United States Patent Application Publication US 2005/0244851 A1 - sequence listing, part 144

SEQ ID NO: 5622622 - DNA, 25 bp, Homo sapien
tttggacaacattctttggtgctga

SEQ ID NO: 5622623 - DNA, 25 bp, Homo sapien
aaagtctgaactagttttgattacc

SEQ ID NO: 5622624 - DNA, 25 bp, Homo sapien
accttctaaacaatcagagagccta

SEQ ID NO: 5622625 - DNA, 25 bp, Homo sapien
ggatgaaaatactgcgggcacaaca

SEQ ID NO: 5622626 - DNA, 25 bp, Homo sapien
aaaatcttatgtaactggccgggcg

SEQ ID NO: 5622627 - DNA, 25 bp, Homo sapien
tttatcatgtcaccaagcaactatt

SEQ ID NO: 5622628 - DNA, 25 bp, Homo sapien
agaggttgcactcaagcatgggtga

SEQ ID NO: 5622629 - DNA, 25 bp, Homo sapien
acctaaagtgattaccagtggatga

SEQ ID NO: 5622630 - DNA, 25 bp, Homo sapien
gaatcgcctgaacacagtgggcaga

SEQ ID NO: 5622631 - DNA, 25 bp, Homo sapien
tgcgggcacaacatgaaaccttcta

SEQ ID NO: 5622632 - DNA, 25 bp, Homo sapien
acaatcagagagcctattacaatac

SEQ ID NO: 5622633 - DNA, 25 bp, Homo sapien
acagagcgaggcttgaatatagtct

SEQ ID NO: 5622634 - DNA, 25 bp, Homo sapien
cctgaatgcagtttgtattagttcc

SEQ ID NO: 5622635 - DNA, 25 bp, Homo sapien
agtggagcaacatcatcccagtcac

SEQ ID NO: 5622636 - DNA, 25 bp, Homo sapien
tgcaacagaatgagcatgggctttg

SEQ ID NO: 5622637 - DNA, 25 bp, Homo sapien
agctgctgggtatctccaacaaaat

SEQ ID NO: 5622638 - DNA, 25 bp, Homo sapien
cttggttacctgttagtggagcaac

SEQ ID NO: 5622639 - DNA, 25 bp, Homo sapien
gcatgggctttggaactaaacaact

SEQ ID NO: 5622640 - DNA, 25 bp, Homo sapien
gattgctaagtcctctgatgctacc

SEQ ID NO: 5622641 - DNA, 25 bp, Homo sapien
ttcaagccaaaaatcagctctgccc

SEQ ID NO: 5622642 - DNA, 25 bp, Homo sapien
tcagatccatcttggtgcacattcc

SEQ ID NO: 5622643 - DNA, 25 bp, Homo sapien
aacacttggcaactgattcttcccc

SEQ ID NO: 5622644 - DNA, 25 bp, Homo sapien
cacttcctggtgcaacagaatgagc

SEQ ID NO: 5622645 - DNA, 25 bp, Homo sapien
gctgagacatcgcttcatgaccttc

SEQ ID NO: 5622646 - DNA, 25 bp, Homo sapien
ctctacgcaccatggtttgaggatt

SEQ ID NO: 5622647 - DNA, 25 bp, Homo sapien
aaatcagggcattaagtgaacgcta

SEQ ID NO: 5622648 - DNA, 25 bp, Homo sapien
taggtgtatgcattcgaagtagcac

SEQ ID NO: 5622649 - DNA, 25 bp, Homo sapien
gaaaccctcgtcccctccagcgtca

SEQ ID NO: 5622650 - DNA, 25 bp, Homo sapien
attagatacgggacaaaaaaatcag

SEQ ID NO: 5622651 - DNA, 25 bp, Homo sapien
cttcaggatgctgagacatcgcttc

SEQ ID NO: 5622652 - DNA, 25 bp, Homo sapien
cattaagtgaacgctatcctggcct

SEQ ID NO: 5622653 - DNA, 25 bp, Homo sapien
cttgtgtccatgagtcccagataat

SEQ ID NO: 5622654 - DNA, 25 bp, Homo sapien
tcgaagtagcacatttgaggattat

SEQ ID NO: 5622655 - DNA, 25 bp, Homo sapien
ccctccagcgtcactaggtgtatgc

SEQ ID NO: 5622656 - DNA, 25 bp, Homo sapien
tgaatctgagcaaatgggtaggata

SEQ ID NO: 5622657 - DNA, 25 bp, Homo sapien
gggtaggataccatagaaattgttc

SEQ ID NO: 5622658 - DNA, 25 bp, Homo sapien
atgtcacagactggcacaagactac

SEQ ID NO: 5622659 - DNA, 25 bp, Homo sapien
tgcttgttatcgattaaggcctggt

SEQ ID NO: 5622660 - DNA, 25 bp, Homo sapien
cgggaatgacaaaccttttgtttgc

SEQ ID NO: 5622661 - DNA, 25 bp, Homo sapien
ctctctggtactccccaacaccccc

SEQ ID NO: 5622662 - DNA, 25 bp, Homo sapien
attaaggcctggtttgaatctgagc

SEQ ID NO: 5622663 - DNA, 25 bp, Homo sapien
ctggcacaagactacacctgcatcc

SEQ ID NO: 5622664 - DNA, 25 bp, Homo sapien
agaaattgttcaggtgttatgtcac

SEQ ID NO: 5622665 - DNA, 25 bp, Homo sapien
ccaaaagcagcaacatattatatga

SEQ ID NO: 5622666 - DNA, 25 bp, Homo sapien
gccagtgtacactgcagatgcatgc

SEQ ID NO: 5622667 - DNA, 25 bp, Homo sapien
tagaatcccatgcaggagtgactct

SEQ ID NO: 5622668 - DNA, 25 bp, Homo sapien
cccaattccacgcctcgctgcagtc

SEQ ID NO: 5622669 - DNA, 25 bp, Homo sapien
gtcccatcacactcacagctgcagc

SEQ ID NO: 5622670 - DNA, 25 bp, Homo sapien
caggagtgactctgctgtcccatca

SEQ ID NO: 5622671 - DNA, 25 bp, Homo sapien
cgcctcgctgcagtctcttcacctt

SEQ ID NO: 5622672 - DNA, 25 bp, Homo sapien
ccctagaatcccatgcaggagtgac

SEQ ID NO: 5622673 - DNA, 25 bp, Homo sapien
tgcagcaaggatgcctttccagcag

SEQ ID NO: 5622674 - DNA, 25 bp, Homo sapien
gaagagcttcccaattccacgcctc

SEQ ID NO: 5622675 - DNA, 25 bp, Homo sapien
ttcaccttgctccagaggaaagacc

SEQ ID NO: 5622676 - DNA, 25 bp, Homo sapien
cccagccctagaatcccatgcagga

SEQ ID NO: 5622677 - DNA, 25 bp, Homo sapien
ttccacgcctcgctgcagtctcttc

SEQ ID NO: 5622678 - DNA, 25 bp, Homo sapien
aggaatgaagtacatgctcaccatc

SEQ ID NO: 5622679 - DNA, 25 bp, Homo sapien
ccagtacattcagagttggacaacc

SEQ ID NO: 5622680 - DNA, 25 bp, Homo sapien
gaaggttgtaatagtaaagtcactc

SEQ ID NO: 5622681 - DNA, 25 bp, Homo sapien
ggagtcaggaatgaagtacatgctc

SEQ ID NO: 5622682 - DNA, 25 bp, Homo sapien
tattgtaccctttggagtcaggaat

SEQ ID NO: 5622683 - DNA, 25 bp, Homo sapien
ttagtacaaggctgagactactgtt

SEQ ID NO: 5622684 - DNA, 25 bp, Homo sapien
ctgtttgtccttatgttgctgggtc

SEQ ID NO: 5622685 - DNA, 25 bp, Homo sapien
catataccatttagcacacccattt

SEQ ID NO: 5622686 - DNA, 25 bp, Homo sapien
caaggctgagactactgtttgtcct

SEQ ID NO: 5622687 - DNA, 25 bp, Homo sapien
aaaatgtatacttcaatggtttcca

SEQ ID NO: 5622688 - DNA, 25 bp, Homo sapien
actgatggaaataatcaatagcttt

SEQ ID NO: 5622689 - DNA, 25 bp, Homo sapien
tggcattctctgctgtggacgtgca

SEQ ID NO: 5622690 - DNA, 25 bp, Homo sapien
tgtggacgtgcatatgtattgaatc

SEQ ID NO: 5622691 - DNA, 25 bp, Homo sapien
tcgcagctcaatgtctgcctgcaac

SEQ ID NO: 5622692 - DNA, 25 bp, Homo sapien
taattcttacacaggccgcatggca

SEQ ID NO: 5622693 - DNA, 25 bp, Homo sapien
tgtctgcctgcaaccccgctatttc

SEQ ID NO: 5622694 - DNA, 25 bp, Homo sapien
ccgctatttccttgggctcagttcc

SEQ ID NO: 5622695 - DNA, 25 bp, Homo sapien
ggtctgcctattttcgaggctctgc

SEQ ID NO: 5622696 - DNA, 25 bp, Homo sapien
tcatcagtgcatataaatctgcctt

SEQ ID NO: 5622697 - DNA, 25 bp, Homo sapien
gtcgctggctcaaacggtctgccta

SEQ ID NO: 5622698 - DNA, 25 bp, Homo sapien
ggttattcccattgtctcgcagctc

SEQ ID NO: 5622699 - DNA, 25 bp, Homo sapien
acacaggccgcatggcattctctgc

SEQ ID NO: 5622700 - DNA, 25 bp, Homo sapien
ctgtatccccgcccccaaggttaca

SEQ ID NO: 5622701 - DNA, 25 bp, Homo sapien
agatgcgtgggagacttttgttccc

SEQ ID NO: 5622702 - DNA, 25 bp, Homo sapien
gtagacaccacaaaatgttgctgtt

SEQ ID NO: 5622703 - DNA, 25 bp, Homo sapien
ttttgttcccatggtgacgctgcag

SEQ ID NO: 5622704 - DNA, 25 bp, Homo sapien
caaggttacacttttaggaggcact

SEQ ID NO: 5622705 - DNA, 25 bp, Homo sapien
atgacttcatcccctttcgccccag

SEQ ID NO: 5622706 - DNA, 25 bp, Homo sapien
cataatcccatgtaaccggtattcc

SEQ ID NO: 5622707 - DNA, 25 bp, Homo sapien
atgtaaccggtattccaaggtaaga

SEQ ID NO: 5622708 - DNA, 25 bp, Homo sapien
taaagattcctcgggcctgagatgc

SEQ ID NO: 5622709 - DNA, 25 bp, Homo sapien
agttggtacaagtagaatgacttca

SEQ ID NO: 5622710 - DNA, 25 bp, Homo sapien
ccccacgcctgtagacaccacaaaa

SEQ ID NO: 5622711 - DNA, 25 bp, Homo sapien
tgtgtaagtggagcttcaaagacat

SEQ ID NO: 5622712 - DNA, 25 bp, Homo sapien
tgacaggactttagggttaactaga

SEQ ID NO: 5622713 - DNA, 25 bp, Homo sapien
ctaccaaagaacaggatatctagca

SEQ ID NO: 5622714 - DNA, 25 bp, Homo sapien
actgcataactaatccaagtgtatc

SEQ ID NO: 5622715 - DNA, 25 bp, Homo sapien
aacaggatatctagcaagcaacagc

SEQ ID NO: 5622716 - DNA, 25 bp, Homo sapien
agtgtatcctggaacatttcttcac

SEQ ID NO: 5622717 - DNA, 25 bp, Homo sapien
agggctagacattgataagaaatac

SEQ ID NO: 5622718 - DNA, 25 bp, Homo sapien
ttaggcacttcttgagtacagacta

SEQ ID NO: 5622719 - DNA, 25 bp, Homo sapien
tacagactatgggaattttctacca

SEQ ID NO: 5622720 - DNA, 25 bp, Homo sapien
ttgagggagcatgatatacaagttt

SEQ ID NO: 5622721 - DNA, 25 bp, Homo sapien
ctagcaagcaacagcataaagattt

SEQ ID NO: 5622722 - DNA, 25 bp, Homo sapien
caaggaattaggaatctgggtttta

SEQ ID NO: 5622723 - DNA, 25 bp, Homo sapien
gcctttaaggagtcactacctgtgc

SEQ ID NO: 5622724 - DNA, 25 bp, Homo sapien
cacgcacttgtgggactcattgaga

SEQ ID NO: 5622725 - DNA, 25 bp, Homo sapien
gagaggattacacatctgttgagca

SEQ ID NO: 5622726 - DNA, 25 bp, Homo sapien
actacctgtgcatgggcaatccttc

SEQ ID NO: 5622727 - DNA, 25 bp, Homo sapien
ttctcctgagtgataggatgggaag

SEQ ID NO: 5622728 - DNA, 25 bp, Homo sapien
gaaggaagagatttaagaactggaa

SEQ ID NO: 5622729 - DNA, 25 bp, Homo sapien
tacagaatttggtcataagtgcttt

SEQ ID NO: 5622730 - DNA, 25 bp, Homo sapien
gttgagcacaaactccagggcttga

SEQ ID NO: 5622731 - DNA, 25 bp, Homo sapien
ttctttaagtctggaaaggatggtg

SEQ ID NO: 5622732 - DNA, 25 bp, Homo sapien
gtagatggagtatcaggttctcagc

SEQ ID NO: 5622733 - DNA, 25 bp, Homo sapien
atctgctccctgccaccctacctcc

SEQ ID NO: 5622734 - DNA, 25 bp, Homo sapien
catgcgatgcaatctgctccctgcc

SEQ ID NO: 5622735 - DNA, 25 bp, Homo sapien
ggctggcctcatgcgatgcaatctg

SEQ ID NO: 5622736 - DNA, 25 bp, Homo sapien
tgccaccctacctccaaaagtgcta

SEQ ID NO: 5622737 - DNA, 25 bp, Homo sapien
attaaatggtgaaataacataagta

SEQ ID NO: 5622738 - DNA, 25 bp, Homo sapien
ggcctcatgcgatgcaatctgctcc

SEQ ID NO: 5622739 - DNA, 25 bp, Homo sapien
gacatgatcatggtcacggctcgct

SEQ ID NO: 5622740 - DNA, 25 bp, Homo sapien
gtcacggctcgctgcatcctcgact

SEQ ID NO: 5622741 - DNA, 25 bp, Homo sapien
acggctcgctgcatcctcgacttcc

SEQ ID NO: 5622742 - DNA, 25 bp, Homo sapien
gtgacatgatcatggtcacggctcg

SEQ ID NO: 5622743 - DNA, 25 bp, Homo sapien
taacataagtaatctcataaaatgc

SEQ ID NO: 5622744 - DNA, 25 bp, Homo sapien
agagtcttatttcagaggtgggtac

SEQ ID NO: 5622745 - DNA, 25 bp, Homo sapien
agagtctattgtgtgagtgtttttc

SEQ ID NO: 5622746 - DNA, 25 bp, Homo sapien
tcaagtgctcagtagacatagtgga

SEQ ID NO: 5622747 - DNA, 25 bp, Homo sapien
aggtgggtactatgaaatcacagac

SEQ ID NO: 5622748 - DNA, 25 bp, Homo sapien
gagggtcaagaaagatgattcagaa

SEQ ID NO: 5622749 - DNA, 25 bp, Homo sapien
aaaaatggagatattacatgtgtgt

SEQ ID NO: 5622750 - DNA, 25 bp, Homo sapien
gtggatagtgaagacctaaagtacc

SEQ ID NO: 5622751 - DNA, 25 bp, Homo sapien
cagtagacatagtggatagtgaaga

SEQ ID NO: 5622752 - DNA, 25 bp, Homo sapien
tggtgagctgacctcagagtctatt

SEQ ID NO: 5622753 - DNA, 25 bp, Homo sapien
gactgttggcagatgtttgagtaca

SEQ ID NO: 5622754 - DNA, 25 bp, Homo sapien
aggaagcctgtcttgctacagtttg

SEQ ID NO: 5622755 - DNA, 25 bp, Homo sapien
acattggtagttaagcttcagatcc

SEQ ID NO: 5622756 - DNA, 25 bp, Homo sapien
gaccccatgaagcaccagctggggc

SEQ ID NO: 5622757 - DNA, 25 bp, Homo sapien
ctcctgaaagctacagtgatgtcaa

SEQ ID NO: 5622758 - DNA, 25 bp, Homo sapien
ggcataaataagatgacgccacttt

SEQ ID NO: 5622759 - DNA, 25 bp, Homo sapien
aaatgattatcaccagcagacccca

SEQ ID NO: 5622760 - DNA, 25 bp, Homo sapien
taaaaaatgagatcagtggctgtaa

SEQ ID NO: 5622761 - DNA, 25 bp, Homo sapien
ggtcaaatgtcatgggttattttgg

SEQ ID NO: 5622762 - DNA, 25 bp, Homo sapien
attttggtaactcataagggacaca

SEQ ID NO: 5622763 - DNA, 25 bp, Homo sapien
ttcagcctatgaacattggtagtta

SEQ ID NO: 5622764 - DNA, 25 bp, Homo sapien
aaatgagcactgatgtcataatgtt

SEQ ID NO: 5622765 - DNA, 25 bp, Homo sapien
aaatgataaatatttgaggactcaa

SEQ ID NO: 5622766 - DNA, 25 bp, Homo sapien
attctaagactaactgaatgccaca

SEQ ID NO: 5622767 - DNA, 25 bp, Homo sapien
atagaatcacacaggcagaaagaaa

SEQ ID NO: 5622768 - DNA, 25 bp, Homo sapien
caatccacagaagctttggtaaatt

SEQ ID NO: 5622769 - DNA, 25 bp, Homo sapien
ttccccccattaactgcctcaatcc

SEQ ID NO: 5622770 - DNA, 25 bp, Homo sapien
tagcacaaaggaacacttggaactg

SEQ ID NO: 5622771 - DNA, 25 bp, Homo sapien
aagaaagaggcccacattctaagac

SEQ ID NO: 5622772 - DNA, 25 bp, Homo sapien
caaagcaaacagaaggctcatggct

SEQ ID NO: 5622773 - DNA, 25 bp, Homo sapien
tggtaaattttagcacaaaggaaca

SEQ ID NO: 5622774 - DNA, 25 bp, Homo sapien
tctgttgatcagctgctttggaggc

SEQ ID NO: 5622775 - DNA, 25 bp, Homo sapien
gaacctgatggagaaaataaggaaa

SEQ ID NO: 5622776 - DNA, 25 bp, Homo sapien
actcctaggttgatagaatttcccc

SEQ ID NO: 5622777 - DNA, 25 bp, Homo sapien
cagacaccagtggattgtatatatt

SEQ ID NO: 5622778 - DNA, 25 bp, Homo sapien
aatagaattaagctttttatcagcg

SEQ ID NO: 5622779 - DNA, 25 bp, Homo sapien
tgagcggtgcaatttgtcaagtcga

SEQ ID NO: 5622780 - DNA, 25 bp, Homo sapien
attaattacgaaattgtatgcctcc

SEQ ID NO: 5622781 - DNA, 25 bp, Homo sapien
tggttcaaagccaggttttggatta

SEQ ID NO: 5622782 - DNA, 25 bp, Homo sapien
caaagccaggttttggattaaatgt

SEQ ID NO: 5622783 - DNA, 25 bp, Homo sapien
taatgcaataaaatgcgtaattaat

SEQ ID NO: 5622784 - DNA, 25 bp, Homo sapien
tctaaacgcttccattgagcggtgc

SEQ ID NO: 5622785 - DNA, 25 bp, Homo sapien
gtcaagtcgagttgttaatagaatt

SEQ ID NO: 5622786 - DNA, 25 bp, Homo sapien
cttccattgagcggtgcaatttgtc

SEQ ID NO: 5622787 - DNA, 25 bp, Homo sapien
acgaaattgtatgcctccctggttc

SEQ ID NO: 5622788 - DNA, 25 bp, Homo sapien
aaagtcctaacgctctgcagaaatt

SEQ ID NO: 5622789 - DNA, 25 bp, Homo sapien
aatttctgcagagcgttaggacttt

SEQ ID NO: 5622790 - DNA, 25 bp, Homo sapien
aagagtgactttattcgacatggtt

SEQ ID NO: 5622791 - DNA, 25 bp, Homo sapien
ggcccacaagagtacaacagtgctt

SEQ ID NO: 5622792 - DNA, 25 bp, Homo sapien
cagtgcttggcatacagtagaacac

SEQ ID NO: 5622793 - DNA, 25 bp, Homo sapien
tgtagacctcccaagagtgacttta

SEQ ID NO: 5622794 - DNA, 25 bp, Homo sapien
agtctttaagaatgaatagggtttc

SEQ ID NO: 5622795 - DNA, 25 bp, Homo sapien
ctaaggagatagaaaacggacttaa

SEQ ID NO: 5622796 - DNA, 25 bp, Homo sapien
tattatactgctactgggcggtgct

SEQ ID NO: 5622797 - DNA, 25 bp, Homo sapien
agaatccatgaggaggcaaattctg

SEQ ID NO: 5622798 - DNA, 25 bp, Homo sapien
aggtaccaagcactaaggagataga

SEQ ID NO: 5622799 - DNA, 25 bp, Homo sapien
gaatgaatagggtttcaatggtttc

SEQ ID NO: 5622800 - DNA, 25 bp, Homo sapien
acatggttagtgtcctagggaatta

SEQ ID NO: 5622801 - DNA, 25 bp, Homo sapien
aggcattatctgaaggcacgtgtct

SEQ ID NO: 5622802 - DNA, 25 bp, Homo sapien
tgttcgtgctgctgtggactccata

SEQ ID NO: 5622803 - DNA, 25 bp, Homo sapien
gaccccaggagctttgagtgtgtct

SEQ ID NO: 5622804 - DNA, 25 bp, Homo sapien
gtgcctagcaaacaggaaacacata

SEQ ID NO: 5622805 - DNA, 25 bp, Homo sapien
gacgggatttctagagtgcttggag

SEQ ID NO: 5622806 - DNA, 25 bp, Homo sapien
gggcactcactgcttgagacgggat

SEQ ID NO: 5622807 - DNA, 25 bp, Homo sapien
aggggtgtatttccagttcggtgtc

SEQ ID NO: 5622808 - DNA, 25 bp, Homo sapien
agagtgcttggagcatgcacgtttc

SEQ ID NO: 5622809 - DNA, 25 bp, Homo sapien
gggtgtctttccacagcgctgagtc

SEQ ID NO: 5622810 - DNA, 25 bp, Homo sapien
cccaacctcagcaagagtgcctagc

SEQ ID NO: 5622811 - DNA, 25 bp, Homo sapien
gagctgaccctcccctgggtgtgct

SEQ ID NO: 5622812 - DNA, 25 bp, Homo sapien
ttgctggatagcaagataattgccc

SEQ ID NO: 5622813 - DNA, 25 bp, Homo sapien
tctcatgcttaactaggcttgaacc

SEQ ID NO: 5622814 - DNA, 25 bp, Homo sapien
ttgagtaagttgtccacagaaaggc

SEQ ID NO: 5622815 - DNA, 25 bp, Homo sapien
agataattgcccataaacagaaatg

SEQ ID NO: 5622816 - DNA, 25 bp, Homo sapien
tgtccacagaaaggcttccccacat

SEQ ID NO: 5622817 - DNA, 25 bp, Homo sapien
gaaatgaatggcttttgcacaaccc

SEQ ID NO: 5622818 - DNA, 25 bp, Homo sapien
ttgatatccaataagactgtacaga

SEQ ID NO: 5622819 - DNA, 25 bp, Homo sapien
tcaatcataaggtttcatcagtatc

SEQ ID NO: 5622820 - DNA, 25 bp, Homo sapien
tctgatgaacactaagttgatagcc

SEQ ID NO: 5622821 - DNA, 25 bp, Homo sapien
cattagtatggactctctcatgctt

SEQ ID NO: 5622822 - DNA, 25 bp, Homo sapien
ggtttctcaagagtaagagttctta

SEQ ID NO: 5622823 - DNA, 25 bp, Homo sapien
ctcctgccactggtgagaaaaatgg

SEQ ID NO: 5622824 - DNA, 25 bp, Homo sapien
atctaaatcaccacagcctgccgtt

SEQ ID NO: 5622825 - DNA, 25 bp, Homo sapien
gtacagggattttcaggcatggtca

SEQ ID NO: 5622826 - DNA, 25 bp, Homo sapien
gcctgccgttatataatgctgaata

SEQ ID NO: 5622827 - DNA, 25 bp, Homo sapien
atctgaacataaagggtgagcagtg

SEQ ID NO: 5622828 - DNA, 25 bp, Homo sapien
atggttatctagtgctgaatacatc

SEQ ID NO: 5622829 - DNA, 25 bp, Homo sapien
cactttaaaaagtttggtggagctc

SEQ ID NO: 5622830 - DNA, 25 bp, Homo sapien
actgaagattccatgttgctggtgg

SEQ ID NO: 5622831 - DNA, 25 bp, Homo sapien
tggtggagctcttgtttgccaacag

SEQ ID NO: 5622832 - DNA, 25 bp, Homo sapien
tcaggagctccaccaatctaaatca

SEQ ID NO: 5622833 - DNA, 25 bp, Homo sapien
tctagtgctgaatacatctgaacat

SEQ ID NO: 5622834 - DNA, 25 bp, Homo sapien
ctgatcataagctctacctgggtag

SEQ ID NO: 5622835 - DNA, 25 bp, Homo sapien
agaggcacaggtgttcgtcatctgg

SEQ ID NO: 5622836 - DNA, 25 bp, Homo sapien
gaaagatcccaagccaagtcctgaa

SEQ ID NO: 5622837 - DNA, 25 bp, Homo sapien
atttgcaatcctggagcagaaggta

SEQ ID NO: 5622838 - DNA, 25 bp, Homo sapien
cagaaggtatatgtgctatgatgga

SEQ ID NO: 5622839 - DNA, 25 bp, Homo sapien
ccaggtactgagtctaaaaagaaag

SEQ ID NO: 5622840 - DNA, 25 bp, Homo sapien
gtgttcgtcatctgggcagagtgga

SEQ ID NO: 5622841 - DNA, 25 bp, Homo sapien
ggggagaaatggaaacactatctca

SEQ ID NO: 5622842 - DNA, 25 bp, Homo sapien
tttgccttggggaatttgcaatcct

SEQ ID NO: 5622843 - DNA, 25 bp, Homo sapien
gatggaaatacatagagggtccagt

SEQ ID NO: 5622844 - DNA, 25 bp, Homo sapien
tggaaaatcttccgaggaaagatcc

SEQ ID NO: 5622845 - DNA, 25 bp, Homo sapien
ttaccaggaattacacccaagtatc

SEQ ID NO: 5622846 - DNA, 25 bp, Homo sapien
tcacagccatagcttgaaggagaag

SEQ ID NO: 5622847 - DNA, 25 bp, Homo sapien
tcagaggccttattgcccggaccac

SEQ ID NO: 5622848 - DNA, 25 bp, Homo sapien
cttgatgaaaaccagtaatgggcac

SEQ ID NO: 5622849 - DNA, 25 bp, Homo sapien
taagatagcttattagggaagagat

SEQ ID NO: 5622850 - DNA, 25 bp, Homo sapien
gaaggcaaatatggtcagaggcctt

SEQ ID NO: 5622851 - DNA, 25 bp, Homo sapien
gcacaagtgaatacaggagattatt

SEQ ID NO: 5622852 - DNA, 25 bp, Homo sapien
attagggaagagatatcactatact

SEQ ID NO: 5622853 - DNA, 25 bp, Homo sapien
aaccagtaatgggcacaagtgaata

SEQ ID NO: 5622854 - DNA, 25 bp, Homo sapien
tttgacaaaaatgatagggaaacat

SEQ ID NO: 5622855 - DNA, 25 bp, Homo sapien
agggcagcacactggtgttgccttt

SEQ ID NO: 5622856 - DNA, 25 bp, Homo sapien
ggaatctgattccaggataagagat

SEQ ID NO: 5622857 - DNA, 25 bp, Homo sapien
ggaagaacgtgtccttaaattgctc

SEQ ID NO: 5622858 - DNA, 25 bp, Homo sapien
tccaattgtgctagagctgacaaac

SEQ ID NO: 5622859 - DNA, 25 bp, Homo sapien
ataagagatcttacctaggaccatt

SEQ ID NO: 5622860 - DNA, 25 bp, Homo sapien
gagtgaaatggcttcccacacaagc

SEQ ID NO: 5622861 - DNA, 25 bp, Homo sapien
ccttctcctcagttacagcccatgt

SEQ ID NO: 5622862 - DNA, 25 bp, Homo sapien
tctctctctttggaagaacgtgtcc

SEQ ID NO: 5622863 - DNA, 25 bp, Homo sapien
aattgctcataaagaaaaccacatg

SEQ ID NO: 5622864 - DNA, 25 bp, Homo sapien
ccaaagggtttactgagcaccactc

SEQ ID NO: 5622865 - DNA, 25 bp, Homo sapien
gtgctagagctgacaaactactgat

SEQ ID NO: 5622866 - DNA, 25 bp, Homo sapien
actactgataccaaagggtttactg

SEQ ID NO: 5622867 - DNA, 25 bp, Homo sapien
tgctgccgaaaggtagcagctaagg

SEQ ID NO: 5622868 - DNA, 25 bp, Homo sapien
actgctgccgaaaggtagcagctaa

SEQ ID NO: 5622869 - DNA, 25 bp, Homo sapien
ggcagtggcgacaataagtcaaaag

SEQ ID NO: 5622870 - DNA, 25 bp, Homo sapien
ctcaaccgccaccctgctcccttcc

SEQ ID NO: 5622871 - DNA, 25 bp, Homo sapien
tgaagcgttcctcaaccgccaccct

SEQ ID NO: 5622872 - DNA, 25 bp, Homo sapien
cagtggcgacaataagtcaaaaggg

SEQ ID NO: 5622873 - DNA, 25 bp, Homo sapien
cgttcctcaaccgccaccctgctcc

SEQ ID NO: 5622874 - DNA, 25 bp, Homo sapien
tatttcactgctgccgaaaggtagc

SEQ ID NO: 5622875 - DNA, 25 bp, Homo sapien
ggcgacaataagtcaaaagggagcc

SEQ ID NO: 5622876 - DNA, 25 bp, Homo sapien
gtggcgacaataagtcaaaagggag

SEQ ID NO: 5622877 - DNA, 25 bp, Homo sapien
tcactgctgccgaaaggtagcagct

SEQ ID NO: 5622878 - DNA, 25 bp, Homo sapien
tagaacccggttcactttgtgtcac

SEQ ID NO: 5622879 - DNA, 25 bp, Homo sapien
tgtgtcacttatgttgctgccagca

SEQ ID NO: 5622880 - DNA, 25 bp, Homo sapien
tgctggtctttgctaatctcggcta

SEQ ID NO: 5622881 - DNA, 25 bp, Homo sapien
gttcaagtccctgtaggaccctatc

SEQ ID NO: 5622882 - DNA, 25 bp, Homo sapien
atcacctcgggcctgaaaaactgtt

SEQ ID NO: 5622883 - DNA, 25 bp, Homo sapien
gtctctgctagtccttgctggtctt

SEQ ID NO: 5622884 - DNA, 25 bp, Homo sapien
tgtccctatctgtctctgcctgtcc

SEQ ID NO: 5622885 - DNA, 25 bp, Homo sapien
tacagcagtcataagcagtgtccac

SEQ ID NO: 5622886 - DNA, 25 bp, Homo sapien
ctgccagcagacttgtaacagggtt

SEQ ID NO: 5622887 - DNA, 25 bp, Homo sapien
gttcatctggttggttgtagttctt

SEQ ID NO: 5622888 - DNA, 25 bp, Homo sapien
ccaaatcgttggctcaccactttcc

SEQ ID NO: 5622889 - DNA, 25 bp, Homo sapien
agatgtgactctacagataaaattc

SEQ ID NO: 5622890 - DNA, 25 bp, Homo sapien
tgggaaccaggactctttgtgagtt

SEQ ID NO: 5622891 - DNA, 25 bp, Homo sapien
cgacatcaggttgagcagtcgtctc

SEQ ID NO: 5622892 - DNA, 25 bp, Homo sapien
tggggcctccccttacagacaatca

SEQ ID NO: 5622893 - DNA, 25 bp, Homo sapien
gcacgcatttgcctagatgtgactc

SEQ ID NO: 5622894 - DNA, 25 bp, Homo sapien
aaactgtaacgacatcaggttgagc

SEQ ID NO: 5622895 - DNA, 25 bp, Homo sapien
tcgaaattgaatatgtagattgttg

SEQ ID NO: 5622896 - DNA, 25 bp, Homo sapien
ccgggtggtgaattatgtgtatttt

SEQ ID NO: 5622897 - DNA, 25 bp, Homo sapien
ttgggcgcctttgtcaagcacgcat

SEQ ID NO: 5622898 - DNA, 25 bp, Homo sapien
ttcattactgcgtctcctgggaagg

SEQ ID NO: 5622899 - DNA, 25 bp, Homo sapien
tttgtgagttaagaatttgtgtatt

SEQ ID NO: 5622900 - DNA, 25 bp, Homo sapien
taagtttaaggtggacttcgagctc

SEQ ID NO: 5622901 - DNA, 25 bp, Homo sapien
gcgcctggctctcacgatgatgaag

SEQ ID NO: 5622902 - DNA, 25 bp, Homo sapien
agtgcccttcgtcaatggggtcctc

SEQ ID NO: 5622903 - DNA, 25 bp, Homo sapien
cctagggaccgctctaaaatcagtc

SEQ ID NO: 5622904 - DNA, 25 bp, Homo sapien
tcctccaggtaactcgcctcccgcg

SEQ ID NO: 5622905 - DNA, 25 bp, Homo sapien
ccgcgccgcctcgcccctttctgct

SEQ ID NO: 5622906 - DNA, 25 bp, Homo sapien
ggacttcgagctcgaggagctctcc

SEQ ID NO: 5622907 - DNA, 25 bp, Homo sapien
gcaaatgggttcttctcagctggcc

SEQ ID NO: 5622908 - DNA, 25 bp, Homo sapien
ggcagcttcaccgccgagtcctcca

SEQ ID NO: 5622909 - DNA, 25 bp, Homo sapien
cctctcccgactcccagacgggcgg

SEQ ID NO: 5622910 - DNA, 25 bp, Homo sapien
ggcggttcctcgagcctcgcctctc

SEQ ID NO: 5622911 - DNA, 25 bp, Homo sapien
agcattaggggttagaatcaagatt

SEQ ID NO: 5622912 - DNA, 25 bp, Homo sapien
cagcaggcccagagtctcaaattag

SEQ ID NO: 5622913 - DNA, 25 bp, Homo sapien
agttcccagaagagctgggatggga

SEQ ID NO: 5622914 - DNA, 25 bp, Homo sapien
gggagtcggtcttcacctgtggttc

SEQ ID NO: 5622915 - DNA, 25 bp, Homo sapien
cctgtctaatgagccagggaccttc

SEQ ID NO: 5622916 - DNA, 25 bp, Homo sapien
gagctgcctctggtgcactcacagt

SEQ ID NO: 5622917 - DNA, 25 bp, Homo sapien
ttcaggttccctcccagacagtgcc

SEQ ID NO: 5622918 - DNA, 25 bp, Homo sapien
ggaattcaagcaggagctcgaacaa

SEQ ID NO: 5622919 - DNA, 25 bp, Homo sapien
ggagctcgaacaatccagcccctac

SEQ ID NO: 5622920 - DNA, 25 bp, Homo sapien
gctatgtgagattagacccagcagg

SEQ ID NO: 5622921 - DNA, 25 bp, Homo sapien
agagaggttgagtgactttccatac

SEQ ID NO: 5622922 - DNA, 25 bp, Homo sapien
aataaaatataacaaccagttagat

SEQ ID NO: 5622923 - DNA, 25 bp, Homo sapien
cattatactaggttgagtgggattt

SEQ ID NO: 5622924 - DNA, 25 bp, Homo sapien
tctgcattatactaggttgagtggg

SEQ ID NO: 5622925 - DNA, 25 bp, Homo sapien
tgagagatgtattatgtttcccgta

SEQ ID NO: 5622926 - DNA, 25 bp, Homo sapien
gaagcttcaatattgtaaaagtggc

SEQ ID NO: 5622927 - DNA, 25 bp, Homo sapien
taaattgagagatgtattatgtttc

SEQ ID NO: 5622928 - DNA, 25 bp, Homo sapien
tttcccgtaggaagcttcaatattg

SEQ ID NO: 5622929 - DNA, 25 bp, Homo sapien
atttgagttgctccgtgaactgtcc

SEQ ID NO: 5622930 - DNA, 25 bp, Homo sapien
atacacaaaaatcaatactttccat

SEQ ID NO: 5622931 - DNA, 25 bp, Homo sapien
gtaaaagtggcaattatttgagttg

SEQ ID NO: 5622932 - DNA, 25 bp, Homo sapien
gctccgtgaactgtcctctgcatta

SEQ ID NO: 5622933 - DNA, 25 bp, Homo sapien
gccgccctgtggcaagcatcactga

SEQ ID NO: 5622934 - DNA, 25 bp, Homo sapien
attcagctgaagtgaagttgcggaa

SEQ ID NO: 5622935 - DNA, 25 bp, Homo sapien
ggccagtgcagagactatatggtgg

SEQ ID NO: 5622936 - DNA, 25 bp, Homo sapien
taatgagaagagcagccatatccta

SEQ ID NO: 5622937 - DNA, 25 bp, Homo sapien
ctcccaaaatgagctagaaaaggcc

SEQ ID NO: 5622938 - DNA, 25 bp, Homo sapien
tctgcctgggtcttcagcggccata

SEQ ID NO: 5622939 - DNA, 25 bp, Homo sapien
tcctgagccaaaacaaaccagccac

SEQ ID NO: 5622940 - DNA, 25 bp, Homo sapien
ttgactaccttgaggcagccatgct

SEQ ID NO: 5622941 - DNA, 25 bp, Homo sapien
tttgcggctaagttgtgaagtgatt

SEQ ID NO: 5622942 - DNA, 25 bp, Homo sapien
cagcccacagcaaccatgagactta

SEQ ID NO: 5622943 - DNA, 25 bp, Homo sapien
tttccatcaagagctggggtctatg

SEQ ID NO: 5622944 - DNA, 25 bp, Homo sapien
ccttgaaatgcctgggaattggtag

SEQ ID NO: 5622945 - DNA, 25 bp, Homo sapien
ttaggctgttaagaactggtataat

SEQ ID NO: 5622946 - DNA, 25 bp, Homo sapien
ttccatgcacataatccccctcccc

SEQ ID NO: 5622947 - DNA, 25 bp, Homo sapien
tgggaagtacatgaagctcagaatt

SEQ ID NO: 5622948 - DNA, 25 bp, Homo sapien
gaaaaggatgaaagcgtcctagaca

SEQ ID NO: 5622949 - DNA, 25 bp, Homo sapien
cttcaaaagcggtgctagacaaagc

SEQ ID NO: 5622950 - DNA, 25 bp, Homo sapien
actatgttctggacacgtaacgttc

SEQ ID NO: 5622951 - DNA, 25 bp, Homo sapien
tcaatcggtattagaaacaaacatc

SEQ ID NO: 5622952 - DNA, 25 bp, Homo sapien
cgttctggaaacgaatgagagtgta

SEQ ID NO: 5622953 - DNA, 25 bp, Homo sapien
tttgtacgcagtccttgtgaaaagg

SEQ ID NO: 5622954 - DNA, 25 bp, Homo sapien
agctggccaaaccatgacaactggt

SEQ ID NO: 5622955 - DNA, 25 bp, Homo sapien
tagtgcagcttcataacagactggc

SEQ ID NO: 5622956 - DNA, 25 bp, Homo sapien
tctcttagagtcttagtgtcaccct

SEQ ID NO: 5622957 - DNA, 25 bp, Homo sapien
cagaaggacaggtttctcttaggct

SEQ ID NO: 5622958 - DNA, 25 bp, Homo sapien
agccccagagtatgcccagctaatt

SEQ ID NO: 5622959 - DNA, 25 bp, Homo sapien
tcagatgtgctgcctcagtagtgca

SEQ ID NO: 5622960 - DNA, 25 bp, Homo sapien
ttcaccacattgccaaggctgctct

SEQ ID NO: 5622961 - DNA, 25 bp, Homo sapien
tagtggcaggggttattctttctct

SEQ ID NO: 5622962 - DNA, 25 bp, Homo sapien
tccttatgctgtctggctcccagga

SEQ ID NO: 5622963 - DNA, 25 bp, Homo sapien
cacatatgcaacttggaattagatc

SEQ ID NO: 5622964 - DNA, 25 bp, Homo sapien
atgcctggccagcttgctatacttc

SEQ ID NO: 5622965 - DNA, 25 bp, Homo sapien
tcccgtttctcaggacagaaggaca

SEQ ID NO: 5622966 - DNA, 25 bp, Homo sapien
aatgtcttagactcacaactgttgt

SEQ ID NO: 5622967 - DNA, 25 bp, Homo sapien
acaacagttgtgagtctaagacatt

SEQ ID NO: 5622968 - DNA, 25 bp, Homo sapien
tgccctggtcagtagcatttgcggt

SEQ ID NO: 5622969 - DNA, 25 bp, Homo sapien
ctggtcagtagcatttgcggtacac

SEQ ID NO: 5622970 - DNA, 25 bp, Homo sapien
gggaccctgttcctcgtactgctcc

SEQ ID NO: 5622971 - DNA, 25 bp, Homo sapien
agaagcacgttttgggccaagtccg

SEQ ID NO: 5622972 - DNA, 25 bp, Homo sapien
ctcgtactgctcccgcaggacccag

SEQ ID NO: 5622973 - DNA, 25 bp, Homo sapien
gtcagtagcatttgcggtacacgat

SEQ ID NO: 5622974 - DNA, 25 bp, Homo sapien
agcatttgcggtacacgatataggg

SEQ ID NO: 5622975 - DNA, 25 bp, Homo sapien
cggtacacgatatagggaccctgtt

SEQ ID NO: 5622976 - DNA, 25 bp, Homo sapien
catttgcggtacacgatatagggac

SEQ ID NO: 5622977 - DNA, 25 bp, Homo sapien
ggtacacgatatagggaccctgttc

SEQ ID NO: 5622978 - DNA, 25 bp, Homo sapien
atagggaccctgttcctcgtactgc

SEQ ID NO: 5622979 - DNA, 25 bp, Homo sapien
acactgaaagcttcaggcaccggca

SEQ ID NO: 5622980 - DNA, 25 bp, Homo sapien
tggaagaagtgtcacattagactcc

SEQ ID NO: 5622981 - DNA, 25 bp, Homo sapien
aatgtaggcggttctgtgttttgga

SEQ ID NO: 5622982 - DNA, 25 bp, Homo sapien
ttcctgtgcaccaccagggccttaa

SEQ ID NO: 5622983 - DNA, 25 bp, Homo sapien
caggtgtggtgttgagtcttttata

SEQ ID NO: 5622984 - DNA, 25 bp, Homo sapien
ccactgaccctgcagaaaatgagtc

SEQ ID NO: 5622985 - DNA, 25 bp, Homo sapien
cctggaaaagccagccaagagctta

SEQ ID NO: 5622986 - DNA, 25 bp, Homo sapien
gagggtcataagcaagcaaaactta

SEQ ID NO: 5622987 - DNA, 25 bp, Homo sapien
tatcccgtattaggaacagtgtacc

SEQ ID NO: 5622988 - DNA, 25 bp, Homo sapien
gatgaagccataagtaagcagaacc

SEQ ID NO: 5622989 - DNA, 25 bp, Homo sapien
acagggacagccacctctccagttt

SEQ ID NO: 5622990 - DNA, 25 bp, Homo sapien
ctgtaaaagctcataggaagtaact

SEQ ID NO: 5622991 - DNA, 25 bp, Homo sapien
aaagtactttgcagaaatattgatc

SEQ ID NO: 5622992 - DNA, 25 bp, Homo sapien
caaatagggaagtgttcagtgaata

SEQ ID NO: 5622993 - DNA, 25 bp, Homo sapien
agggaagtgttcagtgaatactcac

SEQ ID NO: 5622994 - DNA, 25 bp, Homo sapien
gagaagcactgacttattacagagc

SEQ ID NO: 5622995 - DNA, 25 bp, Homo sapien
cactgacttattacagagctctgcc

SEQ ID NO: 5622996 - DNA, 25 bp, Homo sapien
tatttattgaagtgtttgtagtaat

SEQ ID NO: 5622997 - DNA, 25 bp, Homo sapien
ttgcagaaatattgatctgtggcaa

SEQ ID NO: 5622998 - DNA, 25 bp, Homo sapien
tgatctgtggcaaattggaaattca

SEQ ID NO: 5622999 - DNA, 25 bp, Homo sapien
ctgtggcaaattggaaattcaagaa

SEQ ID NO: 5623000 - DNA, 25 bp, Homo sapien
tgtcactgtaaaagctcataggaag

SEQ ID NO: 5623001 - DNA, 25 bp, Homo sapien
gcacatacagtaagaccagcaggta

SEQ ID NO: 5623002 - DNA, 25 bp, Homo sapien
ctttagttgcacatacagtaagacc

SEQ ID NO: 5623003 - DNA, 25 bp, Homo sapien
gatatggcacagagtgatgtgtacc

SEQ ID NO: 5623004 - DNA, 25 bp, Homo sapien
agaccagcaggtacacactatacac

SEQ ID NO: 5623005 - DNA, 25 bp, Homo sapien
atggaaataccaacttgggcgacgg

SEQ ID NO: 5623006 - DNA, 25 bp, Homo sapien
gcacagccagccaaaaatttacaac

SEQ ID NO: 5623007 - DNA, 25 bp, Homo sapien
gatgtgtaccaaacatggaaatacc

SEQ ID NO: 5623008 - DNA, 25 bp, Homo sapien
caccccccaaatgcatgtaaagttt

SEQ ID NO: 5623009 - DNA, 25 bp, Homo sapien
ttgggcgacggtttgaatcttgtta

SEQ ID NO: 5623010 - DNA, 25 bp, Homo sapien
ccgtcctatgcaattaagcaacacc

SEQ ID NO: 5623011 - DNA, 25 bp, Homo sapien
acttaacaacgacctgatatggcac

SEQ ID NO: 5623012 - DNA, 25 bp, Homo sapien
tcaagacgctctactgccaggtgca

SEQ ID NO: 5623013 - DNA, 25 bp, Homo sapien
ccagggcttcaaggccatcatcgac

SEQ ID NO: 5623014 - DNA, 25 bp, Homo sapien
aaatgaacaaccgaaaggaagatat

SEQ ID NO: 5623015 - DNA, 25 bp, Homo sapien
atcacgtcccactaccggcacctgc

SEQ ID NO: 5623016 - DNA, 25 bp, Homo sapien
aaggaagatatggaaatcacgtccc

SEQ ID NO: 5623017 - DNA, 25 bp, Homo sapien
gccacgacttcatcaaggcggcgct

SEQ ID NO: 5623018 - DNA, 25 bp, Homo sapien
acatcgtcacggcccagggcttcaa

SEQ ID NO: 5623019 - DNA, 25 bp, Homo sapien
gggtcacagagtctgtagaagaggc

SEQ ID NO: 5623020 - DNA, 25 bp, Homo sapien
acggtcacgcacctggacatcgtca

SEQ ID NO: 5623021 - DNA, 25 bp, Homo sapien
atcgacttcatgtactcagcgcacc

SEQ ID NO: 5623022 - DNA, 25 bp, Homo sapien
ctgcagatgacggacatcgtgcaag

SEQ ID NO: 5623023 - DNA, 25 bp, Homo sapien
ccagaacctgtgactaggaccttac

SEQ ID NO: 5623024 - DNA, 25 bp, Homo sapien
ccctctggatccttgcagccaggtc

SEQ ID NO: 5623025 - DNA, 25 bp, Homo sapien
cctatccctctggatccttgcagcc

SEQ ID NO: 5623026 - DNA, 25 bp, Homo sapien
aaccatgaaggatgtagtcagttgg

SEQ ID NO: 5623027 - DNA, 25 bp, Homo sapien
taatatacaacatgctggcaggggg

SEQ ID NO: 5623028 - DNA, 25 bp, Homo sapien
tccatgtcccagaacctgtgactag

SEQ ID NO: 5623029 - DNA, 25 bp, Homo sapien
acgttctgagcaatacaaatacagc

SEQ ID NO: 5623030 - DNA, 25 bp, Homo sapien
ccatgaaggatgtagtcagttgggt

SEQ ID NO: 5623031 - DNA, 25 bp, Homo sapien
aattaatatacaacatgctggcagg

SEQ ID NO: 5623032 - DNA, 25 bp, Homo sapien
ggtcacagcccctgaaaagatgaca

SEQ ID NO: 5623033 - DNA, 25 bp, Homo sapien
aaggagaacatatacgaataacaaa

SEQ ID NO: 5623034 - DNA, 25 bp, Homo sapien
ttgaattaatcagctagtctcttcc

SEQ ID NO: 5623035 - DNA, 25 bp, Homo sapien
agtggtgcaatcatagctgcactgc

SEQ ID NO: 5623036 - DNA, 25 bp, Homo sapien
tttattggagagtacctaatttgaa

SEQ ID NO: 5623037 - DNA, 25 bp, Homo sapien
ttcaaatgctttattggagagtacc

SEQ ID NO: 5623038 - DNA, 25 bp, Homo sapien
ggtttacagatgtgagccactgcac

SEQ ID NO: 5623039 - DNA, 25 bp, Homo sapien
ggacagtggtgcaatcatagctgca

SEQ ID NO: 5623040 - DNA, 25 bp, Homo sapien
ggggtttacagatgtgagccactgc

SEQ ID NO: 5623041 - DNA, 25 bp, Homo sapien
gttcaatcgatcctcccactcagcc

SEQ ID NO: 5623042 - DNA, 25 bp, Homo sapien
taatttgaattaatcagctagtctc

SEQ ID NO: 5623043 - DNA, 25 bp, Homo sapien
taattcctgtgttcaatcgatcctc

SEQ ID NO: 5623044 - DNA, 25 bp, Homo sapien
ctcttcctagaagtcttaaatacct

SEQ ID NO: 5623045 - DNA, 25 bp, Homo sapien
tttggaacatgtagtatagataaat

SEQ ID NO: 5623046 - DNA, 25 bp, Homo sapien
tgcttcacctcccccgtgcagctgc

SEQ ID NO: 5623047 - DNA, 25 bp, Homo sapien
ttgaggctcagcgagtttctgcttc

SEQ ID NO: 5623048 - DNA, 25 bp, Homo sapien
gtgcagctgcaaagttacaaggttt

SEQ ID NO: 5623049 - DNA, 25 bp, Homo sapien
tctttgtccagggctcagactttcc

SEQ ID NO: 5623050 - DNA, 25 bp, Homo sapien
atggtttcccaaggatttggaacat

SEQ ID NO: 5623051 - DNA, 25 bp, Homo sapien
agtgatcatcaataaagacctttcc

SEQ ID NO: 5623052 - DNA, 25 bp, Homo sapien
aatcctactgagccaagtgatcatc

SEQ ID NO: 5623053 - DNA, 25 bp, Homo sapien
tgtgcttcctgcatcacgtagctcc

SEQ ID NO: 5623054 - DNA, 25 bp, Homo sapien
gactgcttaaaaggtggctgctttc

SEQ ID NO: 5623055 - DNA, 25 bp, Homo sapien
tcacgtagctcccagccactgactg

SEQ ID NO: 5623056 - DNA, 25 bp, Homo sapien
cactggttaaagagtgccacaaggt

SEQ ID NO: 5623057 - DNA, 25 bp, Homo sapien
cctccagacaattgaaaaccttgac

SEQ ID NO: 5623058 - DNA, 25 bp, Homo sapien
tcatccttactgcaccaagcctcga

SEQ ID NO: 5623059 - DNA, 25 bp, Homo sapien
tccaaagagttccagtcggaaccac

SEQ ID NO: 5623060 - DNA, 25 bp, Homo sapien
atacctaagaatggaatggaattgc

SEQ ID NO: 5623061 - DNA, 25 bp, Homo sapien
gggtaggtgtatgtgtttggcttta

SEQ ID NO: 5623062 - DNA, 25 bp, Homo sapien
ccagtcggaaccacatcctccagac

SEQ ID NO: 5623063 - DNA, 25 bp, Homo sapien
cctcctagagggttgtattgccttc

SEQ ID NO: 5623064 - DNA, 25 bp, Homo sapien
gaccaccagtcagacagctgtcagc

SEQ ID NO: 5623065 - DNA, 25 bp, Homo sapien
aatggaattgctggacattgggtag

SEQ ID NO: 5623066 - DNA, 25 bp, Homo sapien
ctccctctgtgctgccactgccctc

SEQ ID NO: 5623067 - DNA, 25 bp, Homo sapien
agtcaaaatgttaccgatataataa

SEQ ID NO: 5623068 - DNA, 25 bp, Homo sapien
ttattatatcggtaacattttgact

SEQ ID NO: 5623069 - DNA, 25 bp, Homo sapien
tggatcaaaaatgttcgaggggaaa

SEQ ID NO: 5623070 - DNA, 25 bp, Homo sapien
tattcacaatagttatgttcacaac

SEQ ID NO: 5623071 - DNA, 25 bp, Homo sapien
ctgtggattcaaccaattgtggatc

SEQ ID NO: 5623072 - DNA, 25 bp, Homo sapien
cacaattgtgaaagctatttacatt

SEQ ID NO: 5623073 - DNA, 25 bp, Homo sapien
ggggaaaaaaagatgactgcatctg

SEQ ID NO: 5623074 - DNA, 25 bp, Homo sapien
aaccaattgtggatcaaaaatgttc

SEQ ID NO: 5623075 - DNA, 25 bp, Homo sapien
gactgcatctgtactgaatatgtat

SEQ ID NO: 5623076 - DNA, 25 bp, Homo sapien
ttgtggatcaaaaatgttcgagggg

SEQ ID NO: 5623077 - DNA, 25 bp, Homo sapien
attccctaatcagcataacaactat

SEQ ID NO: 5623078 - DNA, 25 bp, Homo sapien
ttaccaagactgtgtgttccccatc

SEQ ID NO: 5623079 - DNA, 25 bp, Homo sapien
gtgtgttccccatctgtggattcaa

SEQ ID NO: 5623080 - DNA, 25 bp, Homo sapien
gttagatgatattgacacgttccct

SEQ ID NO: 5623081 - DNA, 25 bp, Homo sapien
ggggaagagtcctgatactacaaca

SEQ ID NO: 5623082 - DNA, 25 bp, Homo sapien
ttaccctcacacggcaaggtcacag

SEQ ID NO: 5623083 - DNA, 25 bp, Homo sapien
gtcatctgaaagtaagaagaaagcc

SEQ ID NO: 5623084 - DNA, 25 bp, Homo sapien
cagctgggcttgaacacagctagag

SEQ ID NO: 5623085 - DNA, 25 bp, Homo sapien
aatcaactgccaggttgtgtggagc

SEQ ID NO: 5623086 - DNA, 25 bp, Homo sapien
acagtggctcgcagttctagcatcc

SEQ ID NO: 5623087 - DNA, 25 bp, Homo sapien
ggttgtgtggagcacttaccctcac

SEQ ID NO: 5623088 - DNA, 25 bp, Homo sapien
cattcaagtagtgtagcctgatgct

SEQ ID NO: 5623089 - DNA, 25 bp, Homo sapien
gctagagctgtcttgggtgtaacaa

SEQ ID NO: 5623090 - DNA, 25 bp, Homo sapien
actgtgctgaagagaactttagctc

SEQ ID NO: 5623091 - DNA, 25 bp, Homo sapien
gttgcagcaggaaacagcttttaac

SEQ ID NO: 5623092 - DNA, 25 bp, Homo sapien
caattaaacaaagatgagaggagaa

SEQ ID NO: 5623093 - DNA, 25 bp, Homo sapien
tataaatctaacatatggtcaaata

SEQ ID NO: 5623094 - DNA, 25 bp, Homo sapien
attcaaaattggatgtaaggggaga

SEQ ID NO: 5623095 - DNA, 25 bp, Homo sapien
tgaaaatcctgataaacatctgtaa

SEQ ID NO: 5623096 - DNA, 25 bp, Homo sapien
gctcactttgcaatctcagaatact

SEQ ID NO: 5623097 - DNA, 25 bp, Homo sapien
gaaaacaagaaggataatacgatta

SEQ ID NO: 5623098 - DNA, 25 bp, Homo sapien
tattattttggtagcagagtattga

SEQ ID NO: 5623099 - DNA, 25 bp, Homo sapien
catctgtaagtagttgcagcaggaa

SEQ ID NO: 5623100 - DNA, 25 bp, Homo sapien
ttggtagcagagtattgaaaatcct

SEQ ID NO: 5623101 - DNA, 25 bp, Homo sapien
taatcaatgaaaacaagaaggataa

SEQ ID NO: 5623102 - DNA, 25 bp, Homo sapien
ggcctaattttgagtgtgcagggga

SEQ ID NO: 5623103 - DNA, 25 bp, Homo sapien
ttaagtgcatagaaagtagaccatt

SEQ ID NO: 5623104 - DNA, 25 bp, Homo sapien
aaagaaaaactggacctcctcaatc

SEQ ID NO: 5623105 - DNA, 25 bp, Homo sapien
attggattgatcctgagtagcaggg

SEQ ID NO: 5623106 - DNA, 25 bp, Homo sapien
ggataggaaaacaaacatgaagcct

SEQ ID NO: 5623107 - DNA, 25 bp, Homo sapien
ctcctcaatccaatgatcaagccct

SEQ ID NO: 5623108 - DNA, 25 bp, Homo sapien
atccaatgatcaagcccttaggcct

SEQ ID NO: 5623109 - DNA, 25 bp, Homo sapien
agaaagtagaccattggattgatcc

SEQ ID NO: 5623110 - DNA, 25 bp, Homo sapien
tatactagaaccactcgaattcttc

SEQ ID NO: 5623111 - DNA, 25 bp, Homo sapien
ccttaggcctaattttgagtgtgca

SEQ ID NO: 5623112 - DNA, 25 bp, Homo sapien
acaaacatgaagcctaggagaaagt

SEQ ID NO: 5623113 - DNA, 25 bp, Homo sapien
catccagtcctgcaccggcgctggt

SEQ ID NO: 5623114 - DNA, 25 bp, Homo sapien
tcatcagtcactccccatcccctcc

SEQ ID NO: 5623115 - DNA, 25 bp, Homo sapien
ccagcccctggcagcacaaatttac

SEQ ID NO: 5623116 - DNA, 25 bp, Homo sapien
ctttgccttagatctgggaaaggtt

SEQ ID NO: 5623117 - DNA, 25 bp, Homo sapien
gtggtgccgtctctgtcactgcagt

SEQ ID NO: 5623118 - DNA, 25 bp, Homo sapien
ctgagatgtgcatgagcatccagtc

SEQ ID NO: 5623119 - DNA, 25 bp, Homo sapien
tttggtggtaacatgtaacatacaa

SEQ ID NO: 5623120 - DNA, 25 bp, Homo sapien
aggagagcccatacccattcatcag

SEQ ID NO: 5623121 - DNA, 25 bp, Homo sapien
ttttgatcactccggaaggagagcc

SEQ ID NO: 5623122 - DNA, 25 bp, Homo sapien
ttagctgcagattggtttttgtggc

SEQ ID NO: 5623123 - DNA, 25 bp, Homo sapien
gtgattttgggtgctgttcctcatt

SEQ ID NO: 5623124 - DNA, 25 bp, Homo sapien
agcaatttgaataggaaacagaaaa

SEQ ID NO: 5623125 - DNA, 25 bp, Homo sapien
acataggagacaaaacagcaatttg

SEQ ID NO: 5623126 - DNA, 25 bp, Homo sapien
gtggtggctagattttagggtctta

SEQ ID NO: 5623127 - DNA, 25 bp, Homo sapien
tccactgattctaatggggggaggg

SEQ ID NO: 5623128 - DNA, 25 bp, Homo sapien
agctgcagacacaaatgacttccac

SEQ ID NO: 5623129 - DNA, 25 bp, Homo sapien
ccctgcagtgagtccacgttctaga

SEQ ID NO: 5623130 - DNA, 25 bp, Homo sapien
taaatggcagcagtccaaaattccc

SEQ ID NO: 5623131 - DNA, 25 bp, Homo sapien
ttagggtcttaacaatgccattggg

SEQ ID NO: 5623132 - DNA, 25 bp, Homo sapien
actcctagagagacatacaaaaaat

SEQ ID NO: 5623133 - DNA, 25 bp, Homo sapien
tgccattgggtccagtccctgcagt

SEQ ID NO: 5623134 - DNA, 25 bp, Homo sapien
tcaatagtggataaacgctcttctt

SEQ ID NO: 5623135 - DNA, 25 bp, Homo sapien
cgtgaattttggagccacaaactat

SEQ ID NO: 5623136 - DNA, 25 bp, Homo sapien
atagtttgtggctccaaaattcacg

SEQ ID NO: 5623137 - DNA, 25 bp, Homo sapien
ttggtgagctatcaaggtgacatca

SEQ ID NO: 5623138 - DNA, 25 bp, Homo sapien
gggggaaaaagccctgattcatagc

SEQ ID NO: 5623139 - DNA, 25 bp, Homo sapien
tcagagtggtggtgtatctacattg

SEQ ID NO: 5623140 - DNA, 25 bp, Homo sapien
tgaatccattgatgtgctaggaaat

SEQ ID NO: 5623141 - DNA, 25 bp, Homo sapien
cattgtcaagtcatggatctgttgc

SEQ ID NO: 5623142 - DNA, 25 bp, Homo sapien
catatgtcttcagagtggtggtgta

SEQ ID NO: 5623143 - DNA, 25 bp, Homo sapien
gatgtgcagaagctgaccctatctc

SEQ ID NO: 5623144 - DNA, 25 bp, Homo sapien
tggatctgttgcatactagcttctc

SEQ ID NO: 5623145 - DNA, 25 bp, Homo sapien
attctcagaataacgatgacatcac

SEQ ID NO: 5623146 - DNA, 25 bp, Homo sapien
tcatacgctctcccagtgccctcct

SEQ ID NO: 5623147 - DNA, 25 bp, Homo sapien
tatgaagcgatgtgtttttagtgtt

SEQ ID NO: 5623148 - DNA, 25 bp, Homo sapien
acatcttggaaattcgtgctaatga

SEQ ID NO: 5623149 - DNA, 25 bp, Homo sapien
tccaatgctcagagactttggtctc

SEQ ID NO: 5623150 - DNA, 25 bp, Homo sapien
agagcaagacaatggcacctcaaga

SEQ ID NO: 5623151 - DNA, 25 bp, Homo sapien
cctacaccatgaaggttcccctttc

SEQ ID NO: 5623152 - DNA, 25 bp, Homo sapien
gcctaggaactgagctaggagagaa

SEQ ID NO: 5623153 - DNA, 25 bp, Homo sapien
gtgaacactcacagggtatcataac

SEQ ID NO: 5623154 - DNA, 25 bp, Homo sapien
ctgggatgttacaaaaggtgatgtt

SEQ ID NO: 5623155 - DNA, 25 bp, Homo sapien
gtgttggtagatatgctttcacatc

SEQ ID NO: 5623156 - DNA, 25 bp, Homo sapien
ctatacataagcctaggaactgagc

SEQ ID NO: 5623157 - DNA, 25 bp, Homo sapien
tggccttttccagagcaagacaatg

SEQ ID NO: 5623158 - DNA, 25 bp, Homo sapien
agaccccctctacctgctgcccagc

SEQ ID NO: 5623159 - DNA, 25 bp, Homo sapien
tttgtttgtgactaaatgtgtccac

SEQ ID NO: 5623160 - DNA, 25 bp, Homo sapien
cacatctgccacattttcaacctgc

SEQ ID NO: 5623161 - DNA, 25 bp, Homo sapien
tttaaatacattgcagactgctact

SEQ ID NO: 5623162 - DNA, 25 bp, Homo sapien
aaaggacagaaaacattccctcttc

SEQ ID NO: 5623163 - DNA, 25 bp, Homo sapien
tgcagcgaggaattaataaacagtt

SEQ ID NO: 5623164 - DNA, 25 bp, Homo sapien
cacttctgtcatgcagcgaggaatt

SEQ ID NO: 5623165 - DNA, 25 bp, Homo sapien
ttgtgccccccaccttctgcccagc

SEQ ID NO: 5623166 - DNA, 25 bp, Homo sapien
aagagtatattaagccacttctgtc

SEQ ID NO: 5623167 - DNA, 25 bp, Homo sapien
tatatagcacaacaataattctttc

SEQ ID NO: 5623168 - DNA, 25 bp, Homo sapien
tagatcttgccaacttgactagtcc

SEQ ID NO: 5623169 - DNA, 25 bp, Homo sapien
ttctgcccagcacacatcaaattcc

SEQ ID NO: 5623170 - DNA, 25 bp, Homo sapien
tctgtgaatgagactacaaagatat

SEQ ID NO: 5623171 - DNA, 25 bp, Homo sapien
catttttacagcctccgggttgcgg

SEQ ID NO: 5623172 - DNA, 25 bp, Homo sapien
tttaagatgtgatagaacaattttc

SEQ ID NO: 5623173 - DNA, 25 bp, Homo sapien
gtgggtcaaatcaatagttaccatt

SEQ ID NO: 5623174 - DNA, 25 bp, Homo sapien
tatcccatttaaagtgggtcaaatc

SEQ ID NO: 5623175 - DNA, 25 bp, Homo sapien
caacatctagattcggggtaaactg

SEQ ID NO: 5623176 - DNA, 25 bp, Homo sapien
gtctatcttaacaacagtcacttct

SEQ ID NO: 5623177 - DNA, 25 bp, Homo sapien
cttgaagtatccaacatctagattc

SEQ ID NO: 5623178 - DNA, 25 bp, Homo sapien
cggggtaaactgaaccttggattca

SEQ ID NO: 5623179 - DNA, 25 bp, Homo sapien
gggggattaggaattctgtgaatga

SEQ ID NO: 5623180 - DNA, 25 bp, Homo sapien
accttggattcaaagactatgctct

SEQ ID NO: 5623181 - DNA, 25 bp, Homo sapien
attggtcagaactcactgcaggtct

SEQ ID NO: 5623182 - DNA, 25 bp, Homo sapien
tttgataatcagcacagctagactc

SEQ ID NO: 5623183 - DNA, 25 bp, Homo sapien
tcagctatgaattgaagtgggatgg

SEQ ID NO: 5623184 - DNA, 25 bp, Homo sapien
tataaagttgaccggcacctgtgtt

SEQ ID NO: 5623185 - DNA, 25 bp, Homo sapien
aaggatacccataacatctggtggc

SEQ ID NO: 5623186 - DNA, 25 bp, Homo sapien
cattgaactgcaccagcaggagagg

SEQ ID NO: 5623187 - DNA, 25 bp, Homo sapien
tcctgcatcaggatgcagcaggaga

SEQ ID NO: 5623188 - DNA, 25 bp, Homo sapien
agctagactctgtagaaagatctct

SEQ ID NO: 5623189 - DNA, 25 bp, Homo sapien
acataaggtttgtgaggttgtgcag

SEQ ID NO: 5623190 - DNA, 25 bp, Homo sapien
gagggctagccctgaatgtgtcaaa

SEQ ID NO: 5623191 - DNA, 25 bp, Homo sapien
gaggttgtgcagtggtcctgcatca

SEQ ID NO: 5623192 - DNA, 25 bp, Homo sapien
ctacccagttggaaaacaatgatct

SEQ ID NO: 5623193 - DNA, 25 bp, Homo sapien
aaaaaaagaatgacttcactggtaa

SEQ ID NO: 5623194 - DNA, 25 bp, Homo sapien
ttctaagcgactagtacagcatatc

SEQ ID NO: 5623195 - DNA, 25 bp, Homo sapien
gttgtgactcactttaggaagcctc

SEQ ID NO: 5623196 - DNA, 25 bp, Homo sapien
tggcccactaagaggtaactaccca

SEQ ID NO: 5623197 - DNA, 25 bp, Homo sapien
cacttctcagggtagaaaacctatc

SEQ ID NO: 5623198 - DNA, 25 bp, Homo sapien
tcaagcaaataaaggacaagtttta

SEQ ID NO: 5623199 - DNA, 25 bp, Homo sapien
aggaagcctcacctgaaggtaaggt

SEQ ID NO: 5623200 - DNA, 25 bp, Homo sapien
ttaagattcttaaggctggcttttc

SEQ ID NO: 5623201 - DNA, 25 bp, Homo sapien
tggaaaacaatgatctagctcactc

SEQ ID NO: 5623202 - DNA, 25 bp, Homo sapien
taaaacggtatcaagtagctgttct

SEQ ID NO: 5623203 - DNA, 25 bp, Homo sapien
cgacatgctctgatgtgaagggtga

SEQ ID NO: 5623204 - DNA, 25 bp, Homo sapien
taagcaacgatgtgtggacaattgt

SEQ ID NO: 5623205 - DNA, 25 bp, Homo sapien
tgttaaatattggggagcaactaaa

SEQ ID NO: 5623206 - DNA, 25 bp, Homo sapien
ccttacaacccagggcatgggagaa

SEQ ID NO: 5623207 - DNA, 25 bp, Homo sapien
gagaacgtgtcccttggtgagactc

SEQ ID NO: 5623208 - DNA, 25 bp, Homo sapien
gtatggaacttatgttagcaacctc

SEQ ID NO: 5623209 - DNA, 25 bp, Homo sapien
ctcccacccaccgacatgctctgat

SEQ ID NO: 5623210 - DNA, 25 bp, Homo sapien
cccactgaacaggcctggttgcatt

SEQ ID NO: 5623211 - DNA, 25 bp, Homo sapien
aactgaggttcagcatccctgtctc

SEQ ID NO: 5623212 - DNA, 25 bp, Homo sapien
tttggcataatagcttaggggaagc

SEQ ID NO: 5623213 - DNA, 25 bp, Homo sapien
tgtctcagtggagccttgacaccac

SEQ ID NO: 5623214 - DNA, 25 bp, Homo sapien
gccagggtcaggtaaattggcctca

SEQ ID NO: 5623215 - DNA, 25 bp, Homo sapien
gggctcccgatatgctgaccacttt

SEQ ID NO: 5623216 - DNA, 25 bp, Homo sapien
aatcttgccactagtggggggaaag

SEQ ID NO: 5623217 - DNA, 25 bp, Homo sapien
gatgggccagtgtgttcttcagatt

SEQ ID NO: 5623218 - DNA, 25 bp, Homo sapien
ttcatcaaatgcaaaactgggcttc

SEQ ID NO: 5623219 - DNA, 25 bp, Homo sapien
tgccagcatggagtaagctggtgct

SEQ ID NO: 5623220 - DNA, 25 bp, Homo sapien
cggcctttgtgacatgtgatgggtc

SEQ ID NO: 5623221 - DNA, 25 bp, Homo sapien
aggagctctctcggacccgttggct

SEQ ID NO: 5623222 - DNA, 25 bp, Homo sapien
cccaaaggatggaaagatgatttct

SEQ ID NO: 5623223 - DNA, 25 bp, Homo sapien
acagggctttgagggtcttcagccc

SEQ ID NO: 5623224 - DNA, 25 bp, Homo sapien
cagggtaaattggctttgagtggat

SEQ ID NO: 5623225 - DNA, 25 bp, Homo sapien
cccacctggtccacccgaccctgtc

SEQ ID NO: 5623226 - DNA, 25 bp, Homo sapien
atgggtaagacacctaagatgatct

SEQ ID NO: 5623227 - DNA, 25 bp, Homo sapien
gggaatcaaaggcagtactgctcta

SEQ ID NO: 5623228 - DNA, 25 bp, Homo sapien
gctgcaggcagctctatcatcgaca

SEQ ID NO: 5623229 - DNA, 25 bp, Homo sapien
tccacccgaccctgtctgaagccag

SEQ ID NO: 5623230 - DNA, 25 bp, Homo sapien
gcaggcagctctatcatcgacaggt

SEQ ID NO: 5623231 - DNA, 25 bp, Homo sapien
cgcaaaccccacctggtccacccga

SEQ ID NO: 5623232 - DNA, 25 bp, Homo sapien
tgctctaagtagcaggactgcaccc

SEQ ID NO: 5623233 - DNA, 25 bp, Homo sapien
tctaagtagcaggactgcaccccag

SEQ ID NO: 5623234 - DNA, 25 bp, Homo sapien
ggtccacccgaccctgtctgaagcc

SEQ ID NO: 5623235 - DNA, 25 bp, Homo sapien
gtactgctctaagtagcaggactgc

SEQ ID NO: 5623236 - DNA, 25 bp, Homo sapien
gagataacagataacacagaagcca

SEQ ID NO: 5623237 - DNA, 25 bp, Homo sapien
cacagaagccatgtgctggcacttc

SEQ ID NO: 5623238 - DNA, 25 bp, Homo sapien
tcttacccagatgaggcttatggtc

SEQ ID NO: 5623239 - DNA, 25 bp, Homo sapien
tgtctagtctagtaggaccatttcc

SEQ ID NO: 5623240 - DNA, 25 bp, Homo sapien
tgttttggatgaggctttatgcttc

SEQ ID NO: 5623241 - DNA, 25 bp, Homo sapien
gcacttctattcaggttggcatggc

SEQ ID NO: 5623242 - DNA, 25 bp, Homo sapien
agatatgaagaaatgctgctatgct

SEQ ID NO: 5623243 - DNA, 25 bp, Homo sapien
ctcatatatgaaaagggccattcca

SEQ ID NO: 5623244 - DNA, 25 bp, Homo sapien
tgaaaagggccattccacagtgttc

SEQ ID NO: 5623245 - DNA, 25 bp, Homo sapien
cctggggtatgatggctaaattgag

SEQ ID NO: 5623246 - DNA, 25 bp, Homo sapien
ccatactaggaaggcagatatgaag

SEQ ID NO: 5623247 - DNA, 25 bp, Homo sapien
agtccagtcggtctgcattcaaagc

SEQ ID NO: 5623248 - DNA, 25 bp, Homo sapien
catctaacaggggatgaccacatga

SEQ ID NO: 5623249 - DNA, 25 bp, Homo sapien
tcatacacagacttccagcccagga

SEQ ID NO: 5623250 - DNA, 25 bp, Homo sapien
atttagtgaagttctgtcgtggaat

SEQ ID NO: 5623251 - DNA, 25 bp, Homo sapien
acacatttagtgaagttctgtcgtg

SEQ ID NO: 5623252 - DNA, 25 bp, Homo sapien
gccagaattaaagtccagtcggtct

SEQ ID NO: 5623253 - DNA, 25 bp, Homo sapien
gctgtgtgtcccatggccttacagg

SEQ ID NO: 5623254 - DNA, 25 bp, Homo sapien
ttaagtaacatgtacaagatcacac

SEQ ID NO: 5623255 - DNA, 25 bp, Homo sapien
agtgaagttctgtcgtggaatgttc

SEQ ID NO: 5623256 - DNA, 25 bp, Homo sapien
atcacaactagtaaagccagaatta

SEQ ID NO: 5623257 - DNA, 25 bp, Homo sapien
ctgtcgtggaatgttcacacagaag

SEQ ID NO: 5623258 - DNA, 25 bp, Homo sapien
cactttctagagcttgtatagtctt

SEQ ID NO: 5623259 - DNA, 25 bp, Homo sapien
tccttgaagagttgatgagattgtg

SEQ ID NO: 5623260 - DNA, 25 bp, Homo sapien
agagttgatgagattgtgtgttgca

SEQ ID NO: 5623261 - DNA, 25 bp, Homo sapien
ttataaatgagaagaaccaaggaaa

SEQ ID NO: 5623262 - DNA, 25 bp, Homo sapien
aaggaggctacctgagaacttcact

SEQ ID NO: 5623263 - DNA, 25 bp, Homo sapien
agaaacagagccaactgattaggtc

SEQ ID NO: 5623264 - DNA, 25 bp, Homo sapien
gaattgcagacagcgggttcaattt

SEQ ID NO: 5623265 - DNA, 25 bp, Homo sapien
atgagaagaaccaaggaaaactcca

SEQ ID NO: 5623266 - DNA, 25 bp, Homo sapien
tgcagacagcgggttcaatttattt

SEQ ID NO: 5623267 - DNA, 25 bp, Homo sapien
ggtttatggtacaggttatttcatc

SEQ ID NO: 5623268 - DNA, 25 bp, Homo sapien
gaaaactccaatgagaaacagagcc

SEQ ID NO: 5623269 - DNA, 25 bp, Homo sapien
gagaaatttaagtgttcaaaacata

SEQ ID NO: 5623270 - DNA, 25 bp, Homo sapien
tgaggaagtatcagtgtattctccc

SEQ ID NO: 5623271 - DNA, 25 bp, Homo sapien
cccttatgcatacagaattcacact

SEQ ID NO: 5623272 - DNA, 25 bp, Homo sapien
tcaaatgaggaagtatcagtgtatt

SEQ ID NO: 5623273 - DNA, 25 bp, Homo sapien
aattttcaaatgaggaagtatcagt

SEQ ID NO: 5623274 - DNA, 25 bp, Homo sapien
ataaccaagaacacttatcaggtat

SEQ ID NO: 5623275 - DNA, 25 bp, Homo sapien
gggtggcccctacataaatatagac

SEQ ID NO: 5623276 - DNA, 25 bp, Homo sapien
ttcaaaacataaccaagaacactta

SEQ ID NO: 5623277 - DNA, 25 bp, Homo sapien
tatcaggtattgaaaagctagaggc

SEQ ID NO: 5623278 - DNA, 25 bp, Homo sapien
aaaagctagaggccagccacttctg

SEQ ID NO: 5623279 - DNA, 25 bp, Homo sapien
agccacttctggttcttagttcccc

SEQ ID NO: 5623280 - DNA, 25 bp, Homo sapien
agggtaaagctagaacccagttctc

SEQ ID NO: 5623281 - DNA, 25 bp, Homo sapien
ttatcttcaccaagggacagttgcc

SEQ ID NO: 5623282 - DNA, 25 bp, Homo sapien
ggacagttgcccttacatcaatctc

SEQ ID NO: 5623283 - DNA, 25 bp, Homo sapien
ccagatatttaccgtcggaagggta

SEQ ID NO: 5623284 - DNA, 25 bp, Homo sapien
ttccgtggataacctgtaatgggtc

SEQ ID NO: 5623285 - DNA, 25 bp, Homo sapien
tggagtatatggggttgaaccttac

SEQ ID NO: 5623286 - DNA, 25 bp, Homo sapien
ttatggtaacaaacaagaacctgaa

SEQ ID NO: 5623287 - DNA, 25 bp, Homo sapien
atatttactgacagaggggtaggtt

SEQ ID NO: 5623288 - DNA, 25 bp, Homo sapien
tctcctggcctctcattatggtaac

SEQ ID NO: 5623289 - DNA, 25 bp, Homo sapien
ctgaaaaatgacatacccttgatcc

SEQ ID NO: 5623290 - DNA, 25 bp, Homo sapien
ctgtaatgggtcaatggagtatatg

SEQ ID NO: 5623291 - DNA, 25 bp, Homo sapien
ttcaaacagtgattaaccattattc

SEQ ID NO: 5623292 - DNA, 25 bp, Homo sapien
aatgagcctgccatgtcatgtcata

SEQ ID NO: 5623293 - DNA, 25 bp, Homo sapien
atcctaaggttcttctctcagtgcc

SEQ ID NO: 5623294 - DNA, 25 bp, Homo sapien
aagtcacatgacattagccgatgat

SEQ ID NO: 5623295 - DNA, 25 bp, Homo sapien
cctgacttcaaaaatcctaaggttc

SEQ ID NO: 5623296 - DNA, 25 bp, Homo sapien
accagctagtaaatagtctctgatt

SEQ ID NO: 5623297 - DNA, 25 bp, Homo sapien
ttaaaggacagcacctgacttcaaa

SEQ ID NO: 5623298 - DNA, 25 bp, Homo sapien
cctgatttatgaggaccagctagta

SEQ ID NO: 5623299 - DNA, 25 bp, Homo sapien
attcatgaagcaaaatgagcctgcc

SEQ ID NO: 5623300 - DNA, 25 bp, Homo sapien
ttagccgatgataaatatttctcct

SEQ ID NO: 5623301 - DNA, 25 bp, Homo sapien
tccccagccctgatttatgaggacc

SEQ ID NO: 5623302 - DNA, 25 bp, Homo sapien
gcaaaaagtcagtcaatctcttcca

SEQ ID NO: 5623303 - DNA, 25 bp, Homo sapien
caggcacaatcagaatcagaatgga

SEQ ID NO: 5623304 - DNA, 25 bp, Homo sapien
caggactgaggacccacaaattcct

SEQ ID NO: 5623305 - DNA, 25 bp, Homo sapien
tattttctgctatatggggacattt

SEQ ID NO: 5623306 - DNA, 25 bp, Homo sapien
aaccaaggttaggccataaatggtc

SEQ ID NO: 5623307 - DNA, 25 bp, Homo sapien
atctcttccaaatggtgacaggtcc

SEQ ID NO: 5623308 - DNA, 25 bp, Homo sapien
gcagaagaccagagttttgaacagc

SEQ ID NO: 5623309 - DNA, 25 bp, Homo sapien
cgtgatctcagtcaccgcaccctcc

SEQ ID NO: 5623310 - DNA, 25 bp, Homo sapien
tgctccaagcaatgaaaaagacacc

SEQ ID NO: 5623311 - DNA, 25 bp, Homo sapien
cagcactcaactgaaacaggactga

SEQ ID NO: 5623312 - DNA, 25 bp, Homo sapien
aatggtgacaggtccttgaagtcta

SEQ ID NO: 5623313 - DNA, 25 bp, Homo sapien
aacaaacagcgctggaaaaactgag

SEQ ID NO: 5623314 - DNA, 25 bp, Homo sapien
atgaccacctgctgcccattccaca

SEQ ID NO: 5623315 - DNA, 25 bp, Homo sapien
tctgaggtcttacagtaattgattc

SEQ ID NO: 5623316 - DNA, 25 bp, Homo sapien
gaaaaactgagggaaaacaatcatc

SEQ ID NO: 5623317 - DNA, 25 bp, Homo sapien
gtggaatatactttgctttggttga

SEQ ID NO: 5623318 - DNA, 25 bp, Homo sapien
atgaccactggttagtgatgtattt

SEQ ID NO: 5623319 - DNA, 25 bp, Homo sapien
agcaataatgagaattaggttaggc

SEQ ID NO: 5623320 - DNA, 25 bp, Homo sapien
ctggagcttgaactttctaatggcc

SEQ ID NO: 5623321 - DNA, 25 bp, Homo sapien
gctttggttgagtaatgctctaatt

SEQ ID NO: 5623322 - DNA, 25 bp, Homo sapien
ctgagggaaaacaatcatctgacat

SEQ ID NO: 5623323 - DNA, 25 bp, Homo sapien
catagtaataagggtaacaaacagc

SEQ ID NO: 5623324 - DNA, 25 bp, Homo sapien
ctgacccggcgaggtctgctggtga

SEQ ID NO: 5623325 - DNA, 25 bp, Homo sapien
tcaccagcagacctcgccgggtcag

SEQ ID NO: 5623326 - DNA, 25 bp, Homo sapien
ttgacctcaggtcccaggactaagc

SEQ ID NO: 5623327 - DNA, 25 bp, Homo sapien
agttgctggagtttcatcaggtgtc

SEQ ID NO: 5623328 - DNA, 25 bp, Homo sapien
gcgtaaccatcgaaggaaaaataga

SEQ ID NO: 5623329 - DNA, 25 bp, Homo sapien
aaagtccattagtcacagaagtaac

SEQ ID NO: 5623330 - DNA, 25 bp, Homo sapien
gcaggccagatgtagaagttgctgg

SEQ ID NO: 5623331 - DNA, 25 bp, Homo sapien
ccacatccatgctgaggaaagtgtt

SEQ ID NO: 5623332 - DNA, 25 bp, Homo sapien
cttcacaacagcagtgtgggtttcc

SEQ ID NO: 5623333 - DNA, 25 bp, Homo sapien
aaggagtgttgctgacagcatccaa

SEQ ID NO: 5623334 - DNA, 25 bp, Homo sapien
attatgtgggtaaaaactcaaggag

SEQ ID NO: 5623335 - DNA, 25 bp, Homo sapien
ccagggaatgcatctcacatggctc

SEQ ID NO: 5623336 - DNA, 25 bp, Homo sapien
ccttttactgagttggtagggtgag

SEQ ID NO: 5623337 - DNA, 25 bp, Homo sapien
tagcttcaagacttatactgccact

SEQ ID NO: 5623338 - DNA, 25 bp, Homo sapien
tgattcacacatggaaaccagggcc

SEQ ID NO: 5623339 - DNA, 25 bp, Homo sapien
cagggccttaggttagaatcctagc

SEQ ID NO: 5623340 - DNA, 25 bp, Homo sapien
ctgcacaactacaaatcccatgaac

SEQ ID NO: 5623341 - DNA, 25 bp, Homo sapien
catggaaaccagggccttaggttag

SEQ ID NO: 5623342 - DNA, 25 bp, Homo sapien
aacagcacttaaaactacaagtttc

SEQ ID NO: 5623343 - DNA, 25 bp, Homo sapien
ctgccactaactgttaatgggcttg

SEQ ID NO: 5623344 - DNA, 25 bp, Homo sapien
ttacacagaaaagcactcctacgtt

SEQ ID NO: 5623345 - DNA, 25 bp, Homo sapien
agggagttacacagaaaagcactcc

SEQ ID NO: 5623346 - DNA, 25 bp, Homo sapien
aagtttctgttgtgatgtatactgc

SEQ ID NO: 5623347 - DNA, 25 bp, Homo sapien
taaagaatggcataaaacactgatt

SEQ ID NO: 5623348 - DNA, 25 bp, Homo sapien
catgagttcctgtgaggagagttgg

SEQ ID NO: 5623349 - DNA, 25 bp, Homo sapien
tcaaagacggttgtgatgcagtttt

SEQ ID NO: 5623350 - DNA, 25 bp, Homo sapien
tcttagtgaaactggcaattgaact

SEQ ID NO: 5623351 - DNA, 25 bp, Homo sapien
ttttgatatgaggataacaggaagc

SEQ ID NO: 5623352 - DNA, 25 bp, Homo sapien
ttgatgggcaaaatttctcctagac

SEQ ID NO: 5623353 - DNA, 25 bp, Homo sapien
ctcctcagcggtgactttccaggtg

SEQ ID NO: 5623354 - DNA, 25 bp, Homo sapien
gtgaattgatttggttggaatgctc

SEQ ID NO: 5623355 - DNA, 25 bp, Homo sapien
aaaagaccatagtaatcagatctac

SEQ ID NO: 5623356 - DNA, 25 bp, Homo sapien
ccagaagttgtgcatgagttcctgt

SEQ ID NO: 5623357 - DNA, 25 bp, Homo sapien
agcgtcaggacaatcatgcccataa

SEQ ID NO: 5623358 - DNA, 25 bp, Homo sapien
tacagccactagattcccagaagtt

SEQ ID NO: 5623359 - DNA, 25 bp, Homo sapien
acccagctcctaatgcagcaggcgc

SEQ ID NO: 5623360 - DNA, 25 bp, Homo sapien
ccacagttcccgcagactcctggcc

SEQ ID NO: 5623361 - DNA, 25 bp, Homo sapien
attgctgcttcagtgcactaatcgc

SEQ ID NO: 5623362 - DNA, 25 bp, Homo sapien
gtgcactaatcgcttaaagagcagc

SEQ ID NO: 5623363 - DNA, 25 bp, Homo sapien
ttaagctacaggtttatggttctaa

SEQ ID NO: 5623364 - DNA, 25 bp, Homo sapien
atgtcaagaggaatacccagctcct

SEQ ID NO: 5623365 - DNA, 25 bp, Homo sapien
aggcatcgtgacccagcaacatcca

SEQ ID NO: 5623366 - DNA, 25 bp, Homo sapien
taaagagcagcaaagactctgtgct

SEQ ID NO: 5623367 - DNA, 25 bp, Homo sapien
aaaagttccatgcactgcccagagc

SEQ ID NO: 5623368 - DNA, 25 bp, Homo sapien
acatccagatgtcaagaggaatacc

SEQ ID NO: 5623369 - DNA, 25 bp, Homo sapien
gtgctctctgccccacagttcccgc

SEQ ID NO: 5623370 - DNA, 25 bp, Homo sapien
atggatttcaatgaaagagggtacg

SEQ ID NO: 5623371 - DNA, 25 bp, Homo sapien
tccattttggggatctggtatattc

SEQ ID NO: 5623372 - DNA, 25 bp, Homo sapien
agaaagcatggttacgcagccaagt

SEQ ID NO: 5623373 - DNA, 25 bp, Homo sapien
taaaatggaagctggttctttgccc

SEQ ID NO: 5623374 - DNA, 25 bp, Homo sapien
actctcttctcagaggatctggcgg

SEQ ID NO: 5623375 - DNA, 25 bp, Homo sapien
aatccagaaagcatggttacgcagc

SEQ ID NO: 5623376 - DNA, 25 bp, Homo sapien
tgctaggaagactgattagtgctca

SEQ ID NO: 5623377 - DNA, 25 bp, Homo sapien
agaaagagcaagtctgctaggaaga

SEQ ID NO: 5623378 - DNA, 25 bp, Homo sapien
tcatgcaggtccatacactgttctc

SEQ ID NO: 5623379 - DNA, 25 bp, Homo sapien
agactgattagtgctcatgcaggtc

SEQ ID NO: 5623380 - DNA, 25 bp, Homo sapien
gttctcagacgcaagtacgtgacag

SEQ ID NO: 5623381 - DNA, 25 bp, Homo sapien
aactggcataaataggttttgctac

SEQ ID NO: 5623382 - DNA, 25 bp, Homo sapien
ctggtctaaaccatacccataacac

SEQ ID NO: 5623383 - DNA, 25 bp, Homo sapien
aactgctagaagtatactcggacgt

SEQ ID NO: 5623384 - DNA, 25 bp, Homo sapien
ttatagcaggtaaactggcataaat

SEQ ID NO: 5623385 - DNA, 25 bp, Homo sapien
atttggttgttgaatagcatgtaat

SEQ ID NO: 5623386 - DNA, 25 bp, Homo sapien
aaataattatagcaggtaaactggc

SEQ ID NO: 5623387 - DNA, 25 bp, Homo sapien
tatactcggacgtacccaagaagaa

SEQ ID NO: 5623388 - DNA, 25 bp, Homo sapien
catacctgactcttagtgactacac

SEQ ID NO: 5623389 - DNA, 25 bp, Homo sapien
aagatcctgtgaagcagtcagactt

SEQ ID NO: 5623390 - DNA, 25 bp, Homo sapien
taagaacttaaagatcctgtgaagc

SEQ ID NO: 5623391 - DNA, 25 bp, Homo sapien
ccaagaagaaccgttgaactcccaa

SEQ ID NO: 5623392 - DNA, 25 bp, Homo sapien
gtcatgctcttaaacggggactgcc

SEQ ID NO: 5623393 - DNA, 25 bp, Homo sapien
tgctcttaaacggggactgcccaga

SEQ ID NO: 5623394 - DNA, 25 bp, Homo sapien
aagatcctcgcccctgggatcgagc

SEQ ID NO: 5623395 - DNA, 25 bp, Homo sapien
gtcattcaggacacgggcttttctg

SEQ ID NO: 5623396 - DNA, 25 bp, Homo sapien
acgtgctggaccacttctcggagct

SEQ ID NO: 5623397 - DNA, 25 bp, Homo sapien
tctgtgaagatcctcgcccctggga

SEQ ID NO: 5623398 - DNA, 25 bp, Homo sapien
ctggaccacttctcggagctgcgca

SEQ ID NO: 5623399 - DNA, 25 bp, Homo sapien
aggacacgggcttttctgtgaagat

SEQ ID NO: 5623400 - DNA, 25 bp, Homo sapien
cctgggatcgagcccttctccctgc

SEQ ID NO: 5623401 - DNA, 25 bp, Homo sapien
agtcattgtcattcaggacacgggc

SEQ ID NO: 5623402 - DNA, 25 bp, Homo sapien
gctgccatcagtcatgctcttaaac

SEQ ID NO: 5623403 - DNA, 25 bp, Homo sapien
caaggccctacattcacactgacag

SEQ ID NO: 5623404 - DNA, 25 bp, Homo sapien
aacagaactcttgcaggaagacagc

SEQ ID NO: 5623405 - DNA, 25 bp, Homo sapien
tcacactgacagtatgtagtgctca

SEQ ID NO: 5623406 - DNA, 25 bp, Homo sapien
aagaaattccttggcaacagaactc

SEQ ID NO: 5623407 - DNA, 25 bp, Homo sapien
caggaagacagctgcccttataagt

SEQ ID NO: 5623408 - DNA, 25 bp, Homo sapien
agaatgagcgacattaagaaattcc

SEQ ID NO: 5623409 - DNA, 25 bp, Homo sapien
acagcagccaacacaaagtccagct

SEQ ID NO: 5623410 - DNA, 25 bp, Homo sapien
aacacaggagattgcttttataacc

SEQ ID NO: 5623411 - DNA, 25 bp, Homo sapien
gcaaaatgctttcaaggccctacat

SEQ ID NO: 5623412 - DNA, 25 bp, Homo sapien
gttcatgttctatacagcagccaac

SEQ ID NO: 5623413 - DNA, 25 bp, Homo sapien
cccaaaccccctggacagaatgagc

SEQ ID NO: 5623414 - DNA, 25 bp, Homo sapien
actgattcactcccactgatgactg

SEQ ID NO: 5623415 - DNA, 25 bp, Homo sapien
cactcccactgatgactgggtagaa

SEQ ID NO: 5623416 - DNA, 25 bp, Homo sapien
agtccccatcctgtccttttctttc

SEQ ID NO: 5623417 - DNA, 25 bp, Homo sapien
gcagaacactgatttagatcatcgt

SEQ ID NO: 5623418 - DNA, 25 bp, Homo sapien
ccccacattcctactgattcactcc

SEQ ID NO: 5623419 - DNA, 25 bp, Homo sapien
gggtagaaaagttgcagaacactga

SEQ ID NO: 5623420 - DNA, 25 bp, Homo sapien
cccttgatcttggcttcaggtctgc

SEQ ID NO: 5623421 - DNA, 25 bp, Homo sapien
atcttggcttcaggtctgcaggaca

SEQ ID NO: 5623422 - DNA, 25 bp, Homo sapien
aggacatgaaggtttaaggaacaat

SEQ ID NO: 5623423 - DNA, 25 bp, Homo sapien
ccactgatgactgggtagaaaagtt

SEQ ID NO: 5623424 - DNA, 25 bp, Homo sapien
tcccctcactcccttccccacattc

SEQ ID NO: 5623425 - DNA, 25 bp, Homo sapien
atgcgttaatagagggaatcaggca

SEQ ID NO: 5623426 - DNA, 25 bp, Homo sapien
ggtcctctgccgctgactgagggac

SEQ ID NO: 5623427 - DNA, 25 bp, Homo sapien
gctcagccgcagataggcctctttt

SEQ ID NO: 5623428 - DNA, 25 bp, Homo sapien
atttaaacctgcgtgtggcagcggt

SEQ ID NO: 5623429 - DNA, 25 bp, Homo sapien
ctgtgtaggtttggggtcactcaca

SEQ ID NO: 5623430 - DNA, 25 bp, Homo sapien
ggagaaacggacacttccggaatgc

SEQ ID NO: 5623431 - DNA, 25 bp, Homo sapien
ctgagtgctagatatgcacaggggc

SEQ ID NO: 5623432 - DNA, 25 bp, Homo sapien
tgaggccacacgaggtcctttctgt

SEQ ID NO: 5623433 - DNA, 25 bp, Homo sapien
gggagcaggatcggttctcatcatt

SEQ ID NO: 5623434 - DNA, 25 bp, Homo sapien
cggagcccagctgttacgagctgca

SEQ ID NO: 5623435 - DNA, 25 bp, Homo sapien
tgtccttgtgagggaatttgggaga

SEQ ID NO: 5623436 - DNA, 25 bp, Homo sapien
ccctgtaccatggctgcgtgtggga

SEQ ID NO: 5623437 - DNA, 25 bp, Homo sapien
cagtccccttgtgtcaccaggcacc

SEQ ID NO: 5623438 - DNA, 25 bp, Homo sapien
cgcccttcgagtccatctccctccc

SEQ ID NO: 5623439 - DNA, 25 bp, Homo sapien
ggcccccacagtccccttgtgtcac

SEQ ID NO: 5623440 - DNA, 25 bp, Homo sapien
agctgccctgtaccatggctgcgtg

SEQ ID NO: 5623441 - DNA, 25 bp, Homo sapien
ccccttgtgtcaccaggcaccatct

SEQ ID NO: 5623442 - DNA, 25 bp, Homo sapien
ggcccttccgcccttcgagtccatc

SEQ ID NO: 5623443 - DNA, 25 bp, Homo sapien
tgagctgccctgtaccatggctgcg

SEQ ID NO: 5623444 - DNA, 25 bp, Homo sapien
ctgggcccttccgcccttcgagtcc

SEQ ID NO: 5623445 - DNA, 25 bp, Homo sapien
tgccctgtaccatggctgcgtgtgg

SEQ ID NO: 5623446 - DNA, 25 bp, Homo sapien
ttgtgtcaccaggcaccatctgtcc

SEQ ID NO: 5623447 - DNA, 25 bp, Homo sapien
ctgcaccccactcgtgggggaacac

SEQ ID NO: 5623448 - DNA, 25 bp, Homo sapien
ggaacacagccgctcccctctgctc

SEQ ID NO: 5623449 - DNA, 25 bp, Homo sapien
gggaacacagccgctcccctctgct

SEQ ID NO: 5623450 - DNA, 25 bp, Homo sapien
cccccgtcctcctggtcatttcctc

SEQ ID NO: 5623451 - DNA, 25 bp, Homo sapien
tttggccgatgcaaacaggccccta

SEQ ID NO: 5623452 - DNA, 25 bp, Homo sapien
gaggccgagaagaccttctgttcct

SEQ ID NO: 5623453 - DNA, 25 bp, Homo sapien
ccccctggtgctccaggttgggtga

SEQ ID NO: 5623454 - DNA, 25 bp, Homo sapien
caccgtcccttttccgaggccgaga

SEQ ID NO: 5623455 - DNA, 25 bp, Homo sapien
ttattccctgccgttgtagcggggc

SEQ ID NO: 5623456 - DNA, 25 bp, Homo sapien
tgccccagcgccctttcggatcaca

SEQ ID NO: 5623457 - DNA, 25 bp, Homo sapien
tcggatcacagtcccgccgtgtctt

SEQ ID NO: 5623458 - DNA, 25 bp, Homo sapien
cgactctcgaccatcgggtttgacg

SEQ ID NO: 5623459 - DNA, 25 bp, Homo sapien
cgtcaaacccgatggtcgagagtcg

SEQ ID NO: 5623460 - DNA, 25 bp, Homo sapien
caggagagacgtagaactaaactcc

SEQ ID NO: 5623461 - DNA, 25 bp, Homo sapien
ttcatggcagtatcacgtaaggaga

SEQ ID NO: 5623462 - DNA, 25 bp, Homo sapien
ggctccgctgtccgcactgcgtctc

SEQ ID NO: 5623463 - DNA, 25 bp, Homo sapien
aaagaacccaaaatccaggagagac

SEQ ID NO: 5623464 - DNA, 25 bp, Homo sapien
agggaggttgcagtagttactatga

SEQ ID NO: 5623465 - DNA, 25 bp, Homo sapien
gaccaagtctgagcttattcatggc

SEQ ID NO: 5623466 - DNA, 25 bp, Homo sapien
atgtgcaaagagtgagtctagtgct

SEQ ID NO: 5623467 - DNA, 25 bp, Homo sapien
gtgctccatcatcaataggctccgc

SEQ ID NO: 5623468 - DNA, 25 bp, Homo sapien
atacaggagataataaatgaccaag

SEQ ID NO: 5623469 - DNA, 25 bp, Homo sapien
tgatcacaacagatgagctctaccc

SEQ ID NO: 5623470 - DNA, 25 bp, Homo sapien
cctgttagcgacagggatgtgcaaa

SEQ ID NO: 5623471 - DNA, 25 bp, Homo sapien
atctataggcatgcaaccactgagc

SEQ ID NO: 5623472 - DNA, 25 bp, Homo sapien
ccacagaggaaacttgcactacaca

SEQ ID NO: 5623473 - DNA, 25 bp, Homo sapien
atttgcaccaggatgatttacccca

SEQ ID NO: 5623474 - DNA, 25 bp, Homo sapien
gcaaccactgagcctagcagcttcc

SEQ ID NO: 5623475 - DNA, 25 bp, Homo sapien
tgtagacagaagtcacttgtgggtc

SEQ ID NO: 5623476 - DNA, 25 bp, Homo sapien
gcagaaccatgagcaactggcacaa

SEQ ID NO: 5623477 - DNA, 25 bp, Homo sapien
tgcagatcacaactagtcctgggcc

SEQ ID NO: 5623478 - DNA, 25 bp, Homo sapien
atccagtcacaaagtctagccaaac

SEQ ID NO: 5623479 - DNA, 25 bp, Homo sapien
ttcagcttgcagccctgtgattggc

SEQ ID NO: 5623480 - DNA, 25 bp, Homo sapien
actggcacaatgaacgctataaacg

SEQ ID NO: 5623481 - DNA, 25 bp, Homo sapien
ggagaataagctaaactggggcttc

SEQ ID NO: 5623482 - DNA, 25 bp, Homo sapien
ctctgggggagtaattactactcac

SEQ ID NO: 5623483 - DNA, 25 bp, Homo sapien
ggaggagggtataaatctcagctgt

SEQ ID NO: 5623484 - DNA, 25 bp, Homo sapien
tccattattttggtgtggaggaggg

SEQ ID NO: 5623485 - DNA, 25 bp, Homo sapien
tccatttgaaggatgtgagggttaa

SEQ ID NO: 5623486 - DNA, 25 bp, Homo sapien
tcctccgttgctgtaaaacacccaa

SEQ ID NO: 5623487 - DNA, 25 bp, Homo sapien
tgtggccaaggcaataatttgataa

SEQ ID NO: 5623488 - DNA, 25 bp, Homo sapien
aaacacccaaaatcaggcggtaaca

SEQ ID NO: 5623489 - DNA, 25 bp, Homo sapien
gaacacttaactgcctggagacatc

SEQ ID NO: 5623490 - DNA, 25 bp, Homo sapien
tcagcctcactgtggccaaggcaat

SEQ ID NO: 5623491 - DNA, 25 bp, Homo sapien
gggccgcaaaggctagaacacttaa

SEQ ID NO: 5623492 - DNA, 25 bp, Homo sapien
tcactggcttcctgagcagcttgat

SEQ ID NO: 5623493 - DNA, 25 bp, Homo sapien
caaagggtaatccttccaactagga

SEQ ID NO: 5623494 - DNA, 25 bp, Homo sapien
cttaagcaaattaactgccctaaac

SEQ ID NO: 5623495 - DNA, 25 bp, Homo sapien
ttgggctaatcacccaccctgactg

SEQ ID NO: 5623496 - DNA, 25 bp, Homo sapien
aatccaccgacacaaaacatcttct

SEQ ID NO: 5623497 - DNA, 25 bp, Homo sapien
aataaggcctatttcagattgtgct

SEQ ID NO: 5623498 - DNA, 25 bp, Homo sapien
caactaggatttagaagtcactttc

SEQ ID NO: 5623499 - DNA, 25 bp, Homo sapien
accctgactgtgtaacttaagcaaa

SEQ ID NO: 5623500 - DNA, 25 bp, Homo sapien
gttttccatgaataataaggcctat

SEQ ID NO: 5623501 - DNA, 25 bp, Homo sapien
cagattgtgcttttgtgaggctatt

SEQ ID NO: 5623502 - DNA, 25 bp, Homo sapien
gccaaaataataatttcgtcgacgc

SEQ ID NO: 5623503 - DNA, 25 bp, Homo sapien
aacagagttctcaatccaccgacac

SEQ ID NO: 5623504 - DNA, 25 bp, Homo sapien
tttcagcacatgtgacagtggccat

SEQ ID NO: 5623505 - DNA, 25 bp, Homo sapien
gacagtggccatgttaatatgaata

SEQ ID NO: 5623506 - DNA, 25 bp, Homo sapien
ttgataagtttgactgctgtggttc

SEQ ID NO: 5623507 - DNA, 25 bp, Homo sapien
gctgtggttcagtcttcaattttgg

SEQ ID NO: 5623508 - DNA, 25 bp, Homo sapien
tcaccggttttgatcaaaaggttga

SEQ ID NO: 5623509 - DNA, 25 bp, Homo sapien
ggttttctgaaactgtatcacaggt

SEQ ID NO: 5623510 - DNA, 25 bp, Homo sapien
caattttggaagttactgttatagc

SEQ ID NO: 5623511 - DNA, 25 bp, Homo sapien
ctctcaaccaattttcagcacatgt

SEQ ID NO: 5623512 - DNA, 25 bp, Homo sapien
aaaaggttgataagtttgactgctg

SEQ ID NO: 5623513 - DNA, 25 bp, Homo sapien
atgaataagatttgaaataaggttt

SEQ ID NO: 5623514 - DNA, 25 bp, Homo sapien
actgtatcacaggtttcatattcct

SEQ ID NO: 5623515 - DNA, 25 bp, Homo sapien
tagaattcggtggaatcaacaacac

SEQ ID NO: 5623516 - DNA, 25 bp, Homo sapien
cagatatcaagatgtaatggaattc

SEQ ID NO: 5623517 - DNA, 25 bp, Homo sapien
taactttgagcttgtaccagatatc

SEQ ID NO: 5623518 - DNA, 25 bp, Homo sapien
ttaagctaaagatattactgtttac

SEQ ID NO: 5623519 - DNA, 25 bp, Homo sapien
attcttagaattcggtggaatcaac

SEQ ID NO: 5623520 - DNA, 25 bp, Homo sapien
catttcagttgggttcttaagctaa

SEQ ID NO: 5623521 - DNA, 25 bp, Homo sapien
tgccctaagccaaaatttaagatta

SEQ ID NO: 5623522 - DNA, 25 bp, Homo sapien
tcaacaacactgattgcacattttt

SEQ ID NO: 5623523 - DNA, 25 bp, Homo sapien
tttctcctcccttctcagcacccag

SEQ ID NO: 5623524 - DNA, 25 bp, Homo sapien
gaccttccaggctctaaggatcctc

SEQ ID NO: 5623525 - DNA, 25 bp, Homo sapien
gcaagtacggccatgccctaagcca

SEQ ID NO: 5623526 - DNA, 25 bp, Homo sapien
tttacaagccacttggggcctgctg

SEQ ID NO: 5623527 - DNA, 25 bp, Homo sapien
cagcttgctccagtgccgccgttta

SEQ ID NO: 5623528 - DNA, 25 bp, Homo sapien
gtacgtggcctgcagttcacggatc

SEQ ID NO: 5623529 - DNA, 25 bp, Homo sapien
ccgtttacgtcatgggtacgtggcc

SEQ ID NO: 5623530 - DNA, 25 bp, Homo sapien
atacagcccagcagactaaagtcag

SEQ ID NO: 5623531 - DNA, 25 bp, Homo sapien
ggatctccaggcccatcctgttgac

SEQ ID NO: 5623532 - DNA, 25 bp, Homo sapien
aggcccatcctgttgactgcatacc

SEQ ID NO: 5623533 - DNA, 25 bp, Homo sapien
atgtcatgtgcccctgttgtcccca

SEQ ID NO: 5623534 - DNA, 25 bp, Homo sapien
gtggcctgcagttcacggatctcca

SEQ ID NO: 5623535 - DNA, 25 bp, Homo sapien
actgcatacccagtgaggcttcgag

SEQ ID NO: 5623536 - DNA, 25 bp, Homo sapien
gtgccgccgtttacgtcatgggtac

SEQ ID NO: 5623537 - DNA, 25 bp, Homo sapien
aaacaatggacttctctcaacagtt

SEQ ID NO: 5623538 - DNA, 25 bp, Homo sapien
ctcaacagtttgaatcacctctttt

SEQ ID NO: 5623539 - DNA, 25 bp, Homo sapien
ataataaaataatgtgtgagtttgc

SEQ ID NO: 5623540 - DNA, 25 bp, Homo sapien
aatgtgtgagtttgcttttttcccc

SEQ ID NO: 5623541 - DNA, 25 bp, Homo sapien
tggcatctctcaaaggtttaactta

SEQ ID NO: 5623542 - DNA, 25 bp, Homo sapien
agtacactgtttcattctggagttc

SEQ ID NO: 5623543 - DNA, 25 bp, Homo sapien
ccccttagaaaacaatggacttctc

SEQ ID NO: 5623544 - DNA, 25 bp, Homo sapien
ccagactaacttggcaaaattactc

SEQ ID NO: 5623545 - DNA, 25 bp, Homo sapien
ccacagatagaatccagactaactt

SEQ ID NO: 5623546 - DNA, 25 bp, Homo sapien
ttgcactttgtatcctattaaccct

SEQ ID NO: 5623547 - DNA, 25 bp, Homo sapien
tttgtccacagatagaatccagact

SEQ ID NO: 5623548 - DNA, 25 bp, Homo sapien
cgccgcggatccgcgcgccacgtta

SEQ ID NO: 5623549 - DNA, 25 bp, Homo sapien
taacgtggcgcgcggatccgcggcg

SEQ ID NO: 5623550 - DNA, 25 bp, Homo sapien
agcaagcaatgatataagagtaaaa

SEQ ID NO: 5623551 - DNA, 25 bp, Homo sapien
agaagttcaagcaataaatacatac

SEQ ID NO: 5623552 - DNA, 25 bp, Homo sapien
aagcaagaatacatgagccatttaa

SEQ ID NO: 5623553 - DNA, 25 bp, Homo sapien
gaaagccatgaatacagaacgaata

SEQ ID NO: 5623554 - DNA, 25 bp, Homo sapien
ataaggtatgcacagaagttcaagc

SEQ ID NO: 5623555 - DNA, 25 bp, Homo sapien
gctacgcaaagcagatgcagaaaag

SEQ ID NO: 5623556 - DNA, 25 bp, Homo sapien
tacaatagctacgcaaagcagatgc

SEQ ID NO: 5623557 - DNA, 25 bp, Homo sapien
atacagaacgaataacagctgttac

SEQ ID NO: 5623558 - DNA, 25 bp, Homo sapien
gctgtatacaaaagatcatagtccc

SEQ ID NO: 5623559 - DNA, 25 bp, Homo sapien
tcttagaaaaagtctggtcatttat

SEQ ID NO: 5623560 - DNA, 25 bp, Homo sapien
atagtacacagtaatgaaaagtatc

SEQ ID NO: 5623561 - DNA, 25 bp, Homo sapien
gcattaacagtctacaacggagggc

SEQ ID NO: 5623562 - DNA, 25 bp, Homo sapien
cggttccacccactcgcgcgtctcg

SEQ ID NO: 5623563 - DNA, 25 bp, Homo sapien
aacctttggcgtcaacagaaaagcc

SEQ ID NO: 5623564 - DNA, 25 bp, Homo sapien
tcatggaacttaggaggatacaaaa

SEQ ID NO: 5623565 - DNA, 25 bp, Homo sapien
cttctcccgccccacgcggttccac

SEQ ID NO: 5623566 - DNA, 25 bp, Homo sapien
ttcttccctggtgagtgatactttt

SEQ ID NO: 5623567 - DNA, 25 bp, Homo sapien
tcgggcatcctggacacgcattaac

SEQ ID NO: 5623568 - DNA, 25 bp, Homo sapien
aacggagggctcattcacgattata

SEQ ID NO: 5623569 - DNA, 25 bp, Homo sapien
gctccaggtttaggctgaactgccc

SEQ ID NO: 5623570 - DNA, 25 bp, Homo sapien
tgcccacggggaccattttcttgct

SEQ ID NO: 5623571 - DNA, 25 bp, Homo sapien
tgaaagatgagtaacgatttaaggc

SEQ ID NO: 5623572 - DNA, 25 bp, Homo sapien
tcaactctgggatggagatgagttt

SEQ ID NO: 5623573 - DNA, 25 bp, Homo sapien
ggttcccgaccagcaaaatcactat

SEQ ID NO: 5623574 - DNA, 25 bp, Homo sapien
aatttttgcagtgtggttcccgacc

SEQ ID NO: 5623575 - DNA, 25 bp, Homo sapien
atcttacactctggggatgttgccc

SEQ ID NO: 5623576 - DNA, 25 bp, Homo sapien
tctacaagagtctggggatactcac

SEQ ID NO: 5623577 - DNA, 25 bp, Homo sapien
tggtggtttccagtttagctgagtc

SEQ ID NO: 5623578 - DNA, 25 bp, Homo sapien
tctcagctttaaggtgaagaggaag

SEQ ID NO: 5623579 - DNA, 25 bp, Homo sapien
caaattatacaagggtcagctggtt

SEQ ID NO: 5623580 - DNA, 25 bp, Homo sapien
cctgcaatcttgaaggatggtggga

SEQ ID NO: 5623581 - DNA, 25 bp, Homo sapien
aattctcagcagtgatcttgccccc

SEQ ID NO: 5623582 - DNA, 25 bp, Homo sapien
ctggaaacttattagaggtacaaat

SEQ ID NO: 5623583 - DNA, 25 bp, Homo sapien
atagtatcatttatggatgctacat

SEQ ID NO: 5623584 - DNA, 25 bp, Homo sapien
acacaaatttagtaaactctccagt

SEQ ID NO: 5623585 - DNA, 25 bp, Homo sapien
actttaggatggcggctacctctag

SEQ ID NO: 5623586 - DNA, 25 bp, Homo sapien
gggatttataatgaatggcccaaat

SEQ ID NO: 5623587 - DNA, 25 bp, Homo sapien
aaaaagcacatgagatcaatcctct

SEQ ID NO: 5623588 - DNA, 25 bp, Homo sapien
attcatgaaaataattcacactgac

SEQ ID NO: 5623589 - DNA, 25 bp, Homo sapien
aatgtgatgctgattaaaatttaca

SEQ ID NO: 5623590 - DNA, 25 bp, Homo sapien
aaatgtaaaatttgaaaatagtatc

SEQ ID NO: 5623591 - DNA, 25 bp, Homo sapien
ggctacctctagggaggaaaactgc

SEQ ID NO: 5623592 - DNA, 25 bp, Homo sapien
tagcatgtaattaatcttggtattt

SEQ ID NO: 5623593 - DNA, 25 bp, Homo sapien
ttcacactgactttaggatggcggc

SEQ ID NO: 5623594 - DNA, 25 bp, Homo sapien
aactcaataagatgtcagtcacaat

SEQ ID NO: 5623595 - DNA, 25 bp, Homo sapien
aagggaagcatgctctccaaggagc

SEQ ID NO: 5623596 - DNA, 25 bp, Homo sapien
gattttagtaggtgggtacagtcaa

SEQ ID NO: 5623597 - DNA, 25 bp, Homo sapien
aagcatgctctccaaggagcaagtc

SEQ ID NO: 5623598 - DNA, 25 bp, Homo sapien
acagagagattttagtaggtgggta

SEQ ID NO: 5623599 - DNA, 25 bp, Homo sapien
caggtgggccttgacatctagtttt

SEQ ID NO: 5623600 - DNA, 25 bp, Homo sapien
aatttgataacatacagagagattt

SEQ ID NO: 5623601 - DNA, 25 bp, Homo sapien
ctagtttttagagaacaatgtacac

SEQ ID NO: 5623602 - DNA, 25 bp, Homo sapien
taggtgggtacagtcaaagtatttg

SEQ ID NO: 5623603 - DNA, 25 bp, Homo sapien
tgtcagtcacaatgtgtcccctgtc

SEQ ID NO: 5623604 - DNA, 25 bp, Homo sapien
aacaggtgggccttgacatctagtt

SEQ ID NO: 5623605 - DNA, 25 bp, Homo sapien
gatgactagcacctagggacaaagg

SEQ ID NO: 5623606 - DNA, 25 bp, Homo sapien
tctaggagtcaaaaagagaaactct

SEQ ID NO: 5623607 - DNA, 25 bp, Homo sapien
actggaatgagttggaatatgaatt

SEQ ID NO: 5623608 - DNA, 25 bp, Homo sapien
ctagagccctagagtgctctgaagc

SEQ ID NO: 5623609 - DNA, 25 bp, Homo sapien
ctctgaagctaggtcttactgcgtt

SEQ ID NO: 5623610 - DNA, 25 bp, Homo sapien
tgaaggtaaagccatatctgtagat

SEQ ID NO: 5623611 - DNA, 25 bp, Homo sapien
aaggggaacaaattagctagagccc

SEQ ID NO: 5623612 - DNA, 25 bp, Homo sapien
tgtagataatgctaagaaacacctc

SEQ ID NO: 5623613 - DNA, 25 bp, Homo sapien
aagagaaactcttgggatcaagtca

SEQ ID NO: 5623614 - DNA, 25 bp, Homo sapien
cctgacacaattgaaggtaaagcca

SEQ ID NO: 5623615 - DNA, 25 bp, Homo sapien
atgataggtgagaaaggctatttct

SEQ ID NO: 5623616 - DNA, 25 bp, Homo sapien
agtgggccctcacaaatgaagagta

SEQ ID NO: 5623617 - DNA, 25 bp, Homo sapien
gtcatgaggtaaggagtactatttc

SEQ ID NO: 5623618 - DNA, 25 bp, Homo sapien
accagaacaaggaatccaatccagc

SEQ ID NO: 5623619 - DNA, 25 bp, Homo sapien
gaggtgacagctagtaagttgattc

SEQ ID NO: 5623620 - DNA, 25 bp, Homo sapien
acactcagagaatcctaaggcaaat

SEQ ID NO: 5623621 - DNA, 25 bp, Homo sapien
catctcagagttgaagtgacttgcc

SEQ ID NO: 5623622 - DNA, 25 bp, Homo sapien
tccaactcggaaagcatactcactc

SEQ ID NO: 5623623 - DNA, 25 bp, Homo sapien
atgatcgaaggcccagtgtatacca

SEQ ID NO: 5623624 - DNA, 25 bp, Homo sapien
aacatgggatctgaaatagggattt

SEQ ID NO: 5623625 - DNA, 25 bp, Homo sapien
gttgattcagacgcaggtgtttcca

SEQ ID NO: 5623626 - DNA, 25 bp, Homo sapien
cagacaagcatcaacatgggaacat

SEQ ID NO: 5623627 - DNA, 25 bp, Homo sapien
gcaaccattgtagcccccagggcca

SEQ ID NO: 5623628 - DNA, 25 bp, Homo sapien
gagctgctccccgcccagctacagc

SEQ ID NO: 5623629 - DNA, 25 bp, Homo sapien
caccccaaggatctgagcacattca

SEQ ID NO: 5623630 - DNA, 25 bp, Homo sapien
cctacagtccccgcaccccaaggat

SEQ ID NO: 5623631 - DNA, 25 bp, Homo sapien
tggagttctcctgacccagtggtct

SEQ ID NO: 5623632 - DNA, 25 bp, Homo sapien
acattcagttacaggcatggggtca

SEQ ID NO: 5623633 - DNA, 25 bp, Homo sapien
tctgcatagtcaaggtaagaaaacc

SEQ ID NO: 5623634 - DNA, 25 bp, Homo sapien
ggggtcaccccagaccatggaagag

SEQ ID NO: 5623635 - DNA, 25 bp, Homo sapien
gccaggacagtcccacaccttcaaa

SEQ ID NO: 5623636 - DNA, 25 bp, Homo sapien
gagatccgcctctggagttggctct

SEQ ID NO: 5623637 - DNA, 25 bp, Homo sapien
cctggttcccagcacccaaaccctc

SEQ ID NO: 5623638 - DNA, 25 bp, Homo sapien
gatactagaacagtgagaggcactg

SEQ ID NO: 5623639 - DNA, 25 bp, Homo sapien
aatgggtaaaaatctagctgttaac

SEQ ID NO: 5623640 - DNA, 25 bp, Homo sapien
cagcgagcaagcctttaggagatta

SEQ ID NO: 5623641 - DNA, 25 bp, Homo sapien
gccaactgctgatgaggcatgtcta

SEQ ID NO: 5623642 - DNA, 25 bp, Homo sapien
tttgcagagtgatactagaacagtg

SEQ ID NO: 5623643 - DNA, 25 bp, Homo sapien
cttcttccccggtccaaagcacctc

SEQ ID NO: 5623644 - DNA, 25 bp, Homo sapien
atatacaccagtaagagaaaacttc

SEQ ID NO: 5623645 - DNA, 25 bp, Homo sapien
tactagccagagttatgggaaggaa

SEQ ID NO: 5623646 - DNA, 25 bp, Homo sapien
gtattagatgtcacagcgagcaagc

SEQ ID NO: 5623647 - DNA, 25 bp, Homo sapien
tcctccaggatagacaatgggtaaa

SEQ ID NO: 5623648 - DNA, 25 bp, Homo sapien
acaaatgtcacaggttcctaaagcc

SEQ ID NO: 5623649 - DNA, 25 bp, Homo sapien
gccaaagacatgacatcaaataagt

SEQ ID NO: 5623650 - DNA, 25 bp, Homo sapien
ctgagctagaagaaaccttagaggc

SEQ ID NO: 5623651 - DNA, 25 bp, Homo sapien
ctggatggatccctagggactacct

SEQ ID NO: 5623652 - DNA, 25 bp, Homo sapien
ggattgcattcctggccaaagacat

SEQ ID NO: 5623653 - DNA, 25 bp, Homo sapien
aagtgtagcccagagtctagttggt

SEQ ID NO: 5623654 - DNA, 25 bp, Homo sapien
ataagtaatagacatcaccagcaat

SEQ ID NO: 5623655 - DNA, 25 bp, Homo sapien
atattttaaagtgtagcccagagtc

SEQ ID NO: 5623656 - DNA, 25 bp, Homo sapien
ctggaacaatgctaattaggattgc

SEQ ID NO: 5623657 - DNA, 25 bp, Homo sapien
aaaccttagaggccatctgatgata

SEQ ID NO: 5623658 - DNA, 25 bp, Homo sapien
agagtctagttggtaaatgttactt

SEQ ID NO: 5623659 - DNA, 25 bp, Homo sapien
cacacctggctgaacatcagatatt

SEQ ID NO: 5623660 - DNA, 25 bp, Homo sapien
agggccacccctagacagtcagcct

SEQ ID NO: 5623661 - DNA, 25 bp, Homo sapien
aatgggaacgtagtttgccctctgc

SEQ ID NO: 5623662 - DNA, 25 bp, Homo sapien
ttgtaaagaccctagaggcagtgat

SEQ ID NO: 5623663 - DNA, 25 bp, Homo sapien
ggatgaccagcccccggtaaataga

SEQ ID NO: 5623664 - DNA, 25 bp, Homo sapien
aaccttacgttcgctgtcccttgta

SEQ ID NO: 5623665 - DNA, 25 bp, Homo sapien
accttgtggctttaatgggaacgta

SEQ ID NO: 5623666 - DNA, 25 bp, Homo sapien
gtcccttgtaaagaccctagaggca

SEQ ID NO: 5623667 - DNA, 25 bp, Homo sapien
gaacgtagtttgccctctgctcctc

SEQ ID NO: 5623668 - DNA, 25 bp, Homo sapien
cgaagccagctccgaaaccttacgt

SEQ ID NO: 5623669 - DNA, 25 bp, Homo sapien
agggttgaagtgtgcttttccaagg

SEQ ID NO: 5623670 - DNA, 25 bp, Homo sapien
gccacccctagacagtcagcctggc

SEQ ID NO: 5623671 - DNA, 25 bp, Homo sapien
aagatgtcacaggcttttgatattc

SEQ ID NO: 5623672 - DNA, 25 bp, Homo sapien
tctatatgaaggcaataactaattt

SEQ ID NO: 5623673 - DNA, 25 bp, Homo sapien
ggctaaaaatccagaagaagatatc

SEQ ID NO: 5623674 - DNA, 25 bp, Homo sapien
tgtggaaagcactcctcccattttc

SEQ ID NO: 5623675 - DNA, 25 bp, Homo sapien
aagataggaataaaatatacactgc

SEQ ID NO: 5623676 - DNA, 25 bp, Homo sapien
ttgatattctagggtgcactgtgat

SEQ ID NO: 5623677 - DNA, 25 bp, Homo sapien
tcagatcatgagctgaagtaagaat

SEQ ID NO: 5623678 - DNA, 25 bp, Homo sapien
gaaaaacatagtcctcaaacatagt

SEQ ID NO: 5623679 - DNA, 25 bp, Homo sapien
aaattaagtgtcagatcatgagctg

SEQ ID NO: 5623680 - DNA, 25 bp, Homo sapien
ttggaaaatactggattgaagaaaa

SEQ ID NO: 5623681 - DNA, 25 bp, Homo sapien
aatgcttagtcaaagagcaggcata

SEQ ID NO: 5623682 - DNA, 25 bp, Homo sapien
tcagagaggtgatatgactgaccta

SEQ ID NO: 5623683 - DNA, 25 bp, Homo sapien
catgatgcctgatcacctccagttc

SEQ ID NO: 5623684 - DNA, 25 bp, Homo sapien
tcttcccatgatttctagctgcctc

SEQ ID NO: 5623685 - DNA, 25 bp, Homo sapien
tgactgacctagccctctgattctc

SEQ ID NO: 5623686 - DNA, 25 bp, Homo sapien
tatggaccttgaacaaagtaggggc

SEQ ID NO: 5623687 - DNA, 25 bp, Homo sapien
gctccgtgcccatcctcataacaac

SEQ ID NO: 5623688 - DNA, 25 bp, Homo sapien
cgcctgccccttagaggagatctct

SEQ ID NO: 5623689 - DNA, 25 bp, Homo sapien
ccctttcaacaatcgggtgcggcct

SEQ ID NO: 5623690 - DNA, 25 bp, Homo sapien
tcctccaccgcattgttctcctctc

SEQ ID NO: 5623691 - DNA, 25 bp, Homo sapien
tacaaagcctccagtatggaccttg

SEQ ID NO: 5623692 - DNA, 25 bp, Homo sapien
tccagttcttggagaggctttccct

SEQ ID NO: 5623693 - DNA, 25 bp, Homo sapien
aagcatttcaagatcctggcctgga

SEQ ID NO: 5623694 - DNA, 25 bp, Homo sapien
gtttctgtgtggtaagggaaactga

SEQ ID NO: 5623695 - DNA, 25 bp, Homo sapien
caggaagcacagagtttccttgaaa

SEQ ID NO: 5623696 - DNA, 25 bp, Homo sapien
agtgtgtataaatgaaagtgcaagc

SEQ ID NO: 5623697 - DNA, 25 bp, Homo sapien
acagtgcaggactagaagcatttca

SEQ ID NO: 5623698 - DNA, 25 bp, Homo sapien
ggcttcaatcaaagggaaggagaca

SEQ ID NO: 5623699 - DNA, 25 bp, Homo sapien
tagctaccatagcagacagtgcagg

SEQ ID NO: 5623700 - DNA, 25 bp, Homo sapien
cctatcttgattggggctagctagc

SEQ ID NO: 5623701 - DNA, 25 bp, Homo sapien
ttctctacatgtggcctgcagtgtg

SEQ ID NO: 5623702 - DNA, 25 bp, Homo sapien
cgtgtacatggggatatgtgtaaac

SEQ ID NO: 5623703 - DNA, 25 bp, Homo sapien
gataacagtaaggaaggcttcaatc

SEQ ID NO: 5623704 - DNA, 25 bp, Homo sapien
aaatcatattttaagaaagaagtct

SEQ ID NO: 5623705 - DNA, 25 bp, Homo sapien
tgttgatgtggaatacacactgccc

SEQ ID NO: 5623706 - DNA, 25 bp, Homo sapien
attaacataggtaatagcaccaata

SEQ ID NO: 5623707 - DNA, 25 bp, Homo sapien
ggcttaaaaggggcagctactataa

SEQ ID NO: 5623708 - DNA, 25 bp, Homo sapien
cgttctttctaggatgttgatgtgg

SEQ ID NO: 5623709 - DNA, 25 bp, Homo sapien
acaatcttgaacaaatcatcacgcc

SEQ ID NO: 5623710 - DNA, 25 bp, Homo sapien
acacacacagctggcttaaaagggg

SEQ ID NO: 5623711 - DNA, 25 bp, Homo sapien
tttgaatctggaaagcccaacttca

SEQ ID NO: 5623712 - DNA, 25 bp, Homo sapien
accaaatgtaagtagaaacagtgag

SEQ ID NO: 5623713 - DNA, 25 bp, Homo sapien
taaccctctgcatctaaatctcatc

SEQ ID NO: 5623714 - DNA, 25 bp, Homo sapien
gtaagtagaaacagtgagatcacta

SEQ ID NO: 5623715 - DNA, 25 bp, Homo sapien
agtaaactgtgaacatggcagctac

SEQ ID NO: 5623716 - DNA, 25 bp, Homo sapien
tatgaaaactagcaaagtgtgacac

SEQ ID NO: 5623717 - DNA, 25 bp, Homo sapien
acatgctgatgtaacaaggagtaaa

SEQ ID NO: 5623718 - DNA, 25 bp, Homo sapien
aagcaaggtacgcctgtatccagta

SEQ ID NO: 5623719 - DNA, 25 bp, Homo sapien
aagtgtgacacaaagacatgaaatg

SEQ ID NO: 5623720 - DNA, 25 bp, Homo sapien
tggaaaatggtgctgatagacttat

SEQ ID NO: 5623721 - DNA, 25 bp, Homo sapien
gtaatcaaaaaacactggtcacaga

SEQ ID NO: 5623722 - DNA, 25 bp, Homo sapien
gggcaggatttgtggtatccccaaa

SEQ ID NO: 5623723 - DNA, 25 bp, Homo sapien
attcactgcaaggttgctgcaaacc

SEQ ID NO: 5623724 - DNA, 25 bp, Homo sapien
tgcaatgcacaattaagcaaggtac

SEQ ID NO: 5623725 - DNA, 25 bp, Homo sapien
accttcagtgtgtataaaatgcagt

SEQ ID NO: 5623726 - DNA, 25 bp, Homo sapien
gcaacaaagaagataagcacaccag

SEQ ID NO: 5623727 - DNA, 25 bp, Homo sapien
ggtccacatagcagagaacttcaca

SEQ ID NO: 5623728 - DNA, 25 bp, Homo sapien
ccagatatagtacatagctcagctc

SEQ ID NO: 5623729 - DNA, 25 bp, Homo sapien
tactcctcgaggtagtctcagatct

SEQ ID NO: 5623730 - DNA, 25 bp, Homo sapien
atgtggacttggatcaaatagggca

SEQ ID NO: 5623731 - DNA, 25 bp, Homo sapien
accagcattggtccgtggactgcat

SEQ ID NO: 5623732 - DNA, 25 bp, Homo sapien
tcaaatagggcatgaaccagcattg

SEQ ID NO: 5623733 - DNA, 25 bp, Homo sapien
agcacaccaggtccacatagcagag

SEQ ID NO: 5623734 - DNA, 25 bp, Homo sapien
gaaacttggatgttgaggcaatgtc

SEQ ID NO: 5623735 - DNA, 25 bp, Homo sapien
atgacaactaatacttgaagcactt

SEQ ID NO: 5623736 - DNA, 25 bp, Homo sapien
tctgtacttaatgtggacttggatc

SEQ ID NO: 5623737 - DNA, 25 bp, Homo sapien
tttaatgcaacgctctcccccaccc

SEQ ID NO: 5623738 - DNA, 25 bp, Homo sapien
cattaaagaaggcttcgggacactt

SEQ ID NO: 5623739 - DNA, 25 bp, Homo sapien
cagcctccagtcccctagattttca

SEQ ID NO: 5623740 - DNA, 25 bp, Homo sapien
cccccaaacccactcatcgcattta

SEQ ID NO: 5623741 - DNA, 25 bp, Homo sapien
acttccaggattcccccttggcacc

SEQ ID NO: 5623742 - DNA, 25 bp, Homo sapien
tcacagttgcaacctcgccccccaa

SEQ ID NO: 5623743 - DNA, 25 bp, Homo sapien
gtgccgacctcgggctctagttagc

SEQ ID NO: 5623744 - DNA, 25 bp, Homo sapien
gcccacaaagcatcacagttgcaac

SEQ ID NO: 5623745 - DNA, 25 bp, Homo sapien
tatccgtaagttaggtttgcccaca

SEQ ID NO: 5623746 - DNA, 25 bp, Homo sapien
tagccgaatccctacggcggactgc

SEQ ID NO: 5623747 - DNA, 25 bp, Homo sapien
aattgagacccccggcctatccgta

SEQ ID NO: 5623748 - DNA, 25 bp, Homo sapien
aggggaagatctaacaaaagaaaca

SEQ ID NO: 5623749 - DNA, 25 bp, Homo sapien
ctgttatagccctgggagcaggtca

SEQ ID NO: 5623750 - DNA, 25 bp, Homo sapien
tttcccctcggaggatgtgaccttc

SEQ ID NO: 5623751 - DNA, 25 bp, Homo sapien
tgacacaagggaaatgctcccctca

SEQ ID NO: 5623752 - DNA, 25 bp, Homo sapien
gttactcctgacacaagggaaatgc

SEQ ID NO: 5623753 - DNA, 25 bp, Homo sapien
ctcatttgctagctgaggaggatat

SEQ ID NO: 5623754 - DNA, 25 bp, Homo sapien
attagatatggtcatgtagattctc

SEQ ID NO: 5623755 - DNA, 25 bp, Homo sapien
atagaatccgtgggccagaataaat

SEQ ID NO: 5623756 - DNA, 25 bp, Homo sapien
ggaggatatcaagagacactgacct

SEQ ID NO: 5623757 - DNA, 25 bp, Homo sapien
tcggaggatgtgaccttccactccc

SEQ ID NO: 5623758 - DNA, 25 bp, Homo sapien
ccctaacagaccacatagaatccgt

SEQ ID NO: 5623759 - DNA, 25 bp, Homo sapien
tataaatatgcataagcaggtatat

SEQ ID NO: 5623760 - DNA, 25 bp, Homo sapien
acatgaaagttaatatggacacatc

SEQ ID NO: 5623761 - DNA, 25 bp, Homo sapien
atggacacatcaatcactgcagtaa

SEQ ID NO: 5623762 - DNA, 25 bp, Homo sapien
taagaactgatgccacactgaattt

SEQ ID NO: 5623763 - DNA, 25 bp, Homo sapien
atcaaaattctgagtggagaaatgt

SEQ ID NO: 5623764 - DNA, 25 bp, Homo sapien
ataatgaatgtatctgtatatgcat

SEQ ID NO: 5623765 - DNA, 25 bp, Homo sapien
aaagttaaagcaagtcatattagtc

SEQ ID NO: 5623766 - DNA, 25 bp, Homo sapien
taagggactaggatgatcaaaattc

SEQ ID NO: 5623767 - DNA, 25 bp, Homo sapien
ctgaatctgcaggctaatctttctc

SEQ ID NO: 5623768 - DNA, 25 bp, Homo sapien
agtattaagaactgatgccacactg

SEQ ID NO: 5623769 - DNA, 25 bp, Homo sapien
actgtgttttgacttgacccatatt

SEQ ID NO: 5623770 - DNA, 25 bp, Homo sapien
ccatataagaggctggcaaactagg

SEQ ID NO: 5623771 - DNA, 25 bp, Homo sapien
gcctaaaatgctatcagggccttta

SEQ ID NO: 5623772 - DNA, 25 bp, Homo sapien
tctgttatagttgagagtggctgga

SEQ ID NO: 5623773 - DNA, 25 bp, Homo sapien
atggctaacccacaacaaaagtata

SEQ ID NO: 5623774 - DNA, 25 bp, Homo sapien
atcagtgtccatataagaggctggc

SEQ ID NO: 5623775 - DNA, 25 bp, Homo sapien
catgtataaaacagacctatgggtc

SEQ ID NO: 5623776 - DNA, 25 bp, Homo sapien
aatgagctcagtgttttcctgccat

SEQ ID NO: 5623777 - DNA, 25 bp, Homo sapien
aaggcaatggcaaagattcataatt

SEQ ID NO: 5623778 - DNA, 25 bp, Homo sapien
gggctatgggcccactccacagtct

SEQ ID NO: 5623779 - DNA, 25 bp, Homo sapien
tgtttcccagaaacgcagaaggcaa

SEQ ID NO: 5623780 - DNA, 25 bp, Homo sapien
gtaggtcctcaaactaagagctgtt

SEQ ID NO: 5623781 - DNA, 25 bp, Homo sapien
agctgtcctaccttcatgggaactg

SEQ ID NO: 5623782 - DNA, 25 bp, Homo sapien
cgatgacctgccagatataccagtc

SEQ ID NO: 5623783 - DNA, 25 bp, Homo sapien
ctgaaaagtgagtaatatcttcatc

SEQ ID NO: 5623784 - DNA, 25 bp, Homo sapien
caaaggcgtactcatcaggtaaacc

SEQ ID NO: 5623785 - DNA, 25 bp, Homo sapien
ataccagtcttccttccgagaggtt

SEQ ID NO: 5623786 - DNA, 25 bp, Homo sapien
ggcagagaacaaatagtagtgttgc

SEQ ID NO: 5623787 - DNA, 25 bp, Homo sapien
accttcatgggaactgaaagctgtg

SEQ ID NO: 5623788 - DNA, 25 bp, Homo sapien
ggatgctgtactggtcgatgacctg

SEQ ID NO: 5623789 - DNA, 25 bp, Homo sapien
ctcaaaccaacagatggtgttgatg

SEQ ID NO: 5623790 - DNA, 25 bp, Homo sapien
ggttgtgacaaaggcgtactcatca

SEQ ID NO: 5623791 - DNA, 25 bp, Homo sapien
tttcctcaccggactgtgtgctggt

SEQ ID NO: 5623792 - DNA, 25 bp, Homo sapien
accatattatcctaggcaatgttcc

SEQ ID NO: 5623793 - DNA, 25 bp, Homo sapien
catggctatgttctctaattactcc

SEQ ID NO: 5623794 - DNA, 25 bp, Homo sapien
aaaacagaaagattatgcaatactt

SEQ ID NO: 5623795 - DNA, 25 bp, Homo sapien
atgatataacttatgatcctcaccc

SEQ ID NO: 5623796 - DNA, 25 bp, Homo sapien
attgattccaggttcttgcagtaat

SEQ ID NO: 5623797 - DNA, 25 bp, Homo sapien
ttgtacctgatcatatggatatacc

SEQ ID NO: 5623798 - DNA, 25 bp, Homo sapien
ttgcagtaatcagacagataaaaga

SEQ ID NO: 5623799 - DNA, 25 bp, Homo sapien
tcacaaaccacagctataccatatt

SEQ ID NO: 5623800 - DNA, 25 bp, Homo sapien
ataccataaatcacaaaccacagct

SEQ ID NO: 5623801 - DNA, 25 bp, Homo sapien
gatcctcaccctaacatggctatgt

SEQ ID NO: 5623802 - DNA, 25 bp, Homo sapien
ctttaatactggtgcttggacagtg

SEQ ID NO: 5623803 - DNA, 25 bp, Homo sapien
acatactgaaagaagcataagcgag

SEQ ID NO: 5623804 - DNA, 25 bp, Homo sapien
aggcccttgcgtcctagtagcaggc

SEQ ID NO: 5623805 - DNA, 25 bp, Homo sapien
gaccatgctttggagagccacggta

SEQ ID NO: 5623806 - DNA, 25 bp, Homo sapien
gtctggggctgaaaaacttcttgct

SEQ ID NO: 5623807 - DNA, 25 bp, Homo sapien
acgaggaatcaaacagaccacaaca

SEQ ID NO: 5623808 - DNA, 25 bp, Homo sapien
cccgtctggactgtcccaggctggg

SEQ ID NO: 5623809 - DNA, 25 bp, Homo sapien
gctactccagcaaaataacgggcac

SEQ ID NO: 5623810 - DNA, 25 bp, Homo sapien
gacacgacagtaacctcatggcttt

SEQ ID NO: 5623811 - DNA, 25 bp, Homo sapien
aacgggcacaaatgacagctttgac

SEQ ID NO: 5623812 - DNA, 25 bp, Homo sapien
ggcaccgtaatggcactggtgtgac

SEQ ID NO: 5623813 - DNA, 25 bp, Homo sapien
ggggctacagcacacgctgctactc

SEQ ID NO: 5623814 - DNA, 25 bp, Homo sapien
tttcccatgtccctcacaagatgac

SEQ ID NO: 5623815 - DNA, 25 bp, Homo sapien
tagataaaaggttgctctgacattt

SEQ ID NO: 5623816 - DNA, 25 bp, Homo sapien
caccagagagacactaacaaaggtc

SEQ ID NO: 5623817 - DNA, 25 bp, Homo sapien
gagagacactaacaaaggtcctccc

SEQ ID NO: 5623818 - DNA, 25 bp, Homo sapien
gatgacagttgtagcgtagataaga

SEQ ID NO: 5623819 - DNA, 25 bp, Homo sapien
aacgtctagataaaaggttgctctg

SEQ ID NO: 5623820 - DNA, 25 bp, Homo sapien
ttttcggccaagcatggtgtctcat

SEQ ID NO: 5623821 - DNA, 25 bp, Homo sapien
cccaactctttgggtgggctgaagc

SEQ ID NO: 5623822 - DNA, 25 bp, Homo sapien
ccccattatatcaccagagagacac

SEQ ID NO: 5623823 - DNA, 25 bp, Homo sapien
cacaagatgacagttgtagcgtaga

SEQ ID NO: 5623824 - DNA, 25 bp, Homo sapien
aattaataatgattttcggccaagc

SEQ ID NO: 5623825 - DNA, 25 bp, Homo sapien
agatgccaaactcaaagggctttag

SEQ ID NO: 5623826 - DNA, 25 bp, Homo sapien
aagcaagaagtcattttcagggaaa

SEQ ID NO: 5623827 - DNA, 25 bp, Homo sapien
aaaggatcagcctcttggtaaaacc

SEQ ID NO: 5623828 - DNA, 25 bp, Homo sapien
gaagttttggggagattagacatat

SEQ ID NO: 5623829 - DNA, 25 bp, Homo sapien
tgtgtcaaacataagcaagaagtca

SEQ ID NO: 5623830 - DNA, 25 bp, Homo sapien
ttgctcaccaagttatgtttggcac

SEQ ID NO: 5623831 - DNA, 25 bp, Homo sapien
tgtcagtttgtggcaaaatgggcaa

SEQ ID NO: 5623832 - DNA, 25 bp, Homo sapien
tggtcttaagaggcttgggttccag

SEQ ID NO: 5623833 - DNA, 25 bp, Homo sapien
acagtacttggaaatgtttgcaggt

SEQ ID NO: 5623834 - DNA, 25 bp, Homo sapien
ggaaaaaacttccctctagagctca

SEQ ID NO: 5623835 - DNA, 25 bp, Homo sapien
tagctttgaagttttggggagatta

SEQ ID NO: 5623836 - DNA, 25 bp, Homo sapien
attaatacattaacagagggccagg

SEQ ID NO: 5623837 - DNA, 25 bp, Homo sapien
cataaaattgggactggcaaaaaag

SEQ ID NO: 5623838 - DNA, 25 bp, Homo sapien
tcaacagaagagactgcttactgtt

SEQ ID NO: 5623839 - DNA, 25 bp, Homo sapien
tcttgaaaataactgtgtcacagct

SEQ ID NO: 5623840 - DNA, 25 bp, Homo sapien
agtacacattaaaacctaagtggtc

SEQ ID NO: 5623841 - DNA, 25 bp, Homo sapien
ctacccctgacacagcaagaccaac

SEQ ID NO: 5623842 - DNA, 25 bp, Homo sapien
gaaaacaactgcataaaattgggac

SEQ ID NO: 5623843 - DNA, 25 bp, Homo sapien
agtcaagatgtacctctgctacccc

SEQ ID NO: 5623844 - DNA, 25 bp, Homo sapien
tacgcatgaagtagtatattacatc

SEQ ID NO: 5623845 - DNA, 25 bp, Homo sapien
aagaaactgtggtaagtcaagatgt

SEQ ID NO: 5623846 - DNA, 25 bp, Homo sapien
cacagcttgccaggagtaaagaata

SEQ ID NO: 5623847 - DNA, 25 bp, Homo sapien
gtggctgcagtgtagtgcacatgta

SEQ ID NO: 5623848 - DNA, 25 bp, Homo sapien
ctcactgcagccgacatttttgttg

SEQ ID NO: 5623849 - DNA, 25 bp, Homo sapien
aggcagaaacaatagaaaccccagg

SEQ ID NO: 5623850 - DNA, 25 bp, Homo sapien
ctgtgcccagccaataatgctaata

SEQ ID NO: 5623851 - DNA, 25 bp, Homo sapien
gtgcacatgtagtaaggacagctca

SEQ ID NO: 5623852 - DNA, 25 bp, Homo sapien
ctaatatctaaaggatgagaaaagc

SEQ ID NO: 5623853 - DNA, 25 bp, Homo sapien
ctcatcactgggtgaaagcaaatgg

SEQ ID NO: 5623854 - DNA, 25 bp, Homo sapien
atagaaaccccagggaataagtcac

SEQ ID NO: 5623855 - DNA, 25 bp, Homo sapien
gcaggtaagatgctcatcactgggt

SEQ ID NO: 5623856 - DNA, 25 bp, Homo sapien
agggaataagtcacacagtgtggct

SEQ ID NO: 5623857 - DNA, 25 bp, Homo sapien
ggtgaaagcaaatggactagttaca

SEQ ID NO: 5623858 - DNA, 25 bp, Homo sapien
attcatatgacggaagagtatttat

SEQ ID NO: 5623859 - DNA, 25 bp, Homo sapien
ggaatgaactcctgcaatacccaat

SEQ ID NO: 5623860 - DNA, 25 bp, Homo sapien
aatagccataaactgggaacaaccc

SEQ ID NO: 5623861 - DNA, 25 bp, Homo sapien
ctaagacataagttagggaatgggc

SEQ ID NO: 5623862 - DNA, 25 bp, Homo sapien
ttggtctaagacataagttagggaa

SEQ ID NO: 5623863 - DNA, 25 bp, Homo sapien
gcaatacccaataagatggatgaat

SEQ ID NO: 5623864 - DNA, 25 bp, Homo sapien
tttattcttacatgagttctgcctc

SEQ ID NO: 5623865 - DNA, 25 bp, Homo sapien
agttagggaatgggcattaacatct

SEQ ID NO: 5623866 - DNA, 25 bp, Homo sapien
atgacggaagagtatttataaacaa

SEQ ID NO: 5623867 - DNA, 25 bp, Homo sapien
ttttgacatacataagaacttaata

SEQ ID NO: 5623868 - DNA, 25 bp, Homo sapien
caacaaaccagtatacaaatgaata

SEQ ID NO: 5623869 - DNA, 25 bp, Homo sapien
cagttggaacagaaacccgttgttc

SEQ ID NO: 5623870 - DNA, 25 bp, Homo sapien
catggttttgggacttgttgactca

SEQ ID NO: 5623871 - DNA, 25 bp, Homo sapien
accgtcaataatggcctgctggcaa

SEQ ID NO: 5623872 - DNA, 25 bp, Homo sapien
tggttccaggaagtctggaggcata

SEQ ID NO: 5623873 - DNA, 25 bp, Homo sapien
ggcatatgtgccggtcacagagttc

SEQ ID NO: 5623874 - DNA, 25 bp, Homo sapien
cccaagcagactttgtgtgagcaac

SEQ ID NO: 5623875 - DNA, 25 bp, Homo sapien
tttctcagggattcttcgagcggga

SEQ ID NO: 5623876 - DNA, 25 bp, Homo sapien
gcagtctttacagggcaaagtggcg

SEQ ID NO: 5623877 - DNA, 25 bp, Homo sapien
tggactcctaattgggagagagatc

SEQ ID NO: 5623878 - DNA, 25 bp, Homo sapien
tctggattgaagacccaagcagact

SEQ ID NO: 5623879 - DNA, 25 bp, Homo sapien
acagagttcttaatggcccaccgtc

SEQ ID NO: 5623880 - DNA, 25 bp, Homo sapien
tcctagcaaaggatagccacttttg

SEQ ID NO: 5623881 - DNA, 25 bp, Homo sapien
tgactatgttagagagattgtgaaa

SEQ ID NO: 5623882 - DNA, 25 bp, Homo sapien
gtatgaggttgtggatttgactatg

SEQ ID NO: 5623883 - DNA, 25 bp, Homo sapien
ggagctaatgaaaaccaagctttca

SEQ ID NO: 5623884 - DNA, 25 bp, Homo sapien
accttgggcatatgctgaagagaaa

SEQ ID NO: 5623885 - DNA, 25 bp, Homo sapien
gtcagtagactgtcagcccagagag

SEQ ID NO: 5623886 - DNA, 25 bp, Homo sapien
gagattgtgaaaactgaatacaggt

SEQ ID NO: 5623887 - DNA, 25 bp, Homo sapien
ttaggaactgatagtttggagctaa

SEQ ID NO: 5623888 - DNA, 25 bp, Homo sapien
cattcagaatagcttcaggctgctc

SEQ ID NO: 5623889 - DNA, 25 bp, Homo sapien
gagagggacatcaagtgctttccaa

SEQ ID NO: 5623890 - DNA, 25 bp, Homo sapien
acaaaaaatcctggagagattaatt

SEQ ID NO: 5623891 - DNA, 25 bp, Homo sapien
gagtagctagagtacagaaataaga

SEQ ID NO: 5623892 - DNA, 25 bp, Homo sapien
tataaaaaataaattctggacaatc

SEQ ID NO: 5623893 - DNA, 25 bp, Homo sapien
tattacctatgagtagctagagtac

SEQ ID NO: 5623894 - DNA, 25 bp, Homo sapien
attctggacaatcaaaaagtaattt

SEQ ID NO: 5623895 - DNA, 25 bp, Homo sapien
tggctattcacaggcacaatcccac

SEQ ID NO: 5623896 - DNA, 25 bp, Homo sapien
acattaaataacttactgccagcaa

SEQ ID NO: 5623897 - DNA, 25 bp, Homo sapien
tagcaaaattagtactcaatgtgga

SEQ ID NO: 5623898 - DNA, 25 bp, Homo sapien
gccagcaatattaactagcaaaatt

SEQ ID NO: 5623899 - DNA, 25 bp, Homo sapien
ttgacctgctccactgaggattttt

SEQ ID NO: 5623900 - DNA, 25 bp, Homo sapien
ctatgagtagctagagtacagaaat

SEQ ID NO: 5623901 - DNA, 25 bp, Homo sapien
ttagtactcaatgtggatatcaaat

SEQ ID NO: 5623902 - DNA, 25 bp, Homo sapien
tgcttcccccaaaccagcattaccc

SEQ ID NO: 5623903 - DNA, 25 bp, Homo sapien
ttcgggaaatcatctatgcatgcac

SEQ ID NO: 5623904 - DNA, 25 bp, Homo sapien
atgtctgcgttgtatttaattctat

SEQ ID NO: 5623905 - DNA, 25 bp, Homo sapien
aaacagactattattgatgaacatc

SEQ ID NO: 5623906 - DNA, 25 bp, Homo sapien
tgctccctcccttcataccactgct

SEQ ID NO: 5623907 - DNA, 25 bp, Homo sapien
tacagtaaaaaggaatgctccctcc

SEQ ID NO: 5623908 - DNA, 25 bp, Homo sapien
ttgtttgaatatctttcgggaaatc

SEQ ID NO: 5623909 - DNA, 25 bp, Homo sapien
cttggatattcttggatatagccat

SEQ ID NO: 5623910 - DNA, 25 bp, Homo sapien
tgcatgcacagtgataggagtaaac

SEQ ID NO: 5623911 - DNA, 25 bp, Homo sapien
cacagtgataggagtaaacatacat

SEQ ID NO: 5623912 - DNA, 25 bp, Homo sapien
tctatgcatgcacagtgataggagt

SEQ ID NO: 5623913 - DNA, 25 bp, Homo sapien
cagcaatagtttaggacagaaagac

SEQ ID NO: 5623914 - DNA, 25 bp, Homo sapien
tgaaatagactggactcagacacca

SEQ ID NO: 5623915 - DNA, 25 bp, Homo sapien
taaaagtaattcaaccagagctgga

SEQ ID NO: 5623916 - DNA, 25 bp, Homo sapien
aaggcagcatcactcatcactcccc

SEQ ID NO: 5623917 - DNA, 25 bp, Homo sapien
tcagacaccaactaaaggcagcatc

SEQ ID NO: 5623918 - DNA, 25 bp, Homo sapien
tgaacagaactcaggcaaactaagt

SEQ ID NO: 5623919 - DNA, 25 bp, Homo sapien
aataccaagggatgacaacccgaag

SEQ ID NO: 5623920 - DNA, 25 bp, Homo sapien
ggggaagagacctgatttgacaaca

SEQ ID NO: 5623921 - DNA, 25 bp, Homo sapien
actttagtggtcagcagttgagcat

SEQ ID NO: 5623922 - DNA, 25 bp, Homo sapien
gatttgacaacaggatgaacagaac

SEQ ID NO: 5623923 - DNA, 25 bp, Homo sapien
aaagccaagaacaacactcaagctc

SEQ ID NO: 5623924 - DNA, 25 bp, Homo sapien
gaacaccacattgaatagagggctt

SEQ ID NO: 5623925 - DNA, 25 bp, Homo sapien
aataggatactacagcaatgcttct

SEQ ID NO: 5623926 - DNA, 25 bp, Homo sapien
attgaatccttaggcctggagtggg

SEQ ID NO: 5623927 - DNA, 25 bp, Homo sapien
ataaagccaaagttgcacaagtgat

SEQ ID NO: 5623928 - DNA, 25 bp, Homo sapien
aatagagggcttaataccatgcttc

SEQ ID NO: 5623929 - DNA, 25 bp, Homo sapien
aataatgtgacaaccaagagaatgg

SEQ ID NO: 5623930 - DNA, 25 bp, Homo sapien
tagtaacttccaagacagcaaagat

SEQ ID NO: 5623931 - DNA, 25 bp, Homo sapien
tagtagttaaaatgaccaggatgtt

SEQ ID NO: 5623932 - DNA, 25 bp, Homo sapien
caagagaatggtctcaagtagcatt

SEQ ID NO: 5623933 - DNA, 25 bp, Homo sapien
ccaatgctactgatgtgaacaccac

SEQ ID NO: 5623934 - DNA, 25 bp, Homo sapien
gactaaagtgtggaaaataggatac

SEQ ID NO: 5623935 - DNA, 25 bp, Homo sapien
gttgtattcctaggcacctgaaatg

SEQ ID NO: 5623936 - DNA, 25 bp, Homo sapien
gaagattggcatatagaacagtcat

SEQ ID NO: 5623937 - DNA, 25 bp, Homo sapien
tgttctagttaggctgagcatttac

SEQ ID NO: 5623938 - DNA, 25 bp, Homo sapien
actaaaatacaagctctatgagggc

SEQ ID NO: 5623939 - DNA, 25 bp, Homo sapien
agagagattcagtgacgaagattgg

SEQ ID NO: 5623940 - DNA, 25 bp, Homo sapien
ttgctatgttctagttaggctgagc

SEQ ID NO: 5623941 - DNA, 25 bp, Homo sapien
tcagtgacgaagattggcatataga

SEQ ID NO: 5623942 - DNA, 25 bp, Homo sapien
aatacaagctctatgagggcggtgt

SEQ ID NO: 5623943 - DNA, 25 bp, Homo sapien
gaacagtcatatagaaggaaagacc

SEQ ID NO: 5623944 - DNA, 25 bp, Homo sapien
gcttagtgttgtattcctaggcacc

SEQ ID NO: 5623945 - DNA, 25 bp, Homo sapien
tattaacatgagcatttgaagacag

SEQ ID NO: 5623946 - DNA, 25 bp, Homo sapien
aaaaatcaaggttggaagcacctat

SEQ ID NO: 5623947 - DNA, 25 bp, Homo sapien
caaggacaaatggcatgctcttcgt

SEQ ID NO: 5623948 - DNA, 25 bp, Homo sapien
ttgtaaactagagaggacaaaggaa

SEQ ID NO: 5623949 - DNA, 25 bp, Homo sapien
ccctaaaaagtgttgtgagtgcacc

SEQ ID NO: 5623950 - DNA, 25 bp, Homo sapien
atcatggaaaggtgcctggtctatt

SEQ ID NO: 5623951 - DNA, 25 bp, Homo sapien
tggtgaaccggcctgtatcttgtgt

SEQ ID NO: 5623952 - DNA, 25 bp, Homo sapien
ctggtctattttatggaggcaatca

SEQ ID NO: 5623953 - DNA, 25 bp, Homo sapien
ggaggcaatcataaaactgggtgtg

SEQ ID NO: 5623954 - DNA, 25 bp, Homo sapien
ccattggcctggcatcatggaaagg

SEQ ID NO: 5623955 - DNA, 25 bp, Homo sapien
agaaaagaggactagaatccctgtc

SEQ ID NO: 5623956 - DNA, 25 bp, Homo sapien
acaccctgcccattggcctggcatc

SEQ ID NO: 5623957 - DNA, 25 bp, Homo sapien
accctttcaagggagatcacagagc

SEQ ID NO: 5623958 - DNA, 25 bp, Homo sapien
ttgtattcctaactggggatacgtc

SEQ ID NO: 5623959 - DNA, 25 bp, Homo sapien
ccaaaggtcggattgcatttgtccc

SEQ ID NO: 5623960 - DNA, 25 bp, Homo sapien
acagagctctgactacacgccctag

SEQ ID NO: 5623961 - DNA, 25 bp, Homo sapien
agaggaatgtgtagatccaaaggtc

SEQ ID NO: 5623962 - DNA, 25 bp, Homo sapien
tgacacccattgaagcaagaggaat

SEQ ID NO: 5623963 - DNA, 25 bp, Homo sapien
tggggatacgtcttccagcaattcc

SEQ ID NO: 5623964 - DNA, 25 bp, Homo sapien
acagagagagctggttttctgtgac

SEQ ID NO: 5623965 - DNA, 25 bp, Homo sapien
tgcaagacaatgtttacagaaatcc

SEQ ID NO: 5623966 - DNA, 25 bp, Homo sapien
taactgctgcagagatctgggtgtt

SEQ ID NO: 5623967 - DNA, 25 bp, Homo sapien
acgccctagaccgaactttgcaagt

SEQ ID NO: 5623968 - DNA, 25 bp, Homo sapien
tgaaggtactattggtctgggaaac

SEQ ID NO: 5623969 - DNA, 25 bp, Homo sapien
ttctcaggtcaatcgctcacacttt

SEQ ID NO: 5623970 - DNA, 25 bp, Homo sapien
ccttttcaataaacgccccacgctg

SEQ ID NO: 5623971 - DNA, 25 bp, Homo sapien
ccttttgaaggtactattggtctgg

SEQ ID NO: 5623972 - DNA, 25 bp, Homo sapien
agataccaatggcttgctaaaagaa

SEQ ID NO: 5623973 - DNA, 25 bp, Homo sapien
atgtctttggagcttaaaccccttg

SEQ ID NO: 5623974 - DNA, 25 bp, Homo sapien
gcatgcactgtatgggaaagcagtc

SEQ ID NO: 5623975 - DNA, 25 bp, Homo sapien
tccgcagggcctccctaatgtcttt

SEQ ID NO: 5623976 - DNA, 25 bp, Homo sapien
gagcccggcatgcactgtatgggaa

SEQ ID NO: 5623977 - DNA, 25 bp, Homo sapien
atgggaaagcagtccaccttgttac

SEQ ID NO: 5623978 - DNA, 25 bp, Homo sapien
caataaacgccccacgctgatagca

SEQ ID NO: 5623979 - DNA, 25 bp, Homo sapien
gaatgtccaacaacagtaagacagt

SEQ ID NO: 5623980 - DNA, 25 bp, Homo sapien
attctggatataactaaaaacacaa

SEQ ID NO: 5623981 - DNA, 25 bp, Homo sapien
attaacaaacaattctggatataac

SEQ ID NO: 5623982 - DNA, 25 bp, Homo sapien
tagaaaaaacttctgaatgtccaac

SEQ ID NO: 5623983 - DNA, 25 bp, Homo sapien
cagtaagacagttgcataaattgct

SEQ ID NO: 5623984 - DNA, 25 bp, Homo sapien
atataactaaaaacacaaattcacc

SEQ ID NO: 5623985 - DNA, 25 bp, Homo sapien
tctgaatgtccaacaacagtaagac

SEQ ID NO: 5623986 - DNA, 25 bp, Homo sapien
ccaacaacagtaagacagttgcata

SEQ ID NO: 5623987 - DNA, 25 bp, Homo sapien
tgtccaacaacagtaagacagttgc

SEQ ID NO: 5623988 - DNA, 25 bp, Homo sapien
aacagtaagacagttgcataaattg

SEQ ID NO: 5623989 - DNA, 25 bp, Homo sapien
aaattagaaaaaacttctgaatgtc

SEQ ID NO: 5623990 - DNA, 25 bp, Homo sapien
ctcttggaacaagtctcctgccttc

SEQ ID NO: 5623991 - DNA, 25 bp, Homo sapien
tgtggagacttgtgaatactatatc

SEQ ID NO: 5623992 - DNA, 25 bp, Homo sapien
aaaccagaggaataatactgttttg

SEQ ID NO: 5623993 - DNA, 25 bp, Homo sapien
ggctcctatataaccctggcattag

SEQ ID NO: 5623994 - DNA, 25 bp, Homo sapien
tgtgccctgaatcacagacatcctt

SEQ ID NO: 5623995 - DNA, 25 bp, Homo sapien
catccatggctcactggtcaatgtt

SEQ ID NO: 5623996 - DNA, 25 bp, Homo sapien
aatttaatcctgaagacaaacttac

SEQ ID NO: 5623997 - DNA, 25 bp, Homo sapien
catttgttctcactcaggctcctat

SEQ ID NO: 5623998 - DNA, 25 bp, Homo sapien
gtactttgcaggagtatagactgta

SEQ ID NO: 5623999 - DNA, 25 bp, Homo sapien
ttccactctggatgtgttggtgagg

SEQ ID NO: 5624000 - DNA, 25 bp, Homo sapien
ccttttgaggatccttagttccaac

SEQ ID NO: 5624001 - DNA, 25 bp, Homo sapien
ctatccagtgccaggtcctggaggc

SEQ ID NO: 5624002 - DNA, 25 bp, Homo sapien
gtgctgggaggtgccctccccttct

SEQ ID NO: 5624003 - DNA, 25 bp, Homo sapien
cccaggctggtttttcagtgggggc

SEQ ID NO: 5624004 - DNA, 25 bp, Homo sapien
gaggaagcagtcattgtcaggtgca

SEQ ID NO: 5624005 - DNA, 25 bp, Homo sapien
ggtgccaaggctttcggtctgccct

SEQ ID NO: 5624006 - DNA, 25 bp, Homo sapien
cagtcattgtcaggtgcagtttccc

SEQ ID NO: 5624007 - DNA, 25 bp, Homo sapien
gcaggaacaagtgcctcatgtagcc

SEQ ID NO: 5624008 - DNA, 25 bp, Homo sapien
gctctgaggttaaaggacacattct

SEQ ID NO: 5624009 - DNA, 25 bp, Homo sapien
cagcaaacatttggcacctatccag

SEQ ID NO: 5624010 - DNA, 25 bp, Homo sapien
agtttcccttctgcaggaacaagtg

SEQ ID NO: 5624011 - DNA, 25 bp, Homo sapien
tctgccctctcagggccacccaggc

SEQ ID NO: 5624012 - DNA, 25 bp, Homo sapien
tcattgctcggaaaagatagatagc

SEQ ID NO: 5624013 - DNA, 25 bp, Homo sapien
gtaacattcagagaaaggtgggata

SEQ ID NO: 5624014 - DNA, 25 bp, Homo sapien
atcctgtctaaccaggaagaaagag

SEQ ID NO: 5624015 - DNA, 25 bp, Homo sapien
taacagagaagaagtaagctgatga

SEQ ID NO: 5624016 - DNA, 25 bp, Homo sapien
ttcttagatgcagcctgggataggg

SEQ ID NO: 5624017 - DNA, 25 bp, Homo sapien
aagtgtgatgttcaaaaaacaatgc

SEQ ID NO: 5624018 - DNA, 25 bp, Homo sapien
ttctgaaagtagactctctgaaaat

SEQ ID NO: 5624019 - DNA, 25 bp, Homo sapien
gaaaagatagatagcatattccctt

SEQ ID NO: 5624020 - DNA, 25 bp, Homo sapien
gtacatgatgtattcctgaaggctt

SEQ ID NO: 5624021 - DNA, 25 bp, Homo sapien
gtgtgtaagtgtgtatgagaaagac

SEQ ID NO: 5624022 - DNA, 25 bp, Homo sapien
acttctatgaccactggagacagca

SEQ ID NO: 5624023 - DNA, 25 bp, Homo sapien
cactgaagcttgtgcgtgtgtgagt

SEQ ID NO: 5624024 - DNA, 25 bp, Homo sapien
gtgaccctggagcacttaccatgtg

SEQ ID NO: 5624025 - DNA, 25 bp, Homo sapien
gggtgataactgtatgctggaaaca

SEQ ID NO: 5624026 - DNA, 25 bp, Homo sapien
aacatcttaagggacactgaagctt

SEQ ID NO: 5624027 - DNA, 25 bp, Homo sapien
tgtgacaggtgttatgctaagcatg

SEQ ID NO: 5624028 - DNA, 25 bp, Homo sapien
tactgacttgggcaaggaatgtgaa

SEQ ID NO: 5624029 - DNA, 25 bp, Homo sapien
atgatggaaattaatctgtactgac

SEQ ID NO: 5624030 - DNA, 25 bp, Homo sapien
atgctaagcatgttgtatgcattcc

SEQ ID NO: 5624031 - DNA, 25 bp, Homo sapien
gtataaagtatgagttggaaatgat

SEQ ID NO: 5624032 - DNA, 25 bp, Homo sapien
cttaccatgtgacaggtgttatgct

SEQ ID NO: 5624033 - DNA, 25 bp, Homo sapien
ttcattgaatgacagctacctatat

SEQ ID NO: 5624034 - DNA, 25 bp, Homo sapien
ctcatcacgaagttatagacgcgga

SEQ ID NO: 5624035 - DNA, 25 bp, Homo sapien
gacggagatcaggaactcatcacga

SEQ ID NO: 5624036 - DNA, 25 bp, Homo sapien
agaagaaacgactgtctctggtgtg

SEQ ID NO: 5624037 - DNA, 25 bp, Homo sapien
atagacgcggataatcccacaaacg

SEQ ID NO: 5624038 - DNA, 25 bp, Homo sapien
cagttcatccgagtgactgaggagg

SEQ ID NO: 5624039 - DNA, 25 bp, Homo sapien
cagtaagatgaagaagcgattccta

SEQ ID NO: 5624040 - DNA, 25 bp, Homo sapien
ctggaacaaaccctcggatgacttc

SEQ ID NO: 5624041 - DNA, 25 bp, Homo sapien
aacgtcgcatcaaaacttcagtaag

SEQ ID NO: 5624042 - DNA, 25 bp, Homo sapien
acggccacaaaacccatgcaacctc

SEQ ID NO: 5624043 - DNA, 25 bp, Homo sapien
aatccaaacacaccaggaagacacc

SEQ ID NO: 5624044 - DNA, 25 bp, Homo sapien
cccaagttttggaagacggagatca

SEQ ID NO: 5624045 - DNA, 25 bp, Homo sapien
tctcctaggcatcaagacattaaaa

SEQ ID NO: 5624046 - DNA, 25 bp, Homo sapien
gaggatcaagaatcacatgtagtga

SEQ ID NO: 5624047 - DNA, 25 bp, Homo sapien
tggatgtgtccagcgcctgtcacag

SEQ ID NO: 5624048 - DNA, 25 bp, Homo sapien
ccagcgcctgtcacaggagaaagga

SEQ ID NO: 5624049 - DNA, 25 bp, Homo sapien
aggccagaccacacactagcccctg

SEQ ID NO: 5624050 - DNA, 25 bp, Homo sapien
atggaggcaaagtgcagttttctga

SEQ ID NO: 5624051 - DNA, 25 bp, Homo sapien
gaccacacactagcccctgtatctc

SEQ ID NO: 5624052 - DNA, 25 bp, Homo sapien
aatgtggagctgcaagtaatctaag

SEQ ID NO: 5624053 - DNA, 25 bp, Homo sapien
cacatgtagtgaacagatttaccta

SEQ ID NO: 5624054 - DNA, 25 bp, Homo sapien
tagcccctgtatctcctaggcatca

SEQ ID NO: 5624055 - DNA, 25 bp, Homo sapien
cagttttctgaaatgtggagctgca

SEQ ID NO: 5624056 - DNA, 25 bp, Homo sapien
gtcgattgttacagaccttccgggt

SEQ ID NO: 5624057 - DNA, 25 bp, Homo sapien
acccggaaggtctgtaacaatcgac

SEQ ID NO: 5624058 - DNA, 25 bp, Homo sapien
atacagaagtgaaacagacatgatc

SEQ ID NO: 5624059 - DNA, 25 bp, Homo sapien
attggggaggcctctatgatttttc

SEQ ID NO: 5624060 - DNA, 25 bp, Homo sapien
aaaaggccagggctatccctaagct

SEQ ID NO: 5624061 - DNA, 25 bp, Homo sapien
caggaagctaagaagtccacacctt

SEQ ID NO: 5624062 - DNA, 25 bp, Homo sapien
cctatgcatttgtattggggaggcc

SEQ ID NO: 5624063 - DNA, 25 bp, Homo sapien
cacccccaagtcacctccaaaaggc

SEQ ID NO: 5624064 - DNA, 25 bp, Homo sapien
aatttggcaaatggtacgaaaagga

SEQ ID NO: 5624065 - DNA, 25 bp, Homo sapien
gacatgatccctgcccttgagaagc

SEQ ID NO: 5624066 - DNA, 25 bp, Homo sapien
agaaaggagaagttactgctgactc

SEQ ID NO: 5624067 - DNA, 25 bp, Homo sapien
attatatgacagatgccaaggatac

SEQ ID NO: 5624068 - DNA, 25 bp, Homo sapien
gggctggattgatgtgacagctgtc

SEQ ID NO: 5624069 - DNA, 25 bp, Homo sapien
taggggaaaatcttgctgttcaacc

SEQ ID NO: 5624070 - DNA, 25 bp, Homo sapien
caatgcacaaaggactaacacacca

SEQ ID NO: 5624071 - DNA, 25 bp, Homo sapien
aacacaccatgcataggggaaaatc

SEQ ID NO: 5624072 - DNA, 25 bp, Homo sapien
atgacatgccggctcccccttcact

SEQ ID NO: 5624073 - DNA, 25 bp, Homo sapien
tgtcgtcctcgcaatagtgagtgag

SEQ ID NO: 5624074 - DNA, 25 bp, Homo sapien
aaaaggtgacctatgatactgttcc

SEQ ID NO: 5624075 - DNA, 25 bp, Homo sapien
tctgccaaggctgtaagtttcctga

SEQ ID NO: 5624076 - DNA, 25 bp, Homo sapien
gctgatgctggcaatgcacttcttg

SEQ ID NO: 5624077 - DNA, 25 bp, Homo sapien
aaatctgaaatctaggctaagttcc

SEQ ID NO: 5624078 - DNA, 25 bp, Homo sapien
tccccttggtactgtcgtcctcgca

SEQ ID NO: 5624079 - DNA, 25 bp, Homo sapien
ctataatcctcagtgctggaggtgg

SEQ ID NO: 5624080 - DNA, 25 bp, Homo sapien
aagtaatttggttaaaagtgctgta

SEQ ID NO: 5624081 - DNA, 25 bp, Homo sapien
tggttaaaagtgctgtataaaatga

SEQ ID NO: 5624082 - DNA, 25 bp, Homo sapien
atgtaagtgccagccagtactggag

SEQ ID NO: 5624083 - DNA, 25 bp, Homo sapien
atgaaggtgaatgagaggttttcat

SEQ ID NO: 5624084 - DNA, 25 bp, Homo sapien
gccagtactggagctaacattagaa

SEQ ID NO: 5624085 - DNA, 25 bp, Homo sapien
taaagttagtaattggttctgttga

SEQ ID NO: 5624086 - DNA, 25 bp, Homo sapien
taggtacagtgtagtgaatgtaagt

SEQ ID NO: 5624087 - DNA, 25 bp, Homo sapien
gaatgtaagtgccagccagtactgg

SEQ ID NO: 5624088 - DNA, 25 bp, Homo sapien
tataggtacagtgtagtgaatgtaa

SEQ ID NO: 5624089 - DNA, 25 bp, Homo sapien
gtacagtgtagtgaatgtaagtgcc

SEQ ID NO: 5624090 - DNA, 25 bp, Homo sapien
tgccagccagtactggagctaacat

SEQ ID NO: 5624091 - DNA, 25 bp, Homo sapien
tggtgtcctcgatgaaaatggtagt

SEQ ID NO: 5624092 - DNA, 25 bp, Homo sapien
gttaggagacatatcttggctgttt

SEQ ID NO: 5624093 - DNA, 25 bp, Homo sapien
cacagtggatttcttacttgcctca

SEQ ID NO: 5624094 - DNA, 25 bp, Homo sapien
cttgcctcagaaacaaagtaaaaca

SEQ ID NO: 5624095 - DNA, 25 bp, Homo sapien
taagatctataaacagtagagtttc

SEQ ID NO: 5624096 - DNA, 25 bp, Homo sapien
tcattctgttgttaggagacatatc

SEQ ID NO: 5624097 - DNA, 25 bp, Homo sapien
cttggaatgtctgcatgcgcacgct

SEQ ID NO: 5624098 - DNA, 25 bp, Homo sapien
ctttcaatcaaaggaactacaagca

SEQ ID NO: 5624099 - DNA, 25 bp, Homo sapien
ctgcttacagtccgtgatggtgtcc

SEQ ID NO: 5624100 - DNA, 25 bp, Homo sapien
ggtcacttggaatgtctgcatgcgc

SEQ ID NO: 5624101 - DNA, 25 bp, Homo sapien
caccagaatataacaccaatgacag

SEQ ID NO: 5624102 - DNA, 25 bp, Homo sapien
ataagagacacacagtaaactaaca

SEQ ID NO: 5624103 - DNA, 25 bp, Homo sapien
tgaaactaactcagtggatccaact

SEQ ID NO: 5624104 - DNA, 25 bp, Homo sapien
tgtaacaagtccttgggttagagac

SEQ ID NO: 5624105 - DNA, 25 bp, Homo sapien
taaaatggtaggactgttttcagtg

SEQ ID NO: 5624106 - DNA, 25 bp, Homo sapien
ctcatctttaagacatggatagggc

SEQ ID NO: 5624107 - DNA, 25 bp, Homo sapien
cccccgccccaatgaaactaactca

SEQ ID NO: 5624108 - DNA, 25 bp, Homo sapien
tgggttagagactctgtttggtctt

SEQ ID NO: 5624109 - DNA, 25 bp, Homo sapien
tcccagctagctttcggcaaaattg

SEQ ID NO: 5624110 - DNA, 25 bp, Homo sapien
tctaggtcagaagagatttcaatct

SEQ ID NO: 5624111 - DNA, 25 bp, Homo sapien
aactgcaacttgtgatgatcctatt

SEQ ID NO: 5624112 - DNA, 25 bp, Homo sapien
ctgaaatctgctgaatgcctgaagt

SEQ ID NO: 5624113 - DNA, 25 bp, Homo sapien
acttggaatgaggcaacatcacttg

SEQ ID NO: 5624114 - DNA, 25 bp, Homo sapien
aaagagtctgacatatgtgtatttt

SEQ ID NO: 5624115 - DNA, 25 bp, Homo sapien
ttaccataataaagagtctgacata

SEQ ID NO: 5624116 - DNA, 25 bp, Homo sapien
atggtctacaaaactgacttggaat

SEQ ID NO: 5624117 - DNA, 25 bp, Homo sapien
aacaataaccatagaaaacaaagaa

SEQ ID NO: 5624118 - DNA, 25 bp, Homo sapien
tttaggaacaaaaatcagaagataa

SEQ ID NO: 5624119 - DNA, 25 bp, Homo sapien
gagggcctgaacatgccataggaag

SEQ ID NO: 5624120 - DNA, 25 bp, Homo sapien
agatgacctgttttgtgcttttacc

SEQ ID NO: 5624121 - DNA, 25 bp, Homo sapien
gaacatgccataggaagacttactt

SEQ ID NO: 5624122 - DNA, 25 bp, Homo sapien
aatgaggcaacatcacttgggattt

SEQ ID NO: 5624123 - DNA, 25 bp, Homo sapien
agcatttccacaaaaagatgacctg

SEQ ID NO: 5624124 - DNA, 25 bp, Homo sapien
atcaggtctgtgtaaggaccgtggg

SEQ ID NO: 5624125 - DNA, 25 bp, Homo sapien
atgtcagcctaaccatggtcagggc

SEQ ID NO: 5624126 - DNA, 25 bp, Homo sapien
agggaaattctgtctcgtggctgga

SEQ ID NO: 5624127 - DNA, 25 bp, Homo sapien
caaacccacaggccagggctattca

SEQ ID NO: 5624128 - DNA, 25 bp, Homo sapien
aaattatgaggagactgcttattac

SEQ ID NO: 5624129 - DNA, 25 bp, Homo sapien
ggctgaggtttggcagataatgctt

SEQ ID NO: 5624130 - DNA, 25 bp, Homo sapien
tattcaatggatctgtaagagggaa

SEQ ID NO: 5624131 - DNA, 25 bp, Homo sapien
tgagtcagaattagcaggatcaggt

SEQ ID NO: 5624132 - DNA, 25 bp, Homo sapien
gcaatctgtgctggtcctgtggtac

SEQ ID NO: 5624133 - DNA, 25 bp, Homo sapien
tggcagataatgcttcagggctttt

SEQ ID NO: 5624134 - DNA, 25 bp, Homo sapien
ctggacaatgtgctggagcaatctg

SEQ ID NO: 5624135 - DNA, 25 bp, Homo sapien
cctgcctagattccagactccagcc

SEQ ID NO: 5624136 - DNA, 25 bp, Homo sapien
ccaaaatcagtcgtaaacttaggtc

SEQ ID NO: 5624137 - DNA, 25 bp, Homo sapien
aaagaggtattgccggatgtaattt

SEQ ID NO: 5624138 - DNA, 25 bp, Homo sapien
catccacttgaaactgagactaagc

SEQ ID NO: 5624139 - DNA, 25 bp, Homo sapien
caggctcgagaattccactttggtt

SEQ ID NO: 5624140 - DNA, 25 bp, Homo sapien
ctgagactaagctactaatcccacc

SEQ ID NO: 5624141 - DNA, 25 bp, Homo sapien
caaggttactgtcaggccagctacc

SEQ ID NO: 5624142 - DNA, 25 bp, Homo sapien
tgagttccattagcaaaagaggtat

SEQ ID NO: 5624143 - DNA, 25 bp, Homo sapien
ctggatcaaggttactgtcaggcca

SEQ ID NO: 5624144 - DNA, 25 bp, Homo sapien
gatctcaatgcatgggcggatttga

SEQ ID NO: 5624145 - DNA, 25 bp, Homo sapien
agtcatcaattccaggctcgagaat

SEQ ID NO: 5624146 - DNA, 25 bp, Homo sapien
tccaatccaagtcaccactgccagc

SEQ ID NO: 5624147 - DNA, 25 bp, Homo sapien
cctttgagcagcactcaggtgttgc

SEQ ID NO: 5624148 - DNA, 25 bp, Homo sapien
gcagcactcaggtgttgctccctac

SEQ ID NO: 5624149 - DNA, 25 bp, Homo sapien
gccccaacctccaatccaagtcacc

SEQ ID NO: 5624150 - DNA, 25 bp, Homo sapien
gtatctacccattagactgtctcac

SEQ ID NO: 5624151 - DNA, 25 bp, Homo sapien
gccactataattcaaccctaagccc

SEQ ID NO: 5624152 - DNA, 25 bp, Homo sapien
gctccctacaatactatgcacactt

SEQ ID NO: 5624153 - DNA, 25 bp, Homo sapien
actatgcacactttatctccagctc

SEQ ID NO: 5624154 - DNA, 25 bp, Homo sapien
tagactgtctcactttcagccacta

SEQ ID NO: 5624155 - DNA, 25 bp, Homo sapien
caaccctaagccccaacctccaatc

SEQ ID NO: 5624156 - DNA, 25 bp, Homo sapien
ctttgaacacaatttgtatctaccc

SEQ ID NO: 5624157 - DNA, 25 bp, Homo sapien
cagaacaatggctgtgctttcatcc

SEQ ID NO: 5624158 - DNA, 25 bp, Homo sapien
cctctcctcagccactaggaagctc

SEQ ID NO: 5624159 - DNA, 25 bp, Homo sapien
ctagaacacatgggatctagggact

SEQ ID NO: 5624160 - DNA, 25 bp, Homo sapien
ctagggactgtcaaagcacagacaa

SEQ ID NO: 5624161 - DNA, 25 bp, Homo sapien
ggaggctgagatagatttaaaaaac

SEQ ID NO: 5624162 - DNA, 25 bp, Homo sapien
cagacaatgtgcccacaccagccca

SEQ ID NO: 5624163 - DNA, 25 bp, Homo sapien
cagggagcctgtataatgacaacca

SEQ ID NO: 5624164 - DNA, 25 bp, Homo sapien
ggaagtagaggagctaaatcctgaa

SEQ ID NO: 5624165 - DNA, 25 bp, Homo sapien
tcttctagctcagtgagtggggact

SEQ ID NO: 5624166 - DNA, 25 bp, Homo sapien
ggagagaaggttctagaacacatgg

SEQ ID NO: 5624167 - DNA, 25 bp, Homo sapien
atcttattgcttgtcaggaggctga

SEQ ID NO: 5624168 - DNA, 25 bp, Homo sapien
cacctggtccctgccgcaaagggtg

SEQ ID NO: 5624169 - DNA, 25 bp, Homo sapien
tctgtgtttctaagagggggaatga

SEQ ID NO: 5624170 - DNA, 25 bp, Homo sapien
gcattgccaattacaggtggggctg

SEQ ID NO: 5624171 - DNA, 25 bp, Homo sapien
agggggaatgatttagctattgcat

SEQ ID NO: 5624172 - DNA, 25 bp, Homo sapien
aaataatatggaaacacggtgtggt

SEQ ID NO: 5624173 - DNA, 25 bp, Homo sapien
ccggggcctgtctagcccacagctt

SEQ ID NO: 5624174 - DNA, 25 bp, Homo sapien
ggtggcctctcgagttaggagccat

SEQ ID NO: 5624175 - DNA, 25 bp, Homo sapien
aacacggtgtggtaaaagatccatt

SEQ ID NO: 5624176 - DNA, 25 bp, Homo sapien
gcccaggcctcccggggcctgtcta

SEQ ID NO: 5624177 - DNA, 25 bp, Homo sapien
atttcccaagggatctggataacca

SEQ ID NO: 5624178 - DNA, 25 bp, Homo sapien
tctctagagacgtgcttaaaataat

SEQ ID NO: 5624179 - DNA, 25 bp, Homo sapien
cagggcatttggggagttacccaaa

SEQ ID NO: 5624180 - DNA, 25 bp, Homo sapien
agtagctcatgaactatagagcttc

SEQ ID NO: 5624181 - DNA, 25 bp, Homo sapien
aattgagtgatgaagactttgtacc

SEQ ID NO: 5624182 - DNA, 25 bp, Homo sapien
tgaagactttgtacctaagaatcac

SEQ ID NO: 5624183 - DNA, 25 bp, Homo sapien
taacataaaatgatctctagaaaat

SEQ ID NO: 5624184 - DNA, 25 bp, Homo sapien
tttgttaaaattgagtgatgaagac

SEQ ID NO: 5624185 - DNA, 25 bp, Homo sapien
tttactgagacaaaagtactctacc

SEQ ID NO: 5624186 - DNA, 25 bp, Homo sapien
catcaacaatgtataatagcttaac

SEQ ID NO: 5624187 - DNA, 25 bp, Homo sapien
atttgttttacagggcatttgggga

SEQ ID NO: 5624188 - DNA, 25 bp, Homo sapien
ttttgctgacaccacaaccttccac

SEQ ID NO: 5624189 - DNA, 25 bp, Homo sapien
ctctagaaaatatcaagtagctcat

SEQ ID NO: 5624190 - DNA, 25 bp, Homo sapien
cagatggtagcattgtttccagttc

SEQ ID NO: 5624191 - DNA, 25 bp, Homo sapien
ctccatgctgtaatccaagagtcac

SEQ ID NO: 5624192 - DNA, 25 bp, Homo sapien
caccttcctcttcagcccctacttc

SEQ ID NO: 5624193 - DNA, 25 bp, Homo sapien
ttccagttctgccacgtggatccta

SEQ ID NO: 5624194 - DNA, 25 bp, Homo sapien
ctgagtcactcaaattgattgcaag

SEQ ID NO: 5624195 - DNA, 25 bp, Homo sapien
gattgcaagtagaaaatattgcctc

SEQ ID NO: 5624196 - DNA, 25 bp, Homo sapien
gctctgttgcctcttacgccagttc

SEQ ID NO: 5624197 - DNA, 25 bp, Homo sapien
acccttatcagatggtagcattgtt

SEQ ID NO: 5624198 - DNA, 25 bp, Homo sapien
ttgttcttctagacggctctgttgc

SEQ ID NO: 5624199 - DNA, 25 bp, Homo sapien
aagtattgctgctgacatagtctcc

SEQ ID NO: 5624200 - DNA, 25 bp, Homo sapien
cacgtggatcctaaagtattgctgc

SEQ ID NO: 5624201 - DNA, 25 bp, Homo sapien
cctatgaacagattgaagaggccat

SEQ ID NO: 5624202 - DNA, 25 bp, Homo sapien
aggtgccttctgaaggtaggctttc

SEQ ID NO: 5624203 - DNA, 25 bp, Homo sapien
tttctcctggttactagtggcctct

SEQ ID NO: 5624204 - DNA, 25 bp, Homo sapien
gtgacatgcatcatcatcagtctgc

SEQ ID NO: 5624205 - DNA, 25 bp, Homo sapien
agaagaatttccagcgccatgtcat

SEQ ID NO: 5624206 - DNA, 25 bp, Homo sapien
caaagacagaaagatggtcaccata

SEQ ID NO: 5624207 - DNA, 25 bp, Homo sapien
ctgcttaagggatcgcaaagacaga

SEQ ID NO: 5624208 - DNA, 25 bp, Homo sapien
aaaaatggttgaatagggttctatc

SEQ ID NO: 5624209 - DNA, 25 bp, Homo sapien
gagcagtggctctgtactccctggc

SEQ ID NO: 5624210 - DNA, 25 bp, Homo sapien
tggcattgggttacagcactcctgc

SEQ ID NO: 5624211 - DNA, 25 bp, Homo sapien
tagtagctttaatccaggtgccttc

SEQ ID NO: 5624212 - DNA, 25 bp, Homo sapien
ttgaaataagtgggagccaactaac

SEQ ID NO: 5624213 - DNA, 25 bp, Homo sapien
taaaattgaaataagtgggagccaa

SEQ ID NO: 5624214 - DNA, 25 bp, Homo sapien
ttcctgccaaagtacaaaaaacatg

SEQ ID NO: 5624215 - DNA, 25 bp, Homo sapien
taaacaggacctacaactcagtaca

SEQ ID NO: 5624216 - DNA, 25 bp, Homo sapien
tcatattccagggttcaagaaatcc

SEQ ID NO: 5624217 - DNA, 25 bp, Homo sapien
aagaaatttccccccgcaggatata

SEQ ID NO: 5624218 - DNA, 25 bp, Homo sapien
taattaacagtcttcagccaaatcc

SEQ ID NO: 5624219 - DNA, 25 bp, Homo sapien
cccccgcaggatataattaacagtc

SEQ ID NO: 5624220 - DNA, 25 bp, Homo sapien
ctcagtacattactcagaaaactac

SEQ ID NO: 5624221 - DNA, 25 bp, Homo sapien
agtgggagccaactaactaaactta

SEQ ID NO: 5624222 - DNA, 25 bp, Homo sapien
ttactcagaaaactactaacaggaa

SEQ ID NO: 5624223 - DNA, 25 bp, Homo sapien
ccacacctcccagctccggagacgg

SEQ ID NO: 5624224 - DNA, 25 bp, Homo sapien
agactcgataaagaaaacgcggtac

SEQ ID NO: 5624225 - DNA, 25 bp, Homo sapien
caactgaagcgcccatcaatgatag

SEQ ID NO: 5624226 - DNA, 25 bp, Homo sapien
tccaccataaaggcatgcacgcgaa

SEQ ID NO: 5624227 - DNA, 25 bp, Homo sapien
tgcacgcgaatgctcattgcagcac

SEQ ID NO: 5624228 - DNA, 25 bp, Homo sapien
cttgcttgcattgtggaagacagcg

SEQ ID NO: 5624229 - DNA, 25 bp, Homo sapien
acaatcccacaaggcgctgtccctt

SEQ ID NO: 5624230 - DNA, 25 bp, Homo sapien
gaagacagcgtggccattccttaaa

SEQ ID NO: 5624231 - DNA, 25 bp, Homo sapien
cttaaagacctagaggcagaaatgc

SEQ ID NO: 5624232 - DNA, 25 bp, Homo sapien
cctcggtgtgtaaataggtcaggag

SEQ ID NO: 5624233 - DNA, 25 bp, Homo sapien
gtgtgtgcagtgtccgtgcagaata

SEQ ID NO: 5624234 - DNA, 25 bp, Homo sapien
ttgcttacattccccctccccacat

SEQ ID NO: 5624235 - DNA, 25 bp, Homo sapien
tctggcagtcagaccacacatacaa

SEQ ID NO: 5624236 - DNA, 25 bp, Homo sapien
attttaggaaatattacatcgtgac

SEQ ID NO: 5624237 - DNA, 25 bp, Homo sapien
aggttttctggcagtcagaccacac

SEQ ID NO: 5624238 - DNA, 25 bp, Homo sapien
agaccacacatacaatggcaatttc

SEQ ID NO: 5624239 - DNA, 25 bp, Homo sapien
cctcccaaacctttctccccatagc

SEQ ID NO: 5624240 - DNA, 25 bp, Homo sapien
tgtcttactaacatggaaaagccaa

SEQ ID NO: 5624241 - DNA, 25 bp, Homo sapien
acttttcatcatggcagcagtttac

SEQ ID NO: 5624242 - DNA, 25 bp, Homo sapien
catggaaaagccaacttactccttg

SEQ ID NO: 5624243 - DNA, 25 bp, Homo sapien
attacatcgtgactgaaacatgcct

SEQ ID NO: 5624244 - DNA, 25 bp, Homo sapien
ctccccatagcttcaaaattttagg

SEQ ID NO: 5624245 - DNA, 25 bp, Homo sapien
aacagctcagtctataatggagggc

SEQ ID NO: 5624246 - DNA, 25 bp, Homo sapien
ttgtaggtcacaaaggtattgactt

SEQ ID NO: 5624247 - DNA, 25 bp, Homo sapien
gggaaagattgagtacatttttgtg

SEQ ID NO: 5624248 - DNA, 25 bp, Homo sapien
tattagccagtgaatccatgtgagc

SEQ ID NO: 5624249 - DNA, 25 bp, Homo sapien
acaaagcaactttcagtttagggta

SEQ ID NO: 5624250 - DNA, 25 bp, Homo sapien
attaaaatttaccagcagaggggag

SEQ ID NO: 5624251 - DNA, 25 bp, Homo sapien
gggcgagaagaatgaactaactcca

SEQ ID NO: 5624252 - DNA, 25 bp, Homo sapien
gccagtgaatccatgtgagctcatt

SEQ ID NO: 5624253 - DNA, 25 bp, Homo sapien
cagtttagggtaatttttgggcata

SEQ ID NO: 5624254 - DNA, 25 bp, Homo sapien
acttttgatcagaagttccaggggg

SEQ ID NO: 5624255 - DNA, 25 bp, Homo sapien
gtctataatggagggcaaataaaga

SEQ ID NO: 5624256 - DNA, 25 bp, Homo sapien
catgatttcactctgtccgagggcc

SEQ ID NO: 5624257 - DNA, 25 bp, Homo sapien
aaggagtcccacaagtggaacttgt

SEQ ID NO: 5624258 - DNA, 25 bp, Homo sapien
caacaatcttgtacagtcaggactg

SEQ ID NO: 5624259 - DNA, 25 bp, Homo sapien
gcctaaggactaggaatgctgctgt

SEQ ID NO: 5624260 - DNA, 25 bp, Homo sapien
acagtcaggactgataaaatggggt

SEQ ID NO: 5624261 - DNA, 25 bp, Homo sapien
gtcactcaagaaagtctcttctaac

SEQ ID NO: 5624262 - DNA, 25 bp, Homo sapien
tcactctgtccgagggcctaaggac

SEQ ID NO: 5624263 - DNA, 25 bp, Homo sapien
atcctgaaatgaacagctaacacaa

SEQ ID NO: 5624264 - DNA, 25 bp, Homo sapien
ggcaacaaaaggagtcccacaagtg

SEQ ID NO: 5624265 - DNA, 25 bp, Homo sapien
aacataaaggcaaatacatatagct

SEQ ID NO: 5624266 - DNA, 25 bp, Homo sapien
ggactaggaatgctgctgtgataca

SEQ ID NO: 5624267 - DNA, 25 bp, Homo sapien
accacatacaactgtgctgccccat

SEQ ID NO: 5624268 - DNA, 25 bp, Homo sapien
gcaattatataagcaaactgaacct

SEQ ID NO: 5624269 - DNA, 25 bp, Homo sapien
gcaaactgaacctttggaaaatgct

SEQ ID NO: 5624270 - DNA, 25 bp, Homo sapien
aaattcagagattattcagtgatcc

SEQ ID NO: 5624271 - DNA, 25 bp, Homo sapien
tttctttccagagtaccaacaatca

SEQ ID NO: 5624272 - DNA, 25 bp, Homo sapien
caaattatgtggtcctgacaccctc

SEQ ID NO: 5624273 - DNA, 25 bp, Homo sapien
gctgccccatcactgaataatctac

SEQ ID NO: 5624274 - DNA, 25 bp, Homo sapien
cctcataacaagaaccatcagtacc

SEQ ID NO: 5624275 - DNA, 25 bp, Homo sapien
cagtggggctagaaatacctaccac

SEQ ID NO: 5624276 - DNA, 25 bp, Homo sapien
aatgctaattaataaggcagggttt

SEQ ID NO: 5624277 - DNA, 25 bp, Homo sapien
cagtgatccaagtcccacaattttt

SEQ ID NO: 5624278 - DNA, 25 bp, Homo sapien
aggtcccgttctccgtgacctggta

SEQ ID NO: 5624279 - DNA, 25 bp, Homo sapien
taccaggtcacggagaacgggacct

SEQ ID NO: 5624280 - DNA, 25 bp, Homo sapien
tcaccttactggagtgttacactgt

SEQ ID NO: 5624281 - DNA, 25 bp, Homo sapien
atgtaactagttcaaaggatataat

SEQ ID NO: 5624282 - DNA, 25 bp, Homo sapien
atatgtcacataatccccaagagcc

SEQ ID NO: 5624283 - DNA, 25 bp, Homo sapien
ttcagcaattcacaattcaccttac

SEQ ID NO: 5624284 - DNA, 25 bp, Homo sapien
gaaaagcctagagaactaaattgca

SEQ ID NO: 5624285 - DNA, 25 bp, Homo sapien
agaaacaggaggatataaaactatt

SEQ ID NO: 5624286 - DNA, 25 bp, Homo sapien
aatccccaagagcctcaggccagaa

SEQ ID NO: 5624287 - DNA, 25 bp, Homo sapien
acataatccccaagagcctcaggcc

SEQ ID NO: 5624288 - DNA, 25 bp, Homo sapien
ccagatttagaaacaggaggatata

SEQ ID NO: 5624289 - DNA, 25 bp, Homo sapien
ggagtgttacactgtcatccagatt

SEQ ID NO: 5624290 - DNA, 25 bp, Homo sapien
tctgcattaattctaacatgaggaa

SEQ ID NO: 5624291 - DNA, 25 bp, Homo sapien
atgcacaaaaacagaatatgctgac

SEQ ID NO: 5624292 - DNA, 25 bp, Homo sapien
gaccaacctgggcagtatgataaaa

SEQ ID NO: 5624293 - DNA, 25 bp, Homo sapien
atgcatgcacaaaaacagaatatgc

SEQ ID NO: 5624294 - DNA, 25 bp, Homo sapien
tgttcttgaacttaaggctacatgt

SEQ ID NO: 5624295 - DNA, 25 bp, Homo sapien
tgcgtgtctgtggcttagctactcg

SEQ ID NO: 5624296 - DNA, 25 bp, Homo sapien
tctgtggcttagctactcgagaagc

SEQ ID NO: 5624297 - DNA, 25 bp, Homo sapien
tgtatatatgtcagttaagaacatg

SEQ ID NO: 5624298 - DNA, 25 bp, Homo sapien
tgaacttaaggctacatgtttccac

SEQ ID NO: 5624299 - DNA, 25 bp, Homo sapien
gtcagttaagaacatgtataccatg

SEQ ID NO: 5624300 - DNA, 25 bp, Homo sapien
gcagtatgataaaaccccgtttcta

SEQ ID NO: 5624301 - DNA, 25 bp, Homo sapien
cagaatatgctgacaaaagtatgta

SEQ ID NO: 5624302 - DNA, 25 bp, Homo sapien
agcaactggtataaacaggtttagg

SEQ ID NO: 5624303 - DNA, 25 bp, Homo sapien
caatcaaggaagtcagttaaggagg

SEQ ID NO: 5624304 - DNA, 25 bp, Homo sapien
ggtttaggaacctgcaaacgcattc

SEQ ID NO: 5624305 - DNA, 25 bp, Homo sapien
gcaaacgcattcttggtaggcattg

SEQ ID NO: 5624306 - DNA, 25 bp, Homo sapien
tcttggtaggcattgtgacactcag

SEQ ID NO: 5624307 - DNA, 25 bp, Homo sapien
agagcattggacaatcaaggaagtc

SEQ ID NO: 5624308 - DNA, 25 bp, Homo sapien
agttaaggaggttttagagcaatta

SEQ ID NO: 5624309 - DNA, 25 bp, Homo sapien
ttacatagcaactggtataaacagg

SEQ ID NO: 5624310 - DNA, 25 bp, Homo sapien
aagtcagttaaggaggttttagagc

SEQ ID NO: 5624311 - DNA, 25 bp, Homo sapien
tgacactcagtggttagaagaagca

SEQ ID NO: 5624312 - DNA, 25 bp, Homo sapien
gtaatggagagcattggacaatcaa

SEQ ID NO: 5624313 - DNA, 25 bp, Homo sapien
gatctggatggatgattgtgatgag

SEQ ID NO: 5624314 - DNA, 25 bp, Homo sapien
aatggactgtgagctttcagggatg

SEQ ID NO: 5624315 - DNA, 25 bp, Homo sapien
atcccttgtttggcacagtgtcagc

SEQ ID NO: 5624316 - DNA, 25 bp, Homo sapien
gggagtaaagggacttccatgatct

SEQ ID NO: 5624317 - DNA, 25 bp, Homo sapien
tttgcttgctaacagaaaatcctga

SEQ ID NO: 5624318 - DNA, 25 bp, Homo sapien
gtcagcttgatgaggtcactttttc

SEQ ID NO: 5624319 - DNA, 25 bp, Homo sapien
tttggaaaaactcgagtcagcttga

SEQ ID NO: 5624320 - DNA, 25 bp, Homo sapien
tggcgacaaatatgaattatggcac

SEQ ID NO: 5624321 - DNA, 25 bp, Homo sapien
ttggataaacaaagtgtccagtgtc

SEQ ID NO: 5624322 - DNA, 25 bp, Homo sapien
cagtgtcaggtgatgactcaaggtt

SEQ ID NO: 5624323 - DNA, 25 bp, Homo sapien
gcacagtgtcagcctgagaagatgc

SEQ ID NO: 5624324 - DNA, 25 bp, Homo sapien
gcagccaaaatgacattgagcaaac

SEQ ID NO: 5624325 - DNA, 25 bp, Homo sapien
acagtaggatgtatagccagaatta

SEQ ID NO: 5624326 - DNA, 25 bp, Homo sapien
tcgtttaagctgccacctgaggatt

SEQ ID NO: 5624327 - DNA, 25 bp, Homo sapien
attacccccttgacagaggtacagt

SEQ ID NO: 5624328 - DNA, 25 bp, Homo sapien
tctatgtgtacacacacgaggcagc

SEQ ID NO: 5624329 - DNA, 25 bp, Homo sapien
agaattataaatcaaggctgctcac

SEQ ID NO: 5624330 - DNA, 25 bp, Homo sapien
tgggtgtcaccgatcacacatacac

SEQ ID NO: 5624331 - DNA, 25 bp, Homo sapien
aatcaaggctgctcacctgatgttc

SEQ ID NO: 5624332 - DNA, 25 bp, Homo sapien
gacattgagcaaacctgggtgtcac

SEQ ID NO: 5624333 - DNA, 25 bp, Homo sapien
cacacacgaggcagctcgtttaagc

SEQ ID NO: 5624334 - DNA, 25 bp, Homo sapien
acatacacgtacagactattccatc

SEQ ID NO: 5624335 - DNA, 25 bp, Homo sapien
cctctagttatatgacggaaaatat

SEQ ID NO: 5624336 - DNA, 25 bp, Homo sapien
taaaacacttaggaagctgactgct

SEQ ID NO: 5624337 - DNA, 25 bp, Homo sapien
ggaaaaaggtatgaagatgagcctt

SEQ ID NO: 5624338 - DNA, 25 bp, Homo sapien
ggacaagatcaagggcaatactgat

SEQ ID NO: 5624339 - DNA, 25 bp, Homo sapien
aatgcttaaaaacaacccaagtgga

SEQ ID NO: 5624340 - DNA, 25 bp, Homo sapien
aacaacccaagtggaatgcagattc

SEQ ID NO: 5624341 - DNA, 25 bp, Homo sapien
tgcagattcaggagcttaaacataa

SEQ ID NO: 5624342 - DNA, 25 bp, Homo sapien
ttaactccataaaaaggacaagatc

SEQ ID NO: 5624343 - DNA, 25 bp, Homo sapien
aagtggaaaagtctcccacgtaaga

SEQ ID NO: 5624344 - DNA, 25 bp, Homo sapien
gaagggtttgaattcggcacttatc

SEQ ID NO: 5624345 - DNA, 25 bp, Homo sapien
aacataaaatgaagggtttgaattc

SEQ ID NO: 5624346 - DNA, 25 bp, Homo sapien
gaactctgggataagacccgaggaa

SEQ ID NO: 5624347 - DNA, 25 bp, Homo sapien
gaagaggaccatggttcacatgctc

SEQ ID NO: 5624348 - DNA, 25 bp, Homo sapien
atacctgaatgtcaaatgcagccag

SEQ ID NO: 5624349 - DNA, 25 bp, Homo sapien
caatcaaccacctactgagactctg

SEQ ID NO: 5624350 - DNA, 25 bp, Homo sapien
gaagtgcaaagaagaatacctgaat

SEQ ID NO: 5624351 - DNA, 25 bp, Homo sapien
aagtactcaagaacctgtgttttac

SEQ ID NO: 5624352 - DNA, 25 bp, Homo sapien
gccatcagtaacaacaatcaaccac

SEQ ID NO: 5624353 - DNA, 25 bp, Homo sapien
ctattgagtagcaaagacaagagtt

SEQ ID NO: 5624354 - DNA, 25 bp, Homo sapien
aagtgggataaaatggcataattca

SEQ ID NO: 5624355 - DNA, 25 bp, Homo sapien
acatgctcaggaagagccatcagta

SEQ ID NO: 5624356 - DNA, 25 bp, Homo sapien
gtagcaaagacaagagttaagcata

SEQ ID NO: 5624357 - DNA, 25 bp, Homo sapien
gtctggtgtcaaggaacattgcttt

SEQ ID NO: 5624358 - DNA, 25 bp, Homo sapien
agtaagcactgatgtctggtgtcaa

SEQ ID NO: 5624359 - DNA, 25 bp, Homo sapien
tactgaagtttagtaagcactgatg

SEQ ID NO: 5624360 - DNA, 25 bp, Homo sapien
tcctaccacctttagcacctggcac

SEQ ID NO: 5624361 - DNA, 25 bp, Homo sapien
caattactcttgcggatggacttca

SEQ ID NO: 5624362 - DNA, 25 bp, Homo sapien
aaatggtcagtaatttagaacctgt

SEQ ID NO: 5624363 - DNA, 25 bp, Homo sapien
gaagtccacaaatggtcagtaattt

SEQ ID NO: 5624364 - DNA, 25 bp, Homo sapien
actcttgcggatggacttcaaactt

SEQ ID NO: 5624365 - DNA, 25 bp, Homo sapien
gagagaaatgctaatataccataca

SEQ ID NO: 5624366 - DNA, 25 bp, Homo sapien
tttagaacctgtggtccaattactc

SEQ ID NO: 5624367 - DNA, 25 bp, Homo sapien
atataaatctaagaagtccacaaat

SEQ ID NO: 5624368 - DNA, 25 bp, Homo sapien
gtctgtaagtcaggaatactctttc

SEQ ID NO: 5624369 - DNA, 25 bp, Homo sapien
ggctgtggaccctcctcgtcaactt

SEQ ID NO: 5624370 - DNA, 25 bp, Homo sapien
caccccctaccccagtctgtaagtc

SEQ ID NO: 5624371 - DNA, 25 bp, Homo sapien
gacagtcccactggaactaggggtc

SEQ ID NO: 5624372 - DNA, 25 bp, Homo sapien
aagcctgcctttccctctgggatgt

SEQ ID NO: 5624373 - DNA, 25 bp, Homo sapien
gtatgtgaagggtgtcagccttcaa

SEQ ID NO: 5624374 - DNA, 25 bp, Homo sapien
tccctctgggatgttgatgaagcca

SEQ ID NO: 5624375 - DNA, 25 bp, Homo sapien
ggtccctggctgtggaccctcctcg

SEQ ID NO: 5624376 - DNA, 25 bp, Homo sapien
gggatgttgatgaagccacttgctt

SEQ ID NO: 5624377 - DNA, 25 bp, Homo sapien
cctaccccagtctgtaagtcaggaa

SEQ ID NO: 5624378 - DNA, 25 bp, Homo sapien
tgctttgtttgctcctttccccacc

SEQ ID NO: 5624379 - DNA, 25 bp, Homo sapien
aaggtgtatccaagtgtgtctggca

SEQ ID NO: 5624380 - DNA, 25 bp, Homo sapien
aagtgtgtctggcattcattgattt

SEQ ID NO: 5624381 - DNA, 25 bp, Homo sapien
ggttagccaggggttacctgtcaga

SEQ ID NO: 5624382 - DNA, 25 bp, Homo sapien
gctgcctgtgtccagtagatagctg

SEQ ID NO: 5624383 - DNA, 25 bp, Homo sapien
catggagaatgatttagggtattta

SEQ ID NO: 5624384 - DNA, 25 bp, Homo sapien
aaaagaaaccataggacatcttaaa

SEQ ID NO: 5624385 - DNA, 25 bp, Homo sapien
tgagagactatctgatcatggagaa

SEQ ID NO: 5624386 - DNA, 25 bp, Homo sapien
caggggttacctgtcagatgtctga

SEQ ID NO: 5624387 - DNA, 25 bp, Homo sapien
ccagtagatagctgggttagccagg

SEQ ID NO: 5624388 - DNA, 25 bp, Homo sapien
ttaagaaaaatcatggtcctaagcc

SEQ ID NO: 5624389 - DNA, 25 bp, Homo sapien
gggagttttggagatgctctgcaca

SEQ ID NO: 5624390 - DNA, 25 bp, Homo sapien
aacagctgaagcagcgttgagtgtg

SEQ ID NO: 5624391 - DNA, 25 bp, Homo sapien
caccccttaaagctaagaggccttc

SEQ ID NO: 5624392 - DNA, 25 bp, Homo sapien
ggccaatgggtgttcagacctgcca

SEQ ID NO: 5624393 - DNA, 25 bp, Homo sapien
agcggaacaacgtgacacgaatggt

SEQ ID NO: 5624394 - DNA, 25 bp, Homo sapien
ctaatctgactctgggaggtgaaga

SEQ ID NO: 5624395 - DNA, 25 bp, Homo sapien
ttgagaccaccagtgactccgagga

SEQ ID NO: 5624396 - DNA, 25 bp, Homo sapien
accccatgcaccagtgtggccaatg

SEQ ID NO: 5624397 - DNA, 25 bp, Homo sapien
cccctataggaagactccagggccg

SEQ ID NO: 5624398 - DNA, 25 bp, Homo sapien
atagaacagcagactggcctccaat

SEQ ID NO: 5624399 - DNA, 25 bp, Homo sapien
cggaaacaggcaactgaaccgatgt

SEQ ID NO: 5624400 - DNA, 25 bp, Homo sapien
gacaacagcaggtgccatcctggac

SEQ ID NO: 5624401 - DNA, 25 bp, Homo sapien
tgaaacagacttactacctggccaa

SEQ ID NO: 5624402 - DNA, 25 bp, Homo sapien
actacctggccaagttaatgactat

SEQ ID NO: 5624403 - DNA, 25 bp, Homo sapien
agcatcacctgctttgaaacagact

SEQ ID NO: 5624404 - DNA, 25 bp, Homo sapien
ataatgtgttgtgaagggactttgt

SEQ ID NO: 5624405 - DNA, 25 bp, Homo sapien
tcaacaaccctttaagagtatagct

SEQ ID NO: 5624406 - DNA, 25 bp, Homo sapien
tgactatagctattatgcaaggatc

SEQ ID NO: 5624407 - DNA, 25 bp, Homo sapien
attaggcaacagaattaggcaaact

SEQ ID NO: 5624408 - DNA, 25 bp, Homo sapien
taggcaaactagaagtgttcttgtc

SEQ ID NO: 5624409 - DNA, 25 bp, Homo sapien
cttgtcatgcaaattcaggaaacta

SEQ ID NO: 5624410 - DNA, 25 bp, Homo sapien
gtctaaaggcttaataatgtgttgt

SEQ ID NO: 5624411 - DNA, 25 bp, Homo sapien
aaagaattacgtattaggcaacaga

SEQ ID NO: 5624412 - DNA, 25 bp, Homo sapien
acaagtctcttgatcctgcccataa

SEQ ID NO: 5624413 - DNA, 25 bp, Homo sapien
ttatatcaaccctgcccggctctta

SEQ ID NO: 5624414 - DNA, 25 bp, Homo sapien
tttttgggtccatgtctatacttcc

SEQ ID NO: 5624415 - DNA, 25 bp, Homo sapien
catctttgtggaggcagaagtaatg

SEQ ID NO: 5624416 - DNA, 25 bp, Homo sapien
tgcccataaaacagttcctatagct

SEQ ID NO: 5624417 - DNA, 25 bp, Homo sapien
gagtaagctcagacacatagaatgg

SEQ ID NO: 5624418 - DNA, 25 bp, Homo sapien
tacatctcgtaaaagaagtatgtgc

SEQ ID NO: 5624419 - DNA, 25 bp, Homo sapien
tagaatggtctaagcgttctggagg

SEQ ID NO: 5624420 - DNA, 25 bp, Homo sapien
tagataaatagaaaaacctctcctg

SEQ ID NO: 5624421 - DNA, 25 bp, Homo sapien
cgttctggaggatgagctctctgaa

SEQ ID NO: 5624422 - DNA, 25 bp, Homo sapien
ttttgtgtgtatatcctgtggtttt

SEQ ID NO: 5624423 - DNA, 25 bp, Homo sapien
aacacatgcattatgggactcttcc

SEQ ID NO: 5624424 - DNA, 25 bp, Homo sapien
gaaccaagcacagcattaggagatg

SEQ ID NO: 5624425 - DNA, 25 bp, Homo sapien
agattgggaaccaagcacagcatta

SEQ ID NO: 5624426 - DNA, 25 bp, Homo sapien
cagaaaccagcaaagtcaggaatta

SEQ ID NO: 5624427 - DNA, 25 bp, Homo sapien
aagggatttgccttgaacaggtttc

SEQ ID NO: 5624428 - DNA, 25 bp, Homo sapien
tgaacaggtttcatctgcacaaggc

SEQ ID NO: 5624429 - DNA, 25 bp, Homo sapien
tctgcacaaggcaaaatcacgagaa

SEQ ID NO: 5624430 - DNA, 25 bp, Homo sapien
gtttaatcaccaccagccagtcaga

SEQ ID NO: 5624431 - DNA, 25 bp, Homo sapien
tggcacaggcagcttagcatatcag

SEQ ID NO: 5624432 - DNA, 25 bp, Homo sapien
ctggaagagcacagtaattaaggac

SEQ ID NO: 5624433 - DNA, 25 bp, Homo sapien
gagtttgggtcaaattgggagattg

SEQ ID NO: 5624434 - DNA, 25 bp, Homo sapien
ttactatattggccagcatactgac

SEQ ID NO: 5624435 - DNA, 25 bp, Homo sapien
atgtgtcatgaaaaattacagtctt

SEQ ID NO: 5624436 - DNA, 25 bp, Homo sapien
aaagagacattgctcaaagatgttc

SEQ ID NO: 5624437 - DNA, 25 bp, Homo sapien
caaagttcaggaagctcccgactca

SEQ ID NO: 5624438 - DNA, 25 bp, Homo sapien
taggtatgtgctgaaaaacctgttc

SEQ ID NO: 5624439 - DNA, 25 bp, Homo sapien
taataaccagtcacaagtcactctt

SEQ ID NO: 5624440 - DNA, 25 bp, Homo sapien
aagaacttataataggtatgtgctg

SEQ ID NO: 5624441 - DNA, 25 bp, Homo sapien
tcctggctgtgaataaatagcaaat

SEQ ID NO: 5624442 - DNA, 25 bp, Homo sapien
taaaacacaaagttcaggaagctcc

SEQ ID NO: 5624443 - DNA, 25 bp, Homo sapien
ttagtagcaacatcaaaagagacat

SEQ ID NO: 5624444 - DNA, 25 bp, Homo sapien
tggccagcatactgactaacggcat

SEQ ID NO: 5624445 - DNA, 25 bp, Homo sapien
aggagaccagattcaagtaatcaga

SEQ ID NO: 5624446 - DNA, 25 bp, Homo sapien
cctagtgtgcaatatgaagtttaca

SEQ ID NO: 5624447 - DNA, 25 bp, Homo sapien
gagcattggtggatcaagcattgtt

SEQ ID NO: 5624448 - DNA, 25 bp, Homo sapien
tacacgttaaaattcaaaatgagct

SEQ ID NO: 5624449 - DNA, 25 bp, Homo sapien
ctaatagcactaaattcaagtggaa

SEQ ID NO: 5624450 - DNA, 25 bp, Homo sapien
attaaaaagagcattggtggatcaa

SEQ ID NO: 5624451 - DNA, 25 bp, Homo sapien
gagcacacgctgttcagctcgggtt

SEQ ID NO: 5624452 - DNA, 25 bp, Homo sapien
gctgttcagctcgggtttcacgttc

SEQ ID NO: 5624453 - DNA, 25 bp, Homo sapien
attcaaaatgagctagcaatggctt

SEQ ID NO: 5624454 - DNA, 25 bp, Homo sapien
aaacattaaaaagagcattggtgga

SEQ ID NO: 5624455 - DNA, 25 bp, Homo sapien
caagtaatcagagcacacgctgttc

SEQ ID NO: 5624456 - DNA, 25 bp, Homo sapien
catcagcacatcaaagtgggctcgg

SEQ ID NO: 5624457 - DNA, 25 bp, Homo sapien
gggtcagaaaaacgaaatctagatc

SEQ ID NO: 5624458 - DNA, 25 bp, Homo sapien
cctgttggggaccttatgcaaattc

SEQ ID NO: 5624459 - DNA, 25 bp, Homo sapien
gtggccccttccaggccgcatcagc

SEQ ID NO: 5624460 - DNA, 25 bp, Homo sapien
ttgactgcgcctgtttcgccccacc

SEQ ID NO: 5624461 - DNA, 25 bp, Homo sapien
gcccgacccagcctctcggccttcc

SEQ ID NO: 5624462 - DNA, 25 bp, Homo sapien
ctgaccctttgaatccacggcgggg

SEQ ID NO: 5624463 - DNA, 25 bp, Homo sapien
ggcctgccttcacctgttggggacc

SEQ ID NO: 5624464 - DNA, 25 bp, Homo sapien
ctctaaaggtggagaaaacagtaaa

SEQ ID NO: 5624465 - DNA, 25 bp, Homo sapien
ggagcagggaccctcattccctcta

SEQ ID NO: 5624466 - DNA, 25 bp, Homo sapien
ggccaaggtgccagccccttgactg

SEQ ID NO: 5624467 - DNA, 25 bp, Homo sapien
atacagtgcgatgatggtttgtgtc

SEQ ID NO: 5624468 - DNA, 25 bp, Homo sapien
ggtgatgatatctgactggtgaagg

SEQ ID NO: 5624469 - DNA, 25 bp, Homo sapien
gaaatctgttgaagcaaagaaaagc

SEQ ID NO: 5624470 - DNA, 25 bp, Homo sapien
agctgaatgtgcctgccacaggaac

SEQ ID NO: 5624471 - DNA, 25 bp, Homo sapien
taaataagctgaatgtgcctgccac

SEQ ID NO: 5624472 - DNA, 25 bp, Homo sapien
ctttaagattggtttggatactgcc

SEQ ID NO: 5624473 - DNA, 25 bp, Homo sapien
cataaacttatgggagatcaagcaa

SEQ ID NO: 5624474 - DNA, 25 bp, Homo sapien
cagcacatgctcctgcaatacagtg

SEQ ID NO: 5624475 - DNA, 25 bp, Homo sapien
aaaggcaaatacactagatactgat

SEQ ID NO: 5624476 - DNA, 25 bp, Homo sapien
tatgggagatcaagcaaaatatatg

SEQ ID NO: 5624477 - DNA, 25 bp, Homo sapien
aggcaggtgagagcagttattttaa

SEQ ID NO: 5624478 - DNA, 25 bp, Homo sapien
ccgtcgagctccaagccacctgtga

SEQ ID NO: 5624479 - DNA, 25 bp, Homo sapien
tcacaggtggcttggagctcgacgg

SEQ ID NO: 5624480 - DNA, 25 bp, Homo sapien
tcccgccttaattccagtgacaggg

SEQ ID NO: 5624481 - DNA, 25 bp, Homo sapien
gattggttaaatagattacgggaca

SEQ ID NO: 5624482 - DNA, 25 bp, Homo sapien
aacaaggaagattacagacaacact

SEQ ID NO: 5624483 - DNA, 25 bp, Homo sapien
gacaacacttgacatggcaggaaat

SEQ ID NO: 5624484 - DNA, 25 bp, Homo sapien
tagtgagaatgtgaatcccgcctta

SEQ ID NO: 5624485 - DNA, 25 bp, Homo sapien
ttccagtgacagggattggttaaat

SEQ ID NO: 5624486 - DNA, 25 bp, Homo sapien
aaagatgggcactgcaacatatcat

SEQ ID NO: 5624487 - DNA, 25 bp, Homo sapien
tgtctaatccctcactgggggttac

SEQ ID NO: 5624488 - DNA, 25 bp, Homo sapien
tgccctctatcccttctacagcccc

SEQ ID NO: 5624489 - DNA, 25 bp, Homo sapien
atccctcactgggggttactgcagt

SEQ ID NO: 5624490 - DNA, 25 bp, Homo sapien
gttactgcagtgatggagatgcaag

SEQ ID NO: 5624491 - DNA, 25 bp, Homo sapien
agtgtaggttgatttatgcgatgct

SEQ ID NO: 5624492 - DNA, 25 bp, Homo sapien
tccggaataagaataccacactgaa

SEQ ID NO: 5624493 - DNA, 25 bp, Homo sapien
ctccccccataaaaatacagctaga

SEQ ID NO: 5624494 - DNA, 25 bp, Homo sapien
taccaatctgatacatgggaaatgt

SEQ ID NO: 5624495 - DNA, 25 bp, Homo sapien
gaattcaatagaactcaagggagaa

SEQ ID NO: 5624496 - DNA, 25 bp, Homo sapien
gctttcccatcagcaatgtaggaga

SEQ ID NO: 5624497 - DNA, 25 bp, Homo sapien
gcgatgcttatgaataaagttcggt

SEQ ID NO: 5624498 - DNA, 25 bp, Homo sapien
gggaaatgtatctcagtgtaggttg

SEQ ID NO: 5624499 - DNA, 25 bp, Homo sapien
tgtaggagagtggctgtttctccac

SEQ ID NO: 5624500 - DNA, 25 bp, Homo sapien
aaccttgctaataggatgtgttgtt

SEQ ID NO: 5624501 - DNA, 25 bp, Homo sapien
agctagaaagtattccggaataaga

SEQ ID NO: 5624502 - DNA, 25 bp, Homo sapien
agatgtggttataagggtaactggg

SEQ ID NO: 5624503 - DNA, 25 bp, Homo sapien
aggatccaagcttacgtacgcgtgc

SEQ ID NO: 5624504 - DNA, 25 bp, Homo sapien
actggaaggctatggagctccagtg

SEQ ID NO: 5624505 - DNA, 25 bp, Homo sapien
gccagttgcatcaggcccctggagg

SEQ ID NO: 5624506 - DNA, 25 bp, Homo sapien
acgcgtgcatgcgacgtcatagctc

SEQ ID NO: 5624507 - DNA, 25 bp, Homo sapien
ggccgctctagaggatccaagctta

SEQ ID NO: 5624508 - DNA, 25 bp, Homo sapien
cccgggtcgactactactacaacta

SEQ ID NO: 5624509 - DNA, 25 bp, Homo sapien
gtcgacgcggccgcgaatttagtag

SEQ ID NO: 5624510 - DNA, 25 bp, Homo sapien
ggtgggacactgcctttccaagagc

SEQ ID NO: 5624511 - DNA, 25 bp, Homo sapien
gagctccagtggtagatgtggttat

SEQ ID NO: 5624512 - DNA, 25 bp, Homo sapien
ctacaactaaattcgcggccgcgtc

SEQ ID NO: 5624513 - DNA, 25 bp, Homo sapien
tctcccgctaggtgtgagcattctt

SEQ ID NO: 5624514 - DNA, 25 bp, Homo sapien
acaggaaagccttgagattctcctt

SEQ ID NO: 5624515 - DNA, 25 bp, Homo sapien
acagcgctttccagagaatgtgtac

SEQ ID NO: 5624516 - DNA, 25 bp, Homo sapien
ccatatgccgcatccctcagaaccc

SEQ ID NO: 5624517 - DNA, 25 bp, Homo sapien
aacgccctcccagtcaaagacgtcc

SEQ ID NO: 5624518 - DNA, 25 bp, Homo sapien
ggcagatccacttcgttaacaaggt

SEQ ID NO: 5624519 - DNA, 25 bp, Homo sapien
caaagacgtccctaaggttgggagc

SEQ ID NO: 5624520 - DNA, 25 bp, Homo sapien
ttcctttcacaacgccctcccagtc

SEQ ID NO: 5624521 - DNA, 25 bp, Homo sapien
tcagggatctcccgctaggtgtgag

SEQ ID NO: 5624522 - DNA, 25 bp, Homo sapien
ggagagaggataagccttttgcaca

SEQ ID NO: 5624523 - DNA, 25 bp, Homo sapien
ctcttctgagccatatgccgcatcc

SEQ ID NO: 5624524 - DNA, 25 bp, Homo sapien
caagcagcaacaacaagctgttctg

SEQ ID NO: 5624525 - DNA, 25 bp, Homo sapien
gacacacacaccattggttcagttc

SEQ ID NO: 5624526 - DNA, 25 bp, Homo sapien
tctttctgatgggctagggaactaa

SEQ ID NO: 5624527 - DNA, 25 bp, Homo sapien
gtcttggatcaaaacaagcagcaac

SEQ ID NO: 5624528 - DNA, 25 bp, Homo sapien
gaagtagccagcctgggaatctttc

SEQ ID NO: 5624529 - DNA, 25 bp, Homo sapien
tgcaagggtcatcccgaagtagcca

SEQ ID NO: 5624530 - DNA, 25 bp, Homo sapien
ataattggaagtgcaaagctgaaca

SEQ ID NO: 5624531 - DNA, 25 bp, Homo sapien
atgtcttaaaagctagtggggaaaa

SEQ ID NO: 5624532 - DNA, 25 bp, Homo sapien
aagctgaacaagatatagttcctat

SEQ ID NO: 5624533 - DNA, 25 bp, Homo sapien
actaacttagagtgtgcagagacac

SEQ ID NO: 5624534 - DNA, 25 bp, Homo sapien
tctgagtgcctaacacacgccaggc

SEQ ID NO: 5624535 - DNA, 25 bp, Homo sapien
ctcccttgagtaaagtcatagcact

SEQ ID NO: 5624536 - DNA, 25 bp, Homo sapien
ctagaaagacccacagctcatcagc

SEQ ID NO: 5624537 - DNA, 25 bp, Homo sapien
attccagctatgatagggttggtct

SEQ ID NO: 5624538 - DNA, 25 bp, Homo sapien
gaactggctacagctaggaaacctg

SEQ ID NO: 5624539 - DNA, 25 bp, Homo sapien
ggggaagagagttatacagatttat

SEQ ID NO: 5624540 - DNA, 25 bp, Homo sapien
ccagctacctaaatccaggggaaga

SEQ ID NO: 5624541 - DNA, 25 bp, Homo sapien
tagggttggtctaaagaacacatcc

SEQ ID NO: 5624542 - DNA, 25 bp, Homo sapien
gctaggaaacctgatccagctacct

SEQ ID NO: 5624543 - DNA, 25 bp, Homo sapien
aagttagtgaacaaggaactggcta

SEQ ID NO: 5624544 - DNA, 25 bp, Homo sapien
tgctcaaagtgaaaaaatcaaagga

SEQ ID NO: 5624545 - DNA, 25 bp, Homo sapien
atcagctcaagcaagttagtgaaca

SEQ ID NO: 5624546 - DNA, 25 bp, Homo sapien
gtgctggcacctttgcttcattgtg

SEQ ID NO: 5624547 - DNA, 25 bp, Homo sapien
cttctgaaagtgtgaatgtttaatg

SEQ ID NO: 5624548 - DNA, 25 bp, Homo sapien
accccacgatctcaactaaacctgt

SEQ ID NO: 5624549 - DNA, 25 bp, Homo sapien
tttaatgtaatgggagcatatgtta

SEQ ID NO: 5624550 - DNA, 25 bp, Homo sapien
tctcatgggctcaccccacgatctc

SEQ ID NO: 5624551 - DNA, 25 bp, Homo sapien
tcagcccattatcaactcccttctc

SEQ ID NO: 5624552 - DNA, 25 bp, Homo sapien
tctcgcccccatatcaattgcttgc

SEQ ID NO: 5624553 - DNA, 25 bp, Homo sapien
taatgggagcatatgttaggatttt

SEQ ID NO: 5624554 - DNA, 25 bp, Homo sapien
ggggggatgctaatgttcagcccat

SEQ ID NO: 5624555 - DNA, 25 bp, Homo sapien
cacctttgcttcattgtgagggtcc

SEQ ID NO: 5624556 - DNA, 25 bp, Homo sapien
ttaactcataagtgaggttactggc

SEQ ID NO: 5624557 - DNA, 25 bp, Homo sapien
ataggccgtgtgattttagcatgaa

SEQ ID NO: 5624558 - DNA, 25 bp, Homo sapien
cctcctgaactctctctccgccctc

SEQ ID NO: 5624559 - DNA, 25 bp, Homo sapien
ttacaaacagagctgtgtaagcggg

SEQ ID NO: 5624560 - DNA, 25 bp, Homo sapien
tgtctatctgttcggtatctccctc

SEQ ID NO: 5624561 - DNA, 25 bp, Homo sapien
aagaagatagcataccacggaattc

SEQ ID NO: 5624562 - DNA, 25 bp, Homo sapien
gggctctgtgactctctgggttttg

SEQ ID NO: 5624563 - DNA, 25 bp, Homo sapien
aacttacatcaacaaataggccgtg

SEQ ID NO: 5624564 - DNA, 25 bp, Homo sapien
agctgaactctgcacagggcaggct

SEQ ID NO: 5624565 - DNA, 25 bp, Homo sapien
ccacggaattcaggcaacttacatc

SEQ ID NO: 5624566 - DNA, 25 bp, Homo sapien
tgctccctgcgcatcctgcctcctc

SEQ ID NO: 5624567 - DNA, 25 bp, Homo sapien
ctgtgtaagcgggttctcccggaaa

SEQ ID NO: 5624568 - DNA, 25 bp, Homo sapien
atgcgtttttagtagtgagagagtt

SEQ ID NO: 5624569 - DNA, 25 bp, Homo sapien
ctagttcctgattcttgggggttta

SEQ ID NO: 5624570 - DNA, 25 bp, Homo sapien
ctttcggaagaaatatctcagctgt

SEQ ID NO: 5624571 - DNA, 25 bp, Homo sapien
atctcagctgtggttaggctaactt

SEQ ID NO: 5624572 - DNA, 25 bp, Homo sapien
aatacgcaatgtgcaaacagtatcc

SEQ ID NO: 5624573 - DNA, 25 bp, Homo sapien
actcaaagcttctcggggcttattc

SEQ ID NO: 5624574 - DNA, 25 bp, Homo sapien
atgttagttttggagcccggaagaa

SEQ ID NO: 5624575 - DNA, 25 bp, Homo sapien
agctgtagagtttgtggggcttttt

SEQ ID NO: 5624576 - DNA, 25 bp, Homo sapien
attctaagtagttgtggagttcctc

SEQ ID NO: 5624577 - DNA, 25 bp, Homo sapien
caggaacagctgacctgacaatggg

SEQ ID NO: 5624578 - DNA, 25 bp, Homo sapien
ctgacaatggggcctttctctcaac

SEQ ID NO: 5624579 - DNA, 25 bp, Homo sapien
caactcttcagggaatctagaactc

SEQ ID NO: 5624580 - DNA, 25 bp, Homo sapien
tttaatacctcatctggcccagatt

SEQ ID NO: 5624581 - DNA, 25 bp, Homo sapien
aaatcaatcacttagactcaactct

SEQ ID NO: 5624582 - DNA, 25 bp, Homo sapien
agggaatctagaactcttcagggaa

SEQ ID NO: 5624583 - DNA, 25 bp, Homo sapien
ctcttcagggaatcaagaaaataac

SEQ ID NO: 5624584 - DNA, 25 bp, Homo sapien
aaaaggcacaaaattgaaagaaaca

SEQ ID NO: 5624585 - DNA, 25 bp, Homo sapien
aacagatgtcttccctttcaacgtc

SEQ ID NO: 5624586 - DNA, 25 bp, Homo sapien
aagaaaataacagaggctccaatgc

SEQ ID NO: 5624587 - DNA, 25 bp, Homo sapien
taataggaactctgaaatagctcgt

SEQ ID NO: 5624588 - DNA, 25 bp, Homo sapien
atgctataagatcccaaaataacgt

SEQ ID NO: 5624589 - DNA, 25 bp, Homo sapien
ttaaagtatgcaactcaatagattt

SEQ ID NO: 5624590 - DNA, 25 bp, Homo sapien
aaattcagaggtagtcatggcctct

SEQ ID NO: 5624591 - DNA, 25 bp, Homo sapien
gttatagtattaaagaaagtggctg

SEQ ID NO: 5624592 - DNA, 25 bp, Homo sapien
tagttatagtattaaagaaagtggc

SEQ ID NO: 5624593 - DNA, 25 bp, Homo sapien
tatagtattaaagaaagtggctggg

SEQ ID NO: 5624594 - DNA, 25 bp, Homo sapien
acagtcttagacaatttgtgcattt

SEQ ID NO: 5624595 - DNA, 25 bp, Homo sapien
aaatttactaaattcagaggtagtc

SEQ ID NO: 5624596 - DNA, 25 bp, Homo sapien
aattcagaggtagtcatggcctctc

SEQ ID NO: 5624597 - DNA, 25 bp, Homo sapien
atgcctgggccaacaccaaccttta

SEQ ID NO: 5624598 - DNA, 25 bp, Homo sapien
actaaattcagaggtagtcatggcc

SEQ ID NO: 5624599 - DNA, 25 bp, Homo sapien
agtcatggcctctccccaataaact

SEQ ID NO: 5624600 - DNA, 25 bp, Homo sapien
aataaactttacagtcttagacaat

SEQ ID NO: 5624601 - DNA, 25 bp, Homo sapien
tcatctggctgttcggtgacaccaa

SEQ ID NO: 5624602 - DNA, 25 bp, Homo sapien
aggcacatgcccaggaaactggtag

SEQ ID NO: 5624603 - DNA, 25 bp, Homo sapien
ggagataattccaacgtcacaaggt

SEQ ID NO: 5624604 - DNA, 25 bp, Homo sapien
caagtttatggagaaaaaacaggga

SEQ ID NO: 5624605 - DNA, 25 bp, Homo sapien
tgttcggtgacaccaaggcacatgc

SEQ ID NO: 5624606 - DNA, 25 bp, Homo sapien
gggcagagatgtggcttgtttccct

SEQ ID NO: 5624607 - DNA, 25 bp, Homo sapien
ctggtagtttccagtctggcaccac

SEQ ID NO: 5624608 - DNA, 25 bp, Homo sapien
gagcttcttgagtaatgggagataa

SEQ ID NO: 5624609 - DNA, 25 bp, Homo sapien
aagcaccattcatgtgcctggcatc

SEQ ID NO: 5624610 - DNA, 25 bp, Homo sapien
tggtgacaagtctcatctggctgtt

SEQ ID NO: 5624611 - DNA, 25 bp, Homo sapien
ttcccagcaagtttatggagaaaaa

SEQ ID NO: 5624612 - DNA, 25 bp, Homo sapien
gagtctgagagatcaagtagaagac

SEQ ID NO: 5624613 - DNA, 25 bp, Homo sapien
aacaactttggtctaatggacatcc

SEQ ID NO: 5624614 - DNA, 25 bp, Homo sapien
agggagaaattggtaagttcactag

SEQ ID NO: 5624615 - DNA, 25 bp, Homo sapien
ttcaagcaatcatgaaacatttaca

SEQ ID NO: 5624616 - DNA, 25 bp, Homo sapien
aatggacatccaacaactaaaaaac

SEQ ID NO: 5624617 - DNA, 25 bp, Homo sapien
aaaattgacagaattacagggagaa

SEQ ID NO: 5624618 - DNA, 25 bp, Homo sapien
aaacaggttataatctaggtcataa

SEQ ID NO: 5624619 - DNA, 25 bp, Homo sapien
tctaggtcataaagcaaatctcaac

SEQ ID NO: 5624620 - DNA, 25 bp, Homo sapien
atataaaactaaaattgacagaatt

SEQ ID NO: 5624621 - DNA, 25 bp, Homo sapien
agaatagaaaatttcaacacatctc

SEQ ID NO: 5624622 - DNA, 25 bp, Homo sapien
ttgacagaattacagggagaaattg

SEQ ID NO: 5624623 - DNA, 25 bp, Homo sapien
aaaaaatgtaagacagagaaagcag

SEQ ID NO: 5624624 - DNA, 25 bp, Homo sapien
gtaagagggatcccagacttgacca

SEQ ID NO: 5624625 - DNA, 25 bp, Homo sapien
aagcagctgcagaatagcaggtaag

SEQ ID NO: 5624626 - DNA, 25 bp, Homo sapien
ctttaagattagacgtggcccaaaa

SEQ ID NO: 5624627 - DNA, 25 bp, Homo sapien
gtggactttaaggatagactgttac

SEQ ID NO: 5624628 - DNA, 25 bp, Homo sapien
acctggaatgtggaaagcactccac

SEQ ID NO: 5624629 - DNA, 25 bp, Homo sapien
aactggctacggttctgagaaatct

SEQ ID NO: 5624630 - DNA, 25 bp, Homo sapien
gacgtggcccaaaaaatgtaagaca

SEQ ID NO: 5624631 - DNA, 25 bp, Homo sapien
tatggaagcagtcttgctatgggcg

SEQ ID NO: 5624632 - DNA, 25 bp, Homo sapien
tccataagactgctgtaagaattaa

SEQ ID NO: 5624633 - DNA, 25 bp, Homo sapien
tgcaaaccaagggtagagtttactc

SEQ ID NO: 5624634 - DNA, 25 bp, Homo sapien
ctgtgtttctggaggtgcatctgaa

SEQ ID NO: 5624635 - DNA, 25 bp, Homo sapien
tgcatctgaacaagactgggcagtt

SEQ ID NO: 5624636 - DNA, 25 bp, Homo sapien
ccaggcaggttcgagctttcactaa

SEQ ID NO: 5624637 - DNA, 25 bp, Homo sapien
tgctaggaatgcagagatgaatcag

SEQ ID NO: 5624638 - DNA, 25 bp, Homo sapien
ggaggctgctacaggcttagtagtt

SEQ ID NO: 5624639 - DNA, 25 bp, Homo sapien
gcctgctggcactgttctactcctc

SEQ ID NO: 5624640 - DNA, 25 bp, Homo sapien
aggcttagtagttggctctgagttc

SEQ ID NO: 5624641 - DNA, 25 bp, Homo sapien
gaatcaggcagactcagtccctgtc

SEQ ID NO: 5624642 - DNA, 25 bp, Homo sapien
caccaaggtaagtgctaggaatgca

SEQ ID NO: 5624643 - DNA, 25 bp, Homo sapien
ctcagaaagtcagagcccatatccc

SEQ ID NO: 5624644 - DNA, 25 bp, Homo sapien
gaatgtggtagctagtccctcatcc

SEQ ID NO: 5624645 - DNA, 25 bp, Homo sapien
tgaccaacaggccctctggattcaa

SEQ ID NO: 5624646 - DNA, 25 bp, Homo sapien
gaacccagtcgtggaagcctggttc

SEQ ID NO: 5624647 - DNA, 25 bp, Homo sapien
tcttcccactggcctgggtagaacc

SEQ ID NO: 5624648 - DNA, 25 bp, Homo sapien
aatcaaggctggcctgaagtttccc

SEQ ID NO: 5624649 - DNA, 25 bp, Homo sapien
ggaagttcttccaatcaaggctggc

SEQ ID NO: 5624650 - DNA, 25 bp, Homo sapien
aaaagcgatcttaaagacctccctc

SEQ ID NO: 5624651 - DNA, 25 bp, Homo sapien
ttactctgccggcctgaaatgtcct

SEQ ID NO: 5624652 - DNA, 25 bp, Homo sapien
tagcaaaatatccagtgacagccct

SEQ ID NO: 5624653 - DNA, 25 bp, Homo sapien
ttccaaaagtcacctctatgcctgt

SEQ ID NO: 5624654 - DNA, 25 bp, Homo sapien
tagacaagtcctggaaactatttta

SEQ ID NO: 5624655 - DNA, 25 bp, Homo sapien
ccaacacattgaccaacaggccctc

SEQ ID NO: 5624656 - DNA, 25 bp, Homo sapien
aaaaggcagggaacagttccagatt

SEQ ID NO: 5624657 - DNA, 25 bp, Homo sapien
tcctggccaagacgtttaacctgaa

SEQ ID NO: 5624658 - DNA, 25 bp, Homo sapien
tctaaaattagatcgtggtgccagc

SEQ ID NO: 5624659 - DNA, 25 bp, Homo sapien
aaaagatatctggcctagaagcttc

SEQ ID NO: 5624660 - DNA, 25 bp, Homo sapien
gttccagattaaaggagaccaaaga

SEQ ID NO: 5624661 - DNA, 25 bp, Homo sapien
taaacagctacagaagttgggatca

SEQ ID NO: 5624662 - DNA, 25 bp, Homo sapien
ttaaagaaatgcattgtatggggca

SEQ ID NO: 5624663 - DNA, 25 bp, Homo sapien
agatcgtggtgccagctacacaatt

SEQ ID NO: 5624664 - DNA, 25 bp, Homo sapien
aaggagaccaaagaatcacatcaac

SEQ ID NO: 5624665 - DNA, 25 bp, Homo sapien
tgtatggggcattctaaaagatatc

SEQ ID NO: 5624666 - DNA, 25 bp, Homo sapien
tacaaatgtcaagcaaggaagaaaa

SEQ ID NO: 5624667 - DNA, 25 bp, Homo sapien
agctagtcactgagggaaaaaacct

SEQ ID NO: 5624668 - DNA, 25 bp, Homo sapien
aggttttttccctcagtgactagct

SEQ ID NO: 5624669 - DNA, 25 bp, Homo sapien
cgagactgctcgggctccattccta

SEQ ID NO: 5624670 - DNA, 25 bp, Homo sapien
aattaaaaggccaaaagcttgaggc

SEQ ID NO: 5624671 - DNA, 25 bp, Homo sapien
acgggcaattcaccacgctcctcca

SEQ ID NO: 5624672 - DNA, 25 bp, Homo sapien
gtgaagcagcgtcatccccatgctg

SEQ ID NO: 5624673 - DNA, 25 bp, Homo sapien
gaggaaccacacacagccttggcct

SEQ ID NO: 5624674 - DNA, 25 bp, Homo sapien
ttctgcgtctccagagctgggacag

SEQ ID NO: 5624675 - DNA, 25 bp, Homo sapien
ttaagaaggcccagaattcagtgtt

SEQ ID NO: 5624676 - DNA, 25 bp, Homo sapien
gaaaaaggtgcataaagcagaagtg

SEQ ID NO: 5624677 - DNA, 25 bp, Homo sapien
gtgactccacacagggccctgagag

SEQ ID NO: 5624678 - DNA, 25 bp, Homo sapien
gggcatttggcagtgcagatcacca

SEQ ID NO: 5624679 - DNA, 25 bp, Homo sapien
tcatcagctccgactgtcagggaca

SEQ ID NO: 5624680 - DNA, 25 bp, Homo sapien
aggttcgaatggaatataaaaagtg

SEQ ID NO: 5624681 - DNA, 25 bp, Homo sapien
ctagaagctttctggttccttgatc

SEQ ID NO: 5624682 - DNA, 25 bp, Homo sapien
ctggatgtaacacggacctctctac

SEQ ID NO: 5624683 - DNA, 25 bp, Homo sapien
tactcaaatttccaggttcgaatgg

SEQ ID NO: 5624684 - DNA, 25 bp, Homo sapien
gacatctcatgcctctagaagcttt

SEQ ID NO: 5624685 - DNA, 25 bp, Homo sapien
ccaaaccaagctctggatgtaacac

SEQ ID NO: 5624686 - DNA, 25 bp, Homo sapien
tagcctcccattttaggatcctttc

SEQ ID NO: 5624687 - DNA, 25 bp, Homo sapien
tataaaaagtggtttagtgggatgc

SEQ ID NO: 5624688 - DNA, 25 bp, Homo sapien
ttggtgtctttatctttagcctccc

SEQ ID NO: 5624689 - DNA, 25 bp, Homo sapien
gatgtctcgctctactacccaaacc

SEQ ID NO: 5624690 - DNA, 25 bp, Homo sapien
tattggaatccgacatctcatgcct

SEQ ID NO: 5624691 - DNA, 25 bp, Homo sapien
aatgcataagtgtacaaagttcaac

SEQ ID NO: 5624692 - DNA, 25 bp, Homo sapien
caagatacgtcaaagcacaaaagat

SEQ ID NO: 5624693 - DNA, 25 bp, Homo sapien
aatgagtgtaaattgtgagactact

SEQ ID NO: 5624694 - DNA, 25 bp, Homo sapien
tgagatagtgcttggtccctgaatg

SEQ ID NO: 5624695 - DNA, 25 bp, Homo sapien
aaagcacaaaagataacagaggaaa

SEQ ID NO: 5624696 - DNA, 25 bp, Homo sapien
tgtgcaaagacccctcaagatacgt

SEQ ID NO: 5624697 - DNA, 25 bp, Homo sapien
taaacactgccaaaatatcctaaag

SEQ ID NO: 5624698 - DNA, 25 bp, Homo sapien
actgacttttgcacgttaaaaccac

SEQ ID NO: 5624699 - DNA, 25 bp, Homo sapien
gatgtaatccttgtgcaaagacccc

SEQ ID NO: 5624700 - DNA, 25 bp, Homo sapien
ctggggtaaaagttcttagaatatg

SEQ ID NO: 5624701 - DNA, 25 bp, Homo sapien
gcttggtccctgaatgatgtaatcc

SEQ ID NO: 5624702 - DNA, 25 bp, Homo sapien
aaatacatggaagcgtgaggagtgt

SEQ ID NO: 5624703 - DNA, 25 bp, Homo sapien
acactcctcacgcttccatgtattt

SEQ ID NO: 5624704 - DNA, 25 bp, Homo sapien
ctccccgctggtttggtaaacagag

SEQ ID NO: 5624705 - DNA, 25 bp, Homo sapien
ggtaaacagagttccacttggccag

SEQ ID NO: 5624706 - DNA, 25 bp, Homo sapien
ggcgagtttcctcctctcctgagcc

SEQ ID NO: 5624707 - DNA, 25 bp, Homo sapien
agaaccacatcacctgcgtccaccc

SEQ ID NO: 5624708 - DNA, 25 bp, Homo sapien
atggccagcatggcacatgactcag

SEQ ID NO: 5624709 - DNA, 25 bp, Homo sapien
tggcttgtgctctccccgctggttt

SEQ ID NO: 5624710 - DNA, 25 bp, Homo sapien
tccacttggccagaaccacatcacc

SEQ ID NO: 5624711 - DNA, 25 bp, Homo sapien
tggccagaaccacatcacctgcgtc

SEQ ID NO: 5624712 - DNA, 25 bp, Homo sapien
tgcgtccaccctgtttcgtgctgct

SEQ ID NO: 5624713 - DNA, 25 bp, Homo sapien
ccacatgggcgagtttcctcctctc

SEQ ID NO: 5624714 - DNA, 25 bp, Homo sapien
cagtgatggccagcatggcacatga

SEQ ID NO: 5624715 - DNA, 25 bp, Homo sapien
ttcggattcacccgggcagatgatt

SEQ ID NO: 5624716 - DNA, 25 bp, Homo sapien
ggctgaagtcggagctttctgtgga

SEQ ID NO: 5624717 - DNA, 25 bp, Homo sapien
ctcggcgtccgtatcgccgtcgggg

SEQ ID NO: 5624718 - DNA, 25 bp, Homo sapien
atgtctaataagcgtccctggggtt

SEQ ID NO: 5624719 - DNA, 25 bp, Homo sapien
agggaagctcctgatcttgggtaga

SEQ ID NO: 5624720 - DNA, 25 bp, Homo sapien
ctggtcaatgtggatatgtgcaaac

SEQ ID NO: 5624721 - DNA, 25 bp, Homo sapien
aaagtcactcggtgttggaggattt

SEQ ID NO: 5624722 - DNA, 25 bp, Homo sapien
atgacccagataatcgcagtgtgac

SEQ ID NO: 5624723 - DNA, 25 bp, Homo sapien
ccatggaattagtctggagcttggg

SEQ ID NO: 5624724 - DNA, 25 bp, Homo sapien
agaggcacctcgactgtggcttttg

SEQ ID NO: 5624725 - DNA, 25 bp, Homo sapien
gaggatttttagacagacgcgatac

SEQ ID NO: 5624726 - DNA, 25 bp, Homo sapien
attcgatatagcaaccctgggtgta

SEQ ID NO: 5624727 - DNA, 25 bp, Homo sapien
ccctgcttacctacacctggtccac

SEQ ID NO: 5624728 - DNA, 25 bp, Homo sapien
gagccatccaagttggtttagcctc

SEQ ID NO: 5624729 - DNA, 25 bp, Homo sapien
aaagtcatgtgacaacattggaccc

SEQ ID NO: 5624730 - DNA, 25 bp, Homo sapien
aacattggacccacatggctactgg

SEQ ID NO: 5624731 - DNA, 25 bp, Homo sapien
aacatgaattcgatatagcaaccct

SEQ ID NO: 5624732 - DNA, 25 bp, Homo sapien
cagcttgcaacatccagcaccactc

SEQ ID NO: 5624733 - DNA, 25 bp, Homo sapien
agcctctctggataggacagagctc

SEQ ID NO: 5624734 - DNA, 25 bp, Homo sapien
gaaaaaacagacacccagcttctca

SEQ ID NO: 5624735 - DNA, 25 bp, Homo sapien
gaactgacctctagaaacatgaatt

SEQ ID NO: 5624736 - DNA, 25 bp, Homo sapien
cctgggtgtactctagatcccatat

SEQ ID NO: 5624737 - DNA, 25 bp, Homo sapien
ttcatggtcagaaccgtgatacttc

SEQ ID NO: 5624738 - DNA, 25 bp, Homo sapien
tgctggattagagttgaacacactt

SEQ ID NO: 5624739 - DNA, 25 bp, Homo sapien
gaacacactttcatggtcagaaccg

SEQ ID NO: 5624740 - DNA, 25 bp, Homo sapien
cttcaaacccctagtcagccgtatc

SEQ ID NO: 5624741 - DNA, 25 bp, Homo sapien
ttagacgacacagaatcaaatgatc

SEQ ID NO: 5624742 - DNA, 25 bp, Homo sapien
actggctctgtaaccttggaccggg

SEQ ID NO: 5624743 - DNA, 25 bp, Homo sapien
ctagtcagccgtatcccaaaggacc

SEQ ID NO: 5624744 - DNA, 25 bp, Homo sapien
acacattcacaggagcccttcctcc

SEQ ID NO: 5624745 - DNA, 25 bp, Homo sapien
taacaaaggccaattgctgttcttc

SEQ ID NO: 5624746 - DNA, 25 bp, Homo sapien
cacttctgagtccaactggctctgt

SEQ ID NO: 5624747 - DNA, 25 bp, Homo sapien
caaaaagattcataacaaaggccaa

SEQ ID NO: 5624748 - DNA, 25 bp, Homo sapien
agtgagtatgaaacacgcagtggaa

SEQ ID NO: 5624749 - DNA, 25 bp, Homo sapien
tggagggactttcagcatctcagca

SEQ ID NO: 5624750 - DNA, 25 bp, Homo sapien
cctcatagatcacatgggcaggtac

SEQ ID NO: 5624751 - DNA, 25 bp, Homo sapien
gtttggggcacagtttcgctttcac

SEQ ID NO: 5624752 - DNA, 25 bp, Homo sapien
ctgagattagcaggtgattagtgga

SEQ ID NO: 5624753 - DNA, 25 bp, Homo sapien
ggtgtcgggattctgagattagcag

SEQ ID NO: 5624754 - DNA, 25 bp, Homo sapien
agactctagttggccacattggttc

SEQ ID NO: 5624755 - DNA, 25 bp, Homo sapien
tggtgtctttaactgtttggggcac

SEQ ID NO: 5624756 - DNA, 25 bp, Homo sapien
atgaaacacgcagtggaaattcagg

SEQ ID NO: 5624757 - DNA, 25 bp, Homo sapien
tgttgtcttacaagtggagggactt

SEQ ID NO: 5624758 - DNA, 25 bp, Homo sapien
gtcagcaagcaggtactgcacagac

SEQ ID NO: 5624759 - DNA, 25 bp, Homo sapien
gaccagatagtgagtattttaggct

SEQ ID NO: 5624760 - DNA, 25 bp, Homo sapien
ggtgcagcagaggtcccttacctct

SEQ ID NO: 5624761 - DNA, 25 bp, Homo sapien
taggcttgtcaggtcacatatgatc

SEQ ID NO: 5624762 - DNA, 25 bp, Homo sapien
gagtattttaggcttgtcaggtcac

SEQ ID NO: 5624763 - DNA, 25 bp, Homo sapien
tcaggtcacatatgatctctgcagc

SEQ ID NO: 5624764 - DNA, 25 bp, Homo sapien
agatagtgagtattttaggcttgtc

SEQ ID NO: 5624765 - DNA, 25 bp, Homo sapien
gagagagagagatgaccctttaaaa

SEQ ID NO: 5624766 - DNA, 25 bp, Homo sapien
ctctcagaagcacattcaggccagg

SEQ ID NO: 5624767 - DNA, 25 bp, Homo sapien
cttacctctcagtgtttagaccaga

SEQ ID NO: 5624768 - DNA, 25 bp, Homo sapien
ctcagaagcacattcaggccaggag

SEQ ID NO: 5624769 - DNA, 25 bp, Homo sapien
ttgactgcctctcagaagcacattc

SEQ ID NO: 5624770 - DNA, 25 bp, Homo sapien
gcaccagtgggagctcaatactggg

SEQ ID NO: 5624771 - DNA, 25 bp, Homo sapien
aggataaagattcaagagccgacca

SEQ ID NO: 5624772 - DNA, 25 bp, Homo sapien
ggtggcaaccccctgacaggggcag

SEQ ID NO: 5624773 - DNA, 25 bp, Homo sapien
tgcagagcaacttggagctgctgga

SEQ ID NO: 5624774 - DNA, 25 bp, Homo sapien
caccagtgggagctcaatactgggg

SEQ ID NO: 5624775 - DNA, 25 bp, Homo sapien
tcccagcgtctgactgggcaccagt

SEQ ID NO: 5624776 - DNA, 25 bp, Homo sapien
gttgcagagcaacttggagctgctg

SEQ ID NO: 5624777 - DNA, 25 bp, Homo sapien
agggtagtcccagcgtctgactggg

SEQ ID NO: 5624778 - DNA, 25 bp, Homo sapien
ggataaagattcaagagccgaccag

SEQ ID NO: 5624779 - DNA, 25 bp, Homo sapien
gtagtcccagcgtctgactgggcac

SEQ ID NO: 5624780 - DNA, 25 bp, Homo sapien
cgctgtccgcgaatccgcagtgcgg

SEQ ID NO: 5624781 - DNA, 25 bp, Homo sapien
tcttgtaagactaataaatcaaaac

SEQ ID NO: 5624782 - DNA, 25 bp, Homo sapien
ccctaacaggaagacttacaaatag

SEQ ID NO: 5624783 - DNA, 25 bp, Homo sapien
taaaatcttcaaatccctaacagga

SEQ ID NO: 5624784 - DNA, 25 bp, Homo sapien
acttacaaatagaagaaacaaaatc

SEQ ID NO: 5624785 - DNA, 25 bp, Homo sapien
caacctgctgagaattaaactgata

SEQ ID NO: 5624786 - DNA, 25 bp, Homo sapien
tctaagcatttcaaactatactcac

SEQ ID NO: 5624787 - DNA, 25 bp, Homo sapien
ttaaactgataaattcaggttctcc

SEQ ID NO: 5624788 - DNA, 25 bp, Homo sapien
ctcacaaatttgatacatctggctt

SEQ ID NO: 5624789 - DNA, 25 bp, Homo sapien
ttctcaggacttacttagttcttgt

SEQ ID NO: 5624790 - DNA, 25 bp, Homo sapien
ttcaggttctcctgagcatccaaac

SEQ ID NO: 5624791 - DNA, 25 bp, Homo sapien
ctgagcatccaaacattgactacaa

SEQ ID NO: 5624792 - DNA, 25 bp, Homo sapien
atggcccctgaagagcattaacttt

SEQ ID NO: 5624793 - DNA, 25 bp, Homo sapien
aacaactgccaagcaataaagcttt

SEQ ID NO: 5624794 - DNA, 25 bp, Homo sapien
taaacagcttctatgaatggcccct

SEQ ID NO: 5624795 - DNA, 25 bp, Homo sapien
aatgacaaagagcacccaccttctc

SEQ ID NO: 5624796 - DNA, 25 bp, Homo sapien
aagaccagacacataatctagctct

SEQ ID NO: 5624797 - DNA, 25 bp, Homo sapien
cataatctagctctcaaagtgaaaa

SEQ ID NO: 5624798 - DNA, 25 bp, Homo sapien
tggcaactagttataaaacagtatc

SEQ ID NO: 5624799 - DNA, 25 bp, Homo sapien
ctgtttaaatggtttgggtgcccaa

SEQ ID NO: 5624800 - DNA, 25 bp, Homo sapien
aagatttaagaccagacacataatc

SEQ ID NO: 5624801 - DNA, 25 bp, Homo sapien
accttctctacatttaaacagcttc

SEQ ID NO: 5624802 - DNA, 25 bp, Homo sapien
ttctatgaatggcccctgaagagca

SEQ ID NO: 5624803 - DNA, 25 bp, Homo sapien
ctggatacagctcaaagactgcacc

SEQ ID NO: 5624804 - DNA, 25 bp, Homo sapien
tttagtccaagagaataatgccaac

SEQ ID NO: 5624805 - DNA, 25 bp, Homo sapien
aaggagagagtgatcagtttatctt

SEQ ID NO: 5624806 - DNA, 25 bp, Homo sapien
ataaactgtccacgaaggagagagt

SEQ ID NO: 5624807 - DNA, 25 bp, Homo sapien
aaaccccttgattgagaggagggca

SEQ ID NO: 5624808 - DNA, 25 bp, Homo sapien
caaagtgaggaagttaatactattc

SEQ ID NO: 5624809 - DNA, 25 bp, Homo sapien
atcagaatgacaaacccatgaacgt

SEQ ID NO: 5624810 - DNA, 25 bp, Homo sapien
agtggcttacccaaagtgaggaagt

SEQ ID NO: 5624811 - DNA, 25 bp, Homo sapien
tgagaaaactgcagcccaaaaatct

SEQ ID NO: 5624812 - DNA, 25 bp, Homo sapien
tcagtgggacgatattgatcatcag

SEQ ID NO: 5624813 - DNA, 25 bp, Homo sapien
aaagagactcaaagaattgtgaacc

SEQ ID NO: 5624814 - DNA, 25 bp, Homo sapien
tctaggaagtgcaatgcagtcattc

SEQ ID NO: 5624815 - DNA, 25 bp, Homo sapien
aacaacagggatagttcctgtagct

SEQ ID NO: 5624816 - DNA, 25 bp, Homo sapien
agtgataggaaaacaatgcccaaca

SEQ ID NO: 5624817 - DNA, 25 bp, Homo sapien
ttggaaggtttttctaggaagtgca

SEQ ID NO: 5624818 - DNA, 25 bp, Homo sapien
aggggtcagttggacctgtgtacat

SEQ ID NO: 5624819 - DNA, 25 bp, Homo sapien
gccacttctggcaggttcctgagct

SEQ ID NO: 5624820 - DNA, 25 bp, Homo sapien
agtggaagttgtctatgaatcagaa

SEQ ID NO: 5624821 - DNA, 25 bp, Homo sapien
tcttccctttgtgaggggctgacag

SEQ ID NO: 5624822 - DNA, 25 bp, Homo sapien
ggctgtcaatgaaagtagtggaagt

SEQ ID NO: 5624823 - DNA, 25 bp, Homo sapien
tgtgatgctatatagttggaaggtt

SEQ ID NO: 5624824 - DNA, 25 bp, Homo sapien
ggacgagaaaagaccagttaccatc

SEQ ID NO: 5624825 - DNA, 25 bp, Homo sapien
tcctacgacacagtaggcgtgtcat

SEQ ID NO: 5624826 - DNA, 25 bp, Homo sapien
atgacacgcctactgtgtcgtagga

SEQ ID NO: 5624827 - DNA, 25 bp, Homo sapien
cagacaaaaccggctgactgctttt

SEQ ID NO: 5624828 - DNA, 25 bp, Homo sapien
ggtgcatgctctgtgacacgtttca

SEQ ID NO: 5624829 - DNA, 25 bp, Homo sapien
tgggacttgctgccagcatgagaca

SEQ ID NO: 5624830 - DNA, 25 bp, Homo sapien
caggcagctgtctgttaactgaccc

SEQ ID NO: 5624831 - DNA, 25 bp, Homo sapien
gccagcatgagacaagctccagtgg

SEQ ID NO: 5624832 - DNA, 25 bp, Homo sapien
gtggcccaggtatgtgtttgaggcc

SEQ ID NO: 5624833 - DNA, 25 bp, Homo sapien
gggcttggtcagactctgccaggag

SEQ ID NO: 5624834 - DNA, 25 bp, Homo sapien
ataaatgcaaaagatggccaaaggt

SEQ ID NO: 5624835 - DNA, 25 bp, Homo sapien
gctccagtggggtccatccccctga

SEQ ID NO: 5624836 - DNA, 25 bp, Homo sapien
ttaggctggagcattgcaactcatt

SEQ ID NO: 5624837 - DNA, 25 bp, Homo sapien
ttcccttgaagaatggggtacacca

SEQ ID NO: 5624838 - DNA, 25 bp, Homo sapien
cagagtacaccgacttcccggggag

SEQ ID NO: 5624839 - DNA, 25 bp, Homo sapien
cgatagatggtggttaaataagatg

SEQ ID NO: 5624840 - DNA, 25 bp, Homo sapien
gtcaagggacagtcaccactaggaa

SEQ ID NO: 5624841 - DNA, 25 bp, Homo sapien
tcaccactaggaagtacaacgagaa

SEQ ID NO: 5624842 - DNA, 25 bp, Homo sapien
acgagaaagagtgtccctcagatgg

SEQ ID NO: 5624843 - DNA, 25 bp, Homo sapien
taaataagatgatagtctccggggg

SEQ ID NO: 5624844 - DNA, 25 bp, Homo sapien
tggagactgggtgcatcctcagtcc

SEQ ID NO: 5624845 - DNA, 25 bp, Homo sapien
atcctcagtccacgaagggcagagg

SEQ ID NO: 5624846 - DNA, 25 bp, Homo sapien
ctcatgtcaaagcatagggtcaagg

SEQ ID NO: 5624847 - DNA, 25 bp, Homo sapien
ggctgaaggcagagttttaagttgt

SEQ ID NO: 5624848 - DNA, 25 bp, Homo sapien
gctgggtcaaacctgaacttgaacc

SEQ ID NO: 5624849 - DNA, 25 bp, Homo sapien
atggacatgacacaggcaagattaa

SEQ ID NO: 5624850 - DNA, 25 bp, Homo sapien
ttcagcaaagatggtacttcccctt

SEQ ID NO: 5624851 - DNA, 25 bp, Homo sapien
aaaagttgtgtgatacggatttcat

SEQ ID NO: 5624852 - DNA, 25 bp, Homo sapien
aggcgcttagctgtgcaatggaaat

SEQ ID NO: 5624853 - DNA, 25 bp, Homo sapien
gcaagattaatgcctaaagggtttc

SEQ ID NO: 5624854 - DNA, 25 bp, Homo sapien
caagaattcagcaaagatggtactt

SEQ ID NO: 5624855 - DNA, 25 bp, Homo sapien
agtgtggaataagaatagccaaagt

SEQ ID NO: 5624856 - DNA, 25 bp, Homo sapien
atttaacaaaggcgcttagctgtgc

SEQ ID NO: 5624857 - DNA, 25 bp, Homo sapien
tagccaaagttaatggacatgacac

SEQ ID NO: 5624858 - DNA, 25 bp, Homo sapien
aagggtttcaaaagttgtgtgatac

SEQ ID NO: 5624859 - DNA, 25 bp, Homo sapien
agaataaactgctgacaacaaaaag

SEQ ID NO: 5624860 - DNA, 25 bp, Homo sapien
taatctttaacaaatggcaggagta

SEQ ID NO: 5624861 - DNA, 25 bp, Homo sapien
tactcctgccatttgttaaagatta

SEQ ID NO: 5624862 - DNA, 25 bp, Homo sapien
actccaaatccattcagggtaggtc

SEQ ID NO: 5624863 - DNA, 25 bp, Homo sapien
caggaaataaggaagagaaacttat

SEQ ID NO: 5624864 - DNA, 25 bp, Homo sapien
acacaattctggaaggttggtgcta

SEQ ID NO: 5624865 - DNA, 25 bp, Homo sapien
gacgcgaataacaggacatatccaa

SEQ ID NO: 5624866 - DNA, 25 bp, Homo sapien
ttgttgtcatggagactagtggcca

SEQ ID NO: 5624867 - DNA, 25 bp, Homo sapien
tgagtgactgctgacgcgaataaca

SEQ ID NO: 5624868 - DNA, 25 bp, Homo sapien
tggccagaaactagagctaggttca

SEQ ID NO: 5624869 - DNA, 25 bp, Homo sapien
gcagagatgggtttgaaacctggat

SEQ ID NO: 5624870 - DNA, 25 bp, Homo sapien
tgtgccaggaactggactaagtatc

SEQ ID NO: 5624871 - DNA, 25 bp, Homo sapien
gtcttgattgagaagaatgggaatc

SEQ ID NO: 5624872 - DNA, 25 bp, Homo sapien
ttagaacactagaagctttggggtc

SEQ ID NO: 5624873 - DNA, 25 bp, Homo sapien
atttttggctgcataggcaggagtg

SEQ ID NO: 5624874 - DNA, 25 bp, Homo sapien
cagcatgctcctccacaccagattt

SEQ ID NO: 5624875 - DNA, 25 bp, Homo sapien
aagggacttacaaatcaaaggcaac

SEQ ID NO: 5624876 - DNA, 25 bp, Homo sapien
accaaggaaccacacaagaacttgc

SEQ ID NO: 5624877 - DNA, 25 bp, Homo sapien
gttcctgtgcacactgtgggggaaa

SEQ ID NO: 5624878 - DNA, 25 bp, Homo sapien
gatctctctagaaccagccagcact

SEQ ID NO: 5624879 - DNA, 25 bp, Homo sapien
gcccgcactaagggcaagatgtggt

SEQ ID NO: 5624880 - DNA, 25 bp, Homo sapien
gccagcactatgtgcatggagagcc

SEQ ID NO: 5624881 - DNA, 25 bp, Homo sapien
agaacttgctctcaaagggacttac

SEQ ID NO: 5624882 - DNA, 25 bp, Homo sapien
ggcaatggtgagaccaaatgatctc

SEQ ID NO: 5624883 - DNA, 25 bp, Homo sapien
cagtaggctgttagtagttttgggg

SEQ ID NO: 5624884 - DNA, 25 bp, Homo sapien
acttaagagccaataatgggaagct

SEQ ID NO: 5624885 - DNA, 25 bp, Homo sapien
ttagctcttgagttagacaggaagc

SEQ ID NO: 5624886 - DNA, 25 bp, Homo sapien
ttcacaaatgcagtcaaccagggga

SEQ ID NO: 5624887 - DNA, 25 bp, Homo sapien
ggctcacttcaaggaaggcagaatc

SEQ ID NO: 5624888 - DNA, 25 bp, Homo sapien
ggaattcatggcatggcctaagatc

SEQ ID NO: 5624889 - DNA, 25 bp, Homo sapien
actgaggcttcatcgtggcagctaa

SEQ ID NO: 5624890 - DNA, 25 bp, Homo sapien
cagggagcatgagcacttgtttctt

SEQ ID NO: 5624891 - DNA, 25 bp, Homo sapien
tgtgtagcaggactccccctcatct

SEQ ID NO: 5624892 - DNA, 25 bp, Homo sapien
ctctattctggactgctgatgggcc

SEQ ID NO: 5624893 - DNA, 25 bp, Homo sapien
cgtggcagctaataatgtcagggag

SEQ ID NO: 5624894 - DNA, 25 bp, Homo sapien
gttgataggccagagctcagttatt

SEQ ID NO: 5624895 - DNA, 25 bp, Homo sapien
tgcactagtcaaactctcaaggaaa

SEQ ID NO: 5624896 - DNA, 25 bp, Homo sapien
ttgtaaaggaatcaatagtaggaga

SEQ ID NO: 5624897 - DNA, 25 bp, Homo sapien
aaagagtaggttttgctcgagcaca

SEQ ID NO: 5624898 - DNA, 25 bp, Homo sapien
agatctttgggagagtttttctttc

SEQ ID NO: 5624899 - DNA, 25 bp, Homo sapien
atgtagcttgaaattttggtagtct

SEQ ID NO: 5624900 - DNA, 25 bp, Homo sapien
tctagggctgaaaattgagaataca

SEQ ID NO: 5624901 - DNA, 25 bp, Homo sapien
attggtaattgtcccatgtagcttg

SEQ ID NO: 5624902 - DNA, 25 bp, Homo sapien
tgagaatacataaaaagagtaggtt

SEQ ID NO: 5624903 - DNA, 25 bp, Homo sapien
cttaaattgaaatagttgtaaagga

SEQ ID NO: 5624904 - DNA, 25 bp, Homo sapien
taaatcccttagtgaaaaatattca

SEQ ID NO: 5624905 - DNA, 25 bp, Homo sapien
gctcgagcacaggaataaaaccatt

SEQ ID NO: 5624906 - DNA, 25 bp, Homo sapien
tcaaggatgtggtccgtgcctataa

SEQ ID NO: 5624907 - DNA, 25 bp, Homo sapien
gcaagaaggacttgctggagactat

SEQ ID NO: 5624908 - DNA, 25 bp, Homo sapien
cggtatcccacgaggcagatgtggg

SEQ ID NO: 5624909 - DNA, 25 bp, Homo sapien
gggaccgccactagcttggatacct

SEQ ID NO: 5624910 - DNA, 25 bp, Homo sapien
ccagcatcaaggtgctgtcggtatc

SEQ ID NO: 5624911 - DNA, 25 bp, Homo sapien
gtggtccgtgcctataaaagcctgc

SEQ ID NO: 5624912 - DNA, 25 bp, Homo sapien
ctataaaagcctgctgaaggagaaa

SEQ ID NO: 5624913 - DNA, 25 bp, Homo sapien
tggggcaatccgttcagaccctcca

SEQ ID NO: 5624914 - DNA, 25 bp, Homo sapien
gcattaggtccgggataactaggtg

SEQ ID NO: 5624915 - DNA, 25 bp, Homo sapien
gcccgagcaagaaggacttgctgga

SEQ ID NO: 5624916 - DNA, 25 bp, Homo sapien
tggagactatagagacccagaagaa

SEQ ID NO: 5624917 - DNA, 25 bp, Homo sapien
caccgcaccccgccagtgttttaac

SEQ ID NO: 5624918 - DNA, 25 bp, Homo sapien
gtaatgtaaactatcaactcagaac

SEQ ID NO: 5624919 - DNA, 25 bp, Homo sapien
ctccccagttgaatgagggaggcag

SEQ ID NO: 5624920 - DNA, 25 bp, Homo sapien
tgaggaactcaagaactccccagtt

SEQ ID NO: 5624921 - DNA, 25 bp, Homo sapien
ggaggcagctgcatcaagtttatgc

SEQ ID NO: 5624922 - DNA, 25 bp, Homo sapien
ttcaagacctaattgtaatgtaaac

SEQ ID NO: 5624923 - DNA, 25 bp, Homo sapien
attggatatttggtagttttttctc

SEQ ID NO: 5624924 - DNA, 25 bp, Homo sapien
ttaactagtaattggactcctattg

SEQ ID NO: 5624925 - DNA, 25 bp, Homo sapien
aactactaagaatacctccaatctc

SEQ ID NO: 5624926 - DNA, 25 bp, Homo sapien
tagtggctacatcatgggcttaccc

SEQ ID NO: 5624927 - DNA, 25 bp, Homo sapien
ttgtactagtggctacatcatgggc

SEQ ID NO: 5624928 - DNA, 25 bp, Homo sapien
aaatgttagaaaatgggccacactt

SEQ ID NO: 5624929 - DNA, 25 bp, Homo sapien
caagagggagttaccaattcaacac

SEQ ID NO: 5624930 - DNA, 25 bp, Homo sapien
tgaatgaatgatgcacagtgaacac

SEQ ID NO: 5624931 - DNA, 25 bp, Homo sapien
ctctggccaacgaaagacaaccaag

SEQ ID NO: 5624932 - DNA, 25 bp, Homo sapien
ttataatcttgggctggaggcaaat

SEQ ID NO: 5624933 - DNA, 25 bp, Homo sapien
cagaacatcatggggtgaatgaatg

SEQ ID NO: 5624934 - DNA, 25 bp, Homo sapien
cggtggctcttctgtaaggaaatgc

SEQ ID NO: 5624935 - DNA, 25 bp, Homo sapien
tgcttgaacccaaagagagaacatg

SEQ ID NO: 5624936 - DNA, 25 bp, Homo sapien
gtttcatcaatcgagaagagagggg

SEQ ID NO: 5624937 - DNA, 25 bp, Homo sapien
gctggaggcaaatgcatacagttta

SEQ ID NO: 5624938 - DNA, 25 bp, Homo sapien
tacccatgacttccacggtggctct

SEQ ID NO: 5624939 - DNA, 25 bp, Homo sapien
ttaacaccaaaccgagtcctgtcta

SEQ ID NO: 5624940 - DNA, 25 bp, Homo sapien
attgttggctactgtgtgtgaatcc

SEQ ID NO: 5624941 - DNA, 25 bp, Homo sapien
gcccggctcaagatgctgattacat

SEQ ID NO: 5624942 - DNA, 25 bp, Homo sapien
gggaaagacgtctctgaccccgaca

SEQ ID NO: 5624943 - DNA, 25 bp, Homo sapien
tgaccccgacaaatctgcgtaaatc

SEQ ID NO: 5624944 - DNA, 25 bp, Homo sapien
tacagaagcctcacaaagggaggcc

SEQ ID NO: 5624945 - DNA, 25 bp, Homo sapien
gaagtctgggcgctgcgtttcaata

SEQ ID NO: 5624946 - DNA, 25 bp, Homo sapien
tttcaatacgcgttgtacacgggcc

SEQ ID NO: 5624947 - DNA, 25 bp, Homo sapien
ctgtgttctatgggccttttggcgt

SEQ ID NO: 5624948 - DNA, 25 bp, Homo sapien
cacgggccgacaatgtggtcattgt

SEQ ID NO: 5624949 - DNA, 25 bp, Homo sapien
ttattgagggcagattagttgaagt

SEQ ID NO: 5624950 - DNA, 25 bp, Homo sapien
ttgagacacaatggatggctaagat

SEQ ID NO: 5624951 - DNA, 25 bp, Homo sapien
agaacttggtggaatccaaattctc

SEQ ID NO: 5624952 - DNA, 25 bp, Homo sapien
aactgggatcgaagtgattgacttc

SEQ ID NO: 5624953 - DNA, 25 bp, Homo sapien
ggctaagattagctcaggctcaggc

SEQ ID NO: 5624954 - DNA, 25 bp, Homo sapien
gcccagccctgcccgtttattgccg

SEQ ID NO: 5624955 - DNA, 25 bp, Homo sapien
gccggtcggtcttcctcggcgtgga

SEQ ID NO: 5624956 - DNA, 25 bp, Homo sapien
gcctggttaggtgcccttctggatg

SEQ ID NO: 5624957 - DNA, 25 bp, Homo sapien
gctcccagaggataaacctaggggc

SEQ ID NO: 5624958 - DNA, 25 bp, Homo sapien
gtctgctccaggggcctggttaggt

SEQ ID NO: 5624959 - DNA, 25 bp, Homo sapien
tacccaggcctcaagtttccacagt

SEQ ID NO: 5624960 - DNA, 25 bp, Homo sapien
tttattgccgggtacttgctggaag

SEQ ID NO: 5624961 - DNA, 25 bp, Homo sapien
accacagcctcaacctctgaagctc

SEQ ID NO: 5624962 - DNA, 25 bp, Homo sapien
catttcaaaagtagacgttaggcca

SEQ ID NO: 5624963 - DNA, 25 bp, Homo sapien
tgacaccaacatggctcaccacagc

SEQ ID NO: 5624964 - DNA, 25 bp, Homo sapien
agacaggattttgccatgttgccca

SEQ ID NO: 5624965 - DNA, 25 bp, Homo sapien
aggtgcacatcaccacacccggcta

SEQ ID NO: 5624966 - DNA, 25 bp, Homo sapien
gttaggccagttgcagtggctcaca

SEQ ID NO: 5624967 - DNA, 25 bp, Homo sapien
ggcttgagtgcagtgacaccaacat

SEQ ID NO: 5624968 - DNA, 25 bp, Homo sapien
ttctagagaaagaatttggaagggc

SEQ ID NO: 5624969 - DNA, 25 bp, Homo sapien
tcaaaagtagacgttaggccagttg

SEQ ID NO: 5624970 - DNA, 25 bp, Homo sapien
tggcaattgtgtatttcccattctc

SEQ ID NO: 5624971 - DNA, 25 bp, Homo sapien
ccaccatagccttctgagtagcttg

SEQ ID NO: 5624972 - DNA, 25 bp, Homo sapien
cacaggttaatcttaagtggtgttt

SEQ ID NO: 5624973 - DNA, 25 bp, Homo sapien
gttgatgggagagaaaatcctccat

SEQ ID NO: 5624974 - DNA, 25 bp, Homo sapien
cagaattgttgtaagaactttccaa

SEQ ID NO: 5624975 - DNA, 25 bp, Homo sapien
atgtggaaattaagaccaaactgca

SEQ ID NO: 5624976 - DNA, 25 bp, Homo sapien
gagaaaatcctccatcagaattgtt

SEQ ID NO: 5624977 - DNA, 25 bp, Homo sapien
tggcatttatttaagtagactgagc

SEQ ID NO: 5624978 - DNA, 25 bp, Homo sapien
attcatgtggaaattaagaccaaac

SEQ ID NO: 5624979 - DNA, 25 bp, Homo sapien
atcttaagtggtgtttggttgatgg

SEQ ID NO: 5624980 - DNA, 25 bp, Homo sapien
atttaagtagactgagccacaggtt

SEQ ID NO: 5624981 - DNA, 25 bp, Homo sapien
tttccaatgtgcttgacatgcatcc

SEQ ID NO: 5624982 - DNA, 25 bp, Homo sapien
aagtagactgagccacaggttaatc

SEQ ID NO: 5624983 - DNA, 25 bp, Homo sapien
cactgcagacttccaaggatggaga

SEQ ID NO: 5624984 - DNA, 25 bp, Homo sapien
aggctaggcccagaaatcgtctctg

SEQ ID NO: 5624985 - DNA, 25 bp, Homo sapien
ttaacacagcaccactacctaagga

SEQ ID NO: 5624986 - DNA, 25 bp, Homo sapien
gtcgaagatatggtccctggcattc

SEQ ID NO: 5624987 - DNA, 25 bp, Homo sapien
cactacctaaggaaacctggagaaa

SEQ ID NO: 5624988 - DNA, 25 bp, Homo sapien
tctctgttgcagtgtgtaggatgaa

SEQ ID NO: 5624989 - DNA, 25 bp, Homo sapien
ttcccatcagtcaaacgagctgttc

SEQ ID NO: 5624990 - DNA, 25 bp, Homo sapien
gacttccaaggatggagaaaaggat

SEQ ID NO: 5624991 - DNA, 25 bp, Homo sapien
aaagactacacaggcaaggtatgat

SEQ ID NO: 5624992 - DNA, 25 bp, Homo sapien
cgagctgttcagttatagaatgatt

SEQ ID NO: 5624993 - DNA, 25 bp, Homo sapien
gactacacaggcaaggtatgatctc

SEQ ID NO: 5624994 - DNA, 25 bp, Homo sapien
attggccacattgaattgttccttc

SEQ ID NO: 5624995 - DNA, 25 bp, Homo sapien
catagtagaaaaacaaattggccac

SEQ ID NO: 5624996 - DNA, 25 bp, Homo sapien
gtgaccacatgcgggtttcccctgc

SEQ ID NO: 5624997 - DNA, 25 bp, Homo sapien
cacgtgtcccagggagcaaatgtgt

SEQ ID NO: 5624998 - DNA, 25 bp, Homo sapien
tgggttcccatgtacattatgaatc

SEQ ID NO: 5624999 - DNA, 25 bp, Homo sapien
cactaagaaccacgtgtcccaggga

SEQ ID NO: 5625000 - DNA, 25 bp, Homo sapien
atatgagtgaaattcatgggttccc

SEQ ID NO: 5625001 - DNA, 25 bp, Homo sapien
ttcccctgcacactaagaaccacgt

SEQ ID NO: 5625002 - DNA, 25 bp, Homo sapien
agcaaatgtgtcctcgttcccgcct

SEQ ID NO: 5625003 - DNA, 25 bp, Homo sapien
aagtgcttgccatagtagaaaaaca

SEQ ID NO: 5625004 - DNA, 25 bp, Homo sapien
gattctaaactcaggaggaaagaga

SEQ ID NO: 5625005 - DNA, 25 bp, Homo sapien
gcctttgagaccacaactgagagat

SEQ ID NO: 5625006 - DNA, 25 bp, Homo sapien
ggcagcagtcactgagcgttccctt

SEQ ID NO: 5625007 - DNA, 25 bp, Homo sapien
tgagcgttcccttccccacggagta

SEQ ID NO: 5625008 - DNA, 25 bp, Homo sapien
ccaatctgccaactcctggggtgtt

SEQ ID NO: 5625009 - DNA, 25 bp, Homo sapien
ttcgagtgataaaattacaagccaa

SEQ ID NO: 5625010 - DNA, 25 bp, Homo sapien
tgaagtggatttagattcgagtgat

SEQ ID NO: 5625011 - DNA, 25 bp, Homo sapien
aggccagctgattgcatctcagttt

SEQ ID NO: 5625012 - DNA, 25 bp, Homo sapien
tctcgccccgagacatgttctttct

SEQ ID NO: 5625013 - DNA, 25 bp, Homo sapien
ggaaaatcctggttcatgtttggcc

SEQ ID NO: 5625014 - DNA, 25 bp, Homo sapien
tggcaggttcacgtcttctcgcccc

SEQ ID NO: 5625015 - DNA, 25 bp, Homo sapien
tagtgtttaacggagaccttcctga

SEQ ID NO: 5625016 - DNA, 25 bp, Homo sapien
tttcctaggcccttgctgccagcca

SEQ ID NO: 5625017 - DNA, 25 bp, Homo sapien
ctggtgaccaattactaagcacact

SEQ ID NO: 5625018 - DNA, 25 bp, Homo sapien
tgccctgccatcaccctgcaaggtc

SEQ ID NO: 5625019 - DNA, 25 bp, Homo sapien
cttaagtattggtgttacagaaatg

SEQ ID NO: 5625020 - DNA, 25 bp, Homo sapien
ggatgacagctggtgaccaattact

SEQ ID NO: 5625021 - DNA, 25 bp, Homo sapien
ttactaagcacactacactgggcgc

SEQ ID NO: 5625022 - DNA, 25 bp, Homo sapien
ggctgccctgccatcaccctgcaag

SEQ ID NO: 5625023 - DNA, 25 bp, Homo sapien
ttcaagctcaaaagctaaccactac

SEQ ID NO: 5625024 - DNA, 25 bp, Homo sapien
agtattggtgttacagaaatggttc

SEQ ID NO: 5625025 - DNA, 25 bp, Homo sapien
cccaggctgccctgccatcaccctg

SEQ ID NO: 5625026 - DNA, 25 bp, Homo sapien
aattactaagcacactacactgggc

SEQ ID NO: 5625027 - DNA, 25 bp, Homo sapien
gctgtagcttgccaaccactagtct

SEQ ID NO: 5625028 - DNA, 25 bp, Homo sapien
aacaggtgctataaatagaaacatt

SEQ ID NO: 5625029 - DNA, 25 bp, Homo sapien
acagttacagtgatataacaggtgc

SEQ ID NO: 5625030 - DNA, 25 bp, Homo sapien
ggttcacaggctgtagcttgccaac

SEQ ID NO: 5625031 - DNA, 25 bp, Homo sapien
cagcaggctagatttggttcacagg

SEQ ID NO: 5625032 - DNA, 25 bp, Homo sapien
catgccaacatacagttacagtgat

SEQ ID NO: 5625033 - DNA, 25 bp, Homo sapien
caaaaaacagattaagaccccctga

SEQ ID NO: 5625034 - DNA, 25 bp, Homo sapien
ccccctgatttagtagaagaaactc

SEQ ID NO: 5625035 - DNA, 25 bp, Homo sapien
gtagaagaaactcatgccaacatac

SEQ ID NO: 5625036 - DNA, 25 bp, Homo sapien
gttttccagcagttcacacaccccc

SEQ ID NO: 5625037 - DNA, 25 bp, Homo sapien
acacccccaaagacatcaacaaaaa

SEQ ID NO: 5625038 - DNA, 25 bp, Homo sapien
ggccctttgccggccatggcaggat

SEQ ID NO: 5625039 - DNA, 25 bp, Homo sapien
agtatttggaccctaggccctttgc

SEQ ID NO: 5625040 - DNA, 25 bp, Homo sapien
cagctccctgagaaatggtttatgg

SEQ ID NO: 5625041 - DNA, 25 bp, Homo sapien
atggtttatggtacagtcaggaact

SEQ ID NO: 5625042 - DNA, 25 bp, Homo sapien
ctttcaaaaaggggcagtatttgga

SEQ ID NO: 5625043 - DNA, 25 bp, Homo sapien
ttggcagtctggtttggtctctctt

SEQ ID NO: 5625044 - DNA, 25 bp, Homo sapien
ttccccacaaagacaaggaagaagc

SEQ ID NO: 5625045 - DNA, 25 bp, Homo sapien
gaaggccacctaactgttccagccc

SEQ ID NO: 5625046 - DNA, 25 bp, Homo sapien
catctaagatgtgggtcaacctttc

SEQ ID NO: 5625047 - DNA, 25 bp, Homo sapien
tggcaggatgttatactgtggccca

SEQ ID NO: 5625048 - DNA, 25 bp, Homo sapien
gttgaagtcaagtatgaatgcattc

SEQ ID NO: 5625049 - DNA, 25 bp, Homo sapien
accttgcctgagaagaatggtctac

SEQ ID NO: 5625050 - DNA, 25 bp, Homo sapien
ggagaaaccgatggcagtcatctat

SEQ ID NO: 5625051 - DNA, 25 bp, Homo sapien
agataaaagtctactcctggggaga

SEQ ID NO: 5625052 - DNA, 25 bp, Homo sapien
ccactaggtcagcaaaggtatggaa

SEQ ID NO: 5625053 - DNA, 25 bp, Homo sapien
aaagataaatgaacagtgggattgg

SEQ ID NO: 5625054 - DNA, 25 bp, Homo sapien
cagtcttaacaagtaccgtggggga

SEQ ID NO: 5625055 - DNA, 25 bp, Homo sapien
cctggggagagctaatcagtcttaa

SEQ ID NO: 5625056 - DNA, 25 bp, Homo sapien
gtcatctatgccagctaggttcatc

SEQ ID NO: 5625057 - DNA, 25 bp, Homo sapien
tttgactagtggtatggtggtatta

SEQ ID NO: 5625058 - DNA, 25 bp, Homo sapien
atcaagagatagggttaaaattagg

SEQ ID NO: 5625059 - DNA, 25 bp, Homo sapien
ttgccgaacaagagaaatcaagaga

SEQ ID NO: 5625060 - DNA, 25 bp, Homo sapien
tcagccaagacctgaatgatggagc

SEQ ID NO: 5625061 - DNA, 25 bp, Homo sapien
ggcccctcacaggtaaggcttcagc

SEQ ID NO: 5625062 - DNA, 25 bp, Homo sapien
agaggaattaagatccagcagctcc

SEQ ID NO: 5625063 - DNA, 25 bp, Homo sapien
ataattaatgccaaggagtgggaaa

SEQ ID NO: 5625064 - DNA, 25 bp, Homo sapien
gaccatgtgggcccctcacaggtaa

SEQ ID NO: 5625065 - DNA, 25 bp, Homo sapien
agccaagacctgaatgatggagcaa

SEQ ID NO: 5625066 - DNA, 25 bp, Homo sapien
attaatgccaaggagtgggaaatat

SEQ ID NO: 5625067 - DNA, 25 bp, Homo sapien
gaagcgtaagaggaattaagatcca

SEQ ID NO: 5625068 - DNA, 25 bp, Homo sapien
aaggcttcagcttacacacctaggt

SEQ ID NO: 5625069 - DNA, 25 bp, Homo sapien
gacaggaccaaaggtccgtgcaaag

SEQ ID NO: 5625070 - DNA, 25 bp, Homo sapien
atggacaggaccaaaggtccgtgca

SEQ ID NO: 5625071 - DNA, 25 bp, Homo sapien
tgcaactcacggatatgaagggcag

SEQ ID NO: 5625072 - DNA, 25 bp, Homo sapien
ctgtcacacagttgaggtcttggaa

SEQ ID NO: 5625073 - DNA, 25 bp, Homo sapien
cattgtatcccatgggggaaatgga

SEQ ID NO: 5625074 - DNA, 25 bp, Homo sapien
ttgatttatgggtggatgtattgct

SEQ ID NO: 5625075 - DNA, 25 bp, Homo sapien
taaagacaaaaacgtatgctcctac

SEQ ID NO: 5625076 - DNA, 25 bp, Homo sapien
ggtcttggaatgaactacgtatgcc

SEQ ID NO: 5625077 - DNA, 25 bp, Homo sapien
tgaaggctggagtcactcacatgac

SEQ ID NO: 5625078 - DNA, 25 bp, Homo sapien
atggaatcacggatgtgcaactcac

SEQ ID NO: 5625079 - DNA, 25 bp, Homo sapien
agctcatggggctcaactctactgc

SEQ ID NO: 5625080 - DNA, 25 bp, Homo sapien
attgctgatgatcattggggaaggg

SEQ ID NO: 5625081 - DNA, 25 bp, Homo sapien
tgaagggcagactgtataccttgtc

SEQ ID NO: 5625082 - DNA, 25 bp, Homo sapien
gtaggcatataaaggctaccggtgc

SEQ ID NO: 5625083 - DNA, 25 bp, Homo sapien
ccggtgccaatagagggtctatatt

SEQ ID NO: 5625084 - DNA, 25 bp, Homo sapien
agagagggtgcttcaatgcttactg

SEQ ID NO: 5625085 - DNA, 25 bp, Homo sapien
aatgattgagaagggcacccaacaa

SEQ ID NO: 5625086 - DNA, 25 bp, Homo sapien
agacagagaaatagcctcctggtat

SEQ ID NO: 5625087 - DNA, 25 bp, Homo sapien
gaaaaggtgatccagatggctatct

SEQ ID NO: 5625088 - DNA, 25 bp, Homo sapien
gggagcttcaggctaagacaccaag

SEQ ID NO: 5625089 - DNA, 25 bp, Homo sapien
ctcatgaacaactgctaagggcttc

SEQ ID NO: 5625090 - DNA, 25 bp, Homo sapien
gatggctatctagaaaggcaatgat

SEQ ID NO: 5625091 - DNA, 25 bp, Homo sapien
acttgggaacaataaaatgcatagg

SEQ ID NO: 5625092 - DNA, 25 bp, Homo sapien
ctatattccaggcccaaatgccatc

SEQ ID NO: 5625093 - DNA, 25 bp, Homo sapien
tgtgagccctgcaggcattttattc

SEQ ID NO: 5625094 - DNA, 25 bp, Homo sapien
gtgagcaaatcaatcgcttccggtc

SEQ ID NO: 5625095 - DNA, 25 bp, Homo sapien
cttctcaagtccttctggggctccc

SEQ ID NO: 5625096 - DNA, 25 bp, Homo sapien
ctggggctcccctttacctcctgca

SEQ ID NO: 5625097 - DNA, 25 bp, Homo sapien
ccggtcctctccctgtgagccctgc

SEQ ID NO: 5625098 - DNA, 25 bp, Homo sapien
acctcctgcagactttcccacccct

SEQ ID NO: 5625099 - DNA, 25 bp, Homo sapien
tcacctatgcctctggggaactggg

SEQ ID NO: 5625100 - DNA, 25 bp, Homo sapien
gctctattctagatgggctcttctc

SEQ ID NO: 5625101 - DNA, 25 bp, Homo sapien
acccctactcccatcctaaagcctc

SEQ ID NO: 5625102 - DNA, 25 bp, Homo sapien
tatctttaggtcctgtatgggtcag

SEQ ID NO: 5625103 - DNA, 25 bp, Homo sapien
aattcaaacccagtacggcccattc

SEQ ID NO: 5625104 - DNA, 25 bp, Homo sapien
ctcctttgtaacggagagaagcgcg

SEQ ID NO: 5625105 - DNA, 25 bp, Homo sapien
accgccagcctgacagctcctgctg

SEQ ID NO: 5625106 - DNA, 25 bp, Homo sapien
cgccagcctgacagctcctgctgcc

SEQ ID NO: 5625107 - DNA, 25 bp, Homo sapien
agttctcagcccagagttgcgggcg

SEQ ID NO: 5625108 - DNA, 25 bp, Homo sapien
agcctgacagctcctgctgccctcc

SEQ ID NO: 5625109 - DNA, 25 bp, Homo sapien
gggagaagttctcagcccagagttg

SEQ ID NO: 5625110 - DNA, 25 bp, Homo sapien
agctcctgctgccctcctgctgccg

SEQ ID NO: 5625111 - DNA, 25 bp, Homo sapien
gccacgcccctccctcgacgaaggc

SEQ ID NO: 5625112 - DNA, 25 bp, Homo sapien
gaagttctcagcccagagttgcggg

SEQ ID NO: 5625113 - DNA, 25 bp, Homo sapien
tccctcctttgtaacggagagaagc

SEQ ID NO: 5625114 - DNA, 25 bp, Homo sapien
gagaagttctcagcccagagttgcg

SEQ ID NO: 5625115 - DNA, 25 bp, Homo sapien
tgggttgacaaatgaaacagccctt

SEQ ID NO: 5625116 - DNA, 25 bp, Homo sapien
agagctagggaggctattccattag

SEQ ID NO: 5625117 - DNA, 25 bp, Homo sapien
ttgtgtgggttgacaaatgaaacag

SEQ ID NO: 5625118 - DNA, 25 bp, Homo sapien
atgaaacagcccttaaaagggctac

SEQ ID NO: 5625119 - DNA, 25 bp, Homo sapien
ttcatggtgtcggctatattgttca

SEQ ID NO: 5625120 - DNA, 25 bp, Homo sapien
aacatgcagtttgtgtgggttgaca

SEQ ID NO: 5625121 - DNA, 25 bp, Homo sapien
tcctgtgtttcatggtgtcggctat

SEQ ID NO: 5625122 - DNA, 25 bp, Homo sapien
aaagggctacttcttaaatgttctc

SEQ ID NO: 5625123 - DNA, 25 bp, Homo sapien
gattaatcctctcccttgaagggct

SEQ ID NO: 5625124 - DNA, 25 bp, Homo sapien
ataagtaatacaacatgcagtttgt

SEQ ID NO: 5625125 - DNA, 25 bp, Homo sapien
ctcccttgaagggctgaaaaagagc

SEQ ID NO: 5625126 - DNA, 25 bp, Homo sapien
tctagaaaaagaagccatggctttc

SEQ ID NO: 5625127 - DNA, 25 bp, Homo sapien
aaattggcagtatgtgtgcatttat

SEQ ID NO: 5625128 - DNA, 25 bp, Homo sapien
catgagtaattgcaacccaaaatac

SEQ ID NO: 5625129 - DNA, 25 bp, Homo sapien
attaaatacaaattatggcttcttt

SEQ ID NO: 5625130 - DNA, 25 bp, Homo sapien
cagcctgatgtctactgctacattt

SEQ ID NO: 5625131 - DNA, 25 bp, Homo sapien
aaaaggatagcagcctgatgtctac

SEQ ID NO: 5625132 - DNA, 25 bp, Homo sapien
tgaatatacgaaattttggtatcac

SEQ ID NO: 5625133 - DNA, 25 bp, Homo sapien
catctgccatgagtaattgcaaccc

SEQ ID NO: 5625134 - DNA, 25 bp, Homo sapien
taaaactataagattgatttgaata

SEQ ID NO: 5625135 - DNA, 25 bp, Homo sapien
cctccttgattaaacataaatagtt

SEQ ID NO: 5625136 - DNA, 25 bp, Homo sapien
gtaaaaaaggatagcagcctgatgt

SEQ ID NO: 5625137 - DNA, 25 bp, Homo sapien
ggaccaccagatgatggcaagttca

SEQ ID NO: 5625138 - DNA, 25 bp, Homo sapien
gaattcagactagggaccaccagat

SEQ ID NO: 5625139 - DNA, 25 bp, Homo sapien
cctcaagctgtcggtgaaattggca

SEQ ID NO: 5625140 - DNA, 25 bp, Homo sapien
tgtatacatgaacatactaggttat

SEQ ID NO: 5625141 - DNA, 25 bp, Homo sapien
aactcctcaagctgtcggtgaaatt

SEQ ID NO: 5625142 - DNA, 25 bp, Homo sapien
tacatgaacatactaggttattttc

SEQ ID NO: 5625143 - DNA, 25 bp, Homo sapien
accagatgatggcaagttcatgaaa

SEQ ID NO: 5625144 - DNA, 25 bp, Homo sapien
catgaaactcctcaagctgtcggtg

SEQ ID NO: 5625145 - DNA, 25 bp, Homo sapien
agttcatgaaactcctcaagctgtc

SEQ ID NO: 5625146 - DNA, 25 bp, Homo sapien
aagctgtcggtgaaattggcagtat

SEQ ID NO: 5625147 - DNA, 25 bp, Homo sapien
gctgtcggtgaaattggcagtatgt

SEQ ID NO: 5625148 - DNA, 25 bp, Homo sapien
taatttaccggtctggtatggacat

SEQ ID NO: 5625149 - DNA, 25 bp, Homo sapien
taaacagctaattctagacactaac

SEQ ID NO: 5625150 - DNA, 25 bp, Homo sapien
tagataaagctgattacttagagct

SEQ ID NO: 5625151 - DNA, 25 bp, Homo sapien
cccaaacatcacagtagaccaattc

SEQ ID NO: 5625152 - DNA, 25 bp, Homo sapien
tttatgacactaagaatagagctat

SEQ ID NO: 5625153 - DNA, 25 bp, Homo sapien
aatgccctcaaattagataaagctg

SEQ ID NO: 5625154 - DNA, 25 bp, Homo sapien
aagaatagagctatgacttatgcat

SEQ ID NO: 5625155 - DNA, 25 bp, Homo sapien
tcctccccaaacatcacagtagacc

SEQ ID NO: 5625156 - DNA, 25 bp, Homo sapien
ctgtcttcacatacaagtgcattaa

SEQ ID NO: 5625157 - DNA, 25 bp, Homo sapien
tctcaaagttctaggcagtaatttt

SEQ ID NO: 5625158 - DNA, 25 bp, Homo sapien
cggtctggtatggacatgaacagtt

SEQ ID NO: 5625159 - DNA, 25 bp, Homo sapien
ttttacttgacgcgtgtcgaggctg

SEQ ID NO: 5625160 - DNA, 25 bp, Homo sapien
ggacgcaccaggccgtctcacctgg

SEQ ID NO: 5625161 - DNA, 25 bp, Homo sapien
catgtgtgcttgtgagcacagatgg

SEQ ID NO: 5625162 - DNA, 25 bp, Homo sapien
ctgagcaaataaatggggagtttaa

SEQ ID NO: 5625163 - DNA, 25 bp, Homo sapien
tcagaacagttgagcaaaccttaag

SEQ ID NO: 5625164 - DNA, 25 bp, Homo sapien
tagggtctccatgcatttgttgaga

SEQ ID NO: 5625165 - DNA, 25 bp, Homo sapien
ctccatgcatttgttgagagaggga

SEQ ID NO: 5625166 - DNA, 25 bp, Homo sapien
ccttttgctcctttagacctggggc

SEQ ID NO: 5625167 - DNA, 25 bp, Homo sapien
ccaggccgtctcacctgggcaatga

SEQ ID NO: 5625168 - DNA, 25 bp, Homo sapien
agggaacatgtgtgcttgtgagcac

SEQ ID NO: 5625169 - DNA, 25 bp, Homo sapien
ttgctcctttagacctggggcagcc

SEQ ID NO: 5625170 - DNA, 25 bp, Homo sapien
aaacaatcctggtaatgacacttcc

SEQ ID NO: 5625171 - DNA, 25 bp, Homo sapien
gtgcagagaaaagactaaaagtcat

SEQ ID NO: 5625172 - DNA, 25 bp, Homo sapien
catgctgattgtaggaaactagaaa

SEQ ID NO: 5625173 - DNA, 25 bp, Homo sapien
aactatggacagacttcaggaactt

SEQ ID NO: 5625174 - DNA, 25 bp, Homo sapien
ggagggttgtgtttaatgtcgtatg

SEQ ID NO: 5625175 - DNA, 25 bp, Homo sapien
cttcaggaacttgtgtatggagagg

SEQ ID NO: 5625176 - DNA, 25 bp, Homo sapien
tgacacttccaccacaatgagcttt

SEQ ID NO: 5625177 - DNA, 25 bp, Homo sapien
ccagtgtttccttcagagggcaaag

SEQ ID NO: 5625178 - DNA, 25 bp, Homo sapien
gggtggaagtcagtcctcgcttctt

SEQ ID NO: 5625179 - DNA, 25 bp, Homo sapien
aaccactctgaacagcacacttctt

SEQ ID NO: 5625180 - DNA, 25 bp, Homo sapien
acttcaggtcgtagaaataaccact

SEQ ID NO: 5625181 - DNA, 25 bp, Homo sapien
tatttgattgtggtcagagtgtgag

SEQ ID NO: 5625182 - DNA, 25 bp, Homo sapien
caccgcgtttcaaattctggaactg

SEQ ID NO: 5625183 - DNA, 25 bp, Homo sapien
aatggcaaaaccttaatcaaggacc

SEQ ID NO: 5625184 - DNA, 25 bp, Homo sapien
ccactagcctcttccaccgcgtttc

SEQ ID NO: 5625185 - DNA, 25 bp, Homo sapien
ttctggaactgacagctagaagcag

SEQ ID NO: 5625186 - DNA, 25 bp, Homo sapien
gtgtgaggaaactgccctgcttcac

SEQ ID NO: 5625187 - DNA, 25 bp, Homo sapien
aatcaaggaccaagtaccatcctct

SEQ ID NO: 5625188 - DNA, 25 bp, Homo sapien
agttagcttcctttagacgcaatgc

SEQ ID NO: 5625189 - DNA, 25 bp, Homo sapien
ggaggttgaaggattcaatggcaaa

SEQ ID NO: 5625190 - DNA, 25 bp, Homo sapien
ttctgtacacccactagcctcttcc

SEQ ID NO: 5625191 - DNA, 25 bp, Homo sapien
aactgacagctagaagcagtggtag

SEQ ID NO: 5625192 - DNA, 25 bp, Homo sapien
gcaaatagccaggcagagacctgga

SEQ ID NO: 5625193 - DNA, 25 bp, Homo sapien
cctagtccagtgctcccttccaaag

SEQ ID NO: 5625194 - DNA, 25 bp, Homo sapien
gggcacacaacaggtccttgggaca

SEQ ID NO: 5625195 - DNA, 25 bp, Homo sapien
aagatgctaagctgcaacaagttcc

SEQ ID NO: 5625196 - DNA, 25 bp, Homo sapien
cacaacaggtccttgggacaggaag

SEQ ID NO: 5625197 - DNA, 25 bp, Homo sapien
ctgtcttccaagctgggcacacaac

SEQ ID NO: 5625198 - DNA, 25 bp, Homo sapien
gggcatctgagatgggttcatggag

SEQ ID NO: 5625199 - DNA, 25 bp, Homo sapien
ccttccaaagatgctaagctgcaac

SEQ ID NO: 5625200 - DNA, 25 bp, Homo sapien
ctgactgagtgcacagtgtcgtcca

SEQ ID NO: 5625201 - DNA, 25 bp, Homo sapien
ggatgtgagtggccactgtcttcca

SEQ ID NO: 5625202 - DNA, 25 bp, Homo sapien
gcaacaagttccaaggaagctgccc

SEQ ID NO: 5625203 - DNA, 25 bp, Homo sapien
tcagaaatagtcgcccaggattttc

SEQ ID NO: 5625204 - DNA, 25 bp, Homo sapien
aaggggaaatttgaaatcagaacta

SEQ ID NO: 5625205 - DNA, 25 bp, Homo sapien
ctatacttgaagtcacagggaaggt

SEQ ID NO: 5625206 - DNA, 25 bp, Homo sapien
tccctttcctactaaagagagctac

SEQ ID NO: 5625207 - DNA, 25 bp, Homo sapien
ggaaggtgctaatgaagttaaagaa

SEQ ID NO: 5625208 - DNA, 25 bp, Homo sapien
tgtaaacattctctaaggttaattc

SEQ ID NO: 5625209 - DNA, 25 bp, Homo sapien
gtgataaaggggaaatttgaaatca

SEQ ID NO: 5625210 - DNA, 25 bp, Homo sapien
atcagaactaactaacccaagtcaa

SEQ ID NO: 5625211 - DNA, 25 bp, Homo sapien
ttctaatgtataaaagtcctgtcta

SEQ ID NO: 5625212 - DNA, 25 bp, Homo sapien
gaactcagaaatagtcgcccaggat

SEQ ID NO: 5625213 - DNA, 25 bp, Homo sapien
cctactaaagagagctacttaaagg

SEQ ID NO: 5625214 - DNA, 25 bp, Homo sapien
aagcagaagggagctgattatttga

SEQ ID NO: 5625215 - DNA, 25 bp, Homo sapien
tcaaagctgcgtatgttttccagtt

SEQ ID NO: 5625216 - DNA, 25 bp, Homo sapien
ggtcagtattatttagtggtcagcc

SEQ ID NO: 5625217 - DNA, 25 bp, Homo sapien
ctgcttacgcagggcttcatggtga

SEQ ID NO: 5625218 - DNA, 25 bp, Homo sapien
ttgtcaaagtgatttgtgtgtgaag

SEQ ID NO: 5625219 - DNA, 25 bp, Homo sapien
tacttggcatacctgggtcagtatt

SEQ ID NO: 5625220 - DNA, 25 bp, Homo sapien
gggcttcatggtgaagcagaaggga

SEQ ID NO: 5625221 - DNA, 25 bp, Homo sapien
gagctgattatttgaatgaggtgtt

SEQ ID NO: 5625222 - DNA, 25 bp, Homo sapien
cttgcctgtacatctcccacccttt

SEQ ID NO: 5625223 - DNA, 25 bp, Homo sapien
agatccccaaaaatatgttgtagct

SEQ ID NO: 5625224 - DNA, 25 bp, Homo sapien
tttgcaaagtcttctagatccccaa

SEQ ID NO: 5625225 - DNA, 25 bp, Homo sapien
ccctccaaacacacagggctcccga

SEQ ID NO: 5625226 - DNA, 25 bp, Homo sapien
cacagggctcccgatgcagccctgc

SEQ ID NO: 5625227 - DNA, 25 bp, Homo sapien
gctgtgtcattaactaccccaaacc

SEQ ID NO: 5625228 - DNA, 25 bp, Homo sapien
aaaccccagcggctcacaacactga

SEQ ID NO: 5625229 - DNA, 25 bp, Homo sapien
agtggtgacaaagatcaagtcctct

SEQ ID NO: 5625230 - DNA, 25 bp, Homo sapien
ccatgaaacaggttacacccgcacc

SEQ ID NO: 5625231 - DNA, 25 bp, Homo sapien
tacacccgcaccaacacgtttgctg

SEQ ID NO: 5625232 - DNA, 25 bp, Homo sapien
tattgttgagatgcagtggtgacaa

SEQ ID NO: 5625233 - DNA, 25 bp, Homo sapien
tagtaagcaggtaagtgaatcaatg

SEQ ID NO: 5625234 - DNA, 25 bp, Homo sapien
acaaacagagcaaagcctggtgtat

SEQ ID NO: 5625235 - DNA, 25 bp, Homo sapien
ttagacgctagtattgttgagatgc

SEQ ID NO: 5625236 - DNA, 25 bp, Homo sapien
gtgttcacaacattccatcggggaa

SEQ ID NO: 5625237 - DNA, 25 bp, Homo sapien
ccatcggggaatcttcttaattgtc

SEQ ID NO: 5625238 - DNA, 25 bp, Homo sapien
tgtcggaggatttgtgctgttatta

SEQ ID NO: 5625239 - DNA, 25 bp, Homo sapien
aggagttacaattagctttatcgtt

SEQ ID NO: 5625240 - DNA, 25 bp, Homo sapien
gacaatccgccctgtcggaggattt

SEQ ID NO: 5625241 - DNA, 25 bp, Homo sapien
gagaactgtgggaatccaaggattt

SEQ ID NO: 5625242 - DNA, 25 bp, Homo sapien
aggattttgatagggcttccagtcc

SEQ ID NO: 5625243 - DNA, 25 bp, Homo sapien
ctctttgttgggtagacaatccgcc

SEQ ID NO: 5625244 - DNA, 25 bp, Homo sapien
ttccagtcctaagcaagaggtattt

SEQ ID NO: 5625245 - DNA, 25 bp, Homo sapien
taaccttaaacagcagcagagaact

SEQ ID NO: 5625246 - DNA, 25 bp, Homo sapien
tcattctgttaaagcttccaaggtt

SEQ ID NO: 5625247 - DNA, 25 bp, Homo sapien
aagtaggctgaacttaagttgcaaa

SEQ ID NO: 5625248 - DNA, 25 bp, Homo sapien
gataaaacattagtctccacctgcc

SEQ ID NO: 5625249 - DNA, 25 bp, Homo sapien
caaacaattggacacccttaaggga

SEQ ID NO: 5625250 - DNA, 25 bp, Homo sapien
ttgagataaaacattagtctccacc

SEQ ID NO: 5625251 - DNA, 25 bp, Homo sapien
tagtctccacctgcccaaaatacca

SEQ ID NO: 5625252 - DNA, 25 bp, Homo sapien
tccgtcttagatcattttcccaaac

SEQ ID NO: 5625253 - DNA, 25 bp, Homo sapien
aaaatgcttgtcactagcagttctt

SEQ ID NO: 5625254 - DNA, 25 bp, Homo sapien
aataccagcatccgtcttagatcat

SEQ ID NO: 5625255 - DNA, 25 bp, Homo sapien
cttaagttgcaaacattgagataaa

SEQ ID NO: 5625256 - DNA, 25 bp, Homo sapien
attggacacccttaagggacagccc

SEQ ID NO: 5625257 - DNA, 25 bp, Homo sapien
gggacagcccttaagtaggctgaac

SEQ ID NO: 5625258 - DNA, 25 bp, Homo sapien
tgacttagttgtggagagatgttga

SEQ ID NO: 5625259 - DNA, 25 bp, Homo sapien
gtacctcagatatgaaggaagaaat

SEQ ID NO: 5625260 - DNA, 25 bp, Homo sapien
tccatgtcccccaagattctgtata

SEQ ID NO: 5625261 - DNA, 25 bp, Homo sapien
cagcacagtgatactagaacttgca

SEQ ID NO: 5625262 - DNA, 25 bp, Homo sapien
tgtccagagcagtttctatgacctc

SEQ ID NO: 5625263 - DNA, 25 bp, Homo sapien
ctatgacctcaaaaggttgggaaac

SEQ ID NO: 5625264 - DNA, 25 bp, Homo sapien
gccctcatgttcagaaaagtccttt

SEQ ID NO: 5625265 - DNA, 25 bp, Homo sapien
agtgtcaacctcagaggagctgagc

SEQ ID NO: 5625266 - DNA, 25 bp, Homo sapien
gctcccactgcagaccttcaaaatc

SEQ ID NO: 5625267 - DNA, 25 bp, Homo sapien
gtcatcccattgcctgtacctcaga

SEQ ID NO: 5625268 - DNA, 25 bp, Homo sapien
cgggagaaagatgaatctccagggc

SEQ ID NO: 5625269 - DNA, 25 bp, Homo sapien
gatcagaattgtattaagccagttc

SEQ ID NO: 5625270 - DNA, 25 bp, Homo sapien
aggttaagaagtgctactggtagac

SEQ ID NO: 5625271 - DNA, 25 bp, Homo sapien
caggactgtggtctgtctctccatt

SEQ ID NO: 5625272 - DNA, 25 bp, Homo sapien
gaagatctggcattcaacgatattc

SEQ ID NO: 5625273 - DNA, 25 bp, Homo sapien
agtgagcaggttaagaagtgctact

SEQ ID NO: 5625274 - DNA, 25 bp, Homo sapien
ttgttggcatcttgatcagaattgt

SEQ ID NO: 5625275 - DNA, 25 bp, Homo sapien
agctttgtcggaggctgttctgatg

SEQ ID NO: 5625276 - DNA, 25 bp, Homo sapien
tagacaagggagaattagtaatgaa

SEQ ID NO: 5625277 - DNA, 25 bp, Homo sapien
aagaatttggatgcagctttgtcgg

SEQ ID NO: 5625278 - DNA, 25 bp, Homo sapien
ttgctggagtctcctttaagcccag

SEQ ID NO: 5625279 - DNA, 25 bp, Homo sapien
ctcacatgcctgcgtgctgagcagt

SEQ ID NO: 5625280 - DNA, 25 bp, Homo sapien
ccaattatatacaagaaaggtgagc

SEQ ID NO: 5625281 - DNA, 25 bp, Homo sapien
gcagaggggtaaaatgaccattgtt

SEQ ID NO: 5625282 - DNA, 25 bp, Homo sapien
ctcaagagccctcaaagagtacagc

SEQ ID NO: 5625283 - DNA, 25 bp, Homo sapien
cagccttagtgaataccaattatat

SEQ ID NO: 5625284 - DNA, 25 bp, Homo sapien
ccctatgaggtagcttgttagtttc

SEQ ID NO: 5625285 - DNA, 25 bp, Homo sapien
caactatctacacaaacacccacac

SEQ ID NO: 5625286 - DNA, 25 bp, Homo sapien
tgctggtaaaacatattatctcaca

SEQ ID NO: 5625287 - DNA, 25 bp, Homo sapien
catgaagactcgctcaagagccctc

SEQ ID NO: 5625288 - DNA, 25 bp, Homo sapien
caagaaaggtgagcatttaatgaat

SEQ ID NO: 5625289 - DNA, 25 bp, Homo sapien
ctcatgtggttctcacagcaaccct

SEQ ID NO: 5625290 - DNA, 25 bp, Homo sapien
gccctcaaagagtacagcagagcag

SEQ ID NO: 5625291 - DNA, 25 bp, Homo sapien
agaatgtttcagtaccaaatgggtt

SEQ ID NO: 5625292 - DNA, 25 bp, Homo sapien
attctgcagaatgtttcagtaccaa

SEQ ID NO: 5625293 - DNA, 25 bp, Homo sapien
gctcttggctgaagccttatactgt

SEQ ID NO: 5625294 - DNA, 25 bp, Homo sapien
ttcaggacacaacatcataaccact

SEQ ID NO: 5625295 - DNA, 25 bp, Homo sapien
ttggctgaagccttatactgtctgc

SEQ ID NO: 5625296 - DNA, 25 bp, Homo sapien
gtaccaaatgggttcaggacacaac

SEQ ID NO: 5625297 - DNA, 25 bp, Homo sapien
atcccaagtaaagcattataaattc

SEQ ID NO: 5625298 - DNA, 25 bp, Homo sapien
atactgtctgcagcatgttactttc

SEQ ID NO: 5625299 - DNA, 25 bp, Homo sapien
atcatatctaaaagaagctcttggc

SEQ ID NO: 5625300 - DNA, 25 bp, Homo sapien
cataaccactacaggaaaatgtaac

SEQ ID NO: 5625301 - DNA, 25 bp, Homo sapien
tcagtaccaaatgggttcaggacac

SEQ ID NO: 5625302 - DNA, 25 bp, Homo sapien
attaaaaacatagtacttgaagcca

SEQ ID NO: 5625303 - DNA, 25 bp, Homo sapien
tggcttcaagtactatgtttttaat

SEQ ID NO: 5625304 - DNA, 25 bp, Homo sapien
tgtgtggctacctcccaagctagga

SEQ ID NO: 5625305 - DNA, 25 bp, Homo sapien
acaaaatgcttaagccactgttgat

SEQ ID NO: 5625306 - DNA, 25 bp, Homo sapien
gtggctgcttgaactattggttgtc

SEQ ID NO: 5625307 - DNA, 25 bp, Homo sapien
tttgtggcagctcagttgcttagag

SEQ ID NO: 5625308 - DNA, 25 bp, Homo sapien
taggactgcaagacccttatcactc

SEQ ID NO: 5625309 - DNA, 25 bp, Homo sapien
ttggcaattttctagtggctgcttg

SEQ ID NO: 5625310 - DNA, 25 bp, Homo sapien
cttgcacatgtagctaatggctcat

SEQ ID NO: 5625311 - DNA, 25 bp, Homo sapien
attggttgtcagattgacctgattt

SEQ ID NO: 5625312 - DNA, 25 bp, Homo sapien
ttgccagctgtcttgcacatgtagc

SEQ ID NO: 5625313 - DNA, 25 bp, Homo sapien
aatggctcattatggggacacagca

SEQ ID NO: 5625314 - DNA, 25 bp, Homo sapien
gttgcttagagcaaggtgttaatga

SEQ ID NO: 5625315 - DNA, 25 bp, Homo sapien
ttgaaacttgagtcagtaaacaaat

SEQ ID NO: 5625316 - DNA, 25 bp, Homo sapien
atttgtttactgactcaagtttcaa

SEQ ID NO: 5625317 - DNA, 25 bp, Homo sapien
tctaatgtgtagctggcaattctag

SEQ ID NO: 5625318 - DNA, 25 bp, Homo sapien
tacggctgagctgtccagttccaca

SEQ ID NO: 5625319 - DNA, 25 bp, Homo sapien
agttccacagccacacacagttact

SEQ ID NO: 5625320 - DNA, 25 bp, Homo sapien
caaaatagcaagacaagatacctac

SEQ ID NO: 5625321 - DNA, 25 bp, Homo sapien
cccaacaccttggggactgaaacag

SEQ ID NO: 5625322 - DNA, 25 bp, Homo sapien
tacaggttcttatcagtgtccaaaa

SEQ ID NO: 5625323 - DNA, 25 bp, Homo sapien
gccttagtctccaccgttagcattt

SEQ ID NO: 5625324 - DNA, 25 bp, Homo sapien
tcccaagctccaagagttaagtctt

SEQ ID NO: 5625325 - DNA, 25 bp, Homo sapien
agggaaacactctacggctgagctg

SEQ ID NO: 5625326 - DNA, 25 bp, Homo sapien
agttgtagcactatcccaagctcca

SEQ ID NO: 5625327 - DNA, 25 bp, Homo sapien
aaggaaacaatctcatacaggttct

SEQ ID NO: 5625328 - DNA, 25 bp, Homo sapien
caagctttgactgaaaactcccgtt

SEQ ID NO: 5625329 - DNA, 25 bp, Homo sapien
gagtgtgtgcgtatgaaagaaaatc

SEQ ID NO: 5625330 - DNA, 25 bp, Homo sapien
ataaaggcagaaagtccttgttttc

SEQ ID NO: 5625331 - DNA, 25 bp, Homo sapien
ctttagcaattagatgggagagaag

SEQ ID NO: 5625332 - DNA, 25 bp, Homo sapien
gatgaattcataacctctgcagagt

SEQ ID NO: 5625333 - DNA, 25 bp, Homo sapien
aatagtacttgaaatgtaggttgtt

SEQ ID NO: 5625334 - DNA, 25 bp, Homo sapien
tccatttataaaggcagaaagtcct

SEQ ID NO: 5625335 - DNA, 25 bp, Homo sapien
tccagtcactggagtgtgtgcgtat

SEQ ID NO: 5625336 - DNA, 25 bp, Homo sapien
ctctgcagagttatagttcatacac

SEQ ID NO: 5625337 - DNA, 25 bp, Homo sapien
attacaggactaaaagttcattatt

SEQ ID NO: 5625338 - DNA, 25 bp, Homo sapien
attattgtttgtaaaggatgaattc

SEQ ID NO: 5625339 - DNA, 25 bp, Homo sapien
aaggaaacttctagaatcaggctgt

SEQ ID NO: 5625340 - DNA, 25 bp, Homo sapien
tatgtcacataggcttgatactgtc

SEQ ID NO: 5625341 - DNA, 25 bp, Homo sapien
gcttgatactgtctagaaaaatctc

SEQ ID NO: 5625342 - DNA, 25 bp, Homo sapien
gtgcttcaattcagggacttacaaa

SEQ ID NO: 5625343 - DNA, 25 bp, Homo sapien
taaagtgagcttatgtcacataggc

SEQ ID NO: 5625344 - DNA, 25 bp, Homo sapien
gacttacaaaagggcctccctgctc

SEQ ID NO: 5625345 - DNA, 25 bp, Homo sapien
gctgtgggctgtgactctcctcagc

SEQ ID NO: 5625346 - DNA, 25 bp, Homo sapien
tcaattcagggacttacaaaagggc

SEQ ID NO: 5625347 - DNA, 25 bp, Homo sapien
atgctccctggaaacatactttggg

SEQ ID NO: 5625348 - DNA, 25 bp, Homo sapien
aaacttctagaatcaggctgtgggc

SEQ ID NO: 5625349 - DNA, 25 bp, Homo sapien
tggggaatctgtttttaaagtgagc

SEQ ID NO: 5625350 - DNA, 25 bp, Homo sapien
actcattaaaccaagctgcaggatt

SEQ ID NO: 5625351 - DNA, 25 bp, Homo sapien
ctcagtattgggcaagttttctgtc

SEQ ID NO: 5625352 - DNA, 25 bp, Homo sapien
acacaggacacatttagtaccatac

SEQ ID NO: 5625353 - DNA, 25 bp, Homo sapien
gtgaatgttgtgagtagttattttc

SEQ ID NO: 5625354 - DNA, 25 bp, Homo sapien
tcactactgcccagacaaaaggaaa

SEQ ID NO: 5625355 - DNA, 25 bp, Homo sapien
caagctgcaggattctcagttgtgc

SEQ ID NO: 5625356 - DNA, 25 bp, Homo sapien
agagtaacctgcaaaaacatccacc

SEQ ID NO: 5625357 - DNA, 25 bp, Homo sapien
gtaccatacacaaggacatagcacc

SEQ ID NO: 5625358 - DNA, 25 bp, Homo sapien
agcacctttgattagaagtatgttc

SEQ ID NO: 5625359 - DNA, 25 bp, Homo sapien
cagatgaactgggttgaaaacattt

SEQ ID NO: 5625360 - DNA, 25 bp, Homo sapien
tcataagcaaaattctcagagtaac

SEQ ID NO: 5625361 - DNA, 25 bp, Homo sapien
ccctccttaataggggtgggcctca

SEQ ID NO: 5625362 - DNA, 25 bp, Homo sapien
cagggtccacggacatttggccaaa

SEQ ID NO: 5625363 - DNA, 25 bp, Homo sapien
atgcaatcaatcaagggccaggaga

SEQ ID NO: 5625364 - DNA, 25 bp, Homo sapien
tacgattaacattgggatgggcaga

SEQ ID NO: 5625365 - DNA, 25 bp, Homo sapien
atatgacaaagggcatgtgtgatag

SEQ ID NO: 5625366 - DNA, 25 bp, Homo sapien
atataagctgcagtttgggagaaaa

SEQ ID NO: 5625367 - DNA, 25 bp, Homo sapien
ggagaaaaacagtggaaatcaccaa

SEQ ID NO: 5625368 - DNA, 25 bp, Homo sapien
gtgttccagagagtctttcagatac

SEQ ID NO: 5625369 - DNA, 25 bp, Homo sapien
ggcagactaagtgaagcagattgcc

SEQ ID NO: 5625370 - DNA, 25 bp, Homo sapien
cttgtcactgtgaccgagcaccagg

SEQ ID NO: 5625371 - DNA, 25 bp, Homo sapien
taagagaacaaatataagctgcagt

SEQ ID NO: 5625372 - DNA, 25 bp, Homo sapien
aagccaagaaggacccaatccatca

SEQ ID NO: 5625373 - DNA, 25 bp, Homo sapien
gaggaaccttccagagcagttctgc

SEQ ID NO: 5625374 - DNA, 25 bp, Homo sapien
gagattgggcaaggttagaacttgc

SEQ ID NO: 5625375 - DNA, 25 bp, Homo sapien
atggaagcaatatgactggttactc

SEQ ID NO: 5625376 - DNA, 25 bp, Homo sapien
atcatcacagaggcacatggactga

SEQ ID NO: 5625377 - DNA, 25 bp, Homo sapien
attgccaatgccatgaggaaccttc

SEQ ID NO: 5625378 - DNA, 25 bp, Homo sapien
tgaggttggctctgtattgtgcgat

SEQ ID NO: 5625379 - DNA, 25 bp, Homo sapien
tttaagcagcatagaataagatcat

SEQ ID NO: 5625380 - DNA, 25 bp, Homo sapien
gtgcgatatgtcattggagagttcc

SEQ ID NO: 5625381 - DNA, 25 bp, Homo sapien
ccttgtaactgcagatgtggagcaa

SEQ ID NO: 5625382 - DNA, 25 bp, Homo sapien
agagttcccagcatggaagcaatat

SEQ ID NO: 5625383 - DNA, 25 bp, Homo sapien
tggtggcaaaacgatacccagctca

SEQ ID NO: 5625384 - DNA, 25 bp, Homo sapien
cctatgaggcattatggacatctag

SEQ ID NO: 5625385 - DNA, 25 bp, Homo sapien
ctcaggataatgcctcagggatgca

SEQ ID NO: 5625386 - DNA, 25 bp, Homo sapien
cagactggtgctattgaagactcgt

SEQ ID NO: 5625387 - DNA, 25 bp, Homo sapien
ggacatctagtggctgctcaggata

SEQ ID NO: 5625388 - DNA, 25 bp, Homo sapien
gcgacccaaagtcactaggaagtgc

SEQ ID NO: 5625389 - DNA, 25 bp, Homo sapien
gttcctgccactgatggacctaccc

SEQ ID NO: 5625390 - DNA, 25 bp, Homo sapien
taaaagagtccgcaaagcctatttg

SEQ ID NO: 5625391 - DNA, 25 bp, Homo sapien
tcactcctggaacaccctatgaggc

SEQ ID NO: 5625392 - DNA, 25 bp, Homo sapien
gagagtcctgggtcctctagatgac

SEQ ID NO: 5625393 - DNA, 25 bp, Homo sapien
cctcagggatgcatatcaggttagg

SEQ ID NO: 5625394 - DNA, 25 bp, Homo sapien
ttcataatgcaaaaggagtaaacag

SEQ ID NO: 5625395 - DNA, 25 bp, Homo sapien
gcattagaactgtaagctgtatagc

SEQ ID NO: 5625396 - DNA, 25 bp, Homo sapien
aagctgtatagcaaaagcacacacc

SEQ ID NO: 5625397 - DNA, 25 bp, Homo sapien
aaggagtaaacagaagataggttta

SEQ ID NO: 5625398 - DNA, 25 bp, Homo sapien
ctcatatcagagcatcacaatccag

SEQ ID NO: 5625399 - DNA, 25 bp, Homo sapien
agcacacaccgaagctccagcctat

SEQ ID NO: 5625400 - DNA, 25 bp, Homo sapien
taagtgtcaaatgattagcaacaaa

SEQ ID NO: 5625401 - DNA, 25 bp, Homo sapien
ggcaatcctcaggagttggatcatc

SEQ ID NO: 5625402 - DNA, 25 bp, Homo sapien
tcattgaagagggccttcataatgc

SEQ ID NO: 5625403 - DNA, 25 bp, Homo sapien
ctgtgtgattgctgtagtgttatta

SEQ ID NO: 5625404 - DNA, 25 bp, Homo sapien
tcacaatccagtatgagggggaaaa

SEQ ID NO: 5625405 - DNA, 25 bp, Homo sapien
tttgtatcaacaggtatgggaagaa

SEQ ID NO: 5625406 - DNA, 25 bp, Homo sapien
cagaggaatcatccctgactgtgtc

SEQ ID NO: 5625407 - DNA, 25 bp, Homo sapien
tgcagcttccggaaaagaagacgat

SEQ ID NO: 5625408 - DNA, 25 bp, Homo sapien
catcactctgagctctgactgcgct

SEQ ID NO: 5625409 - DNA, 25 bp, Homo sapien
atgggaagaaaagcttttaatgtgc

SEQ ID NO: 5625410 - DNA, 25 bp, Homo sapien
tggagtgctcctgaagagaaattcc

SEQ ID NO: 5625411 - DNA, 25 bp, Homo sapien
cctcggcatcgaccagctctcctgt

SEQ ID NO: 5625412 - DNA, 25 bp, Homo sapien
catggggactgtacctgaccctctg

SEQ ID NO: 5625413 - DNA, 25 bp, Homo sapien
ctcctgtgtaagaatgccaatggct

SEQ ID NO: 5625414 - DNA, 25 bp, Homo sapien
gggaccagtactcaagagagctctg

SEQ ID NO: 5625415 - DNA, 25 bp, Homo sapien
caggctgcctcacctcggcatcgac

SEQ ID NO: 5625416 - DNA, 25 bp, Homo sapien
tctctcgtctctggacggaagttcc

SEQ ID NO: 5625417 - DNA, 25 bp, Homo sapien
aaatagaaatttgggacgtcagctt

SEQ ID NO: 5625418 - DNA, 25 bp, Homo sapien
gatacagaaatacacggattcaccc

SEQ ID NO: 5625419 - DNA, 25 bp, Homo sapien
agacagtttcacggcagagcgtttg

SEQ ID NO: 5625420 - DNA, 25 bp, Homo sapien
cgtttggctggcgtgcttaaactca

SEQ ID NO: 5625421 - DNA, 25 bp, Homo sapien
gaggattcccagtcggtctctcgtc

SEQ ID NO: 5625422 - DNA, 25 bp, Homo sapien
tttggaccttgactgagaggattcc

SEQ ID NO: 5625423 - DNA, 25 bp, Homo sapien
accgagggatccaccggccctcggc

SEQ ID NO: 5625424 - DNA, 25 bp, Homo sapien
atcacaggaccgtacacgtaaggag

SEQ ID NO: 5625425 - DNA, 25 bp, Homo sapien
ggcctcacggactctgagccgagga

SEQ ID NO: 5625426 - DNA, 25 bp, Homo sapien
tcacccaaaacacagaaagcagtct

SEQ ID NO: 5625427 - DNA, 25 bp, Homo sapien
acccccagaagcaaccaatagctaa

SEQ ID NO: 5625428 - DNA, 25 bp, Homo sapien
ttctgtatagccacagggtacctcc

SEQ ID NO: 5625429 - DNA, 25 bp, Homo sapien
atgacaccacaataaagagcttttc

SEQ ID NO: 5625430 - DNA, 25 bp, Homo sapien
accaaagacttacaagggtatatac

SEQ ID NO: 5625431 - DNA, 25 bp, Homo sapien
ctgagttcaagtaactagacattcc

SEQ ID NO: 5625432 - DNA, 25 bp, Homo sapien
acagggtacctccttgtatggatgc

SEQ ID NO: 5625433 - DNA, 25 bp, Homo sapien
tttcccacacccccagaagcaacca

SEQ ID NO: 5625434 - DNA, 25 bp, Homo sapien
atccctgaccctagtttcccacacc

SEQ ID NO: 5625435 - DNA, 25 bp, Homo sapien
tccatttgagtaactaaagagctcc

SEQ ID NO: 5625436 - DNA, 25 bp, Homo sapien
aaaactatctccccatccctgaccc

SEQ ID NO: 5625437 - DNA, 25 bp, Homo sapien
cttacaagggtatatactgaaaact

SEQ ID NO: 5625438 - DNA, 25 bp, Homo sapien
acagagagaagttaccaggtatcaa

SEQ ID NO: 5625439 - DNA, 25 bp, Homo sapien
aagtgttctgtattagggtttgcaa

SEQ ID NO: 5625440 - DNA, 25 bp, Homo sapien
aaactgttgaccacttcggagcttt

SEQ ID NO: 5625441 - DNA, 25 bp, Homo sapien
taagcatgtcgttagattctgtgtt

SEQ ID NO: 5625442 - DNA, 25 bp, Homo sapien
catgagcctgcaaatgttgttattc

SEQ ID NO: 5625443 - DNA, 25 bp, Homo sapien
cataaacctgctgaatcacagggcc

SEQ ID NO: 5625444 - DNA, 25 bp, Homo sapien
aaaagttggaagtgaaactgttgac

SEQ ID NO: 5625445 - DNA, 25 bp, Homo sapien
aagaagcagcagaaattgcagaaat

SEQ ID NO: 5625446 - DNA, 25 bp, Homo sapien
gttggccatttgacatctgcgattc

SEQ ID NO: 5625447 - DNA, 25 bp, Homo sapien
ttttgtcaggcagctctcatgagcc

SEQ ID NO: 5625448 - DNA, 25 bp, Homo sapien
tgaggaattagccaaagcccaacta

SEQ ID NO: 5625449 - DNA, 25 bp, Homo sapien
ctgacccgaaagatcagaagcagaa

SEQ ID NO: 5625450 - DNA, 25 bp, Homo sapien
gagaatgccagaactagactatagc

SEQ ID NO: 5625451 - DNA, 25 bp, Homo sapien
cacctcctctggggcaccagatgcc

SEQ ID NO: 5625452 - DNA, 25 bp, Homo sapien
gcaggttgttcaggcccctgtgaaa

SEQ ID NO: 5625453 - DNA, 25 bp, Homo sapien
aaaataatgctgacccgaaagatca

SEQ ID NO: 5625454 - DNA, 25 bp, Homo sapien
acggaggtgaacagcactcaccttc

SEQ ID NO: 5625455 - DNA, 25 bp, Homo sapien
aaaaaatccctgagaatgccagaac

SEQ ID NO: 5625456 - DNA, 25 bp, Homo sapien
agaagcagaagacggcttgctgcta

SEQ ID NO: 5625457 - DNA, 25 bp, Homo sapien
ctccagacccattgcttggctcgat

SEQ ID NO: 5625458 - DNA, 25 bp, Homo sapien
ttgctgctatccacatctgctgctt

SEQ ID NO: 5625459 - DNA, 25 bp, Homo sapien
aatgagaagcagaccacctcctctg

SEQ ID NO: 5625460 - DNA, 25 bp, Homo sapien
ttaaagaaccagatcacataccatt

SEQ ID NO: 5625461 - DNA, 25 bp, Homo sapien
agcaaaccagagatcctctctacac

SEQ ID NO: 5625462 - DNA, 25 bp, Homo sapien
tccaaccctggacactacctcgata

SEQ ID NO: 5625463 - DNA, 25 bp, Homo sapien
tgtctcagaggataggttttgcaag

SEQ ID NO: 5625464 - DNA, 25 bp, Homo sapien
agaaactacttacaaggtggctttc

SEQ ID NO: 5625465 - DNA, 25 bp, Homo sapien
aaagaatgatgaccttccaaccctg

SEQ ID NO: 5625466 - DNA, 25 bp, Homo sapien
aataacaacaccctagctaacctgc

SEQ ID NO: 5625467 - DNA, 25 bp, Homo sapien
cactacctcgataaagcaaaccaga

SEQ ID NO: 5625468 - DNA, 25 bp, Homo sapien
tctatggaagccataaaagttgcca

SEQ ID NO: 5625469 - DNA, 25 bp, Homo sapien
aagtcagaatactttgcagacatac

SEQ ID NO: 5625470 - DNA, 25 bp, Homo sapien
gttttgcaagattcaaaggaaaatc

SEQ ID NO: 5625471 - DNA, 25 bp, Homo sapien
gcttcgcggacctctttggtttcca

SEQ ID NO: 5625472 - DNA, 25 bp, Homo sapien
ttatttccctgaatctgattggctc

SEQ ID NO: 5625473 - DNA, 25 bp, Homo sapien
tccctccactgtggggaataaaggc

SEQ ID NO: 5625474 - DNA, 25 bp, Homo sapien
ttccatccctccactgtggggaata

SEQ ID NO: 5625475 - DNA, 25 bp, Homo sapien
ggtggagttctgattggccagtcca

SEQ ID NO: 5625476 - DNA, 25 bp, Homo sapien
gcagcaataaacaccagaagctgaa

SEQ ID NO: 5625477 - DNA, 25 bp, Homo sapien
caataaacaccagaagctgaagctg

SEQ ID NO: 5625478 - DNA, 25 bp, Homo sapien
attggctcacctgaaccaatcacag

SEQ ID NO: 5625479 - DNA, 25 bp, Homo sapien
cgcggacctctttggtttccatccc

SEQ ID NO: 5625480 - DNA, 25 bp, Homo sapien
gccagtccagagtcacatgtccact

SEQ ID NO: 5625481 - DNA, 25 bp, Homo sapien
attggccagtccagagtcacatgtc

SEQ ID NO: 5625482 - DNA, 25 bp, Homo sapien
ggtgctatgtgtaaaattgtggaat

SEQ ID NO: 5625483 - DNA, 25 bp, Homo sapien
aggagaaaaatctgattacataaaa

SEQ ID NO: 5625484 - DNA, 25 bp, Homo sapien
ttcagcaggcactccaccaatatgt

SEQ ID NO: 5625485 - DNA, 25 bp, Homo sapien
gtagggatctaccttgaaggacaac

SEQ ID NO: 5625486 - DNA, 25 bp, Homo sapien
aaggattaaacatacaaggcaaaac

SEQ ID NO: 5625487 - DNA, 25 bp, Homo sapien
cttgaaggacaacataagcttccag

SEQ ID NO: 5625488 - DNA, 25 bp, Homo sapien
taaatgaataagaactatttcacac

SEQ ID NO: 5625489 - DNA, 25 bp, Homo sapien
ttccttaactggtgctatgtgtaaa

SEQ ID NO: 5625490 - DNA, 25 bp, Homo sapien
ctacacatgccttaaaggattaaac

SEQ ID NO: 5625491 - DNA, 25 bp, Homo sapien
tgtggaattcatcctgagggctgaa

SEQ ID NO: 5625492 - DNA, 25 bp, Homo sapien
aagagtactaccttcagcaggcact

SEQ ID NO: 5625493 - DNA, 25 bp, Homo sapien
catctctatgttggggtagagactt

SEQ ID NO: 5625494 - DNA, 25 bp, Homo sapien
aggcctaaggcaataatccttgagc

SEQ ID NO: 5625495 - DNA, 25 bp, Homo sapien
gatgtgtgataactaggcctaaggc

SEQ ID NO: 5625496 - DNA, 25 bp, Homo sapien
aaagcacctaatacagttagagtac

SEQ ID NO: 5625497 - DNA, 25 bp, Homo sapien
tatcgagctattacagagagttaac

SEQ ID NO: 5625498 - DNA, 25 bp, Homo sapien
ggtagagacttgctgactgagtgta

SEQ ID NO: 5625499 - DNA, 25 bp, Homo sapien
ggttggtgaaacagtacttttcatc

SEQ ID NO: 5625500 - DNA, 25 bp, Homo sapien
ttgctctggcacctggatacctatc

SEQ ID NO: 5625501 - DNA, 25 bp, Homo sapien
tgcaaatgaagatttccctgcccac

SEQ ID NO: 5625502 - DNA, 25 bp, Homo sapien
aataatccttgagcaaaagactctt

SEQ ID NO: 5625503 - DNA, 25 bp, Homo sapien
ggaagggctttggccaatctgcttt

SEQ ID NO: 5625504 - DNA, 25 bp, Homo sapien
agataaacctatgaagggaagaatt

SEQ ID NO: 5625505 - DNA, 25 bp, Homo sapien
tgggagaatcaaatgcagataaacc

SEQ ID NO: 5625506 - DNA, 25 bp, Homo sapien
ttaatgtgccaccatcaccactatc

SEQ ID NO: 5625507 - DNA, 25 bp, Homo sapien
aagtgtaccatttaagaacagtatt

SEQ ID NO: 5625508 - DNA, 25 bp, Homo sapien
ggaagtcaatgaaaatagcaattac

SEQ ID NO: 5625509 - DNA, 25 bp, Homo sapien
atccttgtacaagtatgggagaatc

SEQ ID NO: 5625510 - DNA, 25 bp, Homo sapien
cgtcctcaaggttcattcatgctgt

SEQ ID NO: 5625511 - DNA, 25 bp, Homo sapien
tgatggccgattgggctgcttctat

SEQ ID NO: 5625512 - DNA, 25 bp, Homo sapien
catctactgatggccgattgggctg

SEQ ID NO: 5625513 - DNA, 25 bp, Homo sapien
tcctgtaaaactgcataacgtcctc

SEQ ID NO: 5625514 - DNA, 25 bp, Homo sapien
catgctgtagccagtgtcagaattt

SEQ ID NO: 5625515 - DNA, 25 bp, Homo sapien
tgtactaagaaggcagttagagctg

SEQ ID NO: 5625516 - DNA, 25 bp, Homo sapien
tactttaagaagctgacgcgttatc

SEQ ID NO: 5625517 - DNA, 25 bp, Homo sapien
aaggcagaaagacatgtactaagaa

SEQ ID NO: 5625518 - DNA, 25 bp, Homo sapien
agaaagacatgtactaagaaggcag

SEQ ID NO: 5625519 - DNA, 25 bp, Homo sapien
taagtccacaatatgtcattagggg

SEQ ID NO: 5625520 - DNA, 25 bp, Homo sapien
actcatatgcttcaaaggcagaaag

SEQ ID NO: 5625521 - DNA, 25 bp, Homo sapien
ggggagaatgactttggcaaactca

SEQ ID NO: 5625522 - DNA, 25 bp, Homo sapien
caggggcactcttcacagaaattaa

SEQ ID NO: 5625523 - DNA, 25 bp, Homo sapien
aaggcagttagagctggaaaattct

SEQ ID NO: 5625524 - DNA, 25 bp, Homo sapien
aattacaactttagcaagagaataa

SEQ ID NO: 5625525 - DNA, 25 bp, Homo sapien
agaagctgacgcgttatccagacac

SEQ ID NO: 5625526 - DNA, 25 bp, Homo sapien
attatgatggaaacaacaaagggta

SEQ ID NO: 5625527 - DNA, 25 bp, Homo sapien
cactagaatcagtgggtaaagtgag

SEQ ID NO: 5625528 - DNA, 25 bp, Homo sapien
tgctaaggcttactaaccaaggact

SEQ ID NO: 5625529 - DNA, 25 bp, Homo sapien
gtaaagtgagagaaagctgattttc

SEQ ID NO: 5625530 - DNA, 25 bp, Homo sapien
acaaagggtaaacatgatacctggc

SEQ ID NO: 5625531 - DNA, 25 bp, Homo sapien
atgtctggaatttgattgggctacc

SEQ ID NO: 5625532 - DNA, 25 bp, Homo sapien
cagtgtgaactgagtagcctgcttg

SEQ ID NO: 5625533 - DNA, 25 bp, Homo sapien
tgcttgctgcagactcactaaatat

SEQ ID NO: 5625534 - DNA, 25 bp, Homo sapien
tgtatgtaaacgatgatggcaagga

SEQ ID NO: 5625535 - DNA, 25 bp, Homo sapien
ttgggctaccctgcgcttccccatc

SEQ ID NO: 5625536 - DNA, 25 bp, Homo sapien
cacacagcaagcactcaaacatctg

SEQ ID NO: 5625537 - DNA, 25 bp, Homo sapien
gaaactgtagcatattggaatttta

SEQ ID NO: 5625538 - DNA, 25 bp, Homo sapien
ttttagtacagacacatcagagagg

SEQ ID NO: 5625539 - DNA, 25 bp, Homo sapien
tttggtcgacttaaactcactcttc

SEQ ID NO: 5625540 - DNA, 25 bp, Homo sapien
tgggagatagcataacaaagctggt

SEQ ID NO: 5625541 - DNA, 25 bp, Homo sapien
aaaggctggtcatatccagatatct

SEQ ID NO: 5625542 - DNA, 25 bp, Homo sapien
taaataacatttagacacagaggtc

SEQ ID NO: 5625543 - DNA, 25 bp, Homo sapien
gacacagaggtcaataagatgttcc

SEQ ID NO: 5625544 - DNA, 25 bp, Homo sapien
ctgagtagacatagtaccagatcac

SEQ ID NO: 5625545 - DNA, 25 bp, Homo sapien
taacaaagctggtaagatatttttc

SEQ ID NO: 5625546 - DNA, 25 bp, Homo sapien
accagatcacttacaaactacaagc

SEQ ID NO: 5625547 - DNA, 25 bp, Homo sapien
ttgtggcactcctgaataatttccc

SEQ ID NO: 5625548 - DNA, 25 bp, Homo sapien
ttaggacaaggccttacttacacac

SEQ ID NO: 5625549 - DNA, 25 bp, Homo sapien
caaccaccacaacagttagggcttt

SEQ ID NO: 5625550 - DNA, 25 bp, Homo sapien
tgtgtgtattgcaagtccaaaggat

SEQ ID NO: 5625551 - DNA, 25 bp, Homo sapien
caaatggagctttactaaggaagag

SEQ ID NO: 5625552 - DNA, 25 bp, Homo sapien
ataactcagaatgcaaaatgtactc

SEQ ID NO: 5625553 - DNA, 25 bp, Homo sapien
aaagaaaaagcagaacttagagtcc

SEQ ID NO: 5625554 - DNA, 25 bp, Homo sapien
agtactgctccatcaagactcagcc

SEQ ID NO: 5625555 - DNA, 25 bp, Homo sapien
ttaaggaaggagagttattgcctag

SEQ ID NO: 5625556 - DNA, 25 bp, Homo sapien
gtccaaaggataaggagaacttcta

SEQ ID NO: 5625557 - DNA, 25 bp, Homo sapien
gtgatcaataccagtgagaaaggtg

SEQ ID NO: 5625558 - DNA, 25 bp, Homo sapien
tataatgtccaggttaggagagaag

SEQ ID NO: 5625559 - DNA, 25 bp, Homo sapien
gataaacaaagcacccaattcctac

SEQ ID NO: 5625560 - DNA, 25 bp, Homo sapien
gatattgacagaaactatacaaatc

SEQ ID NO: 5625561 - DNA, 25 bp, Homo sapien
aatgttgccataaggtatgtgtacc

SEQ ID NO: 5625562 - DNA, 25 bp, Homo sapien
atcactagtgctgtggtggcacctg

SEQ ID NO: 5625563 - DNA, 25 bp, Homo sapien
cctgatatcctacccctacggcaat

SEQ ID NO: 5625564 - DNA, 25 bp, Homo sapien
ctacggcaatcctttgagaagcacc

SEQ ID NO: 5625565 - DNA, 25 bp, Homo sapien
tagaatttagagtgctaggaatgtt

SEQ ID NO: 5625566 - DNA, 25 bp, Homo sapien
tagagtgctaggaatgttgccataa

SEQ ID NO: 5625567 - DNA, 25 bp, Homo sapien
ctgtgctcccacatcctgatatcct

SEQ ID NO: 5625568 - DNA, 25 bp, Homo sapien
actgtcccagaagtctaggggcaat

SEQ ID NO: 5625569 - DNA, 25 bp, Homo sapien
ctaggggcaatgactctccatcact

SEQ ID NO: 5625570 - DNA, 25 bp, Homo sapien
gatcctcggggtatttatgcagtat

SEQ ID NO: 5625571 - DNA, 25 bp, Homo sapien
aaaaagatcctcggggtatttatgc

SEQ ID NO: 5625572 - DNA, 25 bp, Homo sapien
gaaacaatttccatgtctcaagacc

SEQ ID NO: 5625573 - DNA, 25 bp, Homo sapien
caaagcaatgtaattccaaaaagat

SEQ ID NO: 5625574 - DNA, 25 bp, Homo sapien
taaaatggttactttgataatacaa

SEQ ID NO: 5625575 - DNA, 25 bp, Homo sapien
tacttgttctgcttctatcaccatc

SEQ ID NO: 5625576 - DNA, 25 bp, Homo sapien
aggaattagattcatgatgctactt

SEQ ID NO: 5625577 - DNA, 25 bp, Homo sapien
tccattttctggaggaagggacata

SEQ ID NO: 5625578 - DNA, 25 bp, Homo sapien
ctcaagaccattacattggttaccc

SEQ ID NO: 5625579 - DNA, 25 bp, Homo sapien
aatcactaaatcctaaaacttctct

SEQ ID NO: 5625580 - DNA, 25 bp, Homo sapien
ctatcaccatcaaacattaggtaaa

SEQ ID NO: 5625581 - DNA, 25 bp, Homo sapien
ggctctggggaaaaatctaaatgtc

SEQ ID NO: 5625582 - DNA, 25 bp, Homo sapien
agcaagtccctaagataaaaacatc

SEQ ID NO: 5625583 - DNA, 25 bp, Homo sapien
tttggatagtcggatttctcagccc

SEQ ID NO: 5625584 - DNA, 25 bp, Homo sapien
gaccactatgccagagggctgtctt

SEQ ID NO: 5625585 - DNA, 25 bp, Homo sapien
aggggagatgtaattgtcaagctca

SEQ ID NO: 5625586 - DNA, 25 bp, Homo sapien
aaggaggatcacctacctggctctc

SEQ ID NO: 5625587 - DNA, 25 bp, Homo sapien
atctgagcagcaaatattccccaca

SEQ ID NO: 5625588 - DNA, 25 bp, Homo sapien
acccaagaaagaataccataacagc

SEQ ID NO: 5625589 - DNA, 25 bp, Homo sapien
ccaaaagcataccacaaggaggatc

SEQ ID NO: 5625590 - DNA, 25 bp, Homo sapien
cccacagatgtaggctctggggaaa

SEQ ID NO: 5625591 - DNA, 25 bp, Homo sapien
ccacaagagaatgaccactatgcca

SEQ ID NO: 5625592 - DNA, 25 bp, Homo sapien
gaggccccggtcccggcggagagcg

SEQ ID NO: 5625593 - DNA, 25 bp, Homo sapien
cgctctccgccgggaccggggcctc

SEQ ID NO: 5625594 - DNA, 25 bp, Homo sapien
agagtgatatttctggatggtggta

SEQ ID NO: 5625595 - DNA, 25 bp, Homo sapien
aaaaagtcttacacacgtgttatgt

SEQ ID NO: 5625596 - DNA, 25 bp, Homo sapien
atggtggtagtatgagtaattgaca

SEQ ID NO: 5625597 - DNA, 25 bp, Homo sapien
tttataaggaagcatgcgtgttcag

SEQ ID NO: 5625598 - DNA, 25 bp, Homo sapien
ggaaggatgtgtgccaacatgttca

SEQ ID NO: 5625599 - DNA, 25 bp, Homo sapien
gttatgtgtagagaaaaatgttagg

SEQ ID NO: 5625600 - DNA, 25 bp, Homo sapien
gccaacatgttcagagtgatatttc

SEQ ID NO: 5625601 - DNA, 25 bp, Homo sapien
gtgtgccaacatgttcagagtgata

SEQ ID NO: 5625602 - DNA, 25 bp, Homo sapien
ggtggtagtatgagtaattgacatc

SEQ ID NO: 5625603 - DNA, 25 bp, Homo sapien
ttttataaggaagcatgcgtgttca

SEQ ID NO: 5625604 - DNA, 25 bp, Homo sapien
gtgcccggctgagttatgtaaactt

SEQ ID NO: 5625605 - DNA, 25 bp, Homo sapien
gaaggaatccaaactgacgaacatc

SEQ ID NO: 5625606 - DNA, 25 bp, Homo sapien
ctttgtcgtgcagtgatgatgaagg

SEQ ID NO: 5625607 - DNA, 25 bp, Homo sapien
taggtggtcgtaagtgctatagaaa

SEQ ID NO: 5625608 - DNA, 25 bp, Homo sapien
ctaggatgtagggttttaaatttca

SEQ ID NO: 5625609 - DNA, 25 bp, Homo sapien
aagaggcctcatagaatgctttgtc

SEQ ID NO: 5625610 - DNA, 25 bp, Homo sapien
cagcagcgccacatcatggacatca

SEQ ID NO: 5625611 - DNA, 25 bp, Homo sapien
cagctaatatagaaggataacaata

SEQ ID NO: 5625612 - DNA, 25 bp, Homo sapien
ttctccatgttaagggagagaggac

SEQ ID NO: 5625613 - DNA, 25 bp, Homo sapien
gctatagaaaaaacgaagcaggaaa

SEQ ID NO: 5625614 - DNA, 25 bp, Homo sapien
taaatttcagtagggtgtcaggtga

SEQ ID NO: 5625615 - DNA, 25 bp, Homo sapien
gcctgcagcccaagaggcctcatag

SEQ ID NO: 5625616 - DNA, 25 bp, Homo sapien
cggacagccagaaacactagtttta

SEQ ID NO: 5625617 - DNA, 25 bp, Homo sapien
tagacatttcagtttaacgtgccct

SEQ ID NO: 5625618 - DNA, 25 bp, Homo sapien
aacgtgcccttttcaaatcttctgg

SEQ ID NO: 5625619 - DNA, 25 bp, Homo sapien
tgttgttgctttatgttagtagttt

SEQ ID NO: 5625620 - DNA, 25 bp, Homo sapien
gtggaaacagagccaactagaatca

SEQ ID NO: 5625621 - DNA, 25 bp, Homo sapien
atctggcaactctaggaactcttaa

SEQ ID NO: 5625622 - DNA, 25 bp, Homo sapien
gagccaactagaatcacggacagcc

SEQ ID NO: 5625623 - DNA, 25 bp, Homo sapien
attagtgagaactgtatgcaatggg

SEQ ID NO: 5625624 - DNA, 25 bp, Homo sapien
catttgcacacaggtggaaacagag

SEQ ID NO: 5625625 - DNA, 25 bp, Homo sapien
ttggggactacatttgcacacaggt

SEQ ID NO: 5625626 - DNA, 25 bp, Homo sapien
taaagaaattggggactacatttgc

SEQ ID NO: 5625627 - DNA, 25 bp, Homo sapien
ttggagctatatgcttcgacgtcta

SEQ ID NO: 5625628 - DNA, 25 bp, Homo sapien
aggtgctttggagctatatgcttcg

SEQ ID NO: 5625629 - DNA, 25 bp, Homo sapien
ttcgacgtctaactcacagccacag

SEQ ID NO: 5625630 - DNA, 25 bp, Homo sapien
cacagccacagtcattctaactaaa

SEQ ID NO: 5625631 - DNA, 25 bp, Homo sapien
ggaagtcaaacgctgtaacacaaat

SEQ ID NO: 5625632 - DNA, 25 bp, Homo sapien
acacaccccctagacagtgctggag

SEQ ID NO: 5625633 - DNA, 25 bp, Homo sapien
gtaatgaacacaccccctagacagt

SEQ ID NO: 5625634 - DNA, 25 bp, Homo sapien
aatggacttccacacacaaggagat

SEQ ID NO: 5625635 - DNA, 25 bp, Homo sapien
tgtgcggaagtcaaacgctgtaaca

SEQ ID NO: 5625636 - DNA, 25 bp, Homo sapien
cgctgtaacacaaatggacttccac

SEQ ID NO: 5625637 - DNA, 25 bp, Homo sapien
atgggtaatgaacacaccccctaga

SEQ ID NO: 5625638 - DNA, 25 bp, Homo sapien
gtatcttaatggatgcctatgaccc

SEQ ID NO: 5625639 - DNA, 25 bp, Homo sapien
agcccacggacaatcacaagatctt

SEQ ID NO: 5625640 - DNA, 25 bp, Homo sapien
aacaaaaaggcaagcttatgccaac

SEQ ID NO: 5625641 - DNA, 25 bp, Homo sapien
gccaacactaacagaaacactaata

SEQ ID NO: 5625642 - DNA, 25 bp, Homo sapien
tatagaccataacaaaagcatagct

SEQ ID NO: 5625643 - DNA, 25 bp, Homo sapien
gggattaaggaaacaatgtgacaga

SEQ ID NO: 5625644 - DNA, 25 bp, Homo sapien
tatcatggtgggacaacagtattga

SEQ ID NO: 5625645 - DNA, 25 bp, Homo sapien
atgtcaactatcatggtgggacaac

SEQ ID NO: 5625646 - DNA, 25 bp, Homo sapien
aataaatcaaggactgaagataaac

SEQ ID NO: 5625647 - DNA, 25 bp, Homo sapien
caatgtgacagagttttaagatatc

SEQ ID NO: 5625648 - DNA, 25 bp, Homo sapien
gaacaaaagaaaccatgtgagccca

SEQ ID NO: 5625649 - DNA, 25 bp, Homo sapien
ttctaccaacacagagagatctttc

SEQ ID NO: 5625650 - DNA, 25 bp, Homo sapien
ttattgaataggtgtgacttgtcac

SEQ ID NO: 5625651 - DNA, 25 bp, Homo sapien
cattcctttaggggataaaatctgg

SEQ ID NO: 5625652 - DNA, 25 bp, Homo sapien
gcggaattggaagccttacttacac

SEQ ID NO: 5625653 - DNA, 25 bp, Homo sapien
gacttgtcacccacttcacacacca

SEQ ID NO: 5625654 - DNA, 25 bp, Homo sapien
ataagggtgtcagataaggaattat

SEQ ID NO: 5625655 - DNA, 25 bp, Homo sapien
caagttgttgaaacccagaaatccc

SEQ ID NO: 5625656 - DNA, 25 bp, Homo sapien
agaatagaaaaactacccacaattc

SEQ ID NO: 5625657 - DNA, 25 bp, Homo sapien
ttgaaaagtgtagataaacacaaaa

SEQ ID NO: 5625658 - DNA, 25 bp, Homo sapien
caaaacaagaccttaactgaagtta

SEQ ID NO: 5625659 - DNA, 25 bp, Homo sapien
aaacatctccagccataagggtgtc

SEQ ID NO: 5625660 - DNA, 25 bp, Homo sapien
gcccagcttgtcccacgcaggtctg

SEQ ID NO: 5625661 - DNA, 25 bp, Homo sapien
actgcctacattcctgggagtgggg

SEQ ID NO: 5625662 - DNA, 25 bp, Homo sapien
gtctggcgcccccttgcccactgtc

SEQ ID NO: 5625663 - DNA, 25 bp, Homo sapien
ccctccgccgaacagtctgtccacc

SEQ ID NO: 5625664 - DNA, 25 bp, Homo sapien
tgaacttgcgcggaaccctctaatc

SEQ ID NO: 5625665 - DNA, 25 bp, Homo sapien
gtctgtccaccagtcagcgagcttc

SEQ ID NO: 5625666 - DNA, 25 bp, Homo sapien
tgtttaacccccaagcaagcagcac

SEQ ID NO: 5625667 - DNA, 25 bp, Homo sapien
cgggagggtatcatagccgccctcc

SEQ ID NO: 5625668 - DNA, 25 bp, Homo sapien
gggaactgtgatgttgtggttgttt

SEQ ID NO: 5625669 - DNA, 25 bp, Homo sapien
ctgtgttgctgctcaaggagtgtac

SEQ ID NO: 5625670 - DNA, 25 bp, Homo sapien
caagcaagcagcacccctgaaactg

SEQ ID NO: 5625671 - DNA, 25 bp, Homo sapien
cttactgtggctgaagagcaaagta

SEQ ID NO: 5625672 - DNA, 25 bp, Homo sapien
ttttgaatagaggaaatatgagcaa

SEQ ID NO: 5625673 - DNA, 25 bp, Homo sapien
tgagggcaataacaaataggctatg

SEQ ID NO: 5625674 - DNA, 25 bp, Homo sapien
tacatgcaatcaacccagcctggga

SEQ ID NO: 5625675 - DNA, 25 bp, Homo sapien
cctatcctaagggtaagagtcatta

SEQ ID NO: 5625676 - DNA, 25 bp, Homo sapien
aaagcccagaatccagagagctgat

SEQ ID NO: 5625677 - DNA, 25 bp, Homo sapien
agcctgctaaggagttcagacccta

SEQ ID NO: 5625678 - DNA, 25 bp, Homo sapien
tctgaaggatgagtaattgtgatac

SEQ ID NO: 5625679 - DNA, 25 bp, Homo sapien
gtggcaagaaagacatgaagtataa

SEQ ID NO: 5625680 - DNA, 25 bp, Homo sapien
ccaaagaggtcaacaaggttaatat

SEQ ID NO: 5625681 - DNA, 25 bp, Homo sapien
ggtactacagtagaaggtgctatac

SEQ ID NO: 5625682 - DNA, 25 bp, Homo sapien
aagggccagacattgcaactgtgta

SEQ ID NO: 5625683 - DNA, 25 bp, Homo sapien
tatgtgatagttgatacttgtgatg

SEQ ID NO: 5625684 - DNA, 25 bp, Homo sapien
aatctaaaattatgcaactgtatgc

SEQ ID NO: 5625685 - DNA, 25 bp, Homo sapien
ggagggattatttttgcaaacaggc

SEQ ID NO: 5625686 - DNA, 25 bp, Homo sapien
aatcttaagggccagacattgcaac

SEQ ID NO: 5625687 - DNA, 25 bp, Homo sapien
actgcacccgacatataaaatcatg

SEQ ID NO: 5625688 - DNA, 25 bp, Homo sapien
catatcataatcttaagggccagac

SEQ ID NO: 5625689 - DNA, 25 bp, Homo sapien
gccaaagagagtaaaacagaaatct

SEQ ID NO: 5625690 - DNA, 25 bp, Homo sapien
tcctcacacaaatagattccaaatc

SEQ ID NO: 5625691 - DNA, 25 bp, Homo sapien
gattccaaatctgtgaataacattc

SEQ ID NO: 5625692 - DNA, 25 bp, Homo sapien
aacttatgctgccctaaaacaaggt

SEQ ID NO: 5625693 - DNA, 25 bp, Homo sapien
caagtactaccggttgaggtcaaag

SEQ ID NO: 5625694 - DNA, 25 bp, Homo sapien
ctttgacctcaaccggtagtacttg

SEQ ID NO: 5625695 - DNA, 25 bp, Homo sapien
aataaccaggttcagtggcttctgt

SEQ ID NO: 5625696 - DNA, 25 bp, Homo sapien
gtggcttctgtaaaaagtcacttcc

SEQ ID NO: 5625697 - DNA, 25 bp, Homo sapien
tccccaggactaggcctttcgccag

SEQ ID NO: 5625698 - DNA, 25 bp, Homo sapien
gtcacttcctctcagcaggaaaggc

SEQ ID NO: 5625699 - DNA, 25 bp, Homo sapien
ggttcagtggcttctgtaaaaagtc

SEQ ID NO: 5625700 - DNA, 25 bp, Homo sapien
cttcctctcagcaggaaaggcccag

SEQ ID NO: 5625701 - DNA, 25 bp, Homo sapien
aggactaggcctttcgccaggtcag

SEQ ID NO: 5625702 - DNA, 25 bp, Homo sapien
tcgagacggacgatttgccaaaata

SEQ ID NO: 5625703 - DNA, 25 bp, Homo sapien
gatttgccaaaataaccaggttcag

SEQ ID NO: 5625704 - DNA, 25 bp, Homo sapien
aaaataaccaggttcagtggcttct

SEQ ID NO: 5625705 - DNA, 25 bp, Homo sapien
cccaggactaggcctttcgccaggt

SEQ ID NO: 5625706 - DNA, 25 bp, Homo sapien
tgtgcagtgcaaatatgactcatta

SEQ ID NO: 5625707 - DNA, 25 bp, Homo sapien
ccatgttacgttgtgggagagaaaa

SEQ ID NO: 5625708 - DNA, 25 bp, Homo sapien
tagctctaattggcagggatctcct

SEQ ID NO: 5625709 - DNA, 25 bp, Homo sapien
atcaaattcgcagtgatgaggggta

SEQ ID NO: 5625710 - DNA, 25 bp, Homo sapien
agagaatttaaagacagacacaccc

SEQ ID NO: 5625711 - DNA, 25 bp, Homo sapien
gaagcaaaaagaattgtgcagtgca

SEQ ID NO: 5625712 - DNA, 25 bp, Homo sapien
taaatggtcagaggtatactagtgg

SEQ ID NO: 5625713 - DNA, 25 bp, Homo sapien
ttaaagcttgccaaacccatgttac

SEQ ID NO: 5625714 - DNA, 25 bp, Homo sapien
acctgatataaacacgtgtgcacgt

SEQ ID NO: 5625715 - DNA, 25 bp, Homo sapien
acgtgtgtgtaatctgaggaaaacc

SEQ ID NO: 5625716 - DNA, 25 bp, Homo sapien
ctggtcatttactaagggttctatc

SEQ ID NO: 5625717 - DNA, 25 bp, Homo sapien
ataaactgtaatacgaagcaagata

SEQ ID NO: 5625718 - DNA, 25 bp, Homo sapien
gaaaatgaaggctaactggcacaat

SEQ ID NO: 5625719 - DNA, 25 bp, Homo sapien
cattataatgccagaaaatgaaggc

SEQ ID NO: 5625720 - DNA, 25 bp, Homo sapien
caccacagaaaagatcaacaccagt

SEQ ID NO: 5625721 - DNA, 25 bp, Homo sapien
tcatcaggttaaaagtttacgagaa

SEQ ID NO: 5625722 - DNA, 25 bp, Homo sapien
aatgttaatatccatgggctgaaac

SEQ ID NO: 5625723 - DNA, 25 bp, Homo sapien
aaagtttacgagaatatgaatatat

SEQ ID NO: 5625724 - DNA, 25 bp, Homo sapien
ttactacaaacaacagcatcaacta

SEQ ID NO: 5625725 - DNA, 25 bp, Homo sapien
atacgaagcaagataaatggaacta

SEQ ID NO: 5625726 - DNA, 25 bp, Homo sapien
aaataatagcaccacagaaaagatc

SEQ ID NO: 5625727 - DNA, 25 bp, Homo sapien
ttaacatactacagaatcacaaacg

SEQ ID NO: 5625728 - DNA, 25 bp, Homo sapien
atggaacacagatataagctcctac

SEQ ID NO: 5625729 - DNA, 25 bp, Homo sapien
aagtccttaaatgcctagaaaataa

SEQ ID NO: 5625730 - DNA, 25 bp, Homo sapien
aacagatacgcaaatgaagtcctta

SEQ ID NO: 5625731 - DNA, 25 bp, Homo sapien
ttgaatatgcagattgaatatcaaa

SEQ ID NO: 5625732 - DNA, 25 bp, Homo sapien
ttctttaaccataacagatacgcaa

SEQ ID NO: 5625733 - DNA, 25 bp, Homo sapien
aaattcagtcatggtaattgttagt

SEQ ID NO: 5625734 - DNA, 25 bp, Homo sapien
gtaatcatgggaaacttactgaaaa

SEQ ID NO: 5625735 - DNA, 25 bp, Homo sapien
tcaagtgtatgtaattctgtgacag

SEQ ID NO: 5625736 - DNA, 25 bp, Homo sapien
acaaacccctcataggtaaatactc

SEQ ID NO: 5625737 - DNA, 25 bp, Homo sapien
taaaaattgaatgttggattatgtc

SEQ ID NO: 5625738 - DNA, 25 bp, Homo sapien
ttctgtgacagaataccaatttctt

SEQ ID NO: 5625739 - DNA, 25 bp, Homo sapien
ttcccacatgggcaataagggaaag

SEQ ID NO: 5625740 - DNA, 25 bp, Homo sapien
caaatacgccacttgacaaccactc

SEQ ID NO: 5625741 - DNA, 25 bp, Homo sapien
gagactgttatacatccggaactcc

SEQ ID NO: 5625742 - DNA, 25 bp, Homo sapien
atgaagtataaaaaggtggcacaat

SEQ ID NO: 5625743 - DNA, 25 bp, Homo sapien
cagggcacccgatgaattaatacaa

SEQ ID NO: 5625744 - DNA, 25 bp, Homo sapien
acatactccactctcccccacaccc

SEQ ID NO: 5625745 - DNA, 25 bp, Homo sapien
actcttaagtattcccacatgggca

SEQ ID NO: 5625746 - DNA, 25 bp, Homo sapien
actctgttagctactgcccagcagt

SEQ ID NO: 5625747 - DNA, 25 bp, Homo sapien
gaaaagaggagactgttatacatcc

SEQ ID NO: 5625748 - DNA, 25 bp, Homo sapien
gtaatacaatgtagtagcaagttta

SEQ ID NO: 5625749 - DNA, 25 bp, Homo sapien
tgggagactgttatacatcgagatc

SEQ ID NO: 5625750 - DNA, 25 bp, Homo sapien
taaagaacaaaaatcttcatgccaa

SEQ ID NO: 5625751 - DNA, 25 bp, Homo sapien
tcatgccaaattagcaagatacagg

SEQ ID NO: 5625752 - DNA, 25 bp, Homo sapien
agcggaaagactttcagcaggagta

SEQ ID NO: 5625753 - DNA, 25 bp, Homo sapien
cctgacagttgttacacaaagctga

SEQ ID NO: 5625754 - DNA, 25 bp, Homo sapien
aatacagggaaaaaaagctaattca

SEQ ID NO: 5625755 - DNA, 25 bp, Homo sapien
tagcaagatacaggaaaaaaggtaa

SEQ ID NO: 5625756 - DNA, 25 bp, Homo sapien
acaaagctgagagagtctttccctc

SEQ ID NO: 5625757 - DNA, 25 bp, Homo sapien
aaagctaattcaccctgacagttgt

SEQ ID NO: 5625758 - DNA, 25 bp, Homo sapien
ctggtaggggaaaatgttatctcct

SEQ ID NO: 5625759 - DNA, 25 bp, Homo sapien
gactttcagcaggagtaagccatga

SEQ ID NO: 5625760 - DNA, 25 bp, Homo sapien
ttacacaaagctgagagagtctttc

SEQ ID NO: 5625761 - DNA, 25 bp, Homo sapien
tccatgagaggcaatgaccttagtt

SEQ ID NO: 5625762 - DNA, 25 bp, Homo sapien
atctggggagcttgttgaaaataat

SEQ ID NO: 5625763 - DNA, 25 bp, Homo sapien
tatcagacccagcatcaaacgtacc

SEQ ID NO: 5625764 - DNA, 25 bp, Homo sapien
gggctctccctcataacagtgcatc

SEQ ID NO: 5625765 - DNA, 25 bp, Homo sapien
ccagatgattcaaatggaggtggtg

SEQ ID NO: 5625766 - DNA, 25 bp, Homo sapien
gtgctgattcagtgggtcttgagga

SEQ ID NO: 5625767 - DNA, 25 bp, Homo sapien
tcccagaataagacctactgcagac

SEQ ID NO: 5625768 - DNA, 25 bp, Homo sapien
aggagaagaggccaaaattgcttct

SEQ ID NO: 5625769 - DNA, 25 bp, Homo sapien
tggaggtggtgtgaattctacaatt

SEQ ID NO: 5625770 - DNA, 25 bp, Homo sapien
caacattctataaggctgggctctc

SEQ ID NO: 5625771 - DNA, 25 bp, Homo sapien
cttgaggaggatctagtaatctgca

SEQ ID NO: 5625772 - DNA, 25 bp, Homo sapien
gatgagtgttcgtaattgtgattcc

SEQ ID NO: 5625773 - DNA, 25 bp, Homo sapien
tttaataggatgagtgttcgtaatt

SEQ ID NO: 5625774 - DNA, 25 bp, Homo sapien
ttctcaaactgagcctctgcgtgtt

SEQ ID NO: 5625775 - DNA, 25 bp, Homo sapien
gaagaatggtggccttctaccagtt

SEQ ID NO: 5625776 - DNA, 25 bp, Homo sapien
cccatggctgaaacagaagaatggt

SEQ ID NO: 5625777 - DNA, 25 bp, Homo sapien
gcaaccttgatatttgggagaggcc

SEQ ID NO: 5625778 - DNA, 25 bp, Homo sapien
ccaccagtttccacggcaaccttga

SEQ ID NO: 5625779 - DNA, 25 bp, Homo sapien
tgcaggtaacaaacatattaaacat

SEQ ID NO: 5625780 - DNA, 25 bp, Homo sapien
accagttatcaagaaaaattaagtc

SEQ ID NO: 5625781 - DNA, 25 bp, Homo sapien
tgagcctctgcgtgttttccttggg

SEQ ID NO: 5625782 - DNA, 25 bp, Homo sapien
tgggagaggccatcctagttctcaa

SEQ ID NO: 5625783 - DNA, 25 bp, Homo sapien
cggcctgccagcctgcctgtacctg

SEQ ID NO: 5625784 - DNA, 25 bp, Homo sapien
gcagcgactcagagaacgtctacga

SEQ ID NO: 5625785 - DNA, 25 bp, Homo sapien
acttgcacgtcccgccgcgggagga

SEQ ID NO: 5625786 - DNA, 25 bp, Homo sapien
cgactcagagaacgtctacgaggtc

SEQ ID NO: 5625787 - DNA, 25 bp, Homo sapien
tcatccaggacttgcacgtcccgcc

SEQ ID NO: 5625788 - DNA, 25 bp, Homo sapien
agagaacgtctacgaggtcatccag

SEQ ID NO: 5625789 - DNA, 25 bp, Homo sapien
aacgtctacgaggtcatccaggact

SEQ ID NO: 5625790 - DNA, 25 bp, Homo sapien
gcggcccctgagccgctcgcctacg

SEQ ID NO: 5625791 - DNA, 25 bp, Homo sapien
gcagtccctgaacgacctggcctgc

SEQ ID NO: 5625792 - DNA, 25 bp, Homo sapien
gagccgctcgcctacgactaccggt

SEQ ID NO: 5625793 - DNA, 25 bp, Homo sapien
ctacgactaccggtttgtgagcgcg

SEQ ID NO: 5625794 - DNA, 25 bp, Homo sapien
tcggctgagaattcttaatagactg

SEQ ID NO: 5625795 - DNA, 25 bp, Homo sapien
agtcactgcactcggctgagaattc

SEQ ID NO: 5625796 - DNA, 25 bp, Homo sapien
cgatctctcatggtgggctcaagtg

SEQ ID NO: 5625797 - DNA, 25 bp, Homo sapien
ggctgcagtacgccatgaccatgcc

SEQ ID NO: 5625798 - DNA, 25 bp, Homo sapien
tgcacatcaacacacccggataatt

SEQ ID NO: 5625799 - DNA, 25 bp, Homo sapien
gaccatgcctgtaaatagctattgt

SEQ ID NO: 5625800 - DNA, 25 bp, Homo sapien
tgagtcactgcactcggctgagaat

SEQ ID NO: 5625801 - DNA, 25 bp, Homo sapien
tgcagcctcgatctctcatggtggg

SEQ ID NO: 5625802 - DNA, 25 bp, Homo sapien
gccatgaccatgcctgtaaatagct

SEQ ID NO: 5625803 - DNA, 25 bp, Homo sapien
tagctattgtactacagactgggca

SEQ ID NO: 5625804 - DNA, 25 bp, Homo sapien
ttcttaatagactgaaagtgaagtg

SEQ ID NO: 5625805 - DNA, 25 bp, Homo sapien
tcgggagatttaacagacaaagcaa

SEQ ID NO: 5625806 - DNA, 25 bp, Homo sapien
gaaggtttcaaacgaactcagcgct

SEQ ID NO: 5625807 - DNA, 25 bp, Homo sapien
actctgcagcgaccatcaagatctc

SEQ ID NO: 5625808 - DNA, 25 bp, Homo sapien
acaattctcgccaagagaagccttc

SEQ ID NO: 5625809 - DNA, 25 bp, Homo sapien
tctctaagggaacactcaacaagct

SEQ ID NO: 5625810 - DNA, 25 bp, Homo sapien
ccagccgcagccccaattttgatgg

SEQ ID NO: 5625811 - DNA, 25 bp, Homo sapien
attgctgtctcaagcaaggagatcc

SEQ ID NO: 5625812 - DNA, 25 bp, Homo sapien
cttccacagtcacagcatggattgc

SEQ ID NO: 5625813 - DNA, 25 bp, Homo sapien
actcagcgctgaagttactctgcag

SEQ ID NO: 5625814 - DNA, 25 bp, Homo sapien
ctttgcagctgcaggttcagagatg

SEQ ID NO: 5625815 - DNA, 25 bp, Homo sapien
gaacactcaacaagctaggggatag

SEQ ID NO: 5625816 - DNA, 25 bp, Homo sapien
aagtatctggcgaaagaaatgctat

SEQ ID NO: 5625817 - DNA, 25 bp, Homo sapien
ccagtgctatgtataacagacaaac

SEQ ID NO: 5625818 - DNA, 25 bp, Homo sapien
aagtaaaatgtttgcggtaccagtg

SEQ ID NO: 5625819 - DNA, 25 bp, Homo sapien
ccaggattaatgtaaggtgaaatat

SEQ ID NO: 5625820 - DNA, 25 bp, Homo sapien
attaaagtatctggcgaaagaaatg

SEQ ID NO: 5625821 - DNA, 25 bp, Homo sapien
gggattactggcgtgccccctacac

SEQ ID NO: 5625822 - DNA, 25 bp, Homo sapien
aatgtaaggtgaaatattaaagtat

SEQ ID NO: 5625823 - DNA, 25 bp, Homo sapien
atttcaattaaagaaatgtgaatcc

SEQ ID NO: 5625824 - DNA, 25 bp, Homo sapien
aatgtttgcggtaccagtgctatgt

SEQ ID NO: 5625825 - DNA, 25 bp, Homo sapien
gaaatgctattaagagtttaagtaa

SEQ ID NO: 5625826 - DNA, 25 bp, Homo sapien
ggcgtgccccctacacctggccaaa

SEQ ID NO: 5625827 - DNA, 25 bp, Homo sapien
atgggaaaaaaatagagacacttta

SEQ ID NO: 5625828 - DNA, 25 bp, Homo sapien
ttcagcgaagtctgcagatggtaga

SEQ ID NO: 5625829 - DNA, 25 bp, Homo sapien
agtcttacagggatgtgaggtttaa

SEQ ID NO: 5625830 - DNA, 25 bp, Homo sapien
ctgacatgggcagtttctgagtctt

SEQ ID NO: 5625831 - DNA, 25 bp, Homo sapien
gtttgtaaaggagctatcacagagc

SEQ ID NO: 5625832 - DNA, 25 bp, Homo sapien
acgtcgtaggtgcttggtaaatatt

SEQ ID NO: 5625833 - DNA, 25 bp, Homo sapien
atgaaaccccacatggccccttgcc

SEQ ID NO: 5625834 - DNA, 25 bp, Homo sapien
tcttgtactgtggtgggcactaaag

SEQ ID NO: 5625835 - DNA, 25 bp, Homo sapien
ggtgcacatgctgcctgcctttgcc

SEQ ID NO: 5625836 - DNA, 25 bp, Homo sapien
gttacagtgagtatggtagtccaac

SEQ ID NO: 5625837 - DNA, 25 bp, Homo sapien
cctagtctcaagtagggggaaatat

SEQ ID NO: 5625838 - DNA, 25 bp, Homo sapien
cattacagattgcatccgtaggtgg

SEQ ID NO: 5625839 - DNA, 25 bp, Homo sapien
cctagttggaaaactctgcatgtcc

SEQ ID NO: 5625840 - DNA, 25 bp, Homo sapien
ttgcatagaccacaggacacctttc

SEQ ID NO: 5625841 - DNA, 25 bp, Homo sapien
aaaagctgttcctattaccataacc

SEQ ID NO: 5625842 - DNA, 25 bp, Homo sapien
cacttatattgaagttgggcaggaa

SEQ ID NO: 5625843 - DNA, 25 bp, Homo sapien
aataacagacttctcatgcacatgc

SEQ ID NO: 5625844 - DNA, 25 bp, Homo sapien
tcatgcacatgcattacagattgca

SEQ ID NO: 5625845 - DNA, 25 bp, Homo sapien
taatttgcatagaccacaggacacc

SEQ ID NO: 5625846 - DNA, 25 bp, Homo sapien
agaccacaggacacctttctcgcat

SEQ ID NO: 5625847 - DNA, 25 bp, Homo sapien
tttctcgcattttagtccacactta

SEQ ID NO: 5625848 - DNA, 25 bp, Homo sapien
cacagattcagtcttcctagttgga

SEQ ID NO: 5625849 - DNA, 25 bp, Homo sapien
taaaatgaagatatagcaagcaaat

SEQ ID NO: 5625850 - DNA, 25 bp, Homo sapien
ataactacaaataaaatagggcttc

SEQ ID NO: 5625851 - DNA, 25 bp, Homo sapien
atgaagatatagcaagcaaataata

SEQ ID NO: 5625852 - DNA, 25 bp, Homo sapien
aaaaaattatacagtcaatccaaca

SEQ ID NO: 5625853 - DNA, 25 bp, Homo sapien
gaaagcttgcaacccagctatagct

SEQ ID NO: 5625854 - DNA, 25 bp, Homo sapien
aaaacacaaagaattaaaatgaaga

SEQ ID NO: 5625855 - DNA, 25 bp, Homo sapien
cccagctatagctataaacacaaaa

SEQ ID NO: 5625856 - DNA, 25 bp, Homo sapien
aaaaccactcagataacaaaaacag

SEQ ID NO: 5625857 - DNA, 25 bp, Homo sapien
attagcctattaaaagataaaacca

SEQ ID NO: 5625858 - DNA, 25 bp, Homo sapien
taaaatagggcttccaaattatgtc

SEQ ID NO: 5625859 - DNA, 25 bp, Homo sapien
taagaaacactaacataaaacacaa

SEQ ID NO: 5625860 - DNA, 25 bp, Homo sapien
aaaggggtccattatgatacaattc

SEQ ID NO: 5625861 - DNA, 25 bp, Homo sapien
ttgaatcacttagcactaggaatac

SEQ ID NO: 5625862 - DNA, 25 bp, Homo sapien
atttaaaggttctgaggcttctctc

SEQ ID NO: 5625863 - DNA, 25 bp, Homo sapien
tgcaaattctgattaaaaggggtcc

SEQ ID NO: 5625864 - DNA, 25 bp, Homo sapien
tttgtgttaggagtgtaccacactg

SEQ ID NO: 5625865 - DNA, 25 bp, Homo sapien
agcattagaatcatcaaggttaagc

SEQ ID NO: 5625866 - DNA, 25 bp, Homo sapien
gagaggaatttgactcagaagactg

SEQ ID NO: 5625867 - DNA, 25 bp, Homo sapien
aacctgtgcaactatgtccagtcct

SEQ ID NO: 5625868 - DNA, 25 bp, Homo sapien
tctgacagaagtttgatgagaggaa

SEQ ID NO: 5625869 - DNA, 25 bp, Homo sapien
agcaggaaaagaaagttgtctgaca

SEQ ID NO: 5625870 - DNA, 25 bp, Homo sapien
gctcaatgtgtttacaggtgcatgt

SEQ ID NO: 5625871 - DNA, 25 bp, Homo sapien
tttcctccctgtaagaggtgtgaga

SEQ ID NO: 5625872 - DNA, 25 bp, Homo sapien
ctctcccgctggctgttttcctccc

SEQ ID NO: 5625873 - DNA, 25 bp, Homo sapien
gctgactctctcccgctggctgttt

SEQ ID NO: 5625874 - DNA, 25 bp, Homo sapien
aatagaggactactgcattaaatag

SEQ ID NO: 5625875 - DNA, 25 bp, Homo sapien
cccagagtaccagcagtctgccttc

SEQ ID NO: 5625876 - DNA, 25 bp, Homo sapien
gtactctctctgggcactacctatg

SEQ ID NO: 5625877 - DNA, 25 bp, Homo sapien
aatagtaatcctgacaccaaaagca

SEQ ID NO: 5625878 - DNA, 25 bp, Homo sapien
cctccctgtaagaggtgtgagagtg

SEQ ID NO: 5625879 - DNA, 25 bp, Homo sapien
tctctgggcactacctatgaatttt

SEQ ID NO: 5625880 - DNA, 25 bp, Homo sapien
gcagtcccagagtaccagcagtctg

SEQ ID NO: 5625881 - DNA, 25 bp, Homo sapien
ttaaatagtaatcctgacaccaaaa

SEQ ID NO: 5625882 - DNA, 25 bp, Homo sapien
ccccaacatggtaagcatcagccac

SEQ ID NO: 5625883 - DNA, 25 bp, Homo sapien
cagttctaccggacagtgctgctct

SEQ ID NO: 5625884 - DNA, 25 bp, Homo sapien
ctcaatcccagaaccaagcatttta

SEQ ID NO: 5625885 - DNA, 25 bp, Homo sapien
gcagccacataggaccacgtgtact

SEQ ID NO: 5625886 - DNA, 25 bp, Homo sapien
tgttaaatgactgctccacagagtt

SEQ ID NO: 5625887 - DNA, 25 bp, Homo sapien
caggacagcgcagacatttccatct

SEQ ID NO: 5625888 - DNA, 25 bp, Homo sapien
cacgtgtactctacaggacagcgca

SEQ ID NO: 5625889 - DNA, 25 bp, Homo sapien
cccaaatgtccaaggaccaagttcc

SEQ ID NO: 5625890 - DNA, 25 bp, Homo sapien
ttagtgtaattgcagaaatgctctg

SEQ ID NO: 5625891 - DNA, 25 bp, Homo sapien
catttcagatgctcggcagccacat

SEQ ID NO: 5625892 - DNA, 25 bp, Homo sapien
cactgcagacagttctaccggacag

SEQ ID NO: 5625893 - DNA, 25 bp, Homo sapien
gaccacagtgcagtgaacctctatg

SEQ ID NO: 5625894 - DNA, 25 bp, Homo sapien
catagaggttcactgcactgtggtc

SEQ ID NO: 5625895 - DNA, 25 bp, Homo sapien
cacatgaggatagtgaagtctagga

SEQ ID NO: 5625896 - DNA, 25 bp, Homo sapien
atgaagcactcacatgaggcaacgt

SEQ ID NO: 5625897 - DNA, 25 bp, Homo sapien
acttcacagacagccttggaaatat

SEQ ID NO: 5625898 - DNA, 25 bp, Homo sapien
ctgaagacagtagtctcgatgggta

SEQ ID NO: 5625899 - DNA, 25 bp, Homo sapien
ttggccagcgtcacaccctgctatg

SEQ ID NO: 5625900 - DNA, 25 bp, Homo sapien
aattaaaggtcatccactgcagttc

SEQ ID NO: 5625901 - DNA, 25 bp, Homo sapien
tctgcagaggattgtccttggagcg

SEQ ID NO: 5625902 - DNA, 25 bp, Homo sapien
gaggcaacgtaaagcacacacaata

SEQ ID NO: 5625903 - DNA, 25 bp, Homo sapien
gggtaggtatatcacttggccagcg

SEQ ID NO: 5625904 - DNA, 25 bp, Homo sapien
gtgtccactgtggttccagccgcag

SEQ ID NO: 5625905 - DNA, 25 bp, Homo sapien
tctcgatgggtaggacttaaatcca

SEQ ID NO: 5625906 - DNA, 25 bp, Homo sapien
tatatgctagggtgataaaagactt

SEQ ID NO: 5625907 - DNA, 25 bp, Homo sapien
tatgctagggtgataaaagacttga

SEQ ID NO: 5625908 - DNA, 25 bp, Homo sapien
tttatatgctagggtgataaaagac

SEQ ID NO: 5625909 - DNA, 25 bp, Homo sapien
gcttcattttttgcaggttgacttt

SEQ ID NO: 5625910 - DNA, 25 bp, Homo sapien
tgctagggtgataaaagacttgaaa

SEQ ID NO: 5625911 - DNA, 25 bp, Homo sapien
atatttttatatgctagggtgataa

SEQ ID NO: 5625912 - DNA, 25 bp, Homo sapien
tgcagttgtaacagttcaaaccaaa

SEQ ID NO: 5625913 - DNA, 25 bp, Homo sapien
ccaaaaatgttaatgcctagaagtt

SEQ ID NO: 5625914 - DNA, 25 bp, Homo sapien
ctaataattgcagttgtaacagttc

SEQ ID NO: 5625915 - DNA, 25 bp, Homo sapien
aaaccaaaaatgttaatgcctagaa

SEQ ID NO: 5625916 - DNA, 25 bp, Homo sapien
atgcctagaagttaaataaaagtta

SEQ ID NO: 5625917 - DNA, 25 bp, Homo sapien
attcctaagacagacatgagcttag

SEQ ID NO: 5625918 - DNA, 25 bp, Homo sapien
aagacagacatgagcttagatatgc

SEQ ID NO: 5625919 - DNA, 25 bp, Homo sapien
ataacacaaataagtggattaacaa

SEQ ID NO: 5625920 - DNA, 25 bp, Homo sapien
gctaaaagattgaacaccacagagt

SEQ ID NO: 5625921 - DNA, 25 bp, Homo sapien
tcagtcctcgaatgttcattgtgta

SEQ ID NO: 5625922 - DNA, 25 bp, Homo sapien
atgagcttagatatgctacgtacta

SEQ ID NO: 5625923 - DNA, 25 bp, Homo sapien
gtggattaacaaagaaatttgcctc

SEQ ID NO: 5625924 - DNA, 25 bp, Homo sapien
ctctgcctgctaaaattccaattcc

SEQ ID NO: 5625925 - DNA, 25 bp, Homo sapien
accacagagttaaggtgatgatctc

SEQ ID NO: 5625926 - DNA, 25 bp, Homo sapien
tgcctctggactgcatcaggtgtgg

SEQ ID NO: 5625927 - DNA, 25 bp, Homo sapien
gagcagtgagcttctggcatttttt

SEQ ID NO: 5625928 - DNA, 25 bp, Homo sapien
acttaactgcagacaaagagacaga

SEQ ID NO: 5625929 - DNA, 25 bp, Homo sapien
tgagttgcctatggtacaatgcatc

SEQ ID NO: 5625930 - DNA, 25 bp, Homo sapien
agtgcatgaacttaactgcagacaa

SEQ ID NO: 5625931 - DNA, 25 bp, Homo sapien
tagcacagttagaaagacatttgtc

SEQ ID NO: 5625932 - DNA, 25 bp, Homo sapien
gaaattcaccttgatggcgccacac

SEQ ID NO: 5625933 - DNA, 25 bp, Homo sapien
tgtctaaacgactcctctaagggca

SEQ ID NO: 5625934 - DNA, 25 bp, Homo sapien
tgaaggaattcctgaactccctagc

SEQ ID NO: 5625935 - DNA, 25 bp, Homo sapien
agatttggagtggttttcttattcc

SEQ ID NO: 5625936 - DNA, 25 bp, Homo sapien
aaccaagttaaggtgtgagttgcct

SEQ ID NO: 5625937 - DNA, 25 bp, Homo sapien
actccctagcacagttagaaagaca

SEQ ID NO: 5625938 - DNA, 25 bp, Homo sapien
ctcctctaagggcaaacatacatta

SEQ ID NO: 5625939 - DNA, 25 bp, Homo sapien
tggcagagaactgatcagaatccct

SEQ ID NO: 5625940 - DNA, 25 bp, Homo sapien
atgtgtagactgagatcctgaatat

SEQ ID NO: 5625941 - DNA, 25 bp, Homo sapien
ataaatcctgaatacaattaaagac

SEQ ID NO: 5625942 - DNA, 25 bp, Homo sapien
cagaacatctgtttttggttgtggt

SEQ ID NO: 5625943 - DNA, 25 bp, Homo sapien
aaatccaggatagataaaagcagag

SEQ ID NO: 5625944 - DNA, 25 bp, Homo sapien
caaaatggtccaaatcggttattat

SEQ ID NO: 5625945 - DNA, 25 bp, Homo sapien
acccctcaatgtgtagactgagatc

SEQ ID NO: 5625946 - DNA, 25 bp, Homo sapien
ttagtgttaggataattctaatcat

SEQ ID NO: 5625947 - DNA, 25 bp, Homo sapien
atgttcaaaatggtccaaatcggtt

SEQ ID NO: 5625948 - DNA, 25 bp, Homo sapien
ttggttgtggttatacgaagctgtt

SEQ ID NO: 5625949 - DNA, 25 bp, Homo sapien
aagtatccagagttcttccagtttc

SEQ ID NO: 5625950 - DNA, 25 bp, Homo sapien
gggcaacataggcgaaaacccatct

SEQ ID NO: 5625951 - DNA, 25 bp, Homo sapien
ctttaggataatgaaaaataagttc

SEQ ID NO: 5625952 - DNA, 25 bp, Homo sapien
cattacctgtgggtttccagcttac

SEQ ID NO: 5625953 - DNA, 25 bp, Homo sapien
atagcatcaatttaagcctgttctg

SEQ ID NO: 5625954 - DNA, 25 bp, Homo sapien
gaaaaataagttcaggtagaggagc

SEQ ID NO: 5625955 - DNA, 25 bp, Homo sapien
agacttacaaaagagttgcaaagat

SEQ ID NO: 5625956 - DNA, 25 bp, Homo sapien
acagagtaattggttttatagcatc

SEQ ID NO: 5625957 - DNA, 25 bp, Homo sapien
acataggcgaaaacccatcttctac

SEQ ID NO: 5625958 - DNA, 25 bp, Homo sapien
ggtgggcacattacctgtgggtttc

SEQ ID NO: 5625959 - DNA, 25 bp, Homo sapien
ttgtttgagcccagggaatttgaga

SEQ ID NO: 5625960 - DNA, 25 bp, Homo sapien
agagttgcaaagataatacagagta

SEQ ID NO: 5625961 - DNA, 25 bp, Homo sapien
aggagacaaacttgggcaagtgtct

SEQ ID NO: 5625962 - DNA, 25 bp, Homo sapien
gcaccactgtctactggggactgtg

SEQ ID NO: 5625963 - DNA, 25 bp, Homo sapien
agccttgctgctcacgaggagacaa

SEQ ID NO: 5625964 - DNA, 25 bp, Homo sapien
tctgagttcaactgtggcaccactg

SEQ ID NO: 5625965 - DNA, 25 bp, Homo sapien
gattcaggcaggcatagctcacatt

SEQ ID NO: 5625966 - DNA, 25 bp, Homo sapien
catttgtaaaccttccagactgctc

SEQ ID NO: 5625967 - DNA, 25 bp, Homo sapien
tggacacccctgacttagagggttc

SEQ ID NO: 5625968 - DNA, 25 bp, Homo sapien
ttggaatcagccagttctgagttca

SEQ ID NO: 5625969 - DNA, 25 bp, Homo sapien
ccagactgctcaggaaatccagcgg

SEQ ID NO: 5625970 - DNA, 25 bp, Homo sapien
gcttctgggagcctccctctgtgcc

SEQ ID NO: 5625971 - DNA, 25 bp, Homo sapien
tacgtgtcgcccaagacagttcctt

SEQ ID NO: 5625972 - DNA, 25 bp, Homo sapien
tgagccatgatgggttggttcacta

SEQ ID NO: 5625973 - DNA, 25 bp, Homo sapien
cgttgccatggaatagaaatgatgt

SEQ ID NO: 5625974 - DNA, 25 bp, Homo sapien
aatgatgtttagtctggtgattggc

SEQ ID NO: 5625975 - DNA, 25 bp, Homo sapien
gtggatattgattggctaagaagct

SEQ ID NO: 5625976 - DNA, 25 bp, Homo sapien
caaagagataagcaggtatccttcc

SEQ ID NO: 5625977 - DNA, 25 bp, Homo sapien
gaagctgctttgcacatggcaagtc

SEQ ID NO: 5625978 - DNA, 25 bp, Homo sapien
tctacatagtgtgcttcagggtgaa

SEQ ID NO: 5625979 - DNA, 25 bp, Homo sapien
agatggtctgacttaaaacgttgcc

SEQ ID NO: 5625980 - DNA, 25 bp, Homo sapien
tggagacattccagatggtctgact

SEQ ID NO: 5625981 - DNA, 25 bp, Homo sapien
agcagggagttataaatgcagagat

SEQ ID NO: 5625982 - DNA, 25 bp, Homo sapien
tggtgattggcagtagcaccgcaaa

SEQ ID NO: 5625983 - DNA, 25 bp, Homo sapien
agtattgaatgctatttgtataacc

SEQ ID NO: 5625984 - DNA, 25 bp, Homo sapien
gcaaaataggaagaacccttctcta

SEQ ID NO: 5625985 - DNA, 25 bp, Homo sapien
actatagcaatacagataacttatt

SEQ ID NO: 5625986 - DNA, 25 bp, Homo sapien
atagctgctgttaaaacaggctggg

SEQ ID NO: 5625987 - DNA, 25 bp, Homo sapien
gctgagcgttgtggtacgcatctgt

SEQ ID NO: 5625988 - DNA, 25 bp, Homo sapien
tgctgtaataattagtattgaatgc

SEQ ID NO: 5625989 - DNA, 25 bp, Homo sapien
gaccagcctaagcaaaataggaaga

SEQ ID NO: 5625990 - DNA, 25 bp, Homo sapien
aatctactgagtaaaccagtgtaac

SEQ ID NO: 5625991 - DNA, 25 bp, Homo sapien
ccagtgtaactgttgtagactattt

SEQ ID NO: 5625992 - DNA, 25 bp, Homo sapien
aaataaaaagtaagctgagcgttgt

SEQ ID NO: 5625993 - DNA, 25 bp, Homo sapien
tgaacctagttgctcaagaccagcc

SEQ ID NO: 5625994 - DNA, 25 bp, Homo sapien
tcagaaatgcagactcttgcccatc

SEQ ID NO: 5625995 - DNA, 25 bp, Homo sapien
gttggttgtatttagatcaaatcgt

SEQ ID NO: 5625996 - DNA, 25 bp, Homo sapien
gtagtcaggaacactggcatcacct

SEQ ID NO: 5625997 - DNA, 25 bp, Homo sapien
atgtccaagaaatggtctttcatct

SEQ ID NO: 5625998 - DNA, 25 bp, Homo sapien
tgaattctgacctagacagcttaac

SEQ ID NO: 5625999 - DNA, 25 bp, Homo sapien
gacattacaactaatgaagacatcc

SEQ ID NO: 5626000 - DNA, 25 bp, Homo sapien
ttaaataatcaccagaaattcctta

SEQ ID NO: 5626001 - DNA, 25 bp, Homo sapien
tctcagaccaactacatccaggcaa

SEQ ID NO: 5626002 - DNA, 25 bp, Homo sapien
acccacttcaagtttgagcagcatt

SEQ ID NO: 5626003 - DNA, 25 bp, Homo sapien
gaatctgcatcttaatcaaaatccc

SEQ ID NO: 5626004 - DNA, 25 bp, Homo sapien
atccaggcaaatcactgcaaacatc

SEQ ID NO: 5626005 - DNA, 25 bp, Homo sapien
acctgccactgttaaggacagttac

SEQ ID NO: 5626006 - DNA, 25 bp, Homo sapien
cccttcaaagactagctaaaattcc

SEQ ID NO: 5626007 - DNA, 25 bp, Homo sapien
acacacaaacattcatacatgcata

SEQ ID NO: 5626008 - DNA, 25 bp, Homo sapien
gatagaagtgtgacatgtatttctt

SEQ ID NO: 5626009 - DNA, 25 bp, Homo sapien
ctttgcttacgctaatctctcaggc

SEQ ID NO: 5626010 - DNA, 25 bp, Homo sapien
ttatagtacaggtatttgtgcacaa

SEQ ID NO: 5626011 - DNA, 25 bp, Homo sapien
tatttggtatatttgtgactcacag

SEQ ID NO: 5626012 - DNA, 25 bp, Homo sapien
gctgccctaccacaatataaatccc

SEQ ID NO: 5626013 - DNA, 25 bp, Homo sapien
ttgtgcacaagtccagctgccctac

SEQ ID NO: 5626014 - DNA, 25 bp, Homo sapien
tgcatatattagatagaagtgtgac

SEQ ID NO: 5626015 - DNA, 25 bp, Homo sapien
aatcaaaatcctatcaatccaaaac

SEQ ID NO: 5626016 - DNA, 25 bp, Homo sapien
gggaggccacacatgcttggtggca

SEQ ID NO: 5626017 - DNA, 25 bp, Homo sapien
ctaacaagagcaaagatttccagtc

SEQ ID NO: 5626018 - DNA, 25 bp, Homo sapien
tcttagctcctgggaggccacacat

SEQ ID NO: 5626019 - DNA, 25 bp, Homo sapien
tttccaaacactctgtaggtaaagc

SEQ ID NO: 5626020 - DNA, 25 bp, Homo sapien
tcattcctaacagcataaagaggct

SEQ ID NO: 5626021 - DNA, 25 bp, Homo sapien
acacatgcttggtggcaccctgcct

SEQ ID NO: 5626022 - DNA, 25 bp, Homo sapien
acacaaagtgtttctaacaagagca

SEQ ID NO: 5626023 - DNA, 25 bp, Homo sapien
cactctgtaggtaaagcagagcctc

SEQ ID NO: 5626024 - DNA, 25 bp, Homo sapien
gtaggtaaagcagagcctcagtaaa

SEQ ID NO: 5626025 - DNA, 25 bp, Homo sapien
tcacggtgcctccaaaagctcccaa

SEQ ID NO: 5626026 - DNA, 25 bp, Homo sapien
aactctggggtcttagctcctggga

SEQ ID NO: 5626027 - DNA, 25 bp, Homo sapien
gtaagtgctctgtaagtagtggcca

SEQ ID NO: 5626028 - DNA, 25 bp, Homo sapien
tgacacccgagttgtttgaaagagg

SEQ ID NO: 5626029 - DNA, 25 bp, Homo sapien
gagcccacattgacacccgagttgt

SEQ ID NO: 5626030 - DNA, 25 bp, Homo sapien
atactatgtaggaagtttcagtcta

SEQ ID NO: 5626031 - DNA, 25 bp, Homo sapien
gaaggtagaaatccagtcacagaat

SEQ ID NO: 5626032 - DNA, 25 bp, Homo sapien
actgttaaggaataaatggtggctt

SEQ ID NO: 5626033 - DNA, 25 bp, Homo sapien
tcacagaattaatattagagcccac

SEQ ID NO: 5626034 - DNA, 25 bp, Homo sapien
gtagtggccattactgttaaggaat

SEQ ID NO: 5626035 - DNA, 25 bp, Homo sapien
aaactatcatagttgggtgaaaggt

SEQ ID NO: 5626036 - DNA, 25 bp, Homo sapien
ttggaaactcagtaaaaagctgtgt

SEQ ID NO: 5626037 - DNA, 25 bp, Homo sapien
aacaaccctatgagactggtgaaga

SEQ ID NO: 5626038 - DNA, 25 bp, Homo sapien
tagattactggtagaagcatgacct

SEQ ID NO: 5626039 - DNA, 25 bp, Homo sapien
tctgccttggctagggaatgttcca

SEQ ID NO: 5626040 - DNA, 25 bp, Homo sapien
tttcaaattgtttggaggttgagta

SEQ ID NO: 5626041 - DNA, 25 bp, Homo sapien
agaaggagagagtccttagattact

SEQ ID NO: 5626042 - DNA, 25 bp, Homo sapien
taactggaccataagaaaacaatac

SEQ ID NO: 5626043 - DNA, 25 bp, Homo sapien
tagctaaggcttggaaatctggaga

SEQ ID NO: 5626044 - DNA, 25 bp, Homo sapien
ctttacctggatcagaaagataatt

SEQ ID NO: 5626045 - DNA, 25 bp, Homo sapien
aagaaaacaatactaaacaagccaa

SEQ ID NO: 5626046 - DNA, 25 bp, Homo sapien
atagtgagaagttggtagacattct

SEQ ID NO: 5626047 - DNA, 25 bp, Homo sapien
gactctctgaccagctggaatttgc

SEQ ID NO: 5626048 - DNA, 25 bp, Homo sapien
tcccgcctaaggacttctgccttgg

SEQ ID NO: 5626049 - DNA, 25 bp, Homo sapien
tgcaaaaaggcaatgctggatttgg

SEQ ID NO: 5626050 - DNA, 25 bp, Homo sapien
tcttttaaggctaaatagtcccatc

SEQ ID NO: 5626051 - DNA, 25 bp, Homo sapien
aagtgcttggcactaggaagacaaa

SEQ ID NO: 5626052 - DNA, 25 bp, Homo sapien
tcacatgggaaaatatgaatcatta

SEQ ID NO: 5626053 - DNA, 25 bp, Homo sapien
gaagacaaaagtaatccagacaatg

SEQ ID NO: 5626054 - DNA, 25 bp, Homo sapien
actaagtgctagagtaagtgcttgg

SEQ ID NO: 5626055 - DNA, 25 bp, Homo sapien
ccagacaatgtatttgactgcatgg

SEQ ID NO: 5626056 - DNA, 25 bp, Homo sapien
tggatttggttaaaagtagcaattc

SEQ ID NO: 5626057 - DNA, 25 bp, Homo sapien
gactgcatggagattatgttttggt

SEQ ID NO: 5626058 - DNA, 25 bp, Homo sapien
tatcagactgtattcacatgggaaa

SEQ ID NO: 5626059 - DNA, 25 bp, Homo sapien
accagtgttatcaaatctatgccat

SEQ ID NO: 5626060 - DNA, 25 bp, Homo sapien
agcagtgtgcttggcatatagaagt

SEQ ID NO: 5626061 - DNA, 25 bp, Homo sapien
tattgcagcagtatgttcgtgtaac

SEQ ID NO: 5626062 - DNA, 25 bp, Homo sapien
agctatttgtgtgagtagggtatgc

SEQ ID NO: 5626063 - DNA, 25 bp, Homo sapien
cggcagtaaatgcgcactgacgtgt

SEQ ID NO: 5626064 - DNA, 25 bp, Homo sapien
atcaagaggccatagagaagttttt

SEQ ID NO: 5626065 - DNA, 25 bp, Homo sapien
catgttggttcaagcataagatccc

SEQ ID NO: 5626066 - DNA, 25 bp, Homo sapien
gctgtaggagagtctgtttaaggtt

SEQ ID NO: 5626067 - DNA, 25 bp, Homo sapien
cccatcatattagtggtggagcaga

SEQ ID NO: 5626068 - DNA, 25 bp, Homo sapien
gtttccactcggagtcggcagtaaa

SEQ ID NO: 5626069 - DNA, 25 bp, Homo sapien
gtggagcagaactatgcagtgattc

SEQ ID NO: 5626070 - DNA, 25 bp, Homo sapien
tccatggtttggtgcgtgtacccat

SEQ ID NO: 5626071 - DNA, 25 bp, Homo sapien
acgacggcgcccaggccgtcgccga

SEQ ID NO: 5626072 - DNA, 25 bp, Homo sapien
tcggcgacggcctgggcgccgtcgt

SEQ ID NO: 5626073 - DNA, 25 bp, Homo sapien
tagcagaattccccaagtgaggttt

SEQ ID NO: 5626074 - DNA, 25 bp, Homo sapien
tacatttggctgcagtcccatggga

SEQ ID NO: 5626075 - DNA, 25 bp, Homo sapien
ttgaggaccacatcttggggactag

SEQ ID NO: 5626076 - DNA, 25 bp, Homo sapien
gttgtcaacagctcagaatccttcc

SEQ ID NO: 5626077 - DNA, 25 bp, Homo sapien
tcaagtgatcccctgacttcagcct

SEQ ID NO: 5626078 - DNA, 25 bp, Homo sapien
agagtcttatctggtcgctaacctt

SEQ ID NO: 5626079 - DNA, 25 bp, Homo sapien
aagtacccaggacccagtggtctgg

SEQ ID NO: 5626080 - DNA, 25 bp, Homo sapien
cacaatgtggtaagtacccaggacc

SEQ ID NO: 5626081 - DNA, 25 bp, Homo sapien
ccctcctgctgacccgtccagagtc

SEQ ID NO: 5626082 - DNA, 25 bp, Homo sapien
ccagtggtctggcatccatcacctg

SEQ ID NO: 5626083 - DNA, 25 bp, Homo sapien
ggactaggaagcacaatgtggtaag

SEQ ID NO: 5626084 - DNA, 25 bp, Homo sapien
gcccctgcggcctcataacctctgg

SEQ ID NO: 5626085 - DNA, 25 bp, Homo sapien
attcactgtcatgggctggatcaaa

SEQ ID NO: 5626086 - DNA, 25 bp, Homo sapien
agctacctgcagtctgtggtgagcc

SEQ ID NO: 5626087 - DNA, 25 bp, Homo sapien
cctgccagttgtgcaaagaaagtga

SEQ ID NO: 5626088 - DNA, 25 bp, Homo sapien
ttgaatggacccagctccttgggcc

SEQ ID NO: 5626089 - DNA, 25 bp, Homo sapien
tcaccttccatggggccactgtggt

SEQ ID NO: 5626090 - DNA, 25 bp, Homo sapien
gtcctgctgtcagttggggtgacat

SEQ ID NO: 5626091 - DNA, 25 bp, Homo sapien
tttctttcacggacggtggaaatca

SEQ ID NO: 5626092 - DNA, 25 bp, Homo sapien
gggctggatcaaataccaaggtgtc

SEQ ID NO: 5626093 - DNA, 25 bp, Homo sapien
gcctatggggataaataccagctac

SEQ ID NO: 5626094 - DNA, 25 bp, Homo sapien
tgacatccaggtgtccgatgatgac

SEQ ID NO: 5626095 - DNA, 25 bp, Homo sapien
tgtttgcatgcacatgtaaagaaaa

SEQ ID NO: 5626096 - DNA, 25 bp, Homo sapien
tcgagacccttgtgtctaacagtac

SEQ ID NO: 5626097 - DNA, 25 bp, Homo sapien
aaaacacaaattacaggacatatat

SEQ ID NO: 5626098 - DNA, 25 bp, Homo sapien
tacaggacatatatcaacataattc

SEQ ID NO: 5626099 - DNA, 25 bp, Homo sapien
atcatcatggagagggttattcagt

SEQ ID NO: 5626100 - DNA, 25 bp, Homo sapien
gaggtgattaaaagtatatgggagg

SEQ ID NO: 5626101 - DNA, 25 bp, Homo sapien
gggaactctaagggatcatcatgga

SEQ ID NO: 5626102 - DNA, 25 bp, Homo sapien
aaaatgtatgtggagacacatgttt

SEQ ID NO: 5626103 - DNA, 25 bp, Homo sapien
taggtaatccagaggtgattaaaag

SEQ ID NO: 5626104 - DNA, 25 bp, Homo sapien
tacagatttaaccaaccatggatta

SEQ ID NO: 5626105 - DNA, 25 bp, Homo sapien
tctatctgcaagcctcgagaccctt

SEQ ID NO: 5626106 - DNA, 25 bp, Homo sapien
gagttcaagccaagaatgggcaaca

SEQ ID NO: 5626107 - DNA, 25 bp, Homo sapien
actctgatggcagccactagctact

SEQ ID NO: 5626108 - DNA, 25 bp, Homo sapien
gcaccagccacagttcgagtgctca

SEQ ID NO: 5626109 - DNA, 25 bp, Homo sapien
tcggttccttggttgcaccagccac

SEQ ID NO: 5626110 - DNA, 25 bp, Homo sapien
ggctcgcacccgtaatcccatcttt

SEQ ID NO: 5626111 - DNA, 25 bp, Homo sapien
aataatgcaatactcacaactgatt

SEQ ID NO: 5626112 - DNA, 25 bp, Homo sapien
ttacaggcataataatgcaatactc

SEQ ID NO: 5626113 - DNA, 25 bp, Homo sapien
aaaattcggttccttggttgcacca

SEQ ID NO: 5626114 - DNA, 25 bp, Homo sapien
ctgatggcagccactagctactaaa

SEQ ID NO: 5626115 - DNA, 25 bp, Homo sapien
gagaaaagattaagacaatataaat

SEQ ID NO: 5626116 - DNA, 25 bp, Homo sapien
ttcaagccaagaatgggcaacaaag

SEQ ID NO: 5626117 - DNA, 25 bp, Homo sapien
gtagaggcaatgatataagtgacct

SEQ ID NO: 5626118 - DNA, 25 bp, Homo sapien
ttattttgagacggggaaatcaata

SEQ ID NO: 5626119 - DNA, 25 bp, Homo sapien
cctactctgaaatacctctggaaaa

SEQ ID NO: 5626120 - DNA, 25 bp, Homo sapien
ccaagcaatattgttgaaaggaatt

SEQ ID NO: 5626121 - DNA, 25 bp, Homo sapien
gtgtgtgtgttaggcatctttcttg

SEQ ID NO: 5626122 - DNA, 25 bp, Homo sapien
aatataaacattcaccagccaggta

SEQ ID NO: 5626123 - DNA, 25 bp, Homo sapien
ggcaatgatataagtgacctactct

SEQ ID NO: 5626124 - DNA, 25 bp, Homo sapien
gttgaaaggaattgtacaaagagaa

SEQ ID NO: 5626125 - DNA, 25 bp, Homo sapien
ttgagacggggaaatcaatacccca

SEQ ID NO: 5626126 - DNA, 25 bp, Homo sapien
gtacaaagagaattcaatataaaca

SEQ ID NO: 5626127 - DNA, 25 bp, Homo sapien
ttgaaagcaaggataacctgcaatt

SEQ ID NO: 5626128 - DNA, 25 bp, Homo sapien
gtcgattcttgaaagggaattggga

SEQ ID NO: 5626129 - DNA, 25 bp, Homo sapien
ccgtgaaaggccagctctctgtcag

SEQ ID NO: 5626130 - DNA, 25 bp, Homo sapien
agaggctctgctcctttgtcggagc

SEQ ID NO: 5626131 - DNA, 25 bp, Homo sapien
atcccacacctgtcctccagagaga

SEQ ID NO: 5626132 - DNA, 25 bp, Homo sapien
ggagcacgtgccctcaagtcagctc

SEQ ID NO: 5626133 - DNA, 25 bp, Homo sapien
tagataaaatccaaatcccacacct

SEQ ID NO: 5626134 - DNA, 25 bp, Homo sapien
ggtggagtgtgacgttttgtcgatt

SEQ ID NO: 5626135 - DNA, 25 bp, Homo sapien
tcaagtcagctccactgcagtgtgc

SEQ ID NO: 5626136 - DNA, 25 bp, Homo sapien
tggctccaaggagcctggaaagcag

SEQ ID NO: 5626137 - DNA, 25 bp, Homo sapien
gctcctttgtcggagcacgtgccct

SEQ ID NO: 5626138 - DNA, 25 bp, Homo sapien
agctccactgcagtgtgcgctggaa

SEQ ID NO: 5626139 - DNA, 25 bp, Homo sapien
ggcgctgtgctgggttctagctata

SEQ ID NO: 5626140 - DNA, 25 bp, Homo sapien
ctcataatctagggcggaagcctga

SEQ ID NO: 5626141 - DNA, 25 bp, Homo sapien
acaggctgctgcaataaccaggtgt

SEQ ID NO: 5626142 - DNA, 25 bp, Homo sapien
ggaagcctgatggtaacaaatgctc

SEQ ID NO: 5626143 - DNA, 25 bp, Homo sapien
gccccgcccagtggccttgcctggg

SEQ ID NO: 5626144 - DNA, 25 bp, Homo sapien
ggacgcgccccgctgttacgtcact

SEQ ID NO: 5626145 - DNA, 25 bp, Homo sapien
gattcattctgggacggtgagatac

SEQ ID NO: 5626146 - DNA, 25 bp, Homo sapien
accgcgcttgccaatcaggaagtga

SEQ ID NO: 5626147 - DNA, 25 bp, Homo sapien
gtcagccaaagtaattgggtgcctc

SEQ ID NO: 5626148 - DNA, 25 bp, Homo sapien
tctagctataaagagagatgaaccc

SEQ ID NO: 5626149 - DNA, 25 bp, Homo sapien
ctccgcccatcgctgccaccatctc

SEQ ID NO: 5626150 - DNA, 25 bp, Homo sapien
gaagaggatgttcaccaagaactca

SEQ ID NO: 5626151 - DNA, 25 bp, Homo sapien
tatgtcaagtgctaggtagactgtc

SEQ ID NO: 5626152 - DNA, 25 bp, Homo sapien
agagtctcagagattaagttagata

SEQ ID NO: 5626153 - DNA, 25 bp, Homo sapien
gtggactgtacttggtgttatggac

SEQ ID NO: 5626154 - DNA, 25 bp, Homo sapien
agatctacagagggtttggctaaaa

SEQ ID NO: 5626155 - DNA, 25 bp, Homo sapien
gagcctttgggaggtaaataggtca

SEQ ID NO: 5626156 - DNA, 25 bp, Homo sapien
tggaatccagcaaatctagcttagc

SEQ ID NO: 5626157 - DNA, 25 bp, Homo sapien
agggcagttgtgctccttgtggact

SEQ ID NO: 5626158 - DNA, 25 bp, Homo sapien
ggccagagaaccagcttaccctact

SEQ ID NO: 5626159 - DNA, 25 bp, Homo sapien
acacagtactctgtagaccaggaag

SEQ ID NO: 5626160 - DNA, 25 bp, Homo sapien
ttggaaaagttagttgacctgtcaa

SEQ ID NO: 5626161 - DNA, 25 bp, Homo sapien
gtatcaagtgtgaacaggctgacaa

SEQ ID NO: 5626162 - DNA, 25 bp, Homo sapien
ctgaagtaatctgccatggtgaaca

SEQ ID NO: 5626163 - DNA, 25 bp, Homo sapien
aaaattagtgaatactcccaagagc

SEQ ID NO: 5626164 - DNA, 25 bp, Homo sapien
tgaacagctccaaaaccacaggtat

SEQ ID NO: 5626165 - DNA, 25 bp, Homo sapien
attccaaaggaatacccaaatgatt

SEQ ID NO: 5626166 - DNA, 25 bp, Homo sapien
aggctgacaagaatgaccattaact

SEQ ID NO: 5626167 - DNA, 25 bp, Homo sapien
atgtggcttgtaatgatcaacattc

SEQ ID NO: 5626168 - DNA, 25 bp, Homo sapien
gaaaaagaaactagaggcatgttaa

SEQ ID NO: 5626169 - DNA, 25 bp, Homo sapien
ccaatagagtggtatcaagtgtgaa

SEQ ID NO: 5626170 - DNA, 25 bp, Homo sapien
tagaggcatgttaagtccatattcc

SEQ ID NO: 5626171 - DNA, 25 bp, Homo sapien
agtgagagtcactacaaccctgaag

SEQ ID NO: 5626172 - DNA, 25 bp, Homo sapien
gatttgagacagatatggtgcatga

SEQ ID NO: 5626173 - DNA, 25 bp, Homo sapien
taggagcagaaccatcagtcaacca

SEQ ID NO: 5626174 - DNA, 25 bp, Homo sapien
tgcgcagacttgccttgaaaggagg

SEQ ID NO: 5626175 - DNA, 25 bp, Homo sapien
catcttggcctttagtgtggagcac

SEQ ID NO: 5626176 - DNA, 25 bp, Homo sapien
atcagaactttggcagggttacgta

SEQ ID NO: 5626177 - DNA, 25 bp, Homo sapien
ttgacccagccagctactgagggaa

SEQ ID NO: 5626178 - DNA, 25 bp, Homo sapien
acagcaaatctgtggtggccatcag

SEQ ID NO: 5626179 - DNA, 25 bp, Homo sapien
ctcagaaaggcacagcatacataat

SEQ ID NO: 5626180 - DNA, 25 bp, Homo sapien
tccgagttactattaaggccacagc

SEQ ID NO: 5626181 - DNA, 25 bp, Homo sapien
gacatatgtagccaaccgaggtgca

SEQ ID NO: 5626182 - DNA, 25 bp, Homo sapien
agcatgacacgatgatgcgcagact

SEQ ID NO: 5626183 - DNA, 25 bp, Homo sapien
aataaaaattacaccaaaagatgat

SEQ ID NO: 5626184 - DNA, 25 bp, Homo sapien
ctggaggcatacaatgacctaaaca

SEQ ID NO: 5626185 - DNA, 25 bp, Homo sapien
cggatagcagaactttaggaaaaac

SEQ ID NO: 5626186 - DNA, 25 bp, Homo sapien
ccaaaagatgattcagtatgaggat

SEQ ID NO: 5626187 - DNA, 25 bp, Homo sapien
tgaacaaagttcaacggatagcaga

SEQ ID NO: 5626188 - DNA, 25 bp, Homo sapien
aaccattcaatgtcgctaaggccat

SEQ ID NO: 5626189 - DNA, 25 bp, Homo sapien
tgtcgctaaggccataataaagaaa

SEQ ID NO: 5626190 - DNA, 25 bp, Homo sapien
gaaaaatgatgctgtaaaaggagca

SEQ ID NO: 5626191 - DNA, 25 bp, Homo sapien
agtatgaggataagctgtatgaaat

SEQ ID NO: 5626192 - DNA, 25 bp, Homo sapien
tgtaaaaggagcatttctgtaagtt

SEQ ID NO: 5626193 - DNA, 25 bp, Homo sapien
agaaaccttgggccaacatttatct

SEQ ID NO: 5626194 - DNA, 25 bp, Homo sapien
cttgtctgatgtaaaaggtgcgagt

SEQ ID NO: 5626195 - DNA, 25 bp, Homo sapien
aaagcactgagtctaccacagaatc

SEQ ID NO: 5626196 - DNA, 25 bp, Homo sapien
gcacgttcacacggttgacccctcc

SEQ ID NO: 5626197 - DNA, 25 bp, Homo sapien
tcgcggtaaagagcaaatttagcac

SEQ ID NO: 5626198 - DNA, 25 bp, Homo sapien
agctctggactctgaaagcactgag

SEQ ID NO: 5626199 - DNA, 25 bp, Homo sapien
ccctccctgcatgaagagcagatgg

SEQ ID NO: 5626200 - DNA, 25 bp, Homo sapien
gaaggctcgagtaatctctgcacgt

SEQ ID NO: 5626201 - DNA, 25 bp, Homo sapien
cgagtggacctctagccccctttcc

SEQ ID NO: 5626202 - DNA, 25 bp, Homo sapien
tctgatcagtctcgcggtaaagagc

SEQ ID NO: 5626203 - DNA, 25 bp, Homo sapien
tacagctgggaagaatgcatatttt

SEQ ID NO: 5626204 - DNA, 25 bp, Homo sapien
aaggccactaacccaagtcaagctc

SEQ ID NO: 5626205 - DNA, 25 bp, Homo sapien
tttgatacagaaatgaaatggtgag

SEQ ID NO: 5626206 - DNA, 25 bp, Homo sapien
ctggagaacagacccttaaggaaaa

SEQ ID NO: 5626207 - DNA, 25 bp, Homo sapien
tatagcaaaagacccagggctactt

SEQ ID NO: 5626208 - DNA, 25 bp, Homo sapien
tggaagaaacatatcaggatgtgct

SEQ ID NO: 5626209 - DNA, 25 bp, Homo sapien
caggcagtgaataagggaatttctg

SEQ ID NO: 5626210 - DNA, 25 bp, Homo sapien
atctccaccaaaaagccccagcaca

SEQ ID NO: 5626211 - DNA, 25 bp, Homo sapien
catgagttttatgggggactctgtc

SEQ ID NO: 5626212 - DNA, 25 bp, Homo sapien
aatcttgcagtaatgtgcagagagg

SEQ ID NO: 5626213 - DNA, 25 bp, Homo sapien
tttgacctgcccaatgggagtcttc

SEQ ID NO: 5626214 - DNA, 25 bp, Homo sapien
tgaaggtatttgtgctgaaagaatc

SEQ ID NO: 5626215 - DNA, 25 bp, Homo sapien
ggggtatacacagtgtgaactgggc

SEQ ID NO: 5626216 - DNA, 25 bp, Homo sapien
ggatatatagcagccacccagggaa

SEQ ID NO: 5626217 - DNA, 25 bp, Homo sapien
aaaaggtaatgagagttcacagaac

SEQ ID NO: 5626218 - DNA, 25 bp, Homo sapien
gatagagaaaccagtcaggatatat

SEQ ID NO: 5626219 - DNA, 25 bp, Homo sapien
ggagtgttgagaatggatctgaaat

SEQ ID NO: 5626220 - DNA, 25 bp, Homo sapien
agggttggtcttataggaactattc

SEQ ID NO: 5626221 - DNA, 25 bp, Homo sapien
tagcagaagtggaaactcagatttc

SEQ ID NO: 5626222 - DNA, 25 bp, Homo sapien
agcagcaatcaagtgcaatgaaagt

SEQ ID NO: 5626223 - DNA, 25 bp, Homo sapien
ggaggcaatgatcttgagtggtatt

SEQ ID NO: 5626224 - DNA, 25 bp, Homo sapien
attttcctatgaagtgtgagaaggg

SEQ ID NO: 5626225 - DNA, 25 bp, Homo sapien
gagtttttggatagagatgtaggtt

SEQ ID NO: 5626226 - DNA, 25 bp, Homo sapien
atctgaaatgagactagggatagag

SEQ ID NO: 5626227 - DNA, 25 bp, Homo sapien
gctgcaaattagtgtgcagtgaacc

SEQ ID NO: 5626228 - DNA, 25 bp, Homo sapien
agaagagattgagctattttgtttc

SEQ ID NO: 5626229 - DNA, 25 bp, Homo sapien
atgaagaacgaagcaagttcagctc

SEQ ID NO: 5626230 - DNA, 25 bp, Homo sapien
gagcctgctctccaaaacacatcca

SEQ ID NO: 5626231 - DNA, 25 bp, Homo sapien
gtgtaaccaaaaccacagtgctctc

SEQ ID NO: 5626232 - DNA, 25 bp, Homo sapien
ccaggtccatggtaatttggtccac

SEQ ID NO: 5626233 - DNA, 25 bp, Homo sapien
gtacagccagaccttagggaaaatc

SEQ ID NO: 5626234 - DNA, 25 bp, Homo sapien
aacacacctgaaaaggattaaatta

SEQ ID NO: 5626235 - DNA, 25 bp, Homo sapien
aaatgttcaaatgctgaggcaaggc

SEQ ID NO: 5626236 - DNA, 25 bp, Homo sapien
cctcatcgggcttcctagcacttcc

SEQ ID NO: 5626237 - DNA, 25 bp, Homo sapien
tgttgcattacagcagttagaagag

SEQ ID NO: 5626238 - DNA, 25 bp, Homo sapien
taagaggggactattgtattcaaat

SEQ ID NO: 5626239 - DNA, 25 bp, Homo sapien
taattaaaaccacagaaagcaagac

SEQ ID NO: 5626240 - DNA, 25 bp, Homo sapien
tgcactccagactaggtggcaaagt

SEQ ID NO: 5626241 - DNA, 25 bp, Homo sapien
gtggcaaagtgagactctgtcccaa

SEQ ID NO: 5626242 - DNA, 25 bp, Homo sapien
gataagaggggactattgtattcaa

SEQ ID NO: 5626243 - DNA, 25 bp, Homo sapien
tttagaccacagttcaccatgagta

SEQ ID NO: 5626244 - DNA, 25 bp, Homo sapien
accactgcactccagactaggtggc

SEQ ID NO: 5626245 - DNA, 25 bp, Homo sapien
tcaccatgagtaattaaaaccacag

SEQ ID NO: 5626246 - DNA, 25 bp, Homo sapien
taaataaaataaaactcatgaatgg

SEQ ID NO: 5626247 - DNA, 25 bp, Homo sapien
taaaaccacagaaagcaagacagga

SEQ ID NO: 5626248 - DNA, 25 bp, Homo sapien
tagtatttttagaccacagttcacc

SEQ ID NO: 5626249 - DNA, 25 bp, Homo sapien
tgttcacaccagggtgatcaggcct

SEQ ID NO: 5626250 - DNA, 25 bp, Homo sapien
gcaaacctgcccaagaccacacagc

SEQ ID NO: 5626251 - DNA, 25 bp, Homo sapien
aagtaagctagttctgggttaatgt

SEQ ID NO: 5626252 - DNA, 25 bp, Homo sapien
aaggacaaggtcactattgtgaatc

SEQ ID NO: 5626253 - DNA, 25 bp, Homo sapien
tttccaaagagtagttcagaccaac

SEQ ID NO: 5626254 - DNA, 25 bp, Homo sapien
aaagagtagttcagaccaacccaga

SEQ ID NO: 5626255 - DNA, 25 bp, Homo sapien
taggaactggtttgaaatctgccaa

SEQ ID NO: 5626256 - DNA, 25 bp, Homo sapien
ttcctccaaaggacaaggtcactat

SEQ ID NO: 5626257 - DNA, 25 bp, Homo sapien
tgggttaatgttcacaccagggtga

SEQ ID NO: 5626258 - DNA, 25 bp, Homo sapien
tattgtgaatcctgctttacagagc

SEQ ID NO: 5626259 - DNA, 25 bp, Homo sapien
aagtaagtaagctagttctgggtta

SEQ ID NO: 5626260 - DNA, 25 bp, Homo sapien
aagtgttaaaattgaagactgggtg

SEQ ID NO: 5626261 - DNA, 25 bp, Homo sapien
actcttaaagaggtactagtacaat

SEQ ID NO: 5626262 - DNA, 25 bp, Homo sapien
acaacaaaatctcaacaatcaggcc

SEQ ID NO: 5626263 - DNA, 25 bp, Homo sapien
aacaaatctgcttaaaatgggcttt

SEQ ID NO: 5626264 - DNA, 25 bp, Homo sapien
aaacaaacagaacctagacacctat

SEQ ID NO: 5626265 - DNA, 25 bp, Homo sapien
gttgtgaaactagactgtgcttgga

SEQ ID NO: 5626266 - DNA, 25 bp, Homo sapien
gactacaacaatacaaccctacagc

SEQ ID NO: 5626267 - DNA, 25 bp, Homo sapien
acaaaggtaactaggtcaactcagc

SEQ ID NO: 5626268 - DNA, 25 bp, Homo sapien
agacttcaaaaggaaattaccacca

SEQ ID NO: 5626269 - DNA, 25 bp, Homo sapien
gcttggaggcgatgtattaaatatt

SEQ ID NO: 5626270 - DNA, 25 bp, Homo sapien
gagagtcaggttgtgaaactagact

SEQ ID NO: 5626271 - DNA, 25 bp, Homo sapien
gtgctcctcccggaccccgccgatt

SEQ ID NO: 5626272 - DNA, 25 bp, Homo sapien
aatcggcggggtccgggaggagcac

SEQ ID NO: 5626273 - DNA, 25 bp, Homo sapien
aggcccaaacagaggatccacggta

SEQ ID NO: 5626274 - DNA, 25 bp, Homo sapien
taccgtggatcctctgtttgggcct

SEQ ID NO: 5626275 - DNA, 25 bp, Homo sapien
gttatgactaggcagtcaggatgcc

SEQ ID NO: 5626276 - DNA, 25 bp, Homo sapien
atggaggtatattcatagtaaagcc

SEQ ID NO: 5626277 - DNA, 25 bp, Homo sapien
tggaagaggaagtgtctaaatatca

SEQ ID NO: 5626278 - DNA, 25 bp, Homo sapien
tcaggatgcctacactcactaactc

SEQ ID NO: 5626279 - DNA, 25 bp, Homo sapien
atgagtcataggaaacagcaatgga

SEQ ID NO: 5626280 - DNA, 25 bp, Homo sapien
tattgaggatgttggtatttctact

SEQ ID NO: 5626281 - DNA, 25 bp, Homo sapien
cttcaggacactcttagggacttat

SEQ ID NO: 5626282 - DNA, 25 bp, Homo sapien
ctgaacaaataactgtgcatgagtc

SEQ ID NO: 5626283 - DNA, 25 bp, Homo sapien
aggtaaatacacttgggaaattcca

SEQ ID NO: 5626284 - DNA, 25 bp, Homo sapien
aagcctattaagcagaaacaagtta

SEQ ID NO: 5626285 - DNA, 25 bp, Homo sapien
tgggaaattccatgaaacctgaaca

SEQ ID NO: 5626286 - DNA, 25 bp, Homo sapien
atctgcatggataaaggaaaactgc

SEQ ID NO: 5626287 - DNA, 25 bp, Homo sapien
actaacagctatcaaaggaatgggc

SEQ ID NO: 5626288 - DNA, 25 bp, Homo sapien
aggagaaagtcagagatctgcatgg

SEQ ID NO: 5626289 - DNA, 25 bp, Homo sapien
tgaggaccagtctttttgaaggaga

SEQ ID NO: 5626290 - DNA, 25 bp, Homo sapien
gaaaaacttcaaatgaggaccagtc

SEQ ID NO: 5626291 - DNA, 25 bp, Homo sapien
acacaggccaagccaacctgaaatt

SEQ ID NO: 5626292 - DNA, 25 bp, Homo sapien
tttcaaagcaagtcccagaatttaa

SEQ ID NO: 5626293 - DNA, 25 bp, Homo sapien
aaatctgcatagtttagtctgttta

SEQ ID NO: 5626294 - DNA, 25 bp, Homo sapien
tacaactatgtcactaacagctatc

SEQ ID NO: 5626295 - DNA, 25 bp, Homo sapien
aaggaatgggctttgttacttttca

SEQ ID NO: 5626296 - DNA, 25 bp, Homo sapien
ctcaaatcatgagacgactacatct

SEQ ID NO: 5626297 - DNA, 25 bp, Homo sapien
tccgagtgccgtatctcagaacatc

SEQ ID NO: 5626298 - DNA, 25 bp, Homo sapien
ctccatttgtggttctccagagaat

SEQ ID NO: 5626299 - DNA, 25 bp, Homo sapien
gaacctgcatgaccagcagtctgat

SEQ ID NO: 5626300 - DNA, 25 bp, Homo sapien
ggctacactctagtcatgaattaac

SEQ ID NO: 5626301 - DNA, 25 bp, Homo sapien
atgtacagtttccttgcagtgccca

SEQ ID NO: 5626302 - DNA, 25 bp, Homo sapien
tctgatgggagcacccatgaccata

SEQ ID NO: 5626303 - DNA, 25 bp, Homo sapien
taaacccaaacgtctgcttcaattc

SEQ ID NO: 5626304 - DNA, 25 bp, Homo sapien
ggggagcactccgagtgccgtatct

SEQ ID NO: 5626305 - DNA, 25 bp, Homo sapien
agaacatctaagaacagtctaggaa

SEQ ID NO: 5626306 - DNA, 25 bp, Homo sapien
agaacagtctaggaaaacacactcc

SEQ ID NO: 5626307 - DNA, 25 bp, Homo sapien
tgactcatgctgagtgtgggtcctg

SEQ ID NO: 5626308 - DNA, 25 bp, Homo sapien
gtgcacagatttacagagctgctcc

SEQ ID NO: 5626309 - DNA, 25 bp, Homo sapien
gcacagatttacagagctgctcctc

SEQ ID NO: 5626310 - DNA, 25 bp, Homo sapien
tgctcctccctgtgccaggaccgcc

SEQ ID NO: 5626311 - DNA, 25 bp, Homo sapien
agcagcttggcacggaccttttttt

SEQ ID NO: 5626312 - DNA, 25 bp, Homo sapien
cctcctttattaggccaagagtggc

SEQ ID NO: 5626313 - DNA, 25 bp, Homo sapien
cagagctgctcctccctgtgccagg

SEQ ID NO: 5626314 - DNA, 25 bp, Homo sapien
aggttcctgccactatacctggcta

SEQ ID NO: 5626315 - DNA, 25 bp, Homo sapien
agcatcttcaggagcctctgggcca

SEQ ID NO: 5626316 - DNA, 25 bp, Homo sapien
ggattacaggttcctgccactatac

SEQ ID NO: 5626317 - DNA, 25 bp, Homo sapien
atgtgcacagatttacagagctgct

SEQ ID NO: 5626318 - DNA, 25 bp, Homo sapien
cgcccagcatcttcaggagcctctg

SEQ ID NO: 5626319 - DNA, 25 bp, Homo sapien
caccaattctggaagggtggagaga

SEQ ID NO: 5626320 - DNA, 25 bp, Homo sapien
actccctctggatggcttgccgaat

SEQ ID NO: 5626321 - DNA, 25 bp, Homo sapien
cctgcacagtccctagggctgcaag

SEQ ID NO: 5626322 - DNA, 25 bp, Homo sapien
gggtgtctgtgggccaacaccaaac

SEQ ID NO: 5626323 - DNA, 25 bp, Homo sapien
gccggtccttgccaggcccttggtc

SEQ ID NO: 5626324 - DNA, 25 bp, Homo sapien
ggggcacctgtgttccaggaccaag

SEQ ID NO: 5626325 - DNA, 25 bp, Homo sapien
tggacagctgcctgattcggccatg

SEQ ID NO: 5626326 - DNA, 25 bp, Homo sapien
caacaccaaacgccagcctgctctg

SEQ ID NO: 5626327 - DNA, 25 bp, Homo sapien
tgttcagcatcttacaaagggggcc

SEQ ID NO: 5626328 - DNA, 25 bp, Homo sapien
tcggccatgacccttcacgggtgtc

SEQ ID NO: 5626329 - DNA, 25 bp, Homo sapien
acatctaagactgtgcgccctgcac

SEQ ID NO: 5626330 - DNA, 25 bp, Homo sapien
aaaccttcaaggatgtgcctgaggg

SEQ ID NO: 5626331 - DNA, 25 bp, Homo sapien
ccacttcccaagcctggggagcctg

SEQ ID NO: 5626332 - DNA, 25 bp, Homo sapien
ggcgtggctcctccaggtaaggagg

SEQ ID NO: 5626333 - DNA, 25 bp, Homo sapien
gtgtcagggcccacttcccaagcct

SEQ ID NO: 5626334 - DNA, 25 bp, Homo sapien
gttgcaaaaccttcaaggatgtgcc

SEQ ID NO: 5626335 - DNA, 25 bp, Homo sapien
gcccacttcccaagcctggggagcc

SEQ ID NO: 5626336 - DNA, 25 bp, Homo sapien
ggtgagtaagtttcaggctgtaact

SEQ ID NO: 5626337 - DNA, 25 bp, Homo sapien
cagggcccacttcccaagcctgggg

SEQ ID NO: 5626338 - DNA, 25 bp, Homo sapien
ggagcccaggtttgcatttgaaaag

SEQ ID NO: 5626339 - DNA, 25 bp, Homo sapien
tgcatttgaaaagcaccccagtggt

SEQ ID NO: 5626340 - DNA, 25 bp, Homo sapien
accttcaaggatgtgcctgagggaa

SEQ ID NO: 5626341 - DNA, 25 bp, Homo sapien
tgtgttataatggggaagtccttgt

SEQ ID NO: 5626342 - DNA, 25 bp, Homo sapien
ttgacagaggaacaaaagtatttgt

SEQ ID NO: 5626343 - DNA, 25 bp, Homo sapien
gtcatctaacgaacaagaaaggctc

SEQ ID NO: 5626344 - DNA, 25 bp, Homo sapien
aagaatggtatttgacagaggaaca

SEQ ID NO: 5626345 - DNA, 25 bp, Homo sapien
tttactgatgaagctgaaactactt

SEQ ID NO: 5626346 - DNA, 25 bp, Homo sapien
caaagacttgatattgtggaatgac

SEQ ID NO: 5626347 - DNA, 25 bp, Homo sapien
gtggaatgactagcaaacaagcaat

SEQ ID NO: 5626348 - DNA, 25 bp, Homo sapien
atattacatgtcagaagaatggtat

SEQ ID NO: 5626349 - DNA, 25 bp, Homo sapien
aaaattagatcagcacaaagacttg

SEQ ID NO: 5626350 - DNA, 25 bp, Homo sapien
ctaggaaacctgacatgggaccttt

SEQ ID NO: 5626351 - DNA, 25 bp, Homo sapien
agataaagagcctacaaaaacaccc

SEQ ID NO: 5626352 - DNA, 25 bp, Homo sapien
ctccttccagagcaaaaacttaaaa

SEQ ID NO: 5626353 - DNA, 25 bp, Homo sapien
catctcaggaggatatttcaggata

SEQ ID NO: 5626354 - DNA, 25 bp, Homo sapien
gtgagaaaccctagtgaataccaac

SEQ ID NO: 5626355 - DNA, 25 bp, Homo sapien
catgtacttatgtgagaaaccctag

SEQ ID NO: 5626356 - DNA, 25 bp, Homo sapien
tggaaagaaacgatactgctccttc

SEQ ID NO: 5626357 - DNA, 25 bp, Homo sapien
attatcaagttacccaccagaattt

SEQ ID NO: 5626358 - DNA, 25 bp, Homo sapien
aggatatttaagtgagagctaacac

SEQ ID NO: 5626359 - DNA, 25 bp, Homo sapien
cagaatttctggaaagaaacgatac

SEQ ID NO: 5626360 - DNA, 25 bp, Homo sapien
atgggcctctctgtcaaaccaggct

SEQ ID NO: 5626361 - DNA, 25 bp, Homo sapien
aaagttaaaatgggcctctctgtca

SEQ ID NO: 5626362 - DNA, 25 bp, Homo sapien
taggaattagcaagccatctcagga

SEQ ID NO: 5626363 - DNA, 25 bp, Homo sapien
tcttagtgagaggatgcaaacttag

SEQ ID NO: 5626364 - DNA, 25 bp, Homo sapien
atccactgaggtcaaagtcttgttt

SEQ ID NO: 5626365 - DNA, 25 bp, Homo sapien
agatgcagttaggagtaagttctgg

SEQ ID NO: 5626366 - DNA, 25 bp, Homo sapien
tgagaggaatctggagatcttagtg

SEQ ID NO: 5626367 - DNA, 25 bp, Homo sapien
ggtaacccaatgcagagtacggtga

SEQ ID NO: 5626368 - DNA, 25 bp, Homo sapien
gcaaacttaggagtaagatgcagtt

SEQ ID NO: 5626369 - DNA, 25 bp, Homo sapien
ccctcagcctcaacagcctagaacc

SEQ ID NO: 5626370 - DNA, 25 bp, Homo sapien
ctagaaaggtagttactaggggtca

SEQ ID NO: 5626371 - DNA, 25 bp, Homo sapien
gcagagtacggtgactatagttaac

SEQ ID NO: 5626372 - DNA, 25 bp, Homo sapien
tttgactatgcagccactacacttg

SEQ ID NO: 5626373 - DNA, 25 bp, Homo sapien
tttggaataacctcacagaagcaga

SEQ ID NO: 5626374 - DNA, 25 bp, Homo sapien
gaggttacaccctcagcaagggctc

SEQ ID NO: 5626375 - DNA, 25 bp, Homo sapien
gacgcttttccccagcaggtcaccc

SEQ ID NO: 5626376 - DNA, 25 bp, Homo sapien
aacacttcccaggaactgaagtgcc

SEQ ID NO: 5626377 - DNA, 25 bp, Homo sapien
ccaggaactgaagtgcctcatgtga

SEQ ID NO: 5626378 - DNA, 25 bp, Homo sapien
ttcccaggaactgaagtgcctcatg

SEQ ID NO: 5626379 - DNA, 25 bp, Homo sapien
tgagacaacagccctaacacttccc

SEQ ID NO: 5626380 - DNA, 25 bp, Homo sapien
tggtgagacaacagccctaacactt

SEQ ID NO: 5626381 - DNA, 25 bp, Homo sapien
ccgcagaagacgcttttccccagca

SEQ ID NO: 5626382 - DNA, 25 bp, Homo sapien
tcatgtgattgattcccaggcccag

SEQ ID NO: 5626383 - DNA, 25 bp, Homo sapien
ccggcccaggtatcctccctgagcc

SEQ ID NO: 5626384 - DNA, 25 bp, Homo sapien
gcagcggaggttacaccctcagcaa

SEQ ID NO: 5626385 - DNA, 25 bp, Homo sapien
agtatatgtgaggataattaaaata

SEQ ID NO: 5626386 - DNA, 25 bp, Homo sapien
tctaaaattagataatggtgttggt

SEQ ID NO: 5626387 - DNA, 25 bp, Homo sapien
aaagattaccgaattgcacgttttc

SEQ ID NO: 5626388 - DNA, 25 bp, Homo sapien
tgccatgtcatgtagtccttgtacc

SEQ ID NO: 5626389 - DNA, 25 bp, Homo sapien
acggagatagtcactcctgctccca

SEQ ID NO: 5626390 - DNA, 25 bp, Homo sapien
catctgcaaaacggagatagtcact

SEQ ID NO: 5626391 - DNA, 25 bp, Homo sapien
tgtgtgtgtcatcacatgccatgtc

SEQ ID NO: 5626392 - DNA, 25 bp, Homo sapien
aatggtaagttttatggtgtgtaaa

SEQ ID NO: 5626393 - DNA, 25 bp, Homo sapien
aaggtcacctttatggttctgcttc

SEQ ID NO: 5626394 - DNA, 25 bp, Homo sapien
ccccaagcccatgtatgggatctcc

SEQ ID NO: 5626395 - DNA, 25 bp, Homo sapien
taatggtgttggttggttgcacaac

SEQ ID NO: 5626396 - DNA, 25 bp, Homo sapien
gtgtagcttagagtacacactctgc

SEQ ID NO: 5626397 - DNA, 25 bp, Homo sapien
tcaagggtcttctattgtgtgtagc

SEQ ID NO: 5626398 - DNA, 25 bp, Homo sapien
ctgacatccaatgacgttacgtgct

SEQ ID NO: 5626399 - DNA, 25 bp, Homo sapien
aaagaggtattgtcagcacccagat

SEQ ID NO: 5626400 - DNA, 25 bp, Homo sapien
atcttttatgggttccaggagtaaa

SEQ ID NO: 5626401 - DNA, 25 bp, Homo sapien
tttcaaacatcgagaaggagaatcc

SEQ ID NO: 5626402 - DNA, 25 bp, Homo sapien
cccaacggatatatttgccagtgat

SEQ ID NO: 5626403 - DNA, 25 bp, Homo sapien
tgccagtgatgtatgtgagcacatt

SEQ ID NO: 5626404 - DNA, 25 bp, Homo sapien
attcatgtgtagagtaaagaggtat

SEQ ID NO: 5626405 - DNA, 25 bp, Homo sapien
gctcaggcaagacatgtgtgcccta

SEQ ID NO: 5626406 - DNA, 25 bp, Homo sapien
gtttcataaccatctgagctcaggc

SEQ ID NO: 5626407 - DNA, 25 bp, Homo sapien
atcgttctcctttcaggccccccac

SEQ ID NO: 5626408 - DNA, 25 bp, Homo sapien
catactgtactggtctgggctttgg

SEQ ID NO: 5626409 - DNA, 25 bp, Homo sapien
gaccccacgtcagaccagtcgcttt

SEQ ID NO: 5626410 - DNA, 25 bp, Homo sapien
gaacgatgtgtcacccgctccctcc

SEQ ID NO: 5626411 - DNA, 25 bp, Homo sapien
gtgacatcccacgggtactggctct

SEQ ID NO: 5626412 - DNA, 25 bp, Homo sapien
tttcactttcgcagaggccgaaacc

SEQ ID NO: 5626413 - DNA, 25 bp, Homo sapien
aatgaagccgaacccctcagtctca

SEQ ID NO: 5626414 - DNA, 25 bp, Homo sapien
gggcggagatcttgacttcactcga

SEQ ID NO: 5626415 - DNA, 25 bp, Homo sapien
attgggtttatgtgaacgatgtgtc

SEQ ID NO: 5626416 - DNA, 25 bp, Homo sapien
cggaggcttgggcatttcactttcg

SEQ ID NO: 5626417 - DNA, 25 bp, Homo sapien
agtcgctttgttttcgaggctgggg

SEQ ID NO: 5626418 - DNA, 25 bp, Homo sapien
cagttggacctgtttgtggtatcga

SEQ ID NO: 5626419 - DNA, 25 bp, Homo sapien
aacgaatatatttacctgggccagt

SEQ ID NO: 5626420 - DNA, 25 bp, Homo sapien
tttgtggtatcgagtcaccctatcc

SEQ ID NO: 5626421 - DNA, 25 bp, Homo sapien
ttgaagtgtgcccccaaaaaacata

SEQ ID NO: 5626422 - DNA, 25 bp, Homo sapien
tgcacacagaaggaggctctctttg

SEQ ID NO: 5626423 - DNA, 25 bp, Homo sapien
tggtgacgatcatgttaaacgaata

SEQ ID NO: 5626424 - DNA, 25 bp, Homo sapien
caccctatccaagaacaaggggtgt

SEQ ID NO: 5626425 - DNA, 25 bp, Homo sapien
acacagaaggaggctctctttgggg

SEQ ID NO: 5626426 - DNA, 25 bp, Homo sapien
tctcatgtttagaactcacaccttc

SEQ ID NO: 5626427 - DNA, 25 bp, Homo sapien
tatatttacctgggccagttggacc

SEQ ID NO: 5626428 - DNA, 25 bp, Homo sapien
gtgtgcccccaaaaaacatatgttc

SEQ ID NO: 5626429 - DNA, 25 bp, Homo sapien
aattgtgttcatgcaaactgccatc

SEQ ID NO: 5626430 - DNA, 25 bp, Homo sapien
acagaataaaatgattagaaaacat

SEQ ID NO: 5626431 - DNA, 25 bp, Homo sapien
tcagaaacagattacagaatctcac

SEQ ID NO: 5626432 - DNA, 25 bp, Homo sapien
tataagactctatgaggaaaagtgt

SEQ ID NO: 5626433 - DNA, 25 bp, Homo sapien
tactataaggttatttgaaagcacc

SEQ ID NO: 5626434 - DNA, 25 bp, Homo sapien
caagttaccatgaacgcaacaatac

SEQ ID NO: 5626435 - DNA, 25 bp, Homo sapien
tgaggaaaagtgtgcatgcaatcta

SEQ ID NO: 5626436 - DNA, 25 bp, Homo sapien
acatgcaaaagatattgataattcc

SEQ ID NO: 5626437 - DNA, 25 bp, Homo sapien
actaaatagaagaactaaggcaatt

SEQ ID NO: 5626438 - DNA, 25 bp, Homo sapien
taaaacaaacactcatgcattcttc

SEQ ID NO: 5626439 - DNA, 25 bp, Homo sapien
agacattaggaaaaattgtgttcat

SEQ ID NO: 5626440 - DNA, 25 bp, Homo sapien
tagctgctgtaatctcggtactact

SEQ ID NO: 5626441 - DNA, 25 bp, Homo sapien
aaccactgcacaaaactgaaaggat

SEQ ID NO: 5626442 - DNA, 25 bp, Homo sapien
gactcttaaaaagaggcccgatggc

SEQ ID NO: 5626443 - DNA, 25 bp, Homo sapien
attagactcttaaaaagaggcccga

SEQ ID NO: 5626444 - DNA, 25 bp, Homo sapien
gtaatggggtagatttaacagcaaa

SEQ ID NO: 5626445 - DNA, 25 bp, Homo sapien
tagatatacacatcattagactctt

SEQ ID NO: 5626446 - DNA, 25 bp, Homo sapien
tccatttaggacactagctgctgta

SEQ ID NO: 5626447 - DNA, 25 bp, Homo sapien
ctgcacaaaactgaaaggatttctc

SEQ ID NO: 5626448 - DNA, 25 bp, Homo sapien
agcagtgttacaatccagctggaat

SEQ ID NO: 5626449 - DNA, 25 bp, Homo sapien
cttccccaagcagtgttacaatcca

SEQ ID NO: 5626450 - DNA, 25 bp, Homo sapien
agctggaatgggcattagatataca

SEQ ID NO: 5626451 - DNA, 25 bp, Homo sapien
aaaaaatacacgatggaagctggaa

SEQ ID NO: 5626452 - DNA, 25 bp, Homo sapien
ttggatgacttaggtgcagccctac

SEQ ID NO: 5626453 - DNA, 25 bp, Homo sapien
agctggaagaatagatgcagaatca

SEQ ID NO: 5626454 - DNA, 25 bp, Homo sapien
tggtgaggatatacagcaatagttt

SEQ ID NO: 5626455 - DNA, 25 bp, Homo sapien
gatggtaatcaggaattggcttaac

SEQ ID NO: 5626456 - DNA, 25 bp, Homo sapien
acattgatagagtgaatgagactgc

SEQ ID NO: 5626457 - DNA, 25 bp, Homo sapien
tgaaagcaatatggtcatggtaacc

SEQ ID NO: 5626458 - DNA, 25 bp, Homo sapien
cagcacctattatgtggagggactc

SEQ ID NO: 5626459 - DNA, 25 bp, Homo sapien
cttggataaattggtgaggatatac

SEQ ID NO: 5626460 - DNA, 25 bp, Homo sapien
aaggtgagtattagatgtctgatgc

SEQ ID NO: 5626461 - DNA, 25 bp, Homo sapien
tggccaatgaagacagatccacatg

SEQ ID NO: 5626462 - DNA, 25 bp, Homo sapien
tagaactcactgcttggtgctcttc

SEQ ID NO: 5626463 - DNA, 25 bp, Homo sapien
tctccatcaagaagttgttgctggt

SEQ ID NO: 5626464 - DNA, 25 bp, Homo sapien
atttgcagctggtctgaatcataac

SEQ ID NO: 5626465 - DNA, 25 bp, Homo sapien
ttctgtacctgtgttggcagcttga

SEQ ID NO: 5626466 - DNA, 25 bp, Homo sapien
aatcacaggaagtggccagttaaaa

SEQ ID NO: 5626467 - DNA, 25 bp, Homo sapien
ccacgtccatggtacttgcccttcg

SEQ ID NO: 5626468 - DNA, 25 bp, Homo sapien
ctacggctgtctgtaccagcggctt

SEQ ID NO: 5626469 - DNA, 25 bp, Homo sapien
ttgcccttcgggttctacggctgtc

SEQ ID NO: 5626470 - DNA, 25 bp, Homo sapien
ccccaagctaagaaagctgcattct

SEQ ID NO: 5626471 - DNA, 25 bp, Homo sapien
cttcaaggccataaaactttggttc

SEQ ID NO: 5626472 - DNA, 25 bp, Homo sapien
caaactgccagttaagtctccatca

SEQ ID NO: 5626473 - DNA, 25 bp, Homo sapien
ctttgcaagacaccatagatgttac

SEQ ID NO: 5626474 - DNA, 25 bp, Homo sapien
gtaacatctatggtgtcttgcaaag

SEQ ID NO: 5626475 - DNA, 25 bp, Homo sapien
gacatgggataaaccagacagtgga

SEQ ID NO: 5626476 - DNA, 25 bp, Homo sapien
ggagtccaaacaggatgtggacgtc

SEQ ID NO: 5626477 - DNA, 25 bp, Homo sapien
ccttctatgagagcaagggaaacag

SEQ ID NO: 5626478 - DNA, 25 bp, Homo sapien
tgtggacgtccctggtagttctctc

SEQ ID NO: 5626479 - DNA, 25 bp, Homo sapien
caggctctgggaattactcaggtcc

SEQ ID NO: 5626480 - DNA, 25 bp, Homo sapien
tggacgagggatgctctaattctgt

SEQ ID NO: 5626481 - DNA, 25 bp, Homo sapien
gagaactgtcccagtcaggtggacc

SEQ ID NO: 5626482 - DNA, 25 bp, Homo sapien
accctggaaattggagacatgggat

SEQ ID NO: 5626483 - DNA, 25 bp, Homo sapien
cacaacaacacgaacagctaaaact

SEQ ID NO: 5626484 - DNA, 25 bp, Homo sapien
cgagctgcaaaaatgtgcccaaacc

SEQ ID NO: 5626485 - DNA, 25 bp, Homo sapien
tcccaggctcacccccgagctgcaa

SEQ ID NO: 5626486 - DNA, 25 bp, Homo sapien
tgcccccgacaggctttgaagggga

SEQ ID NO: 5626487 - DNA, 25 bp, Homo sapien
caggaaagctgcctaaaacgctgct

SEQ ID NO: 5626488 - DNA, 25 bp, Homo sapien
ctgccagctccagcattaggcctgc

SEQ ID NO: 5626489 - DNA, 25 bp, Homo sapien
gggccatttagtggctgcccccgac

SEQ ID NO: 5626490 - DNA, 25 bp, Homo sapien
agaagccaccattacaactgccagc

SEQ ID NO: 5626491 - DNA, 25 bp, Homo sapien
ttaggcctgcactctaccaccatcc

SEQ ID NO: 5626492 - DNA, 25 bp, Homo sapien
ctgctgaactgggctaagatgccag

SEQ ID NO: 5626493 - DNA, 25 bp, Homo sapien
atcaagaagctgtggaattcagaag

SEQ ID NO: 5626494 - DNA, 25 bp, Homo sapien
cctctctccccacgaaactcagttc

SEQ ID NO: 5626495 - DNA, 25 bp, Homo sapien
gtccatgggatcttggggccattta

SEQ ID NO: 5626496 - DNA, 25 bp, Homo sapien
gcattcaatggcaggatttccatgc

SEQ ID NO: 5626497 - DNA, 25 bp, Homo sapien
gtgtcctatgctcgcgtgtgtgatg

SEQ ID NO: 5626498 - DNA, 25 bp, Homo sapien
cctaacactaatgtcgggatcaaag

SEQ ID NO: 5626499 - DNA, 25 bp, Homo sapien
cgagcccctaacactaatgtcggga

SEQ ID NO: 5626500 - DNA, 25 bp, Homo sapien
tcctatgctcgcgtgtgtgatggga

SEQ ID NO: 5626501 - DNA, 25 bp, Homo sapien
ggtataaataaatgagtgccggtgc

SEQ ID NO: 5626502 - DNA, 25 bp, Homo sapien
taacactaatgtcgggatcaaaggg

SEQ ID NO: 5626503 - DNA, 25 bp, Homo sapien
gcggtgtctatggccgcgctctgtg

SEQ ID NO: 5626504 - DNA, 25 bp, Homo sapien
ctgtgtctccgagcccctaacacta

SEQ ID NO: 5626505 - DNA, 25 bp, Homo sapien
cacagctcacagctcgctctcttgc

SEQ ID NO: 5626506 - DNA, 25 bp, Homo sapien
agcccctaacactaatgtcgggatc

SEQ ID NO: 5626507 - DNA, 25 bp, Homo sapien
gctcacagctcgctctcttgctctc

SEQ ID NO: 5626508 - DNA, 25 bp, Homo sapien
ttaacacagttcttgttttcatttc

SEQ ID NO: 5626509 - DNA, 25 bp, Homo sapien
gaaatgaaaacaagaactgtgttaa

SEQ ID NO: 5626510 - DNA, 25 bp, Homo sapien
ttaaatttttggtcgtgcacctggc

SEQ ID NO: 5626511 - DNA, 25 bp, Homo sapien
aacggatctaataggtgtgagtgtg

SEQ ID NO: 5626512 - DNA, 25 bp, Homo sapien
ggatctaataggtgtgagtgtgtgt

SEQ ID NO: 5626513 - DNA, 25 bp, Homo sapien
tcttcaatggaaacggatctaatag

SEQ ID NO: 5626514 - DNA, 25 bp, Homo sapien
aatggaaacggatctaataggtgtg

SEQ ID NO: 5626515 - DNA, 25 bp, Homo sapien
gcacctggcttgtccccgagcgtaa

SEQ ID NO: 5626516 - DNA, 25 bp, Homo sapien
tttttggtcgtgcacctggcttgtc

SEQ ID NO: 5626517 - DNA, 25 bp, Homo sapien
cttgtccccgagcgtaatattcttc

SEQ ID NO: 5626518 - DNA, 25 bp, Homo sapien
tcaatggaaacggatctaataggtg

SEQ ID NO: 5626519 - DNA, 25 bp, Homo sapien
ggaaacggatctaataggtgtgagt

SEQ ID NO: 5626520 - DNA, 25 bp, Homo sapien
aatattcttcaatggaaacggatct

SEQ ID NO: 5626521 - DNA, 25 bp, Homo sapien
cagctgcaaactgagtaagggtaat

SEQ ID NO: 5626522 - DNA, 25 bp, Homo sapien
atggtaggaagaatgatattaagac

SEQ ID NO: 5626523 - DNA, 25 bp, Homo sapien
aagttctactggatagttttgaatt

SEQ ID NO: 5626524 - DNA, 25 bp, Homo sapien
atttggtcagtcctatggcactgac

SEQ ID NO: 5626525 - DNA, 25 bp, Homo sapien
aactttgaataccaacagcatcctc

SEQ ID NO: 5626526 - DNA, 25 bp, Homo sapien
aggttaagtacagatcattgcagct

SEQ ID NO: 5626527 - DNA, 25 bp, Homo sapien
aagcataatatgtaaaagcaggtta

SEQ ID NO: 5626528 - DNA, 25 bp, Homo sapien
actgagtaagggtaatgagtaaaaa

SEQ ID NO: 5626529 - DNA, 25 bp, Homo sapien
atggcactgacctaagttaaaaaac

SEQ ID NO: 5626530 - DNA, 25 bp, Homo sapien
aaactacacagaaagcaagcatttc

SEQ ID NO: 5626531 - DNA, 25 bp, Homo sapien
ttgaattagattatggtaggaagaa

SEQ ID NO: 5626532 - DNA, 25 bp, Homo sapien
caaccaacaggacacatgaaaagtc

SEQ ID NO: 5626533 - DNA, 25 bp, Homo sapien
tgtttttccatggcacagggttaga

SEQ ID NO: 5626534 - DNA, 25 bp, Homo sapien
actgtgtcttcaaccctgccccctc

SEQ ID NO: 5626535 - DNA, 25 bp, Homo sapien
gccagatgcctctcagaaccgcagc

SEQ ID NO: 5626536 - DNA, 25 bp, Homo sapien
ctgccccctctcaccatgctagttt

SEQ ID NO: 5626537 - DNA, 25 bp, Homo sapien
aaagtctataacactggccagatgc

SEQ ID NO: 5626538 - DNA, 25 bp, Homo sapien
accgcagcagaatgtgcctgtgatt

SEQ ID NO: 5626539 - DNA, 25 bp, Homo sapien
tcgggctcctctttgggtgcaccag

SEQ ID NO: 5626540 - DNA, 25 bp, Homo sapien
ggatgccaccttctgagagccacat

SEQ ID NO: 5626541 - DNA, 25 bp, Homo sapien
ctgctgtgaggatcacaaccaacag

SEQ ID NO: 5626542 - DNA, 25 bp, Homo sapien
gagagccacatgttactgtgtcttc

SEQ ID NO: 5626543 - DNA, 25 bp, Homo sapien
tccagagtgcagttggccaacttag

SEQ ID NO: 5626544 - DNA, 25 bp, Homo sapien
ggttagatgggctccgtttctggag

SEQ ID NO: 5626545 - DNA, 25 bp, Homo sapien
agagtgcagttggccaacttagtgc

SEQ ID NO: 5626546 - DNA, 25 bp, Homo sapien
ttttcagccgagcaccctgtccttg

SEQ ID NO: 5626547 - DNA, 25 bp, Homo sapien
atgggctccgtttctggagagccct

SEQ ID NO: 5626548 - DNA, 25 bp, Homo sapien
gcaccggtgatcgccgctagctttt

SEQ ID NO: 5626549 - DNA, 25 bp, Homo sapien
tagatgggctccgtttctggagagc

SEQ ID NO: 5626550 - DNA, 25 bp, Homo sapien
tgcagttggccaacttagtgcgggt

SEQ ID NO: 5626551 - DNA, 25 bp, Homo sapien
gccgagcaccctgtccttgaggccg

SEQ ID NO: 5626552 - DNA, 25 bp, Homo sapien
tcagccgagcaccctgtccttgagg

SEQ ID NO: 5626553 - DNA, 25 bp, Homo sapien
tttttttcagccgagcaccctgtcc

SEQ ID NO: 5626554 - DNA, 25 bp, Homo sapien
gaaaggaatagaaaacctgactcca

SEQ ID NO: 5626555 - DNA, 25 bp, Homo sapien
gcggggcttgaaagatttgagttag

SEQ ID NO: 5626556 - DNA, 25 bp, Homo sapien
tgcacctccttcccggagtcctggc

SEQ ID NO: 5626557 - DNA, 25 bp, Homo sapien
tccaccagagcatcctggctgcacc

SEQ ID NO: 5626558 - DNA, 25 bp, Homo sapien
atccaaggagctttgcaaaagacac

SEQ ID NO: 5626559 - DNA, 25 bp, Homo sapien
agctttgcaaaagacacgtggcagg

SEQ ID NO: 5626560 - DNA, 25 bp, Homo sapien
caggctgccctgtcctccaagagga

SEQ ID NO: 5626561 - DNA, 25 bp, Homo sapien
acctattccatgggaggttggcctg

SEQ ID NO: 5626562 - DNA, 25 bp, Homo sapien
tccacttggacgcacaggcctttgg

SEQ ID NO: 5626563 - DNA, 25 bp, Homo sapien
cccggagtcctggcttgcctaccta

SEQ ID NO: 5626564 - DNA, 25 bp, Homo sapien
cagctctagtaaagacatctgtctc

SEQ ID NO: 5626565 - DNA, 25 bp, Homo sapien
tgagctaatgatccggatttgaacc

SEQ ID NO: 5626566 - DNA, 25 bp, Homo sapien
tgtgtaaaaggttgtccagtaatat

SEQ ID NO: 5626567 - DNA, 25 bp, Homo sapien
ttatcaagggttactgggttctgag

SEQ ID NO: 5626568 - DNA, 25 bp, Homo sapien
ttcgattttagaaagaggaatgtgt

SEQ ID NO: 5626569 - DNA, 25 bp, Homo sapien
gagacaccccgaatataaccaccac

SEQ ID NO: 5626570 - DNA, 25 bp, Homo sapien
cataggtcattaagacaggccaatt

SEQ ID NO: 5626571 - DNA, 25 bp, Homo sapien
accagagaactgtaattgtccaatt

SEQ ID NO: 5626572 - DNA, 25 bp, Homo sapien
tagtccaacgctctgcacaaagcac

SEQ ID NO: 5626573 - DNA, 25 bp, Homo sapien
gggaattgctgcgctaacagggtta

SEQ ID NO: 5626574 - DNA, 25 bp, Homo sapien
ccacatcaagagcagtacatagtcc

SEQ ID NO: 5626575 - DNA, 25 bp, Homo sapien
cacaaagcacacactcgggaattgc

SEQ ID NO: 5626576 - DNA, 25 bp, Homo sapien
cttacatgaaactcaaagctccctg

SEQ ID NO: 5626577 - DNA, 25 bp, Homo sapien
actctggcacatataaatcattctt

SEQ ID NO: 5626578 - DNA, 25 bp, Homo sapien
tcatccctactataccgtaagattc

SEQ ID NO: 5626579 - DNA, 25 bp, Homo sapien
accgtaagattcttgagggtaggag

SEQ ID NO: 5626580 - DNA, 25 bp, Homo sapien
tagctcttcaagacagtaaaaactc

SEQ ID NO: 5626581 - DNA, 25 bp, Homo sapien
gtctacactaaggagaagaattggg

SEQ ID NO: 5626582 - DNA, 25 bp, Homo sapien
aaaactctgtcatgtactctggcac

SEQ ID NO: 5626583 - DNA, 25 bp, Homo sapien
tctgaactctgtagctcttcaagac

SEQ ID NO: 5626584 - DNA, 25 bp, Homo sapien
atagtcaggctttattgcttatatc

SEQ ID NO: 5626585 - DNA, 25 bp, Homo sapien
accaatttatgagtatgtcaagttc

SEQ ID NO: 5626586 - DNA, 25 bp, Homo sapien
gggtaggagccatatagtcaggctt

SEQ ID NO: 5626587 - DNA, 25 bp, Homo sapien
acactgcagtaaactgagcctcagt

SEQ ID NO: 5626588 - DNA, 25 bp, Homo sapien
ttctatctgggtactgggacttaag

SEQ ID NO: 5626589 - DNA, 25 bp, Homo sapien
tttatagtcaagacagtccataatc

SEQ ID NO: 5626590 - DNA, 25 bp, Homo sapien
aagggtggtgattgccaaaattacc

SEQ ID NO: 5626591 - DNA, 25 bp, Homo sapien
cctatacataagggtggtgattgcc

SEQ ID NO: 5626592 - DNA, 25 bp, Homo sapien
agcctcagtgagcccttaagatatt

SEQ ID NO: 5626593 - DNA, 25 bp, Homo sapien
tagcttgtcacgtaacttgtcattc

SEQ ID NO: 5626594 - DNA, 25 bp, Homo sapien
tttggggcacgaacagatttgtgta

SEQ ID NO: 5626595 - DNA, 25 bp, Homo sapien
tagccggcattaatttccagcaagt

SEQ ID NO: 5626596 - DNA, 25 bp, Homo sapien
ggtggccatcagcttaatcccagtc

SEQ ID NO: 5626597 - DNA, 25 bp, Homo sapien
acaggaacgttatgagaatacaatc

SEQ ID NO: 5626598 - DNA, 25 bp, Homo sapien
tcaccacccccgccgtcagccccgc

SEQ ID NO: 5626599 - DNA, 25 bp, Homo sapien
gcggggctgacggcgggggtggtga

SEQ ID NO: 5626600 - DNA, 25 bp, Homo sapien
gcagaacacaagtccctctcgaaat

SEQ ID NO: 5626601 - DNA, 25 bp, Homo sapien
cccctggtgctattcagaccccttc

SEQ ID NO: 5626602 - DNA, 25 bp, Homo sapien
gtgaagacacgcccagctcacctga

SEQ ID NO: 5626603 - DNA, 25 bp, Homo sapien
cacctgatattctgtgactggttgc

SEQ ID NO: 5626604 - DNA, 25 bp, Homo sapien
tagtagctcttttagggctgtagcc

SEQ ID NO: 5626605 - DNA, 25 bp, Homo sapien
ctgccgcctcccctggtgctattca

SEQ ID NO: 5626606 - DNA, 25 bp, Homo sapien
ccttcaccccagaaccctgagggag

SEQ ID NO: 5626607 - DNA, 25 bp, Homo sapien
attcagaccccttcaccccagaacc

SEQ ID NO: 5626608 - DNA, 25 bp, Homo sapien
ttctagtgattctgagcagggtgga

SEQ ID NO: 5626609 - DNA, 25 bp, Homo sapien
ggctgtagccacagaacggtcattc

SEQ ID NO: 5626610 - DNA, 25 bp, Homo sapien
gtgactggttgcagaacacaagtcc

SEQ ID NO: 5626611 - DNA, 25 bp, Homo sapien
tagcctgaaggtaatcttatatgaa

SEQ ID NO: 5626612 - DNA, 25 bp, Homo sapien
gaacctgtaatagacatcatgtgga

SEQ ID NO: 5626613 - DNA, 25 bp, Homo sapien
tgcttgggacccgaagtgttttcga

SEQ ID NO: 5626614 - DNA, 25 bp, Homo sapien
tttgcaagcacataatgagctattc

SEQ ID NO: 5626615 - DNA, 25 bp, Homo sapien
tgaggaggaatagaactataggttt

SEQ ID NO: 5626616 - DNA, 25 bp, Homo sapien
tccctatccgggaatgcttgggacc

SEQ ID NO: 5626617 - DNA, 25 bp, Homo sapien
tcaataaaaacatagttggattgcc

SEQ ID NO: 5626618 - DNA, 25 bp, Homo sapien
tctgatcagggatactgaacctgta

SEQ ID NO: 5626619 - DNA, 25 bp, Homo sapien
gagtgcagtggagttataatagtcc

SEQ ID NO: 5626620 - DNA, 25 bp, Homo sapien
ttcacatatgggggcattttggatt

SEQ ID NO: 5626621 - DNA, 25 bp, Homo sapien
tattcttggggataggaccgaatta

SEQ ID NO: 5626622 - DNA, 25 bp, Homo sapien
aatatcaaattccaaacccaacatc

SEQ ID NO: 5626623 - DNA, 25 bp, Homo sapien
tgtggcttcagggaatcacccttgt

SEQ ID NO: 5626624 - DNA, 25 bp, Homo sapien
gaatcacccttgtatactgtggtac

SEQ ID NO: 5626625 - DNA, 25 bp, Homo sapien
atactgtggtacatgataactgatc

SEQ ID NO: 5626626 - DNA, 25 bp, Homo sapien
acccatagtcttaaccaaccatgac

SEQ ID NO: 5626627 - DNA, 25 bp, Homo sapien
acccaacatcagttttccaaccctc

SEQ ID NO: 5626628 - DNA, 25 bp, Homo sapien
ccaaccatgactattgtacttctcc

SEQ ID NO: 5626629 - DNA, 25 bp, Homo sapien
cctcagtcaaccatataataattca

SEQ ID NO: 5626630 - DNA, 25 bp, Homo sapien
gctgtagcactaatgaagataatac

SEQ ID NO: 5626631 - DNA, 25 bp, Homo sapien
atttatgtagggttttcttctccac

SEQ ID NO: 5626632 - DNA, 25 bp, Homo sapien
aaatacaggtttgtggcttcaggga

SEQ ID NO: 5626633 - DNA, 25 bp, Homo sapien
tggaaatcttttagacaagttgacc

SEQ ID NO: 5626634 - DNA, 25 bp, Homo sapien
gttgccagaaaagtgaatgttgtac

SEQ ID NO: 5626635 - DNA, 25 bp, Homo sapien
tagaaatggacaaatgttgccagaa

SEQ ID NO: 5626636 - DNA, 25 bp, Homo sapien
aaacagaaaattatactatgcctcc

SEQ ID NO: 5626637 - DNA, 25 bp, Homo sapien
tctaggttgttgcatgtgtacacat

SEQ ID NO: 5626638 - DNA, 25 bp, Homo sapien
tgagaatctaggatcattagtttgt

SEQ ID NO: 5626639 - DNA, 25 bp, Homo sapien
ctggagccctccaactctaggttgt

SEQ ID NO: 5626640 - DNA, 25 bp, Homo sapien
cagttgacccattccgtattgtgtt

SEQ ID NO: 5626641 - DNA, 25 bp, Homo sapien
aagttgaccagtaaaaaggcaattc

SEQ ID NO: 5626642 - DNA, 25 bp, Homo sapien
tggtagggtaatttgtccactagaa

SEQ ID NO: 5626643 - DNA, 25 bp, Homo sapien
agcctctggacggtcaaatcttcat

SEQ ID NO: 5626644 - DNA, 25 bp, Homo sapien
tcctggaagcgctcaccctttgttc

SEQ ID NO: 5626645 - DNA, 25 bp, Homo sapien
agagagactcccaacacctgtgcat

SEQ ID NO: 5626646 - DNA, 25 bp, Homo sapien
tcaccaacatccacctgcagaactc

SEQ ID NO: 5626647 - DNA, 25 bp, Homo sapien
ctcagcactgagcccaccacgctct

SEQ ID NO: 5626648 - DNA, 25 bp, Homo sapien
acctgtgcatgtgactgattcctca

SEQ ID NO: 5626649 - DNA, 25 bp, Homo sapien
ctgctcagctccgttcagtgggtcc

SEQ ID NO: 5626650 - DNA, 25 bp, Homo sapien
atggttgttggcagtaagaacattc

SEQ ID NO: 5626651 - DNA, 25 bp, Homo sapien
ctcctcagtctcggtccccgcccat

SEQ ID NO: 5626652 - DNA, 25 bp, Homo sapien
cagacggaagctctttgcccactca

SEQ ID NO: 5626653 - DNA, 25 bp, Homo sapien
tcttacagactggatggttttgcat

SEQ ID NO: 5626654 - DNA, 25 bp, Homo sapien
ggccgcttgctagcccctggccacc

SEQ ID NO: 5626655 - DNA, 25 bp, Homo sapien
cttctaagttcaagaggcaagagca

SEQ ID NO: 5626656 - DNA, 25 bp, Homo sapien
aaggcttccagtaggccacagcaag

SEQ ID NO: 5626657 - DNA, 25 bp, Homo sapien
ctgtggggctcatttatccaggatt

SEQ ID NO: 5626658 - DNA, 25 bp, Homo sapien
aaatggaatgctatagggatttagc

SEQ ID NO: 5626659 - DNA, 25 bp, Homo sapien
agctcagagaacagattgttaggat

SEQ ID NO: 5626660 - DNA, 25 bp, Homo sapien
tatgggcaagccttctaagttcaag

SEQ ID NO: 5626661 - DNA, 25 bp, Homo sapien
gattgttaggatatatgggcaagcc

SEQ ID NO: 5626662 - DNA, 25 bp, Homo sapien
gggattggcctaacagctcagagaa

SEQ ID NO: 5626663 - DNA, 25 bp, Homo sapien
tgtgagccatagattcagtgactac

SEQ ID NO: 5626664 - DNA, 25 bp, Homo sapien
caatatctcttgccagggattggcc

SEQ ID NO: 5626665 - DNA, 25 bp, Homo sapien
ccagctatagagttaggaaggcttc

SEQ ID NO: 5626666 - DNA, 25 bp, Homo sapien
ctgaggtccgcaaatacgcatctga

SEQ ID NO: 5626667 - DNA, 25 bp, Homo sapien
aagctctctgctctctcgccccatc

SEQ ID NO: 5626668 - DNA, 25 bp, Homo sapien
tgcaaagacaaacagtagaatcaaa

SEQ ID NO: 5626669 - DNA, 25 bp, Homo sapien
tgtggtcatcatgcaaaggagagaa

SEQ ID NO: 5626670 - DNA, 25 bp, Homo sapien
caaaggagagaatctgaatggatta

SEQ ID NO: 5626671 - DNA, 25 bp, Homo sapien
taggcctcctacttagctgctgtcc

SEQ ID NO: 5626672 - DNA, 25 bp, Homo sapien
actctgtaagtttaatgtggtcatc

SEQ ID NO: 5626673 - DNA, 25 bp, Homo sapien
tctcttgggttggagtcactgtttc

SEQ ID NO: 5626674 - DNA, 25 bp, Homo sapien
gccccaggtgatgtttaggcctcct

SEQ ID NO: 5626675 - DNA, 25 bp, Homo sapien
tgccttcatttggaggaggtgtttc

SEQ ID NO: 5626676 - DNA, 25 bp, Homo sapien
gctgctgtcctgtggatttgttcac

SEQ ID NO: 5626677 - DNA, 25 bp, Homo sapien
ttatgaggtgtaattcaataagcac

SEQ ID NO: 5626678 - DNA, 25 bp, Homo sapien
gcactccatagctcctgtgatgaac

SEQ ID NO: 5626679 - DNA, 25 bp, Homo sapien
aggcatcactctctcaccagtcact

SEQ ID NO: 5626680 - DNA, 25 bp, Homo sapien
tctctataaaactatgcactccata

SEQ ID NO: 5626681 - DNA, 25 bp, Homo sapien
tgttctatgtatcttgcctgcgggg

SEQ ID NO: 5626682 - DNA, 25 bp, Homo sapien
aattctgcctgttatgaggtgtaat

SEQ ID NO: 5626683 - DNA, 25 bp, Homo sapien
gcctgcggggagatactctctataa

SEQ ID NO: 5626684 - DNA, 25 bp, Homo sapien
taagcaccttttgctgagcagctct

SEQ ID NO: 5626685 - DNA, 25 bp, Homo sapien
gtgatgaacagcattcaaattctgc

SEQ ID NO: 5626686 - DNA, 25 bp, Homo sapien
atatgctgtaattctgcacctgttc

SEQ ID NO: 5626687 - DNA, 25 bp, Homo sapien
gaggcgaaatgagtatatgctgtaa

SEQ ID NO: 5626688 - DNA, 25 bp, Homo sapien
cagaccctcccagcgcccgttgttt

SEQ ID NO: 5626689 - DNA, 25 bp, Homo sapien
aatatgtagatacacagacctggaa

SEQ ID NO: 5626690 - DNA, 25 bp, Homo sapien
acctggagaattgcagtggttaagt

SEQ ID NO: 5626691 - DNA, 25 bp, Homo sapien
ggaaggctgctcattcacagaccct

SEQ ID NO: 5626692 - DNA, 25 bp, Homo sapien
agaaaataagcctgaatgaaaccat

SEQ ID NO: 5626693 - DNA, 25 bp, Homo sapien
atgaaataaacactcagaaacctgg

SEQ ID NO: 5626694 - DNA, 25 bp, Homo sapien
gatctacaataaaaacctaactgcc

SEQ ID NO: 5626695 - DNA, 25 bp, Homo sapien
tgaaaccatggcattaaaccgtatc

SEQ ID NO: 5626696 - DNA, 25 bp, Homo sapien
cagtggttaagtctgtgagtgggaa

SEQ ID NO: 5626697 - DNA, 25 bp, Homo sapien
aatagagtaggcttcccaaaaacca

SEQ ID NO: 5626698 - DNA, 25 bp, Homo sapien
catagcctattccgtgagcaggatg

SEQ ID NO: 5626699 - DNA, 25 bp, Homo sapien
atccctctaaaacaaacgccagctc

SEQ ID NO: 5626700 - DNA, 25 bp, Homo sapien
cgagcctaagctgatttgcaaaccc

SEQ ID NO: 5626701 - DNA, 25 bp, Homo sapien
attattataagagagacagtggagt

SEQ ID NO: 5626702 - DNA, 25 bp, Homo sapien
agataacttactgaattggcccctc

SEQ ID NO: 5626703 - DNA, 25 bp, Homo sapien
caaacgccagctcaacacccaattt

SEQ ID NO: 5626704 - DNA, 25 bp, Homo sapien
taactatagcaaccaggctgggatc

SEQ ID NO: 5626705 - DNA, 25 bp, Homo sapien
ctcagaagctatgacgagcctaagc

SEQ ID NO: 5626706 - DNA, 25 bp, Homo sapien
ctgggatcctacaggctgaaaacac

SEQ ID NO: 5626707 - DNA, 25 bp, Homo sapien
aagactgctgacaaacaacaaccct

SEQ ID NO: 5626708 - DNA, 25 bp, Homo sapien
agtggagtgtactgtgaataacatt

SEQ ID NO: 5626709 - DNA, 25 bp, Homo sapien
gaaagagaacttacaactcgtgttc

SEQ ID NO: 5626710 - DNA, 25 bp, Homo sapien
tgcaacctccatctcccgggtttaa

SEQ ID NO: 5626711 - DNA, 25 bp, Homo sapien
aaaacatacaggaagttcacccacc

SEQ ID NO: 5626712 - DNA, 25 bp, Homo sapien
aacatacaggaagttcacccacctt

SEQ ID NO: 5626713 - DNA, 25 bp, Homo sapien
tcccaagtagctgcagaattaatcg

SEQ ID NO: 5626714 - DNA, 25 bp, Homo sapien
taaacccaatcaacagatccattgc

SEQ ID NO: 5626715 - DNA, 25 bp, Homo sapien
gtaacttaaacccaatcaacagatc

SEQ ID NO: 5626716 - DNA, 25 bp, Homo sapien
tataaaacatacaggaagttcaccc

SEQ ID NO: 5626717 - DNA, 25 bp, Homo sapien
tatataaaacatacaggaagttcac

SEQ ID NO: 5626718 - DNA, 25 bp, Homo sapien
catctcccgggtttaagtgattctc

SEQ ID NO: 5626719 - DNA, 25 bp, Homo sapien
cctcccaagtagctgcagaattaat

SEQ ID NO: 5626720 - DNA, 25 bp, Homo sapien
caggaagttcacccaccttccctgc

SEQ ID NO: 5626721 - DNA, 25 bp, Homo sapien
tagcgtatcatcagaactcagcaca

SEQ ID NO: 5626722 - DNA, 25 bp, Homo sapien
cactttcgtgtgtatcaggcagata

SEQ ID NO: 5626723 - DNA, 25 bp, Homo sapien
gattaccaagcttgaaactggaaat

SEQ ID NO: 5626724 - DNA, 25 bp, Homo sapien
atcctaatagtatagtgcagtttgc

SEQ ID NO: 5626725 - DNA, 25 bp, Homo sapien
ttctggagaaaaatagagactgttt

SEQ ID NO: 5626726 - DNA, 25 bp, Homo sapien
tcaggcagatactaaacattttccc

SEQ ID NO: 5626727 - DNA, 25 bp, Homo sapien
cccttgagtcagcttaaaatttttc

SEQ ID NO: 5626728 - DNA, 25 bp, Homo sapien
tcacgcagttgttttctggagaaaa

SEQ ID NO: 5626729 - DNA, 25 bp, Homo sapien
agcacagtctgccttataagaaaac

SEQ ID NO: 5626730 - DNA, 25 bp, Homo sapien
gaaactggaaatgtcatatgcactt

SEQ ID NO: 5626731 - DNA, 25 bp, Homo sapien
ccacaaaatggagctatactgttag

SEQ ID NO: 5626732 - DNA, 25 bp, Homo sapien
attatgttattgatagcagatatat

SEQ ID NO: 5626733 - DNA, 25 bp, Homo sapien
gcagatatattagtcgggagtggtg

SEQ ID NO: 5626734 - DNA, 25 bp, Homo sapien
agccaagattgcgccactgtactcc

SEQ ID NO: 5626735 - DNA, 25 bp, Homo sapien
gccactgtactccagcctgggaaac

SEQ ID NO: 5626736 - DNA, 25 bp, Homo sapien
atagcagatatattagtcgggagtg

SEQ ID NO: 5626737 - DNA, 25 bp, Homo sapien
taagcacaaagggaaacaattatgt

SEQ ID NO: 5626738 - DNA, 25 bp, Homo sapien
gcacaaagggaaacaattatgttat

SEQ ID NO: 5626739 - DNA, 25 bp, Homo sapien
gtactccagcctgggaaacagagac

SEQ ID NO: 5626740 - DNA, 25 bp, Homo sapien
gattgcgccactgtactccagcctg

SEQ ID NO: 5626741 - DNA, 25 bp, Homo sapien
agcctgggaaacagagactatttct

SEQ ID NO: 5626742 - DNA, 25 bp, Homo sapien
ttgatagcagatatattagtcggga

SEQ ID NO: 5626743 - DNA, 25 bp, Homo sapien
atttagcaattaagtttggaaaagc

SEQ ID NO: 5626744 - DNA, 25 bp, Homo sapien
ggtcaggagttcaagtgatctgcct

SEQ ID NO: 5626745 - DNA, 25 bp, Homo sapien
ggtgcggtggctcacacctaatccc

SEQ ID NO: 5626746 - DNA, 25 bp, Homo sapien
attaaagaaaatatcggccaggtgc

SEQ ID NO: 5626747 - DNA, 25 bp, Homo sapien
tttgtaagacataattcaggagaac

SEQ ID NO: 5626748 - DNA, 25 bp, Homo sapien
agtttggaaaagctataaaagagac

SEQ ID NO: 5626749 - DNA, 25 bp, Homo sapien
taattcaggagaacctcaaagaaaa

SEQ ID NO: 5626750 - DNA, 25 bp, Homo sapien
aattgtgctagatagaatgtattcc

SEQ ID NO: 5626751 - DNA, 25 bp, Homo sapien
aatgtgtattattcaagaagcatat

SEQ ID NO: 5626752 - DNA, 25 bp, Homo sapien
ttaagagaaaacatattataagtcc

SEQ ID NO: 5626753 - DNA, 25 bp, Homo sapien
gattacaggtgcctggccagaaaac

SEQ ID NO: 5626754 - DNA, 25 bp, Homo sapien
gattgatagctattgtcattacaac

SEQ ID NO: 5626755 - DNA, 25 bp, Homo sapien
cactgcttgggattcactgaacttc

SEQ ID NO: 5626756 - DNA, 25 bp, Homo sapien
agtacacagtactcaatgattgata

SEQ ID NO: 5626757 - DNA, 25 bp, Homo sapien
caatttctataaagtcccatggatg

SEQ ID NO: 5626758 - DNA, 25 bp, Homo sapien
cccatggatgctttaaaagaataga

SEQ ID NO: 5626759 - DNA, 25 bp, Homo sapien
tggcatatgctttatagtccagtgc

SEQ ID NO: 5626760 - DNA, 25 bp, Homo sapien
actgcattctatatgtgtcctcatc

SEQ ID NO: 5626761 - DNA, 25 bp, Homo sapien
tataaaatgcttagtacacagtact

SEQ ID NO: 5626762 - DNA, 25 bp, Homo sapien
gtgccaaaagaaatatactacatat

SEQ ID NO: 5626763 - DNA, 25 bp, Homo sapien
atgtaagtacttgttgataaaatat

SEQ ID NO: 5626764 - DNA, 25 bp, Homo sapien
tatgcagataaattcagagataagc

SEQ ID NO: 5626765 - DNA, 25 bp, Homo sapien
tcctggggatcagcttcaccctcct

SEQ ID NO: 5626766 - DNA, 25 bp, Homo sapien
gtctctgaggctaggtacctttggt

SEQ ID NO: 5626767 - DNA, 25 bp, Homo sapien
agaactgcaggtctgcgagtgtctc

SEQ ID NO: 5626768 - DNA, 25 bp, Homo sapien
ctggagattaagacgttgcttggga

SEQ ID NO: 5626769 - DNA, 25 bp, Homo sapien
gcagaaacagctaaagggttcctct

SEQ ID NO: 5626770 - DNA, 25 bp, Homo sapien
tccattcctggggatcagcttcacc

SEQ ID NO: 5626771 - DNA, 25 bp, Homo sapien
gctctcctggagattaagacgttgc

SEQ ID NO: 5626772 - DNA, 25 bp, Homo sapien
cgagtgtctccatttggggtgactg

SEQ ID NO: 5626773 - DNA, 25 bp, Homo sapien
gtctgagaactgcaggtctgcgagt

SEQ ID NO: 5626774 - DNA, 25 bp, Homo sapien
tcctgaaactgacctcagctgcaga

SEQ ID NO: 5626775 - DNA, 25 bp, Homo sapien
ttagactcaagatctccccctctcc

SEQ ID NO: 5626776 - DNA, 25 bp, Homo sapien
gattataagatcaaaactaggaagc

SEQ ID NO: 5626777 - DNA, 25 bp, Homo sapien
cagagtaagcacttgaatatttatc

SEQ ID NO: 5626778 - DNA, 25 bp, Homo sapien
catgcaacaccacacgcagctttct

SEQ ID NO: 5626779 - DNA, 25 bp, Homo sapien
agctgagataacatgaaaaagcatt

SEQ ID NO: 5626780 - DNA, 25 bp, Homo sapien
taagtctaacattcagagtaagcac

SEQ ID NO: 5626781 - DNA, 25 bp, Homo sapien
acccaagctggattagaattcctgg

SEQ ID NO: 5626782 - DNA, 25 bp, Homo sapien
aagatcaaaactaggaagctgagat

SEQ ID NO: 5626783 - DNA, 25 bp, Homo sapien
acagaaggagcaaagatatgttttt

SEQ ID NO: 5626784 - DNA, 25 bp, Homo sapien
aactaggaagctgagataacatgaa

SEQ ID NO: 5626785 - DNA, 25 bp, Homo sapien
tgaatgtcttatgactgtccactcc

SEQ ID NO: 5626786 - DNA, 25 bp, Homo sapien
cttttagtggccataacagaaggag

SEQ ID NO: 5626787 - DNA, 25 bp, Homo sapien
actctttaggaactgtaggatgcac

SEQ ID NO: 5626788 - DNA, 25 bp, Homo sapien
aatagttatttagtggtagcatgtt

SEQ ID NO: 5626789 - DNA, 25 bp, Homo sapien
gaggaagtgccagtccctggcctgt

SEQ ID NO: 5626790 - DNA, 25 bp, Homo sapien
actgggggtggttctccattccaga

SEQ ID NO: 5626791 - DNA, 25 bp, Homo sapien
gatggctgaaggaacaaagtttttc

SEQ ID NO: 5626792 - DNA, 25 bp, Homo sapien
ttagtggtagcatgttgcaaatatc

SEQ ID NO: 5626793 - DNA, 25 bp, Homo sapien
atgatgcacccactgagaagctagt

SEQ ID NO: 5626794 - DNA, 25 bp, Homo sapien
cactatgatgcacccactgagaagc

SEQ ID NO: 5626795 - DNA, 25 bp, Homo sapien
tccattccagatgcatttgagtcca

SEQ ID NO: 5626796 - DNA, 25 bp, Homo sapien
cccaatataggacaaagtaatagtt

SEQ ID NO: 5626797 - DNA, 25 bp, Homo sapien
aaatctgaaattaacttgcactatg

SEQ ID NO: 5626798 - DNA, 25 bp, Homo sapien
aagttccacaatcaggcttttggcc

SEQ ID NO: 5626799 - DNA, 25 bp, Homo sapien
tttggccttgtagcaggaaatcctg

SEQ ID NO: 5626800 - DNA, 25 bp, Homo sapien
atatgtagtaaaatggtggtagcag

SEQ ID NO: 5626801 - DNA, 25 bp, Homo sapien
ttgtaacatgacccattaaatggat

SEQ ID NO: 5626802 - DNA, 25 bp, Homo sapien
cccaccccagggtcaaacattctga

SEQ ID NO: 5626803 - DNA, 25 bp, Homo sapien
ggaaatcctgatgcacaagttctac

SEQ ID NO: 5626804 - DNA, 25 bp, Homo sapien
ttttacattgcaacacagtatacac

SEQ ID NO: 5626805 - DNA, 25 bp, Homo sapien
atggatttcatgacccaccccaggg

SEQ ID NO: 5626806 - DNA, 25 bp, Homo sapien
cataattgaaatagaagtttactcc

SEQ ID NO: 5626807 - DNA, 25 bp, Homo sapien
aacatcacatatagcagtatcattc

SEQ ID NO: 5626808 - DNA, 25 bp, Homo sapien
tactaaggtggtatgtgttaacatc

SEQ ID NO: 5626809 - DNA, 25 bp, Homo sapien
gataagaaatggcccttcagccccc

SEQ ID NO: 5626810 - DNA, 25 bp, Homo sapien
ccctatttgcccgccccctcaagaa

SEQ ID NO: 5626811 - DNA, 25 bp, Homo sapien
ctggaaagcccaggcacatttgaga

SEQ ID NO: 5626812 - DNA, 25 bp, Homo sapien
aacctcacgcaccaaaccaaccgac

SEQ ID NO: 5626813 - DNA, 25 bp, Homo sapien
taagaaatggcccttcagccccctc

SEQ ID NO: 5626814 - DNA, 25 bp, Homo sapien
agccctggaaagcccaggcacattt

SEQ ID NO: 5626815 - DNA, 25 bp, Homo sapien
ctcaagaagaacctcacgcaccaaa

SEQ ID NO: 5626816 - DNA, 25 bp, Homo sapien
agggagagaatcatctttccttccc

SEQ ID NO: 5626817 - DNA, 25 bp, Homo sapien
tatttgcccgccccctcaagaagaa

SEQ ID NO: 5626818 - DNA, 25 bp, Homo sapien
gaccctgataagaaatggcccttca

SEQ ID NO: 5626819 - DNA, 25 bp, Homo sapien
tcccccaaaatgggctctgccgcag

SEQ ID NO: 5626820 - DNA, 25 bp, Homo sapien
tgcctcagggtcccaagctattttt

SEQ ID NO: 5626821 - DNA, 25 bp, Homo sapien
ctgcctccgtttcccaaagttacag

SEQ ID NO: 5626822 - DNA, 25 bp, Homo sapien
cccggcccagtattagctattttta

SEQ ID NO: 5626823 - DNA, 25 bp, Homo sapien
tcgaacttctagtctcaaggagtcc

SEQ ID NO: 5626824 - DNA, 25 bp, Homo sapien
cacgctggagagacatctattatga

SEQ ID NO: 5626825 - DNA, 25 bp, Homo sapien
gagtcctcctgcctccgtttcccaa

SEQ ID NO: 5626826 - DNA, 25 bp, Homo sapien
cagggtcccaagctatttttatgat

SEQ ID NO: 5626827 - DNA, 25 bp, Homo sapien
acaataaagtcaatttggtacggtc

SEQ ID NO: 5626828 - DNA, 25 bp, Homo sapien
actgaccattaattcatggcggccc

SEQ ID NO: 5626829 - DNA, 25 bp, Homo sapien
aagtcaatttggtacggtctgcttc

SEQ ID NO: 5626830 - DNA, 25 bp, Homo sapien
aatttggtacggtctgcttcagtgt

SEQ ID NO: 5626831 - DNA, 25 bp, Homo sapien
acccaggccatgcagatactggtgc

SEQ ID NO: 5626832 - DNA, 25 bp, Homo sapien
gacaatacttctgctcgaggtggcc

SEQ ID NO: 5626833 - DNA, 25 bp, Homo sapien
agcgttcaggctccatggacaatac

SEQ ID NO: 5626834 - DNA, 25 bp, Homo sapien
gaacacctcacctctggcccccagc

SEQ ID NO: 5626835 - DNA, 25 bp, Homo sapien
caccctggcatctctgcccgggagc

SEQ ID NO: 5626836 - DNA, 25 bp, Homo sapien
cagatatctcagggtatgatcggcc

SEQ ID NO: 5626837 - DNA, 25 bp, Homo sapien
cacacaactaaatctggggagaagc

SEQ ID NO: 5626838 - DNA, 25 bp, Homo sapien
aggggttaaacttcggctgaagcac

SEQ ID NO: 5626839 - DNA, 25 bp, Homo sapien
ccataacaagagagactcggcttac

SEQ ID NO: 5626840 - DNA, 25 bp, Homo sapien
gcttatctaaggcggacgctgacca

SEQ ID NO: 5626841 - DNA, 25 bp, Homo sapien
gaagcaacccgatgccagcatgatg

SEQ ID NO: 5626842 - DNA, 25 bp, Homo sapien
ctagagggttcttgtataacttcac

SEQ ID NO: 5626843 - DNA, 25 bp, Homo sapien
aatttgggctggttattgctattat

SEQ ID NO: 5626844 - DNA, 25 bp, Homo sapien
gagaaaatcaagatacttaacgcat

SEQ ID NO: 5626845 - DNA, 25 bp, Homo sapien
accaccaaagaagcagatgctacct

SEQ ID NO: 5626846 - DNA, 25 bp, Homo sapien
aatagctgggctacagactttaaac

SEQ ID NO: 5626847 - DNA, 25 bp, Homo sapien
tccccacacaccaaatgacatcaac

SEQ ID NO: 5626848 - DNA, 25 bp, Homo sapien
aacactctcaagctccaagaccacc

SEQ ID NO: 5626849 - DNA, 25 bp, Homo sapien
gagtgtttgtatgagaaaaatcgtc

SEQ ID NO: 5626850 - DNA, 25 bp, Homo sapien
gatgctacctctggccaacagcctc

SEQ ID NO: 5626851 - DNA, 25 bp, Homo sapien
aagagtaatgacaaaaccactttct

SEQ ID NO: 5626852 - DNA, 25 bp, Homo sapien
ccaagacagtcaagcattttacagt

SEQ ID NO: 5626853 - DNA, 25 bp, Homo sapien
ttagcaacaaatatgaaactcctcc

SEQ ID NO: 5626854 - DNA, 25 bp, Homo sapien
ctagaaaaaacttccaggatggaga

SEQ ID NO: 5626855 - DNA, 25 bp, Homo sapien
ctgtgctccagcctaagtttttctc

SEQ ID NO: 5626856 - DNA, 25 bp, Homo sapien
gtagatctcatcaagggtcctcatt

SEQ ID NO: 5626857 - DNA, 25 bp, Homo sapien
ttccatggataagaaacaaggactt

SEQ ID NO: 5626858 - DNA, 25 bp, Homo sapien
caaggacttagacgtttccactttc

SEQ ID NO: 5626859 - DNA, 25 bp, Homo sapien
tatgaaactcctcctgttgagattc

SEQ ID NO: 5626860 - DNA, 25 bp, Homo sapien
tttccactggtatcagtttcctgtc

SEQ ID NO: 5626861 - DNA, 25 bp, Homo sapien
ccaggatggagaaaaagttattggt

SEQ ID NO: 5626862 - DNA, 25 bp, Homo sapien
tgttgagattcaatggataaacatt

SEQ ID NO: 5626863 - DNA, 25 bp, Homo sapien
tatttgtagatctcatcaagggtcc

SEQ ID NO: 5626864 - DNA, 25 bp, Homo sapien
ctccactctgacagaggagagaggc

SEQ ID NO: 5626865 - DNA, 25 bp, Homo sapien
cccaagcgtttgtccatcatgtggc

SEQ ID NO: 5626866 - DNA, 25 bp, Homo sapien
tgtctctgaagagaaggatgaagta

SEQ ID NO: 5626867 - DNA, 25 bp, Homo sapien
gacctgcctgtctatcctcttaccc

SEQ ID NO: 5626868 - DNA, 25 bp, Homo sapien
gggagctcgggactccactctgaca

SEQ ID NO: 5626869 - DNA, 25 bp, Homo sapien
ggggttttgtccgcagctcgtcctg

SEQ ID NO: 5626870 - DNA, 25 bp, Homo sapien
cttccttaacctggtgtctgagggg

SEQ ID NO: 5626871 - DNA, 25 bp, Homo sapien
ccgcagctcgtcctgctacatgacc

SEQ ID NO: 5626872 - DNA, 25 bp, Homo sapien
catcatgtggcatttctgggagctc

SEQ ID NO: 5626873 - DNA, 25 bp, Homo sapien
tgctacatgacctgcctgtctatcc

SEQ ID NO: 5626874 - DNA, 25 bp, Homo sapien
gcaacctgccttgattcctgcagct

SEQ ID NO: 5626875 - DNA, 25 bp, Homo sapien
cagctataacaaagcacaccagaaa

SEQ ID NO: 5626876 - DNA, 25 bp, Homo sapien
ttctacagctaaaacctcaacactc

SEQ ID NO: 5626877 - DNA, 25 bp, Homo sapien
gttcaccagctataacaaagcacac

SEQ ID NO: 5626878 - DNA, 25 bp, Homo sapien
ctctcctttaaaccccagcgaacac

SEQ ID NO: 5626879 - DNA, 25 bp, Homo sapien
ttactgcatgtatgaatgtactcca

SEQ ID NO: 5626880 - DNA, 25 bp, Homo sapien
aaaaaatcaatagcagttctacagc

SEQ ID NO: 5626881 - DNA, 25 bp, Homo sapien
cataaatacccttgggtccagaaag

SEQ ID NO: 5626882 - DNA, 25 bp, Homo sapien
cccagcgaacacattctagggggga

SEQ ID NO: 5626883 - DNA, 25 bp, Homo sapien
ggggtcttattttgcagtgctgtca

SEQ ID NO: 5626884 - DNA, 25 bp, Homo sapien
tgctgtcaaactgtcactgttcacc

SEQ ID NO: 5626885 - DNA, 25 bp, Homo sapien
atgcatttgttgggataaaatttta

SEQ ID NO: 5626886 - DNA, 25 bp, Homo sapien
tggctatagaatttcagggtttagt

SEQ ID NO: 5626887 - DNA, 25 bp, Homo sapien
tagcagatattgagggctgattatt

SEQ ID NO: 5626888 - DNA, 25 bp, Homo sapien
ggcacgtgtcaccaatgcatggcta

SEQ ID NO: 5626889 - DNA, 25 bp, Homo sapien
ctagggaaaaaatttacgcttagca

SEQ ID NO: 5626890 - DNA, 25 bp, Homo sapien
tatcacagaagcatttggctataga

SEQ ID NO: 5626891 - DNA, 25 bp, Homo sapien
acccaaaagccgagagtaatggaaa

SEQ ID NO: 5626892 - DNA, 25 bp, Homo sapien
aggcagatctggctcctgtccaatc

SEQ ID NO: 5626893 - DNA, 25 bp, Homo sapien
tgccgcctgcaagttgtgtggcatc

SEQ ID NO: 5626894 - DNA, 25 bp, Homo sapien
tgtgtggcatcacccaaaagccgag

SEQ ID NO: 5626895 - DNA, 25 bp, Homo sapien
ggtgcatatcagtaaatctacgggc

SEQ ID NO: 5626896 - DNA, 25 bp, Homo sapien
aaatctacgggcatatgccgcctgc

SEQ ID NO: 5626897 - DNA, 25 bp, Homo sapien
cttacatcagctggaaacttatgca

SEQ ID NO: 5626898 - DNA, 25 bp, Homo sapien
ctcacttagcatttgggaggttctg

SEQ ID NO: 5626899 - DNA, 25 bp, Homo sapien
actgaaacctctactggctggtatg

SEQ ID NO: 5626900 - DNA, 25 bp, Homo sapien
attctgtccatgctgggctccccag

SEQ ID NO: 5626901 - DNA, 25 bp, Homo sapien
attaaggggacactgcctaatgata

SEQ ID NO: 5626902 - DNA, 25 bp, Homo sapien
aggcaggtaccgtcccctttcacag

SEQ ID NO: 5626903 - DNA, 25 bp, Homo sapien
agatgaatgctctcaaactgaaacc

SEQ ID NO: 5626904 - DNA, 25 bp, Homo sapien
ggggcaggagctttactgaatagta

SEQ ID NO: 5626905 - DNA, 25 bp, Homo sapien
tagatttagattggggtttctgtat

SEQ ID NO: 5626906 - DNA, 25 bp, Homo sapien
ttcacctgaaaaggcaggtaccgtc

SEQ ID NO: 5626907 - DNA, 25 bp, Homo sapien
taatgggatatgctcaaagggtaaa

SEQ ID NO: 5626908 - DNA, 25 bp, Homo sapien
ttataatctttagaggaacaaatgc

SEQ ID NO: 5626909 - DNA, 25 bp, Homo sapien
cagaaatactacaatagagtgtgag

SEQ ID NO: 5626910 - DNA, 25 bp, Homo sapien
cgagacaaatgtcggctctattttc

SEQ ID NO: 5626911 - DNA, 25 bp, Homo sapien
ctacaatagagtgtgagatccaaga

SEQ ID NO: 5626912 - DNA, 25 bp, Homo sapien
tttcatccacgagacaaatgtcggc

SEQ ID NO: 5626913 - DNA, 25 bp, Homo sapien
ttgggaaagcagacaaattacatct

SEQ ID NO: 5626914 - DNA, 25 bp, Homo sapien
gtgcggtggtacatgtccgtattcc

SEQ ID NO: 5626915 - DNA, 25 bp, Homo sapien
ccaagaaatcattaatgtaaggtga

SEQ ID NO: 5626916 - DNA, 25 bp, Homo sapien
tttcctcagaaactgcctaggcagt

SEQ ID NO: 5626917 - DNA, 25 bp, Homo sapien
atgataaaatatttgcaggtgaaat

SEQ ID NO: 5626918 - DNA, 25 bp, Homo sapien
gaaatgatgaatggatatacaagtt

SEQ ID NO: 5626919 - DNA, 25 bp, Homo sapien
ggacctgaaggcagtataaaacaaa

SEQ ID NO: 5626920 - DNA, 25 bp, Homo sapien
aaacatattacaaagctacagaatt

SEQ ID NO: 5626921 - DNA, 25 bp, Homo sapien
aaaaggaacaatgttggaagcatta

SEQ ID NO: 5626922 - DNA, 25 bp, Homo sapien
cctaacataggtatacaaaactcaa

SEQ ID NO: 5626923 - DNA, 25 bp, Homo sapien
tcaagagacaataaagtacctaaca

SEQ ID NO: 5626924 - DNA, 25 bp, Homo sapien
aacaagacagaacattagtaagaga

SEQ ID NO: 5626925 - DNA, 25 bp, Homo sapien
cataaaaacagcaacccctaaagta

SEQ ID NO: 5626926 - DNA, 25 bp, Homo sapien
aaagttgaaatattgggaagatgtc

SEQ ID NO: 5626927 - DNA, 25 bp, Homo sapien
caaataagtcaaaagagtcttaaaa

SEQ ID NO: 5626928 - DNA, 25 bp, Homo sapien
caacccctaaagtatatggaatctc

SEQ ID NO: 5626929 - DNA, 25 bp, Homo sapien
gggaagatgtctatactgctcaatg

SEQ ID NO: 5626930 - DNA, 25 bp, Homo sapien
tagtgtgagagtgctccagtgtttt

SEQ ID NO: 5626931 - DNA, 25 bp, Homo sapien
ggaaaaaatgctacgattaactgac

SEQ ID NO: 5626932 - DNA, 25 bp, Homo sapien
ctcacaaaacaccagcatcagacaa

SEQ ID NO: 5626933 - DNA, 25 bp, Homo sapien
ggctgacctggtgctcacaggtagc

SEQ ID NO: 5626934 - DNA, 25 bp, Homo sapien
aaatgcgctaaccaacactaagtac

SEQ ID NO: 5626935 - DNA, 25 bp, Homo sapien
agctcctgtaatctgggaactggcc

SEQ ID NO: 5626936 - DNA, 25 bp, Homo sapien
gagagaggaaagtagctcctgtaat

SEQ ID NO: 5626937 - DNA, 25 bp, Homo sapien
tatctgtgatgacttagcaggtgag

SEQ ID NO: 5626938 - DNA, 25 bp, Homo sapien
gtagccaatgagttctcttggacac

SEQ ID NO: 5626939 - DNA, 25 bp, Homo sapien
gcatcagacaaggtcactcagtgac

SEQ ID NO: 5626940 - DNA, 25 bp, Homo sapien
ctgggaactggcctgacacagccag

SEQ ID NO: 5626941 - DNA, 25 bp, Homo sapien
gtagagagacaggctgtcacaactc

SEQ ID NO: 5626942 - DNA, 25 bp, Homo sapien
caccagcatctaattgggctgttgc

SEQ ID NO: 5626943 - DNA, 25 bp, Homo sapien
gcagagcaggcttaatggcttctct

SEQ ID NO: 5626944 - DNA, 25 bp, Homo sapien
gagctcagcagagcaggcttaatgg

SEQ ID NO: 5626945 - DNA, 25 bp, Homo sapien
atgtacattgggaatggcactaagc

SEQ ID NO: 5626946 - DNA, 25 bp, Homo sapien
agttagtgtctcaggtgaatggcaa

SEQ ID NO: 5626947 - DNA, 25 bp, Homo sapien
acatgtgggaactacaggatctatt

SEQ ID NO: 5626948 - DNA, 25 bp, Homo sapien
tattaagataccacaacagagacat

SEQ ID NO: 5626949 - DNA, 25 bp, Homo sapien
ggcactaagcattaccacctgggta

SEQ ID NO: 5626950 - DNA, 25 bp, Homo sapien
taataacatgtgatctcatggagct

SEQ ID NO: 5626951 - DNA, 25 bp, Homo sapien
aacagttaccaaaacatgtgggaac

SEQ ID NO: 5626952 - DNA, 25 bp, Homo sapien
ttctctgcaggagagtttgaaaact

SEQ ID NO: 5626953 - DNA, 25 bp, Homo sapien
caaatgtcgatcacaaaagaatctg

SEQ ID NO: 5626954 - DNA, 25 bp, Homo sapien
aaagaatctggaattagaagcgtat

SEQ ID NO: 5626955 - DNA, 25 bp, Homo sapien
caatacactgacatgcaatgaaaac

SEQ ID NO: 5626956 - DNA, 25 bp, Homo sapien
agcaaatttccagactttccccctc

SEQ ID NO: 5626957 - DNA, 25 bp, Homo sapien
attgagaaatgtactgacaacttac

SEQ ID NO: 5626958 - DNA, 25 bp, Homo sapien
aagatcctggttactttaagagtac

SEQ ID NO: 5626959 - DNA, 25 bp, Homo sapien
tatatgtggcagcataaaaatgtga

SEQ ID NO: 5626960 - DNA, 25 bp, Homo sapien
ttctggttgctatatatgtggcagc

SEQ ID NO: 5626961 - DNA, 25 bp, Homo sapien
agaagcgtatgttaaactcatgtcc

SEQ ID NO: 5626962 - DNA, 25 bp, Homo sapien
tctgtcaatgattagaaaaatcctc

SEQ ID NO: 5626963 - DNA, 25 bp, Homo sapien
aagcaccaagaacgaaacgaaaatg

SEQ ID NO: 5626964 - DNA, 25 bp, Homo sapien
aaatgcacgtgtgatcatgactggc

SEQ ID NO: 5626965 - DNA, 25 bp, Homo sapien
aaaagtcaagaaaatgcacgtgtga

SEQ ID NO: 5626966 - DNA, 25 bp, Homo sapien
accaagaacgaaacgaaaatgagca

SEQ ID NO: 5626967 - DNA, 25 bp, Homo sapien
tgactggccaatcatcaactgatac

SEQ ID NO: 5626968 - DNA, 25 bp, Homo sapien
agaaagtaaaaccactgcaagcacc

SEQ ID NO: 5626969 - DNA, 25 bp, Homo sapien
agcaaaaaagattgtggcagcacaa

SEQ ID NO: 5626970 - DNA, 25 bp, Homo sapien
atcaactgatacaacatccaagaaa

SEQ ID NO: 5626971 - DNA, 25 bp, Homo sapien
aagattgtggcagcacaaaagtcaa

SEQ ID NO: 5626972 - DNA, 25 bp, Homo sapien
gaaacgaaaatgagcacagcaaaaa

SEQ ID NO: 5626973 - DNA, 25 bp, Homo sapien
aaatgagcacagcaaaaaagattgt

SEQ ID NO: 5626974 - DNA, 25 bp, Homo sapien
agaccagacctaggaaagtgtcaat

SEQ ID NO: 5626975 - DNA, 25 bp, Homo sapien
aggaaagtgtcaattgaaaaaggcc

SEQ ID NO: 5626976 - DNA, 25 bp, Homo sapien
gcacaggtaaatgatcccatgtttg

SEQ ID NO: 5626977 - DNA, 25 bp, Homo sapien
aagtaaatcaaccacgcatagatat

SEQ ID NO: 5626978 - DNA, 25 bp, Homo sapien
attttcaagtgcaagtaaatcaacc

SEQ ID NO: 5626979 - DNA, 25 bp, Homo sapien
tctatgtgacatctagagaagcata

SEQ ID NO: 5626980 - DNA, 25 bp, Homo sapien
cccatgtttgataattcaggaattc

SEQ ID NO: 5626981 - DNA, 25 bp, Homo sapien
agtgtcaattgaaaaaggcccccaa

SEQ ID NO: 5626982 - DNA, 25 bp, Homo sapien
aatggtttgcacaggtaaatgatcc

SEQ ID NO: 5626983 - DNA, 25 bp, Homo sapien
aaaataatggtttgcacaggtaaat

SEQ ID NO: 5626984 - DNA, 25 bp, Homo sapien
agagaagcataaaaaaacgctgaac

SEQ ID NO: 5626985 - DNA, 25 bp, Homo sapien
agtgattcaagggaacaagaaaaag

SEQ ID NO: 5626986 - DNA, 25 bp, Homo sapien
cacctggctgcttgaatttagattt

SEQ ID NO: 5626987 - DNA, 25 bp, Homo sapien
agaagcaacatgacaatggtgagag

SEQ ID NO: 5626988 - DNA, 25 bp, Homo sapien
tagaccgggttatgagactggttaa

SEQ ID NO: 5626989 - DNA, 25 bp, Homo sapien
tggctatcagttcagaaaattagaa

SEQ ID NO: 5626990 - DNA, 25 bp, Homo sapien
ggtagctgggtatccacctggctat

SEQ ID NO: 5626991 - DNA, 25 bp, Homo sapien
agctgcaatcccattcagatgggtc

SEQ ID NO: 5626992 - DNA, 25 bp, Homo sapien
tgtgctgctgaagacatgtagttgg

SEQ ID NO: 5626993 - DNA, 25 bp, Homo sapien
gaaaatgagaagtgattcaagggaa

SEQ ID NO: 5626994 - DNA, 25 bp, Homo sapien
taatctatagaccgggttatgagac

SEQ ID NO: 5626995 - DNA, 25 bp, Homo sapien
tattacaaaccagaagcaacatgac

SEQ ID NO: 5626996 - DNA, 25 bp, Homo sapien
ttttcgcatcgagtctaaaggaggg

SEQ ID NO: 5626997 - DNA, 25 bp, Homo sapien
ccctcctttagactcgatgcgaaaa

SEQ ID NO: 5626998 - DNA, 25 bp, Homo sapien
gattctaactctaaacttcagcctt

SEQ ID NO: 5626999 - DNA, 25 bp, Homo sapien
tggcaagacagacttgaggattctt

SEQ ID NO: 5627000 - DNA, 25 bp, Homo sapien
gtgacaatgcctgctacacgggagg

SEQ ID NO: 5627001 - DNA, 25 bp, Homo sapien
aaaaatacgtattaaatgggtggca

SEQ ID NO: 5627002 - DNA, 25 bp, Homo sapien
ggcaggcgcctgtgacaatgcctgc

SEQ ID NO: 5627003 - DNA, 25 bp, Homo sapien
tgttggaattcagaacctctcaata

SEQ ID NO: 5627004 - DNA, 25 bp, Homo sapien
agacagacttgaggattcttgattc

SEQ ID NO: 5627005 - DNA, 25 bp, Homo sapien
tcactgatttacatggcatcttctg

SEQ ID NO: 5627006 - DNA, 25 bp, Homo sapien
cctctcaataggccaaaatgtcctg

SEQ ID NO: 5627007 - DNA, 25 bp, Homo sapien
ttaccctaggtaatggatcattgta

SEQ ID NO: 5627008 - DNA, 25 bp, Homo sapien
tacgtattaaatgggtggcaagaca

SEQ ID NO: 5627009 - DNA, 25 bp, Homo sapien
gagcttacaagtgagcgtaattcac

SEQ ID NO: 5627010 - DNA, 25 bp, Homo sapien
gtgaattacgctcacttgtaagctc

SEQ ID NO: 5627011 - DNA, 25 bp, Homo sapien
gctcaacaaaagacatcaggaacaa

SEQ ID NO: 5627012 - DNA, 25 bp, Homo sapien
gcctctgtgaactgcctgttatgtc

SEQ ID NO: 5627013 - DNA, 25 bp, Homo sapien
ttgaataaaataccgataatctgat

SEQ ID NO: 5627014 - DNA, 25 bp, Homo sapien
agtgctgaggttacatagagttctt

SEQ ID NO: 5627015 - DNA, 25 bp, Homo sapien
cttaagtctataggccactggtgtt

SEQ ID NO: 5627016 - DNA, 25 bp, Homo sapien
acttggcattgtcaggcctttaaat

SEQ ID NO: 5627017 - DNA, 25 bp, Homo sapien
gtcatccactgggcaaagatatttg

SEQ ID NO: 5627018 - DNA, 25 bp, Homo sapien
cagaaaggattcatatgcagaattt

SEQ ID NO: 5627019 - DNA, 25 bp, Homo sapien
tgatttgtagggaaggatctcctta

SEQ ID NO: 5627020 - DNA, 25 bp, Homo sapien
atatgccagcattctaagtactaaa

SEQ ID NO: 5627021 - DNA, 25 bp, Homo sapien
caaagttaaaaggtaagtcatccac

SEQ ID NO: 5627022 - DNA, 25 bp, Homo sapien
gtcgtccatacaacttaaaagatca

SEQ ID NO: 5627023 - DNA, 25 bp, Homo sapien
tgatcttttaagttgtatggacgac

SEQ ID NO: 5627024 - DNA, 25 bp, Homo sapien
actaaggggtgaaccatgattcaaa

SEQ ID NO: 5627025 - DNA, 25 bp, Homo sapien
ttgggcacttaacaatgtgcctggc

SEQ ID NO: 5627026 - DNA, 25 bp, Homo sapien
tctcacagaatcttcagaccaaacc

SEQ ID NO: 5627027 - DNA, 25 bp, Homo sapien
agtaaccctgtatacagtcagctgt

SEQ ID NO: 5627028 - DNA, 25 bp, Homo sapien
agtggtaataccaggactcaaactc

SEQ ID NO: 5627029 - DNA, 25 bp, Homo sapien
tgcctggcaaagtgctaaccacttg

SEQ ID NO: 5627030 - DNA, 25 bp, Homo sapien
tacactgccccacaataaccccaac

SEQ ID NO: 5627031 - DNA, 25 bp, Homo sapien
aggggtgagctatcacatttggccc

SEQ ID NO: 5627032 - DNA, 25 bp, Homo sapien
cacaataaccccaacagtaaccctg

SEQ ID NO: 5627033 - DNA, 25 bp, Homo sapien
caaagctctggcattacaggggtga

SEQ ID NO: 5627034 - DNA, 25 bp, Homo sapien
actaagtcagtgagatcttcatcac

SEQ ID NO: 5627035 - DNA, 25 bp, Homo sapien
tctcttggctgaaaatgggatgaat

SEQ ID NO: 5627036 - DNA, 25 bp, Homo sapien
tgagatctgagcagccagtccctta

SEQ ID NO: 5627037 - DNA, 25 bp, Homo sapien
caggtttcaagcatgagaggccctg

SEQ ID NO: 5627038 - DNA, 25 bp, Homo sapien
gctgctagacagattaccggacaaa

SEQ ID NO: 5627039 - DNA, 25 bp, Homo sapien
aggtgagatcaagatgctttggcca

SEQ ID NO: 5627040 - DNA, 25 bp, Homo sapien
aatagaagatggtcacaggtttcaa

SEQ ID NO: 5627041 - DNA, 25 bp, Homo sapien
cagggcaagtttgacgtgactatta

SEQ ID NO: 5627042 - DNA, 25 bp, Homo sapien
ggagaaatcaagcaggtgtctgaat

SEQ ID NO: 5627043 - DNA, 25 bp, Homo sapien
gtcccttagggagacacccaagcga

SEQ ID NO: 5627044 - DNA, 25 bp, Homo sapien
gcagctgttccggctttgggagaat

SEQ ID NO: 5627045 - DNA, 25 bp, Homo sapien
gccctgcaagatggggccacaaata

SEQ ID NO: 5627046 - DNA, 25 bp, Homo sapien
tgaagaatgcaccactaccagtcgg

SEQ ID NO: 5627047 - DNA, 25 bp, Homo sapien
cacatttacgctcgcctgccgcggg

SEQ ID NO: 5627048 - DNA, 25 bp, Homo sapien
tcctagaacggaatgtgctgtgagg

SEQ ID NO: 5627049 - DNA, 25 bp, Homo sapien
ccgggtgaagaatgcaccactacca

SEQ ID NO: 5627050 - DNA, 25 bp, Homo sapien
ggtcccagcctttagatgccgctac

SEQ ID NO: 5627051 - DNA, 25 bp, Homo sapien
atgcaccactaccagtcgggacgca

SEQ ID NO: 5627052 - DNA, 25 bp, Homo sapien
tagcacacatttacgctcgcctgcc

SEQ ID NO: 5627053 - DNA, 25 bp, Homo sapien
agtcgggacgcactcgtgcacttag

SEQ ID NO: 5627054 - DNA, 25 bp, Homo sapien
agaatgcaccactaccagtcgggac

SEQ ID NO: 5627055 - DNA, 25 bp, Homo sapien
gtgcacttagcacacatttacgctc

SEQ ID NO: 5627056 - DNA, 25 bp, Homo sapien
gggttcctagaacggaatgtgctgt

SEQ ID NO: 5627057 - DNA, 25 bp, Homo sapien
tatagaggcttattagagttcagag

SEQ ID NO: 5627058 - DNA, 25 bp, Homo sapien
aacaaaattgcaaaggccttgtgat

SEQ ID NO: 5627059 - DNA, 25 bp, Homo sapien
tttgcaggatgtataggaatgtaaa

SEQ ID NO: 5627060 - DNA, 25 bp, Homo sapien
ttggtttctttgactgcaagccagt

SEQ ID NO: 5627061 - DNA, 25 bp, Homo sapien
ttcagagcctgtcaagaatggtaac

SEQ ID NO: 5627062 - DNA, 25 bp, Homo sapien
aaaggccttgtgatataaagaagtc

SEQ ID NO: 5627063 - DNA, 25 bp, Homo sapien
actcactcaaggttgattgggccag

SEQ ID NO: 5627064 - DNA, 25 bp, Homo sapien
gttgattgggccagaaaacacacaa

SEQ ID NO: 5627065 - DNA, 25 bp, Homo sapien
tggtaacagagtcagcttaaatagc

SEQ ID NO: 5627066 - DNA, 25 bp, Homo sapien
ctattgaggatgatactaggctctt

SEQ ID NO: 5627067 - DNA, 25 bp, Homo sapien
aacaaaagtgctccctaattagaat

SEQ ID NO: 5627068 - DNA, 25 bp, Homo sapien
ccagtgcctctgaggataagctccc

SEQ ID NO: 5627069 - DNA, 25 bp, Homo sapien
cacaagtcattgctgcgtctcactc

SEQ ID NO: 5627070 - DNA, 25 bp, Homo sapien
ggtggcatcttagaatgaaggcaca

SEQ ID NO: 5627071 - DNA, 25 bp, Homo sapien
ccctcaactaatggtgaaaacgatg

SEQ ID NO: 5627072 - DNA, 25 bp, Homo sapien
gctccatgcgtgtcaggtgcactga

SEQ ID NO: 5627073 - DNA, 25 bp, Homo sapien
atgaaggcacagatcgattccctca

SEQ ID NO: 5627074 - DNA, 25 bp, Homo sapien
gaagccagtttgtttggggtctggc

SEQ ID NO: 5627075 - DNA, 25 bp, Homo sapien
ctgccccgaatgcggtggcatctta

SEQ ID NO: 5627076 - DNA, 25 bp, Homo sapien
ataagctcccacatgggagtggact

SEQ ID NO: 5627077 - DNA, 25 bp, Homo sapien
gcacagaaaccatcttacagcagca

SEQ ID NO: 5627078 - DNA, 25 bp, Homo sapien
cactcccttcccaggcatccatgcc

SEQ ID NO: 5627079 - DNA, 25 bp, Homo sapien
atatgggcttctcagttcagaaaac

SEQ ID NO: 5627080 - DNA, 25 bp, Homo sapien
ttcatagctcgaaccgtcctttctt

SEQ ID NO: 5627081 - DNA, 25 bp, Homo sapien
tcaacatttcatagctcgaaccgtc

SEQ ID NO: 5627082 - DNA, 25 bp, Homo sapien
ggctccagaatcacgtgtaggtgtc

SEQ ID NO: 5627083 - DNA, 25 bp, Homo sapien
agatcaggttcaaaacacccaaggc

SEQ ID NO: 5627084 - DNA, 25 bp, Homo sapien
tgtgcattgatatgggcttctcagt

SEQ ID NO: 5627085 - DNA, 25 bp, Homo sapien
catgaaagatacagcatttgaatac

SEQ ID NO: 5627086 - DNA, 25 bp, Homo sapien
ttatgatgagaaaggctccagaatc

SEQ ID NO: 5627087 - DNA, 25 bp, Homo sapien
cacgtgtaggtgtcctcaacatttc

SEQ ID NO: 5627088 - DNA, 25 bp, Homo sapien
aaacaaggcactataactattttat

SEQ ID NO: 5627089 - DNA, 25 bp, Homo sapien
atatggttttatgcagatcaggttc

SEQ ID NO: 5627090 - DNA, 25 bp, Homo sapien
cccccgcgccgcgaggcccttctcg

SEQ ID NO: 5627091 - DNA, 25 bp, Homo sapien
cgagaagggcctcgcggcgcggggg

SEQ ID NO: 5627092 - DNA, 25 bp, Homo sapien
acccccgcgccgcgaggcccttctc

SEQ ID NO: 5627093 - DNA, 25 bp, Homo sapien
gagaagggcctcgcggcgcgggggt

SEQ ID NO: 5627094 - DNA, 25 bp, Homo sapien
gaacaggaaccaaggctttctgacg

SEQ ID NO: 5627095 - DNA, 25 bp, Homo sapien
gaactttgcactgctggagaaaaac

SEQ ID NO: 5627096 - DNA, 25 bp, Homo sapien
ccctgcatggctaactggaaactca

SEQ ID NO: 5627097 - DNA, 25 bp, Homo sapien
acgaagaagaaaccttggactctgg

SEQ ID NO: 5627098 - DNA, 25 bp, Homo sapien
cggtaggactgcttgagcataggaa

SEQ ID NO: 5627099 - DNA, 25 bp, Homo sapien
agcaataagctgtgtgcagtggtgc

SEQ ID NO: 5627100 - DNA, 25 bp, Homo sapien
tgataacagcataagacctgggaac

SEQ ID NO: 5627101 - DNA, 25 bp, Homo sapien
gactctgggatgaccgccacaaata

SEQ ID NO: 5627102 - DNA, 25 bp, Homo sapien
gcagtggtgcactcctagtccccca

SEQ ID NO: 5627103 - DNA, 25 bp, Homo sapien
aagcagtgtaacccagaaaagggaa

SEQ ID NO: 5627104 - DNA, 25 bp, Homo sapien
gaggaaagccaccacagtgaatact

SEQ ID NO: 5627105 - DNA, 25 bp, Homo sapien
atattcagtgaaaagatttgcttat

SEQ ID NO: 5627106 - DNA, 25 bp, Homo sapien
aaagctgttagcagactgaatattc

SEQ ID NO: 5627107 - DNA, 25 bp, Homo sapien
tttttaagtctgagacaaaggagga

SEQ ID NO: 5627108 - DNA, 25 bp, Homo sapien
ctgaatattcagtgaaaagatttgc

SEQ ID NO: 5627109 - DNA, 25 bp, Homo sapien
gatacaaaagctgttagcagactga

SEQ ID NO: 5627110 - DNA, 25 bp, Homo sapien
tttctagattgttaagacaagccag

SEQ ID NO: 5627111 - DNA, 25 bp, Homo sapien
gctcctggaaattccctcataaata

SEQ ID NO: 5627112 - DNA, 25 bp, Homo sapien
ttggtttgaactgctagctaaaatt

SEQ ID NO: 5627113 - DNA, 25 bp, Homo sapien
tttaagtctgagacaaaggaggaat

SEQ ID NO: 5627114 - DNA, 25 bp, Homo sapien
aggaggaatgatacaaaagctgtta

SEQ ID NO: 5627115 - DNA, 25 bp, Homo sapien
tataaatttggtttgaactgctagc

SEQ ID NO: 5627116 - DNA, 25 bp, Homo sapien
gggatttcacccacttggtatggcc

SEQ ID NO: 5627117 - DNA, 25 bp, Homo sapien
aattattcagaaaagggatacatac

SEQ ID NO: 5627118 - DNA, 25 bp, Homo sapien
aattgagttaatacatgtgaagcac

SEQ ID NO: 5627119 - DNA, 25 bp, Homo sapien
gtccttagaatccaaccgcacccac

SEQ ID NO: 5627120 - DNA, 25 bp, Homo sapien
agctgagccctgatggatatttaaa

SEQ ID NO: 5627121 - DNA, 25 bp, Homo sapien
acttcccacataagaggcaggggtg

SEQ ID NO: 5627122 - DNA, 25 bp, Homo sapien
ccacacactggggttgatcactcca

SEQ ID NO: 5627123 - DNA, 25 bp, Homo sapien
tcactccatggacagaagcagctga

SEQ ID NO: 5627124 - DNA, 25 bp, Homo sapien
gtatgcacagcacacagggcttata

SEQ ID NO: 5627125 - DNA, 25 bp, Homo sapien
ggtgattgattccaaagacagtaaa

SEQ ID NO: 5627126 - DNA, 25 bp, Homo sapien
gaaaagggatacatacaaacgatat

SEQ ID NO: 5627127 - DNA, 25 bp, Homo sapien
tgacttatgagatgacagtgaggag

SEQ ID NO: 5627128 - DNA, 25 bp, Homo sapien
catgtgcttcatggagcccctcatc

SEQ ID NO: 5627129 - DNA, 25 bp, Homo sapien
ctaaagtgaactacaaagagtaaac

SEQ ID NO: 5627130 - DNA, 25 bp, Homo sapien
accactggctttcagttggtgctta

SEQ ID NO: 5627131 - DNA, 25 bp, Homo sapien
gaaggtcaatgagctgtttttagac

SEQ ID NO: 5627132 - DNA, 25 bp, Homo sapien
agagtaaactaaactaggagttcta

SEQ ID NO: 5627133 - DNA, 25 bp, Homo sapien
ggagcccctcatccagaatgtggtg

SEQ ID NO: 5627134 - DNA, 25 bp, Homo sapien
cagttgactacatagagatagaaac

SEQ ID NO: 5627135 - DNA, 25 bp, Homo sapien
atagagatagaaacttactagtgtt

SEQ ID NO: 5627136 - DNA, 25 bp, Homo sapien
gaatgtggtggacagtaccactggc

SEQ ID NO: 5627137 - DNA, 25 bp, Homo sapien
aaaatagttaagctctgggaaatat

SEQ ID NO: 5627138 - DNA, 25 bp, Homo sapien
caaatcaattacaacaatgtgctta

SEQ ID NO: 5627139 - DNA, 25 bp, Homo sapien
tatagcttctcttccaataaaggag

SEQ ID NO: 5627140 - DNA, 25 bp, Homo sapien
aaaggggatgtatgttaaaacaatg

SEQ ID NO: 5627141 - DNA, 25 bp, Homo sapien
aaggacaccaagacaatagggctta

SEQ ID NO: 5627142 - DNA, 25 bp, Homo sapien
caatgtgcttatcagctcccctccc

SEQ ID NO: 5627143 - DNA, 25 bp, Homo sapien
agacaattcaaacatacaaatcaat

SEQ ID NO: 5627144 - DNA, 25 bp, Homo sapien
aatagttgttgaaaagaatttgtcc

SEQ ID NO: 5627145 - DNA, 25 bp, Homo sapien
acagttttgaaggacaccaagacaa

SEQ ID NO: 5627146 - DNA, 25 bp, Homo sapien
ccaagacaatagggcttagctaaac

SEQ ID NO: 5627147 - DNA, 25 bp, Homo sapien
gggcttagctaaacaatacggcaat

SEQ ID NO: 5627148 - DNA, 25 bp, Homo sapien
taaaacaatgatacagaaagctggg

SEQ ID NO: 5627149 - DNA, 25 bp, Homo sapien
gaggccagaaacctgagatcaaatt

SEQ ID NO: 5627150 - DNA, 25 bp, Homo sapien
gaaggggacacagtccagcctataa

SEQ ID NO: 5627151 - DNA, 25 bp, Homo sapien
gttggtttctttgaagggctctctc

SEQ ID NO: 5627152 - DNA, 25 bp, Homo sapien
ctctgtgttcatatggtcttccctc

SEQ ID NO: 5627153 - DNA, 25 bp, Homo sapien
gatcaaattgtctgcagggttggtt

SEQ ID NO: 5627154 - DNA, 25 bp, Homo sapien
aggaccacctgcaccaggactgaac

SEQ ID NO: 5627155 - DNA, 25 bp, Homo sapien
atcactcacagcagatgaatcccat

SEQ ID NO: 5627156 - DNA, 25 bp, Homo sapien
attctgaggtactaggcgtccatat

SEQ ID NO: 5627157 - DNA, 25 bp, Homo sapien
ttctttgaagggctctctctgtggc

SEQ ID NO: 5627158 - DNA, 25 bp, Homo sapien
tttcaaagtgttgtccaggaccacc

SEQ ID NO: 5627159 - DNA, 25 bp, Homo sapien
gaatcccatatgcttgctggcttgt

SEQ ID NO: 5627160 - DNA, 25 bp, Homo sapien
aacacagtggaagcactgccaacgg

SEQ ID NO: 5627161 - DNA, 25 bp, Homo sapien
aggaaagacctatgcaaaaaacagt

SEQ ID NO: 5627162 - DNA, 25 bp, Homo sapien
tgagcagctcctatatgccagccca

SEQ ID NO: 5627163 - DNA, 25 bp, Homo sapien
ggaggagagtatcactaataggtac

SEQ ID NO: 5627164 - DNA, 25 bp, Homo sapien
tccagactaagaggtcaccaaaggg

SEQ ID NO: 5627165 - DNA, 25 bp, Homo sapien
gagtgctcagctattaggaaagacc

SEQ ID NO: 5627166 - DNA, 25 bp, Homo sapien
gagcttccagactaagaggtcacca

SEQ ID NO: 5627167 - DNA, 25 bp, Homo sapien
gagcccctacactccaagagtgctc

SEQ ID NO: 5627168 - DNA, 25 bp, Homo sapien
agaggcataaggttgagcccctaca

SEQ ID NO: 5627169 - DNA, 25 bp, Homo sapien
ttacatgcagaaaacacagtggaag

SEQ ID NO: 5627170 - DNA, 25 bp, Homo sapien
agtagggcacttctgggaaataaaa

SEQ ID NO: 5627171 - DNA, 25 bp, Homo sapien
taagagacaactgacttctacaact

SEQ ID NO: 5627172 - DNA, 25 bp, Homo sapien
ttgtaattcttctctcctgtgctct

SEQ ID NO: 5627173 - DNA, 25 bp, Homo sapien
ggctggttaagtgtgtttgggtcag

SEQ ID NO: 5627174 - DNA, 25 bp, Homo sapien
ggtgcctactaagtcagagagttgt

SEQ ID NO: 5627175 - DNA, 25 bp, Homo sapien
aagtgtgtttgggtcagtttatttc

SEQ ID NO: 5627176 - DNA, 25 bp, Homo sapien
gtttaagagacaactgacttctaca

SEQ ID NO: 5627177 - DNA, 25 bp, Homo sapien
aatggtgcctactaagtcagagagt

SEQ ID NO: 5627178 - DNA, 25 bp, Homo sapien
actaagtcagagagttgtaattctt

SEQ ID NO: 5627179 - DNA, 25 bp, Homo sapien
aaaacaggctggttaagtgtgtttg

SEQ ID NO: 5627180 - DNA, 25 bp, Homo sapien
cagtagcatctactgtgctaaagaa

SEQ ID NO: 5627181 - DNA, 25 bp, Homo sapien
tattaagcagtctaatggtgcctac

SEQ ID NO: 5627182 - DNA, 25 bp, Homo sapien
cctgggagctgctcttctccgtatc

SEQ ID NO: 5627183 - DNA, 25 bp, Homo sapien
gagaagctggtcagtttcctgccgt

SEQ ID NO: 5627184 - DNA, 25 bp, Homo sapien
gggcagtgcgatttcacggttttta

SEQ ID NO: 5627185 - DNA, 25 bp, Homo sapien
agaggctggcctggtttttgtagct

SEQ ID NO: 5627186 - DNA, 25 bp, Homo sapien
gttggtgaagaggatgttcctgcaa

SEQ ID NO: 5627187 - DNA, 25 bp, Homo sapien
aaagcacatttgcaccagcagcgcc

SEQ ID NO: 5627188 - DNA, 25 bp, Homo sapien
gagctattctgatagtggggcagtg

SEQ ID NO: 5627189 - DNA, 25 bp, Homo sapien
tcctggatgtgtaagcaagagtgga

SEQ ID NO: 5627190 - DNA, 25 bp, Homo sapien
gccatagggtagatgcgtatttaac

SEQ ID NO: 5627191 - DNA, 25 bp, Homo sapien
gtgggtgcaacaaagcacatttgca

SEQ ID NO: 5627192 - DNA, 25 bp, Homo sapien
tgtgcatgtaaggactcatttctcc

SEQ ID NO: 5627193 - DNA, 25 bp, Homo sapien
ccaaactctcataccacccacgtcc

SEQ ID NO: 5627194 - DNA, 25 bp, Homo sapien
gaccaaaacaggagctgtgtcttct

SEQ ID NO: 5627195 - DNA, 25 bp, Homo sapien
ttccctaccagctgccggcctaagt

SEQ ID NO: 5627196 - DNA, 25 bp, Homo sapien
acccaggaaatgacagaaatgatta

SEQ ID NO: 5627197 - DNA, 25 bp, Homo sapien
gatgttccctaccagctgccggcct

SEQ ID NO: 5627198 - DNA, 25 bp, Homo sapien
agctgccggcctaagtccaaactct

SEQ ID NO: 5627199 - DNA, 25 bp, Homo sapien
aagccaagcacacaattcctctgag

SEQ ID NO: 5627200 - DNA, 25 bp, Homo sapien
ctagtttaaggatgctaccagagac

SEQ ID NO: 5627201 - DNA, 25 bp, Homo sapien
gtttaaggatgctaccagagacacc

SEQ ID NO: 5627202 - DNA, 25 bp, Homo sapien
tcataccacccacgtcctgccccag

SEQ ID NO: 5627203 - DNA, 25 bp, Homo sapien
gagtgcaaggatagatgttccctac

SEQ ID NO: 5627204 - DNA, 25 bp, Homo sapien
ggtggtcaataaacgcgagtttgct

SEQ ID NO: 5627205 - DNA, 25 bp, Homo sapien
ctggcaggggtagcctttactcttc

SEQ ID NO: 5627206 - DNA, 25 bp, Homo sapien
ggccatgtcgccgcgctatctcgca

SEQ ID NO: 5627207 - DNA, 25 bp, Homo sapien
agggtgggctcaatccaaactcact

SEQ ID NO: 5627208 - DNA, 25 bp, Homo sapien
ggccagaggacaatttaaaagcgct

SEQ ID NO: 5627209 - DNA, 25 bp, Homo sapien
gcgctatctcgcaaaagtcgcggcg

SEQ ID NO: 5627210 - DNA, 25 bp, Homo sapien
agccagcccaagactggaaacctgg

SEQ ID NO: 5627211 - DNA, 25 bp, Homo sapien
ctcggcgccactttcagggttaatc

SEQ ID NO: 5627212 - DNA, 25 bp, Homo sapien
gatgtgtatttggctgcacccccgg

SEQ ID NO: 5627213 - DNA, 25 bp, Homo sapien
aagcgcttcaaagcctaggcccttc

SEQ ID NO: 5627214 - DNA, 25 bp, Homo sapien
agaacaaatgcggaggtatttagca

SEQ ID NO: 5627215 - DNA, 25 bp, Homo sapien
ttgaagaaaaggtcacaacagaaat

SEQ ID NO: 5627216 - DNA, 25 bp, Homo sapien
attagaaaaagcaactcactgtgta

SEQ ID NO: 5627217 - DNA, 25 bp, Homo sapien
gcagggggttataaataagctccta

SEQ ID NO: 5627218 - DNA, 25 bp, Homo sapien
ggaaagtaagccaggtatgtttgct

SEQ ID NO: 5627219 - DNA, 25 bp, Homo sapien
actgcctgctcctcgcagggggtta

SEQ ID NO: 5627220 - DNA, 25 bp, Homo sapien
ctgtacgagtccatggatttcaccc

SEQ ID NO: 5627221 - DNA, 25 bp, Homo sapien
gataccacagtgcaagcagaataac

SEQ ID NO: 5627222 - DNA, 25 bp, Homo sapien
tcatctgaccacacgaagcacagtg

SEQ ID NO: 5627223 - DNA, 25 bp, Homo sapien
aagctcctagaatgccacgggtttc

SEQ ID NO: 5627224 - DNA, 25 bp, Homo sapien
aaaaatgagctaacagagatcccat

SEQ ID NO: 5627225 - DNA, 25 bp, Homo sapien
cagagatcccattgatggcccactc

SEQ ID NO: 5627226 - DNA, 25 bp, Homo sapien
ccagacgcctatcgtctttggtctt

SEQ ID NO: 5627227 - DNA, 25 bp, Homo sapien
aagaccaaagacgataggcgtctgg

SEQ ID NO: 5627228 - DNA, 25 bp, Homo sapien
tggccatgagaagctcctaagcagt

SEQ ID NO: 5627229 - DNA, 25 bp, Homo sapien
taggtcttagacaaaggtgagattg

SEQ ID NO: 5627230 - DNA, 25 bp, Homo sapien
gattgatgaacatgtacagtgtgtg

SEQ ID NO: 5627231 - DNA, 25 bp, Homo sapien
tttgtagacccgacccagctttgta

SEQ ID NO: 5627232 - DNA, 25 bp, Homo sapien
agaagtagatactgaatgtgaattt

SEQ ID NO: 5627233 - DNA, 25 bp, Homo sapien
gttgttggctgataaacgtggtctt

SEQ ID NO: 5627234 - DNA, 25 bp, Homo sapien
atggaggtggaccactacgttctct

SEQ ID NO: 5627235 - DNA, 25 bp, Homo sapien
ccaggcagcctttggataaagcttt

SEQ ID NO: 5627236 - DNA, 25 bp, Homo sapien
acaggaccatagtattaagaagctt

SEQ ID NO: 5627237 - DNA, 25 bp, Homo sapien
taagcagtggtcataactgggctac

SEQ ID NO: 5627238 - DNA, 25 bp, Homo sapien
ccagctttgtattatgtgaggcccc

SEQ ID NO: 5627239 - DNA, 25 bp, Homo sapien
agacggctgttgcagttccagacat

SEQ ID NO: 5627240 - DNA, 25 bp, Homo sapien
caccctcaaggtttaagacggctgt

SEQ ID NO: 5627241 - DNA, 25 bp, Homo sapien
accaaagtcatcaaggatccgtctt

SEQ ID NO: 5627242 - DNA, 25 bp, Homo sapien
gagccaaggataagcattctgccag

SEQ ID NO: 5627243 - DNA, 25 bp, Homo sapien
tctatgagcacatggctgagccaag

SEQ ID NO: 5627244 - DNA, 25 bp, Homo sapien
atattacaaagagtcagtgatgggc

SEQ ID NO: 5627245 - DNA, 25 bp, Homo sapien
gagaggaatattcaggcagtaacca

SEQ ID NO: 5627246 - DNA, 25 bp, Homo sapien
cttctgagttaggcatagagtcaac

SEQ ID NO: 5627247 - DNA, 25 bp, Homo sapien
aagtagcaatacacatggcaaatat

SEQ ID NO: 5627248 - DNA, 25 bp, Homo sapien
gatgcagtattcacagaaagaggac

SEQ ID NO: 5627249 - DNA, 25 bp, Homo sapien
gtgatgggccattccaggattggtt

SEQ ID NO: 5627250 - DNA, 25 bp, Homo sapien
atttcattggtgtctattgatagat

SEQ ID NO: 5627251 - DNA, 25 bp, Homo sapien
gaacagcttgttagggtaatcttag

SEQ ID NO: 5627252 - DNA, 25 bp, Homo sapien
tgatagataaacccgctgtgtcctc

SEQ ID NO: 5627253 - DNA, 25 bp, Homo sapien
tattgatagataaacccgctgtgtc

SEQ ID NO: 5627254 - DNA, 25 bp, Homo sapien
gtgtcctcacggctatcgttattcc

SEQ ID NO: 5627255 - DNA, 25 bp, Homo sapien
tagggtaatcttagaaactgggaga

SEQ ID NO: 5627256 - DNA, 25 bp, Homo sapien
ttcccatacacgtggctccttcaaa

SEQ ID NO: 5627257 - DNA, 25 bp, Homo sapien
aacccgctgtgtcctcacggctatc

SEQ ID NO: 5627258 - DNA, 25 bp, Homo sapien
tacacgtggctccttcaaatgacat

SEQ ID NO: 5627259 - DNA, 25 bp, Homo sapien
attcactaagactaataacaagtta

SEQ ID NO: 5627260 - DNA, 25 bp, Homo sapien
tccattagaacagcttgttagggta

SEQ ID NO: 5627261 - DNA, 25 bp, Homo sapien
tatacacctacaaaatgagagtaat

SEQ ID NO: 5627262 - DNA, 25 bp, Homo sapien
tcattcaatgttgtgtccccagcat

SEQ ID NO: 5627263 - DNA, 25 bp, Homo sapien
cccccaccaccacaatacgggctcc

SEQ ID NO: 5627264 - DNA, 25 bp, Homo sapien
catgaaggcccacatttatacacct

SEQ ID NO: 5627265 - DNA, 25 bp, Homo sapien
gtaaggacttatcacaaggtatggc

SEQ ID NO: 5627266 - DNA, 25 bp, Homo sapien
aggactatcacgagaattgcatgag

SEQ ID NO: 5627267 - DNA, 25 bp, Homo sapien
acaaggtatggcatatgatgaatga

SEQ ID NO: 5627268 - DNA, 25 bp, Homo sapien
acattccaacattctgagtactttc

SEQ ID NO: 5627269 - DNA, 25 bp, Homo sapien
atgagagtaataagatattgacctc

SEQ ID NO: 5627270 - DNA, 25 bp, Homo sapien
gagaattgcatgagaacacactgta

SEQ ID NO: 5627271 - DNA, 25 bp, Homo sapien
attgacctcacaggactatcacgag

SEQ ID NO: 5627272 - DNA, 25 bp, Homo sapien
aaagatcgtcaagaacgtcaggttc

SEQ ID NO: 5627273 - DNA, 25 bp, Homo sapien
attgagtagtaaattgaaaactgcc

SEQ ID NO: 5627274 - DNA, 25 bp, Homo sapien
acaacttaggcttgaggtaccatgc

SEQ ID NO: 5627275 - DNA, 25 bp, Homo sapien
aagaacgtcaggttcatcaggcttt

SEQ ID NO: 5627276 - DNA, 25 bp, Homo sapien
aggcaattggtccataaagatcgtc

SEQ ID NO: 5627277 - DNA, 25 bp, Homo sapien
aaaatgagagcaagaaatacccaat

SEQ ID NO: 5627278 - DNA, 25 bp, Homo sapien
ttgccaaagttgtgcatccacgggg

SEQ ID NO: 5627279 - DNA, 25 bp, Homo sapien
cacggggccagtcatcataaattat

SEQ ID NO: 5627280 - DNA, 25 bp, Homo sapien
agcttggggtcaatcaaaggttcat

SEQ ID NO: 5627281 - DNA, 25 bp, Homo sapien
ctggcaaacagcctttgaatgatgc

SEQ ID NO: 5627282 - DNA, 25 bp, Homo sapien
cattgcacgttgaataggagtctta

SEQ ID NO: 5627283 - DNA, 25 bp, Homo sapien
tacaaacctgtgctaagacaaggac

SEQ ID NO: 5627284 - DNA, 25 bp, Homo sapien
cttctctaaactctgctccggacac

SEQ ID NO: 5627285 - DNA, 25 bp, Homo sapien
ttgaaacatggcaagtgcacctgaa

SEQ ID NO: 5627286 - DNA, 25 bp, Homo sapien
aaatagctgcatatggctagtggcc

SEQ ID NO: 5627287 - DNA, 25 bp, Homo sapien
tctcaggaatcccagcgtaagtgaa

SEQ ID NO: 5627288 - DNA, 25 bp, Homo sapien
cctgtgctaagacaaggacatgtga

SEQ ID NO: 5627289 - DNA, 25 bp, Homo sapien
aactctgctccggacacataccttt

SEQ ID NO: 5627290 - DNA, 25 bp, Homo sapien
tagaaatccttaccagcactgtcca

SEQ ID NO: 5627291 - DNA, 25 bp, Homo sapien
gcgtaagtgaagccagactctcact

SEQ ID NO: 5627292 - DNA, 25 bp, Homo sapien
ggctagtggccaccatactgcagag

SEQ ID NO: 5627293 - DNA, 25 bp, Homo sapien
catggcaagtgcacctgaatcttta

SEQ ID NO: 5627294 - DNA, 25 bp, Homo sapien
ccctgaacccacagtgacacatcac

SEQ ID NO: 5627295 - DNA, 25 bp, Homo sapien
gcagaaggtagagttctcatgtgtc

SEQ ID NO: 5627296 - DNA, 25 bp, Homo sapien
ttggataaatgtgtaatgatgtctc

SEQ ID NO: 5627297 - DNA, 25 bp, Homo sapien
acttgggcaccaatgcatgctgaaa

SEQ ID NO: 5627298 - DNA, 25 bp, Homo sapien
ccccactatcaacacccccacacta

SEQ ID NO: 5627299 - DNA, 25 bp, Homo sapien
gcatgctgaaaaagagtcagacttc

SEQ ID NO: 5627300 - DNA, 25 bp, Homo sapien
acccccacactacagtggtagattt

SEQ ID NO: 5627301 - DNA, 25 bp, Homo sapien
aaagcactaatgactacaatggatt

SEQ ID NO: 5627302 - DNA, 25 bp, Homo sapien
atcacagcatcaggcagagtagttt

SEQ ID NO: 5627303 - DNA, 25 bp, Homo sapien
taaaggacagatataatcaccgaat

SEQ ID NO: 5627304 - DNA, 25 bp, Homo sapien
tgtctccaccatcacagcatcaggc

SEQ ID NO: 5627305 - DNA, 25 bp, Homo sapien
ttccacatggatctgcacatttcac

SEQ ID NO: 5627306 - DNA, 25 bp, Homo sapien
cagccccgttccatcacgttccagt

SEQ ID NO: 5627307 - DNA, 25 bp, Homo sapien
gtccctgggtcttgtttatgttgtc

SEQ ID NO: 5627308 - DNA, 25 bp, Homo sapien
gtcccaaacacaaattgtcatcacc

SEQ ID NO: 5627309 - DNA, 25 bp, Homo sapien
tttcacaatcagacgtcccaaacac

SEQ ID NO: 5627310 - DNA, 25 bp, Homo sapien
tgtagtttgtgtgcaatgggctgca

SEQ ID NO: 5627311 - DNA, 25 bp, Homo sapien
atgggctgcactgtgcatgccctgc

SEQ ID NO: 5627312 - DNA, 25 bp, Homo sapien
cccaggaccctgactctggggcaca

SEQ ID NO: 5627313 - DNA, 25 bp, Homo sapien
agcagggaaaagttatctttatttc

SEQ ID NO: 5627314 - DNA, 25 bp, Homo sapien
agctccatcacgttccagccccgtt

SEQ ID NO: 5627315 - DNA, 25 bp, Homo sapien
catgccctgcaggcagtgatgtctg

SEQ ID NO: 5627316 - DNA, 25 bp, Homo sapien
gtccaagcagctttatgagaggcac

SEQ ID NO: 5627317 - DNA, 25 bp, Homo sapien
atgataattgtcaatgggtactcat

SEQ ID NO: 5627318 - DNA, 25 bp, Homo sapien
ggtagagcagctcacaatcggctat

SEQ ID NO: 5627319 - DNA, 25 bp, Homo sapien
gagagagcgtgtgtaccttgttaca

SEQ ID NO: 5627320 - DNA, 25 bp, Homo sapien
gttacattagaatcacagaatcctt

SEQ ID NO: 5627321 - DNA, 25 bp, Homo sapien
ggaaatggagtgattgtaacagatt

SEQ ID NO: 5627322 - DNA, 25 bp, Homo sapien
ttgggagaaaagataagtttaatca

SEQ ID NO: 5627323 - DNA, 25 bp, Homo sapien
tcacagaatccttgaggggaaagag

SEQ ID NO: 5627324 - DNA, 25 bp, Homo sapien
atcaacatagtgaaatgcctcttac

SEQ ID NO: 5627325 - DNA, 25 bp, Homo sapien
accttaagcaagttagtctaatcaa

SEQ ID NO: 5627326 - DNA, 25 bp, Homo sapien
atgagaggcacaactttccaaaagg

SEQ ID NO: 5627327 - DNA, 25 bp, Homo sapien
ttccacaaataccgtgggggctgat

SEQ ID NO: 5627328 - DNA, 25 bp, Homo sapien
taggagaaaccagtaactggcaaac

SEQ ID NO: 5627329 - DNA, 25 bp, Homo sapien
gacacactcaccacaaccaaccacc

SEQ ID NO: 5627330 - DNA, 25 bp, Homo sapien
attactggttgaggcaagaatgttg

SEQ ID NO: 5627331 - DNA, 25 bp, Homo sapien
ctgcctgtagctaaatcaagacttg

SEQ ID NO: 5627332 - DNA, 25 bp, Homo sapien
gctgcatttacagaggtagctgctc

SEQ ID NO: 5627333 - DNA, 25 bp, Homo sapien
taaagcctagacacaaaccacattc

SEQ ID NO: 5627334 - DNA, 25 bp, Homo sapien
atcaagacttgagaaacaaggtttc

SEQ ID NO: 5627335 - DNA, 25 bp, Homo sapien
caacaacaaactgcaaaccacgacc

SEQ ID NO: 5627336 - DNA, 25 bp, Homo sapien
ccacgaccacgactgtgaaaaaagc

SEQ ID NO: 5627337 - DNA, 25 bp, Homo sapien
tgggggctgatctaactaccagaac

SEQ ID NO: 5627338 - DNA, 25 bp, Homo sapien
cctcacagcattccctggtgccctc

SEQ ID NO: 5627339 - DNA, 25 bp, Homo sapien
ggcgtagtagtgttgaccttgctgt

SEQ ID NO: 5627340 - DNA, 25 bp, Homo sapien
gagatggatccaggactctttcccc

SEQ ID NO: 5627341 - DNA, 25 bp, Homo sapien
gctaaggcgtagtagtgttgacctt

SEQ ID NO: 5627342 - DNA, 25 bp, Homo sapien
tgtgatttggctagagatggatcca

SEQ ID NO: 5627343 - DNA, 25 bp, Homo sapien
ttaagaaaaatccgacacagtggtg

SEQ ID NO: 5627344 - DNA, 25 bp, Homo sapien
cagtctgaccgcttccatttattta

SEQ ID NO: 5627345 - DNA, 25 bp, Homo sapien
accctgaagtccctcacagcattcc

SEQ ID NO: 5627346 - DNA, 25 bp, Homo sapien
cattccctggtgccctctactcccc

SEQ ID NO: 5627347 - DNA, 25 bp, Homo sapien
ggggcgacactggctcccttctgca

SEQ ID NO: 5627348 - DNA, 25 bp, Homo sapien
gaaaaatccgacacagtggtgggta

SEQ ID NO: 5627349 - DNA, 25 bp, Homo sapien
tatttgagtaccacaaggtgcctgg

SEQ ID NO: 5627350 - DNA, 25 bp, Homo sapien
acaaagactctagtttatccagggc

SEQ ID NO: 5627351 - DNA, 25 bp, Homo sapien
gagtagatagcagagatggtattaa

SEQ ID NO: 5627352 - DNA, 25 bp, Homo sapien
aaggtgcctggcatgtagtacatta

SEQ ID NO: 5627353 - DNA, 25 bp, Homo sapien
aagggaaggtgcctaaattcccata

SEQ ID NO: 5627354 - DNA, 25 bp, Homo sapien
tctggtgactcataggacatctctc

SEQ ID NO: 5627355 - DNA, 25 bp, Homo sapien
tataagaatgagagtctgattaatc

SEQ ID NO: 5627356 - DNA, 25 bp, Homo sapien
tccagggcattcctgatacaggctt

SEQ ID NO: 5627357 - DNA, 25 bp, Homo sapien
catctaaaaatcaaatgggggtact

SEQ ID NO: 5627358 - DNA, 25 bp, Homo sapien
tacatgagaactacttgtaccagtt

SEQ ID NO: 5627359 - DNA, 25 bp, Homo sapien
aaatagggagttccttcaatgtatt

SEQ ID NO: 5627360 - DNA, 25 bp, Homo sapien
gagtccatgagaaggtgcccttatc

SEQ ID NO: 5627361 - DNA, 25 bp, Homo sapien
aatgcaaaagaggtataatggtcct

SEQ ID NO: 5627362 - DNA, 25 bp, Homo sapien
cctggtatactgcaaatggagggtg

SEQ ID NO: 5627363 - DNA, 25 bp, Homo sapien
gtcctagaagtgatagggttgtgga

SEQ ID NO: 5627364 - DNA, 25 bp, Homo sapien
ccactattgaaaagaggtggggcat

SEQ ID NO: 5627365 - DNA, 25 bp, Homo sapien
taattaggatgaaccatgtggtgat

SEQ ID NO: 5627366 - DNA, 25 bp, Homo sapien
tagggcacaagaaccaacataaatg

SEQ ID NO: 5627367 - DNA, 25 bp, Homo sapien
tgtccaagggacattgttgtggtca

SEQ ID NO: 5627368 - DNA, 25 bp, Homo sapien
tggggcatccttgtctagggcacaa

SEQ ID NO: 5627369 - DNA, 25 bp, Homo sapien
gggggtcagcaaccctggtatactg

SEQ ID NO: 5627370 - DNA, 25 bp, Homo sapien
tatgttgatagtccaccagaagggg

SEQ ID NO: 5627371 - DNA, 25 bp, Homo sapien
ttctaaagcactggcaggatagaat

SEQ ID NO: 5627372 - DNA, 25 bp, Homo sapien
aaataccaatattcaatgcagatgt

SEQ ID NO: 5627373 - DNA, 25 bp, Homo sapien
acacaaagcccaaacacaaccatat

SEQ ID NO: 5627374 - DNA, 25 bp, Homo sapien
ccaggcatgctatttaaggttatgg

SEQ ID NO: 5627375 - DNA, 25 bp, Homo sapien
taacatagaacagcatatttcaggc

SEQ ID NO: 5627376 - DNA, 25 bp, Homo sapien
tctgaattggcaacaagatcttttc

SEQ ID NO: 5627377 - DNA, 25 bp, Homo sapien
acaaaagtcatctgtacacaaagcc

SEQ ID NO: 5627378 - DNA, 25 bp, Homo sapien
gatgttaaaccagatacagaggaga

SEQ ID NO: 5627379 - DNA, 25 bp, Homo sapien
tcaatgcagatgttaaaccagatac

SEQ ID NO: 5627380 - DNA, 25 bp, Homo sapien
ttaaggttatggtttctgaattggc

SEQ ID NO: 5627381 - DNA, 25 bp, Homo sapien
gcaagttattctaaagcactggcag

SEQ ID NO: 5627382 - DNA, 25 bp, Homo sapien
ttaaattagctggaagaagaaagac

SEQ ID NO: 5627383 - DNA, 25 bp, Homo sapien
ggaatgcagaagcagtcacatacta

SEQ ID NO: 5627384 - DNA, 25 bp, Homo sapien
ctattcataggtgcagttatagtgc

SEQ ID NO: 5627385 - DNA, 25 bp, Homo sapien
atagtgcactagcctggagttcctg

SEQ ID NO: 5627386 - DNA, 25 bp, Homo sapien
taggtgcagttatagtgcactagcc

SEQ ID NO: 5627387 - DNA, 25 bp, Homo sapien
agaaagacattggggttcttcttac

SEQ ID NO: 5627388 - DNA, 25 bp, Homo sapien
gcagaagcagtcacatactagttac

SEQ ID NO: 5627389 - DNA, 25 bp, Homo sapien
attcacattgagaaagccaaggata

SEQ ID NO: 5627390 - DNA, 25 bp, Homo sapien
ttgagaggaccagatttggtcccaa

SEQ ID NO: 5627391 - DNA, 25 bp, Homo sapien
tactagttacatgcagcaagaaagt

SEQ ID NO: 5627392 - DNA, 25 bp, Homo sapien
tgcagcaagaaagtcatcctttaga

SEQ ID NO: 5627393 - DNA, 25 bp, Homo sapien
catgacatgatcttgcaggaggaaa

SEQ ID NO: 5627394 - DNA, 25 bp, Homo sapien
agctgtaactgcaagcatgactgac

SEQ ID NO: 5627395 - DNA, 25 bp, Homo sapien
agagggaaatcagtactacaggaaa

SEQ ID NO: 5627396 - DNA, 25 bp, Homo sapien
ctatttacaaggtgtgaagggtgtg

SEQ ID NO: 5627397 - DNA, 25 bp, Homo sapien
atctacaggcttggaaagacaaaga

SEQ ID NO: 5627398 - DNA, 25 bp, Homo sapien
acagtcaaaagatagtgcaacctcc

SEQ ID NO: 5627399 - DNA, 25 bp, Homo sapien
atgcccagccaccacagaactttta

SEQ ID NO: 5627400 - DNA, 25 bp, Homo sapien
gggagagccaacatgacatgatctt

SEQ ID NO: 5627401 - DNA, 25 bp, Homo sapien
gactgacatttaggtttgggcaaca

SEQ ID NO: 5627402 - DNA, 25 bp, Homo sapien
tgatatgagccatgccctctgggag

SEQ ID NO: 5627403 - DNA, 25 bp, Homo sapien
agacaaagagggccccatgatatga

SEQ ID NO: 5627404 - DNA, 25 bp, Homo sapien
ttccgccaatccacacagtttcctt

SEQ ID NO: 5627405 - DNA, 25 bp, Homo sapien
gtgagtcagtaatacccacagcact

SEQ ID NO: 5627406 - DNA, 25 bp, Homo sapien
accctttaagggactgtgagtcagt

SEQ ID NO: 5627407 - DNA, 25 bp, Homo sapien
aaggcagaaatttgggatttatggt

SEQ ID NO: 5627408 - DNA, 25 bp, Homo sapien
atgtggtcagaaaagtaatgcaaaa

SEQ ID NO: 5627409 - DNA, 25 bp, Homo sapien
ctaaaaaacccagaaatagctatct

SEQ ID NO: 5627410 - DNA, 25 bp, Homo sapien
ggtatggctagggataattatgttt

SEQ ID NO: 5627411 - DNA, 25 bp, Homo sapien
caccccacgaattttacagcagacc

SEQ ID NO: 5627412 - DNA, 25 bp, Homo sapien
caaatgatgacaaaattagtggttc

SEQ ID NO: 5627413 - DNA, 25 bp, Homo sapien
tagcaagtatggtatggctagggat

SEQ ID NO: 5627414 - DNA, 25 bp, Homo sapien
tacagcagaccgccttcttgtcacc

SEQ ID NO: 5627415 - DNA, 25 bp, Homo sapien
atagcatttaggcatgggtgaaaag

SEQ ID NO: 5627416 - DNA, 25 bp, Homo sapien
ttaacttgactggcctgaattgctc

SEQ ID NO: 5627417 - DNA, 25 bp, Homo sapien
ctgcaggactagaccttagactagg

SEQ ID NO: 5627418 - DNA, 25 bp, Homo sapien
ccatcaagagtaaaataaacacatc

SEQ ID NO: 5627419 - DNA, 25 bp, Homo sapien
agactaggagttcatctctgagccc

SEQ ID NO: 5627420 - DNA, 25 bp, Homo sapien
gcaagaaggataaatggtataccca

SEQ ID NO: 5627421 - DNA, 25 bp, Homo sapien
agagcagatggtaatttaagggaat

SEQ ID NO: 5627422 - DNA, 25 bp, Homo sapien
ctctgagcccttggagtattttgct

SEQ ID NO: 5627423 - DNA, 25 bp, Homo sapien
atacccaagagagctttgatgactc

SEQ ID NO: 5627424 - DNA, 25 bp, Homo sapien
tccaaagaggggtccctctgcagga

SEQ ID NO: 5627425 - DNA, 25 bp, Homo sapien
taaattggaagttttgcagttatcc

SEQ ID NO: 5627426 - DNA, 25 bp, Homo sapien
caagaagagtcagctttttggcagc

SEQ ID NO: 5627427 - DNA, 25 bp, Homo sapien
aggaatacaaacttgggtcatttta

SEQ ID NO: 5627428 - DNA, 25 bp, Homo sapien
cctctcttgtggggaggaatacaaa

SEQ ID NO: 5627429 - DNA, 25 bp, Homo sapien
ctttctaaggcccaggtaagatagg

SEQ ID NO: 5627430 - DNA, 25 bp, Homo sapien
agcttttacacttcctgccaggccc

SEQ ID NO: 5627431 - DNA, 25 bp, Homo sapien
tgataagccaccaagaactgaattc

SEQ ID NO: 5627432 - DNA, 25 bp, Homo sapien
gaatgtttaggggtatcccagctcc

SEQ ID NO: 5627433 - DNA, 25 bp, Homo sapien
ctcacgtgagttctgagtccctgaa

SEQ ID NO: 5627434 - DNA, 25 bp, Homo sapien
gcccaggtaagataggcctcctctc

SEQ ID NO: 5627435 - DNA, 25 bp, Homo sapien
agcttttctggcaggttcaccaaaa

SEQ ID NO: 5627436 - DNA, 25 bp, Homo sapien
ggcccctgtgtgcttttgataagcc

SEQ ID NO: 5627437 - DNA, 25 bp, Homo sapien
agcaggtcactcagcccacgcttct

SEQ ID NO: 5627438 - DNA, 25 bp, Homo sapien
ggtgcatgccatggtgctcagttct

SEQ ID NO: 5627439 - DNA, 25 bp, Homo sapien
ttctcactcaccaaggagcaggtca

SEQ ID NO: 5627440 - DNA, 25 bp, Homo sapien
ctctaggtacccagaaggctcttca

SEQ ID NO: 5627441 - DNA, 25 bp, Homo sapien
gctcttcatgcccatccagccacat

SEQ ID NO: 5627442 - DNA, 25 bp, Homo sapien
cccatggcctccgaatccctgtcac

SEQ ID NO: 5627443 - DNA, 25 bp, Homo sapien
ctgctcagccctcccccatggcctc

SEQ ID NO: 5627444 - DNA, 25 bp, Homo sapien
tctcacagcgcctcttgcctgtctc

SEQ ID NO: 5627445 - DNA, 25 bp, Homo sapien
atggtgctcagttctaggacttctc

SEQ ID NO: 5627446 - DNA, 25 bp, Homo sapien
gtcacaggacagccaagattaaatc

SEQ ID NO: 5627447 - DNA, 25 bp, Homo sapien
agcacctctaggtacccagaaggct

SEQ ID NO: 5627448 - DNA, 25 bp, Homo sapien
tatgagcccaacattatcttcaatt

SEQ ID NO: 5627449 - DNA, 25 bp, Homo sapien
aattgaagataatgttgggctcata

SEQ ID NO: 5627450 - DNA, 25 bp, Homo sapien
ggctgagaagggtttaacaatgttc

SEQ ID NO: 5627451 - DNA, 25 bp, Homo sapien
cagaacatgcctcacctgcaacttg

SEQ ID NO: 5627452 - DNA, 25 bp, Homo sapien
actggaagtttcttgggctttcagc

SEQ ID NO: 5627453 - DNA, 25 bp, Homo sapien
ccttctgaaacacgcttgctgacca

SEQ ID NO: 5627454 - DNA, 25 bp, Homo sapien
gggttaagttcctatgagcctctgg

SEQ ID NO: 5627455 - DNA, 25 bp, Homo sapien
cctgtatcacgtgactggaagtttc

SEQ ID NO: 5627456 - DNA, 25 bp, Homo sapien
actgaaatgccacttgtacaggttc

SEQ ID NO: 5627457 - DNA, 25 bp, Homo sapien
ctagtggaaatacagggttaagttc

SEQ ID NO: 5627458 - DNA, 25 bp, Homo sapien
gtgctgtctgctatgtttggttggt

SEQ ID NO: 5627459 - DNA, 25 bp, Homo sapien
tggttttgttaaatgggtcgtcatc

SEQ ID NO: 5627460 - DNA, 25 bp, Homo sapien
gggtcgtcatctcaggaatccacaa

SEQ ID NO: 5627461 - DNA, 25 bp, Homo sapien
agtggtttgactggtagaaaatgaa

SEQ ID NO: 5627462 - DNA, 25 bp, Homo sapien
gaaagagctctcagtcccaaaccaa

SEQ ID NO: 5627463 - DNA, 25 bp, Homo sapien
ggattaaaggtatgagccactacac

SEQ ID NO: 5627464 - DNA, 25 bp, Homo sapien
tgcagtctccctggtctcgatctcc

SEQ ID NO: 5627465 - DNA, 25 bp, Homo sapien
ggggaagtaacatgaagactctaat

SEQ ID NO: 5627466 - DNA, 25 bp, Homo sapien
attaaaaatagagatgcagtctccc

SEQ ID NO: 5627467 - DNA, 25 bp, Homo sapien
tctgccctgctataagacctgcctc

SEQ ID NO: 5627468 - DNA, 25 bp, Homo sapien
ccttgctagcaaattggggaagtaa

SEQ ID NO: 5627469 - DNA, 25 bp, Homo sapien
ggagggaatgagttcagcacattaa

SEQ ID NO: 5627470 - DNA, 25 bp, Homo sapien
tccaataaggaaaataagctatcca

SEQ ID NO: 5627471 - DNA, 25 bp, Homo sapien
tattcacttaagcaggagggaatga

SEQ ID NO: 5627472 - DNA, 25 bp, Homo sapien
ctggaaaatccagatggcatccatg

SEQ ID NO: 5627473 - DNA, 25 bp, Homo sapien
ccaaggggtgtttatgtagctctat

SEQ ID NO: 5627474 - DNA, 25 bp, Homo sapien
ggggcttttgaaatgatgaccagtt

SEQ ID NO: 5627475 - DNA, 25 bp, Homo sapien
ttaagtcaagacatccaccctctgt

SEQ ID NO: 5627476 - DNA, 25 bp, Homo sapien
ccttgataatcccagggtttgcttc

SEQ ID NO: 5627477 - DNA, 25 bp, Homo sapien
gcccagcccctaaggcatttcttct

SEQ ID NO: 5627478 - DNA, 25 bp, Homo sapien
tccaactgggcttgtcaactactcc

SEQ ID NO: 5627479 - DNA, 25 bp, Homo sapien
ttgggtgtcaaggaagctattcaca

SEQ ID NO: 5627480 - DNA, 25 bp, Homo sapien
cccggtagacactttgctgggccca

SEQ ID NO: 5627481 - DNA, 25 bp, Homo sapien
atggcatccatgcaaccgcagtcta

SEQ ID NO: 5627482 - DNA, 25 bp, Homo sapien
cttagcaggatgtctggtatccagc

SEQ ID NO: 5627483 - DNA, 25 bp, Homo sapien
tgaagaatgaggagctatgtagctt

SEQ ID NO: 5627484 - DNA, 25 bp, Homo sapien
gaggaattggaacacgatctaactg

SEQ ID NO: 5627485 - DNA, 25 bp, Homo sapien
agtgggtgagtgttgctaaaatcat

SEQ ID NO: 5627486 - DNA, 25 bp, Homo sapien
attaccaaattcaagcttcgagctg

SEQ ID NO: 5627487 - DNA, 25 bp, Homo sapien
cttgcttatgaaaatagagtgaaga

SEQ ID NO: 5627488 - DNA, 25 bp, Homo sapien
ttctagaaattatgagctgccagca

SEQ ID NO: 5627489 - DNA, 25 bp, Homo sapien
ggaagatatgccctgaaacatgctt

SEQ ID NO: 5627490 - DNA, 25 bp, Homo sapien
tagcttctgcagtccatacattcac

SEQ ID NO: 5627491 - DNA, 25 bp, Homo sapien
atatgacacgatttttctgccccac

SEQ ID NO: 5627492 - DNA, 25 bp, Homo sapien
tctgccccacaaatggaggaattgg

SEQ ID NO: 5627493 - DNA, 25 bp, Homo sapien
tccaccatgaaaacaaagcaacacc

SEQ ID NO: 5627494 - DNA, 25 bp, Homo sapien
tgtattacaaggatgttacacattc

SEQ ID NO: 5627495 - DNA, 25 bp, Homo sapien
ttatcaataactagggcaaagaaca

SEQ ID NO: 5627496 - DNA, 25 bp, Homo sapien
actaggcatcaagaaacatgaatcc

SEQ ID NO: 5627497 - DNA, 25 bp, Homo sapien
cttattaaagggaacagcacctaga

SEQ ID NO: 5627498 - DNA, 25 bp, Homo sapien
aaagcaatggcctattaccttgtta

SEQ ID NO: 5627499 - DNA, 25 bp, Homo sapien
catgaatccttgactcagctctgtc

SEQ ID NO: 5627500 - DNA, 25 bp, Homo sapien
atcaaagactactaaactaggcatc

SEQ ID NO: 5627501 - DNA, 25 bp, Homo sapien
gaacataattcaagtagatagattt

SEQ ID NO: 5627502 - DNA, 25 bp, Homo sapien
gttgaaatgggtaatgacttgtatt

SEQ ID NO: 5627503 - DNA, 25 bp, Homo sapien
ataactagggcaaagaacaaaatca

SEQ ID NO: 5627504 - DNA, 25 bp, Homo sapien
gttactcaaaaagaatacataggga

SEQ ID NO: 5627505 - DNA, 25 bp, Homo sapien
gacttattgaggtacttggagagcg

SEQ ID NO: 5627506 - DNA, 25 bp, Homo sapien
tttgagttaatcaggtaggaccctc

SEQ ID NO: 5627507 - DNA, 25 bp, Homo sapien
aaatgcagcattgtcagagtcctca

SEQ ID NO: 5627508 - DNA, 25 bp, Homo sapien
agctctagaaggggaatctttgagt

SEQ ID NO: 5627509 - DNA, 25 bp, Homo sapien
cctggggctcgcacccttaaaaagc

SEQ ID NO: 5627510 - DNA, 25 bp, Homo sapien
tcattgcagaacagagaagtacatt

SEQ ID NO: 5627511 - DNA, 25 bp, Homo sapien
acattttgaacaggagtagagtagt

SEQ ID NO: 5627512 - DNA, 25 bp, Homo sapien
gagcgaggcagtgtcctctgcccat

SEQ ID NO: 5627513 - DNA, 25 bp, Homo sapien
cctctgcccatcgcagctggccagg

SEQ ID NO: 5627514 - DNA, 25 bp, Homo sapien
gaggcacaagtaggtcaatgactta

SEQ ID NO: 5627515 - DNA, 25 bp, Homo sapien
gtcctcatggaaactagaactctct

SEQ ID NO: 5627516 - DNA, 25 bp, Homo sapien
aggacccaggataacaccccctcta

SEQ ID NO: 5627517 - DNA, 25 bp, Homo sapien
tctggtaacgtcccccaggcaaagc

SEQ ID NO: 5627518 - DNA, 25 bp, Homo sapien
tactcttaggtgagaccccagatga

SEQ ID NO: 5627519 - DNA, 25 bp, Homo sapien
gtcgcccctgcaggtaaccctctat

SEQ ID NO: 5627520 - DNA, 25 bp, Homo sapien
taaaggttccaaggcatgccccaag

SEQ ID NO: 5627521 - DNA, 25 bp, Homo sapien
acatacagtccgcctggcaatgggc

SEQ ID NO: 5627522 - DNA, 25 bp, Homo sapien
aggtagatcccttaggtagaggtcc

SEQ ID NO: 5627523 - DNA, 25 bp, Homo sapien
atgcaagaaccccagataatgagtt

SEQ ID NO: 5627524 - DNA, 25 bp, Homo sapien
ttctggggacattcctgtagcaacc

SEQ ID NO: 5627525 - DNA, 25 bp, Homo sapien
gaggaccggacacatacagtccgcc

SEQ ID NO: 5627526 - DNA, 25 bp, Homo sapien
tcatgtaagtaacccaggtagatcc

SEQ ID NO: 5627527 - DNA, 25 bp, Homo sapien
ttccaggcatagatgattccaggct

SEQ ID NO: 5627528 - DNA, 25 bp, Homo sapien
tgattccaggctgctaaagaaagag

SEQ ID NO: 5627529 - DNA, 25 bp, Homo sapien
aggaaaaggcactttgaacctcctg

SEQ ID NO: 5627530 - DNA, 25 bp, Homo sapien
tagctcttgcgtggagcatagcctc

SEQ ID NO: 5627531 - DNA, 25 bp, Homo sapien
cagaagacattgatgtttccaggca

SEQ ID NO: 5627532 - DNA, 25 bp, Homo sapien
ggcctttgtctggccagaagacatt

SEQ ID NO: 5627533 - DNA, 25 bp, Homo sapien
agaaagagcactctcctggtgcttg

SEQ ID NO: 5627534 - DNA, 25 bp, Homo sapien
ctgtaacgatgctgaggtttggaca

SEQ ID NO: 5627535 - DNA, 25 bp, Homo sapien
ggtttggacattctgacccagcccc

SEQ ID NO: 5627536 - DNA, 25 bp, Homo sapien
ataccaggtgcttctgagtcagagg

SEQ ID NO: 5627537 - DNA, 25 bp, Homo sapien
tcttgctgggcatagcgcctttcac

SEQ ID NO: 5627538 - DNA, 25 bp, Homo sapien
atgcccagccgaatgattcattttc

SEQ ID NO: 5627539 - DNA, 25 bp, Homo sapien
attgcagattactttggcaactgtc

SEQ ID NO: 5627540 - DNA, 25 bp, Homo sapien
ggcaactgtctttactgtgtgaatc

SEQ ID NO: 5627541 - DNA, 25 bp, Homo sapien
acccatctcgtgtattaatcccatc

SEQ ID NO: 5627542 - DNA, 25 bp, Homo sapien
taatcccatcaatcattcaggtgtc

SEQ ID NO: 5627543 - DNA, 25 bp, Homo sapien
cataagccatatcccaatacccatc

SEQ ID NO: 5627544 - DNA, 25 bp, Homo sapien
accgtcatatcccctctaaagtgta

SEQ ID NO: 5627545 - DNA, 25 bp, Homo sapien
tctaaaccaagacatgacgtacaac

SEQ ID NO: 5627546 - DNA, 25 bp, Homo sapien
aatcattcaggtgtctggaatacaa

SEQ ID NO: 5627547 - DNA, 25 bp, Homo sapien
agacatgacgtacaaccccagatcc

SEQ ID NO: 5627548 - DNA, 25 bp, Homo sapien
tgtaatacatccaaccaggttttcc

SEQ ID NO: 5627549 - DNA, 25 bp, Homo sapien
attctaggctacgtgttttacaaat

SEQ ID NO: 5627550 - DNA, 25 bp, Homo sapien
tcaaaatgttcaagtctcatattcc

SEQ ID NO: 5627551 - DNA, 25 bp, Homo sapien
acaatacatacaaattcggcctaat

SEQ ID NO: 5627552 - DNA, 25 bp, Homo sapien
ttaatcctcttagtggttgatacca

SEQ ID NO: 5627553 - DNA, 25 bp, Homo sapien
actccacataaaattaaggtattac

SEQ ID NO: 5627554 - DNA, 25 bp, Homo sapien
aaatgtaaacatgaggataaaatat

SEQ ID NO: 5627555 - DNA, 25 bp, Homo sapien
cttaaatgtgactctacctggaagt

SEQ ID NO: 5627556 - DNA, 25 bp, Homo sapien
cacatacccatccaacaatacatac

SEQ ID NO: 5627557 - DNA, 25 bp, Homo sapien
gttgataccactctccccatgttac

SEQ ID NO: 5627558 - DNA, 25 bp, Homo sapien
ataaatcaggtcaatacacataccc

SEQ ID NO: 5627559 - DNA, 25 bp, Homo sapien
tttcaaatgagcactaaattaaatt

SEQ ID NO: 5627560 - DNA, 25 bp, Homo sapien
tgtcaatgtgggtaaagattcctca

SEQ ID NO: 5627561 - DNA, 25 bp, Homo sapien
aatgcagactgcccagatgtgtagc

SEQ ID NO: 5627562 - DNA, 25 bp, Homo sapien
tggaagcctgcatgcacttgggtca

SEQ ID NO: 5627563 - DNA, 25 bp, Homo sapien
ggctgcgtcacggactgccactttt

SEQ ID NO: 5627564 - DNA, 25 bp, Homo sapien
gatgtgtagcaagtcctctgaatgt

SEQ ID NO: 5627565 - DNA, 25 bp, Homo sapien
gctaaaggactaagttaggcctctg

SEQ ID NO: 5627566 - DNA, 25 bp, Homo sapien
gataaccttgggagttctgtgctgg

SEQ ID NO: 5627567 - DNA, 25 bp, Homo sapien
gcagggccatgcctaacccgtatct

SEQ ID NO: 5627568 - DNA, 25 bp, Homo sapien
ttacaatatggttcaaaggtgcttt

SEQ ID NO: 5627569 - DNA, 25 bp, Homo sapien
aactcagtctctctaggcaaggcct

SEQ ID NO: 5627570 - DNA, 25 bp, Homo sapien
tactaaacagtaaggtgattccaga

SEQ ID NO: 5627571 - DNA, 25 bp, Homo sapien
tttcagcacaggctggaacagtttc

SEQ ID NO: 5627572 - DNA, 25 bp, Homo sapien
gagtgcttacatctattccaacaac

SEQ ID NO: 5627573 - DNA, 25 bp, Homo sapien
gaagaactttctggcatggatttac

SEQ ID NO: 5627574 - DNA, 25 bp, Homo sapien
tacctcctgagaatacctttgataa

SEQ ID NO: 5627575 - DNA, 25 bp, Homo sapien
ttaatctgatggcaaaaacttcaaa

SEQ ID NO: 5627576 - DNA, 25 bp, Homo sapien
tattccaacaacatggtgtgggagt

SEQ ID NO: 5627577 - DNA, 25 bp, Homo sapien
gtgggagtatttcagcacaggctgg

SEQ ID NO: 5627578 - DNA, 25 bp, Homo sapien
ataaagactcatagaaaagtaaagc

SEQ ID NO: 5627579 - DNA, 25 bp, Homo sapien
tcaaatgggaagaactttctggcat

SEQ ID NO: 5627580 - DNA, 25 bp, Homo sapien
aaaagtaaagctaaagtctcaactc

SEQ ID NO: 5627581 - DNA, 25 bp, Homo sapien
ccaacaacatggtgtgggagtattt

SEQ ID NO: 5627582 - DNA, 25 bp, Homo sapien
agtatggacaaaaccatgaagacat

SEQ ID NO: 5627583 - DNA, 25 bp, Homo sapien
aagtgcattgcaacagatggcatac

SEQ ID NO: 5627584 - DNA, 25 bp, Homo sapien
aggataatgatttcaggggagtaga

SEQ ID NO: 5627585 - DNA, 25 bp, Homo sapien
aaatcctgatgcagcacggtatggg

SEQ ID NO: 5627586 - DNA, 25 bp, Homo sapien
gtcctagctgacaacccaaactatc

SEQ ID NO: 5627587 - DNA, 25 bp, Homo sapien
attgacaagcaagtaaaaccaagtg

SEQ ID NO: 5627588 - DNA, 25 bp, Homo sapien
ttgcaattgtggacacaatggattc

SEQ ID NO: 5627589 - DNA, 25 bp, Homo sapien
ggagtagaaggtgaaaaatcataac

SEQ ID NO: 5627590 - DNA, 25 bp, Homo sapien
tgttgatccccagaaaataggtgcc

SEQ ID NO: 5627591 - DNA, 25 bp, Homo sapien
cagatggcatacaaatcaaatcctg

SEQ ID NO: 5627592 - DNA, 25 bp, Homo sapien
cataacccaaagtccagtatggaca

SEQ ID NO: 5627593 - DNA, 25 bp, Homo sapien
agagcctctgaggtatgatccctgt

SEQ ID NO: 5627594 - DNA, 25 bp, Homo sapien
atgatcagtactatgatggaagtta

SEQ ID NO: 5627595 - DNA, 25 bp, Homo sapien
gacagaagttatactggaggtgagg

SEQ ID NO: 5627596 - DNA, 25 bp, Homo sapien
cacatttaagagcctctgaggtatg

SEQ ID NO: 5627597 - DNA, 25 bp, Homo sapien
ttctcagcctggacagaagttatac

SEQ ID NO: 5627598 - DNA, 25 bp, Homo sapien
tcctggaagaactgacatctgaact

SEQ ID NO: 5627599 - DNA, 25 bp, Homo sapien
atggaagttaatcacaaaacatgac

SEQ ID NO: 5627600 - DNA, 25 bp, Homo sapien
ctaaggatattatgaaacagcctct

SEQ ID NO: 5627601 - DNA, 25 bp, Homo sapien
ctgccttcctgtagcaaacaaccta

SEQ ID NO: 5627602 - DNA, 25 bp, Homo sapien
gatgggatgtaaatcaaggaaaaca

SEQ ID NO: 5627603 - DNA, 25 bp, Homo sapien
attacagagtaattatgatcagtac

SEQ ID NO: 5627604 - DNA, 25 bp, Homo sapien
aataattaggaatagtgctagtcta

SEQ ID NO: 5627605 - DNA, 25 bp, Homo sapien
atagaaactgtgaaattgacaaata

SEQ ID NO: 5627606 - DNA, 25 bp, Homo sapien
agaagaggctttttagtgaacaacc

SEQ ID NO: 5627607 - DNA, 25 bp, Homo sapien
catcatcagttaggtaatctcagac

SEQ ID NO: 5627608 - DNA, 25 bp, Homo sapien
agaaaaacataatgacctgtcacta

SEQ ID NO: 5627609 - DNA, 25 bp, Homo sapien
gtcgcaagtatacagtgaaaatgtc

SEQ ID NO: 5627610 - DNA, 25 bp, Homo sapien
attcagagaaacgtaagaaaggtga

SEQ ID NO: 5627611 - DNA, 25 bp, Homo sapien
tgaattgtggtgcaagtcgcaagta

SEQ ID NO: 5627612 - DNA, 25 bp, Homo sapien
ggcaaatttataagcaggaaaagaa

SEQ ID NO: 5627613 - DNA, 25 bp, Homo sapien
tgttcactgctgcgaagaattctac

SEQ ID NO: 5627614 - DNA, 25 bp, Homo sapien
tcagcaaacaatagattatagaaac

SEQ ID NO: 5627615 - DNA, 25 bp, Homo sapien
agtgtggctctctgctaacaagaac

SEQ ID NO: 5627616 - DNA, 25 bp, Homo sapien
gggtcattacaagggcatggctaaa

SEQ ID NO: 5627617 - DNA, 25 bp, Homo sapien
aggccctgggtctacacagctccca

SEQ ID NO: 5627618 - DNA, 25 bp, Homo sapien
tatgagaacaaaactgggactaatt

SEQ ID NO: 5627619 - DNA, 25 bp, Homo sapien
gggaaacaaatcaaggcgtctcatt

SEQ ID NO: 5627620 - DNA, 25 bp, Homo sapien
gatggtaaactcttggaatagggaa

SEQ ID NO: 5627621 - DNA, 25 bp, Homo sapien
aagggcatggctaaatccagatggt

SEQ ID NO: 5627622 - DNA, 25 bp, Homo sapien
aagtgctcaccaaactgacccgctt

SEQ ID NO: 5627623 - DNA, 25 bp, Homo sapien
tgaacagagatgactagtgatttaa

SEQ ID NO: 5627624 - DNA, 25 bp, Homo sapien
tggccaggcacactgtggcttgtgc

SEQ ID NO: 5627625 - DNA, 25 bp, Homo sapien
ttcatgaaattggtggggtcattac

SEQ ID NO: 5627626 - DNA, 25 bp, Homo sapien
tgggaagaaacataccaatccagat

SEQ ID NO: 5627627 - DNA, 25 bp, Homo sapien
gagtatcagatcactgcccaggctg

SEQ ID NO: 5627628 - DNA, 25 bp, Homo sapien
agtatataaatcagagtatcagatc

SEQ ID NO: 5627629 - DNA, 25 bp, Homo sapien
taggccttaaagacataactgggaa

SEQ ID NO: 5627630 - DNA, 25 bp, Homo sapien
gacataactgggaagaaacatacca

SEQ ID NO: 5627631 - DNA, 25 bp, Homo sapien
aatccagattggccgaattctttaa

SEQ ID NO: 5627632 - DNA, 25 bp, Homo sapien
tccccgctcaagctccaaaggcagg

SEQ ID NO: 5627633 - DNA, 25 bp, Homo sapien
cccaggctgatgcagcactcaggtt

SEQ ID NO: 5627634 - DNA, 25 bp, Homo sapien
ctcctccctgtccctttccccgctc

SEQ ID NO: 5627635 - DNA, 25 bp, Homo sapien
atccctaggggacttgtgtattatt

SEQ ID NO: 5627636 - DNA, 25 bp, Homo sapien
tttcattacaagatccctaggggac

SEQ ID NO: 5627637 - DNA, 25 bp, Homo sapien
acaagagatcagtcattacaatagc

SEQ ID NO: 5627638 - DNA, 25 bp, Homo sapien
ggctccgtttggctgcctgtttact

SEQ ID NO: 5627639 - DNA, 25 bp, Homo sapien
gttgagaacatagcaaaagcagctc

SEQ ID NO: 5627640 - DNA, 25 bp, Homo sapien
actccacccaggaacctagtcggca

SEQ ID NO: 5627641 - DNA, 25 bp, Homo sapien
ctaaacgtttcagaagccggaagaa

SEQ ID NO: 5627642 - DNA, 25 bp, Homo sapien
aattcttgctgtctcacgagcctcc

SEQ ID NO: 5627643 - DNA, 25 bp, Homo sapien
tccttgcggcctccaagtgccggtg

SEQ ID NO: 5627644 - DNA, 25 bp, Homo sapien
tatgttgccctggcttgtctccaat

SEQ ID NO: 5627645 - DNA, 25 bp, Homo sapien
gtctcacgagcctcccatcttggcc

SEQ ID NO: 5627646 - DNA, 25 bp, Homo sapien
cacttcgggttccctttcagcccac

SEQ ID NO: 5627647 - DNA, 25 bp, Homo sapien
aacttctgttgataagttggagacg

SEQ ID NO: 5627648 - DNA, 25 bp, Homo sapien
atggttagtgtctaaaatggccaag

SEQ ID NO: 5627649 - DNA, 25 bp, Homo sapien
ggttgctccagatggttagtgtcta

SEQ ID NO: 5627650 - DNA, 25 bp, Homo sapien
tcattcacacagcagcattttttca

SEQ ID NO: 5627651 - DNA, 25 bp, Homo sapien
gttttaccatctggagcaacacgat

SEQ ID NO: 5627652 - DNA, 25 bp, Homo sapien
acatggttgctccagatggttagtg

SEQ ID NO: 5627653 - DNA, 25 bp, Homo sapien
aatgtgtaatactaaatacatgctt

SEQ ID NO: 5627654 - DNA, 25 bp, Homo sapien
ttttacacttctggaaaaaagagca

SEQ ID NO: 5627655 - DNA, 25 bp, Homo sapien
atctggagcaacacgatgtatactc

SEQ ID NO: 5627656 - DNA, 25 bp, Homo sapien
agtgctttactttacgtgctgaaac

SEQ ID NO: 5627657 - DNA, 25 bp, Homo sapien
taccatctggagcaacacgatgtat

SEQ ID NO: 5627658 - DNA, 25 bp, Homo sapien
atcctgctcctaagcctgggcaaca

SEQ ID NO: 5627659 - DNA, 25 bp, Homo sapien
acagaacatctgaatagcctatatt

SEQ ID NO: 5627660 - DNA, 25 bp, Homo sapien
cttaaagtggccatgtatgcaaggg

SEQ ID NO: 5627661 - DNA, 25 bp, Homo sapien
caaatcttaaagtggccatgtatgc

SEQ ID NO: 5627662 - DNA, 25 bp, Homo sapien
gaataagcaatggaataacaaatct

SEQ ID NO: 5627663 - DNA, 25 bp, Homo sapien
agacaaagataaagtaggcaaatat

SEQ ID NO: 5627664 - DNA, 25 bp, Homo sapien
gaatcttcctacagaataagcaatg

SEQ ID NO: 5627665 - DNA, 25 bp, Homo sapien
aagaaacacatcaacagatgcagga

SEQ ID NO: 5627666 - DNA, 25 bp, Homo sapien
caggtcatgttcttgtacttggcga

SEQ ID NO: 5627667 - DNA, 25 bp, Homo sapien
cttgtacttggcgaaaggtttgtag

SEQ ID NO: 5627668 - DNA, 25 bp, Homo sapien
tttaccattatgagatgaaacaatc

SEQ ID NO: 5627669 - DNA, 25 bp, Homo sapien
ctcaaattaccaaaacggacaaaca

SEQ ID NO: 5627670 - DNA, 25 bp, Homo sapien
gctagaggccatgactgaatatgct

SEQ ID NO: 5627671 - DNA, 25 bp, Homo sapien
ggagtctgtgcattgtgagtttctc

SEQ ID NO: 5627672 - DNA, 25 bp, Homo sapien
taaccaaaccagagtaaaagcatac

SEQ ID NO: 5627673 - DNA, 25 bp, Homo sapien
aatgcccatctacccgctagaggcc

SEQ ID NO: 5627674 - DNA, 25 bp, Homo sapien
agaacttagcagaattggccagggt

SEQ ID NO: 5627675 - DNA, 25 bp, Homo sapien
catggaaaatctacagtcacctggc

SEQ ID NO: 5627676 - DNA, 25 bp, Homo sapien
acttgggaatacttacactaggatc

SEQ ID NO: 5627677 - DNA, 25 bp, Homo sapien
tgtaagttatcaatggcccaatgcc

SEQ ID NO: 5627678 - DNA, 25 bp, Homo sapien
ttcatgcagcaagtagtgtataccc

SEQ ID NO: 5627679 - DNA, 25 bp, Homo sapien
ctggcttatgtaaacttgggaatac

SEQ ID NO: 5627680 - DNA, 25 bp, Homo sapien
tctcacgccagaaaagacctttgtc

SEQ ID NO: 5627681 - DNA, 25 bp, Homo sapien
cccaacttcgcagaagcagcttcat

SEQ ID NO: 5627682 - DNA, 25 bp, Homo sapien
atctgtccccaccctcggggccagc

SEQ ID NO: 5627683 - DNA, 25 bp, Homo sapien
cgcggctgctaaaactggtgcgcgg

SEQ ID NO: 5627684 - DNA, 25 bp, Homo sapien
gcttcatcggccccccgctagagac

SEQ ID NO: 5627685 - DNA, 25 bp, Homo sapien
gcctcggggatctgtccccaccctc

SEQ ID NO: 5627686 - DNA, 25 bp, Homo sapien
tctgcttgacagctgcaggtcttgg

SEQ ID NO: 5627687 - DNA, 25 bp, Homo sapien
ccgaactctgctgcttcgccccggc

SEQ ID NO: 5627688 - DNA, 25 bp, Homo sapien
tccttccgcggctgctaaaactggt

SEQ ID NO: 5627689 - DNA, 25 bp, Homo sapien
tctgctgcttcgccccggcaagagc

SEQ ID NO: 5627690 - DNA, 25 bp, Homo sapien
gtgcgcgggttcccaacttcgcaga

SEQ ID NO: 5627691 - DNA, 25 bp, Homo sapien
cggcaagagcacttccttccgcggc

SEQ ID NO: 5627692 - DNA, 25 bp, Homo sapien
tctgtaaggacagcaaaatacatct

SEQ ID NO: 5627693 - DNA, 25 bp, Homo sapien
taaattctcgaggactaatggatcc

SEQ ID NO: 5627694 - DNA, 25 bp, Homo sapien
tctcgaggactaatggatccgcatg

SEQ ID NO: 5627695 - DNA, 25 bp, Homo sapien
cgaggactaatggatccgcatgtga

SEQ ID NO: 5627696 - DNA, 25 bp, Homo sapien
taaggacagcaaaatacatctatat

SEQ ID NO: 5627697 - DNA, 25 bp, Homo sapien
tacatctatataggttcactgttaa

SEQ ID NO: 5627698 - DNA, 25 bp, Homo sapien
aaggtacttcttacactgcatgttc

SEQ ID NO: 5627699 - DNA, 25 bp, Homo sapien
ctgagactacataagcatgccacca

SEQ ID NO: 5627700 - DNA, 25 bp, Homo sapien
cactgttaaattctcgaggactaat

SEQ ID NO: 5627701 - DNA, 25 bp, Homo sapien
aaaacactaaagacattaagcattt

SEQ ID NO: 5627702 - DNA, 25 bp, Homo sapien
acactgcatgttctgtaaggacagc

SEQ ID NO: 5627703 - DNA, 25 bp, Homo sapien
taatgttaggtgtgtagaatgtgta

SEQ ID NO: 5627704 - DNA, 25 bp, Homo sapien
ctggaagaacttagagatttggagc

SEQ ID NO: 5627705 - DNA, 25 bp, Homo sapien
tgggaggaaatttagagctcatttt

SEQ ID NO: 5627706 - DNA, 25 bp, Homo sapien
cagtgatctttggtaaaagtcaagc

SEQ ID NO: 5627707 - DNA, 25 bp, Homo sapien
cctaacattaggactgggccttcca

SEQ ID NO: 5627708 - DNA, 25 bp, Homo sapien
tgactggggctctgtattgtaaaat

SEQ ID NO: 5627709 - DNA, 25 bp, Homo sapien
tttcacaggccaattcattaaagcc

SEQ ID NO: 5627710 - DNA, 25 bp, Homo sapien
tcccatgtatgaaattgagattgtg

SEQ ID NO: 5627711 - DNA, 25 bp, Homo sapien
ttggagcaatcttgagttttgagtg

SEQ ID NO: 5627712 - DNA, 25 bp, Homo sapien
aattgagattgtggaattgactggg

SEQ ID NO: 5627713 - DNA, 25 bp, Homo sapien
ggtgtgtagaatgtgtaacagcctc

SEQ ID NO: 5627714 - DNA, 25 bp, Homo sapien
ctgggcatcattcatgggaaactgc

SEQ ID NO: 5627715 - DNA, 25 bp, Homo sapien
acgctctttcagtcaggtgttcccc

SEQ ID NO: 5627716 - DNA, 25 bp, Homo sapien
ccacagtaggccccgggcacatttt

SEQ ID NO: 5627717 - DNA, 25 bp, Homo sapien
ctagggcgatccacgtcattgagaa

SEQ ID NO: 5627718 - DNA, 25 bp, Homo sapien
agtaaggaacatgactgagatctac

SEQ ID NO: 5627719 - DNA, 25 bp, Homo sapien
ggaaactgcactgcgtaagcaggcc

SEQ ID NO: 5627720 - DNA, 25 bp, Homo sapien
cattcaggtcctagtgcagtttctt

SEQ ID NO: 5627721 - DNA, 25 bp, Homo sapien
tcattgagaaacggcgttaggctga

SEQ ID NO: 5627722 - DNA, 25 bp, Homo sapien
tttgctgtcaccagggccatcttgc

SEQ ID NO: 5627723 - DNA, 25 bp, Homo sapien
acattttcagctgcgaagcggagga

SEQ ID NO: 5627724 - DNA, 25 bp, Homo sapien
aacgcatggttgcaaaacgtgctgt

SEQ ID NO: 5627725 - DNA, 25 bp, Homo sapien
aaaaattggaggcattatttcttac

SEQ ID NO: 5627726 - DNA, 25 bp, Homo sapien
gtatgtacagtaaggcagtaattcc

SEQ ID NO: 5627727 - DNA, 25 bp, Homo sapien
aaaacatcctaaagggattcacatg

SEQ ID NO: 5627728 - DNA, 25 bp, Homo sapien
ccattagcatcctgctgtggttttc

SEQ ID NO: 5627729 - DNA, 25 bp, Homo sapien
ttagggggaaaatccatgcttaaca

SEQ ID NO: 5627730 - DNA, 25 bp, Homo sapien
acagtaaggcagtaattccattagc

SEQ ID NO: 5627731 - DNA, 25 bp, Homo sapien
atcctaaagggattcacatgaaatt

SEQ ID NO: 5627732 - DNA, 25 bp, Homo sapien
cttatgggtttatattaaagtagaa

SEQ ID NO: 5627733 - DNA, 25 bp, Homo sapien
tttgtatgtacagtaaggcagtaat

SEQ ID NO: 5627734 - DNA, 25 bp, Homo sapien
taaggcagtaattccattagcatcc

SEQ ID NO: 5627735 - DNA, 25 bp, Homo sapien
aaagactaaggtgtataataaatta

SEQ ID NO: 5627736 - DNA, 25 bp, Homo sapien
aatagctagcccatgtcagtttttc

SEQ ID NO: 5627737 - DNA, 25 bp, Homo sapien
gaaggaataagtaactcgatgagtg

SEQ ID NO: 5627738 - DNA, 25 bp, Homo sapien
cagtccactaataaattgttgcccc

SEQ ID NO: 5627739 - DNA, 25 bp, Homo sapien
attataagcaaattgggagaataca

SEQ ID NO: 5627740 - DNA, 25 bp, Homo sapien
ataccttgttcaaggatgggttttc

SEQ ID NO: 5627741 - DNA, 25 bp, Homo sapien
tccacttggggataaaatacaggta

SEQ ID NO: 5627742 - DNA, 25 bp, Homo sapien
ataagcaaattgggagaatacaaat

SEQ ID NO: 5627743 - DNA, 25 bp, Homo sapien
tcgatgagtgaataaatagctagcc

SEQ ID NO: 5627744 - DNA, 25 bp, Homo sapien
aaatattgtgaaagagatgcaatct

SEQ ID NO: 5627745 - DNA, 25 bp, Homo sapien
ttacgaaggaataagtaactcgatg

SEQ ID NO: 5627746 - DNA, 25 bp, Homo sapien
tccaggttttagggactcaatccca

SEQ ID NO: 5627747 - DNA, 25 bp, Homo sapien
actcttcgtctgttcacggtgttaa

SEQ ID NO: 5627748 - DNA, 25 bp, Homo sapien
ttaacaccgtgaacagacgaagagt

SEQ ID NO: 5627749 - DNA, 25 bp, Homo sapien
aagaaacctataggcccgatagagc

SEQ ID NO: 5627750 - DNA, 25 bp, Homo sapien
ctggtatttactaggtggattttta

SEQ ID NO: 5627751 - DNA, 25 bp, Homo sapien
aggatgttggaaagaatcagatatt

SEQ ID NO: 5627752 - DNA, 25 bp, Homo sapien
tggagctgttagggttaaatttcaa

SEQ ID NO: 5627753 - DNA, 25 bp, Homo sapien
gagcagctgagacactgacctaact

SEQ ID NO: 5627754 - DNA, 25 bp, Homo sapien
aatgagaagctctaagctgttcagc

SEQ ID NO: 5627755 - DNA, 25 bp, Homo sapien
cttagtggcagcttcttaaacatgc

SEQ ID NO: 5627756 - DNA, 25 bp, Homo sapien
atgaaaccaaaggcatcagttctga

SEQ ID NO: 5627757 - DNA, 25 bp, Homo sapien
aagccataaaccaaataaaacagac

SEQ ID NO: 5627758 - DNA, 25 bp, Homo sapien
aaaacagacaagagtggagctgtta

SEQ ID NO: 5627759 - DNA, 25 bp, Homo sapien
ttatagttaggatgttggaaagaat

SEQ ID NO: 5627760 - DNA, 25 bp, Homo sapien
ggtttcacgccgtcgtgagtcggac

SEQ ID NO: 5627761 - DNA, 25 bp, Homo sapien
gtccgactcacgacggcgtgaaacc

SEQ ID NO: 5627762 - DNA, 25 bp, Homo sapien
ttccttggtgttcatggtggtgttc

SEQ ID NO: 5627763 - DNA, 25 bp, Homo sapien
ttccagctattgcataggattcttc

SEQ ID NO: 5627764 - DNA, 25 bp, Homo sapien
ccttgaattaacaccagaatgtatt

SEQ ID NO: 5627765 - DNA, 25 bp, Homo sapien
cgcattgcccaggttggtcttgaac

SEQ ID NO: 5627766 - DNA, 25 bp, Homo sapien
tagatatacttgcatgtttggtttt

SEQ ID NO: 5627767 - DNA, 25 bp, Homo sapien
ttccctctcctgcagttccgtttcc

SEQ ID NO: 5627768 - DNA, 25 bp, Homo sapien
cgtgatccaccacacctggcccaga

SEQ ID NO: 5627769 - DNA, 25 bp, Homo sapien
catggtggtgttcaaactgagattt

SEQ ID NO: 5627770 - DNA, 25 bp, Homo sapien
ttccctataaatccctgcaccccat

SEQ ID NO: 5627771 - DNA, 25 bp, Homo sapien
tcctgtcttggcctcccgagtgctg

SEQ ID NO: 5627772 - DNA, 25 bp, Homo sapien
agggtttcaccgcattgcccaggtt

SEQ ID NO: 5627773 - DNA, 25 bp, Homo sapien
caggcagtaaaacaggttatttaat

SEQ ID NO: 5627774 - DNA, 25 bp, Homo sapien
gagatgtgggtgaaatatgatcatg

SEQ ID NO: 5627775 - DNA, 25 bp, Homo sapien
gaaatatgatcatgagaaagctttt

SEQ ID NO: 5627776 - DNA, 25 bp, Homo sapien
aaaaggactagccttaggagtcact

SEQ ID NO: 5627777 - DNA, 25 bp, Homo sapien
agtttcttcaaggtgagatgtgggt

SEQ ID NO: 5627778 - DNA, 25 bp, Homo sapien
tccacaagtgaaaaggtaagtctac

SEQ ID NO: 5627779 - DNA, 25 bp, Homo sapien
aaagtagataacatcagacacagtg

SEQ ID NO: 5627780 - DNA, 25 bp, Homo sapien
gccttaggagtcactaaaatgagac

SEQ ID NO: 5627781 - DNA, 25 bp, Homo sapien
agacacagtgataacataataactc

SEQ ID NO: 5627782 - DNA, 25 bp, Homo sapien
ttaatgtggaatgtacaggcagtaa

SEQ ID NO: 5627783 - DNA, 25 bp, Homo sapien
aaatgctatgtcagaaaaagttgtt

SEQ ID NO: 5627784 - DNA, 25 bp, Homo sapien
gcattccatcaaactacataagcac

SEQ ID NO: 5627785 - DNA, 25 bp, Homo sapien
agatgaaaacttatcgaagacactc

SEQ ID NO: 5627786 - DNA, 25 bp, Homo sapien
taaaattgctgccaaataaacactg

SEQ ID NO: 5627787 - DNA, 25 bp, Homo sapien
ttaacaatatagatgaaaacttatc

SEQ ID NO: 5627788 - DNA, 25 bp, Homo sapien
gctgagtttagattatgttcctgat

SEQ ID NO: 5627789 - DNA, 25 bp, Homo sapien
tgaaagaggatcctcaggaacggta

SEQ ID NO: 5627790 - DNA, 25 bp, Homo sapien
aagcaggcaaaagatgcaaaccttg

SEQ ID NO: 5627791 - DNA, 25 bp, Homo sapien
aaaagatgcaaaccttgaacaatcc

SEQ ID NO: 5627792 - DNA, 25 bp, Homo sapien
acataagcactagcaatcatctacc

SEQ ID NO: 5627793 - DNA, 25 bp, Homo sapien
cagaagagagattggaaaactgtat

SEQ ID NO: 5627794 - DNA, 25 bp, Homo sapien
tatcattcagaagagagattggaaa

SEQ ID NO: 5627795 - DNA, 25 bp, Homo sapien
ctgtgctgcctaacatggtagtcac

SEQ ID NO: 5627796 - DNA, 25 bp, Homo sapien
aaagctgtgctgcctaacatggtag

SEQ ID NO: 5627797 - DNA, 25 bp, Homo sapien
ctaacatggtagtcacagatcacac

SEQ ID NO: 5627798 - DNA, 25 bp, Homo sapien
tcacgtaactgttctctcacaatgc

SEQ ID NO: 5627799 - DNA, 25 bp, Homo sapien
tcaaccccatgagctctatgcttcc

SEQ ID NO: 5627800 - DNA, 25 bp, Homo sapien
ctgactggctcaaccccatgagctc

SEQ ID NO: 5627801 - DNA, 25 bp, Homo sapien
tggtagtcacagatcacacatggct

SEQ ID NO: 5627802 - DNA, 25 bp, Homo sapien
ctgtattgggtagcacagatataga

SEQ ID NO: 5627803 - DNA, 25 bp, Homo sapien
caatagctatatgcagcaagacact

SEQ ID NO: 5627804 - DNA, 25 bp, Homo sapien
agatcacacatggctattgaaattt

SEQ ID NO: 5627805 - DNA, 25 bp, Homo sapien
ttaaaaatgcgattctgactggctc

SEQ ID NO: 5627806 - DNA, 25 bp, Homo sapien
tgttccaattttagtacaggtgctt

SEQ ID NO: 5627807 - DNA, 25 bp, Homo sapien
attaaagtctcccacaattgtattc

SEQ ID NO: 5627808 - DNA, 25 bp, Homo sapien
tttagaaaccaggatctggacacca

SEQ ID NO: 5627809 - DNA, 25 bp, Homo sapien
ttataaaagatggccaaatacatac

SEQ ID NO: 5627810 - DNA, 25 bp, Homo sapien
agtacaggtgcttttgaagtgggca

SEQ ID NO: 5627811 - DNA, 25 bp, Homo sapien
tgctttactaattcgtgtgtcatcc

SEQ ID NO: 5627812 - DNA, 25 bp, Homo sapien
aaccaggatctggacaccatttctc

SEQ ID NO: 5627813 - DNA, 25 bp, Homo sapien
tgcagtggcactatcctggcccact

SEQ ID NO: 5627814 - DNA, 25 bp, Homo sapien
atcacaaccccagaatcagccattt

SEQ ID NO: 5627815 - DNA, 25 bp, Homo sapien
aggtgcttttgaagtgggcactctt

SEQ ID NO: 5627816 - DNA, 25 bp, Homo sapien
tcgtgtgtcatccatgctaatcatc

SEQ ID NO: 5627817 - DNA, 25 bp, Homo sapien
gtcccactctgggtcaggaatggtc

SEQ ID NO: 5627818 - DNA, 25 bp, Homo sapien
ctggccagtatgtgaagtagatgcc

SEQ ID NO: 5627819 - DNA, 25 bp, Homo sapien
atggtcacaaagattcagaatggcc

SEQ ID NO: 5627820 - DNA, 25 bp, Homo sapien
ctctgatggtggccatttgagaggg

SEQ ID NO: 5627821 - DNA, 25 bp, Homo sapien
gatgagccctggtgacatgtctttg

SEQ ID NO: 5627822 - DNA, 25 bp, Homo sapien
gaatggcctagatgtttgcacggga

SEQ ID NO: 5627823 - DNA, 25 bp, Homo sapien
gcacgggaacaagcatatcacacat

SEQ ID NO: 5627824 - DNA, 25 bp, Homo sapien
atggtctgtaggtgcccaactgctt

SEQ ID NO: 5627825 - DNA, 25 bp, Homo sapien
agggctggcaagtcagtccattata

SEQ ID NO: 5627826 - DNA, 25 bp, Homo sapien
gtgccttgcgattgctaggtcccac

SEQ ID NO: 5627827 - DNA, 25 bp, Homo sapien
cacaacagtgggaatggtccaatta

SEQ ID NO: 5627828 - DNA, 25 bp, Homo sapien
gctggcatggaaagatgtccaagat

SEQ ID NO: 5627829 - DNA, 25 bp, Homo sapien
ggtaatatgtgataaggcaaagaac

SEQ ID NO: 5627830 - DNA, 25 bp, Homo sapien
atgaaggaattctccacaagctggc

SEQ ID NO: 5627831 - DNA, 25 bp, Homo sapien
ctccacaagctggcatggaaagatg

SEQ ID NO: 5627832 - DNA, 25 bp, Homo sapien
aggcaaagaacactttccatagtaa

SEQ ID NO: 5627833 - DNA, 25 bp, Homo sapien
gcaaaaagaatgaaggaattctcca

SEQ ID NO: 5627834 - DNA, 25 bp, Homo sapien
ctctcattagtgcaaagcctgaaag

SEQ ID NO: 5627835 - DNA, 25 bp, Homo sapien
tttctccttttagagtcagggcctc

SEQ ID NO: 5627836 - DNA, 25 bp, Homo sapien
tttatgagtgtgtatttcttcgctt

SEQ ID NO: 5627837 - DNA, 25 bp, Homo sapien
tttgcaccagcaagcccatttcaca

SEQ ID NO: 5627838 - DNA, 25 bp, Homo sapien
tctattggcatgctctgtagctggc

SEQ ID NO: 5627839 - DNA, 25 bp, Homo sapien
tccatcttttgcaagcaggagcctt

SEQ ID NO: 5627840 - DNA, 25 bp, Homo sapien
gccaagtctcaggtaagacacagct

SEQ ID NO: 5627841 - DNA, 25 bp, Homo sapien
aaaattttggacatacagaaaagtg

SEQ ID NO: 5627842 - DNA, 25 bp, Homo sapien
tgcaagcaggagccttttcatgttg

SEQ ID NO: 5627843 - DNA, 25 bp, Homo sapien
tcctataaagatgattactgagttt

SEQ ID NO: 5627844 - DNA, 25 bp, Homo sapien
cttgtggatgttcaaactgtccatc

SEQ ID NO: 5627845 - DNA, 25 bp, Homo sapien
aaaatgagtctgttcccaagtatcc

SEQ ID NO: 5627846 - DNA, 25 bp, Homo sapien
gatgcagttagcgtccttgtggatg

SEQ ID NO: 5627847 - DNA, 25 bp, Homo sapien
ttgagttctgacatggccctagtaa

SEQ ID NO: 5627848 - DNA, 25 bp, Homo sapien
agtggaaatactataatgaaccgcc

SEQ ID NO: 5627849 - DNA, 25 bp, Homo sapien
cacagctacctccaggaagcatttt

SEQ ID NO: 5627850 - DNA, 25 bp, Homo sapien
tagttcgggcttctctcttgcgttc

SEQ ID NO: 5627851 - DNA, 25 bp, Homo sapien
catgtctgcctgttaaaggccttcc

SEQ ID NO: 5627852 - DNA, 25 bp, Homo sapien
gctgcagctgctattaccacttcta

SEQ ID NO: 5627853 - DNA, 25 bp, Homo sapien
ttagaatgcccagcctcaccatgtc

SEQ ID NO: 5627854 - DNA, 25 bp, Homo sapien
agatctgtgatctggcctcttcagt

SEQ ID NO: 5627855 - DNA, 25 bp, Homo sapien
gtgtcctgagtaaagaccaaacttc

SEQ ID NO: 5627856 - DNA, 25 bp, Homo sapien
cagatagattatattccagccaacc

SEQ ID NO: 5627857 - DNA, 25 bp, Homo sapien
tccatgtgatccctgaagtaggaaa

SEQ ID NO: 5627858 - DNA, 25 bp, Homo sapien
atagtctgtgtcatggtaaagttat

SEQ ID NO: 5627859 - DNA, 25 bp, Homo sapien
tctgagtctgcttacctggtcctgt

SEQ ID NO: 5627860 - DNA, 25 bp, Homo sapien
ttctggcagtgataatctgtgttat

SEQ ID NO: 5627861 - DNA, 25 bp, Homo sapien
cctgtcaagaataagaagccgaaca

SEQ ID NO: 5627862 - DNA, 25 bp, Homo sapien
taagaatagaaagacctcgaagctg

SEQ ID NO: 5627863 - DNA, 25 bp, Homo sapien
gcggcaagataaggcctgtcaagaa

SEQ ID NO: 5627864 - DNA, 25 bp, Homo sapien
cctatcaaggacctgccctctcatc

SEQ ID NO: 5627865 - DNA, 25 bp, Homo sapien
agacaggagcatgcaccataactat

SEQ ID NO: 5627866 - DNA, 25 bp, Homo sapien
cacagcccctgatctgaatgaattc

SEQ ID NO: 5627867 - DNA, 25 bp, Homo sapien
atcaaaacctaggataaagatcacc

SEQ ID NO: 5627868 - DNA, 25 bp, Homo sapien
gaatgaattcatactagagggagag

SEQ ID NO: 5627869 - DNA, 25 bp, Homo sapien
tgacatcaatcatgagttcaccctc

SEQ ID NO: 5627870 - DNA, 25 bp, Homo sapien
ttatgaagtgcttacaagggcaagg

SEQ ID NO: 5627871 - DNA, 25 bp, Homo sapien
ggagagattcattctggttgctgat

SEQ ID NO: 5627872 - DNA, 25 bp, Homo sapien
tcaagttcagctttgatggggtagc

SEQ ID NO: 5627873 - DNA, 25 bp, Homo sapien
atggacttgagaggctgctattaat

SEQ ID NO: 5627874 - DNA, 25 bp, Homo sapien
aagtaataatgctgtgcagggtctt

SEQ ID NO: 5627875 - DNA, 25 bp, Homo sapien
gcaataagtggaacatatggtatac

SEQ ID NO: 5627876 - DNA, 25 bp, Homo sapien
catgagtccttgagagttgaagctt

SEQ ID NO: 5627877 - DNA, 25 bp, Homo sapien
ttgatggggtagctgtatttataaa

SEQ ID NO: 5627878 - DNA, 25 bp, Homo sapien
caccatgaccacaatgaactttcac

SEQ ID NO: 5627879 - DNA, 25 bp, Homo sapien
atgaggcctcaatggacttgagagg

SEQ ID NO: 5627880 - DNA, 25 bp, Homo sapien
ggcacgtgttcaagccatctgaaga

SEQ ID NO: 5627881 - DNA, 25 bp, Homo sapien
aaatgggaattttacatgaggcctc

SEQ ID NO: 5627882 - DNA, 25 bp, Homo sapien
gttagatactataatggcacgtgtt

SEQ ID NO: 5627883 - DNA, 25 bp, Homo sapien
ctgactacatcatggattccggtcc

SEQ ID NO: 5627884 - DNA, 25 bp, Homo sapien
tcctccaggtgctcttatgaagatc

SEQ ID NO: 5627885 - DNA, 25 bp, Homo sapien
gaggagaaccttgcatacaacccct

SEQ ID NO: 5627886 - DNA, 25 bp, Homo sapien
ttaatatgatggtcaagacatgaat

SEQ ID NO: 5627887 - DNA, 25 bp, Homo sapien
gttactggacacgggtcatttcttc

SEQ ID NO: 5627888 - DNA, 25 bp, Homo sapien
tccggtccagaacttccagattgtc

SEQ ID NO: 5627889 - DNA, 25 bp, Homo sapien
atacaccacacactcgaggcctggg

SEQ ID NO: 5627890 - DNA, 25 bp, Homo sapien
tgaagatcaaatgaggtattgatgt

SEQ ID NO: 5627891 - DNA, 25 bp, Homo sapien
taaagagagagaaacttaccaaata

SEQ ID NO: 5627892 - DNA, 25 bp, Homo sapien
gcatatgagaattatctaaggttcc

SEQ ID NO: 5627893 - DNA, 25 bp, Homo sapien
ctcaggggaaacttcctaccggctg

SEQ ID NO: 5627894 - DNA, 25 bp, Homo sapien
ccgtgccctggtactttttatattg

SEQ ID NO: 5627895 - DNA, 25 bp, Homo sapien
tcttttttgaaggccgcgaacatgt

SEQ ID NO: 5627896 - DNA, 25 bp, Homo sapien
gccgggcctgacttcgacttctctt

SEQ ID NO: 5627897 - DNA, 25 bp, Homo sapien
attcaactggtatttgtcaaccctt

SEQ ID NO: 5627898 - DNA, 25 bp, Homo sapien
attaggggagacttttgattattgt

SEQ ID NO: 5627899 - DNA, 25 bp, Homo sapien
aaaatatagtggagaaatatgggag

SEQ ID NO: 5627900 - DNA, 25 bp, Homo sapien
aattcaggcctgactgtgataatta

SEQ ID NO: 5627901 - DNA, 25 bp, Homo sapien
aatatgggaggcttccacttgaaac

SEQ ID NO: 5627902 - DNA, 25 bp, Homo sapien
gtcctatactttgagagtttgtgtt

SEQ ID NO: 5627903 - DNA, 25 bp, Homo sapien
tgaaggccgcgaacatgttttactt

SEQ ID NO: 5627904 - DNA, 25 bp, Homo sapien
actgtgataattaggggagactttt

SEQ ID NO: 5627905 - DNA, 25 bp, Homo sapien
gcgaatatgaagtcagagaggtttg

SEQ ID NO: 5627906 - DNA, 25 bp, Homo sapien
aacctggaagaaccctcgcccagat

SEQ ID NO: 5627907 - DNA, 25 bp, Homo sapien
ttaaataggagtgaatgcttgcatt

SEQ ID NO: 5627908 - DNA, 25 bp, Homo sapien
tcgcccagatttaaataggagtgaa

SEQ ID NO: 5627909 - DNA, 25 bp, Homo sapien
tcttgataattgcgaatatgaagtc

SEQ ID NO: 5627910 - DNA, 25 bp, Homo sapien
agaggtttggaaagacgatgctttc

SEQ ID NO: 5627911 - DNA, 25 bp, Homo sapien
attgggtatcatgttcttagtggaa

SEQ ID NO: 5627912 - DNA, 25 bp, Homo sapien
tgacaatagaagtccacaggcagca

SEQ ID NO: 5627913 - DNA, 25 bp, Homo sapien
acaggcagcaccacaacacattatg

SEQ ID NO: 5627914 - DNA, 25 bp, Homo sapien
gatatctaagaatgggcatcctctt

SEQ ID NO: 5627915 - DNA, 25 bp, Homo sapien
ttcttagtggaatgagaaaaacctg

SEQ ID NO: 5627916 - DNA, 25 bp, Homo sapien
caggatcctctgggaatgtactacc

SEQ ID NO: 5627917 - DNA, 25 bp, Homo sapien
atgtagaaacatgcagaaaagtgac

SEQ ID NO: 5627918 - DNA, 25 bp, Homo sapien
gacagacagcgtaagagatttcata

SEQ ID NO: 5627919 - DNA, 25 bp, Homo sapien
gctaatgtataggcagattagggac

SEQ ID NO: 5627920 - DNA, 25 bp, Homo sapien
cagtctgtgccctgggtgttagagg

SEQ ID NO: 5627921 - DNA, 25 bp, Homo sapien
cctgttatgttggacagaagcatgg

SEQ ID NO: 5627922 - DNA, 25 bp, Homo sapien
gaataagttggatgttcaaggttgt

SEQ ID NO: 5627923 - DNA, 25 bp, Homo sapien
ctgggtgttagaggacctatgtttg

SEQ ID NO: 5627924 - DNA, 25 bp, Homo sapien
tctgcagagggtaaatactcgatag

SEQ ID NO: 5627925 - DNA, 25 bp, Homo sapien
aaagctaccacaggctgttagtacc

SEQ ID NO: 5627926 - DNA, 25 bp, Homo sapien
atgatataacacatgaggaaacatc

SEQ ID NO: 5627927 - DNA, 25 bp, Homo sapien
tttatactcatagggaaagccagct

SEQ ID NO: 5627928 - DNA, 25 bp, Homo sapien
ctaacctcagagatatatttctaaa

SEQ ID NO: 5627929 - DNA, 25 bp, Homo sapien
ttagggattctctggtctttggacc

SEQ ID NO: 5627930 - DNA, 25 bp, Homo sapien
atgcatgaatcaacattctaacctc

SEQ ID NO: 5627931 - DNA, 25 bp, Homo sapien
aaactgtcttcctacttagggattc

SEQ ID NO: 5627932 - DNA, 25 bp, Homo sapien
tcaaaacagaagttatcactgatac

SEQ ID NO: 5627933 - DNA, 25 bp, Homo sapien
ggaaagccagctggaatatgcatga

SEQ ID NO: 5627934 - DNA, 25 bp, Homo sapien
aacgactgtgttcatgaaagttgat

SEQ ID NO: 5627935 - DNA, 25 bp, Homo sapien
tcactgatacttggttcagctgaac

SEQ ID NO: 5627936 - DNA, 25 bp, Homo sapien
ttggttcagctgaacgactgtgttc

SEQ ID NO: 5627937 - DNA, 25 bp, Homo sapien
aaattcaaaacagaagttatcactg

SEQ ID NO: 5627938 - DNA, 25 bp, Homo sapien
cttggaatacaacttacatttgggc

SEQ ID NO: 5627939 - DNA, 25 bp, Homo sapien
atgatgatttaaaagcaactgtgat

SEQ ID NO: 5627940 - DNA, 25 bp, Homo sapien
taaaagcaactgtgataagtgctat

SEQ ID NO: 5627941 - DNA, 25 bp, Homo sapien
tgctcaaagttaaccagtaaaagag

SEQ ID NO: 5627942 - DNA, 25 bp, Homo sapien
ttctgtgcccccaaatataagtgac

SEQ ID NO: 5627943 - DNA, 25 bp, Homo sapien
aagtctagggtgttagtagaacaat

SEQ ID NO: 5627944 - DNA, 25 bp, Homo sapien
acagtgaacatgacaagctcagggt

SEQ ID NO: 5627945 - DNA, 25 bp, Homo sapien
caagatgatgaagtctagggtgtta

SEQ ID NO: 5627946 - DNA, 25 bp, Homo sapien
aagtgctataacaagatgatgaagt

SEQ ID NO: 5627947 - DNA, 25 bp, Homo sapien
tataagtgacctgctcaaagttaac

SEQ ID NO: 5627948 - DNA, 25 bp, Homo sapien
agtagaacaattaacagtgaacatg

SEQ ID NO: 5627949 - DNA, 25 bp, Homo sapien
taaatacaggcaaacctctcaaaac

SEQ ID NO: 5627950 - DNA, 25 bp, Homo sapien
taaaaagttagaatcctaatgccat

SEQ ID NO: 5627951 - DNA, 25 bp, Homo sapien
tagaatcctaatgccatactgtatt

SEQ ID NO: 5627952 - DNA, 25 bp, Homo sapien
attgtcactacaaatgaagaagaaa

SEQ ID NO: 5627953 - DNA, 25 bp, Homo sapien
acaggcaaacctctcaaaacactgc

SEQ ID NO: 5627954 - DNA, 25 bp, Homo sapien
agaaatagtgctctggttaattatc

SEQ ID NO: 5627955 - DNA, 25 bp, Homo sapien
aatggcatattaagaaatagtgctc

SEQ ID NO: 5627956 - DNA, 25 bp, Homo sapien
ccatagcaagctctcaataataatc

SEQ ID NO: 5627957 - DNA, 25 bp, Homo sapien
atatcatgattaggaaagatacatg

SEQ ID NO: 5627958 - DNA, 25 bp, Homo sapien
acactgctttgcccatagcaagctc

SEQ ID NO: 5627959 - DNA, 25 bp, Homo sapien
taaagacataaatgagcaatgtact

SEQ ID NO: 5627960 - DNA, 25 bp, Homo sapien
taagatcctgcaggaacgtaaggga

SEQ ID NO: 5627961 - DNA, 25 bp, Homo sapien
gagaaaggcagataaaaactatctc

SEQ ID NO: 5627962 - DNA, 25 bp, Homo sapien
tctaaatgtgaaattgcaagtcgtt

SEQ ID NO: 5627963 - DNA, 25 bp, Homo sapien
ctaagggaactcactgttaagagaa

SEQ ID NO: 5627964 - DNA, 25 bp, Homo sapien
agttacctggcttgagaaatgggaa

SEQ ID NO: 5627965 - DNA, 25 bp, Homo sapien
cattactctgagggaggtgttagtg

SEQ ID NO: 5627966 - DNA, 25 bp, Homo sapien
gataaacattaggaacataagatcc

SEQ ID NO: 5627967 - DNA, 25 bp, Homo sapien
tatttagtagcaatgagtacctttc

SEQ ID NO: 5627968 - DNA, 25 bp, Homo sapien
tcctcttcagtgtggggttataaac

SEQ ID NO: 5627969 - DNA, 25 bp, Homo sapien
ggaaaatgaagctcttgtcagttac

SEQ ID NO: 5627970 - DNA, 25 bp, Homo sapien
atagtaaacagacccatagcacatc

SEQ ID NO: 5627971 - DNA, 25 bp, Homo sapien
tgtatcacagtgtttagcagcctgc

SEQ ID NO: 5627972 - DNA, 25 bp, Homo sapien
tccttagcaaggtgcataggtcttc

SEQ ID NO: 5627973 - DNA, 25 bp, Homo sapien
cacaaactgaatggaattgagctct

SEQ ID NO: 5627974 - DNA, 25 bp, Homo sapien
cctagattcggaacctctctgggct

SEQ ID NO: 5627975 - DNA, 25 bp, Homo sapien
aacagccgacagaatggtcatccta

SEQ ID NO: 5627976 - DNA, 25 bp, Homo sapien
gaagcaatgcaaaggatttcctaac

SEQ ID NO: 5627977 - DNA, 25 bp, Homo sapien
tggaattgagctctggaatctagac

SEQ ID NO: 5627978 - DNA, 25 bp, Homo sapien
tatggtaaatgtcagtaaatgttcc

SEQ ID NO: 5627979 - DNA, 25 bp, Homo sapien
ggtgcataggtcttcaatgggctcc

SEQ ID NO: 5627980 - DNA, 25 bp, Homo sapien
agcagcctgctatatggtaaatgtc

SEQ ID NO: 5627981 - DNA, 25 bp, Homo sapien
actgttgctggaacaagttcaacgc

SEQ ID NO: 5627982 - DNA, 25 bp, Homo sapien
aatgaacaataaagatccactataa

SEQ ID NO: 5627983 - DNA, 25 bp, Homo sapien
ataatccctagcacaggtttcatac

SEQ ID NO: 5627984 - DNA, 25 bp, Homo sapien
ctgggactaaaggcatgcatcacca

SEQ ID NO: 5627985 - DNA, 25 bp, Homo sapien
cctcactacagcctcgacctcccag

SEQ ID NO: 5627986 - DNA, 25 bp, Homo sapien
ttcaatgcagtcataatttgtatcc

SEQ ID NO: 5627987 - DNA, 25 bp, Homo sapien
aataaagagaactaaatgctaaacc

SEQ ID NO: 5627988 - DNA, 25 bp, Homo sapien
ccatgctcagcttcaaagtgctatt

SEQ ID NO: 5627989 - DNA, 25 bp, Homo sapien
caggctcaagtagtcctcccatctc

SEQ ID NO: 5627990 - DNA, 25 bp, Homo sapien
ataagagctcctagatcaaatattt

SEQ ID NO: 5627991 - DNA, 25 bp, Homo sapien
agtggtgcaatcatgcctcactaca

SEQ ID NO: 5627992 - DNA, 25 bp, Homo sapien
tatggcattttagataagagctcct

SEQ ID NO: 5627993 - DNA, 25 bp, Homo sapien
cttgttccgccgccccagcgatacg

SEQ ID NO: 5627994 - DNA, 25 bp, Homo sapien
gtctgggaagattccggcttcaact

SEQ ID NO: 5627995 - DNA, 25 bp, Homo sapien
cacgttccgcccattgttcttcatc

SEQ ID NO: 5627996 - DNA, 25 bp, Homo sapien
cggcacttgcctttgcgggtagaga

SEQ ID NO: 5627997 - DNA, 25 bp, Homo sapien
ttccggcttcaactctgggactgag

SEQ ID NO: 5627998 - DNA, 25 bp, Homo sapien
ttgtatgtggtcttgttccgccgcc

SEQ ID NO: 5627999 - DNA, 25 bp, Homo sapien
caaggaagacactttgtatgtggtc

SEQ ID NO: 5628000 - DNA, 25 bp, Homo sapien
catcttcaccaccatgcgccgcacg

SEQ ID NO: 5628001 - DNA, 25 bp, Homo sapien
tgggaagaccactaccacgttccgc

SEQ ID NO: 5628002 - DNA, 25 bp, Homo sapien
ctgctgctcaaggaagacactttgt

SEQ ID NO: 5628003 - DNA, 25 bp, Homo sapien
gccgcacgccccggcacttgccttt

SEQ ID NO: 5628004 - DNA, 25 bp, Homo sapien
ctctaggagggcagccatttctcta

SEQ ID NO: 5628005 - DNA, 25 bp, Homo sapien
ctttaggcgtttcaccaagaggctg

SEQ ID NO: 5628006 - DNA, 25 bp, Homo sapien
tagtaacaatgcaccagtagaacac

SEQ ID NO: 5628007 - DNA, 25 bp, Homo sapien
catacgaaatgggcaactccgtttc

SEQ ID NO: 5628008 - DNA, 25 bp, Homo sapien
tgtaaaagttaagactaggatttca

SEQ ID NO: 5628009 - DNA, 25 bp, Homo sapien
gttgatgaagcatacgaaatgggca

SEQ ID NO: 5628010 - DNA, 25 bp, Homo sapien
aaatgcaagcagatgttgatgaagc

SEQ ID NO: 5628011 - DNA, 25 bp, Homo sapien
agcgactccgactttgtgccccaac

SEQ ID NO: 5628012 - DNA, 25 bp, Homo sapien
ggggcagcacactttaggcgtttca

SEQ ID NO: 5628013 - DNA, 25 bp, Homo sapien
gtttctatttcggagccgcagcgac

SEQ ID NO: 5628014 - DNA, 25 bp, Homo sapien
atatgaagtagataaaaactggttt

SEQ ID NO: 5628015 - DNA, 25 bp, Homo sapien
cagagctatgctgtctccgcgcaga

SEQ ID NO: 5628016 - DNA, 25 bp, Homo sapien
gaatgtgatacacagtcctcatgtg

SEQ ID NO: 5628017 - DNA, 25 bp, Homo sapien
aacattacgtcgacaaaacaatcgg

SEQ ID NO: 5628018 - DNA, 25 bp, Homo sapien
actaatgccagctaccagctgctat

SEQ ID NO: 5628019 - DNA, 25 bp, Homo sapien
atattagtgaaatctgataagtatt

SEQ ID NO: 5628020 - DNA, 25 bp, Homo sapien
gtggccacaccacgtcaaacgtccc

SEQ ID NO: 5628021 - DNA, 25 bp, Homo sapien
gtctccgcgcagacattctcataga

SEQ ID NO: 5628022 - DNA, 25 bp, Homo sapien
acttgaaaacgtaaagtggccacac

SEQ ID NO: 5628023 - DNA, 25 bp, Homo sapien
gggttcaaaatgccaggttacatac

SEQ ID NO: 5628024 - DNA, 25 bp, Homo sapien
tttccaaattgatgtcagagtgcct

SEQ ID NO: 5628025 - DNA, 25 bp, Homo sapien
aaaatgttggcattcagtagtggta

SEQ ID NO: 5628026 - DNA, 25 bp, Homo sapien
acgcccgaggtttttgtactgtgac

SEQ ID NO: 5628027 - DNA, 25 bp, Homo sapien
gagcccagatggtcctaggactcct

SEQ ID NO: 5628028 - DNA, 25 bp, Homo sapien
ctgcctgtaccactacgcccgaggt

SEQ ID NO: 5628029 - DNA, 25 bp, Homo sapien
accaatacctggtatgggcaaggac

SEQ ID NO: 5628030 - DNA, 25 bp, Homo sapien
atagaaggacccagactaactccag

SEQ ID NO: 5628031 - DNA, 25 bp, Homo sapien
aaaacccagcgttcaaggaatgtga

SEQ ID NO: 5628032 - DNA, 25 bp, Homo sapien
gggacagtctgccaagctgctcacg

SEQ ID NO: 5628033 - DNA, 25 bp, Homo sapien
aggaaaatggtgagctaagaccttt

SEQ ID NO: 5628034 - DNA, 25 bp, Homo sapien
tcaacatgagagtgtaaaacccagc

SEQ ID NO: 5628035 - DNA, 25 bp, Homo sapien
tgagaagctgctacatgcaagattc

SEQ ID NO: 5628036 - DNA, 25 bp, Homo sapien
gtactgtgacactgagggacagtct

SEQ ID NO: 5628037 - DNA, 25 bp, Homo sapien
gaagagaggagccattttggtattc

SEQ ID NO: 5628038 - DNA, 25 bp, Homo sapien
atttcgacagcttagtctgtggtcc

SEQ ID NO: 5628039 - DNA, 25 bp, Homo sapien
ttttgcatttgaaattgtccaattt

SEQ ID NO: 5628040 - DNA, 25 bp, Homo sapien
tatgacatgtatattggataatttg

SEQ ID NO: 5628041 - DNA, 25 bp, Homo sapien
aaatcagcgttaatttcgacagctt

SEQ ID NO: 5628042 - DNA, 25 bp, Homo sapien
agcttagtctgtggtcctgaaaatt

SEQ ID NO: 5628043 - DNA, 25 bp, Homo sapien
tagtctgtggtcctgaaaattatag

SEQ ID NO: 5628044 - DNA, 25 bp, Homo sapien
tctggccctaaaaaaatcagcgtta

SEQ ID NO: 5628045 - DNA, 25 bp, Homo sapien
tcgacagcttagtctgtggtcctga

SEQ ID NO: 5628046 - DNA, 25 bp, Homo sapien
tggtattctggccctaaaaaaatca

SEQ ID NO: 5628047 - DNA, 25 bp, Homo sapien
tacttaggattcacatagatcatac

SEQ ID NO: 5628048 - DNA, 25 bp, Homo sapien
cagtggtgcaatcatagttcatcac

SEQ ID NO: 5628049 - DNA, 25 bp, Homo sapien
catcttgccatcccaaagcgctagg

SEQ ID NO: 5628050 - DNA, 25 bp, Homo sapien
aactcctagactcaagtgatccatc

SEQ ID NO: 5628051 - DNA, 25 bp, Homo sapien
agagaacaggaaatgaagaattgtt

SEQ ID NO: 5628052 - DNA, 25 bp, Homo sapien
gtgatccatcttgccatcccaaagc

SEQ ID NO: 5628053 - DNA, 25 bp, Homo sapien
tgccatcccaaagcgctaggattac

SEQ ID NO: 5628054 - DNA, 25 bp, Homo sapien
gggtgtgcaccatgttcagctgttt

SEQ ID NO: 5628055 - DNA, 25 bp, Homo sapien
ttgaggcaaaaaataaacagaaata

SEQ ID NO: 5628056 - DNA, 25 bp, Homo sapien
atcacagcctcaaactcctagactc

SEQ ID NO: 5628057 - DNA, 25 bp, Homo sapien
tgcaatcatagttcatcacagcctc

SEQ ID NO: 5628058 - DNA, 25 bp, Homo sapien
caggtaatacggaaaactagagaac

SEQ ID NO: 5628059 - DNA, 25 bp, Homo sapien
aaaggaggataatgtcagatgcttt

SEQ ID NO: 5628060 - DNA, 25 bp, Homo sapien
tagggtgagcttcaaaatggtgaat

SEQ ID NO: 5628061 - DNA, 25 bp, Homo sapien
attttcatagtctagggtgagcttc

SEQ ID NO: 5628062 - DNA, 25 bp, Homo sapien
tattaactaaaaaggtgcatctcac

SEQ ID NO: 5628063 - DNA, 25 bp, Homo sapien
aaatatgcatctagaagtgaactaa

SEQ ID NO: 5628064 - DNA, 25 bp, Homo sapien
tgataaatgaaatgactacgtcctc

SEQ ID NO: 5628065 - DNA, 25 bp, Homo sapien
tctaagaaatcaagaactgggcact

SEQ ID NO: 5628066 - DNA, 25 bp, Homo sapien
gcagtgagaaacacggcttcatcag

SEQ ID NO: 5628067 - DNA, 25 bp, Homo sapien
tcatcagaatcccggtccttgccac

SEQ ID NO: 5628068 - DNA, 25 bp, Homo sapien
aaggaagatagatactgatcacttc

SEQ ID NO: 5628069 - DNA, 25 bp, Homo sapien
gagatgcatgctatgacaaggaaga

SEQ ID NO: 5628070 - DNA, 25 bp, Homo sapien
aatggtaccttctgggcacctgctc

SEQ ID NO: 5628071 - DNA, 25 bp, Homo sapien
aggagaaaacatttacctaccgctg

SEQ ID NO: 5628072 - DNA, 25 bp, Homo sapien
atggcatgaaaccttaagcaccgta

SEQ ID NO: 5628073 - DNA, 25 bp, Homo sapien
cttacagataagcatggcatgaaac

SEQ ID NO: 5628074 - DNA, 25 bp, Homo sapien
gctcagaaccaggaattcttgcacc

SEQ ID NO: 5628075 - DNA, 25 bp, Homo sapien
ctagcaaacgagagcccattgtttt

SEQ ID NO: 5628076 - DNA, 25 bp, Homo sapien
caacctccttgcagacttcagccca

SEQ ID NO: 5628077 - DNA, 25 bp, Homo sapien
aaatattccctagcaaacgagagcc

SEQ ID NO: 5628078 - DNA, 25 bp, Homo sapien
acaaggtttgacaaagggatacaat

SEQ ID NO: 5628079 - DNA, 25 bp, Homo sapien
ctggatcatggcacctaatggtacc

SEQ ID NO: 5628080 - DNA, 25 bp, Homo sapien
tatagaagcagactccactgttgat

SEQ ID NO: 5628081 - DNA, 25 bp, Homo sapien
acgtacagagacagcctcaagctaa

SEQ ID NO: 5628082 - DNA, 25 bp, Homo sapien
ggctatagctatgcaggctgccttg

SEQ ID NO: 5628083 - DNA, 25 bp, Homo sapien
atgattggccagtagccccctgttc

SEQ ID NO: 5628084 - DNA, 25 bp, Homo sapien
gcctggtataatgagttggttgccc

SEQ ID NO: 5628085 - DNA, 25 bp, Homo sapien
ggaactcaacgtacagagacagcct

SEQ ID NO: 5628086 - DNA, 25 bp, Homo sapien
atttaagagcagtatgcaaactttt

SEQ ID NO: 5628087 - DNA, 25 bp, Homo sapien
gcctcaagctaatggcctcttgctt

SEQ ID NO: 5628088 - DNA, 25 bp, Homo sapien
gtggagaaactgattggctatagct

SEQ ID NO: 5628089 - DNA, 25 bp, Homo sapien
tccattgttaggtgggaactcaacg

SEQ ID NO: 5628090 - DNA, 25 bp, Homo sapien
taggccctgtgcgtatgccacctct

SEQ ID NO: 5628091 - DNA, 25 bp, Homo sapien
tggttgcccatgattggccagtagc

SEQ ID NO: 5628092 - DNA, 25 bp, Homo sapien
taatcagggctgtatgccacctaac

SEQ ID NO: 5628093 - DNA, 25 bp, Homo sapien
ttttgattgagggtttacagaggta

SEQ ID NO: 5628094 - DNA, 25 bp, Homo sapien
gctgtatgccacctaacagagtgcc

SEQ ID NO: 5628095 - DNA, 25 bp, Homo sapien
ttttaatgctggatgttttgagggg

SEQ ID NO: 5628096 - DNA, 25 bp, Homo sapien
taatatgcaatctgtaaaaaaggta

SEQ ID NO: 5628097 - DNA, 25 bp, Homo sapien
cactttaaactaaaagctcccaata

SEQ ID NO: 5628098 - DNA, 25 bp, Homo sapien
aggggccagtaggtatcactttaaa

SEQ ID NO: 5628099 - DNA, 25 bp, Homo sapien
aaacatgtctaagttcagtgctgtt

SEQ ID NO: 5628100 - DNA, 25 bp, Homo sapien
tgcaatctgtaaaaaaggtactagg

SEQ ID NO: 5628101 - DNA, 25 bp, Homo sapien
tcagttctggctaaatgaaaattct

SEQ ID NO: 5628102 - DNA, 25 bp, Homo sapien
agtgctgtttttaatcagggctgta

SEQ ID NO: 5628103 - DNA, 25 bp, Homo sapien
ttagactctgggaacctatcgcttt

SEQ ID NO: 5628104 - DNA, 25 bp, Homo sapien
ggcatgagtaggaattagatcctgc

SEQ ID NO: 5628105 - DNA, 25 bp, Homo sapien
gagggatgtataataaaagagttgg

SEQ ID NO: 5628106 - DNA, 25 bp, Homo sapien
aagttgggaccaagtacattgtata

SEQ ID NO: 5628107 - DNA, 25 bp, Homo sapien
agctcccaggagttggtagagcttc

SEQ ID NO: 5628108 - DNA, 25 bp, Homo sapien
aagagttgggcaaaattccactggg

SEQ ID NO: 5628109 - DNA, 25 bp, Homo sapien
ttccactgggcttcaatgatcaacc

SEQ ID NO: 5628110 - DNA, 25 bp, Homo sapien
tggttcaagggagaccagctccttg

SEQ ID NO: 5628111 - DNA, 25 bp, Homo sapien
tataaccaagcaaaattccccacat

SEQ ID NO: 5628112 - DNA, 25 bp, Homo sapien
cctggcttgctctggcatgagtagg

SEQ ID NO: 5628113 - DNA, 25 bp, Homo sapien
ctgacatcacaatcaagttgggacc

SEQ ID NO: 5628114 - DNA, 25 bp, Homo sapien
tggggctcaggtttccagaaactta

SEQ ID NO: 5628115 - DNA, 25 bp, Homo sapien
gttcagataaatccttgcagctgtt

SEQ ID NO: 5628116 - DNA, 25 bp, Homo sapien
ccagaaacttagatggctcctcctc

SEQ ID NO: 5628117 - DNA, 25 bp, Homo sapien
tgcacggcgttccagaagtctctgg

SEQ ID NO: 5628118 - DNA, 25 bp, Homo sapien
ctttctcaaaggttcagataaatcc

SEQ ID NO: 5628119 - DNA, 25 bp, Homo sapien
accttcctggttgtggcttgctggg

SEQ ID NO: 5628120 - DNA, 25 bp, Homo sapien
aggccttgcacggcgttccagaagt

SEQ ID NO: 5628121 - DNA, 25 bp, Homo sapien
gggagccctcattgtgcctggctct

SEQ ID NO: 5628122 - DNA, 25 bp, Homo sapien
acactttggtgacatagtgatgagg

SEQ ID NO: 5628123 - DNA, 25 bp, Homo sapien
cctgcaccttcctggttgtggcttg

SEQ ID NO: 5628124 - DNA, 25 bp, Homo sapien
cctcattgtgcctggctctccctgg

SEQ ID NO: 5628125 - DNA, 25 bp, Homo sapien
catgggcaattaacggtacttcaga

SEQ ID NO: 5628126 - DNA, 25 bp, Homo sapien
aactgaaaaagatctcttaaggatt

SEQ ID NO: 5628127 - DNA, 25 bp, Homo sapien
atatatacgatgatacatgtcaata

SEQ ID NO: 5628128 - DNA, 25 bp, Homo sapien
tgcccatgttatgtcagagtaatta

SEQ ID NO: 5628129 - DNA, 25 bp, Homo sapien
aaagccaaattcttgcctgtctgca

SEQ ID NO: 5628130 - DNA, 25 bp, Homo sapien
aaataaactacagattgctcagttc

SEQ ID NO: 5628131 - DNA, 25 bp, Homo sapien
atataaggcccacatatgatgtttt

SEQ ID NO: 5628132 - DNA, 25 bp, Homo sapien
tatgtaatcctagtatgagtcacca

SEQ ID NO: 5628133 - DNA, 25 bp, Homo sapien
tgtctgcaagttgaaacacatgggc

SEQ ID NO: 5628134 - DNA, 25 bp, Homo sapien
gcaacacacttccagacctaaagcc

SEQ ID NO: 5628135 - DNA, 25 bp, Homo sapien
gaaacacatgggcaattaacggtac

SEQ ID NO: 5628136 - DNA, 25 bp, Homo sapien
cgttggcgccaagtccagttacttt

SEQ ID NO: 5628137 - DNA, 25 bp, Homo sapien
ccagccacttgcaacgcgtgatgtc

SEQ ID NO: 5628138 - DNA, 25 bp, Homo sapien
aaatggtcagtgttcagtctgtaac

SEQ ID NO: 5628139 - DNA, 25 bp, Homo sapien
ctgatcatagttagcccgttggcgc

SEQ ID NO: 5628140 - DNA, 25 bp, Homo sapien
tggggagactgcatcaggtcttaaa

SEQ ID NO: 5628141 - DNA, 25 bp, Homo sapien
gattataaattagggatgaaaacaa

SEQ ID NO: 5628142 - DNA, 25 bp, Homo sapien
cagtaacctagaaaaccctggaggc

SEQ ID NO: 5628143 - DNA, 25 bp, Homo sapien
agggggagtaactgcttttattagc

SEQ ID NO: 5628144 - DNA, 25 bp, Homo sapien
tttattagctccagaaaatggtcag

SEQ ID NO: 5628145 - DNA, 25 bp, Homo sapien
aaacaattgggggcctcttggatta

SEQ ID NO: 5628146 - DNA, 25 bp, Homo sapien
tcaggtcttaaataggatgaggggg

SEQ ID NO: 5628147 - DNA, 25 bp, Homo sapien
tttcaaagcacggaacaacacaaag

SEQ ID NO: 5628148 - DNA, 25 bp, Homo sapien
ttggattctgtttcccggacgttgc

SEQ ID NO: 5628149 - DNA, 25 bp, Homo sapien
gggagcagcaaattttgcagcgacc

SEQ ID NO: 5628150 - DNA, 25 bp, Homo sapien
acattcggcacaaaaatagcgcgtt

SEQ ID NO: 5628151 - DNA, 25 bp, Homo sapien
cttttgcgctcagatggataagaag

SEQ ID NO: 5628152 - DNA, 25 bp, Homo sapien
tccttgtcgtattgggagcagcaaa

SEQ ID NO: 5628153 - DNA, 25 bp, Homo sapien
tgtagaagatggtgaaagaatttct

SEQ ID NO: 5628154 - DNA, 25 bp, Homo sapien
gtcttccagacagacgaagaggtgt

SEQ ID NO: 5628155 - DNA, 25 bp, Homo sapien
actgtaatgtgtagaagatggtgaa

SEQ ID NO: 5628156 - DNA, 25 bp, Homo sapien
ccggacgttgctggtatgctcttgg

SEQ ID NO: 5628157 - DNA, 25 bp, Homo sapien
acaaagcggaacatcacattcggca

SEQ ID NO: 5628158 - DNA, 25 bp, Homo sapien
aatagaactggtagaataaaaacac

SEQ ID NO: 5628159 - DNA, 25 bp, Homo sapien
atggacacttagaaatgttgacacc

SEQ ID NO: 5628160 - DNA, 25 bp, Homo sapien
ttcgatccctaggggtctgcaactc

SEQ ID NO: 5628161 - DNA, 25 bp, Homo sapien
gctaaagactcctaggcaggccatg

SEQ ID NO: 5628162 - DNA, 25 bp, Homo sapien
aagtgaaacaggaatacatagagat

SEQ ID NO: 5628163 - DNA, 25 bp, Homo sapien
tgttgacaccacagtacagtaagaa

SEQ ID NO: 5628164 - DNA, 25 bp, Homo sapien
attagatcaggtaaatgagtgttct

SEQ ID NO: 5628165 - DNA, 25 bp, Homo sapien
aggcccaaagaagtcctatggacac

SEQ ID NO: 5628166 - DNA, 25 bp, Homo sapien
gagaaaaactgcacaacatagcgac

SEQ ID NO: 5628167 - DNA, 25 bp, Homo sapien
gagtgttctgaactgctttggtgtc

SEQ ID NO: 5628168 - DNA, 25 bp, Homo sapien
cagtaagaaataagcagcaataccc

SEQ ID NO: 5628169 - DNA, 25 bp, Homo sapien
tggagacaacctggtcatgataacc

SEQ ID NO: 5628170 - DNA, 25 bp, Homo sapien
ctctttagtacagtctggggccctg

SEQ ID NO: 5628171 - DNA, 25 bp, Homo sapien
tgaaacacgcatatctagaaacact

SEQ ID NO: 5628172 - DNA, 25 bp, Homo sapien
aagacactccctgcccatcaccctg

SEQ ID NO: 5628173 - DNA, 25 bp, Homo sapien
gacttctcagaagagacaggcagaa

SEQ ID NO: 5628174 - DNA, 25 bp, Homo sapien
accagcctcgctatgaaacactata

SEQ ID NO: 5628175 - DNA, 25 bp, Homo sapien
taaatcatctcgtgggcacagaggg

SEQ ID NO: 5628176 - DNA, 25 bp, Homo sapien
atcgctgagcgctcagatgcccact

SEQ ID NO: 5628177 - DNA, 25 bp, Homo sapien
aggcagaaggaggtttctccatcgc

SEQ ID NO: 5628178 - DNA, 25 bp, Homo sapien
caggctcaggcatggtcataccttg

SEQ ID NO: 5628179 - DNA, 25 bp, Homo sapien
gccaagcagagatttaagacactcc

SEQ ID NO: 5628180 - DNA, 25 bp, Homo sapien
gggtcgccccgtgggcgacgtcgag

SEQ ID NO: 5628181 - DNA, 25 bp, Homo sapien
ctcgacgtcgcccacggggcgaccc

SEQ ID NO: 5628182 - DNA, 25 bp, Homo sapien
accgatagtcttatgtcccaggaaa

SEQ ID NO: 5628183 - DNA, 25 bp, Homo sapien
tcccaggaaagccctgtcttggcaa

SEQ ID NO: 5628184 - DNA, 25 bp, Homo sapien
tctcccagttttagcaccgatagtc

SEQ ID NO: 5628185 - DNA, 25 bp, Homo sapien
gtcttggcaaataagggcagtttgt

SEQ ID NO: 5628186 - DNA, 25 bp, Homo sapien
agtggattttaagaggacttgctac

SEQ ID NO: 5628187 - DNA, 25 bp, Homo sapien
ttgttagacatctggagtgaccaac

SEQ ID NO: 5628188 - DNA, 25 bp, Homo sapien
aacaatgcatcaatgtgacagctac

SEQ ID NO: 5628189 - DNA, 25 bp, Homo sapien
atctggagtgaccaactgtcctgat

SEQ ID NO: 5628190 - DNA, 25 bp, Homo sapien
cagtttgttgccctgctgctagctc

SEQ ID NO: 5628191 - DNA, 25 bp, Homo sapien
agctctaggtttggacttcaggtct

SEQ ID NO: 5628192 - DNA, 25 bp, Homo sapien
aggtctgtattgctgaagtgtctaa

SEQ ID NO: 5628193 - DNA, 25 bp, Homo sapien
cctccacctccaagcgcttggaagc

SEQ ID NO: 5628194 - DNA, 25 bp, Homo sapien
cctccaagcgcttggaagcggcttt

SEQ ID NO: 5628195 - DNA, 25 bp, Homo sapien
tcctcctcgtcgcccctgggctgct

SEQ ID NO: 5628196 - DNA, 25 bp, Homo sapien
cggggccgccctttgcctcaagtac

SEQ ID NO: 5628197 - DNA, 25 bp, Homo sapien
gctttccgctccacgcccccgggca

SEQ ID NO: 5628198 - DNA, 25 bp, Homo sapien
cgggctgctagtaggttcagccggc

SEQ ID NO: 5628199 - DNA, 25 bp, Homo sapien
agcgcttggaagcggctttccgctc

SEQ ID NO: 5628200 - DNA, 25 bp, Homo sapien
cccgggctgctagtaggttcagccg

SEQ ID NO: 5628201 - DNA, 25 bp, Homo sapien
ggctgctagtaggttcagccggcgt

SEQ ID NO: 5628202 - DNA, 25 bp, Homo sapien
ccacctccaagcgcttggaagcggc

SEQ ID NO: 5628203 - DNA, 25 bp, Homo sapien
ctcgtcgcccctgggctgcttcgag

SEQ ID NO: 5628204 - DNA, 25 bp, Homo sapien
cacctttcccggccatagttaatag

SEQ ID NO: 5628205 - DNA, 25 bp, Homo sapien
tgcttatggtgagcaatttggattt

SEQ ID NO: 5628206 - DNA, 25 bp, Homo sapien
gtaactgtgccttgcttatggtgag

SEQ ID NO: 5628207 - DNA, 25 bp, Homo sapien
aaagttgggatagtttatgggttca

SEQ ID NO: 5628208 - DNA, 25 bp, Homo sapien
aaagtgtagtcttatggagatggag

SEQ ID NO: 5628209 - DNA, 25 bp, Homo sapien
ccttagtacaacacaaaggcagcca

SEQ ID NO: 5628210 - DNA, 25 bp, Homo sapien
ggattttttgaatgaaagtgtagtc

SEQ ID NO: 5628211 - DNA, 25 bp, Homo sapien
gttcatttggggcagtaacttactc

SEQ ID NO: 5628212 - DNA, 25 bp, Homo sapien
caagatagttattggcccctaaacc

SEQ ID NO: 5628213 - DNA, 25 bp, Homo sapien
aacctggccttacctcaagatagtt

SEQ ID NO: 5628214 - DNA, 25 bp, Homo sapien
tccattggaccaagagttcatttgg

SEQ ID NO: 5628215 - DNA, 25 bp, Homo sapien
ccataggaaaacagatgaaagactt

SEQ ID NO: 5628216 - DNA, 25 bp, Homo sapien
tccaaggctaggtcctaagaagctt

SEQ ID NO: 5628217 - DNA, 25 bp, Homo sapien
ccatgcttagcttgggtttctgggg

SEQ ID NO: 5628218 - DNA, 25 bp, Homo sapien
gatgtaattgacagactgaattaac

SEQ ID NO: 5628219 - DNA, 25 bp, Homo sapien
gaataatggtgtgatatgatagtct

SEQ ID NO: 5628220 - DNA, 25 bp, Homo sapien
ccatacttagggttacaagaaggca

SEQ ID NO: 5628221 - DNA, 25 bp, Homo sapien
tgatagtcttcaagatgatgccctc

SEQ ID NO: 5628222 - DNA, 25 bp, Homo sapien
atctgtgctggtcacaatgacttgc

SEQ ID NO: 5628223 - DNA, 25 bp, Homo sapien
aagaagctttgtagtatttgcctgt

SEQ ID NO: 5628224 - DNA, 25 bp, Homo sapien
gaattaacctcagtcatcacatgtg

SEQ ID NO: 5628225 - DNA, 25 bp, Homo sapien
ttagggttacaagaaggcaattata

SEQ ID NO: 5628226 - DNA, 25 bp, Homo sapien
agctgcagagatcatggtaactgac

SEQ ID NO: 5628227 - DNA, 25 bp, Homo sapien
cccagaggaaggtaatatcagaatt

SEQ ID NO: 5628228 - DNA, 25 bp, Homo sapien
cctccacacctcaggcaggaagtga

SEQ ID NO: 5628229 - DNA, 25 bp, Homo sapien
attcaagatacccttgctgggggag

SEQ ID NO: 5628230 - DNA, 25 bp, Homo sapien
tagtggcttcctggtttctccctgc

SEQ ID NO: 5628231 - DNA, 25 bp, Homo sapien
acagatgcacgccccggcctcttga

SEQ ID NO: 5628232 - DNA, 25 bp, Homo sapien
tagtgacctccgcacccagcacaca

SEQ ID NO: 5628233 - DNA, 25 bp, Homo sapien
tatcagaattagtgacctccgcacc

SEQ ID NO: 5628234 - DNA, 25 bp, Homo sapien
actcagtcttctcagtgccacctcc

SEQ ID NO: 5628235 - DNA, 25 bp, Homo sapien
taagatctccagcacagatgcacgc

SEQ ID NO: 5628236 - DNA, 25 bp, Homo sapien
atggaggcatgtcgccagcattaag

SEQ ID NO: 5628237 - DNA, 25 bp, Homo sapien
cctgaatctctgaagtaaccacacc

SEQ ID NO: 5628238 - DNA, 25 bp, Homo sapien
acggtatttgtaatcatggcatgcc

SEQ ID NO: 5628239 - DNA, 25 bp, Homo sapien
ttatggcttaaaagagaaggaacag

SEQ ID NO: 5628240 - DNA, 25 bp, Homo sapien
cagaaagcccttaagtggacacatg

SEQ ID NO: 5628241 - DNA, 25 bp, Homo sapien
caagacactgactgagaaccttggc

SEQ ID NO: 5628242 - DNA, 25 bp, Homo sapien
ttggattgtcaattgggtcaaaata

SEQ ID NO: 5628243 - DNA, 25 bp, Homo sapien
agaaccttggccagacctgctcaca

SEQ ID NO: 5628244 - DNA, 25 bp, Homo sapien
gcatgccaaggattgcagagcaaaa

SEQ ID NO: 5628245 - DNA, 25 bp, Homo sapien
gctgaaagcatcttaaccaagacac

SEQ ID NO: 5628246 - DNA, 25 bp, Homo sapien
aaactcctagtacttgcagtgcaag

SEQ ID NO: 5628247 - DNA, 25 bp, Homo sapien
aagagaaagaacctgggtccttgat

SEQ ID NO: 5628248 - DNA, 25 bp, Homo sapien
ttttacttgatggcagaaatgatta

SEQ ID NO: 5628249 - DNA, 25 bp, Homo sapien
tttctgggaattctggaaacatctt

SEQ ID NO: 5628250 - DNA, 25 bp, Homo sapien
tgaaggatatcaatgttttaatgac

SEQ ID NO: 5628251 - DNA, 25 bp, Homo sapien
ttcctgacacatacacaagactact

SEQ ID NO: 5628252 - DNA, 25 bp, Homo sapien
tcagagaaacatacacatgcaaaaa

SEQ ID NO: 5628253 - DNA, 25 bp, Homo sapien
caggcaggtctctgactagtgagct

SEQ ID NO: 5628254 - DNA, 25 bp, Homo sapien
ccactcagagaaacatacacatgca

SEQ ID NO: 5628255 - DNA, 25 bp, Homo sapien
attcatcttggggaattctagtaac

SEQ ID NO: 5628256 - DNA, 25 bp, Homo sapien
tgatggcagaaatgattatgttgtt

SEQ ID NO: 5628257 - DNA, 25 bp, Homo sapien
tctctgactagtgagctcaagcaat

SEQ ID NO: 5628258 - DNA, 25 bp, Homo sapien
acacaagactactatctctccccac

SEQ ID NO: 5628259 - DNA, 25 bp, Homo sapien
agccaaaaggagaaacttacagggc

SEQ ID NO: 5628260 - DNA, 25 bp, Homo sapien
tagccaaaggatgtaaatcagaatc

SEQ ID NO: 5628261 - DNA, 25 bp, Homo sapien
gagttgataccacatggctcaaagc

SEQ ID NO: 5628262 - DNA, 25 bp, Homo sapien
cagggagcagctgtacttacgatga

SEQ ID NO: 5628263 - DNA, 25 bp, Homo sapien
ctggagtcaggatgctttgctctcg

SEQ ID NO: 5628264 - DNA, 25 bp, Homo sapien
ttcccagaggttgagttgataccac

SEQ ID NO: 5628265 - DNA, 25 bp, Homo sapien
atcagaatcagccaaaaggagaaac

SEQ ID NO: 5628266 - DNA, 25 bp, Homo sapien
aattgaatgattgcccatggttctt

SEQ ID NO: 5628267 - DNA, 25 bp, Homo sapien
gtgccccaacccctgagttattcag

SEQ ID NO: 5628268 - DNA, 25 bp, Homo sapien
ttacgatgacagtgttattatagcc

SEQ ID NO: 5628269 - DNA, 25 bp, Homo sapien
gctgaaggtgacgcttctttcgccc

SEQ ID NO: 5628270 - DNA, 25 bp, Homo sapien
aagggtgaagaatgagtcttacctg

SEQ ID NO: 5628271 - DNA, 25 bp, Homo sapien
ttcgttgcacttaaggattatagac

SEQ ID NO: 5628272 - DNA, 25 bp, Homo sapien
tgactgtggttcaagtttggcagac

SEQ ID NO: 5628273 - DNA, 25 bp, Homo sapien
tgatgtatacagatgggttacttat

SEQ ID NO: 5628274 - DNA, 25 bp, Homo sapien
atagaccacccacaataattccaca

SEQ ID NO: 5628275 - DNA, 25 bp, Homo sapien
actagtgcttagacatgactgtggt

SEQ ID NO: 5628276 - DNA, 25 bp, Homo sapien
gatgaggggaaacatatcaatcaca

SEQ ID NO: 5628277 - DNA, 25 bp, Homo sapien
tagataatgaacaagctcaagtctt

SEQ ID NO: 5628278 - DNA, 25 bp, Homo sapien
cagaaaggagatttctcaagggtga

SEQ ID NO: 5628279 - DNA, 25 bp, Homo sapien
cagggtacgctgttccaatggttaa

SEQ ID NO: 5628280 - DNA, 25 bp, Homo sapien
caaatgttacttacagggtacgctg

SEQ ID NO: 5628281 - DNA, 25 bp, Homo sapien
taatgaaacgtgccgctggcatgga

SEQ ID NO: 5628282 - DNA, 25 bp, Homo sapien
agtgttgctggctagactacctatt

SEQ ID NO: 5628283 - DNA, 25 bp, Homo sapien
ggtgggcaagctatcaaatgctcct

SEQ ID NO: 5628284 - DNA, 25 bp, Homo sapien
gggaaaccataatgaaacgtgccgc

SEQ ID NO: 5628285 - DNA, 25 bp, Homo sapien
gctatcaaatgctcctgggtgtgag

SEQ ID NO: 5628286 - DNA, 25 bp, Homo sapien
atttgctatgaggtttggatgtggg

SEQ ID NO: 5628287 - DNA, 25 bp, Homo sapien
gaggtttggatgtgggaaaccataa

SEQ ID NO: 5628288 - DNA, 25 bp, Homo sapien
tggatgtgggaaaccataatgaaac

SEQ ID NO: 5628289 - DNA, 25 bp, Homo sapien
gctacttcttgggccacgaggcttc

SEQ ID NO: 5628290 - DNA, 25 bp, Homo sapien
taatacttagtgttgctggctagac

SEQ ID NO: 5628291 - DNA, 25 bp, Homo sapien
ggggctacttcttgggccacgaggc

SEQ ID NO: 5628292 - DNA, 25 bp, Homo sapien
cttggcctcttaagggaagttggag

SEQ ID NO: 5628293 - DNA, 25 bp, Homo sapien
tgccaaggtgacagtttaacgaatg

SEQ ID NO: 5628294 - DNA, 25 bp, Homo sapien
agatggccactaaactgccaaggtg

SEQ ID NO: 5628295 - DNA, 25 bp, Homo sapien
agtccaggagccaagtttcccagta

SEQ ID NO: 5628296 - DNA, 25 bp, Homo sapien
aggtctccttcagggaagacagcat

SEQ ID NO: 5628297 - DNA, 25 bp, Homo sapien
agttggagtatggttaaaattaata

SEQ ID NO: 5628298 - DNA, 25 bp, Homo sapien
gtcagatcattgtgtagatggccac

SEQ ID NO: 5628299 - DNA, 25 bp, Homo sapien
aaaaaattggttataatggaggatc

SEQ ID NO: 5628300 - DNA, 25 bp, Homo sapien
tgactggactttaaaacttggcctc

SEQ ID NO: 5628301 - DNA, 25 bp, Homo sapien
acgaatgtggattaagtccaggagc

SEQ ID NO: 5628302 - DNA, 25 bp, Homo sapien
tagtactcagcctgggtcaccctaa

SEQ ID NO: 5628303 - DNA, 25 bp, Homo sapien
aaaatgagagaccaccattacattc

SEQ ID NO: 5628304 - DNA, 25 bp, Homo sapien
tactatgaacagagtatgggaaagc

SEQ ID NO: 5628305 - DNA, 25 bp, Homo sapien
agacttagttatccagcaagagctt

SEQ ID NO: 5628306 - DNA, 25 bp, Homo sapien
ttccactagactacaatgccacctc

SEQ ID NO: 5628307 - DNA, 25 bp, Homo sapien
agagcatgttcccaaagtgcaactt

SEQ ID NO: 5628308 - DNA, 25 bp, Homo sapien
ggtgtgaatgtctgatggttccgtc

SEQ ID NO: 5628309 - DNA, 25 bp, Homo sapien
cctccaacactgagaagatgatacc

SEQ ID NO: 5628310 - DNA, 25 bp, Homo sapien
aatggctcgatgtgagagcatgttc

SEQ ID NO: 5628311 - DNA, 25 bp, Homo sapien
gaccatccaatgaataaaggctcca

SEQ ID NO: 5628312 - DNA, 25 bp, Homo sapien
gacagatactactaagaaaaacagc

SEQ ID NO: 5628313 - DNA, 25 bp, Homo sapien
aaagcagaaaatggctcgatgtgag

SEQ ID NO: 5628314 - DNA, 25 bp, Homo sapien
gaggaggcgccctcccacctctact

SEQ ID NO: 5628315 - DNA, 25 bp, Homo sapien
ctgctcacccggccagtcatcctgg

SEQ ID NO: 5628316 - DNA, 25 bp, Homo sapien
gcgcctcaaaaagcagtcgtgcgag

SEQ ID NO: 5628317 - DNA, 25 bp, Homo sapien
tcccatcgttagctgtggaccccct

SEQ ID NO: 5628318 - DNA, 25 bp, Homo sapien
tacctcacgctgcacaagccggaag

SEQ ID NO: 5628319 - DNA, 25 bp, Homo sapien
cgaggcaccagcaacatgacctatg

SEQ ID NO: 5628320 - DNA, 25 bp, Homo sapien
gtcagaccctgctgagtcccatcgt

SEQ ID NO: 5628321 - DNA, 25 bp, Homo sapien
tacttccgctccctgccccgaggca

SEQ ID NO: 5628322 - DNA, 25 bp, Homo sapien
gatccctaatacaggaatcagcctc

SEQ ID NO: 5628323 - DNA, 25 bp, Homo sapien
gatgccataccccgagggaagatct

SEQ ID NO: 5628324 - DNA, 25 bp, Homo sapien
atgacctatgggaccttcaacttcc

SEQ ID NO: 5628325 - DNA, 25 bp, Homo sapien
aaatcacgcataaacaagccaaatt

SEQ ID NO: 5628326 - DNA, 25 bp, Homo sapien
ctggaacccaaataatatacatagc

SEQ ID NO: 5628327 - DNA, 25 bp, Homo sapien
gcagattagagagagataatgttgc

SEQ ID NO: 5628328 - DNA, 25 bp, Homo sapien
agcagcattacatttggacaattac

SEQ ID NO: 5628329 - DNA, 25 bp, Homo sapien
agtggcaacacaatctagggaatat

SEQ ID NO: 5628330 - DNA, 25 bp, Homo sapien
tgtatctacattcaaggagaggttg

SEQ ID NO: 5628331 - DNA, 25 bp, Homo sapien
cagaatcaatacagtggcaacacaa

SEQ ID NO: 5628332 - DNA, 25 bp, Homo sapien
tcgttcaaatgatctgaagccacat

SEQ ID NO: 5628333 - DNA, 25 bp, Homo sapien
gtaaggacactgagtgttttgagaa

SEQ ID NO: 5628334 - DNA, 25 bp, Homo sapien
attttagctgcagttgtaaggacac

SEQ ID NO: 5628335 - DNA, 25 bp, Homo sapien
tccattcagaattgactgcaaaacc

SEQ ID NO: 5628336 - DNA, 25 bp, Homo sapien
tgtgaaggagattatggactaatac

SEQ ID NO: 5628337 - DNA, 25 bp, Homo sapien
agtttccaaactcggctcacatctc

SEQ ID NO: 5628338 - DNA, 25 bp, Homo sapien
caaagatcaagcattaatagtgttc

SEQ ID NO: 5628339 - DNA, 25 bp, Homo sapien
ccaggtcactgaacaaagatcaagc

SEQ ID NO: 5628340 - DNA, 25 bp, Homo sapien
gtataggtagtcatcaccacggtat

SEQ ID NO: 5628341 - DNA, 25 bp, Homo sapien
tctaagtagagtggttcaaaaacat

SEQ ID NO: 5628342 - DNA, 25 bp, Homo sapien
tgctataaattcttgggaaggagtc

SEQ ID NO: 5628343 - DNA, 25 bp, Homo sapien
gggaaggagtcacactgatttttgg

SEQ ID NO: 5628344 - DNA, 25 bp, Homo sapien
cctgaaagctggattagtgtgaagg

SEQ ID NO: 5628345 - DNA, 25 bp, Homo sapien
atctgctaatatgtaggctaccaat

SEQ ID NO: 5628346 - DNA, 25 bp, Homo sapien
cgagtaagtgggtttaccagtgtta

SEQ ID NO: 5628347 - DNA, 25 bp, Homo sapien
atgcatgcttttgagacattgtagc

SEQ ID NO: 5628348 - DNA, 25 bp, Homo sapien
ttggagagtagttatttgtgtatgc

SEQ ID NO: 5628349 - DNA, 25 bp, Homo sapien
atttctggtgaatacatcatgattt

SEQ ID NO: 5628350 - DNA, 25 bp, Homo sapien
tcttttggatgaatttcgcggccgc

SEQ ID NO: 5628351 - DNA, 25 bp, Homo sapien
atttaacaagtggaaagaacatctc

SEQ ID NO: 5628352 - DNA, 25 bp, Homo sapien
tactgtgtttgaggtacggatgatt

SEQ ID NO: 5628353 - DNA, 25 bp, Homo sapien
aatactgtaatgttgagccgaatct

SEQ ID NO: 5628354 - DNA, 25 bp, Homo sapien
ccagcctatagggtaaatactgtgt

SEQ ID NO: 5628355 - DNA, 25 bp, Homo sapien
ctccccttggaatcagatctgaaac

SEQ ID NO: 5628356 - DNA, 25 bp, Homo sapien
tttctggcatactccccttggaatc

SEQ ID NO: 5628357 - DNA, 25 bp, Homo sapien
cgcgtcgaccagcctatagggtaaa

SEQ ID NO: 5628358 - DNA, 25 bp, Homo sapien
atgaactagtcattagagccggttc

SEQ ID NO: 5628359 - DNA, 25 bp, Homo sapien
agccaaatctgaactactctcctgc

SEQ ID NO: 5628360 - DNA, 25 bp, Homo sapien
atttatgtgtgggcaaataggaaat

SEQ ID NO: 5628361 - DNA, 25 bp, Homo sapien
attagagccggttctttcatgccag

SEQ ID NO: 5628362 - DNA, 25 bp, Homo sapien
ctgcagtttacacaggtggtattta

SEQ ID NO: 5628363 - DNA, 25 bp, Homo sapien
cagtgaaatctggaatgaactagtc

SEQ ID NO: 5628364 - DNA, 25 bp, Homo sapien
aaataggaaatgttgcaaacaaaac

SEQ ID NO: 5628365 - DNA, 25 bp, Homo sapien
atttaattgctgtctgtatggaggc

SEQ ID NO: 5628366 - DNA, 25 bp, Homo sapien
tcatgccaggaaaaagttactcagc

SEQ ID NO: 5628367 - DNA, 25 bp, Homo sapien
agcagtggggccttagaccccaaag

SEQ ID NO: 5628368 - DNA, 25 bp, Homo sapien
acaaaacaaagcactagatctaatg

SEQ ID NO: 5628369 - DNA, 25 bp, Homo sapien
tccaaagcagcactgatgctcagtt

SEQ ID NO: 5628370 - DNA, 25 bp, Homo sapien
caataaataagggttatgtttcttc

SEQ ID NO: 5628371 - DNA, 25 bp, Homo sapien
ttcttcttgtcagacccagaaggga

SEQ ID NO: 5628372 - DNA, 25 bp, Homo sapien
cttccaactgcccaagtacaggtcc

SEQ ID NO: 5628373 - DNA, 25 bp, Homo sapien
gaaaatggagaatgatggcaattct

SEQ ID NO: 5628374 - DNA, 25 bp, Homo sapien
tgctcagttctgaggggaaaaacat

SEQ ID NO: 5628375 - DNA, 25 bp, Homo sapien
gtcctgacactgaaaccacagtatt

SEQ ID NO: 5628376 - DNA, 25 bp, Homo sapien
tgtatgtaagccagaagaatgcaat

SEQ ID NO: 5628377 - DNA, 25 bp, Homo sapien
actgcccaagtacaggtcctgacac

SEQ ID NO: 5628378 - DNA, 25 bp, Homo sapien
tagtgagggcaatgtatgtaagcca

SEQ ID NO: 5628379 - DNA, 25 bp, Homo sapien
aaccacagtattcacatggaatgtt

SEQ ID NO: 5628380 - DNA, 25 bp, Homo sapien
caagctaggggcgtatttctccatt

SEQ ID NO: 5628381 - DNA, 25 bp, Homo sapien
ttctctgctgttcttagggcattgc

SEQ ID NO: 5628382 - DNA, 25 bp, Homo sapien
tgctgttcttagggcattgcgggtt

SEQ ID NO: 5628383 - DNA, 25 bp, Homo sapien
attaacaatgatttaaacaagctag

SEQ ID NO: 5628384 - DNA, 25 bp, Homo sapien
atggtccaagatggcatcagctagc

SEQ ID NO: 5628385 - DNA, 25 bp, Homo sapien
gttcttagggcattgcgggtttcca

SEQ ID NO: 5628386 - DNA, 25 bp, Homo sapien
agcatgttcccattttaggaagcaa

SEQ ID NO: 5628387 - DNA, 25 bp, Homo sapien
agggcattgcgggtttccattctca

SEQ ID NO: 5628388 - DNA, 25 bp, Homo sapien
aagatggcatcagctagcatgttcc

SEQ ID NO: 5628389 - DNA, 25 bp, Homo sapien
tgctgacttctggttttaaggggct

SEQ ID NO: 5628390 - DNA, 25 bp, Homo sapien
tgcgggtttccattctcagtcttct

SEQ ID NO: 5628391 - DNA, 25 bp, Homo sapien
gcaaacagcgaacacaatacaagtc

SEQ ID NO: 5628392 - DNA, 25 bp, Homo sapien
gcccataaagagcatttgccagttc

SEQ ID NO: 5628393 - DNA, 25 bp, Homo sapien
agacattaaataggccaggaaacta

SEQ ID NO: 5628394 - DNA, 25 bp, Homo sapien
ccaaatatttcaggggtcagctagg

SEQ ID NO: 5628395 - DNA, 25 bp, Homo sapien
gagctctagaaaagttatgtaaccc

SEQ ID NO: 5628396 - DNA, 25 bp, Homo sapien
aggggataaagttgatggcatttaa

SEQ ID NO: 5628397 - DNA, 25 bp, Homo sapien
aacagatcacttctacaggggataa

SEQ ID NO: 5628398 - DNA, 25 bp, Homo sapien
tgagaccctattgcccataaagagc

SEQ ID NO: 5628399 - DNA, 25 bp, Homo sapien
ttacacaaatcagaagccatgggag

SEQ ID NO: 5628400 - DNA, 25 bp, Homo sapien
ccaaaaaccctaaagcagggagcca

SEQ ID NO: 5628401 - DNA, 25 bp, Homo sapien
tctatgaatgatgcaaacagcgaac

SEQ ID NO: 5628402 - DNA, 25 bp, Homo sapien
ggcaaaaaacaacacgattcttgct

SEQ ID NO: 5628403 - DNA, 25 bp, Homo sapien
ttagtcaccaaatctagccctgggt

SEQ ID NO: 5628404 - DNA, 25 bp, Homo sapien
atgaatttatatgaactaccagtac

SEQ ID NO: 5628405 - DNA, 25 bp, Homo sapien
gaaaacacaaatatgcatagctatt

SEQ ID NO: 5628406 - DNA, 25 bp, Homo sapien
aagataagaagttagtggctgatat

SEQ ID NO: 5628407 - DNA, 25 bp, Homo sapien
agttagtggctgatatatacaaata

SEQ ID NO: 5628408 - DNA, 25 bp, Homo sapien
aattagtaagtgaagaatgaaggaa

SEQ ID NO: 5628409 - DNA, 25 bp, Homo sapien
agccattcattgttcccttgccctc

SEQ ID NO: 5628410 - DNA, 25 bp, Homo sapien
atatgtacataacaaagcaaggaag

SEQ ID NO: 5628411 - DNA, 25 bp, Homo sapien
tctctttccttaaatggggcacaaa

SEQ ID NO: 5628412 - DNA, 25 bp, Homo sapien
agccctgggtgataatgattcttgc

SEQ ID NO: 5628413 - DNA, 25 bp, Homo sapien
tagtctcgagctcctggcctcaagc

SEQ ID NO: 5628414 - DNA, 25 bp, Homo sapien
acctaatgagacaaacagcatatac

SEQ ID NO: 5628415 - DNA, 25 bp, Homo sapien
caaagacgatatattgtaagacctc

SEQ ID NO: 5628416 - DNA, 25 bp, Homo sapien
gagacaaacagcatatactgcactg

SEQ ID NO: 5628417 - DNA, 25 bp, Homo sapien
catgcctggccaaagacgatatatt

SEQ ID NO: 5628418 - DNA, 25 bp, Homo sapien
ccatcctcctgtcttagcctcccaa

SEQ ID NO: 5628419 - DNA, 25 bp, Homo sapien
tgaacaccacaaaaccttaacacca

SEQ ID NO: 5628420 - DNA, 25 bp, Homo sapien
ttaataacctaatgagacaaacagc

SEQ ID NO: 5628421 - DNA, 25 bp, Homo sapien
tgctaaaatattaaaactgtgaaac

SEQ ID NO: 5628422 - DNA, 25 bp, Homo sapien
tactgcactgcctcaacttcctttt

SEQ ID NO: 5628423 - DNA, 25 bp, Homo sapien
tgacccaccatgcctggccaaagac

SEQ ID NO: 5628424 - DNA, 25 bp, Homo sapien
tgggcttgccagtggttcctcctct

SEQ ID NO: 5628425 - DNA, 25 bp, Homo sapien
ggttcctcctctgagttagtagttc

SEQ ID NO: 5628426 - DNA, 25 bp, Homo sapien
tacctatagcatccaaagtctaatc

SEQ ID NO: 5628427 - DNA, 25 bp, Homo sapien
tacaatgaaactcaaaatatactcc

SEQ ID NO: 5628428 - DNA, 25 bp, Homo sapien
taagtcactgtgaattgaagtcatt

SEQ ID NO: 5628429 - DNA, 25 bp, Homo sapien
aatgggagagatgattcaccttcca

SEQ ID NO: 5628430 - DNA, 25 bp, Homo sapien
agttttatgggcttgccagtggttc

SEQ ID NO: 5628431 - DNA, 25 bp, Homo sapien
ttagtagttcagcttataacagtac

SEQ ID NO: 5628432 - DNA, 25 bp, Homo sapien
gagaagaaatggtttctgcctttgc

SEQ ID NO: 5628433 - DNA, 25 bp, Homo sapien
atctggtgatgaataagagaagaaa

SEQ ID NO: 5628434 - DNA, 25 bp, Homo sapien
cttccagtagttttcaaaggttatc

SEQ ID NO: 5628435 - DNA, 25 bp, Homo sapien
tgcatgacttcgacttcactgcccc

SEQ ID NO: 5628436 - DNA, 25 bp, Homo sapien
gaggatggatattgtgtgcaactgg

SEQ ID NO: 5628437 - DNA, 25 bp, Homo sapien
aaacaaagcagagggtgcttatgtc

SEQ ID NO: 5628438 - DNA, 25 bp, Homo sapien
ttgatgtctcaccatgcatgacttc

SEQ ID NO: 5628439 - DNA, 25 bp, Homo sapien
aaaagaagtgcagttcaggataact

SEQ ID NO: 5628440 - DNA, 25 bp, Homo sapien
gtaccctgagctgcaaaagaagtgc

SEQ ID NO: 5628441 - DNA, 25 bp, Homo sapien
tgcagatatctacatcctaggccac

SEQ ID NO: 5628442 - DNA, 25 bp, Homo sapien
atgtccagtatcttaaggaagactc

SEQ ID NO: 5628443 - DNA, 25 bp, Homo sapien
caggataactgaacttggaaatgta

SEQ ID NO: 5628444 - DNA, 25 bp, Homo sapien
tttagacacaagtaccctgagctgc

SEQ ID NO: 5628445 - DNA, 25 bp, Homo sapien
ttggaagctgtcatatgagacctcc

SEQ ID NO: 5628446 - DNA, 25 bp, Homo sapien
gctgtggtcctgtcctcggtctcca

SEQ ID NO: 5628447 - DNA, 25 bp, Homo sapien
caaccagagtgtgccgatctgcttc

SEQ ID NO: 5628448 - DNA, 25 bp, Homo sapien
ccaccaccaaccagagtgtgccgat

SEQ ID NO: 5628449 - DNA, 25 bp, Homo sapien
ctggcacttctgcaccaccaccaac

SEQ ID NO: 5628450 - DNA, 25 bp, Homo sapien
cctcctggtgtctttcgtcctctcc

SEQ ID NO: 5628451 - DNA, 25 bp, Homo sapien
tcctgggttttgtgatcctcctcag

SEQ ID NO: 5628452 - DNA, 25 bp, Homo sapien
ctccatttgtgatgggcactggctc

SEQ ID NO: 5628453 - DNA, 25 bp, Homo sapien
ctcatcatcacgtgtgtggccctgg

SEQ ID NO: 5628454 - DNA, 25 bp, Homo sapien
gccgtggtggccgccatttttggcc

SEQ ID NO: 5628455 - DNA, 25 bp, Homo sapien
catccggaccctcatcatcacgtgt

SEQ ID NO: 5628456 - DNA, 25 bp, Homo sapien
ccgatctgcttcagagacctgggcc

SEQ ID NO: 5628457 - DNA, 25 bp, Homo sapien
gattggtatatcaaagagagataaa

SEQ ID NO: 5628458 - DNA, 25 bp, Homo sapien
gataacagcctttagatgcctcacc

SEQ ID NO: 5628459 - DNA, 25 bp, Homo sapien
aattggaccactgattaatactgtc

SEQ ID NO: 5628460 - DNA, 25 bp, Homo sapien
gatgatgtgacatgtgataacagcc

SEQ ID NO: 5628461 - DNA, 25 bp, Homo sapien
tgtgtcattaaggagccccaggtca

SEQ ID NO: 5628462 - DNA, 25 bp, Homo sapien
cttctgaggctatcagttacacatc

SEQ ID NO: 5628463 - DNA, 25 bp, Homo sapien
actggtctgtgctatcagctgcatt

SEQ ID NO: 5628464 - DNA, 25 bp, Homo sapien
aggcagcctcctgtacccctctggt

SEQ ID NO: 5628465 - DNA, 25 bp, Homo sapien
caaatctgtgtcattaaggagcccc

SEQ ID NO: 5628466 - DNA, 25 bp, Homo sapien
ttagtagatgccttgaagtttggaa

SEQ ID NO: 5628467 - DNA, 25 bp, Homo sapien
tcagttgcccattaagtgggaatca

SEQ ID NO: 5628468 - DNA, 25 bp, Homo sapien
agttgttcaactatgttatacgtct

SEQ ID NO: 5628469 - DNA, 25 bp, Homo sapien
aataggaaagattttaacagctttc

SEQ ID NO: 5628470 - DNA, 25 bp, Homo sapien
gatctcaagtgatacgcccatctcg

SEQ ID NO: 5628471 - DNA, 25 bp, Homo sapien
aagtctagtacagtaaaacatatac

SEQ ID NO: 5628472 - DNA, 25 bp, Homo sapien
aagtgatacgcccatctcggtctcc

SEQ ID NO: 5628473 - DNA, 25 bp, Homo sapien
atattgagagcctattaacaaactc

SEQ ID NO: 5628474 - DNA, 25 bp, Homo sapien
acaaactcagcttgtgagtgatttc

SEQ ID NO: 5628475 - DNA, 25 bp, Homo sapien
tggcacccagcctcacataggaaac

SEQ ID NO: 5628476 - DNA, 25 bp, Homo sapien
cataggaaacttcttagagcaactt

SEQ ID NO: 5628477 - DNA, 25 bp, Homo sapien
tgatttcagggaatggaaagttgag

SEQ ID NO: 5628478 - DNA, 25 bp, Homo sapien
agtgatttcagggaatggaaagttg

SEQ ID NO: 5628479 - DNA, 25 bp, Homo sapien
caccacagaccttcttccctgcccc

SEQ ID NO: 5628480 - DNA, 25 bp, Homo sapien
gggtagagcaggattgtctctggaa

SEQ ID NO: 5628481 - DNA, 25 bp, Homo sapien
agcaggattgtctctggaagtggga

SEQ ID NO: 5628482 - DNA, 25 bp, Homo sapien
gccccaactctgagcgtgtccttgc

SEQ ID NO: 5628483 - DNA, 25 bp, Homo sapien
aaaaggggtcatccttgagtgactt

SEQ ID NO: 5628484 - DNA, 25 bp, Homo sapien
ggctttcctgcgagaaggtgaaatt

SEQ ID NO: 5628485 - DNA, 25 bp, Homo sapien
gtgacttgagtttttagcgcctgca

SEQ ID NO: 5628486 - DNA, 25 bp, Homo sapien
gccagccctcggagctgtgggctga

SEQ ID NO: 5628487 - DNA, 25 bp, Homo sapien
ggactgaaaaggggtcatccttgag

SEQ ID NO: 5628488 - DNA, 25 bp, Homo sapien
tttttagcgcctgcaccacagacct

SEQ ID NO: 5628489 - DNA, 25 bp, Homo sapien
tgggctccccaaatggcaaacgcct

SEQ ID NO: 5628490 - DNA, 25 bp, Homo sapien
tggggctgcttgctttaatactact

SEQ ID NO: 5628491 - DNA, 25 bp, Homo sapien
cacaggctgccataagtcacttttc

SEQ ID NO: 5628492 - DNA, 25 bp, Homo sapien
tggccccggtacccttgactgtcca

SEQ ID NO: 5628493 - DNA, 25 bp, Homo sapien
atggcaggtcctataagccctggcc

SEQ ID NO: 5628494 - DNA, 25 bp, Homo sapien
tccaatgtatcaggcacaaatagtt

SEQ ID NO: 5628495 - DNA, 25 bp, Homo sapien
tttggtcaaatggtgcaaacgtgtg

SEQ ID NO: 5628496 - DNA, 25 bp, Homo sapien
tgaatcaccagaccacagatatgtg

SEQ ID NO: 5628497 - DNA, 25 bp, Homo sapien
tccctgagcatttgaagcaacaact

SEQ ID NO: 5628498 - DNA, 25 bp, Homo sapien
attggctctgaatgttgacaccagc

SEQ ID NO: 5628499 - DNA, 25 bp, Homo sapien
gacaccagcaacacagagtcacgaa

SEQ ID NO: 5628500 - DNA, 25 bp, Homo sapien
cagatatgtgagtgtaattccaatg

SEQ ID NO: 5628501 - DNA, 25 bp, Homo sapien
atagacacaggtagtggtccagata

SEQ ID NO: 5628502 - DNA, 25 bp, Homo sapien
tgaactgaactgagaagctaaaaaa

SEQ ID NO: 5628503 - DNA, 25 bp, Homo sapien
tactcaagggaaaagctttggacaa

SEQ ID NO: 5628504 - DNA, 25 bp, Homo sapien
actcaaagctgcaccaccgtagcac

SEQ ID NO: 5628505 - DNA, 25 bp, Homo sapien
gtggccaaagataacataataaatg

SEQ ID NO: 5628506 - DNA, 25 bp, Homo sapien
cagttgagactagaataagatataa

SEQ ID NO: 5628507 - DNA, 25 bp, Homo sapien
tttaggtagaactagcagttgagac

SEQ ID NO: 5628508 - DNA, 25 bp, Homo sapien
accgtagcaccaatgtggccaaaga

SEQ ID NO: 5628509 - DNA, 25 bp, Homo sapien
tacaggaatactagtaatgggtact

SEQ ID NO: 5628510 - DNA, 25 bp, Homo sapien
tatgcaattgctagaaaatgttgtg

SEQ ID NO: 5628511 - DNA, 25 bp, Homo sapien
attagatggtcctacttgcagacta

SEQ ID NO: 5628512 - DNA, 25 bp, Homo sapien
aacctgggtgtctggcgttgtgaca

SEQ ID NO: 5628513 - DNA, 25 bp, Homo sapien
tgtcacaacgccagacacccaggtt

SEQ ID NO: 5628514 - DNA, 25 bp, Homo sapien
gtttagaacattgtaacagcagttg

SEQ ID NO: 5628515 - DNA, 25 bp, Homo sapien
aaagggaagcaatatcaactgacta

SEQ ID NO: 5628516 - DNA, 25 bp, Homo sapien
agttgtaaaaaccataaagtgcatc

SEQ ID NO: 5628517 - DNA, 25 bp, Homo sapien
aagagcatttgcaagttgatccttc

SEQ ID NO: 5628518 - DNA, 25 bp, Homo sapien
aaaagctaaattctgaagagcattt

SEQ ID NO: 5628519 - DNA, 25 bp, Homo sapien
aactcccacatgaaagggaagcaat

SEQ ID NO: 5628520 - DNA, 25 bp, Homo sapien
agtgggctgtgagcaaactcccaca

SEQ ID NO: 5628521 - DNA, 25 bp, Homo sapien
tatcccctgcagaacaaccaataac

SEQ ID NO: 5628522 - DNA, 25 bp, Homo sapien
acaaaacgaatacagaaaacacatt

SEQ ID NO: 5628523 - DNA, 25 bp, Homo sapien
catttggaaagatcacagtgtttag

SEQ ID NO: 5628524 - DNA, 25 bp, Homo sapien
aaagtccagtttatagcgaattatt

SEQ ID NO: 5628525 - DNA, 25 bp, Homo sapien
cccaagatcacatagttaagtggca

SEQ ID NO: 5628526 - DNA, 25 bp, Homo sapien
tgtggaactactacaggagattgac

SEQ ID NO: 5628527 - DNA, 25 bp, Homo sapien
ttaggtataaagtgagtaaatatct

SEQ ID NO: 5628528 - DNA, 25 bp, Homo sapien
taagactagccagaattcataattt

SEQ ID NO: 5628529 - DNA, 25 bp, Homo sapien
atgtgccatgcactgtcctggtact

SEQ ID NO: 5628530 - DNA, 25 bp, Homo sapien
ataggatgctccaaggaaaaatgta

SEQ ID NO: 5628531 - DNA, 25 bp, Homo sapien
acaggagattgactgtagtatcttt

SEQ ID NO: 5628532 - DNA, 25 bp, Homo sapien
gtttcatatacgaggaacttaggta

SEQ ID NO: 5628533 - DNA, 25 bp, Homo sapien
aatgtaatctatggaactgtggaac

SEQ ID NO: 5628534 - DNA, 25 bp, Homo sapien
aagggatgtaagattacaaagccct

SEQ ID NO: 5628535 - DNA, 25 bp, Homo sapien
agccaggatttaaattcaggaagta

SEQ ID NO: 5628536 - DNA, 25 bp, Homo sapien
aactaagctgtgaacaaagagaaat

SEQ ID NO: 5628537 - DNA, 25 bp, Homo sapien
tcaactcatgagagaagaaagttta

SEQ ID NO: 5628538 - DNA, 25 bp, Homo sapien
cacaggggcttctgaccctggaaca

SEQ ID NO: 5628539 - DNA, 25 bp, Homo sapien
ttaagaaaacgaattgtcacaagtg

SEQ ID NO: 5628540 - DNA, 25 bp, Homo sapien
ttgtcacaagtgatggtcaaagata

SEQ ID NO: 5628541 - DNA, 25 bp, Homo sapien
tcactgtgctagaacaaaatgctta

SEQ ID NO: 5628542 - DNA, 25 bp, Homo sapien
caatgacatatgatatagcactgtt

SEQ ID NO: 5628543 - DNA, 25 bp, Homo sapien
caaaatgcttaggaaatcatcaccc

SEQ ID NO: 5628544 - DNA, 25 bp, Homo sapien
tgcctaagccagaaactgattcaac

SEQ ID NO: 5628545 - DNA, 25 bp, Homo sapien
aaaaggcaaatagaattgaagtgag

SEQ ID NO: 5628546 - DNA, 25 bp, Homo sapien
gtgagaaaaagttgatgcctaagcc

SEQ ID NO: 5628547 - DNA, 25 bp, Homo sapien
ggtccaacttcaggagaccgcctgc

SEQ ID NO: 5628548 - DNA, 25 bp, Homo sapien
tctcggcaatgcaaccaatagggga

SEQ ID NO: 5628549 - DNA, 25 bp, Homo sapien
ttcagcaaggattccgcccgtcaag

SEQ ID NO: 5628550 - DNA, 25 bp, Homo sapien
caactcaggatagccaagctgctct

SEQ ID NO: 5628551 - DNA, 25 bp, Homo sapien
gtggcacgtcctaatggttcggtcc

SEQ ID NO: 5628552 - DNA, 25 bp, Homo sapien
agcagcgtagctgttactgtggcac

SEQ ID NO: 5628553 - DNA, 25 bp, Homo sapien
cttaggcagtaagttcgatgcaggg

SEQ ID NO: 5628554 - DNA, 25 bp, Homo sapien
gaactctgatccgcacactggctct

SEQ ID NO: 5628555 - DNA, 25 bp, Homo sapien
gcacttaaactggcaagttggggcg

SEQ ID NO: 5628556 - DNA, 25 bp, Homo sapien
gcctgcccttaggatgaccaacagc

SEQ ID NO: 5628557 - DNA, 25 bp, Homo sapien
gggcgctcagcatttgggtcttatt

SEQ ID NO: 5628558 - DNA, 25 bp, Homo sapien
ttccagcaccagaacagacaggaag

SEQ ID NO: 5628559 - DNA, 25 bp, Homo sapien
gggactgactctacaggctcatgtg

SEQ ID NO: 5628560 - DNA, 25 bp, Homo sapien
ttaccaccgatgactcacagctcac

SEQ ID NO: 5628561 - DNA, 25 bp, Homo sapien
gacagccagtaagtacatcatgata

SEQ ID NO: 5628562 - DNA, 25 bp, Homo sapien
agctcacagaagtcaaccaaaaaat

SEQ ID NO: 5628563 - DNA, 25 bp, Homo sapien
acacagggcagtcaccaactatcta

SEQ ID NO: 5628564 - DNA, 25 bp, Homo sapien
caacaactgcggcacaaatccaggg

SEQ ID NO: 5628565 - DNA, 25 bp, Homo sapien
gctcatgtgccgcctgcatgagggc

SEQ ID NO: 5628566 - DNA, 25 bp, Homo sapien
tctctgttggagcctttccagcacc

SEQ ID NO: 5628567 - DNA, 25 bp, Homo sapien
atgttcaatgttggcaagtgggtct

SEQ ID NO: 5628568 - DNA, 25 bp, Homo sapien
catcgccaccaagctcggcatgttc

SEQ ID NO: 5628569 - DNA, 25 bp, Homo sapien
gtgagctttgtaactattctgagat

SEQ ID NO: 5628570 - DNA, 25 bp, Homo sapien
attctgagattatgaaatatccttt

SEQ ID NO: 5628571 - DNA, 25 bp, Homo sapien
actcccttaagtgaagagtgacaac

SEQ ID NO: 5628572 - DNA, 25 bp, Homo sapien
gaagagtgacaactttcctgggcat

SEQ ID NO: 5628573 - DNA, 25 bp, Homo sapien
gtagtatgtggctttacatgtttcc

SEQ ID NO: 5628574 - DNA, 25 bp, Homo sapien
ggcaaccactcccttaagtgaagag

SEQ ID NO: 5628575 - DNA, 25 bp, Homo sapien
agaacattctcatcatcgcccaaag

SEQ ID NO: 5628576 - DNA, 25 bp, Homo sapien
tcctgggcattgtgctttcagtagt

SEQ ID NO: 5628577 - DNA, 25 bp, Homo sapien
aacaccaaattcaagcagtgagctt

SEQ ID NO: 5628578 - DNA, 25 bp, Homo sapien
caactatcaccactattccaattcc

SEQ ID NO: 5628579 - DNA, 25 bp, Homo sapien
tgtgctttcagtagtatgtggcttt

SEQ ID NO: 5628580 - DNA, 25 bp, Homo sapien
actagaactctggaagtatcgcctt

SEQ ID NO: 5628581 - DNA, 25 bp, Homo sapien
atagactactaaagagtgtaaacat

SEQ ID NO: 5628582 - DNA, 25 bp, Homo sapien
gtggccaatattactggactcccgt

SEQ ID NO: 5628583 - DNA, 25 bp, Homo sapien
tccatggtatgcctgtgctgtacag

SEQ ID NO: 5628584 - DNA, 25 bp, Homo sapien
gtggtctggaactgatcctgtaata

SEQ ID NO: 5628585 - DNA, 25 bp, Homo sapien
ctggactcccgtggtatcaagtttc

SEQ ID NO: 5628586 - DNA, 25 bp, Homo sapien
tggtgaggatttcctggaccccgat

SEQ ID NO: 5628587 - DNA, 25 bp, Homo sapien
tgtgaggggtcaagaattttcatgc

SEQ ID NO: 5628588 - DNA, 25 bp, Homo sapien
tgcagtgccagattctggtgaggat

SEQ ID NO: 5628589 - DNA, 25 bp, Homo sapien
gtggctatgataacaaagctgggct

SEQ ID NO: 5628590 - DNA, 25 bp, Homo sapien
agctgggcttggtactttctctggc

SEQ ID NO: 5628591 - DNA, 25 bp, Homo sapien
tatagattataccacaagtaatttc

SEQ ID NO: 5628592 - DNA, 25 bp, Homo sapien
tatttcaagcaggagaaactcatgc

SEQ ID NO: 5628593 - DNA, 25 bp, Homo sapien
attccttatctaaaagttgccccaa

SEQ ID NO: 5628594 - DNA, 25 bp, Homo sapien
cataatattcaggttgtggtacaat

SEQ ID NO: 5628595 - DNA, 25 bp, Homo sapien
aaaatgattcatacacaaactgtcc

SEQ ID NO: 5628596 - DNA, 25 bp, Homo sapien
gctggagggatttacacaacataat

SEQ ID NO: 5628597 - DNA, 25 bp, Homo sapien
taagcacctgaaattggagcacaat

SEQ ID NO: 5628598 - DNA, 25 bp, Homo sapien
agcaggagaaactcatgcatttgcc

SEQ ID NO: 5628599 - DNA, 25 bp, Homo sapien
tcataagcacctgaaattggagcac

SEQ ID NO: 5628600 - DNA, 25 bp, Homo sapien
attcaggttgtggtacaatgtattt

SEQ ID NO: 5628601 - DNA, 25 bp, Homo sapien
ccaacaaaaaagattgccctaattc

SEQ ID NO: 5628602 - DNA, 25 bp, Homo sapien
ttaaaatttaggccgagcatggcag

SEQ ID NO: 5628603 - DNA, 25 bp, Homo sapien
acagtcctactaaaacaatgaagtt

SEQ ID NO: 5628604 - DNA, 25 bp, Homo sapien
aacaggtaaaatgcaatacagtcct

SEQ ID NO: 5628605 - DNA, 25 bp, Homo sapien
agtgatcggcccacctcaacctccc

SEQ ID NO: 5628606 - DNA, 25 bp, Homo sapien
aaaactagaacaaactcccatatgc

SEQ ID NO: 5628607 - DNA, 25 bp, Homo sapien
acaatgaagttgtgtaacaaaaaat

SEQ ID NO: 5628608 - DNA, 25 bp, Homo sapien
agcatggcagctcaagccctgtgtt

SEQ ID NO: 5628609 - DNA, 25 bp, Homo sapien
aagtctttgaaatctagtgtgtatt

SEQ ID NO: 5628610 - DNA, 25 bp, Homo sapien
agctcaagccctgtgttgcccaggc

SEQ ID NO: 5628611 - DNA, 25 bp, Homo sapien
agatgccaaatttttaacaggtaaa

SEQ ID NO: 5628612 - DNA, 25 bp, Homo sapien
actcctgggcttaagtgatcggccc

SEQ ID NO: 5628613 - DNA, 25 bp, Homo sapien
tataatagcatctggaggtactgac

SEQ ID NO: 5628614 - DNA, 25 bp, Homo sapien
ttgtgtgtacatggctagaaaaagt

SEQ ID NO: 5628615 - DNA, 25 bp, Homo sapien
tttagaatgaatagactagagcttc

SEQ ID NO: 5628616 - DNA, 25 bp, Homo sapien
ctaagggcactaatcaagaccaatc

SEQ ID NO: 5628617 - DNA, 25 bp, Homo sapien
gaggggctctggatttcgttgtcct

SEQ ID NO: 5628618 - DNA, 25 bp, Homo sapien
gggtgaagaagctgtcctatttcga

SEQ ID NO: 5628619 - DNA, 25 bp, Homo sapien
gcatctggaggtactgacagtcaat

SEQ ID NO: 5628620 - DNA, 25 bp, Homo sapien
gtcctgctaggaaactctggtaaac

SEQ ID NO: 5628621 - DNA, 25 bp, Homo sapien
ttcgaggtcctgaaattctctcaca

SEQ ID NO: 5628622 - DNA, 25 bp, Homo sapien
gatgtcaatcatgtggagtttttct

SEQ ID NO: 5628623 - DNA, 25 bp, Homo sapien
tggtaaacaggaattcctcttggcc

SEQ ID NO: 5628624 - DNA, 25 bp, Homo sapien
tttatagcagactcctgccccatgg

SEQ ID NO: 5628625 - DNA, 25 bp, Homo sapien
atttaaatgaacagatgtgcctttc

SEQ ID NO: 5628626 - DNA, 25 bp, Homo sapien
ggctgggtgtaactctctaggatct

SEQ ID NO: 5628627 - DNA, 25 bp, Homo sapien
gactcaccagcacctagacacacag

SEQ ID NO: 5628628 - DNA, 25 bp, Homo sapien
agatgcacttcgataagtacctgct

SEQ ID NO: 5628629 - DNA, 25 bp, Homo sapien
tgtaatcaagtaatattcagctcta

SEQ ID NO: 5628630 - DNA, 25 bp, Homo sapien
tgagtgcttaaaagaaccttggctt

SEQ ID NO: 5628631 - DNA, 25 bp, Homo sapien
aactagcctgctattccacaccctt

SEQ ID NO: 5628632 - DNA, 25 bp, Homo sapien
tgtccatgtggactcaccagcacct

SEQ ID NO: 5628633 - DNA, 25 bp, Homo sapien
catttagactgaaaagatgcacttc

SEQ ID NO: 5628634 - DNA, 25 bp, Homo sapien
tccacacccttaagcaatctgattt

SEQ ID NO: 5628635 - DNA, 25 bp, Homo sapien
ttaggaggcaatttcagtgatgtct

SEQ ID NO: 5628636 - DNA, 25 bp, Homo sapien
tcaacaagagcgtaagaaaaattcg

SEQ ID NO: 5628637 - DNA, 25 bp, Homo sapien
aatgtgtaaggtaaatgctgtgtct

SEQ ID NO: 5628638 - DNA, 25 bp, Homo sapien
agaccccatgggtctcaggcatagg

SEQ ID NO: 5628639 - DNA, 25 bp, Homo sapien
tatcctccgcctccaagaccccatg

SEQ ID NO: 5628640 - DNA, 25 bp, Homo sapien
gcaggcctgggataaataatctccc

SEQ ID NO: 5628641 - DNA, 25 bp, Homo sapien
tgtgaatgtgccccctgaaaggctt

SEQ ID NO: 5628642 - DNA, 25 bp, Homo sapien
ggtagcctgtcgctggtcttcagtg

SEQ ID NO: 5628643 - DNA, 25 bp, Homo sapien
tgtgtgtacaaaaatcgaattctta

SEQ ID NO: 5628644 - DNA, 25 bp, Homo sapien
aaatttaaatgacttgggatgcagg

SEQ ID NO: 5628645 - DNA, 25 bp, Homo sapien
ctgtaccgtttgattgcctcgtgtc

SEQ ID NO: 5628646 - DNA, 25 bp, Homo sapien
gaggggtcagcagtgatctctttta

SEQ ID NO: 5628647 - DNA, 25 bp, Homo sapien
gagaacttgtcacaggctggcctcg

SEQ ID NO: 5628648 - DNA, 25 bp, Homo sapien
ggctacgcagttacacctgaatttc

SEQ ID NO: 5628649 - DNA, 25 bp, Homo sapien
gaatgaagaccagtcctttgaacac

SEQ ID NO: 5628650 - DNA, 25 bp, Homo sapien
taggaagtaaaactacaggctacgc

SEQ ID NO: 5628651 - DNA, 25 bp, Homo sapien
ttttgccttggacaggtgagaactt

SEQ ID NO: 5628652 - DNA, 25 bp, Homo sapien
cttttagggctaattgtgtaggtcg

SEQ ID NO: 5628653 - DNA, 25 bp, Homo sapien
accttcagctttacaaaacaacctc

SEQ ID NO: 5628654 - DNA, 25 bp, Homo sapien
ggcccgtattttatcaggcagtcct

SEQ ID NO: 5628655 - DNA, 25 bp, Homo sapien
tcaggcagtcctcgccaaaagacac

SEQ ID NO: 5628656 - DNA, 25 bp, Homo sapien
actttcaaggagatttgggactgag

SEQ ID NO: 5628657 - DNA, 25 bp, Homo sapien
actgtaagatgtatggatgattttc

SEQ ID NO: 5628658 - DNA, 25 bp, Homo sapien
aactgagaaagttatgtagaaattc

SEQ ID NO: 5628659 - DNA, 25 bp, Homo sapien
agaaacaggaaacagtgcttgctgc

SEQ ID NO: 5628660 - DNA, 25 bp, Homo sapien
tgccacagggcatataaactgagaa

SEQ ID NO: 5628661 - DNA, 25 bp, Homo sapien
aacagtgaacagagccctttgtggt

SEQ ID NO: 5628662 - DNA, 25 bp, Homo sapien
gagcgcaaggatgatctttgagaac

SEQ ID NO: 5628663 - DNA, 25 bp, Homo sapien
aaagcagcaacaaagtgccactgtt

SEQ ID NO: 5628664 - DNA, 25 bp, Homo sapien
tgtagaaattcaagatcagaggatg

SEQ ID NO: 5628665 - DNA, 25 bp, Homo sapien
tcaggccttagacatgtaagcatgc

SEQ ID NO: 5628666 - DNA, 25 bp, Homo sapien
tccagggtcctgttaacctaagcta

SEQ ID NO: 5628667 - DNA, 25 bp, Homo sapien
aagctaaagataaaaaagcagcaac

SEQ ID NO: 5628668 - DNA, 25 bp, Homo sapien
acctgtagcagaacaaagatgagaa

SEQ ID NO: 5628669 - DNA, 25 bp, Homo sapien
attggctacaaaaccagtcaggcaa

SEQ ID NO: 5628670 - DNA, 25 bp, Homo sapien
ctcagatcacaagttcctgtcctac

SEQ ID NO: 5628671 - DNA, 25 bp, Homo sapien
agtcaggcaaattaagagcctatgc

SEQ ID NO: 5628672 - DNA, 25 bp, Homo sapien
aatctcctgacaataccatccctct

SEQ ID NO: 5628673 - DNA, 25 bp, Homo sapien
aaatccaagtttaaaatctcctgac

SEQ ID NO: 5628674 - DNA, 25 bp, Homo sapien
ataaaggcaggtaactcttgctgat

SEQ ID NO: 5628675 - DNA, 25 bp, Homo sapien
gcccagcctgattttcggtatgatt

SEQ ID NO: 5628676 - DNA, 25 bp, Homo sapien
aaatggaagtagccttgcataaaag

SEQ ID NO: 5628677 - DNA, 25 bp, Homo sapien
agaaaagtgtgccaagccgaaatat

SEQ ID NO: 5628678 - DNA, 25 bp, Homo sapien
gtgtgccaagccgaaatataagtct

SEQ ID NO: 5628679 - DNA, 25 bp, Homo sapien
tttaaagggtagtcaaatgaagcag

SEQ ID NO: 5628680 - DNA, 25 bp, Homo sapien
gataaaatttataggtctcagtttc

SEQ ID NO: 5628681 - DNA, 25 bp, Homo sapien
agattcctgcaatctcaggtgggag

SEQ ID NO: 5628682 - DNA, 25 bp, Homo sapien
aggtggaatgaagatatgtacgttc

SEQ ID NO: 5628683 - DNA, 25 bp, Homo sapien
agatatgtacgttccctggggctct

SEQ ID NO: 5628684 - DNA, 25 bp, Homo sapien
cttccatgtttgtgttgaggcctct

SEQ ID NO: 5628685 - DNA, 25 bp, Homo sapien
caaggctcagggttttgataaaatt

SEQ ID NO: 5628686 - DNA, 25 bp, Homo sapien
agtatacctagctgtcttccatgtt

SEQ ID NO: 5628687 - DNA, 25 bp, Homo sapien
taaggcttgaagattcctgcaatct

SEQ ID NO: 5628688 - DNA, 25 bp, Homo sapien
ttgtgttgaggcctctgccaggtaa

SEQ ID NO: 5628689 - DNA, 25 bp, Homo sapien
aggaggtagaattgaagtataccta

SEQ ID NO: 5628690 - DNA, 25 bp, Homo sapien
atcaggaaaaacaatggatattcat

SEQ ID NO: 5628691 - DNA, 25 bp, Homo sapien
cttaagtagaagtagtaatcctatt

SEQ ID NO: 5628692 - DNA, 25 bp, Homo sapien
gtgcagaataaaaagcatcttttct

SEQ ID NO: 5628693 - DNA, 25 bp, Homo sapien
aaaatacagtatatgtgcagaataa

SEQ ID NO: 5628694 - DNA, 25 bp, Homo sapien
tcctgaccttttgatacgcccacct

SEQ ID NO: 5628695 - DNA, 25 bp, Homo sapien
cttgcctcagtaagagtgaggaatc

SEQ ID NO: 5628696 - DNA, 25 bp, Homo sapien
ttcaccaaaatgagcctacagtttt

SEQ ID NO: 5628697 - DNA, 25 bp, Homo sapien
aaacgaaaaaataacactcaccatc

SEQ ID NO: 5628698 - DNA, 25 bp, Homo sapien
ccttttgatacgcccacctccgcct

SEQ ID NO: 5628699 - DNA, 25 bp, Homo sapien
attaaaatgaactgcgttgtgatac

SEQ ID NO: 5628700 - DNA, 25 bp, Homo sapien
ccatctgacaaagttaccttgcctc

SEQ ID NO: 5628701 - DNA, 25 bp, Homo sapien
gtaggaagcttcaaaaatcacagta

SEQ ID NO: 5628702 - DNA, 25 bp, Homo sapien
gggacagaacagaaaatctagaagc

SEQ ID NO: 5628703 - DNA, 25 bp, Homo sapien
caaaacagtatgatagacgtgtatg

SEQ ID NO: 5628704 - DNA, 25 bp, Homo sapien
tcaaaataatatgccaactgggtta

SEQ ID NO: 5628705 - DNA, 25 bp, Homo sapien
atgatagacgtgtatgaagaaatat

SEQ ID NO: 5628706 - DNA, 25 bp, Homo sapien
tgcctcagcctggatagaagacaga

SEQ ID NO: 5628707 - DNA, 25 bp, Homo sapien
atccaaccactgggacagaacagaa

SEQ ID NO: 5628708 - DNA, 25 bp, Homo sapien
taagggattaacaaaagagcaatac

SEQ ID NO: 5628709 - DNA, 25 bp, Homo sapien
tttgagtagggattgccatcacaga

SEQ ID NO: 5628710 - DNA, 25 bp, Homo sapien
ctagaagcaaactcagatacatgtt

SEQ ID NO: 5628711 - DNA, 25 bp, Homo sapien
ctaaaagtaaggaacatgacagaat

SEQ ID NO: 5628712 - DNA, 25 bp, Homo sapien
aacagagtagagaactaaatttagc

SEQ ID NO: 5628713 - DNA, 25 bp, Homo sapien
actaaatttagcattcagggtgaaa

SEQ ID NO: 5628714 - DNA, 25 bp, Homo sapien
gtcagaattatctgaatcctgtctc

SEQ ID NO: 5628715 - DNA, 25 bp, Homo sapien
ttggtggcattgattcctacacaaa

SEQ ID NO: 5628716 - DNA, 25 bp, Homo sapien
tcaatttgtttgtacggttatcact

SEQ ID NO: 5628717 - DNA, 25 bp, Homo sapien
acaagttacataaatctttgacaac

SEQ ID NO: 5628718 - DNA, 25 bp, Homo sapien
ctaaactaacagagtagagaactaa

SEQ ID NO: 5628719 - DNA, 25 bp, Homo sapien
atcactaacattttggtggcattga

SEQ ID NO: 5628720 - DNA, 25 bp, Homo sapien
tgaaagaatttcatacaaggctcaa

SEQ ID NO: 5628721 - DNA, 25 bp, Homo sapien
cattcagggtgaaatatgccttttc

SEQ ID NO: 5628722 - DNA, 25 bp, Homo sapien
atacaaggctcaaatcacaagttac

SEQ ID NO: 5628723 - DNA, 25 bp, Homo sapien
gccatcctagtaagtcagaaggagc

SEQ ID NO: 5628724 - DNA, 25 bp, Homo sapien
gataaggctgggttaacactgtgcc

SEQ ID NO: 5628725 - DNA, 25 bp, Homo sapien
gttggtaaggaggctattgccaatg

SEQ ID NO: 5628726 - DNA, 25 bp, Homo sapien
tttgagtcccagccctggctctgcc

SEQ ID NO: 5628727 - DNA, 25 bp, Homo sapien
ttccaataagacggtcaagtgggca

SEQ ID NO: 5628728 - DNA, 25 bp, Homo sapien
tccacaactgtgataaggctgggtt

SEQ ID NO: 5628729 - DNA, 25 bp, Homo sapien
tctactagatgtaaggcattgctcc

SEQ ID NO: 5628730 - DNA, 25 bp, Homo sapien
gtggatcaattgggtgtcgtgctta

SEQ ID NO: 5628731 - DNA, 25 bp, Homo sapien
tgagagaataacaaacttctggacc

SEQ ID NO: 5628732 - DNA, 25 bp, Homo sapien
gagtaagggcagtttaatcaagctg

SEQ ID NO: 5628733 - DNA, 25 bp, Homo sapien
tgggaaagtgtgaagcatctactag

SEQ ID NO: 5628734 - DNA, 25 bp, Homo sapien
aatggccatttagagagggctcttc

SEQ ID NO: 5628735 - DNA, 25 bp, Homo sapien
tttctcatcggccacatcaaataat

SEQ ID NO: 5628736 - DNA, 25 bp, Homo sapien
aaggcaggtgctattgtcatctcca

SEQ ID NO: 5628737 - DNA, 25 bp, Homo sapien
ggaagaaggtgagcattttctctag

SEQ ID NO: 5628738 - DNA, 25 bp, Homo sapien
tcacagctaatagttgatagaacca

SEQ ID NO: 5628739 - DNA, 25 bp, Homo sapien
atctccacttaatgaaacaaggcac

SEQ ID NO: 5628740 - DNA, 25 bp, Homo sapien
agttgatagaaccagagttcaaatc

SEQ ID NO: 5628741 - DNA, 25 bp, Homo sapien
agagttcaaatccaagcctgagttc

SEQ ID NO: 5628742 - DNA, 25 bp, Homo sapien
gctcaagtcactgatctgaaatcac

SEQ ID NO: 5628743 - DNA, 25 bp, Homo sapien
tccaagcctgagttcaaaaggtatt

SEQ ID NO: 5628744 - DNA, 25 bp, Homo sapien
aatgaaacaaggcacaaattgctca

SEQ ID NO: 5628745 - DNA, 25 bp, Homo sapien
gaggaagtagaaacactgtctctcc

SEQ ID NO: 5628746 - DNA, 25 bp, Homo sapien
agtctgcttgtcacgaacgcctgtc

SEQ ID NO: 5628747 - DNA, 25 bp, Homo sapien
ctccagttgtgcacatgacggtaac

SEQ ID NO: 5628748 - DNA, 25 bp, Homo sapien
taggaagtatgctcaggtgtgtgca

SEQ ID NO: 5628749 - DNA, 25 bp, Homo sapien
tcagctcagggacatccccggctta

SEQ ID NO: 5628750 - DNA, 25 bp, Homo sapien
aatgcacgccttccccgtcagcttc

SEQ ID NO: 5628751 - DNA, 25 bp, Homo sapien
agtgatagacttggtgaataaatac

SEQ ID NO: 5628752 - DNA, 25 bp, Homo sapien
gggtgtcagctctgtctctcggggt

SEQ ID NO: 5628753 - DNA, 25 bp, Homo sapien
gcattttgagatggagcacagatgt

SEQ ID NO: 5628754 - DNA, 25 bp, Homo sapien
gtctccccgccttgctgggtgaact

SEQ ID NO: 5628755 - DNA, 25 bp, Homo sapien
tcagggtctccttctggaggaaccc

SEQ ID NO: 5628756 - DNA, 25 bp, Homo sapien
catacaccaccatgcacctacttgc

SEQ ID NO: 5628757 - DNA, 25 bp, Homo sapien
ggaagggcaaggttatgttgcaata

SEQ ID NO: 5628758 - DNA, 25 bp, Homo sapien
atttcatgataatcaggaagggcaa

SEQ ID NO: 5628759 - DNA, 25 bp, Homo sapien
cagattatggagtttccagcatctc

SEQ ID NO: 5628760 - DNA, 25 bp, Homo sapien
caccatgcacctacttgcaagttcc

SEQ ID NO: 5628761 - DNA, 25 bp, Homo sapien
agcatctcatacaccaccatgcacc

SEQ ID NO: 5628762 - DNA, 25 bp, Homo sapien
tgttgcaataagatcttaacccaca

SEQ ID NO: 5628763 - DNA, 25 bp, Homo sapien
agtaaaaagtagatctcagtggctt

SEQ ID NO: 5628764 - DNA, 25 bp, Homo sapien
ataaggagacttaattccacagtta

SEQ ID NO: 5628765 - DNA, 25 bp, Homo sapien
aatgactcagattatggagtttcca

SEQ ID NO: 5628766 - DNA, 25 bp, Homo sapien
cagtggcttaactcaataaggagac

SEQ ID NO: 5628767 - DNA, 25 bp, Homo sapien
tcactcccaacccagcgcctagggg

SEQ ID NO: 5628768 - DNA, 25 bp, Homo sapien
gcaggcttctcacaagcaggtgcgg

SEQ ID NO: 5628769 - DNA, 25 bp, Homo sapien
ccattgaataactctcctcagtagc

SEQ ID NO: 5628770 - DNA, 25 bp, Homo sapien
cgtttacgcttcccagacggcagga

SEQ ID NO: 5628771 - DNA, 25 bp, Homo sapien
agggatcaaagagtcgttttaggct

SEQ ID NO: 5628772 - DNA, 25 bp, Homo sapien
tcctccttctcatacctggtggggg

SEQ ID NO: 5628773 - DNA, 25 bp, Homo sapien
aagagtcgttttaggcttaaatata

SEQ ID NO: 5628774 - DNA, 25 bp, Homo sapien
tttacgcttcccagacggcaggaaa

SEQ ID NO: 5628775 - DNA, 25 bp, Homo sapien
gtccgtttacgcttcccagacggca

SEQ ID NO: 5628776 - DNA, 25 bp, Homo sapien
gtctctggccattgaataactctcc

SEQ ID NO: 5628777 - DNA, 25 bp, Homo sapien
ccttctcatacctggtgggggatac

SEQ ID NO: 5628778 - DNA, 25 bp, Homo sapien
tgtcatagcaaagaaatgatgactt

SEQ ID NO: 5628779 - DNA, 25 bp, Homo sapien
ttttgtcatagcaaagaaatgatga

SEQ ID NO: 5628780 - DNA, 25 bp, Homo sapien
tgactttattgaattagactacacc

SEQ ID NO: 5628781 - DNA, 25 bp, Homo sapien
tgatgactttattgaattagactac

SEQ ID NO: 5628782 - DNA, 25 bp, Homo sapien
agtgtaagagaatagattttgtcac

SEQ ID NO: 5628783 - DNA, 25 bp, Homo sapien
acattaaattgaaattatgacattc

SEQ ID NO: 5628784 - DNA, 25 bp, Homo sapien
gaattagactacaccattctacttc

SEQ ID NO: 5628785 - DNA, 25 bp, Homo sapien
tgccaaagatattaagttttaaaca

SEQ ID NO: 5628786 - DNA, 25 bp, Homo sapien
ttacctaaatggaaatattatattc

SEQ ID NO: 5628787 - DNA, 25 bp, Homo sapien
gtaagagaatagattttgtcacatt

SEQ ID NO: 5628788 - DNA, 25 bp, Homo sapien
gtcatagcaaagaaatgatgacttt

SEQ ID NO: 5628789 - DNA, 25 bp, Homo sapien
tgtgcataaaaccattagaaaagaa

SEQ ID NO: 5628790 - DNA, 25 bp, Homo sapien
aaagaatgactcaataactatcacc

SEQ ID NO: 5628791 - DNA, 25 bp, Homo sapien
ttgaacccgtattctgggatgggag

SEQ ID NO: 5628792 - DNA, 25 bp, Homo sapien
ttaacatgatatagtgcgatagtct

SEQ ID NO: 5628793 - DNA, 25 bp, Homo sapien
gaggaggtcatctaccaaaaagccc

SEQ ID NO: 5628794 - DNA, 25 bp, Homo sapien
tataggtagcataaggtgaaaaacc

SEQ ID NO: 5628795 - DNA, 25 bp, Homo sapien
tagtgcgatagtcttgggacaaaat

SEQ ID NO: 5628796 - DNA, 25 bp, Homo sapien
ttcatgggtatttgtcaacagaatc

SEQ ID NO: 5628797 - DNA, 25 bp, Homo sapien
tcatatgcatggacaggacattttt

SEQ ID NO: 5628798 - DNA, 25 bp, Homo sapien
taagaaggggatgtaatatctgtgt

SEQ ID NO: 5628799 - DNA, 25 bp, Homo sapien
taggttgacttaaatagggaataca

SEQ ID NO: 5628800 - DNA, 25 bp, Homo sapien
gatatagaaaagcagattttgacaa

SEQ ID NO: 5628801 - DNA, 25 bp, Homo sapien
attccctcaggtcttgagagaaaag

SEQ ID NO: 5628802 - DNA, 25 bp, Homo sapien
tatacacaaagagtggcaaatggtt

SEQ ID NO: 5628803 - DNA, 25 bp, Homo sapien
gtgaccagtgttttgtatctgactc

SEQ ID NO: 5628804 - DNA, 25 bp, Homo sapien
aagaattttagtgaccagtgttttg

SEQ ID NO: 5628805 - DNA, 25 bp, Homo sapien
ctgtgtgatcaaaaagctagtcctt

SEQ ID NO: 5628806 - DNA, 25 bp, Homo sapien
ttagacagtaatttggacccttgaa

SEQ ID NO: 5628807 - DNA, 25 bp, Homo sapien
tccagtgttccaaggattccttatt

SEQ ID NO: 5628808 - DNA, 25 bp, Homo sapien
tgagagaaaagttttgatatagaaa

SEQ ID NO: 5628809 - DNA, 25 bp, Homo sapien
gaaggaagggatactacttatgtta

SEQ ID NO: 5628810 - DNA, 25 bp, Homo sapien
gagtggcaaatggtttagacagtaa

SEQ ID NO: 5628811 - DNA, 25 bp, Homo sapien
cttgcataccattaaggtgccttcc

SEQ ID NO: 5628812 - DNA, 25 bp, Homo sapien
gtggaatgcaacatagtaattcatt

SEQ ID NO: 5628813 - DNA, 25 bp, Homo sapien
taaggtgccttccagtttgcctgta

SEQ ID NO: 5628814 - DNA, 25 bp, Homo sapien
tgtgctgagacatctttcttcatac

SEQ ID NO: 5628815 - DNA, 25 bp, Homo sapien
ttataactacctatgtgctgagaca

SEQ ID NO: 5628816 - DNA, 25 bp, Homo sapien
gtataattgtacatgagtgggggca

SEQ ID NO: 5628817 - DNA, 25 bp, Homo sapien
ctgattcccggggcttaattaacga

SEQ ID NO: 5628818 - DNA, 25 bp, Homo sapien
gcctgtaattgcatgaaatgagtat

SEQ ID NO: 5628819 - DNA, 25 bp, Homo sapien
cttttaccacaaaggccactaacac

SEQ ID NO: 5628820 - DNA, 25 bp, Homo sapien
taattgcatgaaatgagtatctgag

SEQ ID NO: 5628821 - DNA, 25 bp, Homo sapien
aatgaatgtacagatccatcacttt

SEQ ID NO: 5628822 - DNA, 25 bp, Homo sapien
gagaaaacaggttcatcacatagcc

SEQ ID NO: 5628823 - DNA, 25 bp, Homo sapien
caggcaccgcgttacaccctctgca

SEQ ID NO: 5628824 - DNA, 25 bp, Homo sapien
aacaaaaacccaagagctcatgctt

SEQ ID NO: 5628825 - DNA, 25 bp, Homo sapien
ggagagtaaaggccattatatggga

SEQ ID NO: 5628826 - DNA, 25 bp, Homo sapien
ttggcatccatcctagaaaggcact

SEQ ID NO: 5628827 - DNA, 25 bp, Homo sapien
gcctctgcattcaagcggtgggaga

SEQ ID NO: 5628828 - DNA, 25 bp, Homo sapien
aactttacacagctagcaaggggtg

SEQ ID NO: 5628829 - DNA, 25 bp, Homo sapien
ttactccgtttggcagacgaggaaa

SEQ ID NO: 5628830 - DNA, 25 bp, Homo sapien
agcctgagctttggctgtggcagtg

SEQ ID NO: 5628831 - DNA, 25 bp, Homo sapien
tgagagtcacagtggttaactttac

SEQ ID NO: 5628832 - DNA, 25 bp, Homo sapien
ctgtcagcagaagaaacgcctctgc

SEQ ID NO: 5628833 - DNA, 25 bp, Homo sapien
gccacctgcatgagtccaggctcgc

SEQ ID NO: 5628834 - DNA, 25 bp, Homo sapien
agctggggacaagacatattaccac

SEQ ID NO: 5628835 - DNA, 25 bp, Homo sapien
ttcacccagacttcatgcggccctc

SEQ ID NO: 5628836 - DNA, 25 bp, Homo sapien
ggattgatggcttcatgactgctgc

SEQ ID NO: 5628837 - DNA, 25 bp, Homo sapien
gcaagagaatgccgtggcagtttca

SEQ ID NO: 5628838 - DNA, 25 bp, Homo sapien
tataccaggttctgggctgggatca

SEQ ID NO: 5628839 - DNA, 25 bp, Homo sapien
acatattaccacccacaagaaggcc

SEQ ID NO: 5628840 - DNA, 25 bp, Homo sapien
ggacaaaagaccacgtagcctggtc

SEQ ID NO: 5628841 - DNA, 25 bp, Homo sapien
aaggcccactaagacaccacctcct

SEQ ID NO: 5628842 - DNA, 25 bp, Homo sapien
tctgcacttcccaccgagatgccac

SEQ ID NO: 5628843 - DNA, 25 bp, Homo sapien
acgtagcctggtcatccccgtgagt

SEQ ID NO: 5628844 - DNA, 25 bp, Homo sapien
aataaaccgtgtcctagccaagcag

SEQ ID NO: 5628845 - DNA, 25 bp, Homo sapien
aaatgattttccaaccgcgagcgtg

SEQ ID NO: 5628846 - DNA, 25 bp, Homo sapien
agccaagcagcgatgcctgcactta

SEQ ID NO: 5628847 - DNA, 25 bp, Homo sapien
agctgggtgttgtcggttcccaatc

SEQ ID NO: 5628848 - DNA, 25 bp, Homo sapien
cctcttcgggaacagcctctgtgat

SEQ ID NO: 5628849 - DNA, 25 bp, Homo sapien
caggttgcgcctatcttggaagttc

SEQ ID NO: 5628850 - DNA, 25 bp, Homo sapien
aattgcagacaggttgcgcctatct

SEQ ID NO: 5628851 - DNA, 25 bp, Homo sapien
atacaaccctctgggaaacactggt

SEQ ID NO: 5628852 - DNA, 25 bp, Homo sapien
agggtacctttggggcaccatctca

SEQ ID NO: 5628853 - DNA, 25 bp, Homo sapien
tggaagttctagcatcaagggaacc

SEQ ID NO: 5628854 - DNA, 25 bp, Homo sapien
acaaaatgcgtattagagacaaaac

SEQ ID NO: 5628855 - DNA, 25 bp, Homo sapien
gatggaggtaaaagtgagtttatct

SEQ ID NO: 5628856 - DNA, 25 bp, Homo sapien
gacaagaaaggctaaactagagctc

SEQ ID NO: 5628857 - DNA, 25 bp, Homo sapien
ttaggtcagtttaaatatgagcaac

SEQ ID NO: 5628858 - DNA, 25 bp, Homo sapien
actgacacacacattctcgtaccgt

SEQ ID NO: 5628859 - DNA, 25 bp, Homo sapien
gaggtgggcattgttaatacgattc

SEQ ID NO: 5628860 - DNA, 25 bp, Homo sapien
gattcaaagcttggttgggcactct

SEQ ID NO: 5628861 - DNA, 25 bp, Homo sapien
aaagattagcctgacaagaacttgc

SEQ ID NO: 5628862 - DNA, 25 bp, Homo sapien
atagtatgcctgggatacagcacat

SEQ ID NO: 5628863 - DNA, 25 bp, Homo sapien
ttggcatcagaacaggataatttta

SEQ ID NO: 5628864 - DNA, 25 bp, Homo sapien
tcctcagctagcatagaggtgggca

SEQ ID NO: 5628865 - DNA, 25 bp, Homo sapien
gcagagctgaaattgaattggcatc

SEQ ID NO: 5628866 - DNA, 25 bp, Homo sapien
gtgagcccggccctgtcacattcaa

SEQ ID NO: 5628867 - DNA, 25 bp, Homo sapien
aacacacagaggttcataatctcgc

SEQ ID NO: 5628868 - DNA, 25 bp, Homo sapien
ccattacacaggtgaggaaaatgag

SEQ ID NO: 5628869 - DNA, 25 bp, Homo sapien
ggaacagtgtacacatccagtgatt

SEQ ID NO: 5628870 - DNA, 25 bp, Homo sapien
ggctgtcttactctgggtgatgttc

SEQ ID NO: 5628871 - DNA, 25 bp, Homo sapien
aaaccaggcaacatatcccccttcc

SEQ ID NO: 5628872 - DNA, 25 bp, Homo sapien
cataataaaagggttgagtacttcc

SEQ ID NO: 5628873 - DNA, 25 bp, Homo sapien
gatagcctaaggctcagacgagaac

SEQ ID NO: 5628874 - DNA, 25 bp, Homo sapien
gtatagtcgctgagtggctgtctta

SEQ ID NO: 5628875 - DNA, 25 bp, Homo sapien
gtttacaaagagctcattcgcatat

SEQ ID NO: 5628876 - DNA, 25 bp, Homo sapien
ctgtgtaccttgcccgaggtcccac

SEQ ID NO: 5628877 - DNA, 25 bp, Homo sapien
aacaaggacacacctgctgtcccca

SEQ ID NO: 5628878 - DNA, 25 bp, Homo sapien
ttaccctaatgcttagcctggctcc

SEQ ID NO: 5628879 - DNA, 25 bp, Homo sapien
tccagtgaaattagctccccagcca

SEQ ID NO: 5628880 - DNA, 25 bp, Homo sapien
aagacaggacaaatacttaccctaa

SEQ ID NO: 5628881 - DNA, 25 bp, Homo sapien
ctggctccagtgaaattagctcccc

SEQ ID NO: 5628882 - DNA, 25 bp, Homo sapien
agtctcgcgacgttttaattagaat

SEQ ID NO: 5628883 - DNA, 25 bp, Homo sapien
agaattttagaattagaggagggct

SEQ ID NO: 5628884 - DNA, 25 bp, Homo sapien
atggaactaacaaggacacacctgc

SEQ ID NO: 5628885 - DNA, 25 bp, Homo sapien
ttttcagtgaggaaactgcccaaga

SEQ ID NO: 5628886 - DNA, 25 bp, Homo sapien
ggcatgcaccactagtctcgcgacg

SEQ ID NO: 5628887 - DNA, 25 bp, Homo sapien
taatgcttagcctggctccagtgaa

SEQ ID NO: 5628888 - DNA, 25 bp, Homo sapien
acaggtcatttcttcagccaccccc

SEQ ID NO: 5628889 - DNA, 25 bp, Homo sapien
tctaacttctgtggcaaccaggtac

SEQ ID NO: 5628890 - DNA, 25 bp, Homo sapien
tatcaaagacgaaaactttctgcca

SEQ ID NO: 5628891 - DNA, 25 bp, Homo sapien
tcactaacatttttctcgaggcctt

SEQ ID NO: 5628892 - DNA, 25 bp, Homo sapien
ttctgtggcaaccaggtacaaagtc

SEQ ID NO: 5628893 - DNA, 25 bp, Homo sapien
aaccaggtacaaagtcattgccatt

SEQ ID NO: 5628894 - DNA, 25 bp, Homo sapien
tcttcagccaccccccatagtattt

SEQ ID NO: 5628895 - DNA, 25 bp, Homo sapien
tccttagccagatcctcccattcat

SEQ ID NO: 5628896 - DNA, 25 bp, Homo sapien
gctgaaaatctccttagccagatcc

SEQ ID NO: 5628897 - DNA, 25 bp, Homo sapien
tctcgaggcctttctaacttctgtg

SEQ ID NO: 5628898 - DNA, 25 bp, Homo sapien
tcccacattatcaaagacgaaaact

SEQ ID NO: 5628899 - DNA, 25 bp, Homo sapien
ctctggaggtaaaatagccaggagc

SEQ ID NO: 5628900 - DNA, 25 bp, Homo sapien
aatgacaccagattatccctacctc

SEQ ID NO: 5628901 - DNA, 25 bp, Homo sapien
acaaaggcctgtgtgtttaatgaca

SEQ ID NO: 5628902 - DNA, 25 bp, Homo sapien
atatacagggcctgtttgagggagc

SEQ ID NO: 5628903 - DNA, 25 bp, Homo sapien
tgctgttggtgtacggtaacctcca

SEQ ID NO: 5628904 - DNA, 25 bp, Homo sapien
tgctgcagtgtaacagagctgcgtc

SEQ ID NO: 5628905 - DNA, 25 bp, Homo sapien
accagcagctctggaggtaaaatag

SEQ ID NO: 5628906 - DNA, 25 bp, Homo sapien
taaaacaagtactaggaacagtctc

SEQ ID NO: 5628907 - DNA, 25 bp, Homo sapien
agaaggaagaaaaagcttcctgctg

SEQ ID NO: 5628908 - DNA, 25 bp, Homo sapien
ggggccagagcctgttagatataca

SEQ ID NO: 5628909 - DNA, 25 bp, Homo sapien
ggcctgtttgagggagcttaatatc

SEQ ID NO: 5628910 - DNA, 25 bp, Homo sapien
aagaaaaatctgtgggcataaattt

SEQ ID NO: 5628911 - DNA, 25 bp, Homo sapien
ttaattcatctgagaaaggtaagcc

SEQ ID NO: 5628912 - DNA, 25 bp, Homo sapien
tcggaggcagtagtaaaatcattaa

SEQ ID NO: 5628913 - DNA, 25 bp, Homo sapien
aaggacatttaagatataggagtgc

SEQ ID NO: 5628914 - DNA, 25 bp, Homo sapien
aaaagtctaagaatgttgatcaagt

SEQ ID NO: 5628915 - DNA, 25 bp, Homo sapien
aagaaattgatcagagtgatgaaaa

SEQ ID NO: 5628916 - DNA, 25 bp, Homo sapien
agtgcaattaacaaaagctgtaaac

SEQ ID NO: 5628917 - DNA, 25 bp, Homo sapien
tcagagtgatgaaaagtgcaattaa

SEQ ID NO: 5628918 - DNA, 25 bp, Homo sapien
actgaagaaagcaatgttataaccc

SEQ ID NO: 5628919 - DNA, 25 bp, Homo sapien
ctgagaaaggtaagccagttttccc

SEQ ID NO: 5628920 - DNA, 25 bp, Homo sapien
gactgtattaataactgaagaaagc

SEQ ID NO: 5628921 - DNA, 25 bp, Homo sapien
tgtgctctgttctcaaacgcccgga

SEQ ID NO: 5628922 - DNA, 25 bp, Homo sapien
gaaagaaataacctatgagaattcc

SEQ ID NO: 5628923 - DNA, 25 bp, Homo sapien
taacgttatgtcctccttccgccca

SEQ ID NO: 5628924 - DNA, 25 bp, Homo sapien
tacccccagccccgtgtgctcatca

SEQ ID NO: 5628925 - DNA, 25 bp, Homo sapien
cggctctccaccttgtggtgcacac

SEQ ID NO: 5628926 - DNA, 25 bp, Homo sapien
agtaacggctctgtaactatttgtt

SEQ ID NO: 5628927 - DNA, 25 bp, Homo sapien
cttccgcccacatcagggctatttg

SEQ ID NO: 5628928 - DNA, 25 bp, Homo sapien
ggagagcgtaaaaactgccctttca

SEQ ID NO: 5628929 - DNA, 25 bp, Homo sapien
ctttcacacgccaccaacccagtcc

SEQ ID NO: 5628930 - DNA, 25 bp, Homo sapien
acattaatgcaggtggttttccaaa

SEQ ID NO: 5628931 - DNA, 25 bp, Homo sapien
tgctccctgctccgtgaaaatctcc

SEQ ID NO: 5628932 - DNA, 25 bp, Homo sapien
tacagtaataacacgggtgccccat

SEQ ID NO: 5628933 - DNA, 25 bp, Homo sapien
aacaaaatgtgaggtagactagtga

SEQ ID NO: 5628934 - DNA, 25 bp, Homo sapien
agaaggacctaacatactcaagaat

SEQ ID NO: 5628935 - DNA, 25 bp, Homo sapien
tgtgcaaatccttaaagaaggacct

SEQ ID NO: 5628936 - DNA, 25 bp, Homo sapien
tcatggtgtcctgtgcttgtgcaaa

SEQ ID NO: 5628937 - DNA, 25 bp, Homo sapien
agcaattgcataaattacagccaaa

SEQ ID NO: 5628938 - DNA, 25 bp, Homo sapien
caaacattagtaagataggctttga

SEQ ID NO: 5628939 - DNA, 25 bp, Homo sapien
tgaaaagaataggcagatcaatttc

SEQ ID NO: 5628940 - DNA, 25 bp, Homo sapien
agtagacacaagacaattttgaatc

SEQ ID NO: 5628941 - DNA, 25 bp, Homo sapien
tctacaggtgagttactgtgtgggc

SEQ ID NO: 5628942 - DNA, 25 bp, Homo sapien
agtgtcctaagggattgcaaagctt

SEQ ID NO: 5628943 - DNA, 25 bp, Homo sapien
gtgagtagtcctataattccagtac

SEQ ID NO: 5628944 - DNA, 25 bp, Homo sapien
ccgaggtagacacagaataagttat

SEQ ID NO: 5628945 - DNA, 25 bp, Homo sapien
tcccaattcaagagaataatgtata

SEQ ID NO: 5628946 - DNA, 25 bp, Homo sapien
atattccacaaatcagaggttttct

SEQ ID NO: 5628947 - DNA, 25 bp, Homo sapien
tttaaagctagtgacaaaacctgat

SEQ ID NO: 5628948 - DNA, 25 bp, Homo sapien
tggaggaaatacatggctaagtata

SEQ ID NO: 5628949 - DNA, 25 bp, Homo sapien
tattgaggatttaaagctagtgaca

SEQ ID NO: 5628950 - DNA, 25 bp, Homo sapien
ttagaacattatttggaaagtattc

SEQ ID NO: 5628951 - DNA, 25 bp, Homo sapien
aaagtatatgaaaagtgagtagtcc

SEQ ID NO: 5628952 - DNA, 25 bp, Homo sapien
atgtgtaagtaatattcagaagaaa

SEQ ID NO: 5628953 - DNA, 25 bp, Homo sapien
ttccagtactttcaccgaggtagac

SEQ ID NO: 5628954 - DNA, 25 bp, Homo sapien
aagacaaagtagcacataaataaaa

SEQ ID NO: 5628955 - DNA, 25 bp, Homo sapien
tgtgtatatacacagagagggagaa

SEQ ID NO: 5628956 - DNA, 25 bp, Homo sapien
atgtttaagacttattgttaggtaa

SEQ ID NO: 5628957 - DNA, 25 bp, Homo sapien
gaaagacaaagtagcacataaataa

SEQ ID NO: 5628958 - DNA, 25 bp, Homo sapien
tgtatgtgtatatacacagagaggg

SEQ ID NO: 5628959 - DNA, 25 bp, Homo sapien
gatcagaaaaaatacattaattaaa

SEQ ID NO: 5628960 - DNA, 25 bp, Homo sapien
ggagaaagacaaagtagcacataaa

SEQ ID NO: 5628961 - DNA, 25 bp, Homo sapien
atgtgtatatacacagagagggaga

SEQ ID NO: 5628962 - DNA, 25 bp, Homo sapien
agcacataaataaaaatacatacat

SEQ ID NO: 5628963 - DNA, 25 bp, Homo sapien
gtgtatatacacagagagggagaaa

SEQ ID NO: 5628964 - DNA, 25 bp, Homo sapien
gagaaagacaaagtagcacataaat

SEQ ID NO: 5628965 - DNA, 25 bp, Homo sapien
atgaaaatcagtaaacagcttggtt

SEQ ID NO: 5628966 - DNA, 25 bp, Homo sapien
ataaatcaggtagacctaaactaac

SEQ ID NO: 5628967 - DNA, 25 bp, Homo sapien
tgcctcagctgtagcagctaggact

SEQ ID NO: 5628968 - DNA, 25 bp, Homo sapien
actagtaagtagcatgagtggtaga

SEQ ID NO: 5628969 - DNA, 25 bp, Homo sapien
tgtgacaaattcctaagtttaacac

SEQ ID NO: 5628970 - DNA, 25 bp, Homo sapien
tttagatctcctcaggaacctacat

SEQ ID NO: 5628971 - DNA, 25 bp, Homo sapien
agagatgggttttcacagtgttagc

SEQ ID NO: 5628972 - DNA, 25 bp, Homo sapien
attactagtaagtagcatgagtggt

SEQ ID NO: 5628973 - DNA, 25 bp, Homo sapien
cctcaggaacctacatgtgacaaat

SEQ ID NO: 5628974 - DNA, 25 bp, Homo sapien
gccactgcgtccagccctctgcctt

SEQ ID NO: 5628975 - DNA, 25 bp, Homo sapien
ttcagtagagatgggttttcacagt

SEQ ID NO: 5628976 - DNA, 25 bp, Homo sapien
tcagctaacagaagaccaaggtaaa

SEQ ID NO: 5628977 - DNA, 25 bp, Homo sapien
gatcaaaactatggggtcaaaaggc

SEQ ID NO: 5628978 - DNA, 25 bp, Homo sapien
tgtgggacagttctacaaaacaacc

SEQ ID NO: 5628979 - DNA, 25 bp, Homo sapien
ggggagatgtagcttataatggaga

SEQ ID NO: 5628980 - DNA, 25 bp, Homo sapien
aaaattaattgcaaaggggagatgt

SEQ ID NO: 5628981 - DNA, 25 bp, Homo sapien
tataatggagagaatctggtagcca

SEQ ID NO: 5628982 - DNA, 25 bp, Homo sapien
aaaaaaacagtgcaaggtataagcc

SEQ ID NO: 5628983 - DNA, 25 bp, Homo sapien
atgccacatgaggtacgcggcatca

SEQ ID NO: 5628984 - DNA, 25 bp, Homo sapien
aacaattagatgaaaggatgacagg

SEQ ID NO: 5628985 - DNA, 25 bp, Homo sapien
gaaaatgtgtaatctggacagagcc

SEQ ID NO: 5628986 - DNA, 25 bp, Homo sapien
cagcagcactaactgtgagacactc

SEQ ID NO: 5628987 - DNA, 25 bp, Homo sapien
ctgaacaccactcactggacagccc

SEQ ID NO: 5628988 - DNA, 25 bp, Homo sapien
cagtttttctgccacacgtctccca

SEQ ID NO: 5628989 - DNA, 25 bp, Homo sapien
aaggcacaatagagaaaccccaatg

SEQ ID NO: 5628990 - DNA, 25 bp, Homo sapien
ctccatcgggtttctgaaggcacaa

SEQ ID NO: 5628991 - DNA, 25 bp, Homo sapien
tctgccacacgtctcccaatccatt

SEQ ID NO: 5628992 - DNA, 25 bp, Homo sapien
attgcctccatcgggtttctgaagg

SEQ ID NO: 5628993 - DNA, 25 bp, Homo sapien
cgggtttctgaaggcacaatagaga

SEQ ID NO: 5628994 - DNA, 25 bp, Homo sapien
gcccactgaacaccactcactggac

SEQ ID NO: 5628995 - DNA, 25 bp, Homo sapien
accactcactggacagccctgggaa

SEQ ID NO: 5628996 - DNA, 25 bp, Homo sapien
catcgggtttctgaaggcacaatag

SEQ ID NO: 5628997 - DNA, 25 bp, Homo sapien
acaccactcactggacagccctggg

SEQ ID NO: 5628998 - DNA, 25 bp, Homo sapien
tattggaaaggaccagcaatgtaaa

SEQ ID NO: 5628999 - DNA, 25 bp, Homo sapien
tggagcctcagccgcagtccattct

SEQ ID NO: 5629000 - DNA, 25 bp, Homo sapien
ttgttataaaggagtggttctgatt

SEQ ID NO: 5629001 - DNA, 25 bp, Homo sapien
ttgaaggtcattggaaaggcattta

SEQ ID NO: 5629002 - DNA, 25 bp, Homo sapien
ctaaagtaaagggaatcgtctgcta

SEQ ID NO: 5629003 - DNA, 25 bp, Homo sapien
gtgaaacagacgaaacccctgcttc

SEQ ID NO: 5629004 - DNA, 25 bp, Homo sapien
ttagattggcattgaaaacagacac

SEQ ID NO: 5629005 - DNA, 25 bp, Homo sapien
tagaaggaagacactactttgcagc

SEQ ID NO: 5629006 - DNA, 25 bp, Homo sapien
agtgctgtcgagaacgatgccattt

SEQ ID NO: 5629007 - DNA, 25 bp, Homo sapien
gaatcgtctgctagagtcgtggagc

SEQ ID NO: 5629008 - DNA, 25 bp, Homo sapien
attgatgggacaacttctgtgtgcc

SEQ ID NO: 5629009 - DNA, 25 bp, Homo sapien
taaaatgagtgtatatgccagtggc

SEQ ID NO: 5629010 - DNA, 25 bp, Homo sapien
cagcacagaaaagataaacaccatg

SEQ ID NO: 5629011 - DNA, 25 bp, Homo sapien
aaacaccatgacataaaaatgagca

SEQ ID NO: 5629012 - DNA, 25 bp, Homo sapien
catataacccgaatggtccattaac

SEQ ID NO: 5629013 - DNA, 25 bp, Homo sapien
tacctgctaatttggccaagctgtt

SEQ ID NO: 5629014 - DNA, 25 bp, Homo sapien
agtggcaaaagtagtataaagaatc

SEQ ID NO: 5629015 - DNA, 25 bp, Homo sapien
tatatgccagtggcccaaggttgga

SEQ ID NO: 5629016 - DNA, 25 bp, Homo sapien
ttcaaagagcactacaagttctgat

SEQ ID NO: 5629017 - DNA, 25 bp, Homo sapien
ggcagatgaagggttttaaaatagc

SEQ ID NO: 5629018 - DNA, 25 bp, Homo sapien
tgcagttgcagaatgaaccatagtc

SEQ ID NO: 5629019 - DNA, 25 bp, Homo sapien
catatatggcagatgaagggtttta

SEQ ID NO: 5629020 - DNA, 25 bp, Homo sapien
aacacaatgagacaaaaacacaaaa

SEQ ID NO: 5629021 - DNA, 25 bp, Homo sapien
tcagacaataacacaatgagacaaa

SEQ ID NO: 5629022 - DNA, 25 bp, Homo sapien
cacaatgagacaaaaacacaaaaca

SEQ ID NO: 5629023 - DNA, 25 bp, Homo sapien
tagtcagacaataacacaatgagac

SEQ ID NO: 5629024 - DNA, 25 bp, Homo sapien
gtttggttttagatttagtcagaca

SEQ ID NO: 5629025 - DNA, 25 bp, Homo sapien
caaaatgacattgttgagtatacat

SEQ ID NO: 5629026 - DNA, 25 bp, Homo sapien
atttagtcagacaataacacaatga

SEQ ID NO: 5629027 - DNA, 25 bp, Homo sapien
gtcacaaaatgacattgttgagtat

SEQ ID NO: 5629028 - DNA, 25 bp, Homo sapien
aaagtcacaaaatgacattgttgag

SEQ ID NO: 5629029 - DNA, 25 bp, Homo sapien
tgagacaaaaacacaaaacataact

SEQ ID NO: 5629030 - DNA, 25 bp, Homo sapien
cttgtttccaaagtcacaaaatgac

SEQ ID NO: 5629031 - DNA, 25 bp, Homo sapien
gaaaggcctgcagatgcctctccca

SEQ ID NO: 5629032 - DNA, 25 bp, Homo sapien
ttgtctccagggctgaacatcgtca

SEQ ID NO: 5629033 - DNA, 25 bp, Homo sapien
cagacaatgaatgttcaagccaaac

SEQ ID NO: 5629034 - DNA, 25 bp, Homo sapien
cttccagggatggagataaacctga

SEQ ID NO: 5629035 - DNA, 25 bp, Homo sapien
gccaaactctcatggagagcctggg

SEQ ID NO: 5629036 - DNA, 25 bp, Homo sapien
cctgggccagagcaactctgcttcc

SEQ ID NO: 5629037 - DNA, 25 bp, Homo sapien
cactatgctaggcaaggatcccagt

SEQ ID NO: 5629038 - DNA, 25 bp, Homo sapien
gcctctcccaacgaagacctgtgca

SEQ ID NO: 5629039 - DNA, 25 bp, Homo sapien
ccagggatggagataaacctgaaag

SEQ ID NO: 5629040 - DNA, 25 bp, Homo sapien
cagggctgaacatcgtcactatgct

SEQ ID NO: 5629041 - DNA, 25 bp, Homo sapien
tctattgatgttggtgttccccttc

SEQ ID NO: 5629042 - DNA, 25 bp, Homo sapien
ttttgaaaagctgcccacaagagca

SEQ ID NO: 5629043 - DNA, 25 bp, Homo sapien
attaccacgggaattaaaacataga

SEQ ID NO: 5629044 - DNA, 25 bp, Homo sapien
acgacacagtcgcaacccacttctc

SEQ ID NO: 5629045 - DNA, 25 bp, Homo sapien
tttaggggagtatcttcaaactatc

SEQ ID NO: 5629046 - DNA, 25 bp, Homo sapien
ttttaaatctcagccaacaacaagc

SEQ ID NO: 5629047 - DNA, 25 bp, Homo sapien
ttaaaacatagaagtgtgtgaccta

SEQ ID NO: 5629048 - DNA, 25 bp, Homo sapien
tgcccacaagagcaagtgattaatc

SEQ ID NO: 5629049 - DNA, 25 bp, Homo sapien
ctaaaatcaattgtgaacagccact

SEQ ID NO: 5629050 - DNA, 25 bp, Homo sapien
gagccgagtatggaagaatctttac

SEQ ID NO: 5629051 - DNA, 25 bp, Homo sapien
aggaaaacaactcatccgagccgag

SEQ ID NO: 5629052 - DNA, 25 bp, Homo sapien
tagctgcaaatacaaagacgtgatt

SEQ ID NO: 5629053 - DNA, 25 bp, Homo sapien
gtctgtgccagttgtaggcaaaggg

SEQ ID NO: 5629054 - DNA, 25 bp, Homo sapien
agttaacacaacaccaagcgccaca

SEQ ID NO: 5629055 - DNA, 25 bp, Homo sapien
actgaagcttgaactaggtagtagc

SEQ ID NO: 5629056 - DNA, 25 bp, Homo sapien
agtgataaagagaatgatgacagta

SEQ ID NO: 5629057 - DNA, 25 bp, Homo sapien
agggcaacataatcagatagacttg

SEQ ID NO: 5629058 - DNA, 25 bp, Homo sapien
catacttggaaggactagcatatct

SEQ ID NO: 5629059 - DNA, 25 bp, Homo sapien
atctacaaagggaatagtaaaccaa

SEQ ID NO: 5629060 - DNA, 25 bp, Homo sapien
acttagaattgggagtagatgacag

SEQ ID NO: 5629061 - DNA, 25 bp, Homo sapien
tgcggaaatgacttagaattgggag

SEQ ID NO: 5629062 - DNA, 25 bp, Homo sapien
agactagggaaatgcaggtttacta

SEQ ID NO: 5629063 - DNA, 25 bp, Homo sapien
tgaactaggtagtagcactgtctgt

SEQ ID NO: 5629064 - DNA, 25 bp, Homo sapien
caaaacgatagttacaattctaggt

SEQ ID NO: 5629065 - DNA, 25 bp, Homo sapien
acctagaattgtaactatcgttttg

SEQ ID NO: 5629066 - DNA, 25 bp, Homo sapien
aatgccatccatatacctgatcaac

SEQ ID NO: 5629067 - DNA, 25 bp, Homo sapien
aagcaagggacagaataaagttttg

SEQ ID NO: 5629068 - DNA, 25 bp, Homo sapien
tttatataataaactctgaggaaac

SEQ ID NO: 5629069 - DNA, 25 bp, Homo sapien
aaagaacgtaacaaatagaaggata

SEQ ID NO: 5629070 - DNA, 25 bp, Homo sapien
agaacgtaacaaatagaaggatagt

SEQ ID NO: 5629071 - DNA, 25 bp, Homo sapien
gatcaacttgaaaagatggagaaac

SEQ ID NO: 5629072 - DNA, 25 bp, Homo sapien
gagaaagaaagataaaatgaaagat

SEQ ID NO: 5629073 - DNA, 25 bp, Homo sapien
taatcaaataaatgtagactgtaaa

SEQ ID NO: 5629074 - DNA, 25 bp, Homo sapien
atatctaaacccttaatggaaaggc

SEQ ID NO: 5629075 - DNA, 25 bp, Homo sapien
acaagtaattgtatggtaaatagtt

SEQ ID NO: 5629076 - DNA, 25 bp, Homo sapien
aaaatgaaagatacaatgttcttaa

SEQ ID NO: 5629077 - DNA, 25 bp, Homo sapien
tgcgctcgaaaggctcgtctcgcag

SEQ ID NO: 5629078 - DNA, 25 bp, Homo sapien
ggcagtaggaccctgaaccaaatgc

SEQ ID NO: 5629079 - DNA, 25 bp, Homo sapien
tgtactcacaggtaaggtcctagga

SEQ ID NO: 5629080 - DNA, 25 bp, Homo sapien
cagggcactctgtggctcgattcat

SEQ ID NO: 5629081 - DNA, 25 bp, Homo sapien
ggtgggaagattccagctcttgtac

SEQ ID NO: 5629082 - DNA, 25 bp, Homo sapien
ccctctccctacagcaggggcgtgg

SEQ ID NO: 5629083 - DNA, 25 bp, Homo sapien
tttttcgtgacgacagacggatgga

SEQ ID NO: 5629084 - DNA, 25 bp, Homo sapien
gcgtggagcaaatgtgcattcagga

SEQ ID NO: 5629085 - DNA, 25 bp, Homo sapien
gttgaagtgtctgcagaccctctcc

SEQ ID NO: 5629086 - DNA, 25 bp, Homo sapien
gcctcagacgactccggcagtagga

SEQ ID NO: 5629087 - DNA, 25 bp, Homo sapien
aaccaaatgcctgagctgcgctcga

SEQ ID NO: 5629088 - DNA, 25 bp, Homo sapien
aggagtgtttcagtacggacagata

SEQ ID NO: 5629089 - DNA, 25 bp, Homo sapien
ctaaatgttataaagaggcatggtt

SEQ ID NO: 5629090 - DNA, 25 bp, Homo sapien
tcaatggcagatacatcttggaaga

SEQ ID NO: 5629091 - DNA, 25 bp, Homo sapien
aggttcttgacatcaggaggagtgt

SEQ ID NO: 5629092 - DNA, 25 bp, Homo sapien
acggacagataatggcttgttaggc

SEQ ID NO: 5629093 - DNA, 25 bp, Homo sapien
ggcgcattataaggacggtgatcta

SEQ ID NO: 5629094 - DNA, 25 bp, Homo sapien
tctatgtgctagataccagggagtg

SEQ ID NO: 5629095 - DNA, 25 bp, Homo sapien
cttggaagaagaaatgatccgtgca

SEQ ID NO: 5629096 - DNA, 25 bp, Homo sapien
ggcagaccagtcaatgggttccatg

SEQ ID NO: 5629097 - DNA, 25 bp, Homo sapien
cttttcagccaaggatcggagatga

SEQ ID NO: 5629098 - DNA, 25 bp, Homo sapien
aaatgatccgtgcaccaggtggttt

SEQ ID NO: 5629099 - DNA, 25 bp, Homo sapien
taatgatattgattattaataccgg

SEQ ID NO: 5629100 - DNA, 25 bp, Homo sapien
ccggtattaataatcaatatcatta

SEQ ID NO: 5629101 - DNA, 25 bp, Homo sapien
cccagaagatcttgccagtagaaat

SEQ ID NO: 5629102 - DNA, 25 bp, Homo sapien
ttggggtcatactactttctgtctc

SEQ ID NO: 5629103 - DNA, 25 bp, Homo sapien
aatgaagctctattgcatcacatac

SEQ ID NO: 5629104 - DNA, 25 bp, Homo sapien
ttacaattatgtattcagccagtac

SEQ ID NO: 5629105 - DNA, 25 bp, Homo sapien
aagaggtaatactaagaactgatga

SEQ ID NO: 5629106 - DNA, 25 bp, Homo sapien
tagaaattaataaggactgtgtact

SEQ ID NO: 5629107 - DNA, 25 bp, Homo sapien
ttgccagtagaaattaataaggact

SEQ ID NO: 5629108 - DNA, 25 bp, Homo sapien
acattccaaagaggtaatactaaga

SEQ ID NO: 5629109 - DNA, 25 bp, Homo sapien
ccccctaggagacttctcagttggg

SEQ ID NO: 5629110 - DNA, 25 bp, Homo sapien
atttatctggtacaaaaatgaagct

SEQ ID NO: 5629111 - DNA, 25 bp, Homo sapien
taggagacttctcagttggggtcat

SEQ ID NO: 5629112 - DNA, 25 bp, Homo sapien
ttctatatggacctgagagaggaag

SEQ ID NO: 5629113 - DNA, 25 bp, Homo sapien
tctgtgagtgtttgaaacttcccgc

SEQ ID NO: 5629114 - DNA, 25 bp, Homo sapien
tggtttatgctaacagtcctgccta

SEQ ID NO: 5629115 - DNA, 25 bp, Homo sapien
tcccgcatgtgcctcagcaatggcc

SEQ ID NO: 5629116 - DNA, 25 bp, Homo sapien
ggcaaagaaggagtaactgacttat

SEQ ID NO: 5629117 - DNA, 25 bp, Homo sapien
ttcaggtccctggtctggtttatgc

SEQ ID NO: 5629118 - DNA, 25 bp, Homo sapien
aatgatcaagccctgggggcgatta

SEQ ID NO: 5629119 - DNA, 25 bp, Homo sapien
tgtaataatgtacagtgagccattt

SEQ ID NO: 5629120 - DNA, 25 bp, Homo sapien
ctctcctacaaagtgggacctgttc

SEQ ID NO: 5629121 - DNA, 25 bp, Homo sapien
tgagaattacccagaggaaacagtc

SEQ ID NO: 5629122 - DNA, 25 bp, Homo sapien
aagtgggacctgttctatatggacc

SEQ ID NO: 5629123 - DNA, 25 bp, Homo sapien
ttgtaagggaaaaaatatatgtgtc

SEQ ID NO: 5629124 - DNA, 25 bp, Homo sapien
agtacttctttaggattcaccattt

SEQ ID NO: 5629125 - DNA, 25 bp, Homo sapien
tacaatcaaatccaacacagttctc

SEQ ID NO: 5629126 - DNA, 25 bp, Homo sapien
gcacatgaaatgatgaaataaagct

SEQ ID NO: 5629127 - DNA, 25 bp, Homo sapien
aatgaaaatacctttgcaagtcttc

SEQ ID NO: 5629128 - DNA, 25 bp, Homo sapien
tttacaatgactgcaaaaattttat

SEQ ID NO: 5629129 - DNA, 25 bp, Homo sapien
ctgggcattccaaaccctagtttcc

SEQ ID NO: 5629130 - DNA, 25 bp, Homo sapien
cataatcagaagtgcagttggtgag

SEQ ID NO: 5629131 - DNA, 25 bp, Homo sapien
tgtatatatgttatctgggcattcc

SEQ ID NO: 5629132 - DNA, 25 bp, Homo sapien
tccttgggtataatgacaaattctc

SEQ ID NO: 5629133 - DNA, 25 bp, Homo sapien
cccaaatcaagaccttcaagatatc

SEQ ID NO: 5629134 - DNA, 25 bp, Homo sapien
gtgattaatcacaacagagacaata

SEQ ID NO: 5629135 - DNA, 25 bp, Homo sapien
aaacgtttgctgacagagccacagg

SEQ ID NO: 5629136 - DNA, 25 bp, Homo sapien
atttgccaatgtattgacatctgct

SEQ ID NO: 5629137 - DNA, 25 bp, Homo sapien
cagagacaataatggcacacaatgc

SEQ ID NO: 5629138 - DNA, 25 bp, Homo sapien
ttgaaacatagtcacagccatttgc

SEQ ID NO: 5629139 - DNA, 25 bp, Homo sapien
atcacaacagagacaataatggcac

SEQ ID NO: 5629140 - DNA, 25 bp, Homo sapien
gtggccttttgcagaaaacgtttgc

SEQ ID NO: 5629141 - DNA, 25 bp, Homo sapien
tgcctaaaacacttactaggtggcc

SEQ ID NO: 5629142 - DNA, 25 bp, Homo sapien
acaacagagacaataatggcacaca

SEQ ID NO: 5629143 - DNA, 25 bp, Homo sapien
actaggtggccttttgcagaaaacg

SEQ ID NO: 5629144 - DNA, 25 bp, Homo sapien
tttattgaaacatagtcacagccat

SEQ ID NO: 5629145 - DNA, 25 bp, Homo sapien
aaaaagagctgctaaacgagaaacc

SEQ ID NO: 5629146 - DNA, 25 bp, Homo sapien
ggcttctagcaagatagtggccctg

SEQ ID NO: 5629147 - DNA, 25 bp, Homo sapien
tacaccgaaatcctggcagtgaacc

SEQ ID NO: 5629148 - DNA, 25 bp, Homo sapien
tgaccattaccataaaaagagctgc

SEQ ID NO: 5629149 - DNA, 25 bp, Homo sapien
aacgagaaaccatgtgctcagtata

SEQ ID NO: 5629150 - DNA, 25 bp, Homo sapien
acaaatggtttgctcctgatgcgtc

SEQ ID NO: 5629151 - DNA, 25 bp, Homo sapien
ggcagtgaaccataaattgaccatt

SEQ ID NO: 5629152 - DNA, 25 bp, Homo sapien
tcctgatgcgtctgcttagccaagc

SEQ ID NO: 5629153 - DNA, 25 bp, Homo sapien
gctttgacagtacaccgaaatcctg

SEQ ID NO: 5629154 - DNA, 25 bp, Homo sapien
cagtaaaagaggttctcgagccttc

SEQ ID NO: 5629155 - DNA, 25 bp, Homo sapien
agcacacagtggcttctagcaagat

SEQ ID NO: 5629156 - DNA, 25 bp, Homo sapien
aaatgatagattgtttatataatgc

SEQ ID NO: 5629157 - DNA, 25 bp, Homo sapien
agttcccactttgggaaacagggca

SEQ ID NO: 5629158 - DNA, 25 bp, Homo sapien
tatttagaaatctgatcatactgaa

SEQ ID NO: 5629159 - DNA, 25 bp, Homo sapien
taaaacagatatagttcccactttg

SEQ ID NO: 5629160 - DNA, 25 bp, Homo sapien
tcagcactggtaaagggcttcacat

SEQ ID NO: 5629161 - DNA, 25 bp, Homo sapien
cacttaaaattatgctgcgaaaaat

SEQ ID NO: 5629162 - DNA, 25 bp, Homo sapien
aacagggcaaacaccttcctcctac

SEQ ID NO: 5629163 - DNA, 25 bp, Homo sapien
atgctctcagcactggtaaagggct

SEQ ID NO: 5629164 - DNA, 25 bp, Homo sapien
ggtaaagggcttcacatatattaac

SEQ ID NO: 5629165 - DNA, 25 bp, Homo sapien
tatataatgcttacaatgctctcag

SEQ ID NO: 5629166 - DNA, 25 bp, Homo sapien
aaagcaaaacagattcctcaactta

SEQ ID NO: 5629167 - DNA, 25 bp, Homo sapien
ctggggctaacagtactgaccaggg

SEQ ID NO: 5629168 - DNA, 25 bp, Homo sapien
tcagattatctggggctaacagtac

SEQ ID NO: 5629169 - DNA, 25 bp, Homo sapien
agttctatggaaactcagtgccacc

SEQ ID NO: 5629170 - DNA, 25 bp, Homo sapien
actgtttagtggagagtcaactgac

SEQ ID NO: 5629171 - DNA, 25 bp, Homo sapien
gcattgggcaatagctgaaaacttt

SEQ ID NO: 5629172 - DNA, 25 bp, Homo sapien
gatgcacacaactcgacctctcaat

SEQ ID NO: 5629173 - DNA, 25 bp, Homo sapien
tctgggaaccaacctgttcaggaga

SEQ ID NO: 5629174 - DNA, 25 bp, Homo sapien
acttagggatggattttcatggtat

SEQ ID NO: 5629175 - DNA, 25 bp, Homo sapien
tcaggtatcctgggttagttcttta

SEQ ID NO: 5629176 - DNA, 25 bp, Homo sapien
acctgttcaggagatgattaactat

SEQ ID NO: 5629177 - DNA, 25 bp, Homo sapien
gagatctacaacaacactgagtgga

SEQ ID NO: 5629178 - DNA, 25 bp, Homo sapien
tccacagatacagtcagcaacattg

SEQ ID NO: 5629179 - DNA, 25 bp, Homo sapien
cacttggcttagaaattgcaaggaa

SEQ ID NO: 5629180 - DNA, 25 bp, Homo sapien
acagaagcagaagacacttggctta

SEQ ID NO: 5629181 - DNA, 25 bp, Homo sapien
aaaagagcccagcaaattccctcca

SEQ ID NO: 5629182 - DNA, 25 bp, Homo sapien
agaagacacttggcttagaaattgc

SEQ ID NO: 5629183 - DNA, 25 bp, Homo sapien
aagctccacagatacagtcagcaac

SEQ ID NO: 5629184 - DNA, 25 bp, Homo sapien
aaaattagataatcaaacatgtttc

SEQ ID NO: 5629185 - DNA, 25 bp, Homo sapien
cactcaactgttttacaaacctggt

SEQ ID NO: 5629186 - DNA, 25 bp, Homo sapien
aggaaaagagcccagcaaattccct

SEQ ID NO: 5629187 - DNA, 25 bp, Homo sapien
caaacctggttatgtaaaggttgta

SEQ ID NO: 5629188 - DNA, 25 bp, Homo sapien
tacaacaagctccacagatacagtc

SEQ ID NO: 5629189 - DNA, 25 bp, Homo sapien
agcgataaagcatggtattgagaca

SEQ ID NO: 5629190 - DNA, 25 bp, Homo sapien
cagtactgctccccgaccaggattt

SEQ ID NO: 5629191 - DNA, 25 bp, Homo sapien
catgccaaccctcagtacaattcac

SEQ ID NO: 5629192 - DNA, 25 bp, Homo sapien
aatggagttatggcaagcaaatttg

SEQ ID NO: 5629193 - DNA, 25 bp, Homo sapien
aatcgcagtcaccctcaaatggagt

SEQ ID NO: 5629194 - DNA, 25 bp, Homo sapien
gctactaatcaacagagagggcaat

SEQ ID NO: 5629195 - DNA, 25 bp, Homo sapien
ttacagcaatgcactgcacacatat

SEQ ID NO: 5629196 - DNA, 25 bp, Homo sapien
ctgtcaggctattgagcgataaagc

SEQ ID NO: 5629197 - DNA, 25 bp, Homo sapien
aaaagaaaagcattcatgccaaccc

SEQ ID NO: 5629198 - DNA, 25 bp, Homo sapien
catcagttctacaattggtggcttt

SEQ ID NO: 5629199 - DNA, 25 bp, Homo sapien
tatgctaacaaaatcgcagtcaccc

SEQ ID NO: 5629200 - DNA, 25 bp, Homo sapien
tttgtctgcagatttgtcctattcc

SEQ ID NO: 5629201 - DNA, 25 bp, Homo sapien
ttttgtggcccaatacatgattttt

SEQ ID NO: 5629202 - DNA, 25 bp, Homo sapien
gccacagaatccacacagaggccca

SEQ ID NO: 5629203 - DNA, 25 bp, Homo sapien
tatactgaaacttgggtaagggtga

SEQ ID NO: 5629204 - DNA, 25 bp, Homo sapien
tattccagaatgggtatactgaaac

SEQ ID NO: 5629205 - DNA, 25 bp, Homo sapien
tggagtgtgtgctttgcattattca

SEQ ID NO: 5629206 - DNA, 25 bp, Homo sapien
ccgtgccacagaatccacacagagg

SEQ ID NO: 5629207 - DNA, 25 bp, Homo sapien
agaatgggtatactgaaacttgggt

SEQ ID NO: 5629208 - DNA, 25 bp, Homo sapien
ttgtgtgattattttgtggcccaat

SEQ ID NO: 5629209 - DNA, 25 bp, Homo sapien
acacataattaaatggagtgtgtgc

SEQ ID NO: 5629210 - DNA, 25 bp, Homo sapien
gcccaggctactatcccacccgtgc

SEQ ID NO: 5629211 - DNA, 25 bp, Homo sapien
aaatgtgctttgtctgtggataaat

SEQ ID NO: 5629212 - DNA, 25 bp, Homo sapien
catatcaaagaattgtggatagcac

SEQ ID NO: 5629213 - DNA, 25 bp, Homo sapien
tgtggataaattcaagatatagcac

SEQ ID NO: 5629214 - DNA, 25 bp, Homo sapien
atctgttgtttcaggtagctggtac

SEQ ID NO: 5629215 - DNA, 25 bp, Homo sapien
aaggaggactccctttcaggacctc

SEQ ID NO: 5629216 - DNA, 25 bp, Homo sapien
tcaggtagctggtacatcttatatc

SEQ ID NO: 5629217 - DNA, 25 bp, Homo sapien
ctttggcagcattttctagtcagaa

SEQ ID NO: 5629218 - DNA, 25 bp, Homo sapien
catcatatgtcttcaagtggctata

SEQ ID NO: 5629219 - DNA, 25 bp, Homo sapien
tcaaaagaaaggaaactaagccaga

SEQ ID NO: 5629220 - DNA, 25 bp, Homo sapien
caccaaagaccacattttgctctat

SEQ ID NO: 5629221 - DNA, 25 bp, Homo sapien
ttcaagtggctataagatcaaattt

SEQ ID NO: 5629222 - DNA, 25 bp, Homo sapien
agaggctcctcttgggcagagatca

SEQ ID NO: 5629223 - DNA, 25 bp, Homo sapien
agtgggtccagaagccctttggatg

SEQ ID NO: 5629224 - DNA, 25 bp, Homo sapien
tcatgatcccaggcagcagtagttg

SEQ ID NO: 5629225 - DNA, 25 bp, Homo sapien
ccaacaggtctggagaagtccttag

SEQ ID NO: 5629226 - DNA, 25 bp, Homo sapien
aacggagtaaaaaaccacagccatg

SEQ ID NO: 5629227 - DNA, 25 bp, Homo sapien
tgatcctctgcagatgggtctattc

SEQ ID NO: 5629228 - DNA, 25 bp, Homo sapien
gggggacaacttcactgtggactta

SEQ ID NO: 5629229 - DNA, 25 bp, Homo sapien
gaccaaggtacctccagaggagtcc

SEQ ID NO: 5629230 - DNA, 25 bp, Homo sapien
catggacaaagtttgtgaaggcatc

SEQ ID NO: 5629231 - DNA, 25 bp, Homo sapien
gccctttggatgttggtcagaggct

SEQ ID NO: 5629232 - DNA, 25 bp, Homo sapien
taattctactggagatgagtgaccc

SEQ ID NO: 5629233 - DNA, 25 bp, Homo sapien
cacaatgccctggtatttagtggcc

SEQ ID NO: 5629234 - DNA, 25 bp, Homo sapien
tttatggttgccacaatgccctggt

SEQ ID NO: 5629235 - DNA, 25 bp, Homo sapien
tagtctgcttgcaaaactcttcgta

SEQ ID NO: 5629236 - DNA, 25 bp, Homo sapien
tccgctggtctaggaaattgtattc

SEQ ID NO: 5629237 - DNA, 25 bp, Homo sapien
tttctttatggttgccacaatgccc

SEQ ID NO: 5629238 - DNA, 25 bp, Homo sapien
aaactcttcgtaatcttggtcaaaa

SEQ ID NO: 5629239 - DNA, 25 bp, Homo sapien
atgccctggtatttagtggccatgt

SEQ ID NO: 5629240 - DNA, 25 bp, Homo sapien
atggttgccacaatgccctggtatt

SEQ ID NO: 5629241 - DNA, 25 bp, Homo sapien
tagtggccatgtcttccagcccttc

SEQ ID NO: 5629242 - DNA, 25 bp, Homo sapien
gaaggtcattagtctgcttgcaaaa

SEQ ID NO: 5629243 - DNA, 25 bp, Homo sapien
ggtcaaaatccattttccgctggtc

SEQ ID NO: 5629244 - DNA, 25 bp, Homo sapien
ctcaatcgttgactttgagaaggta

SEQ ID NO: 5629245 - DNA, 25 bp, Homo sapien
taccttctcaaagtcaacgattgag

SEQ ID NO: 5629246 - DNA, 25 bp, Homo sapien
accacataatccagacgtatttgtc

SEQ ID NO: 5629247 - DNA, 25 bp, Homo sapien
caggcagcctccttgagaaatggtg

SEQ ID NO: 5629248 - DNA, 25 bp, Homo sapien
ttcccttcaggttatggcagcccat

SEQ ID NO: 5629249 - DNA, 25 bp, Homo sapien
aaaacaattccaacaggcagcctcc

SEQ ID NO: 5629250 - DNA, 25 bp, Homo sapien
atggcagcccataaaaaagcaattt

SEQ ID NO: 5629251 - DNA, 25 bp, Homo sapien
gcgtctccaaactgtgcactaggta

SEQ ID NO: 5629252 - DNA, 25 bp, Homo sapien
gagtaaacagatctatccttgcgtc

SEQ ID NO: 5629253 - DNA, 25 bp, Homo sapien
actgtgcactaggtatgcaagactt

SEQ ID NO: 5629254 - DNA, 25 bp, Homo sapien
tagtgttgtgcctagaatagtataa

SEQ ID NO: 5629255 - DNA, 25 bp, Homo sapien
caccatagctgagtagcaatttacc

SEQ ID NO: 5629256 - DNA, 25 bp, Homo sapien
attatatgtggcataagggcaacct

SEQ ID NO: 5629257 - DNA, 25 bp, Homo sapien
gcttccttacatggtggtggaggat

SEQ ID NO: 5629258 - DNA, 25 bp, Homo sapien
aaagagagaagctacaaagcaactt

SEQ ID NO: 5629259 - DNA, 25 bp, Homo sapien
caattcaggctaagctcagctgggc

SEQ ID NO: 5629260 - DNA, 25 bp, Homo sapien
tcgcctgggctttctcatgagacgt

SEQ ID NO: 5629261 - DNA, 25 bp, Homo sapien
ctattgctgcacaacaaagtagctt

SEQ ID NO: 5629262 - DNA, 25 bp, Homo sapien
tggagggtctatgatggccttactc

SEQ ID NO: 5629263 - DNA, 25 bp, Homo sapien
tgctggtctcgcctgggctttctca

SEQ ID NO: 5629264 - DNA, 25 bp, Homo sapien
agagtcagtgaaagggccactgata

SEQ ID NO: 5629265 - DNA, 25 bp, Homo sapien
tcacctgtctgaagcctaatgcggg

SEQ ID NO: 5629266 - DNA, 25 bp, Homo sapien
agcctaatgcgggctatagactggg

SEQ ID NO: 5629267 - DNA, 25 bp, Homo sapien
catgagacgttagttatctggcagc

SEQ ID NO: 5629268 - DNA, 25 bp, Homo sapien
agtaatagtcattcacaatagcaaa

SEQ ID NO: 5629269 - DNA, 25 bp, Homo sapien
ttaattcttcagggttcagtataat

SEQ ID NO: 5629270 - DNA, 25 bp, Homo sapien
tctaagtaagatagaccccatgctc

SEQ ID NO: 5629271 - DNA, 25 bp, Homo sapien
ataaacccaagagcaaaaatacagg

SEQ ID NO: 5629272 - DNA, 25 bp, Homo sapien
cctagtgcttcttaaagtaatagtc

SEQ ID NO: 5629273 - DNA, 25 bp, Homo sapien
tccattaacagcaaaaacgattttc

SEQ ID NO: 5629274 - DNA, 25 bp, Homo sapien
ttttaatcataaatggttaggcatt

SEQ ID NO: 5629275 - DNA, 25 bp, Homo sapien
catgaaaccaacctaaatatccacc

SEQ ID NO: 5629276 - DNA, 25 bp, Homo sapien
aatacaggtttattcctagtgcttc

SEQ ID NO: 5629277 - DNA, 25 bp, Homo sapien
ccccatgctctgtttaatgagaaaa

SEQ ID NO: 5629278 - DNA, 25 bp, Homo sapien
caccaatggtggactggataaagaa

SEQ ID NO: 5629279 - DNA, 25 bp, Homo sapien
tgggcaggccacatccaccatctga

SEQ ID NO: 5629280 - DNA, 25 bp, Homo sapien
caggagatgacctctggcctatcta

SEQ ID NO: 5629281 - DNA, 25 bp, Homo sapien
atttccccaagggaagcaatgtggt

SEQ ID NO: 5629282 - DNA, 25 bp, Homo sapien
agagaaagcccagactagtggattt

SEQ ID NO: 5629283 - DNA, 25 bp, Homo sapien
gaagggactgtatgcaccttgggca

SEQ ID NO: 5629284 - DNA, 25 bp, Homo sapien
ctgatccccaagggctcctgcacag

SEQ ID NO: 5629285 - DNA, 25 bp, Homo sapien
acagaggtgaagtccaaaaccacca

SEQ ID NO: 5629286 - DNA, 25 bp, Homo sapien
tgcctcagccaatcgcagagaaagc

SEQ ID NO: 5629287 - DNA, 25 bp, Homo sapien
cgtacccacactaaggaagggactg

SEQ ID NO: 5629288 - DNA, 25 bp, Homo sapien
agactagtggatttctgtggggcta

SEQ ID NO: 5629289 - DNA, 25 bp, Homo sapien
ggtatgggaagagctgatttcccca

SEQ ID NO: 5629290 - DNA, 25 bp, Homo sapien
tggttttgactgaaagcgaagtgag

SEQ ID NO: 5629291 - DNA, 25 bp, Homo sapien
tgtatttggcaattaacagacccct

SEQ ID NO: 5629292 - DNA, 25 bp, Homo sapien
aaaagatcacagccctccgatgagc

SEQ ID NO: 5629293 - DNA, 25 bp, Homo sapien
attttacctagtgcatacaactttc

SEQ ID NO: 5629294 - DNA, 25 bp, Homo sapien
aaaaaaagatcacagccctccgatg

SEQ ID NO: 5629295 - DNA, 25 bp, Homo sapien
ttcctcccggtcggtgttgacagtg

SEQ ID NO: 5629296 - DNA, 25 bp, Homo sapien
caattattaacaggggttttacatc

SEQ ID NO: 5629297 - DNA, 25 bp, Homo sapien
tttacatcccggagtttgagtgtct

SEQ ID NO: 5629298 - DNA, 25 bp, Homo sapien
gactgaaagcgaagtgagttttctc

SEQ ID NO: 5629299 - DNA, 25 bp, Homo sapien
tcatcagtggagttgtaatatttct

SEQ ID NO: 5629300 - DNA, 25 bp, Homo sapien
aggctttcctcccggtcggtgttga

SEQ ID NO: 5629301 - DNA, 25 bp, Homo sapien
tgtagcctcactaatggaaaagtag

SEQ ID NO: 5629302 - DNA, 25 bp, Homo sapien
aggaacagatccaaagttagcagta

SEQ ID NO: 5629303 - DNA, 25 bp, Homo sapien
agggaaagtcatgatcatcctaaag

SEQ ID NO: 5629304 - DNA, 25 bp, Homo sapien
agatgccatctctgtaatcgcacat

SEQ ID NO: 5629305 - DNA, 25 bp, Homo sapien
aagtagtatgatgaacaatcattcc

SEQ ID NO: 5629306 - DNA, 25 bp, Homo sapien
tttagggagcaacagtatttaactg

SEQ ID NO: 5629307 - DNA, 25 bp, Homo sapien
cccaatggtgtacaatgtaagggtt

SEQ ID NO: 5629308 - DNA, 25 bp, Homo sapien
gtagttttgaattcaggaacagatc

SEQ ID NO: 5629309 - DNA, 25 bp, Homo sapien
tcgagccatcagtttatgttcagat

SEQ ID NO: 5629310 - DNA, 25 bp, Homo sapien
ttaaaacataactgtagcctcacta

SEQ ID NO: 5629311 - DNA, 25 bp, Homo sapien
cctaaggaaacagacacaagctttc

SEQ ID NO: 5629312 - DNA, 25 bp, Homo sapien
aatggaggtgcagtaacaatctctg

SEQ ID NO: 5629313 - DNA, 25 bp, Homo sapien
cctctcactggatctagacaaattc

SEQ ID NO: 5629314 - DNA, 25 bp, Homo sapien
cttttgctaccagatcacagaggat

SEQ ID NO: 5629315 - DNA, 25 bp, Homo sapien
gacatatttcaccagtaaatgcttc

SEQ ID NO: 5629316 - DNA, 25 bp, Homo sapien
ccacagtgtttctggagcttctgct

SEQ ID NO: 5629317 - DNA, 25 bp, Homo sapien
actgaaaacagctctcgagtggaga

SEQ ID NO: 5629318 - DNA, 25 bp, Homo sapien
aaattatcagctgccttttgctacc

SEQ ID NO: 5629319 - DNA, 25 bp, Homo sapien
ttatgcccacagtgtttctggagct

SEQ ID NO: 5629320 - DNA, 25 bp, Homo sapien
gaaaacagctctcgagtggagacca

SEQ ID NO: 5629321 - DNA, 25 bp, Homo sapien
tgctaccagatcacagaggatttct

SEQ ID NO: 5629322 - DNA, 25 bp, Homo sapien
gtaacaatctctgaatatgtaggag

SEQ ID NO: 5629323 - DNA, 25 bp, Homo sapien
tctgcttggtgaaatgcattgcagc

SEQ ID NO: 5629324 - DNA, 25 bp, Homo sapien
cccatcacctgacaggaggcacagg

SEQ ID NO: 5629325 - DNA, 25 bp, Homo sapien
cagcacactccacgacacaaactac

SEQ ID NO: 5629326 - DNA, 25 bp, Homo sapien
caaataaaagccactgagcaagaac

SEQ ID NO: 5629327 - DNA, 25 bp, Homo sapien
aaagggcatttgagttttgtaggtc

SEQ ID NO: 5629328 - DNA, 25 bp, Homo sapien
tctgaggcttggctcatcagtaacc

SEQ ID NO: 5629329 - DNA, 25 bp, Homo sapien
gggacagagcctcccatcacctgac

SEQ ID NO: 5629330 - DNA, 25 bp, Homo sapien
gtcatgacaaccaaatgggcctgct

SEQ ID NO: 5629331 - DNA, 25 bp, Homo sapien
tccatccccacggggactctggcca

SEQ ID NO: 5629332 - DNA, 25 bp, Homo sapien
tgctgcccaaggtgatgtctgcttg

SEQ ID NO: 5629333 - DNA, 25 bp, Homo sapien
aggcacagggagcctcctttcaagg

SEQ ID NO: 5629334 - DNA, 25 bp, Homo sapien
aaagcaatgcaaagtatttactata

SEQ ID NO: 5629335 - DNA, 25 bp, Homo sapien
ttggaagaggccaattactggcaaa

SEQ ID NO: 5629336 - DNA, 25 bp, Homo sapien
ttgtatcaagatgtagttaaactca

SEQ ID NO: 5629337 - DNA, 25 bp, Homo sapien
cataattgtgcctcaccccacctcc

SEQ ID NO: 5629338 - DNA, 25 bp, Homo sapien
ttaaacatctgtaagtcagaaggat

SEQ ID NO: 5629339 - DNA, 25 bp, Homo sapien
ttatcaagacaaaaagtaaatgtac

SEQ ID NO: 5629340 - DNA, 25 bp, Homo sapien
tcctggaggtgatggcttctttttt

SEQ ID NO: 5629341 - DNA, 25 bp, Homo sapien
cgatctgtgttttgggtttgagagc

SEQ ID NO: 5629342 - DNA, 25 bp, Homo sapien
tttttttcctggaggtgatggcttc

SEQ ID NO: 5629343 - DNA, 25 bp, Homo sapien
agtaaatgtactttggaagtgtaaa

SEQ ID NO: 5629344 - DNA, 25 bp, Homo sapien
aatttgtcgtccagagtcccaacct

SEQ ID NO: 5629345 - DNA, 25 bp, Homo sapien
aggcccccaggtgactcctatgcat

SEQ ID NO: 5629346 - DNA, 25 bp, Homo sapien
ggaactcaacaagagacgcagaatc

SEQ ID NO: 5629347 - DNA, 25 bp, Homo sapien
gaacccatgatgcttgtgcccagtg

SEQ ID NO: 5629348 - DNA, 25 bp, Homo sapien
caaaatgtgagtctgtggactggca

SEQ ID NO: 5629349 - DNA, 25 bp, Homo sapien
tgagactattgaatcagaagctgca

SEQ ID NO: 5629350 - DNA, 25 bp, Homo sapien
tcccaaacgtccaaggctccaaaca

SEQ ID NO: 5629351 - DNA, 25 bp, Homo sapien
atatgaaaagagccttggaacatgt

SEQ ID NO: 5629352 - DNA, 25 bp, Homo sapien
cagaagaaagtcctggcaacttgga

SEQ ID NO: 5629353 - DNA, 25 bp, Homo sapien
aagctgaggcaagacttgctagtct

SEQ ID NO: 5629354 - DNA, 25 bp, Homo sapien
taataggtgctccaggttatcaagc

SEQ ID NO: 5629355 - DNA, 25 bp, Homo sapien
tgtctgcctcactcgggaactcaac

SEQ ID NO: 5629356 - DNA, 25 bp, Homo sapien
ggtaaccactatgaccaagtggcac

SEQ ID NO: 5629357 - DNA, 25 bp, Homo sapien
cctgctagcctcacagggtcatgag

SEQ ID NO: 5629358 - DNA, 25 bp, Homo sapien
acaaagaggtggcccccacattctg

SEQ ID NO: 5629359 - DNA, 25 bp, Homo sapien
ggtggcccccacattctgcattctg

SEQ ID NO: 5629360 - DNA, 25 bp, Homo sapien
cgatgttccaggcaagctacgtagc

SEQ ID NO: 5629361 - DNA, 25 bp, Homo sapien
ctatgaccaagtggcacagcatgag

SEQ ID NO: 5629362 - DNA, 25 bp, Homo sapien
gctacgtagccctgccctgctagcc

SEQ ID NO: 5629363 - DNA, 25 bp, Homo sapien
tccataactacaaagtcccaggccc

SEQ ID NO: 5629364 - DNA, 25 bp, Homo sapien
gcgtgtgcaggctccataactacaa

SEQ ID NO: 5629365 - DNA, 25 bp, Homo sapien
ggctgggagccttgctctatattgg

SEQ ID NO: 5629366 - DNA, 25 bp, Homo sapien
ggcagtccctcggccgatgttccag

SEQ ID NO: 5629367 - DNA, 25 bp, Homo sapien
aagaaggaaggcttgtaactactta

SEQ ID NO: 5629368 - DNA, 25 bp, Homo sapien
tttgtgccttacagtgacaggctgc

SEQ ID NO: 5629369 - DNA, 25 bp, Homo sapien
ttaaagatgtctggaaaattgactc

SEQ ID NO: 5629370 - DNA, 25 bp, Homo sapien
ggctgcaaacgatagaattcaaccc

SEQ ID NO: 5629371 - DNA, 25 bp, Homo sapien
aacatattggtgagaaagatgaaga

SEQ ID NO: 5629372 - DNA, 25 bp, Homo sapien
gccgccttgactgtacaatgagccc

SEQ ID NO: 5629373 - DNA, 25 bp, Homo sapien
agagtccacaaaacatattggtgag

SEQ ID NO: 5629374 - DNA, 25 bp, Homo sapien
tacagtgacaggctgcaaacgatag

SEQ ID NO: 5629375 - DNA, 25 bp, Homo sapien
attcaacccaaactgtcacaagaaa

SEQ ID NO: 5629376 - DNA, 25 bp, Homo sapien
tcctccgtcaacgaggccgttttca

SEQ ID NO: 5629377 - DNA, 25 bp, Homo sapien
actggcttaaatctactatcgcatc

SEQ ID NO: 5629378 - DNA, 25 bp, Homo sapien
tcagaaatatatgcaatgttagatc

SEQ ID NO: 5629379 - DNA, 25 bp, Homo sapien
ataggttgacttctgagtgatgaac

SEQ ID NO: 5629380 - DNA, 25 bp, Homo sapien
gaaaaattttagagctgtagtttgc

SEQ ID NO: 5629381 - DNA, 25 bp, Homo sapien
tcagggatatgtaataataccattc

SEQ ID NO: 5629382 - DNA, 25 bp, Homo sapien
tgtattcctaagattgtggccagat

SEQ ID NO: 5629383 - DNA, 25 bp, Homo sapien
cacgtccctgctactacataacaag

SEQ ID NO: 5629384 - DNA, 25 bp, Homo sapien
ttgtggccagattttgaatgactaa

SEQ ID NO: 5629385 - DNA, 25 bp, Homo sapien
aaacagttctatgtacagtagcatc

SEQ ID NO: 5629386 - DNA, 25 bp, Homo sapien
agagctgtagtttgcacgatagaaa

SEQ ID NO: 5629387 - DNA, 25 bp, Homo sapien
ccaaggagctttcccacgtccctgc

SEQ ID NO: 5629388 - DNA, 25 bp, Homo sapien
tgatggtgtaagtattatagaaaac

SEQ ID NO: 5629389 - DNA, 25 bp, Homo sapien
agcactagatctttggaaatggcct

SEQ ID NO: 5629390 - DNA, 25 bp, Homo sapien
ttcagagtaagcaagaacctagttc

SEQ ID NO: 5629391 - DNA, 25 bp, Homo sapien
cccaggattaacgacacagcactag

SEQ ID NO: 5629392 - DNA, 25 bp, Homo sapien
gttatgaattaggccgttttatctc

SEQ ID NO: 5629393 - DNA, 25 bp, Homo sapien
atttcagagaacagtacttcaatac

SEQ ID NO: 5629394 - DNA, 25 bp, Homo sapien
ttcaaagccataaacctaagccatc

SEQ ID NO: 5629395 - DNA, 25 bp, Homo sapien
cctagatcaaaatcagtgggttatg

SEQ ID NO: 5629396 - DNA, 25 bp, Homo sapien
aatggagagtgcaattaaaatgttc

SEQ ID NO: 5629397 - DNA, 25 bp, Homo sapien
tacttcaatactgaaacaggaaggc

SEQ ID NO: 5629398 - DNA, 25 bp, Homo sapien
gaaacagtttaaatggagagtgcaa

SEQ ID NO: 5629399 - DNA, 25 bp, Homo sapien
aagataatatgtatcagccaggcgc

SEQ ID NO: 5629400 - DNA, 25 bp, Homo sapien
acacccaagctagaatgagggatcg

SEQ ID NO: 5629401 - DNA, 25 bp, Homo sapien
catcatgagtactgctgtgatcctt

SEQ ID NO: 5629402 - DNA, 25 bp, Homo sapien
ggttttccctcctcaccagcaccga

SEQ ID NO: 5629403 - DNA, 25 bp, Homo sapien
gacacccaagctagaatgagggatc

SEQ ID NO: 5629404 - DNA, 25 bp, Homo sapien
ttctcatcatgagtactgctgtgat

SEQ ID NO: 5629405 - DNA, 25 bp, Homo sapien
ggggcagccaaaggatccttctcat

SEQ ID NO: 5629406 - DNA, 25 bp, Homo sapien
ttttaagtatgaagacagctgttca

SEQ ID NO: 5629407 - DNA, 25 bp, Homo sapien
tttttttaagtatgaagacagctgt

SEQ ID NO: 5629408 - DNA, 25 bp, Homo sapien
aagtatgaagacagctgttcattgt

SEQ ID NO: 5629409 - DNA, 25 bp, Homo sapien
gggacacccaagctagaatgaggga

SEQ ID NO: 5629410 - DNA, 25 bp, Homo sapien
ccctcctcaccagcaccgagaagtc

SEQ ID NO: 5629411 - DNA, 25 bp, Homo sapien
attgtaatatgaatgggccttctgc

SEQ ID NO: 5629412 - DNA, 25 bp, Homo sapien
aaataccggtcaataggccacacag

SEQ ID NO: 5629413 - DNA, 25 bp, Homo sapien
ggacatcaggctgtgaatgaagaca

SEQ ID NO: 5629414 - DNA, 25 bp, Homo sapien
tcctttagtgccattgtggactcac

SEQ ID NO: 5629415 - DNA, 25 bp, Homo sapien
tatccaagtatcagaggggaaaaaa

SEQ ID NO: 5629416 - DNA, 25 bp, Homo sapien
taggagaccggctttgcaaagccct

SEQ ID NO: 5629417 - DNA, 25 bp, Homo sapien
gttttcggccacaatgagtccttta

SEQ ID NO: 5629418 - DNA, 25 bp, Homo sapien
gctccaataaatgggctggagagaa

SEQ ID NO: 5629419 - DNA, 25 bp, Homo sapien
gccaaaaggtaacataaatctcaga

SEQ ID NO: 5629420 - DNA, 25 bp, Homo sapien
gaccccaataaacagcccaagtatc

SEQ ID NO: 5629421 - DNA, 25 bp, Homo sapien
tggactcacaatgcacatggacatc

SEQ ID NO: 5629422 - DNA, 25 bp, Homo sapien
tccattataacagaatcgaaatttc

SEQ ID NO: 5629423 - DNA, 25 bp, Homo sapien
atggggataggaactttgtcttgtt

SEQ ID NO: 5629424 - DNA, 25 bp, Homo sapien
ctcaatgtcgcaaacagtcatgacc

SEQ ID NO: 5629425 - DNA, 25 bp, Homo sapien
cagaatagaaagcagagtttattac

SEQ ID NO: 5629426 - DNA, 25 bp, Homo sapien
tattatgcagaacaacacatgcttc

SEQ ID NO: 5629427 - DNA, 25 bp, Homo sapien
ccacaataaccctacggacaattcc

SEQ ID NO: 5629428 - DNA, 25 bp, Homo sapien
agaggcttatgaaaatgcaacagaa

SEQ ID NO: 5629429 - DNA, 25 bp, Homo sapien
ccttactgcatgcctagcacctagt

SEQ ID NO: 5629430 - DNA, 25 bp, Homo sapien
aaacagtcatgacctagaggcttat

SEQ ID NO: 5629431 - DNA, 25 bp, Homo sapien
atcactgctttatggggattatttc

SEQ ID NO: 5629432 - DNA, 25 bp, Homo sapien
gcttaacacatagtaggaggcactg

SEQ ID NO: 5629433 - DNA, 25 bp, Homo sapien
tatgaataaaggtaatacatgccat

SEQ ID NO: 5629434 - DNA, 25 bp, Homo sapien
tcagtcatgtacaaggtatgtcttc

SEQ ID NO: 5629435 - DNA, 25 bp, Homo sapien
ttctcctcaaaggcatgatggatgc

SEQ ID NO: 5629436 - DNA, 25 bp, Homo sapien
tgatctcttggagctgacctagggg

SEQ ID NO: 5629437 - DNA, 25 bp, Homo sapien
gaaggtaatacatttagcaggcctt

SEQ ID NO: 5629438 - DNA, 25 bp, Homo sapien
ctgacctagggggtgtcttttccta

SEQ ID NO: 5629439 - DNA, 25 bp, Homo sapien
taaaaggagccatttattttcagtc

SEQ ID NO: 5629440 - DNA, 25 bp, Homo sapien
tttagcaggccttatcaaagataac

SEQ ID NO: 5629441 - DNA, 25 bp, Homo sapien
ttagacaatcaaaactccattctcc

SEQ ID NO: 5629442 - DNA, 25 bp, Homo sapien
tttgctttgggccttaaactgaatc

SEQ ID NO: 5629443 - DNA, 25 bp, Homo sapien
tgatggatgccttcaactttgtagc

SEQ ID NO: 5629444 - DNA, 25 bp, Homo sapien
acttcgacgagtcgctagtgctgct

SEQ ID NO: 5629445 - DNA, 25 bp, Homo sapien
gccgcctacctggcgggcctcatcc

SEQ ID NO: 5629446 - DNA, 25 bp, Homo sapien
ctcgctcgtcatgatcgccgagtac

SEQ ID NO: 5629447 - DNA, 25 bp, Homo sapien
tgatcgccgagtacttcgacgagtc

SEQ ID NO: 5629448 - DNA, 25 bp, Homo sapien
ggccgccatgttcgagtcgctcttc

SEQ ID NO: 5629449 - DNA, 25 bp, Homo sapien
tcgcacacaacacgctggcctacga

SEQ ID NO: 5629450 - DNA, 25 bp, Homo sapien
gagcacttcgccatgttcgcacaca

SEQ ID NO: 5629451 - DNA, 25 bp, Homo sapien
ctacaaccagtactgcccggccttc

SEQ ID NO: 5629452 - DNA, 25 bp, Homo sapien
gacgacgtgctctacgccaagctca

SEQ ID NO: 5629453 - DNA, 25 bp, Homo sapien
cgcgctggcgagcacttcgccatgt

SEQ ID NO: 5629454 - DNA, 25 bp, Homo sapien
cgtgcccaacgcctcgctcgaggcc

SEQ ID NO: 5629455 - DNA, 25 bp, Homo sapien
tcactgtggtaactgagataaaatc

SEQ ID NO: 5629456 - DNA, 25 bp, Homo sapien
gcagttgggattatatgtatgagtc

SEQ ID NO: 5629457 - DNA, 25 bp, Homo sapien
ttgatatgcatgactcaggggtaac

SEQ ID NO: 5629458 - DNA, 25 bp, Homo sapien
gcttaaaggaaatgggtcaacaatc

SEQ ID NO: 5629459 - DNA, 25 bp, Homo sapien
gggagctaagggaatcaatattatc

SEQ ID NO: 5629460 - DNA, 25 bp, Homo sapien
gaagcagggtagttctcactgtggt

SEQ ID NO: 5629461 - DNA, 25 bp, Homo sapien
tgactcaggggtaaccaacaccaaa

SEQ ID NO: 5629462 - DNA, 25 bp, Homo sapien
ttagaagattttgacatgacccgct

SEQ ID NO: 5629463 - DNA, 25 bp, Homo sapien
cttctaggaaatgggaagattgcaa

SEQ ID NO: 5629464 - DNA, 25 bp, Homo sapien
ctttatcaccctggctggaaagcag

SEQ ID NO: 5629465 - DNA, 25 bp, Homo sapien
gtctgtataaccagaagcagggtag

SEQ ID NO: 5629466 - DNA, 25 bp, Homo sapien
gccaccgagtcacagtggcaggaag

SEQ ID NO: 5629467 - DNA, 25 bp, Homo sapien
taagcgaaggattcaggctcctact

SEQ ID NO: 5629468 - DNA, 25 bp, Homo sapien
atcaaaacgcatcaaagggctgcag

SEQ ID NO: 5629469 - DNA, 25 bp, Homo sapien
aagagaaaaactcagagcaaggtgt

SEQ ID NO: 5629470 - DNA, 25 bp, Homo sapien
gccccagaaaggaactgtgatcttc

SEQ ID NO: 5629471 - DNA, 25 bp, Homo sapien
tagctctcagcctggtaagcgaagg

SEQ ID NO: 5629472 - DNA, 25 bp, Homo sapien
aggagtgagagaatcagcattatca

SEQ ID NO: 5629473 - DNA, 25 bp, Homo sapien
aagggacaatctaggtaatggcctc

SEQ ID NO: 5629474 - DNA, 25 bp, Homo sapien
gtaagaaagctattggtggaaagaa

SEQ ID NO: 5629475 - DNA, 25 bp, Homo sapien
tatcacaggtgcagaaaacttcaac

SEQ ID NO: 5629476 - DNA, 25 bp, Homo sapien
aagaaaagacttgaaacagattggc

SEQ ID NO: 5629477 - DNA, 25 bp, Homo sapien
gtacaacatcgtaaagtgtgagaca

SEQ ID NO: 5629478 - DNA, 25 bp, Homo sapien
tgtctcacactttacgatgttgtac

SEQ ID NO: 5629479 - DNA, 25 bp, Homo sapien
tccagcaggagtgccataatatgct

SEQ ID NO: 5629480 - DNA, 25 bp, Homo sapien
ataacacactactatagagactttt

SEQ ID NO: 5629481 - DNA, 25 bp, Homo sapien
taatgccactgaattgtacacttaa

SEQ ID NO: 5629482 - DNA, 25 bp, Homo sapien
tttgagagtctccttaatgtccacc

SEQ ID NO: 5629483 - DNA, 25 bp, Homo sapien
aatgtccaccagtgatgagaaggat

SEQ ID NO: 5629484 - DNA, 25 bp, Homo sapien
tccttcagataatccagcaggagtg

SEQ ID NO: 5629485 - DNA, 25 bp, Homo sapien
aaagaaaaaagttatgatttatcta

SEQ ID NO: 5629486 - DNA, 25 bp, Homo sapien
ccataatatgctagtacaaagacat

SEQ ID NO: 5629487 - DNA, 25 bp, Homo sapien
acacttaaaaatggttaaaatgatc

SEQ ID NO: 5629488 - DNA, 25 bp, Homo sapien
tattatgatagtacttaatgccact

SEQ ID NO: 5629489 - DNA, 25 bp, Homo sapien
ccagtgatgagaaggattaaaatat

SEQ ID NO: 5629490 - DNA, 25 bp, Homo sapien
atattaggaaatgacctgaggaacc

SEQ ID NO: 5629491 - DNA, 25 bp, Homo sapien
gagggtaattaggatacgtgtgctc

SEQ ID NO: 5629492 - DNA, 25 bp, Homo sapien
agggacagatattaggaaatgacct

SEQ ID NO: 5629493 - DNA, 25 bp, Homo sapien
tttagaatctcaaatgggttctgct

SEQ ID NO: 5629494 - DNA, 25 bp, Homo sapien
gcaactttagagactaagagtattc

SEQ ID NO: 5629495 - DNA, 25 bp, Homo sapien
tgctctgaaagctacacaaggcttc

SEQ ID NO: 5629496 - DNA, 25 bp, Homo sapien
ttaggatacgtgtgctctgaaagct

SEQ ID NO: 5629497 - DNA, 25 bp, Homo sapien
gctacacaaggcttcagagaattga

SEQ ID NO: 5629498 - DNA, 25 bp, Homo sapien
tagccaagaggagcatattacatat

SEQ ID NO: 5629499 - DNA, 25 bp, Homo sapien
ctcaaatgggttctgctgaggaaga

SEQ ID NO: 5629500 - DNA, 25 bp, Homo sapien
aagaaaattagccaagaggagcata

SEQ ID NO: 5629501 - DNA, 25 bp, Homo sapien
cagctggtacgaagactttgcaaac

SEQ ID NO: 5629502 - DNA, 25 bp, Homo sapien
agaggaatttctgcaagacattgcc

SEQ ID NO: 5629503 - DNA, 25 bp, Homo sapien
aaattgtttggcctggtaggtttca

SEQ ID NO: 5629504 - DNA, 25 bp, Homo sapien
aaaaagagtgatctgtttgcagcag

SEQ ID NO: 5629505 - DNA, 25 bp, Homo sapien
aaaagtgaaaagcaagctgtgattc

SEQ ID NO: 5629506 - DNA, 25 bp, Homo sapien
agtttactaattctgcagccgccct

SEQ ID NO: 5629507 - DNA, 25 bp, Homo sapien
aaggtgttacgaaaagtgaaaagca

SEQ ID NO: 5629508 - DNA, 25 bp, Homo sapien
gcagccgcccttcacaaactccagc

SEQ ID NO: 5629509 - DNA, 25 bp, Homo sapien
agagcccacagactggaatactaaa

SEQ ID NO: 5629510 - DNA, 25 bp, Homo sapien
tgcgatgttgcaaggtgttacgaaa

SEQ ID NO: 5629511 - DNA, 25 bp, Homo sapien
gctgtgattcagctggtacgaagac

SEQ ID NO: 5629512 - DNA, 25 bp, Homo sapien
ttccgaagctcatggttctaggcac

SEQ ID NO: 5629513 - DNA, 25 bp, Homo sapien
tgcacaacttcgggagccatcactt

SEQ ID NO: 5629514 - DNA, 25 bp, Homo sapien
ctaaattattaaggtgaaggtagaa

SEQ ID NO: 5629515 - DNA, 25 bp, Homo sapien
ttaataatgcaatgatggccttgct

SEQ ID NO: 5629516 - DNA, 25 bp, Homo sapien
ggtagaagatgattaaagcgtgtta

SEQ ID NO: 5629517 - DNA, 25 bp, Homo sapien
ttaagtagctagtgcttacaggatt

SEQ ID NO: 5629518 - DNA, 25 bp, Homo sapien
ttgttgtgttccagaaggtgtcatt

SEQ ID NO: 5629519 - DNA, 25 bp, Homo sapien
ctgcagtgtgaatagtgtcctccat

SEQ ID NO: 5629520 - DNA, 25 bp, Homo sapien
agataccatggtaagagatagtatg

SEQ ID NO: 5629521 - DNA, 25 bp, Homo sapien
agtgggaaaagcacaagtttttaga

SEQ ID NO: 5629522 - DNA, 25 bp, Homo sapien
gagatagtatgttatagtgggaaaa

SEQ ID NO: 5629523 - DNA, 25 bp, Homo sapien
ctgcttgacctttactgccaacgcc

SEQ ID NO: 5629524 - DNA, 25 bp, Homo sapien
acacaaatggtcagaggtcccttat

SEQ ID NO: 5629525 - DNA, 25 bp, Homo sapien
acagagtcagagataaaaaatatat

SEQ ID NO: 5629526 - DNA, 25 bp, Homo sapien
ggtggggagcttgaatgttattacc

SEQ ID NO: 5629527 - DNA, 25 bp, Homo sapien
actgccaacgccaacacaaatggtc

SEQ ID NO: 5629528 - DNA, 25 bp, Homo sapien
ggcgagtagctaggtttggccaaaa

SEQ ID NO: 5629529 - DNA, 25 bp, Homo sapien
gatatggttgcgtgattgtgacctt

SEQ ID NO: 5629530 - DNA, 25 bp, Homo sapien
tgtaaaggctgcaaaacaggctcaa

SEQ ID NO: 5629531 - DNA, 25 bp, Homo sapien
aaaatatgaactagaaaggcaggaa

SEQ ID NO: 5629532 - DNA, 25 bp, Homo sapien
catgatcttgtgggaaaaccctgat

SEQ ID NO: 5629533 - DNA, 25 bp, Homo sapien
ttgcagtggctcacgacgttttttt

SEQ ID NO: 5629534 - DNA, 25 bp, Homo sapien
accacaaaatcagtcaaacacactc

SEQ ID NO: 5629535 - DNA, 25 bp, Homo sapien
cccttggtttccacgggcagatggg

SEQ ID NO: 5629536 - DNA, 25 bp, Homo sapien
cacttgaatccacagctcctctagg

SEQ ID NO: 5629537 - DNA, 25 bp, Homo sapien
gattaaggcctgcaacccagtacga

SEQ ID NO: 5629538 - DNA, 25 bp, Homo sapien
gacttggagctatagtaatgtaagc

SEQ ID NO: 5629539 - DNA, 25 bp, Homo sapien
aaccaagacttggagctatagtaat

SEQ ID NO: 5629540 - DNA, 25 bp, Homo sapien
aaggcctgcaacccagtacgatgca

SEQ ID NO: 5629541 - DNA, 25 bp, Homo sapien
agttaatgccatccctgaataattc

SEQ ID NO: 5629542 - DNA, 25 bp, Homo sapien
atgtaagctgcccttaaccccagtg

SEQ ID NO: 5629543 - DNA, 25 bp, Homo sapien
ggagctatagtaatgtaagctgccc

SEQ ID NO: 5629544 - DNA, 25 bp, Homo sapien
gtacgatgcatttggttcccttggt

SEQ ID NO: 5629545 - DNA, 25 bp, Homo sapien
tgccccataccagagaactcaggga

SEQ ID NO: 5629546 - DNA, 25 bp, Homo sapien
acaaagaccctaaaggttatgtaca

SEQ ID NO: 5629547 - DNA, 25 bp, Homo sapien
ccaagccaacagtgccccataccag

SEQ ID NO: 5629548 - DNA, 25 bp, Homo sapien
gaagcaacggataatgaacaccctt

SEQ ID NO: 5629549 - DNA, 25 bp, Homo sapien
aaaggttatgtacaatgagagaatc

SEQ ID NO: 5629550 - DNA, 25 bp, Homo sapien
agactgtgaggctccagctctcttc

SEQ ID NO: 5629551 - DNA, 25 bp, Homo sapien
tacaatgagagaatcagactgtgag

SEQ ID NO: 5629552 - DNA, 25 bp, Homo sapien
aagctgaagcatgcaggtcatgaat

SEQ ID NO: 5629553 - DNA, 25 bp, Homo sapien
tacaaagacataagcaaggagtttt

SEQ ID NO: 5629554 - DNA, 25 bp, Homo sapien
tgattataatatagaagcaacggat

SEQ ID NO: 5629555 - DNA, 25 bp, Homo sapien
gggaatagcacctggaaaccaggga

SEQ ID NO: 5629556 - DNA, 25 bp, Homo sapien
ttcacaccaaagaatcccaccgcgg

SEQ ID NO: 5629557 - DNA, 25 bp, Homo sapien
gtttagacaatcggtgaagaatgga

SEQ ID NO: 5629558 - DNA, 25 bp, Homo sapien
gaagaatggatgacctcactttccc

SEQ ID NO: 5629559 - DNA, 25 bp, Homo sapien
cgggtcctgaaatgttatgcacgaa

SEQ ID NO: 5629560 - DNA, 25 bp, Homo sapien
tagatagttgagtaaaagcaagctc

SEQ ID NO: 5629561 - DNA, 25 bp, Homo sapien
tgcaggaaagagaacttggttcagg

SEQ ID NO: 5629562 - DNA, 25 bp, Homo sapien
ggttcaggagtgcctacgttgctta

SEQ ID NO: 5629563 - DNA, 25 bp, Homo sapien
acgttgcttaagacaggagagcact

SEQ ID NO: 5629564 - DNA, 25 bp, Homo sapien
attacatagacggatcacagtgcac

SEQ ID NO: 5629565 - DNA, 25 bp, Homo sapien
cggcagaggaccaccgtctctctgt

SEQ ID NO: 5629566 - DNA, 25 bp, Homo sapien
gggagcagtggcttcgtttcatgca

SEQ ID NO: 5629567 - DNA, 25 bp, Homo sapien
gctagactaagccacaggaatgaac

SEQ ID NO: 5629568 - DNA, 25 bp, Homo sapien
tccagttccctcctgtgggtaccgc

SEQ ID NO: 5629569 - DNA, 25 bp, Homo sapien
agtccttattagccggcaaccgaga

SEQ ID NO: 5629570 - DNA, 25 bp, Homo sapien
gtcggcttcttggtctcggcgtgcc

SEQ ID NO: 5629571 - DNA, 25 bp, Homo sapien
gagtggagcagagctcatatgccta

SEQ ID NO: 5629572 - DNA, 25 bp, Homo sapien
ggctggtctctttgtaagggtctac

SEQ ID NO: 5629573 - DNA, 25 bp, Homo sapien
tttttgcatcccacgagtgaccccg

SEQ ID NO: 5629574 - DNA, 25 bp, Homo sapien
gctcatatgcctatggggagaggcc

SEQ ID NO: 5629575 - DNA, 25 bp, Homo sapien
gtgggtaccgctaacggcatcttcc

SEQ ID NO: 5629576 - DNA, 25 bp, Homo sapien
gcgtgccccattcccggccctgtcc

SEQ ID NO: 5629577 - DNA, 25 bp, Homo sapien
attgtgaccaagcgagttacagaga

SEQ ID NO: 5629578 - DNA, 25 bp, Homo sapien
tggaagttgaatgagatgatgttat

SEQ ID NO: 5629579 - DNA, 25 bp, Homo sapien
ataggtaaataaaaggaactgcttc

SEQ ID NO: 5629580 - DNA, 25 bp, Homo sapien
gccaagtactacctggaagttgaat

SEQ ID NO: 5629581 - DNA, 25 bp, Homo sapien
tataaatatgttgatgtagtgcact

SEQ ID NO: 5629582 - DNA, 25 bp, Homo sapien
gatgttatgtcttagtcaaggaaag

SEQ ID NO: 5629583 - DNA, 25 bp, Homo sapien
ataaaagttgaacaaagttaagcta

SEQ ID NO: 5629584 - DNA, 25 bp, Homo sapien
ttaagctatgtgacctgaaccccag

SEQ ID NO: 5629585 - DNA, 25 bp, Homo sapien
aagagactgtatcctggactcaaac

SEQ ID NO: 5629586 - DNA, 25 bp, Homo sapien
atgtagtgcactagagtaatctatc

SEQ ID NO: 5629587 - DNA, 25 bp, Homo sapien
tttcagtacagtaactgccaagtac

SEQ ID NO: 5629588 - DNA, 25 bp, Homo sapien
ggactcaaacgaacagagtgttttc

SEQ ID NO: 5629589 - DNA, 25 bp, Homo sapien
aatattgtatagacacacaggaatt

SEQ ID NO: 5629590 - DNA, 25 bp, Homo sapien
gagagggatttgattgttaggtttg

SEQ ID NO: 5629591 - DNA, 25 bp, Homo sapien
aagtttcccaaatgccggaagttca

SEQ ID NO: 5629592 - DNA, 25 bp, Homo sapien
taaggttttaagtttatgatgtgct

SEQ ID NO: 5629593 - DNA, 25 bp, Homo sapien
atgtaaaatttaatgagagggattt

SEQ ID NO: 5629594 - DNA, 25 bp, Homo sapien
aactccagcacaagtcaaatacctg

SEQ ID NO: 5629595 - DNA, 25 bp, Homo sapien
acatgtatgattacaggaaagaatt

SEQ ID NO: 5629596 - DNA, 25 bp, Homo sapien
tacacaccacacaaaatctaaagtt

SEQ ID NO: 5629597 - DNA, 25 bp, Homo sapien
tccatggagcagattaagtttccca

SEQ ID NO: 5629598 - DNA, 25 bp, Homo sapien
tactgtgcacatagatgtacacacc

SEQ ID NO: 5629599 - DNA, 25 bp, Homo sapien
tcagataaaactacagaatacagat

SEQ ID NO: 5629600 - DNA, 25 bp, Homo sapien
gtgggccctggaaatcctctcatgg

SEQ ID NO: 5629601 - DNA, 25 bp, Homo sapien
gaggacaagtctctccacacagcag

SEQ ID NO: 5629602 - DNA, 25 bp, Homo sapien
gtccatcagacaggacagtcgtgcc

SEQ ID NO: 5629603 - DNA, 25 bp, Homo sapien
tgaggacaatttcatcctgaaaacc

SEQ ID NO: 5629604 - DNA, 25 bp, Homo sapien
aaggcttctgcatcctgtccatcag

SEQ ID NO: 5629605 - DNA, 25 bp, Homo sapien
aggacagtcgtgccttttcaaagtc

SEQ ID NO: 5629606 - DNA, 25 bp, Homo sapien
ttcatcctgaaaaccaggagcgggg

SEQ ID NO: 5629607 - DNA, 25 bp, Homo sapien
ggaaatcctctcatggtgcgggtgg

SEQ ID NO: 5629608 - DNA, 25 bp, Homo sapien
agcagtatcccaggcaccccttcca

SEQ ID NO: 5629609 - DNA, 25 bp, Homo sapien
atcagacaggacagtcgtgcctttt

SEQ ID NO: 5629610 - DNA, 25 bp, Homo sapien
gccaagacgtctgagcagtatccca

SEQ ID NO: 5629611 - DNA, 25 bp, Homo sapien
tttacacagattagataccagacac

SEQ ID NO: 5629612 - DNA, 25 bp, Homo sapien
gctgcaagatggtgtttagaagaat

SEQ ID NO: 5629613 - DNA, 25 bp, Homo sapien
cgtgggattcacagtaagaacaatg

SEQ ID NO: 5629614 - DNA, 25 bp, Homo sapien
acatagtggttaagactctagatgc

SEQ ID NO: 5629615 - DNA, 25 bp, Homo sapien
ctttgtgctcagtaacgtgggattc

SEQ ID NO: 5629616 - DNA, 25 bp, Homo sapien
tctattggaaaaactcatgcctgta

SEQ ID NO: 5629617 - DNA, 25 bp, Homo sapien
ccatagaacaaggataatatcagta

SEQ ID NO: 5629618 - DNA, 25 bp, Homo sapien
agatgctagtgtaagactggccata

SEQ ID NO: 5629619 - DNA, 25 bp, Homo sapien
aaagaggtgagctattaatatgtat

SEQ ID NO: 5629620 - DNA, 25 bp, Homo sapien
tgtttggtccagcccagtaacactt

SEQ ID NO: 5629621 - DNA, 25 bp, Homo sapien
agtaagaacaatgatatagaaagtc

SEQ ID NO: 5629622 - DNA, 25 bp, Homo sapien
tagacagtaaaccaacttaacaggg

SEQ ID NO: 5629623 - DNA, 25 bp, Homo sapien
ccctgttaagttggtttactgtcta

SEQ ID NO: 5629624 - DNA, 25 bp, Homo sapien
cacttaagtaaaataggcgtctaga

SEQ ID NO: 5629625 - DNA, 25 bp, Homo sapien
aaagggcaagaagtcccaataggta

SEQ ID NO: 5629626 - DNA, 25 bp, Homo sapien
ctggcacacaataggagccaaaaaa

SEQ ID NO: 5629627 - DNA, 25 bp, Homo sapien
aaacgaaggcaaatatcagtaagta

SEQ ID NO: 5629628 - DNA, 25 bp, Homo sapien
cccaataggtagataaaaactccac

SEQ ID NO: 5629629 - DNA, 25 bp, Homo sapien
atctgttcagtaaacgaaggcaaat

SEQ ID NO: 5629630 - DNA, 25 bp, Homo sapien
aacgtttgttaaaagtgctgatttc

SEQ ID NO: 5629631 - DNA, 25 bp, Homo sapien
tctagaaaatagccctgcgttaaac

SEQ ID NO: 5629632 - DNA, 25 bp, Homo sapien
gagtaggaatacagaatcgtgcatc

SEQ ID NO: 5629633 - DNA, 25 bp, Homo sapien
tagatgtggtatcagccacagaaat

SEQ ID NO: 5629634 - DNA, 25 bp, Homo sapien
aatcgtgcatcgtgtcccatttgac

SEQ ID NO: 5629635 - DNA, 25 bp, Homo sapien
agcatgccttttgatacctggatta

SEQ ID NO: 5629636 - DNA, 25 bp, Homo sapien
gcttcagagacttgtcctagagttt

SEQ ID NO: 5629637 - DNA, 25 bp, Homo sapien
tagaggcaaattggaaactatttcc

SEQ ID NO: 5629638 - DNA, 25 bp, Homo sapien
agaatatctgaaaacactggggtcc

SEQ ID NO: 5629639 - DNA, 25 bp, Homo sapien
tgcctgtcacaaagaagaaaccaca

SEQ ID NO: 5629640 - DNA, 25 bp, Homo sapien
tcctaaaagtcaggagaatatctga

SEQ ID NO: 5629641 - DNA, 25 bp, Homo sapien
ggtccccaaaacgctgtacatttca

SEQ ID NO: 5629642 - DNA, 25 bp, Homo sapien
tggaacaacgcctcacagcatgcct

SEQ ID NO: 5629643 - DNA, 25 bp, Homo sapien
tgttcagatgaaaagccatgctatt

SEQ ID NO: 5629644 - DNA, 25 bp, Homo sapien
ctagagttttagaggcaaattggaa

SEQ ID NO: 5629645 - DNA, 25 bp, Homo sapien
agaaaccacaaaaatgctgcaaagc

SEQ ID NO: 5629646 - DNA, 25 bp, Homo sapien
aaaattatgcatggagcccgctagg

SEQ ID NO: 5629647 - DNA, 25 bp, Homo sapien
tatttctgaataagcccatcctata

SEQ ID NO: 5629648 - DNA, 25 bp, Homo sapien
agcttaaaaagcgtgttggccaaac

SEQ ID NO: 5629649 - DNA, 25 bp, Homo sapien
tgaactgaattcctactcctgcaat

SEQ ID NO: 5629650 - DNA, 25 bp, Homo sapien
caggagacaagcaacctgccctcag

SEQ ID NO: 5629651 - DNA, 25 bp, Homo sapien
tcactcagagtcacatgaatttatt

SEQ ID NO: 5629652 - DNA, 25 bp, Homo sapien
aatacatgctccagcgaagtgacag

SEQ ID NO: 5629653 - DNA, 25 bp, Homo sapien
ccacactacctaaaagctgggttct

SEQ ID NO: 5629654 - DNA, 25 bp, Homo sapien
gtgctcagcctgcctgctggaaccc

SEQ ID NO: 5629655 - DNA, 25 bp, Homo sapien
ctgaggccaatacatgctccagcga

SEQ ID NO: 5629656 - DNA, 25 bp, Homo sapien
gtctgtaggaagaccaccagctcta

SEQ ID NO: 5629657 - DNA, 25 bp, Homo sapien
ctacatccatctgaccagcagttac

SEQ ID NO: 5629658 - DNA, 25 bp, Homo sapien
agtgctcaaaagccatgtggacacc

SEQ ID NO: 5629659 - DNA, 25 bp, Homo sapien
aattttacacctgacaacacatctc

SEQ ID NO: 5629660 - DNA, 25 bp, Homo sapien
atgccttgtgcaaatctggtgccaa

SEQ ID NO: 5629661 - DNA, 25 bp, Homo sapien
atgtggacaccaaatagtgccgttc

SEQ ID NO: 5629662 - DNA, 25 bp, Homo sapien
aatctggtgccaaagcagtcagcta

SEQ ID NO: 5629663 - DNA, 25 bp, Homo sapien
agcagagtagaatctctcaaaagct

SEQ ID NO: 5629664 - DNA, 25 bp, Homo sapien
cagttacaacaaagcagagtagaat

SEQ ID NO: 5629665 - DNA, 25 bp, Homo sapien
tctgcagcagccttatgccttgtgc

SEQ ID NO: 5629666 - DNA, 25 bp, Homo sapien
gtgcaaatctggtgccaaagcagtc

SEQ ID NO: 5629667 - DNA, 25 bp, Homo sapien
aaatagtgccgttctggacccagat

SEQ ID NO: 5629668 - DNA, 25 bp, Homo sapien
ttatggagcatgtttctaactagct

SEQ ID NO: 5629669 - DNA, 25 bp, Homo sapien
tcattggataagatcaaaacaaatc

SEQ ID NO: 5629670 - DNA, 25 bp, Homo sapien
taggagcttacacaatcagttctcc

SEQ ID NO: 5629671 - DNA, 25 bp, Homo sapien
gtcaggatgttcagacctaacttag

SEQ ID NO: 5629672 - DNA, 25 bp, Homo sapien
ttaatacttcccagatgtcagccac

SEQ ID NO: 5629673 - DNA, 25 bp, Homo sapien
tgtcttgtttataggaaaattggtc

SEQ ID NO: 5629674 - DNA, 25 bp, Homo sapien
ttgtcctagctgtcaggatgttcag

SEQ ID NO: 5629675 - DNA, 25 bp, Homo sapien
atggacgatggttacggtttagctt

SEQ ID NO: 5629676 - DNA, 25 bp, Homo sapien
gtgaaaagtattgcctttatggagc

SEQ ID NO: 5629677 - DNA, 25 bp, Homo sapien
ttgtagctagtgaaaagcaaatttg

SEQ ID NO: 5629678 - DNA, 25 bp, Homo sapien
ataggaaaattggtctcattggata

SEQ ID NO: 5629679 - DNA, 25 bp, Homo sapien
gcaagaattgggagtacactgttct

SEQ ID NO: 5629680 - DNA, 25 bp, Homo sapien
tcttaacagtgagggtggttacaga

SEQ ID NO: 5629681 - DNA, 25 bp, Homo sapien
gactaaagaaaaacactgagtggta

SEQ ID NO: 5629682 - DNA, 25 bp, Homo sapien
tgataacagcacaaagaatggaagg

SEQ ID NO: 5629683 - DNA, 25 bp, Homo sapien
agaaaaatcttaacagtgagggtgg

SEQ ID NO: 5629684 - DNA, 25 bp, Homo sapien
atgcagattgtaaacctaaggtaac

SEQ ID NO: 5629685 - DNA, 25 bp, Homo sapien
attagtggggcttaaagagaaaata

SEQ ID NO: 5629686 - DNA, 25 bp, Homo sapien
aaaacactgagtggtaagaatgaga

SEQ ID NO: 5629687 - DNA, 25 bp, Homo sapien
tgactttgtcaggctaacgcttttt

SEQ ID NO: 5629688 - DNA, 25 bp, Homo sapien
aaagtataaacattagtggggctta

SEQ ID NO: 5629689 - DNA, 25 bp, Homo sapien
tgggagtacactgttctaaggctct

SEQ ID NO: 5629690 - DNA, 25 bp, Homo sapien
gaagtgacgaggtcctcaaggaaga

SEQ ID NO: 5629691 - DNA, 25 bp, Homo sapien
tcttccttgaggacctcgtcacttc

SEQ ID NO: 5629692 - DNA, 25 bp, Homo sapien
tacaccatgggagaacaactgtttt

SEQ ID NO: 5629693 - DNA, 25 bp, Homo sapien
gaagatacatacaccatgggagaac

SEQ ID NO: 5629694 - DNA, 25 bp, Homo sapien
tcatcgggtatgaaatttggtctct

SEQ ID NO: 5629695 - DNA, 25 bp, Homo sapien
ttttgtaagatgtatcactccattc

SEQ ID NO: 5629696 - DNA, 25 bp, Homo sapien
ttggcccaccaacgtatctaatacc

SEQ ID NO: 5629697 - DNA, 25 bp, Homo sapien
tatttggcccacaaataaagcacct

SEQ ID NO: 5629698 - DNA, 25 bp, Homo sapien
actaaggacaaacatgaagatacat

SEQ ID NO: 5629699 - DNA, 25 bp, Homo sapien
accaactgtagcagtcagatttgac

SEQ ID NO: 5629700 - DNA, 25 bp, Homo sapien
attataaccactaaggacaaacatg

SEQ ID NO: 5629701 - DNA, 25 bp, Homo sapien
aaagcaccttactaatcattccagc

SEQ ID NO: 5629702 - DNA, 25 bp, Homo sapien
aatttgatgtcatcgggtatgaaat

SEQ ID NO: 5629703 - DNA, 25 bp, Homo sapien
gtgcagtgatccaatccataaagcc

SEQ ID NO: 5629704 - DNA, 25 bp, Homo sapien
tttcctgaggatgatctacaaagcc

SEQ ID NO: 5629705 - DNA, 25 bp, Homo sapien
gcatctcactgtaatcacgtgcagg

SEQ ID NO: 5629706 - DNA, 25 bp, Homo sapien
caggaggcctgaccgtcagtttcct

SEQ ID NO: 5629707 - DNA, 25 bp, Homo sapien
gtgtgtctcattgggtgcagtgatc

SEQ ID NO: 5629708 - DNA, 25 bp, Homo sapien
gctgaatgagggatctagcatctca

SEQ ID NO: 5629709 - DNA, 25 bp, Homo sapien
gcctcagctccctggtgtcatacag

SEQ ID NO: 5629710 - DNA, 25 bp, Homo sapien
gaccgtcagtttcctgaggatgatc

SEQ ID NO: 5629711 - DNA, 25 bp, Homo sapien
ccagttcagctggctcttcagcact

SEQ ID NO: 5629712 - DNA, 25 bp, Homo sapien
tgaggatgatctacaaagccagttc

SEQ ID NO: 5629713 - DNA, 25 bp, Homo sapien
tgtaatcacgtgcaggaaaaaaagg

SEQ ID NO: 5629714 - DNA, 25 bp, Homo sapien
cccacctgagatccacaactgattc

SEQ ID NO: 5629715 - DNA, 25 bp, Homo sapien
tacaccctgaggaataacaacagac

SEQ ID NO: 5629716 - DNA, 25 bp, Homo sapien
tgaggaataacaacagactaataaa

SEQ ID NO: 5629717 - DNA, 25 bp, Homo sapien
aagtaacgtcagggttagctttctg

SEQ ID NO: 5629718 - DNA, 25 bp, Homo sapien
tggttttacagtgttaacatggcct

SEQ ID NO: 5629719 - DNA, 25 bp, Homo sapien
aacagttctctgtaaaagcactttg

SEQ ID NO: 5629720 - DNA, 25 bp, Homo sapien
catcagcagactaaactactgccct

SEQ ID NO: 5629721 - DNA, 25 bp, Homo sapien
attgttcttagcaaagagtttggtt

SEQ ID NO: 5629722 - DNA, 25 bp, Homo sapien
agctttctggacaatagaatcatcc

SEQ ID NO: 5629723 - DNA, 25 bp, Homo sapien
catgaacatggcatattgctgccct

SEQ ID NO: 5629724 - DNA, 25 bp, Homo sapien
ttggaagcacaaggtttcatcagca

SEQ ID NO: 5629725 - DNA, 25 bp, Homo sapien
agtttctcaaagcacccgaccatca

SEQ ID NO: 5629726 - DNA, 25 bp, Homo sapien
tgatggtcgggtgctttgagaaact

SEQ ID NO: 5629727 - DNA, 25 bp, Homo sapien
atacataacaggaaaaactgtgaaa

SEQ ID NO: 5629728 - DNA, 25 bp, Homo sapien
cagttggaaaataggttaataagcc

SEQ ID NO: 5629729 - DNA, 25 bp, Homo sapien
cattaggctgcctgagaattcctca

SEQ ID NO: 5629730 - DNA, 25 bp, Homo sapien
ggtgtcacaggagttaaaaataatc

SEQ ID NO: 5629731 - DNA, 25 bp, Homo sapien
ttgtagagatgtaactcattttggt

SEQ ID NO: 5629732 - DNA, 25 bp, Homo sapien
aaaaactgtgaaaaagtctggtatc

SEQ ID NO: 5629733 - DNA, 25 bp, Homo sapien
cttgactgaagacaattagtaatac

SEQ ID NO: 5629734 - DNA, 25 bp, Homo sapien
aaagtcttactctcattaggctgcc

SEQ ID NO: 5629735 - DNA, 25 bp, Homo sapien
gaaaaagtctggtatcaacatattt

SEQ ID NO: 5629736 - DNA, 25 bp, Homo sapien
tggttggtgcaatgttaaaagatac

SEQ ID NO: 5629737 - DNA, 25 bp, Homo sapien
aattcctcagttggaaaataggtta

SEQ ID NO: 5629738 - DNA, 25 bp, Homo sapien
atagaacaaacattgtaggtttaac

SEQ ID NO: 5629739 - DNA, 25 bp, Homo sapien
tgtaggtttaaccagtcatggaata

SEQ ID NO: 5629740 - DNA, 25 bp, Homo sapien
attaggtgaatagtgagtccccctt

SEQ ID NO: 5629741 - DNA, 25 bp, Homo sapien
atggaataatgggtgaataactcag

SEQ ID NO: 5629742 - DNA, 25 bp, Homo sapien
tatctcaaattagccctggggtgtg

SEQ ID NO: 5629743 - DNA, 25 bp, Homo sapien
caaaaagaagaatcctcattaggtg

SEQ ID NO: 5629744 - DNA, 25 bp, Homo sapien
atgggtgaataactcagtgtgactc

SEQ ID NO: 5629745 - DNA, 25 bp, Homo sapien
cttgagtaaagtaaatcttccggaa

SEQ ID NO: 5629746 - DNA, 25 bp, Homo sapien
ggggtgtgttctatagtttgctcag

SEQ ID NO: 5629747 - DNA, 25 bp, Homo sapien
aaccagtcatggaataatgggtgaa

SEQ ID NO: 5629748 - DNA, 25 bp, Homo sapien
cttccggaaatcagatacttattac

SEQ ID NO: 5629749 - DNA, 25 bp, Homo sapien
ttagattactttgacaaacaatgtt

SEQ ID NO: 5629750 - DNA, 25 bp, Homo sapien
aacattgtttgtcaaagtaatctaa

SEQ ID NO: 5629751 - DNA, 25 bp, Homo sapien
ctttaacacccattagattactttg

SEQ ID NO: 5629752 - DNA, 25 bp, Homo sapien
caaagtaatctaatgggtgttaaag

SEQ ID NO: 5629753 - DNA, 25 bp, Homo sapien
ggtttcctgtcacacagaagccttc

SEQ ID NO: 5629754 - DNA, 25 bp, Homo sapien
gtatttgtcagtggtctgtctctgc

SEQ ID NO: 5629755 - DNA, 25 bp, Homo sapien
ctgtctctgccctaaaggaggaatc

SEQ ID NO: 5629756 - DNA, 25 bp, Homo sapien
cctaaaggaggaatcttacatcgat

SEQ ID NO: 5629757 - DNA, 25 bp, Homo sapien
acagttaattagagatgagaaccac

SEQ ID NO: 5629758 - DNA, 25 bp, Homo sapien
ggtggggctactcctggattgattc

SEQ ID NO: 5629759 - DNA, 25 bp, Homo sapien
tgccctagaagccaaacagagcaga

SEQ ID NO: 5629760 - DNA, 25 bp, Homo sapien
caacacaatgtgatcggttagaaca

SEQ ID NO: 5629761 - DNA, 25 bp, Homo sapien
tgacttaataagtgagtgtgtgctt

SEQ ID NO: 5629762 - DNA, 25 bp, Homo sapien
ccaggcctgaaaatcgacagacact

SEQ ID NO: 5629763 - DNA, 25 bp, Homo sapien
gatcggttagaacatccgacgcatc

SEQ ID NO: 5629764 - DNA, 25 bp, Homo sapien
ttccaatcagttagtggaggctgcc

SEQ ID NO: 5629765 - DNA, 25 bp, Homo sapien
aatagaaagtttcagggagatatgg

SEQ ID NO: 5629766 - DNA, 25 bp, Homo sapien
gactgggggcatttgccatgaatgt

SEQ ID NO: 5629767 - DNA, 25 bp, Homo sapien
tcttggacagactggtaacttaagt

SEQ ID NO: 5629768 - DNA, 25 bp, Homo sapien
gtgaagacaaaggtgacaaatttca

SEQ ID NO: 5629769 - DNA, 25 bp, Homo sapien
gctgtgtggctactttaagctcatc

SEQ ID NO: 5629770 - DNA, 25 bp, Homo sapien
ttaagtcaaggcaagtacatgagtt

SEQ ID NO: 5629771 - DNA, 25 bp, Homo sapien
gtacatgagttaaggggctaacagt

SEQ ID NO: 5629772 - DNA, 25 bp, Homo sapien
gaaagtaatgagctaggcaatgtgt

SEQ ID NO: 5629773 - DNA, 25 bp, Homo sapien
gcaatgtgttagaagatgggctatt

SEQ ID NO: 5629774 - DNA, 25 bp, Homo sapien
aggtaccatacttggaaaacactgc

SEQ ID NO: 5629775 - DNA, 25 bp, Homo sapien
ctttaaagtgatcaataaggtgctc

SEQ ID NO: 5629776 - DNA, 25 bp, Homo sapien
taatgttattggatacaggaatctg

SEQ ID NO: 5629777 - DNA, 25 bp, Homo sapien
cattggtcagactaaaaatcaagtt

SEQ ID NO: 5629778 - DNA, 25 bp, Homo sapien
tactggttgcataacaagggtagtg

SEQ ID NO: 5629779 - DNA, 25 bp, Homo sapien
tgagacttacaccaaaagcaaaacc

SEQ ID NO: 5629780 - DNA, 25 bp, Homo sapien
taaggtgctcaaaggtgaacctcca

SEQ ID NO: 5629781 - DNA, 25 bp, Homo sapien
caacttcggtggaacttagaagggc

SEQ ID NO: 5629782 - DNA, 25 bp, Homo sapien
ggaacttagaagggccctactgtgc

SEQ ID NO: 5629783 - DNA, 25 bp, Homo sapien
aagggtagtgcatgaaaatgcagct

SEQ ID NO: 5629784 - DNA, 25 bp, Homo sapien
acatctcatacaaagggaaaagaaa

SEQ ID NO: 5629785 - DNA, 25 bp, Homo sapien
tcacaccatgtattgcttagagcca

SEQ ID NO: 5629786 - DNA, 25 bp, Homo sapien
gatcgaggacctaggtcacatgtct

SEQ ID NO: 5629787 - DNA, 25 bp, Homo sapien
agacatgtgacctaggtcctcgatc

SEQ ID NO: 5629788 - DNA, 25 bp, Homo sapien
tgggaccctacaaattaaactgatc

SEQ ID NO: 5629789 - DNA, 25 bp, Homo sapien
aggcaaaattccaggatctggttca

SEQ ID NO: 5629790 - DNA, 25 bp, Homo sapien
ctgatcacagacaagttaacaagaa

SEQ ID NO: 5629791 - DNA, 25 bp, Homo sapien
ttggggtgtatatcttaaactagcc

SEQ ID NO: 5629792 - DNA, 25 bp, Homo sapien
gctttgtcagatctcaattgagctg

SEQ ID NO: 5629793 - DNA, 25 bp, Homo sapien
tggttgcctaagccataggaaagca

SEQ ID NO: 5629794 - DNA, 25 bp, Homo sapien
gatgccctgcctgtccattcatggt

SEQ ID NO: 5629795 - DNA, 25 bp, Homo sapien
aggttcagtgtctgggaccctacaa

SEQ ID NO: 5629796 - DNA, 25 bp, Homo sapien
ggaagaaatggattctaaatcggga

SEQ ID NO: 5629797 - DNA, 25 bp, Homo sapien
ccaggatctggttcagtaaagtttt

SEQ ID NO: 5629798 - DNA, 25 bp, Homo sapien
ctaaatcgggattggttaataagtg

SEQ ID NO: 5629799 - DNA, 25 bp, Homo sapien
cctttaaaagggaggtgcttgaatg

SEQ ID NO: 5629800 - DNA, 25 bp, Homo sapien
tctgtgcctagaaaccatctgcttc

SEQ ID NO: 5629801 - DNA, 25 bp, Homo sapien
gtctgtggtgcgactcacttccctc

SEQ ID NO: 5629802 - DNA, 25 bp, Homo sapien
atagaaacgggagtgtaccactttc

SEQ ID NO: 5629803 - DNA, 25 bp, Homo sapien
gagctctcccagttaccctgcgtct

SEQ ID NO: 5629804 - DNA, 25 bp, Homo sapien
ggaggtgcttgaatgagctcttcgc

SEQ ID NO: 5629805 - DNA, 25 bp, Homo sapien
ctgttgatattgagagctctcccag

SEQ ID NO: 5629806 - DNA, 25 bp, Homo sapien
cttaggagcatgtcattcaggataa

SEQ ID NO: 5629807 - DNA, 25 bp, Homo sapien
gttagagttgctatcccccactgct

SEQ ID NO: 5629808 - DNA, 25 bp, Homo sapien
tgtttatcagtaagatgagctgctg

SEQ ID NO: 5629809 - DNA, 25 bp, Homo sapien
ctctctgaagatagaaacgggagtg

SEQ ID NO: 5629810 - DNA, 25 bp, Homo sapien
cttaatgaataaggttagaagaaaa

SEQ ID NO: 5629811 - DNA, 25 bp, Homo sapien
tttaaaagctacagttcacaaacca

SEQ ID NO: 5629812 - DNA, 25 bp, Homo sapien
atctccttggactaagaaatggatg

SEQ ID NO: 5629813 - DNA, 25 bp, Homo sapien
tactggaaatctcaggggtgtccta

SEQ ID NO: 5629814 - DNA, 25 bp, Homo sapien
tgtggacaccatccatgcaaaccta

SEQ ID NO: 5629815 - DNA, 25 bp, Homo sapien
ggtgccagaagctagctgttaccca

SEQ ID NO: 5629816 - DNA, 25 bp, Homo sapien
ctgaggtatttttatgaaggtgcca

SEQ ID NO: 5629817 - DNA, 25 bp, Homo sapien
caatgctaagctattctgaggtatt

SEQ ID NO: 5629818 - DNA, 25 bp, Homo sapien
agaaatggatgattggcctttatga

SEQ ID NO: 5629819 - DNA, 25 bp, Homo sapien
ccctgccctcccagtggaatccttt

SEQ ID NO: 5629820 - DNA, 25 bp, Homo sapien
atccaggtgacataatcaacataaa

SEQ ID NO: 5629821 - DNA, 25 bp, Homo sapien
tgttaaaaggataatggtcccatat

SEQ ID NO: 5629822 - DNA, 25 bp, Homo sapien
aataatgcatccagaatgtgcggcc

SEQ ID NO: 5629823 - DNA, 25 bp, Homo sapien
tggtttccacatgatggcccccatc

SEQ ID NO: 5629824 - DNA, 25 bp, Homo sapien
ttagccaaaccaaatcccaatggat

SEQ ID NO: 5629825 - DNA, 25 bp, Homo sapien
ataaagtagtgataaaagcatgtca

SEQ ID NO: 5629826 - DNA, 25 bp, Homo sapien
tggtaaccattacaaacacccaatc

SEQ ID NO: 5629827 - DNA, 25 bp, Homo sapien
cacccaatccaggtatggaactgtt

SEQ ID NO: 5629828 - DNA, 25 bp, Homo sapien
ccagaatgtgcggccaccaaatatc

SEQ ID NO: 5629829 - DNA, 25 bp, Homo sapien
ttgtctggatagttcacactttccc

SEQ ID NO: 5629830 - DNA, 25 bp, Homo sapien
aagaagaacatgcttttcaagtaag

SEQ ID NO: 5629831 - DNA, 25 bp, Homo sapien
tgaaatgaggccaattaaaaacaaa

SEQ ID NO: 5629832 - DNA, 25 bp, Homo sapien
attgactatgtaaataagcactatt

SEQ ID NO: 5629833 - DNA, 25 bp, Homo sapien
gagcaataaaaagtgaatagagaaa

SEQ ID NO: 5629834 - DNA, 25 bp, Homo sapien
tgtaaagaggctgtatagttaaaga

SEQ ID NO: 5629835 - DNA, 25 bp, Homo sapien
ttcgctacaatgttggaactattac

SEQ ID NO: 5629836 - DNA, 25 bp, Homo sapien
aaggctaaatagcaggttgcaatac

SEQ ID NO: 5629837 - DNA, 25 bp, Homo sapien
attaaatattgggcagatcgaagat

SEQ ID NO: 5629838 - DNA, 25 bp, Homo sapien
aattctaaggcaccaaaggctaaat

SEQ ID NO: 5629839 - DNA, 25 bp, Homo sapien
atagttaaagaaacataggcatatc

SEQ ID NO: 5629840 - DNA, 25 bp, Homo sapien
gacttgctggtaaatgtgaaatgta

SEQ ID NO: 5629841 - DNA, 25 bp, Homo sapien
agtagcaatagaaagcaagagcaat

SEQ ID NO: 5629842 - DNA, 25 bp, Homo sapien
gctggataaaagaggctttagtagc

SEQ ID NO: 5629843 - DNA, 25 bp, Homo sapien
aacaatgttatggcaatgtcaaatt

SEQ ID NO: 5629844 - DNA, 25 bp, Homo sapien
gccaggtaaacattgactctcaaca

SEQ ID NO: 5629845 - DNA, 25 bp, Homo sapien
atcctgttctgtaatattggccaaa

SEQ ID NO: 5629846 - DNA, 25 bp, Homo sapien
gaagtacaatgagataatcaaatcc

SEQ ID NO: 5629847 - DNA, 25 bp, Homo sapien
actgaagataaagtgcactgctatt

SEQ ID NO: 5629848 - DNA, 25 bp, Homo sapien
tcatgaaggacctcaatccacagta

SEQ ID NO: 5629849 - DNA, 25 bp, Homo sapien
ttattgcaaatatcaggccctcaac

SEQ ID NO: 5629850 - DNA, 25 bp, Homo sapien
caggccctcaacactgaagataaag

SEQ ID NO: 5629851 - DNA, 25 bp, Homo sapien
gtatatatctgtagtcaagtaggcc

SEQ ID NO: 5629852 - DNA, 25 bp, Homo sapien
taagtgtccaatatgaagtacaatg

SEQ ID NO: 5629853 - DNA, 25 bp, Homo sapien
tctgtagtcaagtaggccaggtaaa

SEQ ID NO: 5629854 - DNA, 25 bp, Homo sapien
ttgagtactgacaggtaacatgacc

SEQ ID NO: 5629855 - DNA, 25 bp, Homo sapien
ctaacggcattccaaggtcaaataa

SEQ ID NO: 5629856 - DNA, 25 bp, Homo sapien
tctaggattatcttgctgtaccgac

SEQ ID NO: 5629857 - DNA, 25 bp, Homo sapien
agaagtgaagactcccgattgcttc

SEQ ID NO: 5629858 - DNA, 25 bp, Homo sapien
tcagagacagattaagaagtgaaga

SEQ ID NO: 5629859 - DNA, 25 bp, Homo sapien
gtagctcaagttatgtgcctgcctc

SEQ ID NO: 5629860 - DNA, 25 bp, Homo sapien
aacattgtgatgaaataatccattg

SEQ ID NO: 5629861 - DNA, 25 bp, Homo sapien
attagctaacaatgtcagagacaga

SEQ ID NO: 5629862 - DNA, 25 bp, Homo sapien
gctgtaccgacaccttgcacttaac

SEQ ID NO: 5629863 - DNA, 25 bp, Homo sapien
acatgatgattgagtactgacaggt

SEQ ID NO: 5629864 - DNA, 25 bp, Homo sapien
ttaagtagatatatgcctaacggca

SEQ ID NO: 5629865 - DNA, 25 bp, Homo sapien
gggctgaatctttgggacttgaccc

SEQ ID NO: 5629866 - DNA, 25 bp, Homo sapien
tactcctgccgcttctgctgctgcc

SEQ ID NO: 5629867 - DNA, 25 bp, Homo sapien
tcagcaagagcaacagtagctacag

SEQ ID NO: 5629868 - DNA, 25 bp, Homo sapien
cggcggtgcctgttccagtctttgc

SEQ ID NO: 5629869 - DNA, 25 bp, Homo sapien
gcatcagcaagagcaacagtagcta

SEQ ID NO: 5629870 - DNA, 25 bp, Homo sapien
cttccctcactccccagccgggcgg

SEQ ID NO: 5629871 - DNA, 25 bp, Homo sapien
tccccctggggctgaatctttggga

SEQ ID NO: 5629872 - DNA, 25 bp, Homo sapien
cttctgctgctgcctgtggctggag

SEQ ID NO: 5629873 - DNA, 25 bp, Homo sapien
tttgctgctgcagtccgtgcaacca

SEQ ID NO: 5629874 - DNA, 25 bp, Homo sapien
cgggcgggagcatttattccccaga

SEQ ID NO: 5629875 - DNA, 25 bp, Homo sapien
gttccagtctttgctgctgcagtcc

SEQ ID NO: 5629876 - DNA, 25 bp, Homo sapien
ttccataaaggtctgtgccctgcgg

SEQ ID NO: 5629877 - DNA, 25 bp, Homo sapien
agagcgaggacttccataaaggtct

SEQ ID NO: 5629878 - DNA, 25 bp, Homo sapien
acacagacttcagaaacagccttga

SEQ ID NO: 5629879 - DNA, 25 bp, Homo sapien
atttgtgatcaagtaggacagaggt

SEQ ID NO: 5629880 - DNA, 25 bp, Homo sapien
ttacacattattgaagacaacagta

SEQ ID NO: 5629881 - DNA, 25 bp, Homo sapien
tcttaaatgagcaaaaccaaatttc

SEQ ID NO: 5629882 - DNA, 25 bp, Homo sapien
gacagaggtaagtcccaccatcact

SEQ ID NO: 5629883 - DNA, 25 bp, Homo sapien
catcctcccctggtaacgttagaag

SEQ ID NO: 5629884 - DNA, 25 bp, Homo sapien
agaaggaatgcatctaatgacaaat

SEQ ID NO: 5629885 - DNA, 25 bp, Homo sapien
ggtaacgttagaaggaatgcatcta

SEQ ID NO: 5629886 - DNA, 25 bp, Homo sapien
ggacagtagcaacacacagacttca

SEQ ID NO: 5629887 - DNA, 25 bp, Homo sapien
tgcatgtggtatgacatggatatat

SEQ ID NO: 5629888 - DNA, 25 bp, Homo sapien
tcccctaggttatataaatacttgc

SEQ ID NO: 5629889 - DNA, 25 bp, Homo sapien
taataataggtaaaaaatcagtatc

SEQ ID NO: 5629890 - DNA, 25 bp, Homo sapien
ttaaagagaaagtatgttgcaaatg

SEQ ID NO: 5629891 - DNA, 25 bp, Homo sapien
tactgcttagtgtttttgccacctc

SEQ ID NO: 5629892 - DNA, 25 bp, Homo sapien
atttgtgttattactgctgagcttt

SEQ ID NO: 5629893 - DNA, 25 bp, Homo sapien
attagcccttcaaattaaagagaaa

SEQ ID NO: 5629894 - DNA, 25 bp, Homo sapien
tggtgtcatgcttagaaaggttttc

SEQ ID NO: 5629895 - DNA, 25 bp, Homo sapien
ttatattgagaaaattagcccttca

SEQ ID NO: 5629896 - DNA, 25 bp, Homo sapien
gttggatgttggaatttcttactaa

SEQ ID NO: 5629897 - DNA, 25 bp, Homo sapien
ctggcagctgtgttttgcatgtggt

SEQ ID NO: 5629898 - DNA, 25 bp, Homo sapien
taagttcttggtgaggaccctcttc

SEQ ID NO: 5629899 - DNA, 25 bp, Homo sapien
tactgaaagctgcgaagtccaaaat

SEQ ID NO: 5629900 - DNA, 25 bp, Homo sapien
gtaagtgagcacttgttgtctgctg

SEQ ID NO: 5629901 - DNA, 25 bp, Homo sapien
tcatagtactgaaagctgcgaagtc

SEQ ID NO: 5629902 - DNA, 25 bp, Homo sapien
gaacatgaagagtggataccttaat

SEQ ID NO: 5629903 - DNA, 25 bp, Homo sapien
tgtatccttacatgacagggagaga

SEQ ID NO: 5629904 - DNA, 25 bp, Homo sapien
ggtggtcaagagacccactgagatt

SEQ ID NO: 5629905 - DNA, 25 bp, Homo sapien
actgagattggttagttggaacaga

SEQ ID NO: 5629906 - DNA, 25 bp, Homo sapien
tcctggctcgtaaatggctgacttc

SEQ ID NO: 5629907 - DNA, 25 bp, Homo sapien
tgtactggcagattaagttcttggt

SEQ ID NO: 5629908 - DNA, 25 bp, Homo sapien
taatcccattgtgtgggctccaccc

SEQ ID NO: 5629909 - DNA, 25 bp, Homo sapien
ctcgtgcattctgggtaacttcttc

SEQ ID NO: 5629910 - DNA, 25 bp, Homo sapien
atagaaatcttgtgtagtctgggtt

SEQ ID NO: 5629911 - DNA, 25 bp, Homo sapien
agcccttcagtcctcttgcatcttc

SEQ ID NO: 5629912 - DNA, 25 bp, Homo sapien
ttctcagcttgaaggtactcatacc

SEQ ID NO: 5629913 - DNA, 25 bp, Homo sapien
ggaaatttgagctgataattctatc

SEQ ID NO: 5629914 - DNA, 25 bp, Homo sapien
tctgctaacatttgtgcgtggaaga

SEQ ID NO: 5629915 - DNA, 25 bp, Homo sapien
acatttgtgcgtggaagattgttcc

SEQ ID NO: 5629916 - DNA, 25 bp, Homo sapien
aagaagtgttttacctatagaaatc

SEQ ID NO: 5629917 - DNA, 25 bp, Homo sapien
tgtagtctgggttttaggtgaattc

SEQ ID NO: 5629918 - DNA, 25 bp, Homo sapien
ctttctggcctcacaaaaatactgc

SEQ ID NO: 5629919 - DNA, 25 bp, Homo sapien
tttggaagacaagttcattttaaga

SEQ ID NO: 5629920 - DNA, 25 bp, Homo sapien
gcaggcacccttgcagcagtgcacg

SEQ ID NO: 5629921 - DNA, 25 bp, Homo sapien
attcagactcacagatgaccgtggg

SEQ ID NO: 5629922 - DNA, 25 bp, Homo sapien
ggagccaaagctcttgaaacacgct

SEQ ID NO: 5629923 - DNA, 25 bp, Homo sapien
tgagccacttggtacatgacaggcc

SEQ ID NO: 5629924 - DNA, 25 bp, Homo sapien
acgccccataggagccaaagctctt

SEQ ID NO: 5629925 - DNA, 25 bp, Homo sapien
aggacaagtcgccttctgcaggcac

SEQ ID NO: 5629926 - DNA, 25 bp, Homo sapien
gccccgtctgccaacaagtcacctt

SEQ ID NO: 5629927 - DNA, 25 bp, Homo sapien
ttgaaacacgctctgggcatagctc

SEQ ID NO: 5629928 - DNA, 25 bp, Homo sapien
tagaagagcctcacgccccatagga

SEQ ID NO: 5629929 - DNA, 25 bp, Homo sapien
cttcttaggttgtgaacattcagac

SEQ ID NO: 5629930 - DNA, 25 bp, Homo sapien
gaagttgaaatgttattgccccgtc

SEQ ID NO: 5629931 - DNA, 25 bp, Homo sapien
tcttggtgctgtgcgatcatccttc

SEQ ID NO: 5629932 - DNA, 25 bp, Homo sapien
gatatgctccaccatagcgttctgg

SEQ ID NO: 5629933 - DNA, 25 bp, Homo sapien
acaaagtttgttccgcaggtcttgg

SEQ ID NO: 5629934 - DNA, 25 bp, Homo sapien
ctccgagttcttataacaggggctt

SEQ ID NO: 5629935 - DNA, 25 bp, Homo sapien
gagaaggcacctagatatgctccac

SEQ ID NO: 5629936 - DNA, 25 bp, Homo sapien
tgtcacccctgaagcctccgagttc

SEQ ID NO: 5629937 - DNA, 25 bp, Homo sapien
tgtacagtcaaagggtctgagttgg

SEQ ID NO: 5629938 - DNA, 25 bp, Homo sapien
ttaaagactgtagcattgagatatg

SEQ ID NO: 5629939 - DNA, 25 bp, Homo sapien
ataacaggggcttaaagactgtagc

SEQ ID NO: 5629940 - DNA, 25 bp, Homo sapien
ccggcacagcaagagtgctttgaaa

SEQ ID NO: 5629941 - DNA, 25 bp, Homo sapien
cagcctggataccccactgttgctc

SEQ ID NO: 5629942 - DNA, 25 bp, Homo sapien
tgaggtataaaaccaaggaagccag

SEQ ID NO: 5629943 - DNA, 25 bp, Homo sapien
tataatatggccacctaaggaaatt

SEQ ID NO: 5629944 - DNA, 25 bp, Homo sapien
ggcaggaactgactgtggcagttta

SEQ ID NO: 5629945 - DNA, 25 bp, Homo sapien
gtggcagtttacattatcggtaggc

SEQ ID NO: 5629946 - DNA, 25 bp, Homo sapien
caacccccaaagataggtcattctc

SEQ ID NO: 5629947 - DNA, 25 bp, Homo sapien
gctgaaaactctccaatacctcccc

SEQ ID NO: 5629948 - DNA, 25 bp, Homo sapien
atcggtaggcttgtgattcaacccc

SEQ ID NO: 5629949 - DNA, 25 bp, Homo sapien
atttgcccaccatcaaggaagagag

SEQ ID NO: 5629950 - DNA, 25 bp, Homo sapien
ggaagccagagttcacgtagtatat

SEQ ID NO: 5629951 - DNA, 25 bp, Homo sapien
caaccccaatgccggaaaagagtag

SEQ ID NO: 5629952 - DNA, 25 bp, Homo sapien
gtaggaatcttaacaactcagccca

SEQ ID NO: 5629953 - DNA, 25 bp, Homo sapien
gggaagagaaagactccagttccaa

SEQ ID NO: 5629954 - DNA, 25 bp, Homo sapien
catgaagttgagggaacaatctcat

SEQ ID NO: 5629955 - DNA, 25 bp, Homo sapien
agacagaatacattaactccttgcc

SEQ ID NO: 5629956 - DNA, 25 bp, Homo sapien
cctttcacatgaagttgagggaaca

SEQ ID NO: 5629957 - DNA, 25 bp, Homo sapien
tctagccaagtactccacctttcac

SEQ ID NO: 5629958 - DNA, 25 bp, Homo sapien
gtttgaactgagaaaagaagatgta

SEQ ID NO: 5629959 - DNA, 25 bp, Homo sapien
tccattacacaataaacagagtatc

SEQ ID NO: 5629960 - DNA, 25 bp, Homo sapien
ggctggccacagacagaatacatta

SEQ ID NO: 5629961 - DNA, 25 bp, Homo sapien
attctttggagtccctggttcaagg

SEQ ID NO: 5629962 - DNA, 25 bp, Homo sapien
ctctttcagaggaaaataggggaag

SEQ ID NO: 5629963 - DNA, 25 bp, Homo sapien
ataaacagagtatctagccaagtac

SEQ ID NO: 5629964 - DNA, 25 bp, Homo sapien
aatgccatttcttgactctactgtc

SEQ ID NO: 5629965 - DNA, 25 bp, Homo sapien
tccaggtaccaccccggtctctctc

SEQ ID NO: 5629966 - DNA, 25 bp, Homo sapien
gtagcttggactacaaatatgagcc

SEQ ID NO: 5629967 - DNA, 25 bp, Homo sapien
gcttggactacaaatatgagccacc

SEQ ID NO: 5629968 - DNA, 25 bp, Homo sapien
gttcaagaagccacattattaaatg

SEQ ID NO: 5629969 - DNA, 25 bp, Homo sapien
agtccattaattagcaaagttacac

SEQ ID NO: 5629970 - DNA, 25 bp, Homo sapien
aattagcaaagttacacatggtgtt

SEQ ID NO: 5629971 - DNA, 25 bp, Homo sapien
gtctccttcgtttagttattgcctc

SEQ ID NO: 5629972 - DNA, 25 bp, Homo sapien
acaaattctacctcaccctctccac

SEQ ID NO: 5629973 - DNA, 25 bp, Homo sapien
tctttcctaaacagctaaactcagg

SEQ ID NO: 5629974 - DNA, 25 bp, Homo sapien
ctccacaccactcctgattctccag

SEQ ID NO: 5629975 - DNA, 25 bp, Homo sapien
tttcagggtttctatatgcagattc

SEQ ID NO: 5629976 - DNA, 25 bp, Homo sapien
gactaaacctcaacaacagattaac

SEQ ID NO: 5629977 - DNA, 25 bp, Homo sapien
ggcaggctccctgtaaacatgacaa

SEQ ID NO: 5629978 - DNA, 25 bp, Homo sapien
taaaacactggctgtctgactaaac

SEQ ID NO: 5629979 - DNA, 25 bp, Homo sapien
cctgtaaacatgacaaagccactcc

SEQ ID NO: 5629980 - DNA, 25 bp, Homo sapien
tatgctgctcaggttcccgaccatt

SEQ ID NO: 5629981 - DNA, 25 bp, Homo sapien
gtgttgtgtaaaattatcagggaac

SEQ ID NO: 5629982 - DNA, 25 bp, Homo sapien
ggagagcaagtggtaattatctgct

SEQ ID NO: 5629983 - DNA, 25 bp, Homo sapien
caggaagcagcatcaactccgattc

SEQ ID NO: 5629984 - DNA, 25 bp, Homo sapien
ctctaatagccaacaggcaggctcc

SEQ ID NO: 5629985 - DNA, 25 bp, Homo sapien
ttagttgcctagtgtgtattctttc

SEQ ID NO: 5629986 - DNA, 25 bp, Homo sapien
actgcactcggaactgtgccacgtt

SEQ ID NO: 5629987 - DNA, 25 bp, Homo sapien
tcatattacaaggcgagaaaccaaa

SEQ ID NO: 5629988 - DNA, 25 bp, Homo sapien
aaaaatgatgtcgatgggatctgtt

SEQ ID NO: 5629989 - DNA, 25 bp, Homo sapien
gaggtcacaatgcaccactaccgcc

SEQ ID NO: 5629990 - DNA, 25 bp, Homo sapien
cccaaacactggccacgaagaaatg

SEQ ID NO: 5629991 - DNA, 25 bp, Homo sapien
actgccagattatggagaaagttac

SEQ ID NO: 5629992 - DNA, 25 bp, Homo sapien
gtgccacgttcacaaggacgctcat

SEQ ID NO: 5629993 - DNA, 25 bp, Homo sapien
cagaaacagagacattaagcttaac

SEQ ID NO: 5629994 - DNA, 25 bp, Homo sapien
ccaaaagcagaataatgaggtcaca

SEQ ID NO: 5629995 - DNA, 25 bp, Homo sapien
acggtctgctgagcacttcagaggc

SEQ ID NO: 5629996 - DNA, 25 bp, Homo sapien
tcagaggcagacattgttcaccatg

SEQ ID NO: 5629997 - DNA, 25 bp, Homo sapien
atcccgaacctcagctaagagtcct

SEQ ID NO: 5629998 - DNA, 25 bp, Homo sapien
ccagcctgtttctcctcagacccca

SEQ ID NO: 5629999 - DNA, 25 bp, Homo sapien
ttctcttcccccagcatgccataac

SEQ ID NO: 5630000 - DNA, 25 bp, Homo sapien
ctaagagtccttaccagtgctgtct

SEQ ID NO: 5630001 - DNA, 25 bp, Homo sapien
accccaaatggtctaggaaacatcc

SEQ ID NO: 5630002 - DNA, 25 bp, Homo sapien
gaaacatcctacctcctacctgccc

SEQ ID NO: 5630003 - DNA, 25 bp, Homo sapien
tcccccagcatgccataactgttgc

SEQ ID NO: 5630004 - DNA, 25 bp, Homo sapien
tgttgctcccatcagtagactactt

SEQ ID NO: 5630005 - DNA, 25 bp, Homo sapien
tctgagtgactccttctcgaggccc

SEQ ID NO: 5630006 - DNA, 25 bp, Homo sapien
taaaaatatggcttgtctgagtgac

SEQ ID NO: 5630007 - DNA, 25 bp, Homo sapien
cctgcccacgcactgttaccactgt

SEQ ID NO: 5630008 - DNA, 25 bp, Homo sapien
tcactctgtgactcttggctccctc

SEQ ID NO: 5630009 - DNA, 25 bp, Homo sapien
ttttggatggcaatgagaaaagtta

SEQ ID NO: 5630010 - DNA, 25 bp, Homo sapien
aaagatgcccttcccagggacaggg

SEQ ID NO: 5630011 - DNA, 25 bp, Homo sapien
cgaaaatgttctgaatcacagcctt

SEQ ID NO: 5630012 - DNA, 25 bp, Homo sapien
cagaaaaattttggaaggatacacc

SEQ ID NO: 5630013 - DNA, 25 bp, Homo sapien
agccggccatgtaccctacagcaca

SEQ ID NO: 5630014 - DNA, 25 bp, Homo sapien
agggccctgttgaaggcacacattg

SEQ ID NO: 5630015 - DNA, 25 bp, Homo sapien
gggtggcttgagttaagacttcctg

SEQ ID NO: 5630016 - DNA, 25 bp, Homo sapien
cagaagtgggaccgttagtctgtta

SEQ ID NO: 5630017 - DNA, 25 bp, Homo sapien
cattcaccaaccactgccagctgcc

SEQ ID NO: 5630018 - DNA, 25 bp, Homo sapien
caaactagttaaacaagcaagctat

SEQ ID NO: 5630019 - DNA, 25 bp, Homo sapien
caacataactagattaaggaaaaac

SEQ ID NO: 5630020 - DNA, 25 bp, Homo sapien
tggaaatggaacaccctcaaatacc

SEQ ID NO: 5630021 - DNA, 25 bp, Homo sapien
taagtattgattagtagagtattac

SEQ ID NO: 5630022 - DNA, 25 bp, Homo sapien
tccgttatagccaaatacagagctt

SEQ ID NO: 5630023 - DNA, 25 bp, Homo sapien
attaaaccctaggcttttcatgtat

SEQ ID NO: 5630024 - DNA, 25 bp, Homo sapien
attcagtggaaatggaacaccctca

SEQ ID NO: 5630025 - DNA, 25 bp, Homo sapien
aaaaagcattcagattagtcataac

SEQ ID NO: 5630026 - DNA, 25 bp, Homo sapien
tcatgtattataaagaactgccctt

SEQ ID NO: 5630027 - DNA, 25 bp, Homo sapien
cagagctttcaaacagctgtggaaa

SEQ ID NO: 5630028 - DNA, 25 bp, Homo sapien
tgtggaaatctaagtaagcatcatc

SEQ ID NO: 5630029 - DNA, 25 bp, Homo sapien
aaacagctgtggaaatctaagtaag

SEQ ID NO: 5630030 - DNA, 25 bp, Homo sapien
aactaccactagtcagatgttggac

SEQ ID NO: 5630031 - DNA, 25 bp, Homo sapien
tcacaaaacccttctcaacagtatt

SEQ ID NO: 5630032 - DNA, 25 bp, Homo sapien
tctggcctctctagaactaccacta

SEQ ID NO: 5630033 - DNA, 25 bp, Homo sapien
tttccattcattgtggtgggtactc

SEQ ID NO: 5630034 - DNA, 25 bp, Homo sapien
gatgttggactttttagataaattc

SEQ ID NO: 5630035 - DNA, 25 bp, Homo sapien
ttcacctcaccacccagagatattc

SEQ ID NO: 5630036 - DNA, 25 bp, Homo sapien
tgataatgtgccctggtacagcttt

SEQ ID NO: 5630037 - DNA, 25 bp, Homo sapien
actcttgctctgaagttctagacac

SEQ ID NO: 5630038 - DNA, 25 bp, Homo sapien
gtggtgggtactcaggccctttcaa

SEQ ID NO: 5630039 - DNA, 25 bp, Homo sapien
cacccagagatattcccttcagagc

SEQ ID NO: 5630040 - DNA, 25 bp, Homo sapien
tctgaaattgtatgataatgtgccc

SEQ ID NO: 5630041 - DNA, 25 bp, Homo sapien
ctctaaagtaagaaggctggatgag

SEQ ID NO: 5630042 - DNA, 25 bp, Homo sapien
gcctcctaaagtggaatcccaggga

SEQ ID NO: 5630043 - DNA, 25 bp, Homo sapien
aagggtagtgtccctagaccagagc

SEQ ID NO: 5630044 - DNA, 25 bp, Homo sapien
gatttttcgcgatgaagatggggaa

SEQ ID NO: 5630045 - DNA, 25 bp, Homo sapien
ccccaggggattctgcacaccataa

SEQ ID NO: 5630046 - DNA, 25 bp, Homo sapien
acaccataagtaagggatgaaaagc

SEQ ID NO: 5630047 - DNA, 25 bp, Homo sapien
accagagcgtcagcatcacctcgat

SEQ ID NO: 5630048 - DNA, 25 bp, Homo sapien
caggatgaagcaatgccctaactgc

SEQ ID NO: 5630049 - DNA, 25 bp, Homo sapien
accatatgggttcacccaggggctc

SEQ ID NO: 5630050 - DNA, 25 bp, Homo sapien
gacctgggcctaggcccgctctgtc

SEQ ID NO: 5630051 - DNA, 25 bp, Homo sapien
gggatgaaaagcactaaacacagat

SEQ ID NO: 5630052 - DNA, 25 bp, Homo sapien
tttggccagactactagagaggata

SEQ ID NO: 5630053 - DNA, 25 bp, Homo sapien
gaaaatgtggaaaattaccagctac

SEQ ID NO: 5630054 - DNA, 25 bp, Homo sapien
gagtactcaagatgatgacagtccc

SEQ ID NO: 5630055 - DNA, 25 bp, Homo sapien
gtaagagatctttgctgacctgccc

SEQ ID NO: 5630056 - DNA, 25 bp, Homo sapien
tagtgatctatatacaggaaagctg

SEQ ID NO: 5630057 - DNA, 25 bp, Homo sapien
gttttcacagtggtaagataagaga

SEQ ID NO: 5630058 - DNA, 25 bp, Homo sapien
ggcacttcagtgacaacataaaaat

SEQ ID NO: 5630059 - DNA, 25 bp, Homo sapien
aattacagtggatagaaaatgtgga

SEQ ID NO: 5630060 - DNA, 25 bp, Homo sapien
tgactccactagaccactgtacatc

SEQ ID NO: 5630061 - DNA, 25 bp, Homo sapien
gtaatatacagtactgggcaggcac

SEQ ID NO: 5630062 - DNA, 25 bp, Homo sapien
atactggacgacaacgagattaaca

SEQ ID NO: 5630063 - DNA, 25 bp, Homo sapien
accggactacacatccgaaccgatt

SEQ ID NO: 5630064 - DNA, 25 bp, Homo sapien
aatcggttcggatgtgtagtccggt

SEQ ID NO: 5630065 - DNA, 25 bp, Homo sapien
attcaagtttataccactaggctgt

SEQ ID NO: 5630066 - DNA, 25 bp, Homo sapien
caggcaaaagctagcacaactgtcc

SEQ ID NO: 5630067 - DNA, 25 bp, Homo sapien
ttagaattgttaagagtatcatttt

SEQ ID NO: 5630068 - DNA, 25 bp, Homo sapien
caaaaaatgctgccatgaatatctt

SEQ ID NO: 5630069 - DNA, 25 bp, Homo sapien
cagctctttaatgcacagtgactat

SEQ ID NO: 5630070 - DNA, 25 bp, Homo sapien
gtacattataccaactgagcatacc

SEQ ID NO: 5630071 - DNA, 25 bp, Homo sapien
ttgaatgaaccatttacctgctgat

SEQ ID NO: 5630072 - DNA, 25 bp, Homo sapien
ggatatactattaattgaatgaacc

SEQ ID NO: 5630073 - DNA, 25 bp, Homo sapien
taccactaggctgttaagtatccct

SEQ ID NO: 5630074 - DNA, 25 bp, Homo sapien
ttctgggtctgtacatatggatcta

SEQ ID NO: 5630075 - DNA, 25 bp, Homo sapien
atgaatatctttgtgcagctcttta

SEQ ID NO: 5630076 - DNA, 25 bp, Homo sapien
tgtctatgcagaatccatgacccaa

SEQ ID NO: 5630077 - DNA, 25 bp, Homo sapien
ggtagaagcagataggaccaaatta

SEQ ID NO: 5630078 - DNA, 25 bp, Homo sapien
gacggtccaggatatgactgaagtg

SEQ ID NO: 5630079 - DNA, 25 bp, Homo sapien
attttcagctacggtatgcagttgt

SEQ ID NO: 5630080 - DNA, 25 bp, Homo sapien
gactgaagtgatcacagtaggatat

SEQ ID NO: 5630081 - DNA, 25 bp, Homo sapien
agtcacagtaaaccaaagacggtcc

SEQ ID NO: 5630082 - DNA, 25 bp, Homo sapien
tacagtgctctacagttcagatatc

SEQ ID NO: 5630083 - DNA, 25 bp, Homo sapien
ctccactaggagatcagcgtgtaaa

SEQ ID NO: 5630084 - DNA, 25 bp, Homo sapien
aggatatttggccacaaaaagacaa

SEQ ID NO: 5630085 - DNA, 25 bp, Homo sapien
ccatgacccaataggattcagttcc

SEQ ID NO: 5630086 - DNA, 25 bp, Homo sapien
agcgtgtaaagggaatacgttctta

SEQ ID NO: 5630087 - DNA, 25 bp, Homo sapien
gaatgtccagaaacaatcacaccac

SEQ ID NO: 5630088 - DNA, 25 bp, Homo sapien
gttttcaatggacgttaaatagcaa

SEQ ID NO: 5630089 - DNA, 25 bp, Homo sapien
agctgaaagtaacagaatgcgcaaa

SEQ ID NO: 5630090 - DNA, 25 bp, Homo sapien
gaatgcgcaaaagaaagccatgttt

SEQ ID NO: 5630091 - DNA, 25 bp, Homo sapien
atcacaccacagcacatgactgaaa

SEQ ID NO: 5630092 - DNA, 25 bp, Homo sapien
caatcaaagattgctaaaaagggca

SEQ ID NO: 5630093 - DNA, 25 bp, Homo sapien
catgactgaaaactctatgagaaat

SEQ ID NO: 5630094 - DNA, 25 bp, Homo sapien
tatgctgtgtggcctgatgacattt

SEQ ID NO: 5630095 - DNA, 25 bp, Homo sapien
tctgttacctggtatgctgtgtggc

SEQ ID NO: 5630096 - DNA, 25 bp, Homo sapien
ttcttgtaggcagaaagatgcactt

SEQ ID NO: 5630097 - DNA, 25 bp, Homo sapien
tattgaaaggggtcatgtgattctt

SEQ ID NO: 5630098 - DNA, 25 bp, Homo sapien
ctcaaatctgtctcgctgtgctgcc

SEQ ID NO: 5630099 - DNA, 25 bp, Homo sapien
ggaggtcacgattgcccattgtgtc

SEQ ID NO: 5630100 - DNA, 25 bp, Homo sapien
tctgcagaaactccagttggccata

SEQ ID NO: 5630101 - DNA, 25 bp, Homo sapien
gaccctgaagcagagcttgtctggt

SEQ ID NO: 5630102 - DNA, 25 bp, Homo sapien
gcttcctcatgggtgctgtgtgcaa

SEQ ID NO: 5630103 - DNA, 25 bp, Homo sapien
agtatctaccccaggaggtcacgat

SEQ ID NO: 5630104 - DNA, 25 bp, Homo sapien
ccggggcagttaatacgaaacatgc

SEQ ID NO: 5630105 - DNA, 25 bp, Homo sapien
ctgtgtgcaaatcaaattccggggc

SEQ ID NO: 5630106 - DNA, 25 bp, Homo sapien
aagtcctcagacatgcgcagttatc

SEQ ID NO: 5630107 - DNA, 25 bp, Homo sapien
tacgaaacatgcgtggaaattcagg

SEQ ID NO: 5630108 - DNA, 25 bp, Homo sapien
atattgggtccaactgatttctgcc

SEQ ID NO: 5630109 - DNA, 25 bp, Homo sapien
actttccgtgagaacacactagtta

SEQ ID NO: 5630110 - DNA, 25 bp, Homo sapien
cctcgtccgaggtctgtcgaggaga

SEQ ID NO: 5630111 - DNA, 25 bp, Homo sapien
atacaatgagcaccctgaattatac

SEQ ID NO: 5630112 - DNA, 25 bp, Homo sapien
gcctcctgacctggttggacaaaac

SEQ ID NO: 5630113 - DNA, 25 bp, Homo sapien
gtggcctgcaggtacaacctgagcc

SEQ ID NO: 5630114 - DNA, 25 bp, Homo sapien
acccagatgggtcttgttgataacc

SEQ ID NO: 5630115 - DNA, 25 bp, Homo sapien
cagcaatggagaccccctcgctgga

SEQ ID NO: 5630116 - DNA, 25 bp, Homo sapien
caatcctcctacccaggtctggccc

SEQ ID NO: 5630117 - DNA, 25 bp, Homo sapien
aggtctggcccctgacaagtcttgc

SEQ ID NO: 5630118 - DNA, 25 bp, Homo sapien
tggttggacaaaaccggcaactgca

SEQ ID NO: 5630119 - DNA, 25 bp, Homo sapien
gagaaagccgtgccacgggcttctg

SEQ ID NO: 5630120 - DNA, 25 bp, Homo sapien
atgctgcaattatgtgactctatag

SEQ ID NO: 5630121 - DNA, 25 bp, Homo sapien
aaatcaacagtaattgtattgctat

SEQ ID NO: 5630122 - DNA, 25 bp, Homo sapien
agccagaatttttataaaaggattg

SEQ ID NO: 5630123 - DNA, 25 bp, Homo sapien
gatttggcctccagagccagagttt

SEQ ID NO: 5630124 - DNA, 25 bp, Homo sapien
ccagagccagagttttccaacccct

SEQ ID NO: 5630125 - DNA, 25 bp, Homo sapien
ttccaacccctgagataaagcaaac

SEQ ID NO: 5630126 - DNA, 25 bp, Homo sapien
tataacttcatataatgctgcaatt

SEQ ID NO: 5630127 - DNA, 25 bp, Homo sapien
tcacaattgtaaaaatataaagttc

SEQ ID NO: 5630128 - DNA, 25 bp, Homo sapien
tgtattgctatttaaggatcacttt

SEQ ID NO: 5630129 - DNA, 25 bp, Homo sapien
atttacttagatttattagccagaa

SEQ ID NO: 5630130 - DNA, 25 bp, Homo sapien
ccaacccctgagataaagcaaacat

SEQ ID NO: 5630131 - DNA, 25 bp, Homo sapien
ctattgcgatccctgtaaactcctt

SEQ ID NO: 5630132 - DNA, 25 bp, Homo sapien
tcacagggcacttggcacctagatt

SEQ ID NO: 5630133 - DNA, 25 bp, Homo sapien
ttctcagtggtgttaatgatcccat

SEQ ID NO: 5630134 - DNA, 25 bp, Homo sapien
agcttggttggtcacgatgtgtctc

SEQ ID NO: 5630135 - DNA, 25 bp, Homo sapien
actgcaggttggagttgaattttgt

SEQ ID NO: 5630136 - DNA, 25 bp, Homo sapien
ttgttcagagggaactccagttcac

SEQ ID NO: 5630137 - DNA, 25 bp, Homo sapien
tgtttcaacacatagcccaggccca

SEQ ID NO: 5630138 - DNA, 25 bp, Homo sapien
tctttgggatcctaactgcaggttg

SEQ ID NO: 5630139 - DNA, 25 bp, Homo sapien
ctaccacaagcagacagttactatt

SEQ ID NO: 5630140 - DNA, 25 bp, Homo sapien
tttggaggtcatatgttgaagattt

SEQ ID NO: 5630141 - DNA, 25 bp, Homo sapien
ggtgtgtaaacaactgtcacagggc

SEQ ID NO: 5630142 - DNA, 25 bp, Homo sapien
tcaatgaggaaattagtatagcact

SEQ ID NO: 5630143 - DNA, 25 bp, Homo sapien
tgtcaccctctcaccagcgtcggaa

SEQ ID NO: 5630144 - DNA, 25 bp, Homo sapien
gataaaagcttgtgctgtcactttc

SEQ ID NO: 5630145 - DNA, 25 bp, Homo sapien
tgagtaagtcatggtggttcctgtt

SEQ ID NO: 5630146 - DNA, 25 bp, Homo sapien
tcttacagggccctcaggttcatgg

SEQ ID NO: 5630147 - DNA, 25 bp, Homo sapien
tcctcagatggcctatgtagaccca

SEQ ID NO: 5630148 - DNA, 25 bp, Homo sapien
cagcacctcccaggtagcttttctc

SEQ ID NO: 5630149 - DNA, 25 bp, Homo sapien
tggcctatgtagacccatgatgtcc

SEQ ID NO: 5630150 - DNA, 25 bp, Homo sapien
agcgtcggaaagctgcctcttttca

SEQ ID NO: 5630151 - DNA, 25 bp, Homo sapien
ggggccaagtcctctgtcagcacct

SEQ ID NO: 5630152 - DNA, 25 bp, Homo sapien
attcttggaagcaatgataaaagct

SEQ ID NO: 5630153 - DNA, 25 bp, Homo sapien
aaaatatgaccagatggattcctgc

SEQ ID NO: 5630154 - DNA, 25 bp, Homo sapien
aatatgaccagatggattcctgctt

SEQ ID NO: 5630155 - DNA, 25 bp, Homo sapien
ttatttaaaatatgaccagatggat

SEQ ID NO: 5630156 - DNA, 25 bp, Homo sapien
tttaaaatatgaccagatggattcc

SEQ ID NO: 5630157 - DNA, 25 bp, Homo sapien
ttaaaatatgaccagatggattcct

SEQ ID NO: 5630158 - DNA, 25 bp, Homo sapien
cctgcttccatgaattcaatggaat

SEQ ID NO: 5630159 - DNA, 25 bp, Homo sapien
tatgaccagatggattcctgcttcc

SEQ ID NO: 5630160 - DNA, 25 bp, Homo sapien
aaatatgaccagatggattcctgct

SEQ ID NO: 5630161 - DNA, 25 bp, Homo sapien
aattcaatggaattcaaatcttccc

SEQ ID NO: 5630162 - DNA, 25 bp, Homo sapien
atatgaccagatggattcctgcttc

SEQ ID NO: 5630163 - DNA, 25 bp, Homo sapien
taaaatatgaccagatggattcctg

SEQ ID NO: 5630164 - DNA, 25 bp, Homo sapien
ttaagatggagtgagtcataatgtc

SEQ ID NO: 5630165 - DNA, 25 bp, Homo sapien
tgtcattctatccccctggcattac

SEQ ID NO: 5630166 - DNA, 25 bp, Homo sapien
caatcacttgaaatgtagaactgct

SEQ ID NO: 5630167 - DNA, 25 bp, Homo sapien
ttggttatttaagatggagtgagtc

SEQ ID NO: 5630168 - DNA, 25 bp, Homo sapien
tgtcaaacatatctcttagccactg

SEQ ID NO: 5630169 - DNA, 25 bp, Homo sapien
gagcaggagacagatctgtatctca

SEQ ID NO: 5630170 - DNA, 25 bp, Homo sapien
tcaaatgcctagaacagggcctggt

SEQ ID NO: 5630171 - DNA, 25 bp, Homo sapien
ctgctaaatagcatgcacaaagtca

SEQ ID NO: 5630172 - DNA, 25 bp, Homo sapien
gggcctggtgcatacatggcaagca

SEQ ID NO: 5630173 - DNA, 25 bp, Homo sapien
catgcacaaagtcaaaagtggtttc

SEQ ID NO: 5630174 - DNA, 25 bp, Homo sapien
catggcaagcataaaataaaacgtt

SEQ ID NO: 5630175 - DNA, 25 bp, Homo sapien
atgaatcacaggaatgtaaaactgc

SEQ ID NO: 5630176 - DNA, 25 bp, Homo sapien
atgaatcaatgaatcacaggaatgt

SEQ ID NO: 5630177 - DNA, 25 bp, Homo sapien
actgcaatatgatctggttgaagtt

SEQ ID NO: 5630178 - DNA, 25 bp, Homo sapien
ttagtgtcactttaacatgattctt

SEQ ID NO: 5630179 - DNA, 25 bp, Homo sapien
gaggcaggacatctctctattgccc

SEQ ID NO: 5630180 - DNA, 25 bp, Homo sapien
aagtgagaagcacactaggaaatca

SEQ ID NO: 5630181 - DNA, 25 bp, Homo sapien
aggaatgtaaaactgcaatatgatc

SEQ ID NO: 5630182 - DNA, 25 bp, Homo sapien
gtgagaagcacactaggaaatcaac

SEQ ID NO: 5630183 - DNA, 25 bp, Homo sapien
atgatctggttgaagttagtgtcac

SEQ ID NO: 5630184 - DNA, 25 bp, Homo sapien
gagatctcactattttacccaggtt

SEQ ID NO: 5630185 - DNA, 25 bp, Homo sapien
gcacactaggaaatcaacacaaaat

SEQ ID NO: 5630186 - DNA, 25 bp, Homo sapien
ggacccgaactactcagtagagagg

SEQ ID NO: 5630187 - DNA, 25 bp, Homo sapien
cctctctactgagtagttcgggtcc

SEQ ID NO: 5630188 - DNA, 25 bp, Homo sapien
ttaagtttgggagatgcatagtcta

SEQ ID NO: 5630189 - DNA, 25 bp, Homo sapien
catccagccataaggcgtacgaggg

SEQ ID NO: 5630190 - DNA, 25 bp, Homo sapien
atgttggcagtgcaagatcacgtga

SEQ ID NO: 5630191 - DNA, 25 bp, Homo sapien
gcatagtctaaggccagggttctca

SEQ ID NO: 5630192 - DNA, 25 bp, Homo sapien
gagttatatgacagcctgggaagac

SEQ ID NO: 5630193 - DNA, 25 bp, Homo sapien
aaggagacagataattaagtttggg

SEQ ID NO: 5630194 - DNA, 25 bp, Homo sapien
gcgtgtgaacgtatgcacagacatc

SEQ ID NO: 5630195 - DNA, 25 bp, Homo sapien
acgactgaacacggagatctccaaa

SEQ ID NO: 5630196 - DNA, 25 bp, Homo sapien
caagatcacgtgaggtacgactgaa

SEQ ID NO: 5630197 - DNA, 25 bp, Homo sapien
tggaaatggctgtaacgcatccagc

SEQ ID NO: 5630198 - DNA, 25 bp, Homo sapien
aggcgtacgagggtatatatactta

SEQ ID NO: 5630199 - DNA, 25 bp, Homo sapien
tgcagcagatgtgtacaaaagagct

SEQ ID NO: 5630200 - DNA, 25 bp, Homo sapien
actgaaaacagttcctttatagttc

SEQ ID NO: 5630201 - DNA, 25 bp, Homo sapien
agctttaaaggtagtactgaaaaca

SEQ ID NO: 5630202 - DNA, 25 bp, Homo sapien
gctgtgtggcttaactctcaaactc

SEQ ID NO: 5630203 - DNA, 25 bp, Homo sapien
tgctgtgcagtaggttttatgttgt

SEQ ID NO: 5630204 - DNA, 25 bp, Homo sapien
aaaatgctttccccatgctaagatt

SEQ ID NO: 5630205 - DNA, 25 bp, Homo sapien
ttcactttggtgtaaggaataagga

SEQ ID NO: 5630206 - DNA, 25 bp, Homo sapien
aggaagcattctaaatagatgtcat

SEQ ID NO: 5630207 - DNA, 25 bp, Homo sapien
actacaggcatgtgctgctgtgtgc

SEQ ID NO: 5630208 - DNA, 25 bp, Homo sapien
cagatgtgtacaaaagagctttaaa

SEQ ID NO: 5630209 - DNA, 25 bp, Homo sapien
tgcatttcttctactgggttgtctt

SEQ ID NO: 5630210 - DNA, 25 bp, Homo sapien
ttcaaagttcaaaagtgtataaatc

SEQ ID NO: 5630211 - DNA, 25 bp, Homo sapien
ctgatgagataaggtaaaagttaaa

SEQ ID NO: 5630212 - DNA, 25 bp, Homo sapien
aaatagcttcaaagttcaaaagtgt

SEQ ID NO: 5630213 - DNA, 25 bp, Homo sapien
gatgagataaggtaaaagttaaatg

SEQ ID NO: 5630214 - DNA, 25 bp, Homo sapien
agtttttctctgcgtatgtttagct

SEQ ID NO: 5630215 - DNA, 25 bp, Homo sapien
aagttcaaaagtgtataaatccgac

SEQ ID NO: 5630216 - DNA, 25 bp, Homo sapien
tgagataaggtaaaagttaaatgca

SEQ ID NO: 5630217 - DNA, 25 bp, Homo sapien
aaagtgtataaatccgacaatgaat

SEQ ID NO: 5630218 - DNA, 25 bp, Homo sapien
ttctctgcgtatgtttagcttatgc

SEQ ID NO: 5630219 - DNA, 25 bp, Homo sapien
gttaaatgcaaaaatcaatgattat

SEQ ID NO: 5630220 - DNA, 25 bp, Homo sapien
atccgacaatgaatattttatgggg

SEQ ID NO: 5630221 - DNA, 25 bp, Homo sapien
gcctgggtgttgacagtctaggctc

SEQ ID NO: 5630222 - DNA, 25 bp, Homo sapien
attcgttatcagacagtaaagcatg

SEQ ID NO: 5630223 - DNA, 25 bp, Homo sapien
tgcagatctgagtgtgtatcaaggt

SEQ ID NO: 5630224 - DNA, 25 bp, Homo sapien
atgaaggctcagccctcatcaggtt

SEQ ID NO: 5630225 - DNA, 25 bp, Homo sapien
tcatcaggtttaggtgacagagcta

SEQ ID NO: 5630226 - DNA, 25 bp, Homo sapien
gtgctggtcaagtcactgcagatct

SEQ ID NO: 5630227 - DNA, 25 bp, Homo sapien
ggctgtaatgcgctatgatggctcc

SEQ ID NO: 5630228 - DNA, 25 bp, Homo sapien
aaagcatgaacccacagtgctggtc

SEQ ID NO: 5630229 - DNA, 25 bp, Homo sapien
ggcaacatagccagagtccatctcg

SEQ ID NO: 5630230 - DNA, 25 bp, Homo sapien
ctccataagatgaaaagcaggcaat

SEQ ID NO: 5630231 - DNA, 25 bp, Homo sapien
ggatccctgaagacgagaagttcca

SEQ ID NO: 5630232 - DNA, 25 bp, Homo sapien
caaaatgagttgtaatcccccatcc

SEQ ID NO: 5630233 - DNA, 25 bp, Homo sapien
gcatgtgccacctcaatagtttctc

SEQ ID NO: 5630234 - DNA, 25 bp, Homo sapien
aagggtacacactaagacatctgct

SEQ ID NO: 5630235 - DNA, 25 bp, Homo sapien
agcaggtttgattagcacatgttac

SEQ ID NO: 5630236 - DNA, 25 bp, Homo sapien
agttgaaaagggtacacactaagac

SEQ ID NO: 5630237 - DNA, 25 bp, Homo sapien
tgtcacccaagtactgatcggagct

SEQ ID NO: 5630238 - DNA, 25 bp, Homo sapien
gtctaatcagtagccaaagtgtgcc

SEQ ID NO: 5630239 - DNA, 25 bp, Homo sapien
aacatttgtagcatcagcaggtttg

SEQ ID NO: 5630240 - DNA, 25 bp, Homo sapien
aacacaaccgcatgtgccacctcaa

SEQ ID NO: 5630241 - DNA, 25 bp, Homo sapien
ccccatccactaccagaacatgccc

SEQ ID NO: 5630242 - DNA, 25 bp, Homo sapien
gtagccaaagtgtgcccttgatgct

SEQ ID NO: 5630243 - DNA, 25 bp, Homo sapien
ctcttgaacataagcttaggtaggc

SEQ ID NO: 5630244 - DNA, 25 bp, Homo sapien
tctacttatgaaaggattgcctctg

SEQ ID NO: 5630245 - DNA, 25 bp, Homo sapien
gtgaaggaggtcataataaaattac

SEQ ID NO: 5630246 - DNA, 25 bp, Homo sapien
aaggttacctgggtcacagaacctc

SEQ ID NO: 5630247 - DNA, 25 bp, Homo sapien
tcatctgcttcaggaggatcccaca

SEQ ID NO: 5630248 - DNA, 25 bp, Homo sapien
actaagaaagcagggttacctgaaa

SEQ ID NO: 5630249 - DNA, 25 bp, Homo sapien
ctcatctgtgcatcaaggttacctg

SEQ ID NO: 5630250 - DNA, 25 bp, Homo sapien
agcttaggtaggctgtgtgaaagtt

SEQ ID NO: 5630251 - DNA, 25 bp, Homo sapien
caggaggatcccacaattaaatcac

SEQ ID NO: 5630252 - DNA, 25 bp, Homo sapien
tcctggatttcaagagagactcttg

SEQ ID NO: 5630253 - DNA, 25 bp, Homo sapien
cctgaaaaccactgtgaaggaggtc

SEQ ID NO: 5630254 - DNA, 25 bp, Homo sapien
gagagctctgaatgtcgcccagcta

SEQ ID NO: 5630255 - DNA, 25 bp, Homo sapien
cttatatacctcagagagagagctc

SEQ ID NO: 5630256 - DNA, 25 bp, Homo sapien
aagagattacccatttttgacccaa

SEQ ID NO: 5630257 - DNA, 25 bp, Homo sapien
tttgataaaatggcaacaataaatt

SEQ ID NO: 5630258 - DNA, 25 bp, Homo sapien
tactttggaggactttatcttgccc

SEQ ID NO: 5630259 - DNA, 25 bp, Homo sapien
tgtgtaacaactctgagcaggtaag

SEQ ID NO: 5630260 - DNA, 25 bp, Homo sapien
aggagctcccagggctcttcttata

SEQ ID NO: 5630261 - DNA, 25 bp, Homo sapien
ctgagcaggtaagttttactccaga

SEQ ID NO: 5630262 - DNA, 25 bp, Homo sapien
aaagcattaaggactttatacagct

SEQ ID NO: 5630263 - DNA, 25 bp, Homo sapien
ttgtatcaaaccccactgagcaatc

SEQ ID NO: 5630264 - DNA, 25 bp, Homo sapien
ggaatctttgctttggtgaggctgc

SEQ ID NO: 5630265 - DNA, 25 bp, Homo sapien
gaatggatcccctgccagtaagtcc

SEQ ID NO: 5630266 - DNA, 25 bp, Homo sapien
gtcaaacaatttctatagtgggcag

SEQ ID NO: 5630267 - DNA, 25 bp, Homo sapien
cacagagcaacttccccatgcaccc

SEQ ID NO: 5630268 - DNA, 25 bp, Homo sapien
ctcctaccctgagggcacctggcag

SEQ ID NO: 5630269 - DNA, 25 bp, Homo sapien
cccactctcctaccctgagggcacc

SEQ ID NO: 5630270 - DNA, 25 bp, Homo sapien
gatggtgctttcagaatggatcccc

SEQ ID NO: 5630271 - DNA, 25 bp, Homo sapien
agccacccagactatactcacatca

SEQ ID NO: 5630272 - DNA, 25 bp, Homo sapien
agattcctgtgtcccaaaggtccac

SEQ ID NO: 5630273 - DNA, 25 bp, Homo sapien
ttctatagtgggcagtaaatagcca

SEQ ID NO: 5630274 - DNA, 25 bp, Homo sapien
taacacagttgacaggatggtgctt

SEQ ID NO: 5630275 - DNA, 25 bp, Homo sapien
agtaagtccaagattcctgtgtccc

SEQ ID NO: 5630276 - DNA, 25 bp, Homo sapien
gctggaagccctctagaatggtgtt

SEQ ID NO: 5630277 - DNA, 25 bp, Homo sapien
tgctcctttggaaaagggtgagtaa

SEQ ID NO: 5630278 - DNA, 25 bp, Homo sapien
ctgatggccaacacctgtgctcctt

SEQ ID NO: 5630279 - DNA, 25 bp, Homo sapien
gcgctccagtgtgtcttctgatggc

SEQ ID NO: 5630280 - DNA, 25 bp, Homo sapien
cactttccagcttggagtgtacttc

SEQ ID NO: 5630281 - DNA, 25 bp, Homo sapien
cttctgatggccaacacctgtgctc

SEQ ID NO: 5630282 - DNA, 25 bp, Homo sapien
tttccagcttggagtgtacttccca

SEQ ID NO: 5630283 - DNA, 25 bp, Homo sapien
gctgaatcagaggtgactgagcttg

SEQ ID NO: 5630284 - DNA, 25 bp, Homo sapien
ctgtgctcctttggaaaagggtgag

SEQ ID NO: 5630285 - DNA, 25 bp, Homo sapien
tggaagccctctagaatggtgttct

SEQ ID NO: 5630286 - DNA, 25 bp, Homo sapien
tcagaacacactttccagcttggag

SEQ ID NO: 5630287 - DNA, 25 bp, Homo sapien
ttacactatggcaatgataaatctc

SEQ ID NO: 5630288 - DNA, 25 bp, Homo sapien
tatggcaatgataaatctcacacac

SEQ ID NO: 5630289 - DNA, 25 bp, Homo sapien
ttttaatgcttatgagggtaagtac

SEQ ID NO: 5630290 - DNA, 25 bp, Homo sapien
atcatactctaggtcttctggtttg

SEQ ID NO: 5630291 - DNA, 25 bp, Homo sapien
aataagaactaagagctctcatcta

SEQ ID NO: 5630292 - DNA, 25 bp, Homo sapien
tgagtcagtataacatgataggcac

SEQ ID NO: 5630293 - DNA, 25 bp, Homo sapien
tcacatccagaaaatgtgccatttc

SEQ ID NO: 5630294 - DNA, 25 bp, Homo sapien
gataggcacatttctatggaatttc

SEQ ID NO: 5630295 - DNA, 25 bp, Homo sapien
ctcatctagtcaagtggaagctaat

SEQ ID NO: 5630296 - DNA, 25 bp, Homo sapien
gtggaagctaattcaactcttttac

SEQ ID NO: 5630297 - DNA, 25 bp, Homo sapien
acatacttccactcatacccaccac

SEQ ID NO: 5630298 - DNA, 25 bp, Homo sapien
agcttggaaagtgagtgtatctgtg

SEQ ID NO: 5630299 - DNA, 25 bp, Homo sapien
attatggagctggcactgattggaa

SEQ ID NO: 5630300 - DNA, 25 bp, Homo sapien
cctataaaaagtgtgatgcagtgta

SEQ ID NO: 5630301 - DNA, 25 bp, Homo sapien
ctacgtcacctccaagggtagggga

SEQ ID NO: 5630302 - DNA, 25 bp, Homo sapien
aatgaaataacggaagtgaaaactc

SEQ ID NO: 5630303 - DNA, 25 bp, Homo sapien
gtaggggaggcttctatagcccctc

SEQ ID NO: 5630304 - DNA, 25 bp, Homo sapien
ggctgggagaaaaagttcaatcagt

SEQ ID NO: 5630305 - DNA, 25 bp, Homo sapien
atgcagtgtatatgacccaagggat

SEQ ID NO: 5630306 - DNA, 25 bp, Homo sapien
caagggatagagtgatttcagcaaa

SEQ ID NO: 5630307 - DNA, 25 bp, Homo sapien
atatatttggccaggcgaagctctg

SEQ ID NO: 5630308 - DNA, 25 bp, Homo sapien
agagccaggctttagggccatcata

SEQ ID NO: 5630309 - DNA, 25 bp, Homo sapien
ccagtggcttgtgacacagccccga

SEQ ID NO: 5630310 - DNA, 25 bp, Homo sapien
tcttcgacctttctggagcagcaag

SEQ ID NO: 5630311 - DNA, 25 bp, Homo sapien
ctagctgatgaatagacaggagaga

SEQ ID NO: 5630312 - DNA, 25 bp, Homo sapien
ccagagagagagacctatctgaaac

SEQ ID NO: 5630313 - DNA, 25 bp, Homo sapien
ctatctgaaaccagcttgggcagct

SEQ ID NO: 5630314 - DNA, 25 bp, Homo sapien
tgaggcaacattgaagatgcaagcc

SEQ ID NO: 5630315 - DNA, 25 bp, Homo sapien
gcaagccacatgctaagacagaaga

SEQ ID NO: 5630316 - DNA, 25 bp, Homo sapien
tccaacttggagtgctctggtcatt

SEQ ID NO: 5630317 - DNA, 25 bp, Homo sapien
aaataaagacagaactaagctgggg

SEQ ID NO: 5630318 - DNA, 25 bp, Homo sapien
caggctgccatcagcacccactcac

SEQ ID NO: 5630319 - DNA, 25 bp, Homo sapien
ggggcatgtatgacatttcaagctc

SEQ ID NO: 5630320 - DNA, 25 bp, Homo sapien
agatgtagtattctgagaagagatc

SEQ ID NO: 5630321 - DNA, 25 bp, Homo sapien
ttgcaaaaggtgtagtgaccaatgg

SEQ ID NO: 5630322 - DNA, 25 bp, Homo sapien
gagaagagatcatttgttaagagcg

SEQ ID NO: 5630323 - DNA, 25 bp, Homo sapien
atttgatgcatccgtttcgctgtct

SEQ ID NO: 5630324 - DNA, 25 bp, Homo sapien
tgttaagagcggatttaagacagag

SEQ ID NO: 5630325 - DNA, 25 bp, Homo sapien
tcgctgtcttgcaaaaggtgtagtg

SEQ ID NO: 5630326 - DNA, 25 bp, Homo sapien
aagggcaaagtgatacataaaccaa

SEQ ID NO: 5630327 - DNA, 25 bp, Homo sapien
tcagtgcaaaagattgatggtgatg

SEQ ID NO: 5630328 - DNA, 25 bp, Homo sapien
gatggtgatgatgtatcaatgcaat

SEQ ID NO: 5630329 - DNA, 25 bp, Homo sapien
tttaagacagagagtgtattcattc

SEQ ID NO: 5630330 - DNA, 25 bp, Homo sapien
aaatatacaagggcaaagtgataca

SEQ ID NO: 5630331 - DNA, 25 bp, Homo sapien
ggaatagaaacctgcaggaagttac

SEQ ID NO: 5630332 - DNA, 25 bp, Homo sapien
gcttcctccaaatgtgacacctcat

SEQ ID NO: 5630333 - DNA, 25 bp, Homo sapien
ggtgaactgtcctttgctattgggt

SEQ ID NO: 5630334 - DNA, 25 bp, Homo sapien
ctattgggttaaatagtaaagagac

SEQ ID NO: 5630335 - DNA, 25 bp, Homo sapien
tagtacagaattcaatgtagccttc

SEQ ID NO: 5630336 - DNA, 25 bp, Homo sapien
gttactagtgtgaagctttatgccc

SEQ ID NO: 5630337 - DNA, 25 bp, Homo sapien
agaaattagagttaaaacagttatg

SEQ ID NO: 5630338 - DNA, 25 bp, Homo sapien
ctgtacatcagtgcatttcttaagt

SEQ ID NO: 5630339 - DNA, 25 bp, Homo sapien
taatttggaatagaaacctgcagga

SEQ ID NO: 5630340 - DNA, 25 bp, Homo sapien
gctcacaaaccaaataaaggtgaac

SEQ ID NO: 5630341 - DNA, 25 bp, Homo sapien
aacaactgagtcatgaagctcactt

SEQ ID NO: 5630342 - DNA, 25 bp, Homo sapien
ggaggtcgggtgagttgagagggcg

SEQ ID NO: 5630343 - DNA, 25 bp, Homo sapien
cgccctctcaactcacccgacctcc

SEQ ID NO: 5630344 - DNA, 25 bp, Homo sapien
aaagaaaaagagtcaggaaatcctc

SEQ ID NO: 5630345 - DNA, 25 bp, Homo sapien
caaagatgttaaaaacaacactggg

SEQ ID NO: 5630346 - DNA, 25 bp, Homo sapien
tgatcgaatttgagaaaattagtcc

SEQ ID NO: 5630347 - DNA, 25 bp, Homo sapien
gtgagttggaaattaattggcctct

SEQ ID NO: 5630348 - DNA, 25 bp, Homo sapien
gaaaattagtcctgctgctcagata

SEQ ID NO: 5630349 - DNA, 25 bp, Homo sapien
gctatacaatctgatcgaatttgag

SEQ ID NO: 5630350 - DNA, 25 bp, Homo sapien
cattttaaatggcaagttgtttgtt

SEQ ID NO: 5630351 - DNA, 25 bp, Homo sapien
tgctgctcagataaaaaaagaaatt

SEQ ID NO: 5630352 - DNA, 25 bp, Homo sapien
aattggcctcttaacaaagatgtta

SEQ ID NO: 5630353 - DNA, 25 bp, Homo sapien
aacaagtattagttcaatgtgcttt

SEQ ID NO: 5630354 - DNA, 25 bp, Homo sapien
aatgtgctttgtctcagtttttggc

SEQ ID NO: 5630355 - DNA, 25 bp, Homo sapien
gtcaagtaagtgttgggaagccttg

SEQ ID NO: 5630356 - DNA, 25 bp, Homo sapien
caggctaaagcaaaatcagggactg

SEQ ID NO: 5630357 - DNA, 25 bp, Homo sapien
ggttccaggaatggagtctactccg

SEQ ID NO: 5630358 - DNA, 25 bp, Homo sapien
ctgttggcttaggctggttccagga

SEQ ID NO: 5630359 - DNA, 25 bp, Homo sapien
aagatgctggtagagtaaccaacct

SEQ ID NO: 5630360 - DNA, 25 bp, Homo sapien
ttggcaaaggttcagttccacccca

SEQ ID NO: 5630361 - DNA, 25 bp, Homo sapien
gggcagaattagagccagcctgatt

SEQ ID NO: 5630362 - DNA, 25 bp, Homo sapien
gggaagcagtggtatttcagccaag

SEQ ID NO: 5630363 - DNA, 25 bp, Homo sapien
cagctaccagtggccaataagatcc

SEQ ID NO: 5630364 - DNA, 25 bp, Homo sapien
aagatccacgcaattcagtcccacc

SEQ ID NO: 5630365 - DNA, 25 bp, Homo sapien
tctactccgtgtgcagagcagttgg

SEQ ID NO: 5630366 - DNA, 25 bp, Homo sapien
ggccaatgatgtcggagacatggga

SEQ ID NO: 5630367 - DNA, 25 bp, Homo sapien
gcgaagatcacgtccaccatcccga

SEQ ID NO: 5630368 - DNA, 25 bp, Homo sapien
ataatagcaaacacaacgcagcctt

SEQ ID NO: 5630369 - DNA, 25 bp, Homo sapien
gagctgggtgctatttgctgctgct

SEQ ID NO: 5630370 - DNA, 25 bp, Homo sapien
caggccgtctgggccaatgatgtcg

SEQ ID NO: 5630371 - DNA, 25 bp, Homo sapien
cacgtccaccatcccgatgagcatg

SEQ ID NO: 5630372 - DNA, 25 bp, Homo sapien
gaaaataatagcaaacacaacgcag

SEQ ID NO: 5630373 - DNA, 25 bp, Homo sapien
ggccacgttgaccagatcgcggccg

SEQ ID NO: 5630374 - DNA, 25 bp, Homo sapien
gatcacgtccaccatcccgatgagc

SEQ ID NO: 5630375 - DNA, 25 bp, Homo sapien
ctcctgctgcaacttcctcacctca

SEQ ID NO: 5630376 - DNA, 25 bp, Homo sapien
atagcaaacacaacgcagccttggg

SEQ ID NO: 5630377 - DNA, 25 bp, Homo sapien
gagttcagatgagttctggggtcac

SEQ ID NO: 5630378 - DNA, 25 bp, Homo sapien
ggagtagcttgaaaggctggttttg

SEQ ID NO: 5630379 - DNA, 25 bp, Homo sapien
taaagactgaagagtcagcacttcc

SEQ ID NO: 5630380 - DNA, 25 bp, Homo sapien
accctcctgccaacaccttccactc

SEQ ID NO: 5630381 - DNA, 25 bp, Homo sapien
cagcacttccatgttctcagcggtt

SEQ ID NO: 5630382 - DNA, 25 bp, Homo sapien
ttgtaatacaagctgaaggtggaag

SEQ ID NO: 5630383 - DNA, 25 bp, Homo sapien
aaagtgagaggaatgaaactcttgg

SEQ ID NO: 5630384 - DNA, 25 bp, Homo sapien
ttagtcccctaaagtgagaggaatg

SEQ ID NO: 5630385 - DNA, 25 bp, Homo sapien
cttggatgtgagatctcatgcactt

SEQ ID NO: 5630386 - DNA, 25 bp, Homo sapien
ttctcagcggttatccttggatgtg

SEQ ID NO: 5630387 - DNA, 25 bp, Homo sapien
ttaaacatatgcagctaaaaacttt

SEQ ID NO: 5630388 - DNA, 25 bp, Homo sapien
tgacagagctaggattcaaacctgt

SEQ ID NO: 5630389 - DNA, 25 bp, Homo sapien
taataatggtggctaaaagcaaggt

SEQ ID NO: 5630390 - DNA, 25 bp, Homo sapien
tcaaacctgtgtctgtctgacccca

SEQ ID NO: 5630391 - DNA, 25 bp, Homo sapien
gagcatatttctctggcactgtcac

SEQ ID NO: 5630392 - DNA, 25 bp, Homo sapien
ttcaacagtgagacagtgattataa

SEQ ID NO: 5630393 - DNA, 25 bp, Homo sapien
gaaggccacaacaaaaaagtgacag

SEQ ID NO: 5630394 - DNA, 25 bp, Homo sapien
ctgcctggaaggccacaacaaaaaa

SEQ ID NO: 5630395 - DNA, 25 bp, Homo sapien
tgttgtagcacccagagcatatttc

SEQ ID NO: 5630396 - DNA, 25 bp, Homo sapien
acactgcttcctgcataggtcattc

SEQ ID NO: 5630397 - DNA, 25 bp, Homo sapien
tgtctgaccccaaggttcaagcttt

SEQ ID NO: 5630398 - DNA, 25 bp, Homo sapien
agggaggttaagtatcctgcctgga

SEQ ID NO: 5630399 - DNA, 25 bp, Homo sapien
ctcccaagtccctgaagtcttcccc

SEQ ID NO: 5630400 - DNA, 25 bp, Homo sapien
atgtcaaagacagttctaaaggttc

SEQ ID NO: 5630401 - DNA, 25 bp, Homo sapien
cactggagaaacccaccatctacac

SEQ ID NO: 5630402 - DNA, 25 bp, Homo sapien
cccccatcttctagcacaggtcatc

SEQ ID NO: 5630403 - DNA, 25 bp, Homo sapien
agacagacacttcttaggtcggttc

SEQ ID NO: 5630404 - DNA, 25 bp, Homo sapien
ttcactaactcatcacaacagcttt

SEQ ID NO: 5630405 - DNA, 25 bp, Homo sapien
gttctcacagatgaggacaccgagg

SEQ ID NO: 5630406 - DNA, 25 bp, Homo sapien
ccccaacaccctagcccccatcttc

SEQ ID NO: 5630407 - DNA, 25 bp, Homo sapien
accatctacacagctgacttactac

SEQ ID NO: 5630408 - DNA, 25 bp, Homo sapien
ctaaaggttctatgtgtacgaattc

SEQ ID NO: 5630409 - DNA, 25 bp, Homo sapien
taggtcggttctcacagatgaggac

SEQ ID NO: 5630410 - DNA, 25 bp, Homo sapien
aatagctcagcaatactggagagag

SEQ ID NO: 5630411 - DNA, 25 bp, Homo sapien
catgccaattactgtgaaggtgtga

SEQ ID NO: 5630412 - DNA, 25 bp, Homo sapien
tgtgaaggtgtgaacaaatctttac

SEQ ID NO: 5630413 - DNA, 25 bp, Homo sapien
caaggaaacaaggtagttctttgtc

SEQ ID NO: 5630414 - DNA, 25 bp, Homo sapien
tgtaacttgtgcatttggaacaggc

SEQ ID NO: 5630415 - DNA, 25 bp, Homo sapien
ggggagttatacatctgaggactct

SEQ ID NO: 5630416 - DNA, 25 bp, Homo sapien
gtgttcactttcaggggagttatac

SEQ ID NO: 5630417 - DNA, 25 bp, Homo sapien
cagatagccctagggcagcatagac

SEQ ID NO: 5630418 - DNA, 25 bp, Homo sapien
agatgcggtagaaaactctaatagc

SEQ ID NO: 5630419 - DNA, 25 bp, Homo sapien
tggaacaggcaaatgcaaatgatta

SEQ ID NO: 5630420 - DNA, 25 bp, Homo sapien
actagtgcagggttcttggactttt

SEQ ID NO: 5630421 - DNA, 25 bp, Homo sapien
aaccagtcatctctcaaacaggcag

SEQ ID NO: 5630422 - DNA, 25 bp, Homo sapien
cccagatactgattttgaaagcctc

SEQ ID NO: 5630423 - DNA, 25 bp, Homo sapien
tctgagactcagaaacccctgagct

SEQ ID NO: 5630424 - DNA, 25 bp, Homo sapien
gttacgattctgaaaccaagagtac

SEQ ID NO: 5630425 - DNA, 25 bp, Homo sapien
actccagtcagtgctacaggtagcc

SEQ ID NO: 5630426 - DNA, 25 bp, Homo sapien
cttactaaagaggtgcattcagttc

SEQ ID NO: 5630427 - DNA, 25 bp, Homo sapien
ctgagcttgttagatggacagacat

SEQ ID NO: 5630428 - DNA, 25 bp, Homo sapien
tgtggatgagtgtttcttcagtgtc

SEQ ID NO: 5630429 - DNA, 25 bp, Homo sapien
acaggtagcccagtagagcatctta

SEQ ID NO: 5630430 - DNA, 25 bp, Homo sapien
tctgtaggcagcaaactccagtcag

SEQ ID NO: 5630431 - DNA, 25 bp, Homo sapien
aaacaggcagaatgatttcaatatc

SEQ ID NO: 5630432 - DNA, 25 bp, Homo sapien
tttcatgcagagggtactccgttca

SEQ ID NO: 5630433 - DNA, 25 bp, Homo sapien
gaggacagccaatatcttcagaaat

SEQ ID NO: 5630434 - DNA, 25 bp, Homo sapien
agggagcatttgttaagcgcccgct

SEQ ID NO: 5630435 - DNA, 25 bp, Homo sapien
cctcttacagctgcacgtgtcaggc

SEQ ID NO: 5630436 - DNA, 25 bp, Homo sapien
tcagtgataactgcaaaggaagttt

SEQ ID NO: 5630437 - DNA, 25 bp, Homo sapien
ttacatcaccacgtggccctgtctc

SEQ ID NO: 5630438 - DNA, 25 bp, Homo sapien
ccaggcaccatgaatagggaaaaat

SEQ ID NO: 5630439 - DNA, 25 bp, Homo sapien
ctctcatataagctagaggacagcc

SEQ ID NO: 5630440 - DNA, 25 bp, Homo sapien
gcacgtgtcaggcagcatcatttac

SEQ ID NO: 5630441 - DNA, 25 bp, Homo sapien
tggtgctgtgtttgggcattgttac

SEQ ID NO: 5630442 - DNA, 25 bp, Homo sapien
aatgactggttgattagtaaagcac

SEQ ID NO: 5630443 - DNA, 25 bp, Homo sapien
attattctactgggctctacgtgag

SEQ ID NO: 5630444 - DNA, 25 bp, Homo sapien
tgagagctgctgggagcatttatag

SEQ ID NO: 5630445 - DNA, 25 bp, Homo sapien
acagcaatgaacaatgcggaaagga

SEQ ID NO: 5630446 - DNA, 25 bp, Homo sapien
tcattgtgacagggtagcattgaca

SEQ ID NO: 5630447 - DNA, 25 bp, Homo sapien
agctgctgggagcatttatagcacc

SEQ ID NO: 5630448 - DNA, 25 bp, Homo sapien
tactgggctctacgtgagaatacag

SEQ ID NO: 5630449 - DNA, 25 bp, Homo sapien
atgggactccaagccctgtaattat

SEQ ID NO: 5630450 - DNA, 25 bp, Homo sapien
tgcggaaaggatgccgcaaacttcc

SEQ ID NO: 5630451 - DNA, 25 bp, Homo sapien
ccaaccacctatattccctgaagaa

SEQ ID NO: 5630452 - DNA, 25 bp, Homo sapien
tcatcagagacttatacagtgcatc

SEQ ID NO: 5630453 - DNA, 25 bp, Homo sapien
cactctgaacagcaatgaacaatgc

SEQ ID NO: 5630454 - DNA, 25 bp, Homo sapien
gagagtgtcgatttcccaaggtgtc

SEQ ID NO: 5630455 - DNA, 25 bp, Homo sapien
ggcaatggctgtgaaacacaccaca

SEQ ID NO: 5630456 - DNA, 25 bp, Homo sapien
aggtcaaaggctctacgaacgccgt

SEQ ID NO: 5630457 - DNA, 25 bp, Homo sapien
tgaaacacaccacaccaatgacagg

SEQ ID NO: 5630458 - DNA, 25 bp, Homo sapien
gagttcactttacgctgacggagct

SEQ ID NO: 5630459 - DNA, 25 bp, Homo sapien
tacaatctacctagggaggcaatgg

SEQ ID NO: 5630460 - DNA, 25 bp, Homo sapien
cgggtcactgtgacacaacggatcc

SEQ ID NO: 5630461 - DNA, 25 bp, Homo sapien
acggatccctctgcaaagtcaaagc

SEQ ID NO: 5630462 - DNA, 25 bp, Homo sapien
taaggatgcaaccattagaaaatgt

SEQ ID NO: 5630463 - DNA, 25 bp, Homo sapien
tcctcacccggtgaccttcaggcct

SEQ ID NO: 5630464 - DNA, 25 bp, Homo sapien
gaaaacgcagctctcatctggttcc

SEQ ID NO: 5630465 - DNA, 25 bp, Homo sapien
cacaagatttctgtccatggcaccc

SEQ ID NO: 5630466 - DNA, 25 bp, Homo sapien
atgtgtcatttctgtgggccacggt

SEQ ID NO: 5630467 - DNA, 25 bp, Homo sapien
tcctcaagatgagcaaacaagagtg

SEQ ID NO: 5630468 - DNA, 25 bp, Homo sapien
gagcaaacaagagtgatacagattt

SEQ ID NO: 5630469 - DNA, 25 bp, Homo sapien
atggcacccaaggacccactcaaat

SEQ ID NO: 5630470 - DNA, 25 bp, Homo sapien
tagaaactgtgctctccatggcttc

SEQ ID NO: 5630471 - DNA, 25 bp, Homo sapien
gaaagaatttggcaaacatcccctc

SEQ ID NO: 5630472 - DNA, 25 bp, Homo sapien
cccgcccccagtatcctacgaccaa

SEQ ID NO: 5630473 - DNA, 25 bp, Homo sapien
ccaaggccctggtcttgacagtcct

SEQ ID NO: 5630474 - DNA, 25 bp, Homo sapien
aaaggcagaatttacgtgtgaatta

SEQ ID NO: 5630475 - DNA, 25 bp, Homo sapien
gcaaccctgacaagtggctaagtgg

SEQ ID NO: 5630476 - DNA, 25 bp, Homo sapien
agacctagaactggtgtatatgggc

SEQ ID NO: 5630477 - DNA, 25 bp, Homo sapien
tcagccttttgcacaagaagggctc

SEQ ID NO: 5630478 - DNA, 25 bp, Homo sapien
agaaaggaaactgacatcttaggtt

SEQ ID NO: 5630479 - DNA, 25 bp, Homo sapien
tgtatatgggcagattctgggctct

SEQ ID NO: 5630480 - DNA, 25 bp, Homo sapien
ggctctggacccctccctggagtac

SEQ ID NO: 5630481 - DNA, 25 bp, Homo sapien
agcagctggggcctattttgcactt

SEQ ID NO: 5630482 - DNA, 25 bp, Homo sapien
atggattctatgcctgtggacagta

SEQ ID NO: 5630483 - DNA, 25 bp, Homo sapien
gcaaacacccgctgaacaggattcc

SEQ ID NO: 5630484 - DNA, 25 bp, Homo sapien
gagctcagaagtacaagccagctgg

SEQ ID NO: 5630485 - DNA, 25 bp, Homo sapien
tatccagttagaaagtcctgtcaac

SEQ ID NO: 5630486 - DNA, 25 bp, Homo sapien
ttaggttggtgagactaagacctag

SEQ ID NO: 5630487 - DNA, 25 bp, Homo sapien
aagtggttccctattggcagacatt

SEQ ID NO: 5630488 - DNA, 25 bp, Homo sapien
actcatttgtgtaactgcatatatt

SEQ ID NO: 5630489 - DNA, 25 bp, Homo sapien
atatctcaacgagttttgacaaatt

SEQ ID NO: 5630490 - DNA, 25 bp, Homo sapien
attgtcagttatcctccacggaggt

SEQ ID NO: 5630491 - DNA, 25 bp, Homo sapien
cctattggcagacatttaggttatt

SEQ ID NO: 5630492 - DNA, 25 bp, Homo sapien
tttaagtggttccctattggcagac

SEQ ID NO: 5630493 - DNA, 25 bp, Homo sapien
agcaattcacatgcaggaggcaaac

SEQ ID NO: 5630494 - DNA, 25 bp, Homo sapien
tggggaaaaatgcattgattttaat

SEQ ID NO: 5630495 - DNA, 25 bp, Homo sapien
tagtagatattgtcagttatcctcc

SEQ ID NO: 5630496 - DNA, 25 bp, Homo sapien
tattttgagagtatgaattcctcat

SEQ ID NO: 5630497 - DNA, 25 bp, Homo sapien
ggcaccaggaatgcgcatttgcaat

SEQ ID NO: 5630498 - DNA, 25 bp, Homo sapien
tagaccccacttttggcctgtacac

SEQ ID NO: 5630499 - DNA, 25 bp, Homo sapien
tttggcctgtacaccacggccgtgt

SEQ ID NO: 5630500 - DNA, 25 bp, Homo sapien
ttcgcccctgaagcccctcagcgac

SEQ ID NO: 5630501 - DNA, 25 bp, Homo sapien
ctacttccaggacctgcattcgccc

SEQ ID NO: 5630502 - DNA, 25 bp, Homo sapien
gcctgtacaccacggccgtgtggca

SEQ ID NO: 5630503 - DNA, 25 bp, Homo sapien
cgacgcaacgtgaactgcctgaaga

SEQ ID NO: 5630504 - DNA, 25 bp, Homo sapien
aacgtgaactgcctgaagaacgtgg

SEQ ID NO: 5630505 - DNA, 25 bp, Homo sapien
cctgaagcccctcagcgactcagac

SEQ ID NO: 5630506 - DNA, 25 bp, Homo sapien
aggagggcgtgcacattccctttga

SEQ ID NO: 5630507 - DNA, 25 bp, Homo sapien
cctcagcgactcagaccctgacagt

SEQ ID NO: 5630508 - DNA, 25 bp, Homo sapien
aggacctgcattcgcccctgaagcc

SEQ ID NO: 5630509 - DNA, 25 bp, Homo sapien
gataaagggtactcattacgcccca

SEQ ID NO: 5630510 - DNA, 25 bp, Homo sapien
attctgcctaatgagatggaagggg

SEQ ID NO: 5630511 - DNA, 25 bp, Homo sapien
gaatcaaaggaaaccaagcagaaac

SEQ ID NO: 5630512 - DNA, 25 bp, Homo sapien
cttggctaaagtaagctagggcagt

SEQ ID NO: 5630513 - DNA, 25 bp, Homo sapien
gctgaagatcaaaggacaaacaaga

SEQ ID NO: 5630514 - DNA, 25 bp, Homo sapien
gaacacagaagcaagccaaatttta

SEQ ID NO: 5630515 - DNA, 25 bp, Homo sapien
ctcattacgccccagtggaaccaga

SEQ ID NO: 5630516 - DNA, 25 bp, Homo sapien
tatatatggggttggtctctgttga

SEQ ID NO: 5630517 - DNA, 25 bp, Homo sapien
ctccctacccaggtctgatggctga

SEQ ID NO: 5630518 - DNA, 25 bp, Homo sapien
gggcctaatgggctgtaaattactc

SEQ ID NO: 5630519 - DNA, 25 bp, Homo sapien
gggcactggctccctacccaggtct

SEQ ID NO: 5630520 - DNA, 25 bp, Homo sapien
gccaaagggagtttcaccattcaga

SEQ ID NO: 5630521 - DNA, 25 bp, Homo sapien
cccttggcaatgggtatttgggtgg

SEQ ID NO: 5630522 - DNA, 25 bp, Homo sapien
gctcctaccctggacagaagccatc

SEQ ID NO: 5630523 - DNA, 25 bp, Homo sapien
cctatctctgtgttagctcctaccc

SEQ ID NO: 5630524 - DNA, 25 bp, Homo sapien
cttgatgtctgatggctcttatgcc

SEQ ID NO: 5630525 - DNA, 25 bp, Homo sapien
taacccacactattgagaggccagg

SEQ ID NO: 5630526 - DNA, 25 bp, Homo sapien
accagcagcaccttcctacctcctt

SEQ ID NO: 5630527 - DNA, 25 bp, Homo sapien
cactattgagaggccaggccaaagg

SEQ ID NO: 5630528 - DNA, 25 bp, Homo sapien
ttcaagatcagcctaacccacacta

SEQ ID NO: 5630529 - DNA, 25 bp, Homo sapien
gttagctcctaccctggacagaagc

SEQ ID NO: 5630530 - DNA, 25 bp, Homo sapien
gagggaagtccttgatgtctgatgg

SEQ ID NO: 5630531 - DNA, 25 bp, Homo sapien
gggaactaagagtgacagcagttaa

SEQ ID NO: 5630532 - DNA, 25 bp, Homo sapien
aatcacatgcacctgagggttgagg

SEQ ID NO: 5630533 - DNA, 25 bp, Homo sapien
cacatttacccactgtgggagactt

SEQ ID NO: 5630534 - DNA, 25 bp, Homo sapien
tcaaacccaggtccacacatttacc

SEQ ID NO: 5630535 - DNA, 25 bp, Homo sapien
accatatcaggcagtgaatataatc

SEQ ID NO: 5630536 - DNA, 25 bp, Homo sapien
aggaggaggaagttacatcttatgt

SEQ ID NO: 5630537 - DNA, 25 bp, Homo sapien
gggaggatacacaatcacagcagaa

SEQ ID NO: 5630538 - DNA, 25 bp, Homo sapien
agtgacagcagttaatccctggccc

SEQ ID NO: 5630539 - DNA, 25 bp, Homo sapien
cagttaatccctggcccaaggggtc

SEQ ID NO: 5630540 - DNA, 25 bp, Homo sapien
tgcctacacacaaaatgagtgggtt

SEQ ID NO: 5630541 - DNA, 25 bp, Homo sapien
catcaggtttcaaacccaggtccac

SEQ ID NO: 5630542 - DNA, 25 bp, Homo sapien
tggcgcagttgcatctccgtattga

SEQ ID NO: 5630543 - DNA, 25 bp, Homo sapien
gcggctgagctcgccactccagccg

SEQ ID NO: 5630544 - DNA, 25 bp, Homo sapien
gcgaagggaggtgcccctattatta

SEQ ID NO: 5630545 - DNA, 25 bp, Homo sapien
gcatctccgtattgagtgcgaaggg

SEQ ID NO: 5630546 - DNA, 25 bp, Homo sapien
tccagaacagctgctacccttggtg

SEQ ID NO: 5630547 - DNA, 25 bp, Homo sapien
agaacagctgctacccttggtgggg

SEQ ID NO: 5630548 - DNA, 25 bp, Homo sapien
gcggttccagaacagctgctaccct

SEQ ID NO: 5630549 - DNA, 25 bp, Homo sapien
gttgcatctccgtattgagtgcgaa

SEQ ID NO: 5630550 - DNA, 25 bp, Homo sapien
ctattattatttgacaccccccttg

SEQ ID NO: 5630551 - DNA, 25 bp, Homo sapien
tctccgtattgagtgcgaagggagg

SEQ ID NO: 5630552 - DNA, 25 bp, Homo sapien
tctctggcgcagttgcatctccgta

SEQ ID NO: 5630553 - DNA, 25 bp, Homo sapien
aagaggaatctgaatttacaacccc

SEQ ID NO: 5630554 - DNA, 25 bp, Homo sapien
gagtgtcgaaaggacttgctgatga

SEQ ID NO: 5630555 - DNA, 25 bp, Homo sapien
aacactacccaccaagcccacttta

SEQ ID NO: 5630556 - DNA, 25 bp, Homo sapien
cccatgggactctccacttggcaac

SEQ ID NO: 5630557 - DNA, 25 bp, Homo sapien
tctcttaaaaagtggaagacgtggc

SEQ ID NO: 5630558 - DNA, 25 bp, Homo sapien
gagatactacactaaaagcatggat

SEQ ID NO: 5630559 - DNA, 25 bp, Homo sapien
gcccctccagacccacccatgggac

SEQ ID NO: 5630560 - DNA, 25 bp, Homo sapien
atatagagcacaggttgcaaatggg

SEQ ID NO: 5630561 - DNA, 25 bp, Homo sapien
accacatccagcctgagccatttct

SEQ ID NO: 5630562 - DNA, 25 bp, Homo sapien
gcccacattcccaagcagtgacagt

SEQ ID NO: 5630563 - DNA, 25 bp, Homo sapien
atttcccgtatggccaagaggaatc

SEQ ID NO: 5630564 - DNA, 25 bp, Homo sapien
cattagctcaagttgagtggcagct

SEQ ID NO: 5630565 - DNA, 25 bp, Homo sapien
aatgaacacctttgcacaatccctc

SEQ ID NO: 5630566 - DNA, 25 bp, Homo sapien
gagaaacaggcctctgatagactag

SEQ ID NO: 5630567 - DNA, 25 bp, Homo sapien
actagttaactaatctgggcgcatt

SEQ ID NO: 5630568 - DNA, 25 bp, Homo sapien
agtttgcaggctagcaatgaacacc

SEQ ID NO: 5630569 - DNA, 25 bp, Homo sapien
ttgcttaccacctagtttgcaggct

SEQ ID NO: 5630570 - DNA, 25 bp, Homo sapien
agctcaagttgagtggcagctgtag

SEQ ID NO: 5630571 - DNA, 25 bp, Homo sapien
ctgcataatgtagagagaaacaggc

SEQ ID NO: 5630572 - DNA, 25 bp, Homo sapien
ttgcacaatccctcagactggctgg

SEQ ID NO: 5630573 - DNA, 25 bp, Homo sapien
atctgggcgcattttcattagctca

SEQ ID NO: 5630574 - DNA, 25 bp, Homo sapien
acaggcctctgatagactagttaac

SEQ ID NO: 5630575 - DNA, 25 bp, Homo sapien
agtgactaggagcccacaattttcc

SEQ ID NO: 5630576 - DNA, 25 bp, Homo sapien
gtaattatgaacacaaccagggtgg

SEQ ID NO: 5630577 - DNA, 25 bp, Homo sapien
taacgatataaagcaactgacaaac

SEQ ID NO: 5630578 - DNA, 25 bp, Homo sapien
tgacaaacttgagatgggataaacc

SEQ ID NO: 5630579 - DNA, 25 bp, Homo sapien
atagattagtgcagtgactaggagc

SEQ ID NO: 5630580 - DNA, 25 bp, Homo sapien
gagagacaggctaataatatgcaac

SEQ ID NO: 5630581 - DNA, 25 bp, Homo sapien
agaaaatgtagagggtattcacttg

SEQ ID NO: 5630582 - DNA, 25 bp, Homo sapien
attaacgccaagagtgggcgtcttt

SEQ ID NO: 5630583 - DNA, 25 bp, Homo sapien
caagaaatgtacgttgggctgtaat

SEQ ID NO: 5630584 - DNA, 25 bp, Homo sapien
ttcacttgtcacaggaaaatctccc

SEQ ID NO: 5630585 - DNA, 25 bp, Homo sapien
tttactgtaaagagctcaagagcat

SEQ ID NO: 5630586 - DNA, 25 bp, Homo sapien
atcttatgtggatgcttgccatgtt

SEQ ID NO: 5630587 - DNA, 25 bp, Homo sapien
gactaagcatagactgtcacatata

SEQ ID NO: 5630588 - DNA, 25 bp, Homo sapien
cagtatgatggcaagaatcatcttg

SEQ ID NO: 5630589 - DNA, 25 bp, Homo sapien
agaatcaccaggggagccttttcaa

SEQ ID NO: 5630590 - DNA, 25 bp, Homo sapien
gactgtgatttaactgaccaggggt

SEQ ID NO: 5630591 - DNA, 25 bp, Homo sapien
tcaaaatcaaacaacctgaagcttg

SEQ ID NO: 5630592 - DNA, 25 bp, Homo sapien
gccatgtttaaggaagagtaaggaa

SEQ ID NO: 5630593 - DNA, 25 bp, Homo sapien
aacctgaagcttggactccattttc

SEQ ID NO: 5630594 - DNA, 25 bp, Homo sapien
gagcctgtgtagacttcgcatcaga

SEQ ID NO: 5630595 - DNA, 25 bp, Homo sapien
tcaactaaaacgcatcagtatgatg

SEQ ID NO: 5630596 - DNA, 25 bp, Homo sapien
ttaaatcaagacaaaaaggcataca

SEQ ID NO: 5630597 - DNA, 25 bp, Homo sapien
gaatatgccagaatgtcaatggtaa

SEQ ID NO: 5630598 - DNA, 25 bp, Homo sapien
atcagaacaaaggaactcttacttc

SEQ ID NO: 5630599 - DNA, 25 bp, Homo sapien
tgccaattgaacaatggtgaaaaaa

SEQ ID NO: 5630600 - DNA, 25 bp, Homo sapien
atgtcaatggtaaaaaactcatact

SEQ ID NO: 5630601 - DNA, 25 bp, Homo sapien
gacaaacgatcagaacaaaggaact

SEQ ID NO: 5630602 - DNA, 25 bp, Homo sapien
cgtaagtcagactactatacagaac

SEQ ID NO: 5630603 - DNA, 25 bp, Homo sapien
catgtaaatacagtgacaaacgatc

SEQ ID NO: 5630604 - DNA, 25 bp, Homo sapien
gaaggagtcagaatatgccagaatg

SEQ ID NO: 5630605 - DNA, 25 bp, Homo sapien
ataatggattataaatatgactaag

SEQ ID NO: 5630606 - DNA, 25 bp, Homo sapien
gactaagacatcacctcaaagtctc

SEQ ID NO: 5630607 - DNA, 25 bp, Homo sapien
ctaattggttacgtaagtcagacta

SEQ ID NO: 5630608 - DNA, 25 bp, Homo sapien
tagctttgaatttccctacctccac

SEQ ID NO: 5630609 - DNA, 25 bp, Homo sapien
aagtcatacaattagtaagagagag

SEQ ID NO: 5630610 - DNA, 25 bp, Homo sapien
acagactaacatttggtaagtgctt

SEQ ID NO: 5630611 - DNA, 25 bp, Homo sapien
tgcaaatccaaggaggtagtttagg

SEQ ID NO: 5630612 - DNA, 25 bp, Homo sapien
taaacagactgcaaatccaaggagg

SEQ ID NO: 5630613 - DNA, 25 bp, Homo sapien
ggtaatccaagaagaataatgtgaa

SEQ ID NO: 5630614 - DNA, 25 bp, Homo sapien
actgagacccagaacaattaaatat

SEQ ID NO: 5630615 - DNA, 25 bp, Homo sapien
atacaattagtaagagagagaaagg

SEQ ID NO: 5630616 - DNA, 25 bp, Homo sapien
tggtcaaaccaatttctggtaatcc

SEQ ID NO: 5630617 - DNA, 25 bp, Homo sapien
gattacccaagaaattatctcctgt

SEQ ID NO: 5630618 - DNA, 25 bp, Homo sapien
ttaaataacctaatcaaagtcatac

SEQ ID NO: 5630619 - DNA, 25 bp, Homo sapien
attaaacacaaagtggtttgtaatg

SEQ ID NO: 5630620 - DNA, 25 bp, Homo sapien
caagtatattaaatgctcatgcact

SEQ ID NO: 5630621 - DNA, 25 bp, Homo sapien
gaaagtcctataaaattgtagtgtg

SEQ ID NO: 5630622 - DNA, 25 bp, Homo sapien
aaaaaaggtttagccagaggtgcta

SEQ ID NO: 5630623 - DNA, 25 bp, Homo sapien
ggggttgagaaacacgacatatccc

SEQ ID NO: 5630624 - DNA, 25 bp, Homo sapien
agtcatctgacaatagttatcaagt

SEQ ID NO: 5630625 - DNA, 25 bp, Homo sapien
ttgccctaccagatataataacata

SEQ ID NO: 5630626 - DNA, 25 bp, Homo sapien
attatcaaagtaaatttggaaggaa

SEQ ID NO: 5630627 - DNA, 25 bp, Homo sapien
tctaaggaaataagtgggtatgaaa

SEQ ID NO: 5630628 - DNA, 25 bp, Homo sapien
agccagaggtgctactcctatcttt

SEQ ID NO: 5630629 - DNA, 25 bp, Homo sapien
gagaaacacgacatatcccagtaca

SEQ ID NO: 5630630 - DNA, 25 bp, Homo sapien
cccacaaattttacatccagatagc

SEQ ID NO: 5630631 - DNA, 25 bp, Homo sapien
aaactgtgctgttacatttgctttt

SEQ ID NO: 5630632 - DNA, 25 bp, Homo sapien
agaaaatggcccagggtctgttgtt

SEQ ID NO: 5630633 - DNA, 25 bp, Homo sapien
cagttggtaagcagtacccacaaat

SEQ ID NO: 5630634 - DNA, 25 bp, Homo sapien
ttttagtaaatgaaaccaacatcca

SEQ ID NO: 5630635 - DNA, 25 bp, Homo sapien
accaacatccacccagttaacttcc

SEQ ID NO: 5630636 - DNA, 25 bp, Homo sapien
ccttatccagttggtaagcagtacc

SEQ ID NO: 5630637 - DNA, 25 bp, Homo sapien
ccagatagctctcaagaaaatggcc

SEQ ID NO: 5630638 - DNA, 25 bp, Homo sapien
ttaaggtcctccacagatacctgtg

SEQ ID NO: 5630639 - DNA, 25 bp, Homo sapien
acagatacctgtgactcagactggc

SEQ ID NO: 5630640 - DNA, 25 bp, Homo sapien
tcagactggctaacattgagtttgt

SEQ ID NO: 5630641 - DNA, 25 bp, Homo sapien
ttcggagaactggagctagtttttc

SEQ ID NO: 5630642 - DNA, 25 bp, Homo sapien
atggaaagaagcactgatcgccttc

SEQ ID NO: 5630643 - DNA, 25 bp, Homo sapien
ttgcagttccggtcctggctccttc

SEQ ID NO: 5630644 - DNA, 25 bp, Homo sapien
cttgaactggtctgagctggacatg

SEQ ID NO: 5630645 - DNA, 25 bp, Homo sapien
tcttcaagcacacccagaacccagg

SEQ ID NO: 5630646 - DNA, 25 bp, Homo sapien
cccaggccttgcgccatggaaagaa

SEQ ID NO: 5630647 - DNA, 25 bp, Homo sapien
acgctctgccagaattcggagaact

SEQ ID NO: 5630648 - DNA, 25 bp, Homo sapien
cttctcagccatggcgatgtcaccc

SEQ ID NO: 5630649 - DNA, 25 bp, Homo sapien
tcttcagacagtgctcgcttgggtg

SEQ ID NO: 5630650 - DNA, 25 bp, Homo sapien
tgggcagcaacgcccttgcagttcc

SEQ ID NO: 5630651 - DNA, 25 bp, Homo sapien
gagctggacatgagcaatcatccac

SEQ ID NO: 5630652 - DNA, 25 bp, Homo sapien
ggtgccataacttatcgcagagctc

SEQ ID NO: 5630653 - DNA, 25 bp, Homo sapien
gactggttgctgttggtgccataac

SEQ ID NO: 5630654 - DNA, 25 bp, Homo sapien
ccactgcgcctgtcccctcttggca

SEQ ID NO: 5630655 - DNA, 25 bp, Homo sapien
cttaatagtgttggagagaagctag

SEQ ID NO: 5630656 - DNA, 25 bp, Homo sapien
gagaagctagccccaaatggtggca

SEQ ID NO: 5630657 - DNA, 25 bp, Homo sapien
gcctactcatggtggcccaagacct

SEQ ID NO: 5630658 - DNA, 25 bp, Homo sapien
aggttggcaggtacttaatagtgtt

SEQ ID NO: 5630659 - DNA, 25 bp, Homo sapien
gctagccccaaatggtggcattctc

SEQ ID NO: 5630660 - DNA, 25 bp, Homo sapien
tttgactgcctactcatggtggccc

SEQ ID NO: 5630661 - DNA, 25 bp, Homo sapien
tgcatgctagccaatgacttttgac

SEQ ID NO: 5630662 - DNA, 25 bp, Homo sapien
tcgcagagctctccataaactgaac

SEQ ID NO: 5630663 - DNA, 25 bp, Homo sapien
aaggatccatgccacacgagagtct

SEQ ID NO: 5630664 - DNA, 25 bp, Homo sapien
agggtagtcactagccagttccagc

SEQ ID NO: 5630665 - DNA, 25 bp, Homo sapien
cggtgttttaaagtgaagcagtagg

SEQ ID NO: 5630666 - DNA, 25 bp, Homo sapien
gtggagtccaaataaaacatgtctg

SEQ ID NO: 5630667 - DNA, 25 bp, Homo sapien
ttagaacctgccatgggaaacgata

SEQ ID NO: 5630668 - DNA, 25 bp, Homo sapien
cactgtcatacgaagaaggatccat

SEQ ID NO: 5630669 - DNA, 25 bp, Homo sapien
aacatgtctgcagaccagagctagg

SEQ ID NO: 5630670 - DNA, 25 bp, Homo sapien
cccaaagtcaggtcaatggtaggga

SEQ ID NO: 5630671 - DNA, 25 bp, Homo sapien
gtggaaactgtggcatcttagggta

SEQ ID NO: 5630672 - DNA, 25 bp, Homo sapien
tgggaaacgataatatctgggaagc

SEQ ID NO: 5630673 - DNA, 25 bp, Homo sapien
cagagctaggcttcagactaccagt

SEQ ID NO: 5630674 - DNA, 25 bp, Homo sapien
ctcaggtctgtgctccgaaacttag

SEQ ID NO: 5630675 - DNA, 25 bp, Homo sapien
ctaagtttcggagcacagacctgag

SEQ ID NO: 5630676 - DNA, 25 bp, Homo sapien
acaggaaacatgtaaattagaaacc

SEQ ID NO: 5630677 - DNA, 25 bp, Homo sapien
tttatgtgaagtggcacatcaactc

SEQ ID NO: 5630678 - DNA, 25 bp, Homo sapien
aacttatgacaggacttacaatatt

SEQ ID NO: 5630679 - DNA, 25 bp, Homo sapien
gacaggtatgataaatggatgtaca

SEQ ID NO: 5630680 - DNA, 25 bp, Homo sapien
aagtaaattaatagaaagaggtata

SEQ ID NO: 5630681 - DNA, 25 bp, Homo sapien
gtggcacatcaactctaggtagact

SEQ ID NO: 5630682 - DNA, 25 bp, Homo sapien
gagaacagataaaaatgcaagtctc

SEQ ID NO: 5630683 - DNA, 25 bp, Homo sapien
gaaagaggtatactgtgcaaacact

SEQ ID NO: 5630684 - DNA, 25 bp, Homo sapien
gtgcaaacactaagcttaagaaggc

SEQ ID NO: 5630685 - DNA, 25 bp, Homo sapien
actaagcttaagaaggctgcagtgg

SEQ ID NO: 5630686 - DNA, 25 bp, Homo sapien
ctactttaaataggcacagaagcac

SEQ ID NO: 5630687 - DNA, 25 bp, Homo sapien
gggcctgcaagtaagaatttggtcc

SEQ ID NO: 5630688 - DNA, 25 bp, Homo sapien
tgcttcaccctgactggcaccctca

SEQ ID NO: 5630689 - DNA, 25 bp, Homo sapien
acgaccaaatacagatgaccccctg

SEQ ID NO: 5630690 - DNA, 25 bp, Homo sapien
cacgggccgcccattccaatccctt

SEQ ID NO: 5630691 - DNA, 25 bp, Homo sapien
tgtagggcctttctcagtaactcac

SEQ ID NO: 5630692 - DNA, 25 bp, Homo sapien
accaggcattcaggacctaggccag

SEQ ID NO: 5630693 - DNA, 25 bp, Homo sapien
aggccagaatctgcggaatccggcc

SEQ ID NO: 5630694 - DNA, 25 bp, Homo sapien
ccctggagcttctgctactggttcc

SEQ ID NO: 5630695 - DNA, 25 bp, Homo sapien
tgccaggccttgctcctgaccggct

SEQ ID NO: 5630696 - DNA, 25 bp, Homo sapien
agatgaccccctgaatatgccaggc

SEQ ID NO: 5630697 - DNA, 25 bp, Homo sapien
ctggcaccctcagcctgtagggcct

SEQ ID NO: 5630698 - DNA, 25 bp, Homo sapien
ggagacggcaactcctcggattccg

SEQ ID NO: 5630699 - DNA, 25 bp, Homo sapien
cggaatccgaggagttgccgtctcc

SEQ ID NO: 5630700 - DNA, 25 bp, Homo sapien
tgggttcaagcgacacaatctgtta

SEQ ID NO: 5630701 - DNA, 25 bp, Homo sapien
tggaatttagaagtgatgaaaaacc

SEQ ID NO: 5630702 - DNA, 25 bp, Homo sapien
ataagaaccaagaaagaattctgaa

SEQ ID NO: 5630703 - DNA, 25 bp, Homo sapien
aaaccactaggcagaatcaggatat

SEQ ID NO: 5630704 - DNA, 25 bp, Homo sapien
caggtaccacaatgcagcaagcaga

SEQ ID NO: 5630705 - DNA, 25 bp, Homo sapien
aagggaattctgcaaagacttcaca

SEQ ID NO: 5630706 - DNA, 25 bp, Homo sapien
aagctgttgctgaagtgcttagcta

SEQ ID NO: 5630707 - DNA, 25 bp, Homo sapien
agcaagcagaaaatgtcaagaatcc

SEQ ID NO: 5630708 - DNA, 25 bp, Homo sapien
caaaaagatagacatgtaaatagta

SEQ ID NO: 5630709 - DNA, 25 bp, Homo sapien
ttctgaaaagcaagggaattctgca

SEQ ID NO: 5630710 - DNA, 25 bp, Homo sapien
tgcttagctagcagaataaacctat

SEQ ID NO: 5630711 - DNA, 25 bp, Homo sapien
ataaactgtctaagctggtattaac

SEQ ID NO: 5630712 - DNA, 25 bp, Homo sapien
gaaaagaaggttctgagattcaaac

SEQ ID NO: 5630713 - DNA, 25 bp, Homo sapien
tagagacagaaaagatatcagtggt

SEQ ID NO: 5630714 - DNA, 25 bp, Homo sapien
taaactgtcgaatacagaagcccgt

SEQ ID NO: 5630715 - DNA, 25 bp, Homo sapien
aatataagagccaaaataaactgtc

SEQ ID NO: 5630716 - DNA, 25 bp, Homo sapien
aagaggagaatgactgcttaaaagg

SEQ ID NO: 5630717 - DNA, 25 bp, Homo sapien
tttctgcccatgaaaccaagcctaa

SEQ ID NO: 5630718 - DNA, 25 bp, Homo sapien
aggtttcctcttggggtgatgaaaa

SEQ ID NO: 5630719 - DNA, 25 bp, Homo sapien
cagaaaagatatcagtggttgccag

SEQ ID NO: 5630720 - DNA, 25 bp, Homo sapien
aatacagaagcccgtaaacatgttc

SEQ ID NO: 5630721 - DNA, 25 bp, Homo sapien
agaactagatagtggtaacagtttc

SEQ ID NO: 5630722 - DNA, 25 bp, Homo sapien
ctgaagccattctgttggggaacat

SEQ ID NO: 5630723 - DNA, 25 bp, Homo sapien
aatgtccaccagtccagaatcccag

SEQ ID NO: 5630724 - DNA, 25 bp, Homo sapien
ggctgattcacagaccctgggaagg

SEQ ID NO: 5630725 - DNA, 25 bp, Homo sapien
gggccagcaatcggacttgaaaccc

SEQ ID NO: 5630726 - DNA, 25 bp, Homo sapien
tcgtggttctcaggccatcggtctg

SEQ ID NO: 5630727 - DNA, 25 bp, Homo sapien
acttgaaacccctctggagaaggcg

SEQ ID NO: 5630728 - DNA, 25 bp, Homo sapien
tctttggtaagaagtcgtggttctc

SEQ ID NO: 5630729 - DNA, 25 bp, Homo sapien
ggccgttctattcatggggaccatc

SEQ ID NO: 5630730 - DNA, 25 bp, Homo sapien
gaaagtcagcaatgggactcgtcat

SEQ ID NO: 5630731 - DNA, 25 bp, Homo sapien
tcgtcatgtttcgggttggcgagaa

SEQ ID NO: 5630732 - DNA, 25 bp, Homo sapien
tggcaaacatgagggctcccttgcc

SEQ ID NO: 5630733 - DNA, 25 bp, Homo sapien
ccagagcagctctaggttctaagct

SEQ ID NO: 5630734 - DNA, 25 bp, Homo sapien
gtagactttgctaacccaagaagga

SEQ ID NO: 5630735 - DNA, 25 bp, Homo sapien
ctctgcctgtaaaaagagccccggg

SEQ ID NO: 5630736 - DNA, 25 bp, Homo sapien
gactcccggctttggatgcagagtg

SEQ ID NO: 5630737 - DNA, 25 bp, Homo sapien
agtagattctggactctccgttgtc

SEQ ID NO: 5630738 - DNA, 25 bp, Homo sapien
aagtaggttctcagctccagtgccg

SEQ ID NO: 5630739 - DNA, 25 bp, Homo sapien
ccgttgtcagctgcggctctggaat

SEQ ID NO: 5630740 - DNA, 25 bp, Homo sapien
tctggggccctggctctaaagtgaa

SEQ ID NO: 5630741 - DNA, 25 bp, Homo sapien
cgggctctgcccagactcccggctt

SEQ ID NO: 5630742 - DNA, 25 bp, Homo sapien
aagctccctgctgactctggtgttt

SEQ ID NO: 5630743 - DNA, 25 bp, Homo sapien
aggatcgaagtaggttctcagctcc

SEQ ID NO: 5630744 - DNA, 25 bp, Homo sapien
atatgacaagtttaagtggttaact

SEQ ID NO: 5630745 - DNA, 25 bp, Homo sapien
aagatgggctgttgaatgaccaata

SEQ ID NO: 5630746 - DNA, 25 bp, Homo sapien
gagtaagactgaggaatccacaact

SEQ ID NO: 5630747 - DNA, 25 bp, Homo sapien
cctccaagttggccaatgcaatttt

SEQ ID NO: 5630748 - DNA, 25 bp, Homo sapien
tgaccaatagtaatgggagtaagac

SEQ ID NO: 5630749 - DNA, 25 bp, Homo sapien
agtcagtttgctgaaggagcagtgt

SEQ ID NO: 5630750 - DNA, 25 bp, Homo sapien
aaggagcagtgtaaaattagatgac

SEQ ID NO: 5630751 - DNA, 25 bp, Homo sapien
tattctggcgcaaaagtcaggttac

SEQ ID NO: 5630752 - DNA, 25 bp, Homo sapien
agatgacaaaagtgaacattcttct

SEQ ID NO: 5630753 - DNA, 25 bp, Homo sapien
ctaaaggtaaacagggttatctctc

SEQ ID NO: 5630754 - DNA, 25 bp, Homo sapien
taacactgaagcctccaagttggcc

SEQ ID NO: 5630755 - DNA, 25 bp, Homo sapien
aacatatttattgaaaagaccatcc

SEQ ID NO: 5630756 - DNA, 25 bp, Homo sapien
attcaagatcataaattcccctagg

SEQ ID NO: 5630757 - DNA, 25 bp, Homo sapien
tccatcactggaacaacacatattg

SEQ ID NO: 5630758 - DNA, 25 bp, Homo sapien
agtgtatccatcactggaacaacac

SEQ ID NO: 5630759 - DNA, 25 bp, Homo sapien
tttatgtatgtagtttaagaaatat

SEQ ID NO: 5630760 - DNA, 25 bp, Homo sapien
attcaaggccttcagtgtatccatc

SEQ ID NO: 5630761 - DNA, 25 bp, Homo sapien
cacatattgtatccaccaagcaacc

SEQ ID NO: 5630762 - DNA, 25 bp, Homo sapien
atattgcactatggcgaattcaagg

SEQ ID NO: 5630763 - DNA, 25 bp, Homo sapien
gcactatggcgaattcaaggccttc

SEQ ID NO: 5630764 - DNA, 25 bp, Homo sapien
tccaccaagcaacctgaaagatttt

SEQ ID NO: 5630765 - DNA, 25 bp, Homo sapien
aagaaatattggtgtattcaagatc

SEQ ID NO: 5630766 - DNA, 25 bp, Homo sapien
ggaccagtcaatgccaggcttcagg

SEQ ID NO: 5630767 - DNA, 25 bp, Homo sapien
gaaacccaaatgaatccccattctc

SEQ ID NO: 5630768 - DNA, 25 bp, Homo sapien
tcaatgccaggcttcaggaatctca

SEQ ID NO: 5630769 - DNA, 25 bp, Homo sapien
cactgtacagtggtgccctgagtgg

SEQ ID NO: 5630770 - DNA, 25 bp, Homo sapien
ccagatatgcgatttgcccagagtc

SEQ ID NO: 5630771 - DNA, 25 bp, Homo sapien
agctaattagcaagtgtcaggagta

SEQ ID NO: 5630772 - DNA, 25 bp, Homo sapien
ctaggtctcctgacttgttgcactg

SEQ ID NO: 5630773 - DNA, 25 bp, Homo sapien
gaggggcctttccagactgagtttc

SEQ ID NO: 5630774 - DNA, 25 bp, Homo sapien
aactgaggcccagatatgcgatttg

SEQ ID NO: 5630775 - DNA, 25 bp, Homo sapien
atttgcccagagtcatagagctaat

SEQ ID NO: 5630776 - DNA, 25 bp, Homo sapien
aacatctgttcttaggggaccagtc

SEQ ID NO: 5630777 - DNA, 25 bp, Homo sapien
gcacagacacggcagatagtcaata

SEQ ID NO: 5630778 - DNA, 25 bp, Homo sapien
gtagaggactcgtaagtgcacctag

SEQ ID NO: 5630779 - DNA, 25 bp, Homo sapien
gaaaagcagtttgtaagtagaggac

SEQ ID NO: 5630780 - DNA, 25 bp, Homo sapien
tagtacactgcaatggcacagacac

SEQ ID NO: 5630781 - DNA, 25 bp, Homo sapien
acacagcaactgaatactggcgtat

SEQ ID NO: 5630782 - DNA, 25 bp, Homo sapien
gtggcattgacctgtacaacttcca

SEQ ID NO: 5630783 - DNA, 25 bp, Homo sapien
gccaatagatggagtggcattgacc

SEQ ID NO: 5630784 - DNA, 25 bp, Homo sapien
tagtgaaactcagccaatagatgga

SEQ ID NO: 5630785 - DNA, 25 bp, Homo sapien
aaaatcccatccaaccttagtgtcc

SEQ ID NO: 5630786 - DNA, 25 bp, Homo sapien
tgcaaataaatgggcctatatagtc

SEQ ID NO: 5630787 - DNA, 25 bp, Homo sapien
aaggatacaaggctgtagaaagatt

SEQ ID NO: 5630788 - DNA, 25 bp, Homo sapien
acaagaggaaaacactagcatgctc

SEQ ID NO: 5630789 - DNA, 25 bp, Homo sapien
ctgttactggagctaaaagaaaatc

SEQ ID NO: 5630790 - DNA, 25 bp, Homo sapien
ccagagtataaatgctttggcagcc

SEQ ID NO: 5630791 - DNA, 25 bp, Homo sapien
agagccaagaactggacagctcctt

SEQ ID NO: 5630792 - DNA, 25 bp, Homo sapien
accgcaaccatagccaaaaggacca

SEQ ID NO: 5630793 - DNA, 25 bp, Homo sapien
agggctaatgaatgaaaacgagttc

SEQ ID NO: 5630794 - DNA, 25 bp, Homo sapien
aaggaaaccgctgtgcagtcacagt

SEQ ID NO: 5630795 - DNA, 25 bp, Homo sapien
ctcaacggtcaactgactcagcctc

SEQ ID NO: 5630796 - DNA, 25 bp, Homo sapien
aatccacattgtaaacagggctaat

SEQ ID NO: 5630797 - DNA, 25 bp, Homo sapien
tctgagctctgcataagcaggtaca

SEQ ID NO: 5630798 - DNA, 25 bp, Homo sapien
acttgctttacaggggaaccgcaac

SEQ ID NO: 5630799 - DNA, 25 bp, Homo sapien
tatccaataatgtcaaggccactgc

SEQ ID NO: 5630800 - DNA, 25 bp, Homo sapien
ttaggcaataagacatgtatttaac

SEQ ID NO: 5630801 - DNA, 25 bp, Homo sapien
acaaagtggaaatgtcaaagtttac

SEQ ID NO: 5630802 - DNA, 25 bp, Homo sapien
aagctgatcacaggagatgattgtc

SEQ ID NO: 5630803 - DNA, 25 bp, Homo sapien
tgtcaaggccactgctgatacatca

SEQ ID NO: 5630804 - DNA, 25 bp, Homo sapien
tcagtcagacagatagaatttaaat

SEQ ID NO: 5630805 - DNA, 25 bp, Homo sapien
agaaaggaaaactcttaggcaataa

SEQ ID NO: 5630806 - DNA, 25 bp, Homo sapien
gaatgccttagaacttcagtcagac

SEQ ID NO: 5630807 - DNA, 25 bp, Homo sapien
ttataagctattaaatgggagtctt

SEQ ID NO: 5630808 - DNA, 25 bp, Homo sapien
ttctaagtaaccacagaatgcctta

SEQ ID NO: 5630809 - DNA, 25 bp, Homo sapien
aatttaaatgtgtttggagacaaag

SEQ ID NO: 5630810 - DNA, 25 bp, Homo sapien
aagctaataaatcttggtaagttat

SEQ ID NO: 5630811 - DNA, 25 bp, Homo sapien
aaagcatatagtcatcaacctttat

SEQ ID NO: 5630812 - DNA, 25 bp, Homo sapien
ttttcataatgggaagggacaatat

SEQ ID NO: 5630813 - DNA, 25 bp, Homo sapien
gatgatcaaggttgcttagggaaat

SEQ ID NO: 5630814 - DNA, 25 bp, Homo sapien
taacagcattcatcagattaatttt

SEQ ID NO: 5630815 - DNA, 25 bp, Homo sapien
gacaacattgatgatcaaggttgct

SEQ ID NO: 5630816 - DNA, 25 bp, Homo sapien
tcaaggttgcttagggaaattggga

SEQ ID NO: 5630817 - DNA, 25 bp, Homo sapien
taatgaatcaaaactgccaaaagct

SEQ ID NO: 5630818 - DNA, 25 bp, Homo sapien
tctgggacccagcccaaataatcct

SEQ ID NO: 5630819 - DNA, 25 bp, Homo sapien
gagccttctgggacccagcccaaat

SEQ ID NO: 5630820 - DNA, 25 bp, Homo sapien
taattggtaatgaatcaaaactgcc

SEQ ID NO: 5630821 - DNA, 25 bp, Homo sapien
cggtccagaagctccgcggaacggt

SEQ ID NO: 5630822 - DNA, 25 bp, Homo sapien
accgttccgcggagcttctggaccg

SEQ ID NO: 5630823 - DNA, 25 bp, Homo sapien
tctacacatgatattggtggatgaa

SEQ ID NO: 5630824 - DNA, 25 bp, Homo sapien
tagcttgtgaaatttaggcaggacc

SEQ ID NO: 5630825 - DNA, 25 bp, Homo sapien
cattagtataacgccgaaaataacc

SEQ ID NO: 5630826 - DNA, 25 bp, Homo sapien
gacttgggtttggatcccaactgtc

SEQ ID NO: 5630827 - DNA, 25 bp, Homo sapien
aaaaacattgctcaagacttgggtt

SEQ ID NO: 5630828 - DNA, 25 bp, Homo sapien
ttggtggatgaaatgtctttgattc

SEQ ID NO: 5630829 - DNA, 25 bp, Homo sapien
gattcagccttcattggcctagctt

SEQ ID NO: 5630830 - DNA, 25 bp, Homo sapien
gaccgtgacttgtggattctgagca

SEQ ID NO: 5630831 - DNA, 25 bp, Homo sapien
taggcaggaccaaatcaaacaatga

SEQ ID NO: 5630832 - DNA, 25 bp, Homo sapien
ctaagtgtgtttagaccgtgacttg

SEQ ID NO: 5630833 - DNA, 25 bp, Homo sapien
ggcaataatgctaacagatttatgc

SEQ ID NO: 5630834 - DNA, 25 bp, Homo sapien
aagcaccaagtgctcacaaatagtc

SEQ ID NO: 5630835 - DNA, 25 bp, Homo sapien
ataaataagcaaaaagcattcaatt

SEQ ID NO: 5630836 - DNA, 25 bp, Homo sapien
aattccgatgtgacacctattactc

SEQ ID NO: 5630837 - DNA, 25 bp, Homo sapien
ctctttgagtgtgtcttaagcacca

SEQ ID NO: 5630838 - DNA, 25 bp, Homo sapien
gctcacaaatagtcacgaaaaatac

SEQ ID NO: 5630839 - DNA, 25 bp, Homo sapien
tcgacttgaaattacaagcatcatc

SEQ ID NO: 5630840 - DNA, 25 bp, Homo sapien
tggcaaatatcaattccgatgtgac

SEQ ID NO: 5630841 - DNA, 25 bp, Homo sapien
ttgtcagtacctctttgagtgtgtc

SEQ ID NO: 5630842 - DNA, 25 bp, Homo sapien
gaatatgataaattgtcagtacctc

SEQ ID NO: 5630843 - DNA, 25 bp, Homo sapien
gggataaaccaggtcatctacttta

SEQ ID NO: 5630844 - DNA, 25 bp, Homo sapien
ctcaaaataccaaaacgttctgttg

SEQ ID NO: 5630845 - DNA, 25 bp, Homo sapien
gggtcttctggctcacgtcgaccgg

SEQ ID NO: 5630846 - DNA, 25 bp, Homo sapien
ccggtcgacgtgagccagaagaccc

SEQ ID NO: 5630847 - DNA, 25 bp, Homo sapien
cttgtgttgattggagaatttttct

SEQ ID NO: 5630848 - DNA, 25 bp, Homo sapien
atactgtatagtaaaagttggtcta

SEQ ID NO: 5630849 - DNA, 25 bp, Homo sapien
agttggtctaatagtagaactttaa

SEQ ID NO: 5630850 - DNA, 25 bp, Homo sapien
agagtgggtgtgatttatttgacat

SEQ ID NO: 5630851 - DNA, 25 bp, Homo sapien
tatctggagaacattaataacaagt

SEQ ID NO: 5630852 - DNA, 25 bp, Homo sapien
ttaagtgcacaattaataagaagca

SEQ ID NO: 5630853 - DNA, 25 bp, Homo sapien
taataagaagcacaacttgttcaca

SEQ ID NO: 5630854 - DNA, 25 bp, Homo sapien
gcatctgccaagcataatgcatctt

SEQ ID NO: 5630855 - DNA, 25 bp, Homo sapien
tctcccaacaatgcatatcagctat

SEQ ID NO: 5630856 - DNA, 25 bp, Homo sapien
attgatacttagagtgggtgtgatt

SEQ ID NO: 5630857 - DNA, 25 bp, Homo sapien
attgtgaggaatctgttaaaagttt

SEQ ID NO: 5630858 - DNA, 25 bp, Homo sapien
gaaaggcttagaaccagaagtctga

SEQ ID NO: 5630859 - DNA, 25 bp, Homo sapien
cttgctaggaatggggatctttaga

SEQ ID NO: 5630860 - DNA, 25 bp, Homo sapien
aatgactggcaacctaggaacaatt

SEQ ID NO: 5630861 - DNA, 25 bp, Homo sapien
atgaaccagatggttaggaaaggct

SEQ ID NO: 5630862 - DNA, 25 bp, Homo sapien
ggactaatctagagacctgagctat

SEQ ID NO: 5630863 - DNA, 25 bp, Homo sapien
gagatacaagagcagtagatatgcc

SEQ ID NO: 5630864 - DNA, 25 bp, Homo sapien
ggggacaccaaatgaggactaatct

SEQ ID NO: 5630865 - DNA, 25 bp, Homo sapien
gttaggtgcttgtccccaaactagc

SEQ ID NO: 5630866 - DNA, 25 bp, Homo sapien
tacaaggcattcaggatgaaccaga

SEQ ID NO: 5630867 - DNA, 25 bp, Homo sapien
cctcaagtcacgatatagcagctct

SEQ ID NO: 5630868 - DNA, 25 bp, Homo sapien
atggggatctttagaggcaccagaa

SEQ ID NO: 5630869 - DNA, 25 bp, Homo sapien
caggatagctaggtcctgagccgtg

SEQ ID NO: 5630870 - DNA, 25 bp, Homo sapien
ctattagaacccaggcgcatgtcca

SEQ ID NO: 5630871 - DNA, 25 bp, Homo sapien
agcttgattctgaaccgctgcgggg

SEQ ID NO: 5630872 - DNA, 25 bp, Homo sapien
ccatcctctattagaacccaggcgc

SEQ ID NO: 5630873 - DNA, 25 bp, Homo sapien
gacagccacttcataccccagggag

SEQ ID NO: 5630874 - DNA, 25 bp, Homo sapien
tcctgagccgtgttcccacaggagg

SEQ ID NO: 5630875 - DNA, 25 bp, Homo sapien
gcatgtccaggatagctaggtcctg

SEQ ID NO: 5630876 - DNA, 25 bp, Homo sapien
gtccaggatagctaggtcctgagcc

SEQ ID NO: 5630877 - DNA, 25 bp, Homo sapien
ggtgggtcaggattgaacccatcct

SEQ ID NO: 5630878 - DNA, 25 bp, Homo sapien
cattaatgaactccagcttgattct

SEQ ID NO: 5630879 - DNA, 25 bp, Homo sapien
ggggacagccacttcataccccagg

SEQ ID NO: 5630880 - DNA, 25 bp, Homo sapien
agcataacaaaggtggtgttgctcc

SEQ ID NO: 5630881 - DNA, 25 bp, Homo sapien
tccagcacacaagcacattggggca

SEQ ID NO: 5630882 - DNA, 25 bp, Homo sapien
gccggccctccctcctaagcataac

SEQ ID NO: 5630883 - DNA, 25 bp, Homo sapien
ccctcagttcagctggacagaggct

SEQ ID NO: 5630884 - DNA, 25 bp, Homo sapien
ctgggagctagtggcccttttgctt

SEQ ID NO: 5630885 - DNA, 25 bp, Homo sapien
aggctcaggtgaccccagccttcac

SEQ ID NO: 5630886 - DNA, 25 bp, Homo sapien
caaataagtgggcccttgtgctgtg

SEQ ID NO: 5630887 - DNA, 25 bp, Homo sapien
gagtagggtctagctggctatctct

SEQ ID NO: 5630888 - DNA, 25 bp, Homo sapien
ctccaggagcttatcttcgccccat

SEQ ID NO: 5630889 - DNA, 25 bp, Homo sapien
cccctggaggcatgccccttttctc

SEQ ID NO: 5630890 - DNA, 25 bp, Homo sapien
gggcaggtaatgactccatcgcacc

SEQ ID NO: 5630891 - DNA, 25 bp, Homo sapien
tgtgatttcaaaaccactgcgggga

SEQ ID NO: 5630892 - DNA, 25 bp, Homo sapien
caaaaatataaaactggcaggggaa

SEQ ID NO: 5630893 - DNA, 25 bp, Homo sapien
attttatatacacgaggtctgtgat

SEQ ID NO: 5630894 - DNA, 25 bp, Homo sapien
atatacacgaggtctgtgatttcaa

SEQ ID NO: 5630895 - DNA, 25 bp, Homo sapien
gtggctggcactcctgctaggtgca

SEQ ID NO: 5630896 - DNA, 25 bp, Homo sapien
cgcccagctcaagctcggatggcgg

SEQ ID NO: 5630897 - DNA, 25 bp, Homo sapien
ttatatacacgaggtctgtgatttc

SEQ ID NO: 5630898 - DNA, 25 bp, Homo sapien
gcgcccagctcaagctcggatggcg

SEQ ID NO: 5630899 - DNA, 25 bp, Homo sapien
gatttcaaaaccactgcggggagga

SEQ ID NO: 5630900 - DNA, 25 bp, Homo sapien
tggcactcctgctaggtgcacggag

SEQ ID NO: 5630901 - DNA, 25 bp, Homo sapien
gggaacggaaaacaagttctgcata

SEQ ID NO: 5630902 - DNA, 25 bp, Homo sapien
aaattaccatgagatggcgctgtgg

SEQ ID NO: 5630903 - DNA, 25 bp, Homo sapien
ctcattgatgcacaaatgggaggag

SEQ ID NO: 5630904 - DNA, 25 bp, Homo sapien
tcaacttaaagtagagcaaggtttg

SEQ ID NO: 5630905 - DNA, 25 bp, Homo sapien
tgtggccaagtaaatgcagtatgct

SEQ ID NO: 5630906 - DNA, 25 bp, Homo sapien
ttgttacatatggcacagaataatt

SEQ ID NO: 5630907 - DNA, 25 bp, Homo sapien
gtacagtgacttagttcaatttggc

SEQ ID NO: 5630908 - DNA, 25 bp, Homo sapien
tgtgtttcattaggtgtgagtcgtt

SEQ ID NO: 5630909 - DNA, 25 bp, Homo sapien
ttgaaaacttttagcatcgccttga

SEQ ID NO: 5630910 - DNA, 25 bp, Homo sapien
tgcagtatgctttaaacagttttcc

SEQ ID NO: 5630911 - DNA, 25 bp, Homo sapien
tagttcaatttggctacggtagcac

SEQ ID NO: 5630912 - DNA, 25 bp, Homo sapien
agtagagcaaggtttgttactccgt

SEQ ID NO: 5630913 - DNA, 25 bp, Homo sapien
ggcctccgctcaagaccccgttcat

SEQ ID NO: 5630914 - DNA, 25 bp, Homo sapien
gtttgtacgctcaggcctccgctca

SEQ ID NO: 5630915 - DNA, 25 bp, Homo sapien
ccgacttccactgaggcgccaacgg

SEQ ID NO: 5630916 - DNA, 25 bp, Homo sapien
gggaagctgtttgtacgctcaggcc

SEQ ID NO: 5630917 - DNA, 25 bp, Homo sapien
ggaataagaattcccgcctccgcgc

SEQ ID NO: 5630918 - DNA, 25 bp, Homo sapien
ccactttcaccccagcggggcagcg

SEQ ID NO: 5630919 - DNA, 25 bp, Homo sapien
ctcgccatgcccttttcaataactc

SEQ ID NO: 5630920 - DNA, 25 bp, Homo sapien
gccccactgctactgaattggtccg

SEQ ID NO: 5630921 - DNA, 25 bp, Homo sapien
gcctctctcccacggaggcggctgg

SEQ ID NO: 5630922 - DNA, 25 bp, Homo sapien
gttcataaaccttaagccccactgc

SEQ ID NO: 5630923 - DNA, 25 bp, Homo sapien
gaattggtccgatttcctgcctctc

SEQ ID NO: 5630924 - DNA, 25 bp, Homo sapien
catgccgacttaaaaacgtggatct

SEQ ID NO: 5630925 - DNA, 25 bp, Homo sapien
acatcagagcctctggcagcatgga

SEQ ID NO: 5630926 - DNA, 25 bp, Homo sapien
atggacagcggtgacactttaaaac

SEQ ID NO: 5630927 - DNA, 25 bp, Homo sapien
caatgaaagatgaggcacgattcat

SEQ ID NO: 5630928 - DNA, 25 bp, Homo sapien
acgtggatcttgagagtacagcttc

SEQ ID NO: 5630929 - DNA, 25 bp, Homo sapien
atacaaagaagcctgcagtagacaa

SEQ ID NO: 5630930 - DNA, 25 bp, Homo sapien
gaggggtaaagtagatgctctatta

SEQ ID NO: 5630931 - DNA, 25 bp, Homo sapien
ctttaaaacagtgtccaggagaggg

SEQ ID NO: 5630932 - DNA, 25 bp, Homo sapien
aaaaaatgccatacgctatcgcttc

SEQ ID NO: 5630933 - DNA, 25 bp, Homo sapien
cagtagacaatataaaccaaacagc

SEQ ID NO: 5630934 - DNA, 25 bp, Homo sapien
tccccactggacagcctgaggggta

SEQ ID NO: 5630935 - DNA, 25 bp, Homo sapien
tagtagagttgaaaatctgtgcgta

SEQ ID NO: 5630936 - DNA, 25 bp, Homo sapien
aatctgtgcgtatgtgtgatgttac

SEQ ID NO: 5630937 - DNA, 25 bp, Homo sapien
accttatgaaagccaaatgactgcc

SEQ ID NO: 5630938 - DNA, 25 bp, Homo sapien
atgaaagccaaatgactgcctgttc

SEQ ID NO: 5630939 - DNA, 25 bp, Homo sapien
ggaaggtaaaatgctaattgggctc

SEQ ID NO: 5630940 - DNA, 25 bp, Homo sapien
ttgtgaagagctaatgcagacattt

SEQ ID NO: 5630941 - DNA, 25 bp, Homo sapien
tcagaatttcaaaaagcacccaatt

SEQ ID NO: 5630942 - DNA, 25 bp, Homo sapien
tatgaagagttaattgtgaagagct

SEQ ID NO: 5630943 - DNA, 25 bp, Homo sapien
gctatataccaaatcatgctgaact

SEQ ID NO: 5630944 - DNA, 25 bp, Homo sapien
atggaagacaagacattaactcttg

SEQ ID NO: 5630945 - DNA, 25 bp, Homo sapien
aattgggctcattttgattgccaca

SEQ ID NO: 5630946 - DNA, 25 bp, Homo sapien
gttaaccctctggacataatttgcc

SEQ ID NO: 5630947 - DNA, 25 bp, Homo sapien
tgctatggttttcctgacaggaggc

SEQ ID NO: 5630948 - DNA, 25 bp, Homo sapien
tcactatatctgactgggagcaagg

SEQ ID NO: 5630949 - DNA, 25 bp, Homo sapien
cacactcagatacaccctgggtccc

SEQ ID NO: 5630950 - DNA, 25 bp, Homo sapien
aatttgccaaacagagaccaaagcc

SEQ ID NO: 5630951 - DNA, 25 bp, Homo sapien
aaagtaggatttgctatggttttcc

SEQ ID NO: 5630952 - DNA, 25 bp, Homo sapien
ccattagagggcactttagagaagg

SEQ ID NO: 5630953 - DNA, 25 bp, Homo sapien
atggactgaatctagcatgagggag

SEQ ID NO: 5630954 - DNA, 25 bp, Homo sapien
cctgggtcccttcattgagtgtgac

SEQ ID NO: 5630955 - DNA, 25 bp, Homo sapien
gctgagtgatggactgaatctagca

SEQ ID NO: 5630956 - DNA, 25 bp, Homo sapien
cctgtattcagggacaatccacttc

SEQ ID NO: 5630957 - DNA, 25 bp, Homo sapien
agtgattcaggaagatgaattatct

SEQ ID NO: 5630958 - DNA, 25 bp, Homo sapien
ggaagatgaattatctgcaacacgc

SEQ ID NO: 5630959 - DNA, 25 bp, Homo sapien
ctggtgtggtttttgcacaacattc

SEQ ID NO: 5630960 - DNA, 25 bp, Homo sapien
aatctatcgcctacatggctgattt

SEQ ID NO: 5630961 - DNA, 25 bp, Homo sapien
ctaaaggtatacaaatctatcgcct

SEQ ID NO: 5630962 - DNA, 25 bp, Homo sapien
gtaacggaagaagcataagtttctg

SEQ ID NO: 5630963 - DNA, 25 bp, Homo sapien
ggcatgtacgaatcctggtgtggtt

SEQ ID NO: 5630964 - DNA, 25 bp, Homo sapien
cagtcctctggcatgtacgaatcct

SEQ ID NO: 5630965 - DNA, 25 bp, Homo sapien
gcaacacgcagaagttcagtcctct

SEQ ID NO: 5630966 - DNA, 25 bp, Homo sapien
gcacaacattctgcctgggatgcgt

SEQ ID NO: 5630967 - DNA, 25 bp, Homo sapien
cttcattcatctgggaggcctgcga

SEQ ID NO: 5630968 - DNA, 25 bp, Homo sapien
tgagaaacttggttagtggctctct

SEQ ID NO: 5630969 - DNA, 25 bp, Homo sapien
tgcaaccgtgataattggaggatgc

SEQ ID NO: 5630970 - DNA, 25 bp, Homo sapien
cgttgagcctcagtccaagcagctg

SEQ ID NO: 5630971 - DNA, 25 bp, Homo sapien
aagtggctgaaacctgcgttgagcc

SEQ ID NO: 5630972 - DNA, 25 bp, Homo sapien
aagcggatgtggcagtttccaccgc

SEQ ID NO: 5630973 - DNA, 25 bp, Homo sapien
ttgagtcgcgaagtgatggacttta

SEQ ID NO: 5630974 - DNA, 25 bp, Homo sapien
atccagagataaccaaaatcaggtg

SEQ ID NO: 5630975 - DNA, 25 bp, Homo sapien
gacaagctcagtcaagaagtggctc

SEQ ID NO: 5630976 - DNA, 25 bp, Homo sapien
cgtagccctgtggttgaagtggctg

SEQ ID NO: 5630977 - DNA, 25 bp, Homo sapien
gccacaccagtttgcaaaagcggat

SEQ ID NO: 5630978 - DNA, 25 bp, Homo sapien
gaacaccgggtacttgccacaagta

SEQ ID NO: 5630979 - DNA, 25 bp, Homo sapien
tatgataaagcaagtagaggttatt

SEQ ID NO: 5630980 - DNA, 25 bp, Homo sapien
ggtcagtataagaaacagccacatg

SEQ ID NO: 5630981 - DNA, 25 bp, Homo sapien
caatgtccccaaaggggagaaacac

SEQ ID NO: 5630982 - DNA, 25 bp, Homo sapien
ctcctataaagctcccagtgaagac

SEQ ID NO: 5630983 - DNA, 25 bp, Homo sapien
aaaacagaatttagaagcagatgcc

SEQ ID NO: 5630984 - DNA, 25 bp, Homo sapien
catgagaagtctatatttggacagc

SEQ ID NO: 5630985 - DNA, 25 bp, Homo sapien
ctcctcgagagggataaattcatgc

SEQ ID NO: 5630986 - DNA, 25 bp, Homo sapien
gtaagtagaaattatatatgccagt

SEQ ID NO: 5630987 - DNA, 25 bp, Homo sapien
cagccacatgaaatctatgactgct

SEQ ID NO: 5630988 - DNA, 25 bp, Homo sapien
gaagcagatgccagtctaaaacctc

SEQ ID NO: 5630989 - DNA, 25 bp, Homo sapien
caaaggggagaaacactcataaata

SEQ ID NO: 5630990 - DNA, 25 bp, Homo sapien
caagtggtgagtgacacactctgac

SEQ ID NO: 5630991 - DNA, 25 bp, Homo sapien
atattactttggagaataccggttc

SEQ ID NO: 5630992 - DNA, 25 bp, Homo sapien
acttaagcaatggttttactgtaat

SEQ ID NO: 5630993 - DNA, 25 bp, Homo sapien
gggtagaacaacacgtgcccctgca

SEQ ID NO: 5630994 - DNA, 25 bp, Homo sapien
tgctgaatttcagggcatcaccacc

SEQ ID NO: 5630995 - DNA, 25 bp, Homo sapien
atcaggcccataactaatgccagtg

SEQ ID NO: 5630996 - DNA, 25 bp, Homo sapien
acactctgaccttgggtagaacaac

SEQ ID NO: 5630997 - DNA, 25 bp, Homo sapien
tttcttaaactatcaggcccataac

SEQ ID NO: 5630998 - DNA, 25 bp, Homo sapien
tattctgaagttggtggtctgtgag

SEQ ID NO: 5630999 - DNA, 25 bp, Homo sapien
cctctagagttttgcccacttaagc

SEQ ID NO: 5631000 - DNA, 25 bp, Homo sapien
tacagagctttacacctagatattc

SEQ ID NO: 5631001 - DNA, 25 bp, Homo sapien
cagggtctagagtgaattgtcaata

SEQ ID NO: 5631002 - DNA, 25 bp, Homo sapien
agggatatagatattcaatatagct

SEQ ID NO: 5631003 - DNA, 25 bp, Homo sapien
atagcttggcataaaatgccctgtg

SEQ ID NO: 5631004 - DNA, 25 bp, Homo sapien
atgccctgtgtaagttctgtgtgtc

SEQ ID NO: 5631005 - DNA, 25 bp, Homo sapien
gatcatctgtcgcaactcctcagtc

SEQ ID NO: 5631006 - DNA, 25 bp, Homo sapien
accttcaccccccatgaccactttc

SEQ ID NO: 5631007 - DNA, 25 bp, Homo sapien
ctttggattcttctagcagggtcta

SEQ ID NO: 5631008 - DNA, 25 bp, Homo sapien
ctcctcagtctcccgtcccagttct

SEQ ID NO: 5631009 - DNA, 25 bp, Homo sapien
ttctacttggtagccacttactatt

SEQ ID NO: 5631010 - DNA, 25 bp, Homo sapien
ttctagcagggtctagagtgaattg

SEQ ID NO: 5631011 - DNA, 25 bp, Homo sapien
tattcatgacattgacgggcaggta

SEQ ID NO: 5631012 - DNA, 25 bp, Homo sapien
gacaacggaagcagcatcttagcaa

SEQ ID NO: 5631013 - DNA, 25 bp, Homo sapien
gactagcacctagaggatcttgtct

SEQ ID NO: 5631014 - DNA, 25 bp, Homo sapien
aaatggttatatggaccagaaggtc

SEQ ID NO: 5631015 - DNA, 25 bp, Homo sapien
taagaagtgactagcacctagagga

SEQ ID NO: 5631016 - DNA, 25 bp, Homo sapien
aagactgactacacataaatggtta

SEQ ID NO: 5631017 - DNA, 25 bp, Homo sapien
ttataaagtgtccctaagccttcca

SEQ ID NO: 5631018 - DNA, 25 bp, Homo sapien
gagacagagcttcatcacgttggcc

SEQ ID NO: 5631019 - DNA, 25 bp, Homo sapien
accagaaggtctacagacaacggaa

SEQ ID NO: 5631020 - DNA, 25 bp, Homo sapien
cacggcgcccagcccttacattttt

SEQ ID NO: 5631021 - DNA, 25 bp, Homo sapien
taacttgtacaaaatgactgaatcc

SEQ ID NO: 5631022 - DNA, 25 bp, Homo sapien
tcctaatgaggtaaacttccccaga

SEQ ID NO: 5631023 - DNA, 25 bp, Homo sapien
gccaaaagagatatgtaggcatcta

SEQ ID NO: 5631024 - DNA, 25 bp, Homo sapien
gactacacaatctcaccagcgcccc

SEQ ID NO: 5631025 - DNA, 25 bp, Homo sapien
cgcttgagtccggaaatttgagacc

SEQ ID NO: 5631026 - DNA, 25 bp, Homo sapien
cagcactagatattaggtatacatt

SEQ ID NO: 5631027 - DNA, 25 bp, Homo sapien
agaccacagaatgctgaggccaaaa

SEQ ID NO: 5631028 - DNA, 25 bp, Homo sapien
ccacacactcagcgtaaacataacc

SEQ ID NO: 5631029 - DNA, 25 bp, Homo sapien
aatgcggacaaaagacccttgtcac

SEQ ID NO: 5631030 - DNA, 25 bp, Homo sapien
ataggctgacatacattgcagtatt

SEQ ID NO: 5631031 - DNA, 25 bp, Homo sapien
aataaaaagaccacacactgagcgt

SEQ ID NO: 5631032 - DNA, 25 bp, Homo sapien
agcgtctctcagtatcctcagaacc

SEQ ID NO: 5631033 - DNA, 25 bp, Homo sapien
aaagccttcagaaaattagcctttc

SEQ ID NO: 5631034 - DNA, 25 bp, Homo sapien
aagtaaagataattcaccatgcctg

SEQ ID NO: 5631035 - DNA, 25 bp, Homo sapien
attgaagaagctgaaagactctctg

SEQ ID NO: 5631036 - DNA, 25 bp, Homo sapien
ctctctgagagccttaaactaagat

SEQ ID NO: 5631037 - DNA, 25 bp, Homo sapien
tgaagtccggaaataacttgaggaa

SEQ ID NO: 5631038 - DNA, 25 bp, Homo sapien
agacagaagttaaaccagagaaaat

SEQ ID NO: 5631039 - DNA, 25 bp, Homo sapien
atggtggcacattggctaaagtttc

SEQ ID NO: 5631040 - DNA, 25 bp, Homo sapien
aataagcactaagaggattacgtcc

SEQ ID NO: 5631041 - DNA, 25 bp, Homo sapien
aagacctcaataagaagacagaagt

SEQ ID NO: 5631042 - DNA, 25 bp, Homo sapien
accatgcctgctgtggctttagttc

SEQ ID NO: 5631043 - DNA, 25 bp, Homo sapien
agatataaagaagctgaagtccgga

SEQ ID NO: 5631044 - DNA, 25 bp, Homo sapien
gaagctgaaagactctctgagagcc

SEQ ID NO: 5631045 - DNA, 25 bp, Homo sapien
ctggggcttgacatctagatgacgc

SEQ ID NO: 5631046 - DNA, 25 bp, Homo sapien
gtagcccccaggccagttctgaagc

SEQ ID NO: 5631047 - DNA, 25 bp, Homo sapien
tcttcccgcctgtgtgcgaagctct

SEQ ID NO: 5631048 - DNA, 25 bp, Homo sapien
gctctgctgagaggaccttatgacc

SEQ ID NO: 5631049 - DNA, 25 bp, Homo sapien
aatgcctttggtgctgcagtggctc

SEQ ID NO: 5631050 - DNA, 25 bp, Homo sapien
aggctggactggtcctgacctcttc

SEQ ID NO: 5631051 - DNA, 25 bp, Homo sapien
cgggggtcctttactgctggtctgt

SEQ ID NO: 5631052 - DNA, 25 bp, Homo sapien
gccctgcccagagcacgttcctctt

SEQ ID NO: 5631053 - DNA, 25 bp, Homo sapien
cttatgaccctggtgtcgggcatgt

SEQ ID NO: 5631054 - DNA, 25 bp, Homo sapien
agatgacgcgtccttgcctccttcc

SEQ ID NO: 5631055 - DNA, 25 bp, Homo sapien
ccagtaccctgggacactctgagac

SEQ ID NO: 5631056 - DNA, 25 bp, Homo sapien
tatagagttcccacctgatactgtc

SEQ ID NO: 5631057 - DNA, 25 bp, Homo sapien
aaatggggaaatagatcccgtgatt

SEQ ID NO: 5631058 - DNA, 25 bp, Homo sapien
tgaagtaggacagcaatgaatattt

SEQ ID NO: 5631059 - DNA, 25 bp, Homo sapien
gctaaactgctaactgaagcccagg

SEQ ID NO: 5631060 - DNA, 25 bp, Homo sapien
agacgccaggtgatttgtgtttgca

SEQ ID NO: 5631061 - DNA, 25 bp, Homo sapien
cgtacaccggacatctatagagttc

SEQ ID NO: 5631062 - DNA, 25 bp, Homo sapien
gtgattatgatagacgccaggtgat

SEQ ID NO: 5631063 - DNA, 25 bp, Homo sapien
gtttgcacatgacgtacaccggaca

SEQ ID NO: 5631064 - DNA, 25 bp, Homo sapien
cccttgagactggcttgaagtagga

SEQ ID NO: 5631065 - DNA, 25 bp, Homo sapien
aggaaagaaatacagtctgattcaa

SEQ ID NO: 5631066 - DNA, 25 bp, Homo sapien
ctctgatctaagaggttaggacctc

SEQ ID NO: 5631067 - DNA, 25 bp, Homo sapien
gcatttctggcccctggtgaaaggc

SEQ ID NO: 5631068 - DNA, 25 bp, Homo sapien
aagctgtgctggataaaggatttga

SEQ ID NO: 5631069 - DNA, 25 bp, Homo sapien
tccttcatgggaaaatgaacatgtt

SEQ ID NO: 5631070 - DNA, 25 bp, Homo sapien
tggaataagattcggaactgttgta

SEQ ID NO: 5631071 - DNA, 25 bp, Homo sapien
tgacaaattcgttagcagtgccttc

SEQ ID NO: 5631072 - DNA, 25 bp, Homo sapien
aactgttgtagtgagaccattgagg

SEQ ID NO: 5631073 - DNA, 25 bp, Homo sapien
gactgccgacttggtctaggtggag

SEQ ID NO: 5631074 - DNA, 25 bp, Homo sapien
cctatgagaatgagaagtgcaaagg

SEQ ID NO: 5631075 - DNA, 25 bp, Homo sapien
agctgcttggtaaagctgtgctgga

SEQ ID NO: 5631076 - DNA, 25 bp, Homo sapien
agcagtgccttcaggcagatgataa

SEQ ID NO: 5631077 - DNA, 25 bp, Homo sapien
atgcagctgaatgtagggtaatgta

SEQ ID NO: 5631078 - DNA, 25 bp, Homo sapien
attcgggtgtcgtcgcgcccgacgc

SEQ ID NO: 5631079 - DNA, 25 bp, Homo sapien
gcgtcgggcgcgacgacacccgaat

SEQ ID NO: 5631080 - DNA, 25 bp, Homo sapien
ggagacagccgcgagccaacctccg

SEQ ID NO: 5631081 - DNA, 25 bp, Homo sapien
cggaggttggctcgcggctgtctcc

SEQ ID NO: 5631082 - DNA, 25 bp, Homo sapien
aaagaagggaccaactgctaactca

SEQ ID NO: 5631083 - DNA, 25 bp, Homo sapien
aagcctacggccatgtgtcagatta

SEQ ID NO: 5631084 - DNA, 25 bp, Homo sapien
tagttggaacagttttggacggtga

SEQ ID NO: 5631085 - DNA, 25 bp, Homo sapien
tttgaatctgaggcataaacggaag

SEQ ID NO: 5631086 - DNA, 25 bp, Homo sapien
cctatcgattaggggaaacagtctg

SEQ ID NO: 5631087 - DNA, 25 bp, Homo sapien
tgtccagacctgatagggtactctt

SEQ ID NO: 5631088 - DNA, 25 bp, Homo sapien
gcataaacggaagtctgtccagacc

SEQ ID NO: 5631089 - DNA, 25 bp, Homo sapien
tgtcaccagaatagaaaactaacaa

SEQ ID NO: 5631090 - DNA, 25 bp, Homo sapien
cataaacactatggaaaggaatgtt

SEQ ID NO: 5631091 - DNA, 25 bp, Homo sapien
gtcatgaattgataaaaggcccaca

SEQ ID NO: 5631092 - DNA, 25 bp, Homo sapien
gaatcaggggactaggttctaattc

SEQ ID NO: 5631093 - DNA, 25 bp, Homo sapien
ctcagccagcagaacccttggtgga

SEQ ID NO: 5631094 - DNA, 25 bp, Homo sapien
gtccaggaggccctgccaacctgga

SEQ ID NO: 5631095 - DNA, 25 bp, Homo sapien
cagaacccttggtggaagttcttgg

SEQ ID NO: 5631096 - DNA, 25 bp, Homo sapien
cggctgaccccgttgacagctcgca

SEQ ID NO: 5631097 - DNA, 25 bp, Homo sapien
tcagccagcagaacccttggtggaa

SEQ ID NO: 5631098 - DNA, 25 bp, Homo sapien
cgcatttagagctgagtgcaatcta

SEQ ID NO: 5631099 - DNA, 25 bp, Homo sapien
cagcagaacccttggtggaagttct

SEQ ID NO: 5631100 - DNA, 25 bp, Homo sapien
ctcgcatttagagctgagtgcaatc

SEQ ID NO: 5631101 - DNA, 25 bp, Homo sapien
atgcgacttccggcccgacttgccg

SEQ ID NO: 5631102 - DNA, 25 bp, Homo sapien
tgaccccgttgacagctcgcattta

SEQ ID NO: 5631103 - DNA, 25 bp, Homo sapien
cttccggcccgacttgccgggtgag

SEQ ID NO: 5631104 - DNA, 25 bp, Homo sapien
aatcaaaagactggctagtagcaaa

SEQ ID NO: 5631105 - DNA, 25 bp, Homo sapien
cctacccttgggcatagctgacaaa

SEQ ID NO: 5631106 - DNA, 25 bp, Homo sapien
ttacaggctcagtgtttctgcccct

SEQ ID NO: 5631107 - DNA, 25 bp, Homo sapien
cttggaacgaaaagtcctctgtact

SEQ ID NO: 5631108 - DNA, 25 bp, Homo sapien
cctctgtactatgtgaccctaccct

SEQ ID NO: 5631109 - DNA, 25 bp, Homo sapien
aaacagtcctgcctgtagcccttgg

SEQ ID NO: 5631110 - DNA, 25 bp, Homo sapien
ttgtgaggatgcaatcaaaagactg

SEQ ID NO: 5631111 - DNA, 25 bp, Homo sapien
tctgcccacatagaggagttttacc

SEQ ID NO: 5631112 - DNA, 25 bp, Homo sapien
gctgacaaaccacagtggtccccta

SEQ ID NO: 5631113 - DNA, 25 bp, Homo sapien
gtggtcccctaacttgtgaggatgc

SEQ ID NO: 5631114 - DNA, 25 bp, Homo sapien
tgcaccagcagtattgtttgtcttc

SEQ ID NO: 5631115 - DNA, 25 bp, Homo sapien
gatcacctgactgggaggtgtgtga

SEQ ID NO: 5631116 - DNA, 25 bp, Homo sapien
ttagagtctgctgtcatggagagaa

SEQ ID NO: 5631117 - DNA, 25 bp, Homo sapien
ggaagaggtcaggttgcctctgtct

SEQ ID NO: 5631118 - DNA, 25 bp, Homo sapien
ccatttccaggcctctggggtggga

SEQ ID NO: 5631119 - DNA, 25 bp, Homo sapien
tctgtctggctgattgtcaggggag

SEQ ID NO: 5631120 - DNA, 25 bp, Homo sapien
cttagagtctgctgtcatggagaga

SEQ ID NO: 5631121 - DNA, 25 bp, Homo sapien
tcctcctcccccgccctgcacacag

SEQ ID NO: 5631122 - DNA, 25 bp, Homo sapien
aggatcacctgactgggaggtgtgt

SEQ ID NO: 5631123 - DNA, 25 bp, Homo sapien
agaggtcaggttgcctctgtctggc

SEQ ID NO: 5631124 - DNA, 25 bp, Homo sapien
actcaactccccacctcctcctccc

SEQ ID NO: 5631125 - DNA, 25 bp, Homo sapien
ctaactttccatttccaggcctctg

SEQ ID NO: 5631126 - DNA, 25 bp, Homo sapien
tgctcagtcgggaccgcttggctcc

SEQ ID NO: 5631127 - DNA, 25 bp, Homo sapien
ggagccaagcggtcccgactgagca

SEQ ID NO: 5631128 - DNA, 25 bp, Homo sapien
agcaggtgctgattgcaagtgtgaa

SEQ ID NO: 5631129 - DNA, 25 bp, Homo sapien
atcagcagcatgggaagcctattta

SEQ ID NO: 5631130 - DNA, 25 bp, Homo sapien
agcctatttaggcagaggtggactt

SEQ ID NO: 5631131 - DNA, 25 bp, Homo sapien
ctgctacatggcgaggttgtttgca

SEQ ID NO: 5631132 - DNA, 25 bp, Homo sapien
gcctggtgaccagatgccatggtaa

SEQ ID NO: 5631133 - DNA, 25 bp, Homo sapien
gccatggtaaactgaccctggatgc

SEQ ID NO: 5631134 - DNA, 25 bp, Homo sapien
gaggtggacttaaaggccaactgtc

SEQ ID NO: 5631135 - DNA, 25 bp, Homo sapien
gccaactgtctttaaggggaggaga

SEQ ID NO: 5631136 - DNA, 25 bp, Homo sapien
attaggttctgaggaaagtagcatt

SEQ ID NO: 5631137 - DNA, 25 bp, Homo sapien
gggtcagctaaagcacctgccctgt

SEQ ID NO: 5631138 - DNA, 25 bp, Homo sapien
gatggatgattcaggcacatgtgac

SEQ ID NO: 5631139 - DNA, 25 bp, Homo sapien
tttagtggacattgtggtagtaaat

SEQ ID NO: 5631140 - DNA, 25 bp, Homo sapien
gatatagaagtaaaacacaagacat

SEQ ID NO: 5631141 - DNA, 25 bp, Homo sapien
aagacatgggggtataaataaatta

SEQ ID NO: 5631142 - DNA, 25 bp, Homo sapien
taaaacacaagacatgggggtataa

SEQ ID NO: 5631143 - DNA, 25 bp, Homo sapien
acaacagagtttagttttagtggac

SEQ ID NO: 5631144 - DNA, 25 bp, Homo sapien
gaaataatcccactaaatgcccatc

SEQ ID NO: 5631145 - DNA, 25 bp, Homo sapien
agatctcactgggccttccagggtc

SEQ ID NO: 5631146 - DNA, 25 bp, Homo sapien
aatggaggtaaataaagaatgaata

SEQ ID NO: 5631147 - DNA, 25 bp, Homo sapien
aggcaagaacaaagtctgacaacag

SEQ ID NO: 5631148 - DNA, 25 bp, Homo sapien
agaatacaacagatctcactgggcc

SEQ ID NO: 5631149 - DNA, 25 bp, Homo sapien
agaatcttagtaatggaggtaaata

SEQ ID NO: 5631150 - DNA, 25 bp, Homo sapien
taccaggagacaacatgtccaggtc

SEQ ID NO: 5631151 - DNA, 25 bp, Homo sapien
aatactagtgaggacagcctaagac

SEQ ID NO: 5631152 - DNA, 25 bp, Homo sapien
cgccccagccgactcctctcatttc

SEQ ID NO: 5631153 - DNA, 25 bp, Homo sapien
cctctatgggcttggggtttttgga

SEQ ID NO: 5631154 - DNA, 25 bp, Homo sapien
gccaagactaactctgggctgcggt

SEQ ID NO: 5631155 - DNA, 25 bp, Homo sapien
caattagttaagtgtgctgaccatc

SEQ ID NO: 5631156 - DNA, 25 bp, Homo sapien
aaaaaaaaatcgtagctgcataaac

SEQ ID NO: 5631157 - DNA, 25 bp, Homo sapien
aaagagttgcactgcagccaagact

SEQ ID NO: 5631158 - DNA, 25 bp, Homo sapien
gctaatgtgatccagatgggaacgc

SEQ ID NO: 5631159 - DNA, 25 bp, Homo sapien
tgaaagagccactcatgccacaatc

SEQ ID NO: 5631160 - DNA, 25 bp, Homo sapien
gctgaacgacgtaactgccccatct

SEQ ID NO: 5631161 - DNA, 25 bp, Homo sapien
gctaggagaataactaagtcaactc

SEQ ID NO: 5631162 - DNA, 25 bp, Homo sapien
ggagaatactggaaggcttcatgtt

SEQ ID NO: 5631163 - DNA, 25 bp, Homo sapien
gctaatctgaagtgctgtaagagca

SEQ ID NO: 5631164 - DNA, 25 bp, Homo sapien
aactccagctgctaagaggtcaagc

SEQ ID NO: 5631165 - DNA, 25 bp, Homo sapien
agtcactcagagaatgctaggagaa

SEQ ID NO: 5631166 - DNA, 25 bp, Homo sapien
tgctgtaagagcaaccaagtcactc

SEQ ID NO: 5631167 - DNA, 25 bp, Homo sapien
agaggtcaagcttgtactaggccaa

SEQ ID NO: 5631168 - DNA, 25 bp, Homo sapien
agatgaaagcagctccagactgact

SEQ ID NO: 5631169 - DNA, 25 bp, Homo sapien
tgggaggctaggaatattcaaattc

SEQ ID NO: 5631170 - DNA, 25 bp, Homo sapien
gccacacatttgactcccccgaccc

SEQ ID NO: 5631171 - DNA, 25 bp, Homo sapien
tgactaccaggcagcaaatgaagag

SEQ ID NO: 5631172 - DNA, 25 bp, Homo sapien
acagtgttatatatcatggtaagta

SEQ ID NO: 5631173 - DNA, 25 bp, Homo sapien
taataatgtctgaaacacaccttac

SEQ ID NO: 5631174 - DNA, 25 bp, Homo sapien
atggtaagtaatgagatactagtgt

SEQ ID NO: 5631175 - DNA, 25 bp, Homo sapien
gaatatacttggatgcatacaggat

SEQ ID NO: 5631176 - DNA, 25 bp, Homo sapien
ttgagagcaggattaacaacttaag

SEQ ID NO: 5631177 - DNA, 25 bp, Homo sapien
cttacatcttgagagcaggattaac

SEQ ID NO: 5631178 - DNA, 25 bp, Homo sapien
aggtacacaaaggatgacagttttg

SEQ ID NO: 5631179 - DNA, 25 bp, Homo sapien
agtacaggcacagaagaatatactt

SEQ ID NO: 5631180 - DNA, 25 bp, Homo sapien
tacaggattagatgcagtgtgcaat

SEQ ID NO: 5631181 - DNA, 25 bp, Homo sapien
ttcatgatcctcaagagaaggaaga

SEQ ID NO: 5631182 - DNA, 25 bp, Homo sapien
tacttggatgcatacaggattagat

SEQ ID NO: 5631183 - DNA, 25 bp, Homo sapien
gtaatgagttatctgcagttatatc

SEQ ID NO: 5631184 - DNA, 25 bp, Homo sapien
ttcgtaaggttcacatgagtctctc

SEQ ID NO: 5631185 - DNA, 25 bp, Homo sapien
cttagacctgatggtatataaagac

SEQ ID NO: 5631186 - DNA, 25 bp, Homo sapien
aactgccccctctcaatacacatgg

SEQ ID NO: 5631187 - DNA, 25 bp, Homo sapien
attaaaatggccacataaattcttt

SEQ ID NO: 5631188 - DNA, 25 bp, Homo sapien
ctttgaaaacttagacctgatggta

SEQ ID NO: 5631189 - DNA, 25 bp, Homo sapien
tttggagcactctttgttcttcgat

SEQ ID NO: 5631190 - DNA, 25 bp, Homo sapien
ttttttcgtgcacaactgccccctc

SEQ ID NO: 5631191 - DNA, 25 bp, Homo sapien
ataaagacatgcctgtagatttgtt

SEQ ID NO: 5631192 - DNA, 25 bp, Homo sapien
catgagtctctcaaaccagtttcat

SEQ ID NO: 5631193 - DNA, 25 bp, Homo sapien
ttatgactgtaatgagttatctgca

SEQ ID NO: 5631194 - DNA, 25 bp, Homo sapien
tgcaatgctcttacggcagtgcccc

SEQ ID NO: 5631195 - DNA, 25 bp, Homo sapien
acaccacgtcccaaactggattttc

SEQ ID NO: 5631196 - DNA, 25 bp, Homo sapien
ctgccccttgcttaatgtctctgag

SEQ ID NO: 5631197 - DNA, 25 bp, Homo sapien
tatttggaattcggatggatagatc

SEQ ID NO: 5631198 - DNA, 25 bp, Homo sapien
aattcctcccaataagggctcaaaa

SEQ ID NO: 5631199 - DNA, 25 bp, Homo sapien
catggggggacttcttataagcatt

SEQ ID NO: 5631200 - DNA, 25 bp, Homo sapien
gcaattccagtttacaccacgtccc

SEQ ID NO: 5631201 - DNA, 25 bp, Homo sapien
ggcctgataatgtatgtgcaagagc

SEQ ID NO: 5631202 - DNA, 25 bp, Homo sapien
attcggatggatagatcatgttggc

SEQ ID NO: 5631203 - DNA, 25 bp, Homo sapien
agtgccccacccaaggcacaaggaa

SEQ ID NO: 5631204 - DNA, 25 bp, Homo sapien
aaccacgaaagcaattccagtttac

SEQ ID NO: 5631205 - DNA, 25 bp, Homo sapien
gaaatgtcctcaagaagcccaatca

SEQ ID NO: 5631206 - DNA, 25 bp, Homo sapien
atatctacagagaatatcaaaggta

SEQ ID NO: 5631207 - DNA, 25 bp, Homo sapien
taaaacgagaccacagaaatgtcct

SEQ ID NO: 5631208 - DNA, 25 bp, Homo sapien
taaggatttgtggcatcatcagttc

SEQ ID NO: 5631209 - DNA, 25 bp, Homo sapien
ttggatagctaactttggtgagaac

SEQ ID NO: 5631210 - DNA, 25 bp, Homo sapien
taaaaagtagctctgacaggtgaga

SEQ ID NO: 5631211 - DNA, 25 bp, Homo sapien
gaatttaagatagtaacaaagctaa

SEQ ID NO: 5631212 - DNA, 25 bp, Homo sapien
acaggtgagaggaagatttttccct

SEQ ID NO: 5631213 - DNA, 25 bp, Homo sapien
agttctaggtagcacatgaagctgt

SEQ ID NO: 5631214 - DNA, 25 bp, Homo sapien
aaaaacaataaaacgagaccacaga

SEQ ID NO: 5631215 - DNA, 25 bp, Homo sapien
cttaacagtaccatttaggacattt

SEQ ID NO: 5631216 - DNA, 25 bp, Homo sapien
gtagacagctacgacaaaaggacag

SEQ ID NO: 5631217 - DNA, 25 bp, Homo sapien
ctgtccttttgtcgtagctgtctac

SEQ ID NO: 5631218 - DNA, 25 bp, Homo sapien
gtagccaatgaaaggaatctaaagc

SEQ ID NO: 5631219 - DNA, 25 bp, Homo sapien
aatgaaaggaatctaaagctggaag

SEQ ID NO: 5631220 - DNA, 25 bp, Homo sapien
tggcaacaggaggcccatcattttt

SEQ ID NO: 5631221 - DNA, 25 bp, Homo sapien
ggcaggggacctttctgatgctctt

SEQ ID NO: 5631222 - DNA, 25 bp, Homo sapien
cttctacatgtagccaatgaaagga

SEQ ID NO: 5631223 - DNA, 25 bp, Homo sapien
tctatacccctggcccatgtctgtc

SEQ ID NO: 5631224 - DNA, 25 bp, Homo sapien
tactttttgtgtggcccaattcttc

SEQ ID NO: 5631225 - DNA, 25 bp, Homo sapien
ctacatgtagccaatgaaaggaatc

SEQ ID NO: 5631226 - DNA, 25 bp, Homo sapien
atgctcttgtgaggcaaagggattg

SEQ ID NO: 5631227 - DNA, 25 bp, Homo sapien
cccctggcccatgtctgtcttctac

SEQ ID NO: 5631228 - DNA, 25 bp, Homo sapien
gcaacaggaggcccatcattttttc

SEQ ID NO: 5631229 - DNA, 25 bp, Homo sapien
ttatgagccctctgatttcttgttc

SEQ ID NO: 5631230 - DNA, 25 bp, Homo sapien
ttgttcttctgggttaattctataa

SEQ ID NO: 5631231 - DNA, 25 bp, Homo sapien
ataccagcatgtcagcttcttactc

SEQ ID NO: 5631232 - DNA, 25 bp, Homo sapien
ctcataggatatggttaatgctttt

SEQ ID NO: 5631233 - DNA, 25 bp, Homo sapien
aaatccttgaacctctaaatgtgtc

SEQ ID NO: 5631234 - DNA, 25 bp, Homo sapien
taattgcttattaggtcagctgcac

SEQ ID NO: 5631235 - DNA, 25 bp, Homo sapien
attaggtcagctgcacaactgtcct

SEQ ID NO: 5631236 - DNA, 25 bp, Homo sapien
atgccttcacacttgtataagagat

SEQ ID NO: 5631237 - DNA, 25 bp, Homo sapien
attttgccagagtatatcttcaagg

SEQ ID NO: 5631238 - DNA, 25 bp, Homo sapien
tgcacaactgtcctactagtattcc

SEQ ID NO: 5631239 - DNA, 25 bp, Homo sapien
tagaagtgtcttataccagcatgtc

SEQ ID NO: 5631240 - DNA, 25 bp, Homo sapien
tcctttagcacgtatcctagggata

SEQ ID NO: 5631241 - DNA, 25 bp, Homo sapien
agtcacacagctatcaaagcatctc

SEQ ID NO: 5631242 - DNA, 25 bp, Homo sapien
cctagggataatgagacaatgcatg

SEQ ID NO: 5631243 - DNA, 25 bp, Homo sapien
atacactgagtgagtcattaaatat

SEQ ID NO: 5631244 - DNA, 25 bp, Homo sapien
tgcacttattggcccatgaaccctc

SEQ ID NO: 5631245 - DNA, 25 bp, Homo sapien
tgcaccactagacaaatacagctac

SEQ ID NO: 5631246 - DNA, 25 bp, Homo sapien
gataatgagacaatgcatggaaagc

SEQ ID NO: 5631247 - DNA, 25 bp, Homo sapien
caggaattacaggacagttttcctt

SEQ ID NO: 5631248 - DNA, 25 bp, Homo sapien
gtatggaaccacttgacagatgtaa

SEQ ID NO: 5631249 - DNA, 25 bp, Homo sapien
tgatacagcaaacaatacccaaact

SEQ ID NO: 5631250 - DNA, 25 bp, Homo sapien
cttttacaagaagtatggaaccact

SEQ ID NO: 5631251 - DNA, 25 bp, Homo sapien
tctaaaatccataagcaaaaagctc

SEQ ID NO: 5631252 - DNA, 25 bp, Homo sapien
aataggactttgcacacaaatgttt

SEQ ID NO: 5631253 - DNA, 25 bp, Homo sapien
gtttaatagttcactgaggctgtct

SEQ ID NO: 5631254 - DNA, 25 bp, Homo sapien
aagaaatgctacttcccaaagacta

SEQ ID NO: 5631255 - DNA, 25 bp, Homo sapien
gccttagataagcaaaataggactt

SEQ ID NO: 5631256 - DNA, 25 bp, Homo sapien
actgaatattctagaagcatgagct

SEQ ID NO: 5631257 - DNA, 25 bp, Homo sapien
aaaagtgataccttagaactggtcc

SEQ ID NO: 5631258 - DNA, 25 bp, Homo sapien
gaagcatgagctttgaggccttttg

SEQ ID NO: 5631259 - DNA, 25 bp, Homo sapien
ccaagtcaaaatgccttagataagc

SEQ ID NO: 5631260 - DNA, 25 bp, Homo sapien
atctagagcccattaacactggatt

SEQ ID NO: 5631261 - DNA, 25 bp, Homo sapien
gaaatgctacttcccaagaaatgct

SEQ ID NO: 5631262 - DNA, 25 bp, Homo sapien
aagaagcagacattggcctctgccc

SEQ ID NO: 5631263 - DNA, 25 bp, Homo sapien
cattaccaaggattatcgaggactt

SEQ ID NO: 5631264 - DNA, 25 bp, Homo sapien
gggagatcacagcttactggaggct

SEQ ID NO: 5631265 - DNA, 25 bp, Homo sapien
gtaaagcacatgaaggcactgtgtt

SEQ ID NO: 5631266 - DNA, 25 bp, Homo sapien
ctaatggatttatagggcatactct

SEQ ID NO: 5631267 - DNA, 25 bp, Homo sapien
ccccactaagtagctcctgagtagc

SEQ ID NO: 5631268 - DNA, 25 bp, Homo sapien
gatagagcacagataagcacacatt

SEQ ID NO: 5631269 - DNA, 25 bp, Homo sapien
ttttttgtccagatgagattttgcc

SEQ ID NO: 5631270 - DNA, 25 bp, Homo sapien
cgaggacttggtacatgtaaagcac

SEQ ID NO: 5631271 - DNA, 25 bp, Homo sapien
tggacctgctgccctcagtctgtac

SEQ ID NO: 5631272 - DNA, 25 bp, Homo sapien
ttagtttatgagatagagcacagat

SEQ ID NO: 5631273 - DNA, 25 bp, Homo sapien
aaggaacaagtaaattattgaagac

SEQ ID NO: 5631274 - DNA, 25 bp, Homo sapien
cacttccttcagagaatttgtccta

SEQ ID NO: 5631275 - DNA, 25 bp, Homo sapien
cttttcactatgtcacactggccct

SEQ ID NO: 5631276 - DNA, 25 bp, Homo sapien
tgtaacagtttaatgctctaaagtc

SEQ ID NO: 5631277 - DNA, 25 bp, Homo sapien
gtaatagagcaaaataagacttaac

SEQ ID NO: 5631278 - DNA, 25 bp, Homo sapien
aaatcttcagatgctacagttcctt

SEQ ID NO: 5631279 - DNA, 25 bp, Homo sapien
tcatcaccaaaaggaacaagtaaat

SEQ ID NO: 5631280 - DNA, 25 bp, Homo sapien
aattaatgggcaaacctctaacaat

SEQ ID NO: 5631281 - DNA, 25 bp, Homo sapien
aattattgaagactacacaacttgt

SEQ ID NO: 5631282 - DNA, 25 bp, Homo sapien
agacttaacatgtgggtcttcttac

SEQ ID NO: 5631283 - DNA, 25 bp, Homo sapien
acacaacttgtaatagagcaaaata

SEQ ID NO: 5631284 - DNA, 25 bp, Homo sapien
gcatgtagcgttggcagatagatta

SEQ ID NO: 5631285 - DNA, 25 bp, Homo sapien
aacagaaacagctacaccagaatgg

SEQ ID NO: 5631286 - DNA, 25 bp, Homo sapien
cttccttggtcagagaagcaacagt

SEQ ID NO: 5631287 - DNA, 25 bp, Homo sapien
tataatgtagggattggtgataatc

SEQ ID NO: 5631288 - DNA, 25 bp, Homo sapien
attggcatacattgagacaaaacac

SEQ ID NO: 5631289 - DNA, 25 bp, Homo sapien
cagaatggcagaatgctcctctcaa

SEQ ID NO: 5631290 - DNA, 25 bp, Homo sapien
gaaactggaaggaatttcatcagtc

SEQ ID NO: 5631291 - DNA, 25 bp, Homo sapien
aatacctaaaatagctgctggagag

SEQ ID NO: 5631292 - DNA, 25 bp, Homo sapien
agatagattaagatgtcaggaggac

SEQ ID NO: 5631293 - DNA, 25 bp, Homo sapien
tgagacaaaacacatgcaagcacac

SEQ ID NO: 5631294 - DNA, 25 bp, Homo sapien
caacagtgagaaggaaattcttcct

SEQ ID NO: 5631295 - DNA, 25 bp, Homo sapien
gcgcagcatgccctggacatcattc

SEQ ID NO: 5631296 - DNA, 25 bp, Homo sapien
acacatttacagagactggggggta

SEQ ID NO: 5631297 - DNA, 25 bp, Homo sapien
gtaaatggctgctgcttgtgtcatc

SEQ ID NO: 5631298 - DNA, 25 bp, Homo sapien
ttagcttgtaaatggctgctgcttg

SEQ ID NO: 5631299 - DNA, 25 bp, Homo sapien
ttctacttatctgtccccatgcccc

SEQ ID NO: 5631300 - DNA, 25 bp, Homo sapien
ccgccgtttgttctggtggaggctg

SEQ ID NO: 5631301 - DNA, 25 bp, Homo sapien
cacggccgctgccgccgtttgttct

SEQ ID NO: 5631302 - DNA, 25 bp, Homo sapien
ccgaacagcacaattcaagggtggc

SEQ ID NO: 5631303 - DNA, 25 bp, Homo sapien
taacgtcttacagatctgaaggctt

SEQ ID NO: 5631304 - DNA, 25 bp, Homo sapien
ttccgggtcgattctggactgtgat

SEQ ID NO: 5631305 - DNA, 25 bp, Homo sapien
ccctggacatcattccgaacagcac

SEQ ID NO: 5631306 - DNA, 25 bp, Homo sapien
cttcaccctcaggaaaatgggcttg

SEQ ID NO: 5631307 - DNA, 25 bp, Homo sapien
ggcctcgatgtggttggcttggtca

SEQ ID NO: 5631308 - DNA, 25 bp, Homo sapien
ccagcactgacccaccaaataaggc

SEQ ID NO: 5631309 - DNA, 25 bp, Homo sapien
gaggctttcgtcatgccacagggcc

SEQ ID NO: 5631310 - DNA, 25 bp, Homo sapien
taaatcagggtagcatttcaggagg

SEQ ID NO: 5631311 - DNA, 25 bp, Homo sapien
gtttatcatggtgcacaaacccacc

SEQ ID NO: 5631312 - DNA, 25 bp, Homo sapien
catcacctggtgacaggccatgatc

SEQ ID NO: 5631313 - DNA, 25 bp, Homo sapien
ggccatgatcagcctgtaaacctcc

SEQ ID NO: 5631314 - DNA, 25 bp, Homo sapien
aacccaccaggtattcatccaacgt

SEQ ID NO: 5631315 - DNA, 25 bp, Homo sapien
gcaggtacttgtttaagaggctttc

SEQ ID NO: 5631316 - DNA, 25 bp, Homo sapien
ctgactggcaatcaccccctctctg

SEQ ID NO: 5631317 - DNA, 25 bp, Homo sapien
gcgaagttaaagtgaaccacgtatc

SEQ ID NO: 5631318 - DNA, 25 bp, Homo sapien
ctggagttttgtgggaaagtaaaca

SEQ ID NO: 5631319 - DNA, 25 bp, Homo sapien
gtgaaacagatcatggaaagaaact

SEQ ID NO: 5631320 - DNA, 25 bp, Homo sapien
ttgtggtaggtagcttcacagagac

SEQ ID NO: 5631321 - DNA, 25 bp, Homo sapien
cccgagactcttaaatgttctggag

SEQ ID NO: 5631322 - DNA, 25 bp, Homo sapien
aaccacgtatcactcagcgcacggt

SEQ ID NO: 5631323 - DNA, 25 bp, Homo sapien
tcatctcaaggggtttgtaatttcc

SEQ ID NO: 5631324 - DNA, 25 bp, Homo sapien
acagacacttatgtccagcacaaat

SEQ ID NO: 5631325 - DNA, 25 bp, Homo sapien
taccatgtgcgaagttaaagtgaac

SEQ ID NO: 5631326 - DNA, 25 bp, Homo sapien
ggtaggtagcttcacagagactgtg

SEQ ID NO: 5631327 - DNA, 25 bp, Homo sapien
atcaaatttaaacacccgagactct

SEQ ID NO: 5631328 - DNA, 25 bp, Homo sapien
ctctcggagagctgacatcagagta

SEQ ID NO: 5631329 - DNA, 25 bp, Homo sapien
atggctggggtagctccttaaatga

SEQ ID NO: 5631330 - DNA, 25 bp, Homo sapien
gtctcaaccttggaagggcatcagc

SEQ ID NO: 5631331 - DNA, 25 bp, Homo sapien
gtacggcgcttggcctctctgaacc

SEQ ID NO: 5631332 - DNA, 25 bp, Homo sapien
cagaaatgtttaacgcagagaccgg

SEQ ID NO: 5631333 - DNA, 25 bp, Homo sapien
gccagagtgtctctcggagagctga

SEQ ID NO: 5631334 - DNA, 25 bp, Homo sapien
cccgctgagtgacctttgggtacgg

SEQ ID NO: 5631335 - DNA, 25 bp, Homo sapien
tactcgatgccagacactggggaca

SEQ ID NO: 5631336 - DNA, 25 bp, Homo sapien
aatgagttaagcctccagaaatgtt

SEQ ID NO: 5631337 - DNA, 25 bp, Homo sapien
tcttcaatcaatggctagctgctat

SEQ ID NO: 5631338 - DNA, 25 bp, Homo sapien
gagaccggcacacaagaggtcttca

SEQ ID NO: 5631339 - DNA, 25 bp, Homo sapien
tgagaagtaataatccttgaagaat

SEQ ID NO: 5631340 - DNA, 25 bp, Homo sapien
attcttcaaggattattacttctca

SEQ ID NO: 5631341 - DNA, 25 bp, Homo sapien
tgaaaagtccacaataaagcaccat

SEQ ID NO: 5631342 - DNA, 25 bp, Homo sapien
ctaaatacacaaggtcaagaattac

SEQ ID NO: 5631343 - DNA, 25 bp, Homo sapien
atggtgaatgtgaaagttctaccca

SEQ ID NO: 5631344 - DNA, 25 bp, Homo sapien
tagcattgaaagtctaaaaagtctt

SEQ ID NO: 5631345 - DNA, 25 bp, Homo sapien
tccaacaataggatcaattagcatt

SEQ ID NO: 5631346 - DNA, 25 bp, Homo sapien
taaaatatttagacatggtgaatgt

SEQ ID NO: 5631347 - DNA, 25 bp, Homo sapien
tggcaaggtgttctttgaaaagtcc

SEQ ID NO: 5631348 - DNA, 25 bp, Homo sapien
aggaattaccaaatttggcaaggtg

SEQ ID NO: 5631349 - DNA, 25 bp, Homo sapien
caggaaatgacaattgctaggaatt

SEQ ID NO: 5631350 - DNA, 25 bp, Homo sapien
agtacaaaatgtctgcgagtcaatc

SEQ ID NO: 5631351 - DNA, 25 bp, Homo sapien
aaagcaccatgttacaaagtttgat

SEQ ID NO: 5631352 - DNA, 25 bp, Homo sapien
aatcttcaatccacatgggggggca

SEQ ID NO: 5631353 - DNA, 25 bp, Homo sapien
aagtcccttaaccgctgtgtgcctc

SEQ ID NO: 5631354 - DNA, 25 bp, Homo sapien
gacacacactgagaacatgcctcgc

SEQ ID NO: 5631355 - DNA, 25 bp, Homo sapien
agcccctgtgaggccctttgcagtc

SEQ ID NO: 5631356 - DNA, 25 bp, Homo sapien
cagcccctccagcctccgccatttg

SEQ ID NO: 5631357 - DNA, 25 bp, Homo sapien
agaaatgacacaagacacacactga

SEQ ID NO: 5631358 - DNA, 25 bp, Homo sapien
gcctccgccatttgccccgtgggct

SEQ ID NO: 5631359 - DNA, 25 bp, Homo sapien
gcccagggccctcgtctagcccctg

SEQ ID NO: 5631360 - DNA, 25 bp, Homo sapien
ttgcagtccctcccttgccagcccc

SEQ ID NO: 5631361 - DNA, 25 bp, Homo sapien
gggggggcaccataatcactggtgc

SEQ ID NO: 5631362 - DNA, 25 bp, Homo sapien
cccagcccagctctactgctgtgtg

SEQ ID NO: 5631363 - DNA, 25 bp, Homo sapien
agggtaattacccatattagtctat

SEQ ID NO: 5631364 - DNA, 25 bp, Homo sapien
cacactttagataaaccaaagggta

SEQ ID NO: 5631365 - DNA, 25 bp, Homo sapien
tgttaactatagacaaagctgcttt

SEQ ID NO: 5631366 - DNA, 25 bp, Homo sapien
gctttgggcatattatagaacacat

SEQ ID NO: 5631367 - DNA, 25 bp, Homo sapien
caaatgtcaacacagaaaatgaact

SEQ ID NO: 5631368 - DNA, 25 bp, Homo sapien
tttggccaatataagcacataaaat

SEQ ID NO: 5631369 - DNA, 25 bp, Homo sapien
tggtttggaactctctctacattgc

SEQ ID NO: 5631370 - DNA, 25 bp, Homo sapien
ataaaattggtggtttggaactctc

SEQ ID NO: 5631371 - DNA, 25 bp, Homo sapien
tccctaaaaagatgatatattacta

SEQ ID NO: 5631372 - DNA, 25 bp, Homo sapien
gaatatattcaacaagggaaattat

SEQ ID NO: 5631373 - DNA, 25 bp, Homo sapien
tttgaaatcactattaaaagacagt

SEQ ID NO: 5631374 - DNA, 25 bp, Homo sapien
ctttaatgtgtatctgagggagcga

SEQ ID NO: 5631375 - DNA, 25 bp, Homo sapien
taaggctctagcttagaggcgcact

SEQ ID NO: 5631376 - DNA, 25 bp, Homo sapien
aatgaccaagaaactgctaaaatcc

SEQ ID NO: 5631377 - DNA, 25 bp, Homo sapien
gaggcgcacttgaatgttgaagcac

SEQ ID NO: 5631378 - DNA, 25 bp, Homo sapien
cgagggaaatttccagtgtggcgtt

SEQ ID NO: 5631379 - DNA, 25 bp, Homo sapien
gttgaagcaccgtagtctctgcctc

SEQ ID NO: 5631380 - DNA, 25 bp, Homo sapien
gagcaggaactgattcacttgagtt

SEQ ID NO: 5631381 - DNA, 25 bp, Homo sapien
aagtatctgacaggagttcagcctg

SEQ ID NO: 5631382 - DNA, 25 bp, Homo sapien
gtggcgttaacacaagagaagacac

SEQ ID NO: 5631383 - DNA, 25 bp, Homo sapien
cagcctgagctgtgtggtttttaag

SEQ ID NO: 5631384 - DNA, 25 bp, Homo sapien
agaagacactagggactgtttgtgc

SEQ ID NO: 5631385 - DNA, 25 bp, Homo sapien
tcatgggccctcacaggctacgaga

SEQ ID NO: 5631386 - DNA, 25 bp, Homo sapien
gtggaaggatctagtaatgatggac

SEQ ID NO: 5631387 - DNA, 25 bp, Homo sapien
tatagcccctggaagattcctggaa

SEQ ID NO: 5631388 - DNA, 25 bp, Homo sapien
atcaaatacagactcatgggccctc

SEQ ID NO: 5631389 - DNA, 25 bp, Homo sapien
taatggaaagaataggacaatatag

SEQ ID NO: 5631390 - DNA, 25 bp, Homo sapien
cctggaatgcaagtatcctgtgctc

SEQ ID NO: 5631391 - DNA, 25 bp, Homo sapien
caggggaatcactaccaagccccca

SEQ ID NO: 5631392 - DNA, 25 bp, Homo sapien
caggctacgagaatagctgacatcc

SEQ ID NO: 5631393 - DNA, 25 bp, Homo sapien
agtggtctacaacagcccaaatggc

SEQ ID NO: 5631394 - DNA, 25 bp, Homo sapien
aatgcaaagaaggctattccacctc

SEQ ID NO: 5631395 - DNA, 25 bp, Homo sapien
aatgatggacgcctaaatgcaaaga

SEQ ID NO: 5631396 - DNA, 25 bp, Homo sapien
ttagtacaatgctgatggctacata

SEQ ID NO: 5631397 - DNA, 25 bp, Homo sapien
taggtcccaagaagggtctcagtga

SEQ ID NO: 5631398 - DNA, 25 bp, Homo sapien
gagcccaaggccagctttgaggccg

SEQ ID NO: 5631399 - DNA, 25 bp, Homo sapien
ttactcatgggaacatggcaggaag

SEQ ID NO: 5631400 - DNA, 25 bp, Homo sapien
aaaactaataagagtgagcccaagg

SEQ ID NO: 5631401 - DNA, 25 bp, Homo sapien
ggtctcagtgaggttccatccaagc

SEQ ID NO: 5631402 - DNA, 25 bp, Homo sapien
ggaaacagctcaatgccaacaacta

SEQ ID NO: 5631403 - DNA, 25 bp, Homo sapien
tggcaggaagtaaaactaataagag

SEQ ID NO: 5631404 - DNA, 25 bp, Homo sapien
ggaatgagccacagtaaacttactc

SEQ ID NO: 5631405 - DNA, 25 bp, Homo sapien
ccaagccatccaaaccagggagcat

SEQ ID NO: 5631406 - DNA, 25 bp, Homo sapien
tcagcacgataaaggaaacagctca

SEQ ID NO: 5631407 - DNA, 25 bp, Homo sapien
tattagatatgaccattcccaaaac

SEQ ID NO: 5631408 - DNA, 25 bp, Homo sapien
gtttactattgtgttccctggaaga

SEQ ID NO: 5631409 - DNA, 25 bp, Homo sapien
gcttagcaatccttctactggttcc

SEQ ID NO: 5631410 - DNA, 25 bp, Homo sapien
cttcccatctaagaccatatccacc

SEQ ID NO: 5631411 - DNA, 25 bp, Homo sapien
ctactggttcctaagtggtttacta

SEQ ID NO: 5631412 - DNA, 25 bp, Homo sapien
ctgtcaaagttgactgtgcctccta

SEQ ID NO: 5631413 - DNA, 25 bp, Homo sapien
tgagcttggctttgtcccttggttt

SEQ ID NO: 5631414 - DNA, 25 bp, Homo sapien
acctcttttcagccatgcatccccc

SEQ ID NO: 5631415 - DNA, 25 bp, Homo sapien
atgttttatgggacttgagcttggc

SEQ ID NO: 5631416 - DNA, 25 bp, Homo sapien
ggccatatgctacacaggcttccta

SEQ ID NO: 5631417 - DNA, 25 bp, Homo sapien
caagcctcttagaactgtcaaagtt

SEQ ID NO: 5631418 - DNA, 25 bp, Homo sapien
taataaatcatgcagaagtaagtga

SEQ ID NO: 5631419 - DNA, 25 bp, Homo sapien
tacaccattagttggaagaaggtat

SEQ ID NO: 5631420 - DNA, 25 bp, Homo sapien
aggataaggaacatcatcttttggc

SEQ ID NO: 5631421 - DNA, 25 bp, Homo sapien
aaatatcgtctgtgggcatactgtg

SEQ ID NO: 5631422 - DNA, 25 bp, Homo sapien
accactttaagccccagatattctc

SEQ ID NO: 5631423 - DNA, 25 bp, Homo sapien
gcatactgtggggaatttgctagcc

SEQ ID NO: 5631424 - DNA, 25 bp, Homo sapien
tgagcacattaaactggacctaaac

SEQ ID NO: 5631425 - DNA, 25 bp, Homo sapien
tttgctagcctctgtgactcccttc

SEQ ID NO: 5631426 - DNA, 25 bp, Homo sapien
tggaagaaggtattagtgttagtgt

SEQ ID NO: 5631427 - DNA, 25 bp, Homo sapien
gtgttagtgtgttaggataaggaac

SEQ ID NO: 5631428 - DNA, 25 bp, Homo sapien
aactaatgtactctaaatgggaaat

SEQ ID NO: 5631429 - DNA, 25 bp, Homo sapien
tgcagtaagaatgttcgatttgtaa

SEQ ID NO: 5631430 - DNA, 25 bp, Homo sapien
tatacaggaaacagttcactttaca

SEQ ID NO: 5631431 - DNA, 25 bp, Homo sapien
ctggaaaaagcttatttaacagcca

SEQ ID NO: 5631432 - DNA, 25 bp, Homo sapien
atgtagtttggtttggctggaaaaa

SEQ ID NO: 5631433 - DNA, 25 bp, Homo sapien
ttaagatgagaactttatacaggaa

SEQ ID NO: 5631434 - DNA, 25 bp, Homo sapien
gaatgtagcttagagactttctgcc

SEQ ID NO: 5631435 - DNA, 25 bp, Homo sapien
ccaaagacttcaatctacctagagt

SEQ ID NO: 5631436 - DNA, 25 bp, Homo sapien
gttttcttcagatagccagttttcc

SEQ ID NO: 5631437 - DNA, 25 bp, Homo sapien
gtaaaacttctgtcccatagtctac

SEQ ID NO: 5631438 - DNA, 25 bp, Homo sapien
ctagtctgtgctctttgaacacttc

SEQ ID NO: 5631439 - DNA, 25 bp, Homo sapien
tagaagagttatctttgaatgtagc

SEQ ID NO: 5631440 - DNA, 25 bp, Homo sapien
ggcggtgactttcggctctccatgc

SEQ ID NO: 5631441 - DNA, 25 bp, Homo sapien
caccctgacccgtgcctcgtctctc

SEQ ID NO: 5631442 - DNA, 25 bp, Homo sapien
gtgtagaaaagctcttccgcagtgc

SEQ ID NO: 5631443 - DNA, 25 bp, Homo sapien
tcccggctccaggccgttcgactga

SEQ ID NO: 5631444 - DNA, 25 bp, Homo sapien
gctcttccgcagtgcttgggcaccc

SEQ ID NO: 5631445 - DNA, 25 bp, Homo sapien
tccaagagccttcgtgtagaaaagc

SEQ ID NO: 5631446 - DNA, 25 bp, Homo sapien
gctctccatgcggttcccggctcca

SEQ ID NO: 5631447 - DNA, 25 bp, Homo sapien
ggcgctccggctccaagagccttcg

SEQ ID NO: 5631448 - DNA, 25 bp, Homo sapien
cttgaattcccccggtcgtggagga

SEQ ID NO: 5631449 - DNA, 25 bp, Homo sapien
tcggtgtaattgccttgaattcccc

SEQ ID NO: 5631450 - DNA, 25 bp, Homo sapien
tctcagggacacttactcggacctc

SEQ ID NO: 5631451 - DNA, 25 bp, Homo sapien
gatccactagttctagagcggccgc

SEQ ID NO: 5631452 - DNA, 25 bp, Homo sapien
aagaagacgctctgtggacagactt

SEQ ID NO: 5631453 - DNA, 25 bp, Homo sapien
ggcagctgcccctcttagcacctga

SEQ ID NO: 5631454 - DNA, 25 bp, Homo sapien
ctcagactacaaccaggacctccct

SEQ ID NO: 5631455 - DNA, 25 bp, Homo sapien
acctccctggcagcccaggagtgtg

SEQ ID NO: 5631456 - DNA, 25 bp, Homo sapien
gccccgggcttgtcactgatgccag

SEQ ID NO: 5631457 - DNA, 25 bp, Homo sapien
gtgaaagaaggcagctgctgccatg

SEQ ID NO: 5631458 - DNA, 25 bp, Homo sapien
gtctggtcagcctcgtgccgaattc

SEQ ID NO: 5631459 - DNA, 25 bp, Homo sapien
ggggacctccatggtgctcagacta

SEQ ID NO: 5631460 - DNA, 25 bp, Homo sapien
gcacagaggcaggccctgcccatgg

SEQ ID NO: 5631461 - DNA, 25 bp, Homo sapien
gccccttgcagagctgacctagagc

SEQ ID NO: 5631462 - DNA, 25 bp, Homo sapien
tcttggcttgagctatgtggcaaca

SEQ ID NO: 5631463 - DNA, 25 bp, Homo sapien
caaaccttggcctgatggatcgctt

SEQ ID NO: 5631464 - DNA, 25 bp, Homo sapien
gaacacacagcaaatgaggaaatca

SEQ ID NO: 5631465 - DNA, 25 bp, Homo sapien
gtccatggatactatgggagaggat

SEQ ID NO: 5631466 - DNA, 25 bp, Homo sapien
caaaagagaggtccattacagaaga

SEQ ID NO: 5631467 - DNA, 25 bp, Homo sapien
gaagtatacttcagagcagaccatg

SEQ ID NO: 5631468 - DNA, 25 bp, Homo sapien
gcagaccatgtgattgagcccatca

SEQ ID NO: 5631469 - DNA, 25 bp, Homo sapien
tcttttggaatgacagatctgccat

SEQ ID NO: 5631470 - DNA, 25 bp, Homo sapien
gggagaggatcaaatttaagagagt

SEQ ID NO: 5631471 - DNA, 25 bp, Homo sapien
tccagcctcactagggtagctagct

SEQ ID NO: 5631472 - DNA, 25 bp, Homo sapien
ggcaacactgcccaacactcaccca

SEQ ID NO: 5631473 - DNA, 25 bp, Homo sapien
accgcaccggccttacaattctttc

SEQ ID NO: 5631474 - DNA, 25 bp, Homo sapien
ctttagaagcttgtaaaaaagtgaa

SEQ ID NO: 5631475 - DNA, 25 bp, Homo sapien
gcacttccagttctaaacagatacc

SEQ ID NO: 5631476 - DNA, 25 bp, Homo sapien
acctccttctggctgacgactcctc

SEQ ID NO: 5631477 - DNA, 25 bp, Homo sapien
ctatgaagagactttagaagcttgt

SEQ ID NO: 5631478 - DNA, 25 bp, Homo sapien
ttccagcaatcatctatgaagagac

SEQ ID NO: 5631479 - DNA, 25 bp, Homo sapien
ttgaaaacagattctgcacttccag

SEQ ID NO: 5631480 - DNA, 25 bp, Homo sapien
tagaaagttcacaataaaagaatct

SEQ ID NO: 5631481 - DNA, 25 bp, Homo sapien
aacagataccatatggctgcttctt

SEQ ID NO: 5631482 - DNA, 25 bp, Homo sapien
atttaatgtactagctgtaaaagtt

SEQ ID NO: 5631483 - DNA, 25 bp, Homo sapien
aaaaagtgaattctacctccttctg

SEQ ID NO: 5631484 - DNA, 25 bp, Homo sapien
ctgcctcgggccacgcctcctccga

SEQ ID NO: 5631485 - DNA, 25 bp, Homo sapien
tcggaggaggcgtggcccgaggcag

SEQ ID NO: 5631486 - DNA, 25 bp, Homo sapien
gtcttgtggaaacaaacgcgctttc

SEQ ID NO: 5631487 - DNA, 25 bp, Homo sapien
tgttacatgacagtggcaagctgag

SEQ ID NO: 5631488 - DNA, 25 bp, Homo sapien
atcccgtagcctagttggctggcat

SEQ ID NO: 5631489 - DNA, 25 bp, Homo sapien
gtgtttcacagaccgcccctccatc

SEQ ID NO: 5631490 - DNA, 25 bp, Homo sapien
cacctcggcgtctgttttgtatgct

SEQ ID NO: 5631491 - DNA, 25 bp, Homo sapien
acacagcagtcctgcgacatgaggc

SEQ ID NO: 5631492 - DNA, 25 bp, Homo sapien
tggaatcactgatcacctcggcgtc

SEQ ID NO: 5631493 - DNA, 25 bp, Homo sapien
ggcgctgctgagcgtcagcctttgg

SEQ ID NO: 5631494 - DNA, 25 bp, Homo sapien
tggcaagctgagctttcacgggatg

SEQ ID NO: 5631495 - DNA, 25 bp, Homo sapien
tggcgactacacggagcttgtcttg

SEQ ID NO: 5631496 - DNA, 25 bp, Homo sapien
agaatgtaagctcctgatccaccag

SEQ ID NO: 5631497 - DNA, 25 bp, Homo sapien
tctggggctcaagctaatctcccgc

SEQ ID NO: 5631498 - DNA, 25 bp, Homo sapien
tcactgcagcctcaaactctggggc

SEQ ID NO: 5631499 - DNA, 25 bp, Homo sapien
tgcagtggtgtgatgatagctcact

SEQ ID NO: 5631500 - DNA, 25 bp, Homo sapien
tcatcttcacctaacaccaagcagc

SEQ ID NO: 5631501 - DNA, 25 bp, Homo sapien
tggtgtgatgatagctcactgcagc

SEQ ID NO: 5631502 - DNA, 25 bp, Homo sapien
gcacagcactacactcagctatgat

SEQ ID NO: 5631503 - DNA, 25 bp, Homo sapien
tcacctaacaccaagcagcaataat

SEQ ID NO: 5631504 - DNA, 25 bp, Homo sapien
cagcctctccagtagctaggactac

SEQ ID NO: 5631505 - DNA, 25 bp, Homo sapien
aagcagcaataataactacaaactc

SEQ ID NO: 5631506 - DNA, 25 bp, Homo sapien
ctcaaactctggggctcaagctaat

SEQ ID NO: 5631507 - DNA, 25 bp, Homo sapien
tgggcaccagatctgacaacttttc

SEQ ID NO: 5631508 - DNA, 25 bp, Homo sapien
cattcatgcctgaggttggaatttt

SEQ ID NO: 5631509 - DNA, 25 bp, Homo sapien
ttcagataacaataaacaaggcaga

SEQ ID NO: 5631510 - DNA, 25 bp, Homo sapien
acaatacatacatgccaggctcttt

SEQ ID NO: 5631511 - DNA, 25 bp, Homo sapien
aacagtaagttgaaagcatacaaac

SEQ ID NO: 5631512 - DNA, 25 bp, Homo sapien
aatagtgtcttaacccattcatgcc

SEQ ID NO: 5631513 - DNA, 25 bp, Homo sapien
tacatgccaggctctttcagataac

SEQ ID NO: 5631514 - DNA, 25 bp, Homo sapien
aacaaatgggtgctacagaacacag

SEQ ID NO: 5631515 - DNA, 25 bp, Homo sapien
gaacacagacaaaacgaacactctc

SEQ ID NO: 5631516 - DNA, 25 bp, Homo sapien
gcagagaagtaaaagatggatttaa

SEQ ID NO: 5631517 - DNA, 25 bp, Homo sapien
aataagtagttggcagaataaggca

SEQ ID NO: 5631518 - DNA, 25 bp, Homo sapien
aggatggggtctctgataacaataa

SEQ ID NO: 5631519 - DNA, 25 bp, Homo sapien
tcggcgcctctccgcgctcctgctt

SEQ ID NO: 5631520 - DNA, 25 bp, Homo sapien
gccttccaccgtccccgacagtcgc

SEQ ID NO: 5631521 - DNA, 25 bp, Homo sapien
ttgatccgaaattcgggggagcgaa

SEQ ID NO: 5631522 - DNA, 25 bp, Homo sapien
cctgctgccgtcacgttgcagattg

SEQ ID NO: 5631523 - DNA, 25 bp, Homo sapien
gagcgaaggaaattggctttcgagg

SEQ ID NO: 5631524 - DNA, 25 bp, Homo sapien
gcgaaggaaattggctttcgaggcg

SEQ ID NO: 5631525 - DNA, 25 bp, Homo sapien
gccgtcacgttgcagattgatccga

SEQ ID NO: 5631526 - DNA, 25 bp, Homo sapien
ttgcagattgatccgaaattcgggg

SEQ ID NO: 5631527 - DNA, 25 bp, Homo sapien
gcgtgccttccaccgtccccgacag

SEQ ID NO: 5631528 - DNA, 25 bp, Homo sapien
cgtccccgacagtcgcccaactttc

SEQ ID NO: 5631529 - DNA, 25 bp, Homo sapien
cccttttggtcacgtagggaagagc

SEQ ID NO: 5631530 - DNA, 25 bp, Homo sapien
cagaaaggaatgtgcaatgcatgga

SEQ ID NO: 5631531 - DNA, 25 bp, Homo sapien
gtgcaatgcatggatgtacacgtgc

SEQ ID NO: 5631532 - DNA, 25 bp, Homo sapien
agcattagggtcacagcaaaattga

SEQ ID NO: 5631533 - DNA, 25 bp, Homo sapien
tcagaagccagaggcagttcatgag

SEQ ID NO: 5631534 - DNA, 25 bp, Homo sapien
ctgcggcaggtttgacaactccttc

SEQ ID NO: 5631535 - DNA, 25 bp, Homo sapien
ttttagagcagcattagggtcacag

SEQ ID NO: 5631536 - DNA, 25 bp, Homo sapien
gttcatgagccatgtgacaggacag

SEQ ID NO: 5631537 - DNA, 25 bp, Homo sapien
gtatcctcacaatgacagggagggc

SEQ ID NO: 5631538 - DNA, 25 bp, Homo sapien
cagagacaggaagaccaacttttca

SEQ ID NO: 5631539 - DNA, 25 bp, Homo sapien
tacccgctacccacctccagactcc

SEQ ID NO: 5631540 - DNA, 25 bp, Homo sapien
tgcctggcatgtactgctcacatta

SEQ ID NO: 5631541 - DNA, 25 bp, Homo sapien
tcttgctacgtggcatgaggcattg

SEQ ID NO: 5631542 - DNA, 25 bp, Homo sapien
ggcaagccaacaagcatgccaaccc

SEQ ID NO: 5631543 - DNA, 25 bp, Homo sapien
gtgacgtgtggagcaacattcctcc

SEQ ID NO: 5631544 - DNA, 25 bp, Homo sapien
aggaaactgaccatggtgcagtacc

SEQ ID NO: 5631545 - DNA, 25 bp, Homo sapien
ctacacacctggcaagccaacaagc

SEQ ID NO: 5631546 - DNA, 25 bp, Homo sapien
catgccaaccctggaacttggagaa

SEQ ID NO: 5631547 - DNA, 25 bp, Homo sapien
ttgggtggtcctgtgactcaagcta

SEQ ID NO: 5631548 - DNA, 25 bp, Homo sapien
gtaggaagcccaagtatgagttcta

SEQ ID NO: 5631549 - DNA, 25 bp, Homo sapien
ttctgctgttgtcttgctacgtggc

SEQ ID NO: 5631550 - DNA, 25 bp, Homo sapien
atctcaaccaggaaactgaccatgg

SEQ ID NO: 5631551 - DNA, 25 bp, Homo sapien
ttacataaccagagcccattatctc

SEQ ID NO: 5631552 - DNA, 25 bp, Homo sapien
gtatgagggagacaattccatcccc

SEQ ID NO: 5631553 - DNA, 25 bp, Homo sapien
tctgagagtcacttccctggctgtc

SEQ ID NO: 5631554 - DNA, 25 bp, Homo sapien
gagtccagaggagtcacaatggaca

SEQ ID NO: 5631555 - DNA, 25 bp, Homo sapien
gtagattcagccagatggggtaaaa

SEQ ID NO: 5631556 - DNA, 25 bp, Homo sapien
tacttgagatgggcctgtagattca

SEQ ID NO: 5631557 - DNA, 25 bp, Homo sapien
agaagaatgagaagcagcttagctt

SEQ ID NO: 5631558 - DNA, 25 bp, Homo sapien
gcgtgacaggccctcccaagctata

SEQ ID NO: 5631559 - DNA, 25 bp, Homo sapien
gcatgctgactgtcatacggggagt

SEQ ID NO: 5631560 - DNA, 25 bp, Homo sapien
acaatggacataaaagccctctgat

SEQ ID NO: 5631561 - DNA, 25 bp, Homo sapien
taaggttcctgggtttctgagagtc

SEQ ID NO: 5631562 - DNA, 25 bp, Homo sapien
ccaagctataggctcggatccgaag

SEQ ID NO: 5631563 - DNA, 25 bp, Homo sapien
aaataataagtaatggtcaaaataa

SEQ ID NO: 5631564 - DNA, 25 bp, Homo sapien
atcagactcttgattagaaagaata

SEQ ID NO: 5631565 - DNA, 25 bp, Homo sapien
ttgccgcattagcttgaaaatttac

SEQ ID NO: 5631566 - DNA, 25 bp, Homo sapien
tcagccagcccttattaactgcctc

SEQ ID NO: 5631567 - DNA, 25 bp, Homo sapien
aggaaccgtagatgcactcaaactc

SEQ ID NO: 5631568 - DNA, 25 bp, Homo sapien
aatagtaatggttaaacacacagaa

SEQ ID NO: 5631569 - DNA, 25 bp, Homo sapien
tataaagcataaatgtcagaatcaa

SEQ ID NO: 5631570 - DNA, 25 bp, Homo sapien
gataagtcataaatgtcagccagcc

SEQ ID NO: 5631571 - DNA, 25 bp, Homo sapien
tcagaatcaatattggttttgccgc

SEQ ID NO: 5631572 - DNA, 25 bp, Homo sapien
actggcggaaaaatagtaatggtta

SEQ ID NO: 5631573 - DNA, 25 bp, Homo sapien
tgcctctgaaggtactacaaggaca

SEQ ID NO: 5631574 - DNA, 25 bp, Homo sapien
ctcacctggtggagtcagcttattc

SEQ ID NO: 5631575 - DNA, 25 bp, Homo sapien
tggagttgcagatgaagctgttctc

SEQ ID NO: 5631576 - DNA, 25 bp, Homo sapien
ccaagcactagagataactgacagc

SEQ ID NO: 5631577 - DNA, 25 bp, Homo sapien
tatgttcaagggcaaagttttgtaa

SEQ ID NO: 5631578 - DNA, 25 bp, Homo sapien
gtgttctagtcatctctggagttgc

SEQ ID NO: 5631579 - DNA, 25 bp, Homo sapien
aatggaggttccattagcctgtagg

SEQ ID NO: 5631580 - DNA, 25 bp, Homo sapien
tgtttatggagtggtaatgatgaag

SEQ ID NO: 5631581 - DNA, 25 bp, Homo sapien
gggccaggcaatataccaagcacta

SEQ ID NO: 5631582 - DNA, 25 bp, Homo sapien
ggaatgacaaagcttaaggttcttc

SEQ ID NO: 5631583 - DNA, 25 bp, Homo sapien
gataactgacagccaaagccaatgg

SEQ ID NO: 5631584 - DNA, 25 bp, Homo sapien
ctttgcagagtttgtgtttatggag

SEQ ID NO: 5631585 - DNA, 25 bp, Homo sapien
aagcatgaggtaatggctgatgcaa

SEQ ID NO: 5631586 - DNA, 25 bp, Homo sapien
tataggctgtgagcactcgctattg

SEQ ID NO: 5631587 - DNA, 25 bp, Homo sapien
cgctattgttagggttaggataatc

SEQ ID NO: 5631588 - DNA, 25 bp, Homo sapien
tgaattataggctgtgagcactcgc

SEQ ID NO: 5631589 - DNA, 25 bp, Homo sapien
ataatctaataagcatgaggtaatg

SEQ ID NO: 5631590 - DNA, 25 bp, Homo sapien
aaactctgaattataggctgtgagc

SEQ ID NO: 5631591 - DNA, 25 bp, Homo sapien
ggttaatccagaatggctgataatt

SEQ ID NO: 5631592 - DNA, 25 bp, Homo sapien
taataagcatgaggtaatggctgat

SEQ ID NO: 5631593 - DNA, 25 bp, Homo sapien
aagactggttaatccagaatggctg

SEQ ID NO: 5631594 - DNA, 25 bp, Homo sapien
tcagggcttggacacctctcccttg

SEQ ID NO: 5631595 - DNA, 25 bp, Homo sapien
tgtgacccattaattgtcttgatcc

SEQ ID NO: 5631596 - DNA, 25 bp, Homo sapien
tggagatttacagcaaaccttgggg

SEQ ID NO: 5631597 - DNA, 25 bp, Homo sapien
aaattggcagcaaatccaggtcaga

SEQ ID NO: 5631598 - DNA, 25 bp, Homo sapien
gaaccggccaatccagggccattgc

SEQ ID NO: 5631599 - DNA, 25 bp, Homo sapien
ccacagtactcaggagtgcaccgta

SEQ ID NO: 5631600 - DNA, 25 bp, Homo sapien
gcttacaaattggcagcaaatccag

SEQ ID NO: 5631601 - DNA, 25 bp, Homo sapien
ccacacctgggaccaaacccaattc

SEQ ID NO: 5631602 - DNA, 25 bp, Homo sapien
aggtaaccattcggaatgggtgaac

SEQ ID NO: 5631603 - DNA, 25 bp, Homo sapien
aacccaattcaggtaaccattcgga

SEQ ID NO: 5631604 - DNA, 25 bp, Homo sapien
agggccattgctctgctgccaccca

SEQ ID NO: 5631605 - DNA, 25 bp, Homo sapien
cctctggaattcaaaggcaggacga

SEQ ID NO: 5631606 - DNA, 25 bp, Homo sapien
ctgcacaggacatgtcctctggaat

SEQ ID NO: 5631607 - DNA, 25 bp, Homo sapien
actaaccattggagcaacagcaaaa

SEQ ID NO: 5631608 - DNA, 25 bp, Homo sapien
gcgcaccctgcagccactttggatt

SEQ ID NO: 5631609 - DNA, 25 bp, Homo sapien
ggaagcagatttcacagaaaagtct

SEQ ID NO: 5631610 - DNA, 25 bp, Homo sapien
cccatcggaacacgagattggggtt

SEQ ID NO: 5631611 - DNA, 25 bp, Homo sapien
cctccgttaagtgtgatggctggac

SEQ ID NO: 5631612 - DNA, 25 bp, Homo sapien
ggagttgccacgtgccaccacttct

SEQ ID NO: 5631613 - DNA, 25 bp, Homo sapien
tacaggccattcaatctctccaggg

SEQ ID NO: 5631614 - DNA, 25 bp, Homo sapien
caacatcacagcttacaggccattc

SEQ ID NO: 5631615 - DNA, 25 bp, Homo sapien
ctgcctctgggtgtgcgttttaacc

SEQ ID NO: 5631616 - DNA, 25 bp, Homo sapien
tccagggcctctcctccgttaagtg

SEQ ID NO: 5631617 - DNA, 25 bp, Homo sapien
ctttggattaatattctaggacccc

SEQ ID NO: 5631618 - DNA, 25 bp, Homo sapien
gatacctgacctttatttatatggt

SEQ ID NO: 5631619 - DNA, 25 bp, Homo sapien
accatataaataaaggtcaggtatc

SEQ ID NO: 5631620 - DNA, 25 bp, Homo sapien
atccaagcaacagtggagttgacca

SEQ ID NO: 5631621 - DNA, 25 bp, Homo sapien
ttgaccaccaactccaaccaggacc

SEQ ID NO: 5631622 - DNA, 25 bp, Homo sapien
tcgcatgggcaatacaagaatttct

SEQ ID NO: 5631623 - DNA, 25 bp, Homo sapien
gcaacagtggagttgaccaccaact

SEQ ID NO: 5631624 - DNA, 25 bp, Homo sapien
gggaatctcgcatgggcaatacaag

SEQ ID NO: 5631625 - DNA, 25 bp, Homo sapien
accaccaactccaaccaggaccttc

SEQ ID NO: 5631626 - DNA, 25 bp, Homo sapien
atctcgcatgggcaatacaagaatt

SEQ ID NO: 5631627 - DNA, 25 bp, Homo sapien
ccttcttgggtctgtaggatgaggg

SEQ ID NO: 5631628 - DNA, 25 bp, Homo sapien
accaggaccttcaacgtttagcttc

SEQ ID NO: 5631629 - DNA, 25 bp, Homo sapien
catgggcaatacaagaatttctgtc

SEQ ID NO: 5631630 - DNA, 25 bp, Homo sapien
ggaccttcaacgtttagcttcgctc

SEQ ID NO: 5631631 - DNA, 25 bp, Homo sapien
aatcatgagtagctattgctttagt

SEQ ID NO: 5631632 - DNA, 25 bp, Homo sapien
actaaagcaatagctactcatgatt

SEQ ID NO: 5631633 - DNA, 25 bp, Homo sapien
ataacaccgattccctttggagagg

SEQ ID NO: 5631634 - DNA, 25 bp, Homo sapien
aatagcataggctagagaatggaaa

SEQ ID NO: 5631635 - DNA, 25 bp, Homo sapien
ctacagtaccatcaattaggaaatg

SEQ ID NO: 5631636 - DNA, 25 bp, Homo sapien
aagtaaccagaacagattcgtttac

SEQ ID NO: 5631637 - DNA, 25 bp, Homo sapien
aatgagagaatagcataggctagag

SEQ ID NO: 5631638 - DNA, 25 bp, Homo sapien
ttatcaaagtataaaagtaaccaga

SEQ ID NO: 5631639 - DNA, 25 bp, Homo sapien
gcctgagaggtagatgttttcacca

SEQ ID NO: 5631640 - DNA, 25 bp, Homo sapien
tcagatcagtaaggtcccaaagcca

SEQ ID NO: 5631641 - DNA, 25 bp, Homo sapien
aacatgcatcagatcagtaaggtcc

SEQ ID NO: 5631642 - DNA, 25 bp, Homo sapien
ccaaacaaaatcaggcctttagata

SEQ ID NO: 5631643 - DNA, 25 bp, Homo sapien
tactatagcctgagaggtagatgtt

SEQ ID NO: 5631644 - DNA, 25 bp, Homo sapien
gtacacattacttctatgtctcagt

SEQ ID NO: 5631645 - DNA, 25 bp, Homo sapien
actgagacatagaagtaatgtgtac

SEQ ID NO: 5631646 - DNA, 25 bp, Homo sapien
aaccccgtatctgagccacttcgcc

SEQ ID NO: 5631647 - DNA, 25 bp, Homo sapien
ttccaaccgccgcgagctctcgtga

SEQ ID NO: 5631648 - DNA, 25 bp, Homo sapien
gccacttcgcctaggttagacccac

SEQ ID NO: 5631649 - DNA, 25 bp, Homo sapien
cgcgagctctcgtgaacactagttc

SEQ ID NO: 5631650 - DNA, 25 bp, Homo sapien
agaggtaataacagaaccccgtatc

SEQ ID NO: 5631651 - DNA, 25 bp, Homo sapien
cgcgagagccttccaaccgccgcga

SEQ ID NO: 5631652 - DNA, 25 bp, Homo sapien
ccggccagaattctcaagacgctct

SEQ ID NO: 5631653 - DNA, 25 bp, Homo sapien
caagacgctctcgcgagagccttcc

SEQ ID NO: 5631654 - DNA, 25 bp, Homo sapien
tctcagcacctccaagggtcagcac

SEQ ID NO: 5631655 - DNA, 25 bp, Homo sapien
ttgggcccccggccagaattctcaa

SEQ ID NO: 5631656 - DNA, 25 bp, Homo sapien
ttcgcctaggttagacccactcagc

SEQ ID NO: 5631657 - DNA, 25 bp, Homo sapien
tcaaattacataaaccccatgggac

SEQ ID NO: 5631658 - DNA, 25 bp, Homo sapien
acactaaagcactcataacctcagc

SEQ ID NO: 5631659 - DNA, 25 bp, Homo sapien
ataaaaaggtaaatggcctctgtat

SEQ ID NO: 5631660 - DNA, 25 bp, Homo sapien
accccatgggactgattgtcaatgt

SEQ ID NO: 5631661 - DNA, 25 bp, Homo sapien
ggagccacactaaagcactcataac

SEQ ID NO: 5631662 - DNA, 25 bp, Homo sapien
cataacctcagcttaaccacgggaa

SEQ ID NO: 5631663 - DNA, 25 bp, Homo sapien
catatataagaaagcctcactgtgg

SEQ ID NO: 5631664 - DNA, 25 bp, Homo sapien
cactgtggctgtcatataacttatg

SEQ ID NO: 5631665 - DNA, 25 bp, Homo sapien
actgctgcctgtaatatgattttta

SEQ ID NO: 5631666 - DNA, 25 bp, Homo sapien
tataacttatgccaaatctgttttc

SEQ ID NO: 5631667 - DNA, 25 bp, Homo sapien
atgggactgattgtcaatgtctttc

SEQ ID NO: 5631668 - DNA, 25 bp, Homo sapien
aatagcccagtcgtgatgctgaccg

SEQ ID NO: 5631669 - DNA, 25 bp, Homo sapien
cggtcagcatcacgactgggctatt

SEQ ID NO: 5631670 - DNA, 25 bp, Homo sapien
ctgccaccagagttacagcccaaac

SEQ ID NO: 5631671 - DNA, 25 bp, Homo sapien
gcagggcttcctcaagcagctgcgc

SEQ ID NO: 5631672 - DNA, 25 bp, Homo sapien
ggccaaccaggaagccttcacaaag

SEQ ID NO: 5631673 - DNA, 25 bp, Homo sapien
tgcgcttggtcaccctgccaccaga

SEQ ID NO: 5631674 - DNA, 25 bp, Homo sapien
tccagcagggcattttcttaggcaa

SEQ ID NO: 5631675 - DNA, 25 bp, Homo sapien
ttggggtcagttctatctgggcgaa

SEQ ID NO: 5631676 - DNA, 25 bp, Homo sapien
aggccatcccgaccaccctgctcta

SEQ ID NO: 5631677 - DNA, 25 bp, Homo sapien
tcacaaaggctggcattgaccttcc

SEQ ID NO: 5631678 - DNA, 25 bp, Homo sapien
gggcgaaggtctcagactgatcgta

SEQ ID NO: 5631679 - DNA, 25 bp, Homo sapien
agagagcaggaaagtgttgctcaca

SEQ ID NO: 5631680 - DNA, 25 bp, Homo sapien
gatcgtagtccgacatagagaccgg

SEQ ID NO: 5631681 - DNA, 25 bp, Homo sapien
tacagaagtgaaatctgccaggtct

SEQ ID NO: 5631682 - DNA, 25 bp, Homo sapien
tcccagggccagccttgattcaagg

SEQ ID NO: 5631683 - DNA, 25 bp, Homo sapien
tcttactggtggttgctcatgtggc

SEQ ID NO: 5631684 - DNA, 25 bp, Homo sapien
ctcagcatacagtctctccagcagc

SEQ ID NO: 5631685 - DNA, 25 bp, Homo sapien
tcagtggcaccgttccgttcatctt

SEQ ID NO: 5631686 - DNA, 25 bp, Homo sapien
ttaatgcttaggtctggaactggaa

SEQ ID NO: 5631687 - DNA, 25 bp, Homo sapien
cagtctagtggttaaagtgaatccc

SEQ ID NO: 5631688 - DNA, 25 bp, Homo sapien
gctcaggagtccataatctgggcgg

SEQ ID NO: 5631689 - DNA, 25 bp, Homo sapien
attcagctggctagttggctgggat

SEQ ID NO: 5631690 - DNA, 25 bp, Homo sapien
actggaacgagatcatttctgacac

SEQ ID NO: 5631691 - DNA, 25 bp, Homo sapien
gctcatgtggctgcattcagctggc

SEQ ID NO: 5631692 - DNA, 25 bp, Homo sapien
aagaatatttggggcagaaccctgg

SEQ ID NO: 5631693 - DNA, 25 bp, Homo sapien
acaaaagaatatttggggcagaacc

SEQ ID NO: 5631694 - DNA, 25 bp, Homo sapien
acatcctcagccaaatgaaggctct

SEQ ID NO: 5631695 - DNA, 25 bp, Homo sapien
gggggctctctcacaaaagaatatt

SEQ ID NO: 5631696 - DNA, 25 bp, Homo sapien
tgaaagaaaccttgctgacagcttc

SEQ ID NO: 5631697 - DNA, 25 bp, Homo sapien
ttctcactgacctgcaggacggaac

SEQ ID NO: 5631698 - DNA, 25 bp, Homo sapien
ctcagccaaatgaaggctctgaacc

SEQ ID NO: 5631699 - DNA, 25 bp, Homo sapien
acatcccaaatatcccctcctcctc

SEQ ID NO: 5631700 - DNA, 25 bp, Homo sapien
tcctgaaagaaaccttgctgacagc

SEQ ID NO: 5631701 - DNA, 25 bp, Homo sapien
gacagcttctcactgacctgcagga

SEQ ID NO: 5631702 - DNA, 25 bp, Homo sapien
gggcttcctgaaagaaaccttgctg

SEQ ID NO: 5631703 - DNA, 25 bp, Homo sapien
gtccctacacacctctattcttagg

SEQ ID NO: 5631704 - DNA, 25 bp, Homo sapien
cctaagaatagaggtgtgtagggac

SEQ ID NO: 5631705 - DNA, 25 bp, Homo sapien
tgcctgccttggttttgccagctgc

SEQ ID NO: 5631706 - DNA, 25 bp, Homo sapien
tacatgtcagtgactgcctgccttg

SEQ ID NO: 5631707 - DNA, 25 bp, Homo sapien
cagtttctggagattaagcaagggt

SEQ ID NO: 5631708 - DNA, 25 bp, Homo sapien
gaatgatacagttataccctgagtc

SEQ ID NO: 5631709 - DNA, 25 bp, Homo sapien
caccagcaactgaataattatgccc

SEQ ID NO: 5631710 - DNA, 25 bp, Homo sapien
cctgaagagggacctctggtcagaa

SEQ ID NO: 5631711 - DNA, 25 bp, Homo sapien
gggtagactggctaactgtgatatc

SEQ ID NO: 5631712 - DNA, 25 bp, Homo sapien
ggagcgttgtgaagggctctcattg

SEQ ID NO: 5631713 - DNA, 25 bp, Homo sapien
tgaccatgatgttccccattggact

SEQ ID NO: 5631714 - DNA, 25 bp, Homo sapien
gcactaagagtgctgtgtgacctga

SEQ ID NO: 5631715 - DNA, 25 bp, Homo sapien
tgggaccctgagatctgaccatgat

SEQ ID NO: 5631716 - DNA, 25 bp, Homo sapien
ggaaaaatgccaaagagaccaagta

SEQ ID NO: 5631717 - DNA, 25 bp, Homo sapien
attttaactgaactggacaggttat

SEQ ID NO: 5631718 - DNA, 25 bp, Homo sapien
aaagcaaaacccattccaccactgg

SEQ ID NO: 5631719 - DNA, 25 bp, Homo sapien
ttgaaagatatacctctaaacactc

SEQ ID NO: 5631720 - DNA, 25 bp, Homo sapien
gggattgcctgagccattatttgtt

SEQ ID NO: 5631721 - DNA, 25 bp, Homo sapien
taaaatcgattaacccacaaacata

SEQ ID NO: 5631722 - DNA, 25 bp, Homo sapien
acggaaatatactatgtaagcatta

SEQ ID NO: 5631723 - DNA, 25 bp, Homo sapien
ttagtgatgtatttatagtacctga

SEQ ID NO: 5631724 - DNA, 25 bp, Homo sapien
acctgatatactctggcttacagcc

SEQ ID NO: 5631725 - DNA, 25 bp, Homo sapien
actggacaggttatttctgggaatc

SEQ ID NO: 5631726 - DNA, 25 bp, Homo sapien
aaggtgcaactcatctgtgtttatg

SEQ ID NO: 5631727 - DNA, 25 bp, Homo sapien
gaattagacagggaagctataaaat

SEQ ID NO: 5631728 - DNA, 25 bp, Homo sapien
attgttgcaatggtttcagccccct

SEQ ID NO: 5631729 - DNA, 25 bp, Homo sapien
gcgtaaggtggtcaggttatattaa

SEQ ID NO: 5631730 - DNA, 25 bp, Homo sapien
agatgaagagatgtatcacttaggc

SEQ ID NO: 5631731 - DNA, 25 bp, Homo sapien
ataaaaactttgagaattagacagg

SEQ ID NO: 5631732 - DNA, 25 bp, Homo sapien
tataatgcagaatatgaatggaaac

SEQ ID NO: 5631733 - DNA, 25 bp, Homo sapien
agtggggcatatattattcagaaat

SEQ ID NO: 5631734 - DNA, 25 bp, Homo sapien
gcagaatatgaatggaaactggggc

SEQ ID NO: 5631735 - DNA, 25 bp, Homo sapien
tggtttcagccccctgcgtaaggtg

SEQ ID NO: 5631736 - DNA, 25 bp, Homo sapien
gaaacgatttctagtggggcatata

SEQ ID NO: 5631737 - DNA, 25 bp, Homo sapien
gcaaaatgtgttgccccacctgaaa

SEQ ID NO: 5631738 - DNA, 25 bp, Homo sapien
actccagaaacgccaatggaccctt

SEQ ID NO: 5631739 - DNA, 25 bp, Homo sapien
atcaccccttagaaacctcagaaac

SEQ ID NO: 5631740 - DNA, 25 bp, Homo sapien
cagaactgggggtgatcttatgttc

SEQ ID NO: 5631741 - DNA, 25 bp, Homo sapien
cacaaagccccagaaataacctagc

SEQ ID NO: 5631742 - DNA, 25 bp, Homo sapien
gggtttgccatctcctgcctgctgc

SEQ ID NO: 5631743 - DNA, 25 bp, Homo sapien
gaagatggcctttgcttttgaggac

SEQ ID NO: 5631744 - DNA, 25 bp, Homo sapien
gttagttttgagtggcagaactggg

SEQ ID NO: 5631745 - DNA, 25 bp, Homo sapien
tcatcaccaagggaaccatgttcac

SEQ ID NO: 5631746 - DNA, 25 bp, Homo sapien
taacatgtggcaataattcaacctc

SEQ ID NO: 5631747 - DNA, 25 bp, Homo sapien
taatgaagacctcaccacttggatc

SEQ ID NO: 5631748 - DNA, 25 bp, Homo sapien
gccaatggacccttgtgggtttgcc

SEQ ID NO: 5631749 - DNA, 25 bp, Homo sapien
cgaactcttgcgtcaaaacgtgaac

SEQ ID NO: 5631750 - DNA, 25 bp, Homo sapien
gttcacgttttgacgcaagagttcg

SEQ ID NO: 5631751 - DNA, 25 bp, Homo sapien
ttcctgccgccaatgtcaattaaat

SEQ ID NO: 5631752 - DNA, 25 bp, Homo sapien
ctccttccacgtcgcgcaggaaatc

SEQ ID NO: 5631753 - DNA, 25 bp, Homo sapien
attgacttagactgattggcttcct

SEQ ID NO: 5631754 - DNA, 25 bp, Homo sapien
tgcgcccttgagcgactcgcttcct

SEQ ID NO: 5631755 - DNA, 25 bp, Homo sapien
gtattctcacggtggctccgcggat

SEQ ID NO: 5631756 - DNA, 25 bp, Homo sapien
gttcggccgcagctgaattcatttc

SEQ ID NO: 5631757 - DNA, 25 bp, Homo sapien
tttatctcggaacgtcaattgactt

SEQ ID NO: 5631758 - DNA, 25 bp, Homo sapien
aaagatcttgggatatgactcggtg

SEQ ID NO: 5631759 - DNA, 25 bp, Homo sapien
ggcctctctgccgagctgtattctc

SEQ ID NO: 5631760 - DNA, 25 bp, Homo sapien
ctctttgcgccacgttcggccgcag

SEQ ID NO: 5631761 - DNA, 25 bp, Homo sapien
ggtgacctcctggaagtcgtctgcc

SEQ ID NO: 5631762 - DNA, 25 bp, Homo sapien
ttccaggtcctgagatgtggtcgga

SEQ ID NO: 5631763 - DNA, 25 bp, Homo sapien
tccgaccacatctcaggacctggaa

SEQ ID NO: 5631764 - DNA, 25 bp, Homo sapien
tgcaggcctgccttccagctttgct

SEQ ID NO: 5631765 - DNA, 25 bp, Homo sapien
agctttgctacagggaccagaagcg

SEQ ID NO: 5631766 - DNA, 25 bp, Homo sapien
gccttccagctttgctacagggacc

SEQ ID NO: 5631767 - DNA, 25 bp, Homo sapien
aaaatgaaaactttcggacccatga

SEQ ID NO: 5631768 - DNA, 25 bp, Homo sapien
ggctgccttgcaggcctgccttcca

SEQ ID NO: 5631769 - DNA, 25 bp, Homo sapien
aacagaaccaataacataagtattc

SEQ ID NO: 5631770 - DNA, 25 bp, Homo sapien
ttaacattatgatggtgagagggac

SEQ ID NO: 5631771 - DNA, 25 bp, Homo sapien
tattaacattatgatggtgagaggg

SEQ ID NO: 5631772 - DNA, 25 bp, Homo sapien
acattttgccaaaaacagaaccaat

SEQ ID NO: 5631773 - DNA, 25 bp, Homo sapien
aagtattcaaagttatgtaaagata

SEQ ID NO: 5631774 - DNA, 25 bp, Homo sapien
gccaaaaacagaaccaataacataa

SEQ ID NO: 5631775 - DNA, 25 bp, Homo sapien
gctgagtgtgctctgacctgccaag

SEQ ID NO: 5631776 - DNA, 25 bp, Homo sapien
gaaaaagctgagtgtgctctgacct

SEQ ID NO: 5631777 - DNA, 25 bp, Homo sapien
catacattctcaactgggtccatac

SEQ ID NO: 5631778 - DNA, 25 bp, Homo sapien
cttctctgtcttctgccactctggc

SEQ ID NO: 5631779 - DNA, 25 bp, Homo sapien
tttagcagaataatgctcacacagt

SEQ ID NO: 5631780 - DNA, 25 bp, Homo sapien
agtctggtccaaatcctggacatgc

SEQ ID NO: 5631781 - DNA, 25 bp, Homo sapien
ccaaatcctggacatgcttctctgt

SEQ ID NO: 5631782 - DNA, 25 bp, Homo sapien
ttctgccactctggctggaggaagt

SEQ ID NO: 5631783 - DNA, 25 bp, Homo sapien
atctttatagttgttgcatgttttc

SEQ ID NO: 5631784 - DNA, 25 bp, Homo sapien
gctttgcagatgaggctgactttcc

SEQ ID NO: 5631785 - DNA, 25 bp, Homo sapien
atacatgcatacatttagcagaata

SEQ ID NO: 5631786 - DNA, 25 bp, Homo sapien
cagagttttatgaaaaccaagatat

SEQ ID NO: 5631787 - DNA, 25 bp, Homo sapien
agtagcacaaaagtcccagagtttt

SEQ ID NO: 5631788 - DNA, 25 bp, Homo sapien
agggcacttctcctcatagagtagc

SEQ ID NO: 5631789 - DNA, 25 bp, Homo sapien
gctggccaccacagatatgtttctt

SEQ ID NO: 5631790 - DNA, 25 bp, Homo sapien
caagggacccctctgatattcatcc

SEQ ID NO: 5631791 - DNA, 25 bp, Homo sapien
atgaaaaccaagatatccaagggac

SEQ ID NO: 5631792 - DNA, 25 bp, Homo sapien
tcctcatagagtagcacaaaagtcc

SEQ ID NO: 5631793 - DNA, 25 bp, Homo sapien
catagagtagcacaaaagtcccaga

SEQ ID NO: 5631794 - DNA, 25 bp, Homo sapien
accaagatatccaagggacccctct

SEQ ID NO: 5631795 - DNA, 25 bp, Homo sapien
ccctctgatattcatccatgctggc

SEQ ID NO: 5631796 - DNA, 25 bp, Homo sapien
aaacacaggcattcccttgaaatcc

SEQ ID NO: 5631797 - DNA, 25 bp, Homo sapien
caataccatgaaaactggactggct

SEQ ID NO: 5631798 - DNA, 25 bp, Homo sapien
cctaatgataaaagagtcacgcaat

SEQ ID NO: 5631799 - DNA, 25 bp, Homo sapien
gacaaagagggacatttcctaatga

SEQ ID NO: 5631800 - DNA, 25 bp, Homo sapien
aagtagatttcaggacaaagggtat

SEQ ID NO: 5631801 - DNA, 25 bp, Homo sapien
taatggccttttgaatctgcgtatc

SEQ ID NO: 5631802 - DNA, 25 bp, Homo sapien
gcgtgcatttgcagtttgccagtaa

SEQ ID NO: 5631803 - DNA, 25 bp, Homo sapien
tgcgtatcatgccattctcagttcc

SEQ ID NO: 5631804 - DNA, 25 bp, Homo sapien
tggactggctatagaaatgtcagat

SEQ ID NO: 5631805 - DNA, 25 bp, Homo sapien
gacaaagagggacatttcataatga

SEQ ID NO: 5631806 - DNA, 25 bp, Homo sapien
tcataatgataaaagagtcactctt

SEQ ID NO: 5631807 - DNA, 25 bp, Homo sapien
aaagatgtacataccacacaatacc

SEQ ID NO: 5631808 - DNA, 25 bp, Homo sapien
gtaaggtccgggtaggtagtcgcac

SEQ ID NO: 5631809 - DNA, 25 bp, Homo sapien
gtgcgactacctacccggaccttac

SEQ ID NO: 5631810 - DNA, 25 bp, Homo sapien
tatagtcgttgaattgctccatcct

SEQ ID NO: 5631811 - DNA, 25 bp, Homo sapien
acagctctgggtacctgcccatgtc

SEQ ID NO: 5631812 - DNA, 25 bp, Homo sapien
ccactgggacatctcgctgcttcct

SEQ ID NO: 5631813 - DNA, 25 bp, Homo sapien
tgacacagagctttactgaaagggc

SEQ ID NO: 5631814 - DNA, 25 bp, Homo sapien
cctgcccatgtccttcttttgagcc

SEQ ID NO: 5631815 - DNA, 25 bp, Homo sapien
atgagttcacctaaagcccttcccc

SEQ ID NO: 5631816 - DNA, 25 bp, Homo sapien
aaagtatcactccatggtgggcatc

SEQ ID NO: 5631817 - DNA, 25 bp, Homo sapien
actgaaagggcgacctatagtcgtt

SEQ ID NO: 5631818 - DNA, 25 bp, Homo sapien
aggagccccacaccctgcaaagtat

SEQ ID NO: 5631819 - DNA, 25 bp, Homo sapien
gccatctcctagaagggaggttgca

SEQ ID NO: 5631820 - DNA, 25 bp, Homo sapien
agagctttactgaaagggcgaccta

SEQ ID NO: 5631821 - DNA, 25 bp, Homo sapien
cacactaattaaagatttgaaagcc

SEQ ID NO: 5631822 - DNA, 25 bp, Homo sapien
ccaccaactctgtcttaagggccac

SEQ ID NO: 5631823 - DNA, 25 bp, Homo sapien
taatggaaataaaagacacactaat

SEQ ID NO: 5631824 - DNA, 25 bp, Homo sapien
aacattcaaatggtgctaattattg

SEQ ID NO: 5631825 - DNA, 25 bp, Homo sapien
atacagagtacaaaaagttagattt

SEQ ID NO: 5631826 - DNA, 25 bp, Homo sapien
gtattgaacacaaggaaacatccac

SEQ ID NO: 5631827 - DNA, 25 bp, Homo sapien
aatcttaatattggagctgaaattt

SEQ ID NO: 5631828 - DNA, 25 bp, Homo sapien
attctagccagatatcaacttctac

SEQ ID NO: 5631829 - DNA, 25 bp, Homo sapien
gcaaatcatatccaatacagagtac

SEQ ID NO: 5631830 - DNA, 25 bp, Homo sapien
tcttaagggccacaaattatttgac

SEQ ID NO: 5631831 - DNA, 25 bp, Homo sapien
acacaaggaaacatccaccaactct

SEQ ID NO: 5631832 - DNA, 25 bp, Homo sapien
taagaacggacagtgccgtgtctgt

SEQ ID NO: 5631833 - DNA, 25 bp, Homo sapien
tacagcaccaaagtagcctcgtgta

SEQ ID NO: 5631834 - DNA, 25 bp, Homo sapien
caaagaagcatgtcactggaacaca

SEQ ID NO: 5631835 - DNA, 25 bp, Homo sapien
atgctgttaggtattaaaagccctc

SEQ ID NO: 5631836 - DNA, 25 bp, Homo sapien
atctatcctgtgagctatgtaccct

SEQ ID NO: 5631837 - DNA, 25 bp, Homo sapien
aagccctctgcaactgttcccaacc

SEQ ID NO: 5631838 - DNA, 25 bp, Homo sapien
gatgctaaggattaataccacctcc

SEQ ID NO: 5631839 - DNA, 25 bp, Homo sapien
acctcctccgggagccatcaggtta

SEQ ID NO: 5631840 - DNA, 25 bp, Homo sapien
tagcctcgtgtaggatacagtaggg

SEQ ID NO: 5631841 - DNA, 25 bp, Homo sapien
agctatgtaccctagggaaagagtc

SEQ ID NO: 5631842 - DNA, 25 bp, Homo sapien
gaagcccctgacaaagaagcatgtc

SEQ ID NO: 5631843 - DNA, 25 bp, Homo sapien
atcctttgtgtgagaaatgttattt

SEQ ID NO: 5631844 - DNA, 25 bp, Homo sapien
tttatcctttgtgtgagaaatgtta

SEQ ID NO: 5631845 - DNA, 25 bp, Homo sapien
agtaggtgtatatatgagatttttg

SEQ ID NO: 5631846 - DNA, 25 bp, Homo sapien
agctaggcccccctgctccctagga

SEQ ID NO: 5631847 - DNA, 25 bp, Homo sapien
aaagctaggcccccctgctccctag

SEQ ID NO: 5631848 - DNA, 25 bp, Homo sapien
cacagctttccacactggagactgt

SEQ ID NO: 5631849 - DNA, 25 bp, Homo sapien
cctgaagacctagaacctgctcctt

SEQ ID NO: 5631850 - DNA, 25 bp, Homo sapien
gctttccacactggagactgtgcag

SEQ ID NO: 5631851 - DNA, 25 bp, Homo sapien
aagacctagaacctgctccttcctt

SEQ ID NO: 5631852 - DNA, 25 bp, Homo sapien
ctttaagatgcagaaaatcctgaag

SEQ ID NO: 5631853 - DNA, 25 bp, Homo sapien
aggagatgagctgctttaagatgca

SEQ ID NO: 5631854 - DNA, 25 bp, Homo sapien
aggaaccagcagtgaatacaaaagg

SEQ ID NO: 5631855 - DNA, 25 bp, Homo sapien
ttcgacaacttgtggaactgagcag

SEQ ID NO: 5631856 - DNA, 25 bp, Homo sapien
gaatacaaaagggtcactgagaaca

SEQ ID NO: 5631857 - DNA, 25 bp, Homo sapien
actgagaacatagaggctgagtttg

SEQ ID NO: 5631858 - DNA, 25 bp, Homo sapien
gaatggagcaaataaataagacctc

SEQ ID NO: 5631859 - DNA, 25 bp, Homo sapien
cctgtgattttagagccggagttgg

SEQ ID NO: 5631860 - DNA, 25 bp, Homo sapien
tgggcagcatcctaaggaaggttta

SEQ ID NO: 5631861 - DNA, 25 bp, Homo sapien
aactgagcaggaatcctttcccctg

SEQ ID NO: 5631862 - DNA, 25 bp, Homo sapien
tcttactttgatgggaaggaagtgg

SEQ ID NO: 5631863 - DNA, 25 bp, Homo sapien
ttgctcaaagccaaggcttggggtc

SEQ ID NO: 5631864 - DNA, 25 bp, Homo sapien
gtttgtggacagtgtggagtttaaa

SEQ ID NO: 5631865 - DNA, 25 bp, Homo sapien
atcttttggaagctgggcatcatac

SEQ ID NO: 5631866 - DNA, 25 bp, Homo sapien
gctgggaaaatgactatacataggc

SEQ ID NO: 5631867 - DNA, 25 bp, Homo sapien
agtgaaggataagacagcaactata

SEQ ID NO: 5631868 - DNA, 25 bp, Homo sapien
ggaaagcttgaagtggtcagacttt

SEQ ID NO: 5631869 - DNA, 25 bp, Homo sapien
aaggtaaatccgctgggaaaatgac

SEQ ID NO: 5631870 - DNA, 25 bp, Homo sapien
caggggagagctgtattattcacac

SEQ ID NO: 5631871 - DNA, 25 bp, Homo sapien
atttggacacttgtgctgtgacatc

SEQ ID NO: 5631872 - DNA, 25 bp, Homo sapien
caagcaatcctagcacagaaaaccc

SEQ ID NO: 5631873 - DNA, 25 bp, Homo sapien
ctgggaaaaaggatttcacatgtgt

SEQ ID NO: 5631874 - DNA, 25 bp, Homo sapien
catgtgtacttggccatgtacccac

SEQ ID NO: 5631875 - DNA, 25 bp, Homo sapien
ggcatcatacagcccgcccaggtct

SEQ ID NO: 5631876 - DNA, 25 bp, Homo sapien
atgtctgcaagggaaccagcagaaa

SEQ ID NO: 5631877 - DNA, 25 bp, Homo sapien
actgacagccctcgacagatgggag

SEQ ID NO: 5631878 - DNA, 25 bp, Homo sapien
gtgacccttccatgggggagtctct

SEQ ID NO: 5631879 - DNA, 25 bp, Homo sapien
ggggagtctctctacaagggtgtat

SEQ ID NO: 5631880 - DNA, 25 bp, Homo sapien
gtatgacatggaagctgttgccacc

SEQ ID NO: 5631881 - DNA, 25 bp, Homo sapien
tcttcatccgtcaggtaggaccagc

SEQ ID NO: 5631882 - DNA, 25 bp, Homo sapien
tgctcatggagtccgtagaaagcca

SEQ ID NO: 5631883 - DNA, 25 bp, Homo sapien
ggagctttggcagttccgagcctcc

SEQ ID NO: 5631884 - DNA, 25 bp, Homo sapien
aatgggttagcttgttggttgctca

SEQ ID NO: 5631885 - DNA, 25 bp, Homo sapien
ctctacaagggtgtatccgtgtgga

SEQ ID NO: 5631886 - DNA, 25 bp, Homo sapien
ttgaataggtgacaaagtttgaaat

SEQ ID NO: 5631887 - DNA, 25 bp, Homo sapien
agcgctcgctctgtaaggcacgatg

SEQ ID NO: 5631888 - DNA, 25 bp, Homo sapien
cggggtcacttaggaccgcattcct

SEQ ID NO: 5631889 - DNA, 25 bp, Homo sapien
ccgcattcctcagtcatccagttgt

SEQ ID NO: 5631890 - DNA, 25 bp, Homo sapien
gtcgctgtgctcaaagatcaactca

SEQ ID NO: 5631891 - DNA, 25 bp, Homo sapien
gttagatcagtaagcatccgccaga

SEQ ID NO: 5631892 - DNA, 25 bp, Homo sapien
acgctgttagtcagatcccgcacgc

SEQ ID NO: 5631893 - DNA, 25 bp, Homo sapien
agcagggtgatgattcctcctccca

SEQ ID NO: 5631894 - DNA, 25 bp, Homo sapien
tacttctcagcagggtgatgattcc

SEQ ID NO: 5631895 - DNA, 25 bp, Homo sapien
gtcgctcggctgccacacgctgtta

SEQ ID NO: 5631896 - DNA, 25 bp, Homo sapien
caaaaaatccctgtcgctgtgctca

SEQ ID NO: 5631897 - DNA, 25 bp, Homo sapien
taaggcacgatgtacaaaaaatccc

SEQ ID NO: 5631898 - DNA, 25 bp, Homo sapien
cacagggtttaaagccatgcagact

SEQ ID NO: 5631899 - DNA, 25 bp, Homo sapien
acaggcgcttgaaagcaaggatttt

SEQ ID NO: 5631900 - DNA, 25 bp, Homo sapien
tgttgccaaggcgacatcgtaaaca

SEQ ID NO: 5631901 - DNA, 25 bp, Homo sapien
tcctcaagccagtgctgaggcaggt

SEQ ID NO: 5631902 - DNA, 25 bp, Homo sapien
agcgctgagtggccttggctaaaat

SEQ ID NO: 5631903 - DNA, 25 bp, Homo sapien
accaacagttcccggacttgagtcc

SEQ ID NO: 5631904 - DNA, 25 bp, Homo sapien
agccatgcagacttgagttggaatc

SEQ ID NO: 5631905 - DNA, 25 bp, Homo sapien
aatgaacgaatgaattggctatttt

SEQ ID NO: 5631906 - DNA, 25 bp, Homo sapien
tgagacaaagtgagaaagtttcatt

SEQ ID NO: 5631907 - DNA, 25 bp, Homo sapien
gatagctctgtcagtgagacaaagt

SEQ ID NO: 5631908 - DNA, 25 bp, Homo sapien
gggctgaggcatccactgaaatgcc

SEQ ID NO: 5631909 - DNA, 25 bp, Homo sapien
attagcccataattgaaacctcatc

SEQ ID NO: 5631910 - DNA, 25 bp, Homo sapien
taggccctacattgtgtaatgcgct

SEQ ID NO: 5631911 - DNA, 25 bp, Homo sapien
cgttattaataaagcagtggcctgc

SEQ ID NO: 5631912 - DNA, 25 bp, Homo sapien
tagccctgctagaaagctcagcatt

SEQ ID NO: 5631913 - DNA, 25 bp, Homo sapien
tggtgccattgaatgttggctaggt

SEQ ID NO: 5631914 - DNA, 25 bp, Homo sapien
gtaatgcgctatgtagagctgctgt

SEQ ID NO: 5631915 - DNA, 25 bp, Homo sapien
tctggctaggaacttgccatgaggg

SEQ ID NO: 5631916 - DNA, 25 bp, Homo sapien
gaacttgccatgagggtatagcagc

SEQ ID NO: 5631917 - DNA, 25 bp, Homo sapien
cctgcttcctgcttggcgggtattc

SEQ ID NO: 5631918 - DNA, 25 bp, Homo sapien
ggtgaatggcaaagcactgtgatct

SEQ ID NO: 5631919 - DNA, 25 bp, Homo sapien
ccccacattacagaagaggaagcag

SEQ ID NO: 5631920 - DNA, 25 bp, Homo sapien
tggaaggtgatcgttaggaaactta

SEQ ID NO: 5631921 - DNA, 25 bp, Homo sapien
taaccaggataagatacaggaagca

SEQ ID NO: 5631922 - DNA, 25 bp, Homo sapien
tcaaggagagaaactgtaattattt

SEQ ID NO: 5631923 - DNA, 25 bp, Homo sapien
ttcatgaataagagaattaaatatt

SEQ ID NO: 5631924 - DNA, 25 bp, Homo sapien
attgaatattttggaaggtgatcgt

SEQ ID NO: 5631925 - DNA, 25 bp, Homo sapien
attagaagttagaatattgaatatt

SEQ ID NO: 5631926 - DNA, 25 bp, Homo sapien
tacaggaagcattgcattcaaggag

SEQ ID NO: 5631927 - DNA, 25 bp, Homo sapien
acacgtgcagaatgttcaggttttt

SEQ ID NO: 5631928 - DNA, 25 bp, Homo sapien
ataagatacaggaagcattgcattc

SEQ ID NO: 5631929 - DNA, 25 bp, Homo sapien
ttgcattcaaggagagaaactgtaa

SEQ ID NO: 5631930 - DNA, 25 bp, Homo sapien
acatcatcatgaagacataaaactt

SEQ ID NO: 5631931 - DNA, 25 bp, Homo sapien
ccttccagaactgtcggcactgcag

SEQ ID NO: 5631932 - DNA, 25 bp, Homo sapien
atgaaagggtcaggttgtttaagta

SEQ ID NO: 5631933 - DNA, 25 bp, Homo sapien
tgcatttctaggtctgggcgccatt

SEQ ID NO: 5631934 - DNA, 25 bp, Homo sapien
gctccatcgtggggatcccgcaata

SEQ ID NO: 5631935 - DNA, 25 bp, Homo sapien
tgggcgccattggaccatcactact

SEQ ID NO: 5631936 - DNA, 25 bp, Homo sapien
gagatcagtggcagatgatccaagg

SEQ ID NO: 5631937 - DNA, 25 bp, Homo sapien
atggagagatcaattacaagagtat

SEQ ID NO: 5631938 - DNA, 25 bp, Homo sapien
ccaagctcagcatctggagccggtg

SEQ ID NO: 5631939 - DNA, 25 bp, Homo sapien
gtatgtgtagcaaaagatgaaaggg

SEQ ID NO: 5631940 - DNA, 25 bp, Homo sapien
ttgaagctgccaccgtgagaactca

SEQ ID NO: 5631941 - DNA, 25 bp, Homo sapien
aaatgttgaccagagatcagtggca

SEQ ID NO: 5631942 - DNA, 25 bp, Homo sapien
ttggaagagataagagaatcttgta

SEQ ID NO: 5631943 - DNA, 25 bp, Homo sapien
aagcgaacttgatcataactggtag

SEQ ID NO: 5631944 - DNA, 25 bp, Homo sapien
tggagcctcagtccctcatccgtga

SEQ ID NO: 5631945 - DNA, 25 bp, Homo sapien
atgaagaacagattcaatgtggttc

SEQ ID NO: 5631946 - DNA, 25 bp, Homo sapien
aacactgataagaattggaagagat

SEQ ID NO: 5631947 - DNA, 25 bp, Homo sapien
ccggccccctagtgtccctgcattt

SEQ ID NO: 5631948 - DNA, 25 bp, Homo sapien
ctacccaggccccatagctccagcc

SEQ ID NO: 5631949 - DNA, 25 bp, Homo sapien
ggggatacaaagatgtacctcgccc

SEQ ID NO: 5631950 - DNA, 25 bp, Homo sapien
gggattgggataggtcccagctatg

SEQ ID NO: 5631951 - DNA, 25 bp, Homo sapien
actggtagaaatgacatgtgaacac

SEQ ID NO: 5631952 - DNA, 25 bp, Homo sapien
agcagacatcaaagctggaaacgac

SEQ ID NO: 5631953 - DNA, 25 bp, Homo sapien
aagggcttacccttgaaagaaggca

SEQ ID NO: 5631954 - DNA, 25 bp, Homo sapien
ctgccttcgatggcccaaccccctt

SEQ ID NO: 5631955 - DNA, 25 bp, Homo sapien
tacccttgaaagaaggcagtaggga

SEQ ID NO: 5631956 - DNA, 25 bp, Homo sapien
aggccccttgtgaccaagggcttac

SEQ ID NO: 5631957 - DNA, 25 bp, Homo sapien
cttctgtcccaggccccttgtgacc

SEQ ID NO: 5631958 - DNA, 25 bp, Homo sapien
tcagttactgccagtgatagtgacc

SEQ ID NO: 5631959 - DNA, 25 bp, Homo sapien
ggggctccagtcacggtgttgccca

SEQ ID NO: 5631960 - DNA, 25 bp, Homo sapien
tactgccagtgatagtgacccagtc

SEQ ID NO: 5631961 - DNA, 25 bp, Homo sapien
acccccttattcacgagccgcggcc

SEQ ID NO: 5631962 - DNA, 25 bp, Homo sapien
gccagatgtcagacgcctaggctca

SEQ ID NO: 5631963 - DNA, 25 bp, Homo sapien
tacccgcaccgcgccgctctcttta

SEQ ID NO: 5631964 - DNA, 25 bp, Homo sapien
tctggcacatattaggcaagaaata

SEQ ID NO: 5631965 - DNA, 25 bp, Homo sapien
acacttcacggtttctggcacatat

SEQ ID NO: 5631966 - DNA, 25 bp, Homo sapien
agttgaataagaacctatcagtgaa

SEQ ID NO: 5631967 - DNA, 25 bp, Homo sapien
agatacagctaaccatgctctctgc

SEQ ID NO: 5631968 - DNA, 25 bp, Homo sapien
attgcaaacacaagttggatcatac

SEQ ID NO: 5631969 - DNA, 25 bp, Homo sapien
cacaggaataatgctaaggttaatt

SEQ ID NO: 5631970 - DNA, 25 bp, Homo sapien
gtacaaaaatagcatcatatggcat

SEQ ID NO: 5631971 - DNA, 25 bp, Homo sapien
aaaatgaattagatctacatgcatc

SEQ ID NO: 5631972 - DNA, 25 bp, Homo sapien
attccctcctggcagtaagctttat

SEQ ID NO: 5631973 - DNA, 25 bp, Homo sapien
tcagtgaataataaagcacaggaat

SEQ ID NO: 5631974 - DNA, 25 bp, Homo sapien
aaatgaaacattaaagatacagcta

SEQ ID NO: 5631975 - DNA, 25 bp, Homo sapien
aaattaggcaaggagacaaaatatt

SEQ ID NO: 5631976 - DNA, 25 bp, Homo sapien
gatgcagcacatctttgtgtggctt

SEQ ID NO: 5631977 - DNA, 25 bp, Homo sapien
tactgctccagggaattttgggaaa

SEQ ID NO: 5631978 - DNA, 25 bp, Homo sapien
gaggtgtggcatacagccttgaact

SEQ ID NO: 5631979 - DNA, 25 bp, Homo sapien
gtggctttccatgctaccaagtccc

SEQ ID NO: 5631980 - DNA, 25 bp, Homo sapien
cactgggaagagaccctaaacacat

SEQ ID NO: 5631981 - DNA, 25 bp, Homo sapien
aggtgatttttggtgagttacggat

SEQ ID NO: 5631982 - DNA, 25 bp, Homo sapien
cgcatgcattcgagcacacacacgc

SEQ ID NO: 5631983 - DNA, 25 bp, Homo sapien
ccaatggggacttcacaactgctga

SEQ ID NO: 5631984 - DNA, 25 bp, Homo sapien
ttggtgagttacggatcactgggaa

SEQ ID NO: 5631985 - DNA, 25 bp, Homo sapien
ctgctgatgacacaagcccaaggaa

SEQ ID NO: 5631986 - DNA, 25 bp, Homo sapien
tggaaggacaatctaactggacatt

SEQ ID NO: 5631987 - DNA, 25 bp, Homo sapien
gtctaaagtggaaggacaatctaac

SEQ ID NO: 5631988 - DNA, 25 bp, Homo sapien
agcgagcccttgcagaggcatcttt

SEQ ID NO: 5631989 - DNA, 25 bp, Homo sapien
gctggtgggtgcctccttcttcttg

SEQ ID NO: 5631990 - DNA, 25 bp, Homo sapien
tccattgtctagagggagccatttc

SEQ ID NO: 5631991 - DNA, 25 bp, Homo sapien
gccaaataccagggatcatactgca

SEQ ID NO: 5631992 - DNA, 25 bp, Homo sapien
tcatagaaactgctagcaagggaac

SEQ ID NO: 5631993 - DNA, 25 bp, Homo sapien
tctttaaggagatctgctgagattc

SEQ ID NO: 5631994 - DNA, 25 bp, Homo sapien
tctggaatagcccttgccaaatacc

SEQ ID NO: 5631995 - DNA, 25 bp, Homo sapien
tccagaagaattgaacttgataaac

SEQ ID NO: 5631996 - DNA, 25 bp, Homo sapien
caagggaactctgctaataataact

SEQ ID NO: 5631997 - DNA, 25 bp, Homo sapien
aggcaggacatccaaggaacctata

SEQ ID NO: 5631998 - DNA, 25 bp, Homo sapien
atcacggtagagaccacatcctgtg

SEQ ID NO: 5631999 - DNA, 25 bp, Homo sapien
gggggcttctcaactccaggaggaa

SEQ ID NO: 5632000 - DNA, 25 bp, Homo sapien
ccaaggaacctatagacagtcactc

SEQ ID NO: 5632001 - DNA, 25 bp, Homo sapien
tcattttgcagataggcaggacatc

SEQ ID NO: 5632002 - DNA, 25 bp, Homo sapien
cccctctattggcaggagaaggggt

SEQ ID NO: 5632003 - DNA, 25 bp, Homo sapien
ataggcataaagacacccctccgac

SEQ ID NO: 5632004 - DNA, 25 bp, Homo sapien
gattccaaggcaagtttataggcat

SEQ ID NO: 5632005 - DNA, 25 bp, Homo sapien
cacccttttgagataacacagcact

SEQ ID NO: 5632006 - DNA, 25 bp, Homo sapien
acagcctcatgaaggtatcgatctc

SEQ ID NO: 5632007 - DNA, 25 bp, Homo sapien
catgcatgctcaggaatcacggtag

SEQ ID NO: 5632008 - DNA, 25 bp, Homo sapien
aaattgtcgctaataaaagttgtgc

SEQ ID NO: 5632009 - DNA, 25 bp, Homo sapien
cttatacagcctgtttgggaaggat

SEQ ID NO: 5632010 - DNA, 25 bp, Homo sapien
tcgaaaacttgtagattaagcagag

SEQ ID NO: 5632011 - DNA, 25 bp, Homo sapien
caggaagcctttggtaaaatctata

SEQ ID NO: 5632012 - DNA, 25 bp, Homo sapien
gcagagacgccccaaattgtcgcta

SEQ ID NO: 5632013 - DNA, 25 bp, Homo sapien
atgaacatgaagctgcaagatactc

SEQ ID NO: 5632014 - DNA, 25 bp, Homo sapien
taatctaaagtgttgctccctcgtc

SEQ ID NO: 5632015 - DNA, 25 bp, Homo sapien
ttaaaatggtgacttctgagattcc

SEQ ID NO: 5632016 - DNA, 25 bp, Homo sapien
tctaataggaaagtctgatcacatt

SEQ ID NO: 5632017 - DNA, 25 bp, Homo sapien
aagagacagaagagccatatctaat

SEQ ID NO: 5632018 - DNA, 25 bp, Homo sapien
cttgaagaacaactgattgtcacta

SEQ ID NO: 5632019 - DNA, 25 bp, Homo sapien
gggctgacccaccctgacaggttta

SEQ ID NO: 5632020 - DNA, 25 bp, Homo sapien
caaactacatttggttgagccgggc

SEQ ID NO: 5632021 - DNA, 25 bp, Homo sapien
cttgcaccgcaggagtttgtctttc

SEQ ID NO: 5632022 - DNA, 25 bp, Homo sapien
cagatggccaccaaggtaacaaact

SEQ ID NO: 5632023 - DNA, 25 bp, Homo sapien
cctctggtttagcagtgtggcaggg

SEQ ID NO: 5632024 - DNA, 25 bp, Homo sapien
acaggtttagggctcctgctccggt

SEQ ID NO: 5632025 - DNA, 25 bp, Homo sapien
ctggtccaggactcttgcaccgcag

SEQ ID NO: 5632026 - DNA, 25 bp, Homo sapien
agccacttcccgaatccctgtctgc

SEQ ID NO: 5632027 - DNA, 25 bp, Homo sapien
acctgggtaccatcgagtccttccc

SEQ ID NO: 5632028 - DNA, 25 bp, Homo sapien
ccagaccctccctccaggattactc

SEQ ID NO: 5632029 - DNA, 25 bp, Homo sapien
aggattactccagggctgacccacc

SEQ ID NO: 5632030 - DNA, 25 bp, Homo sapien
tgccagaaaggtatgttttggtgac

SEQ ID NO: 5632031 - DNA, 25 bp, Homo sapien
gtgcacaaaggcagacatcctcaca

SEQ ID NO: 5632032 - DNA, 25 bp, Homo sapien
actactgcgttctaggcaggacctt

SEQ ID NO: 5632033 - DNA, 25 bp, Homo sapien
tctgcctggacttagtattagccac

SEQ ID NO: 5632034 - DNA, 25 bp, Homo sapien
ctagttaagtgccagaaaggtatgt

SEQ ID NO: 5632035 - DNA, 25 bp, Homo sapien
ctgcacatcaatagacttccctgga

SEQ ID NO: 5632036 - DNA, 25 bp, Homo sapien
tctcttccaggtgcacaaaggcaga

SEQ ID NO: 5632037 - DNA, 25 bp, Homo sapien
gacttccctggatgagccttaattc

SEQ ID NO: 5632038 - DNA, 25 bp, Homo sapien
taactaaggcaaaaagttagcagat

SEQ ID NO: 5632039 - DNA, 25 bp, Homo sapien
gtttcaagatagctagttaagtgcc

SEQ ID NO: 5632040 - DNA, 25 bp, Homo sapien
gcaggagggtttaataactaaggca

SEQ ID NO: 5632041 - DNA, 25 bp, Homo sapien
tctgtcagggcatgttctcaggagg

SEQ ID NO: 5632042 - DNA, 25 bp, Homo sapien
ttaaaggacagatgaatatgcagct

SEQ ID NO: 5632043 - DNA, 25 bp, Homo sapien
tgtagagcacaaacaggctttccct

SEQ ID NO: 5632044 - DNA, 25 bp, Homo sapien
cagaaaggactaatcaagcatccta

SEQ ID NO: 5632045 - DNA, 25 bp, Homo sapien
gcttatggggtgtctctgatgtttc

SEQ ID NO: 5632046 - DNA, 25 bp, Homo sapien
ccacatatggcttatggggtgtctc

SEQ ID NO: 5632047 - DNA, 25 bp, Homo sapien
atatgcagctttattgggaaatgtt

SEQ ID NO: 5632048 - DNA, 25 bp, Homo sapien
tgaaggaggacaaagtatactatac

SEQ ID NO: 5632049 - DNA, 25 bp, Homo sapien
tttcacaagcctgtagagcacaaac

SEQ ID NO: 5632050 - DNA, 25 bp, Homo sapien
cattaggttcagatgcccatgccac

SEQ ID NO: 5632051 - DNA, 25 bp, Homo sapien
ttgcttggggataatctaatcattc

SEQ ID NO: 5632052 - DNA, 25 bp, Homo sapien
ggagtcacaaggtcaagtctcagcc

SEQ ID NO: 5632053 - DNA, 25 bp, Homo sapien
ggaaatgagaagtgtcagcaaataa

SEQ ID NO: 5632054 - DNA, 25 bp, Homo sapien
agttcccgtgaaatcctctaaggtc

SEQ ID NO: 5632055 - DNA, 25 bp, Homo sapien
cttggcttcgagtagtggctctcta

SEQ ID NO: 5632056 - DNA, 25 bp, Homo sapien
gtcagcaaataaatgggttccacgt

SEQ ID NO: 5632057 - DNA, 25 bp, Homo sapien
ctcattggagtccatgagtggagaa

SEQ ID NO: 5632058 - DNA, 25 bp, Homo sapien
aattataggtctgggaatgtaggtt

SEQ ID NO: 5632059 - DNA, 25 bp, Homo sapien
tataatcctaggctggagtcacaag

SEQ ID NO: 5632060 - DNA, 25 bp, Homo sapien
gtctcagcccatgttgttgccatcc

SEQ ID NO: 5632061 - DNA, 25 bp, Homo sapien
ggttccacgtgtacagctaagttcc

SEQ ID NO: 5632062 - DNA, 25 bp, Homo sapien
tgcctgacgtaaggcttggcttcga

SEQ ID NO: 5632063 - DNA, 25 bp, Homo sapien
ctctttaggaagtgattgccatcaa

SEQ ID NO: 5632064 - DNA, 25 bp, Homo sapien
attaatgaagaactgccccaaaact

SEQ ID NO: 5632065 - DNA, 25 bp, Homo sapien
tttagtgatatgatatttgagtcaa

SEQ ID NO: 5632066 - DNA, 25 bp, Homo sapien
aatataacccaaattaatgaagaac

SEQ ID NO: 5632067 - DNA, 25 bp, Homo sapien
gtggctgggtttcttgtaacagacc

SEQ ID NO: 5632068 - DNA, 25 bp, Homo sapien
atttgagtcaaaaatctgaggttat

SEQ ID NO: 5632069 - DNA, 25 bp, Homo sapien
ttctgtctaaattggcctctgtctt

SEQ ID NO: 5632070 - DNA, 25 bp, Homo sapien
aaaacttcagtgaaagccaaggagg

SEQ ID NO: 5632071 - DNA, 25 bp, Homo sapien
ctgaggttatagtaccagctgtctt

SEQ ID NO: 5632072 - DNA, 25 bp, Homo sapien
attctggaatagcaaagaaggatac

SEQ ID NO: 5632073 - DNA, 25 bp, Homo sapien
tctggtctcctttttgtcgtctttc

SEQ ID NO: 5632074 - DNA, 25 bp, Homo sapien
gcctgaaccccaggtgcgtctgggc

SEQ ID NO: 5632075 - DNA, 25 bp, Homo sapien
tggtgtcagccaacaccgggctcta

SEQ ID NO: 5632076 - DNA, 25 bp, Homo sapien
tgacaagagacagatcggctcatga

SEQ ID NO: 5632077 - DNA, 25 bp, Homo sapien
tttcacctgagaggactcaacgagg

SEQ ID NO: 5632078 - DNA, 25 bp, Homo sapien
tggctggctacactgtgatgctgac

SEQ ID NO: 5632079 - DNA, 25 bp, Homo sapien
gacaagagattgctactaaagagtt

SEQ ID NO: 5632080 - DNA, 25 bp, Homo sapien
gaggatcagagagattttgaagcca

SEQ ID NO: 5632081 - DNA, 25 bp, Homo sapien
tactaaagagttgaagcaaagagaa

SEQ ID NO: 5632082 - DNA, 25 bp, Homo sapien
gactttcacctgagaggactcaacg

SEQ ID NO: 5632083 - DNA, 25 bp, Homo sapien
aacaccgggctctaagacaagagat

SEQ ID NO: 5632084 - DNA, 25 bp, Homo sapien
gacagatcggctcatgactttcacc

SEQ ID NO: 5632085 - DNA, 25 bp, Homo sapien
tctggagtcagaatgcttggattct

SEQ ID NO: 5632086 - DNA, 25 bp, Homo sapien
gatacctagcagatacaaagatgaa

SEQ ID NO: 5632087 - DNA, 25 bp, Homo sapien
aagagagaagatagtcattttggat

SEQ ID NO: 5632088 - DNA, 25 bp, Homo sapien
cttaagactgatatgtagcttcatc

SEQ ID NO: 5632089 - DNA, 25 bp, Homo sapien
tgatctcaagaggcttagagtctag

SEQ ID NO: 5632090 - DNA, 25 bp, Homo sapien
catgtgggtggaccttgatctcaag

SEQ ID NO: 5632091 - DNA, 25 bp, Homo sapien
accagcttgtgaaacattgcgagac

SEQ ID NO: 5632092 - DNA, 25 bp, Homo sapien
aaaggcagagtgacattatggcttt

SEQ ID NO: 5632093 - DNA, 25 bp, Homo sapien
cattatggctttgggctctggagtc

SEQ ID NO: 5632094 - DNA, 25 bp, Homo sapien
tgaatctcatgtgggtggaccttga

SEQ ID NO: 5632095 - DNA, 25 bp, Homo sapien
actatgctggatacctagcagatac

SEQ ID NO: 5632096 - DNA, 25 bp, Homo sapien
ttctgtaggatacgcagcacttttc

SEQ ID NO: 5632097 - DNA, 25 bp, Homo sapien
cttaaccaagaagacaaaccactag

SEQ ID NO: 5632098 - DNA, 25 bp, Homo sapien
tgtagctttctgtaggatacgcagc

SEQ ID NO: 5632099 - DNA, 25 bp, Homo sapien
agcatcagaaagcaatggattaata

SEQ ID NO: 5632100 - DNA, 25 bp, Homo sapien
cccaaacttgaaacaatccgaatga

SEQ ID NO: 5632101 - DNA, 25 bp, Homo sapien
cttgagtcttcagttttatgcagga

SEQ ID NO: 5632102 - DNA, 25 bp, Homo sapien
cagaaagcaatggattaatattcag

SEQ ID NO: 5632103 - DNA, 25 bp, Homo sapien
gaaacaatccgaatgattctgaccc

SEQ ID NO: 5632104 - DNA, 25 bp, Homo sapien
acagtgcttgatgcatcttgagtct

SEQ ID NO: 5632105 - DNA, 25 bp, Homo sapien
tgacccccaactgtctgtagctttc

SEQ ID NO: 5632106 - DNA, 25 bp, Homo sapien
tccgaatgattctgacccccaactg

SEQ ID NO: 5632107 - DNA, 25 bp, Homo sapien
ggagatggagtttagagttactgga

SEQ ID NO: 5632108 - DNA, 25 bp, Homo sapien
ccacctgctgtgcatgtgaaagggc

SEQ ID NO: 5632109 - DNA, 25 bp, Homo sapien
tgacataaacatagaaaaaatagaa

SEQ ID NO: 5632110 - DNA, 25 bp, Homo sapien
agtagtctaaagggatacatgttgc

SEQ ID NO: 5632111 - DNA, 25 bp, Homo sapien
aagtgctgaccacacaaggcaaatt

SEQ ID NO: 5632112 - DNA, 25 bp, Homo sapien
accaacaagcagtaggatatcgttt

SEQ ID NO: 5632113 - DNA, 25 bp, Homo sapien
aagggctttgtaaacagttaagtgc

SEQ ID NO: 5632114 - DNA, 25 bp, Homo sapien
tggaaaacttaagctatgtcagaaa

SEQ ID NO: 5632115 - DNA, 25 bp, Homo sapien
ggcactaacacttttcacgggatat

SEQ ID NO: 5632116 - DNA, 25 bp, Homo sapien
cttaatgacgataaaggagatggag

SEQ ID NO: 5632117 - DNA, 25 bp, Homo sapien
cacgggatatgcttccagcacaggc

SEQ ID NO: 5632118 - DNA, 25 bp, Homo sapien
acataactcaaataggagcacacat

SEQ ID NO: 5632119 - DNA, 25 bp, Homo sapien
atctcatcaaatcaaatgtgggtgc

SEQ ID NO: 5632120 - DNA, 25 bp, Homo sapien
tcaaatcaaatgtgggtgctgtcaa

SEQ ID NO: 5632121 - DNA, 25 bp, Homo sapien
tgccaaaatatcatgccatttgctt

SEQ ID NO: 5632122 - DNA, 25 bp, Homo sapien
gggtgctgtcaaaaagtctgccaaa

SEQ ID NO: 5632123 - DNA, 25 bp, Homo sapien
catccattacagaaacatagacctc

SEQ ID NO: 5632124 - DNA, 25 bp, Homo sapien
catcaaatcaaatgtgggtgctgtc

SEQ ID NO: 5632125 - DNA, 25 bp, Homo sapien
tgtcaaaaagtctgccaaaatatca

SEQ ID NO: 5632126 - DNA, 25 bp, Homo sapien
ataggagcacacatctcatcaaatc

SEQ ID NO: 5632127 - DNA, 25 bp, Homo sapien
gaaacatagacctcaatttactaca

SEQ ID NO: 5632128 - DNA, 25 bp, Homo sapien
taactcaaataggagcacacatctc

SEQ ID NO: 5632129 - DNA, 25 bp, Homo sapien
cagagcaagtcaccctcagagtggg

SEQ ID NO: 5632130 - DNA, 25 bp, Homo sapien
ctccagcagggtataactaaacaag

SEQ ID NO: 5632131 - DNA, 25 bp, Homo sapien
caagtcaccctcagagtgggtactc

SEQ ID NO: 5632132 - DNA, 25 bp, Homo sapien
gcgggttgcataaccagagcaagtc

SEQ ID NO: 5632133 - DNA, 25 bp, Homo sapien
ctggaaactgtcaagccctctacaa

SEQ ID NO: 5632134 - DNA, 25 bp, Homo sapien
agcagggtataactaaacaagcaaa

SEQ ID NO: 5632135 - DNA, 25 bp, Homo sapien
tgcataaccagagcaagtcaccctc

SEQ ID NO: 5632136 - DNA, 25 bp, Homo sapien
aaccagagcaagtcaccctcagagt

SEQ ID NO: 5632137 - DNA, 25 bp, Homo sapien
gtcaccctcagagtgggtactcggg

SEQ ID NO: 5632138 - DNA, 25 bp, Homo sapien
caaaatgcgggttgcataaccagag

SEQ ID NO: 5632139 - DNA, 25 bp, Homo sapien
aagccctctacaaaatgcgggttgc

SEQ ID NO: 5632140 - DNA, 25 bp, Homo sapien
ggggcggtaacatacacagctttct

SEQ ID NO: 5632141 - DNA, 25 bp, Homo sapien
cagctttctggcccacataggatgt

SEQ ID NO: 5632142 - DNA, 25 bp, Homo sapien
tgagaaggctagataaggttctgta

SEQ ID NO: 5632143 - DNA, 25 bp, Homo sapien
ctctaaaaggtactgagaaggctag

SEQ ID NO: 5632144 - DNA, 25 bp, Homo sapien
gtgtcatttctccaggcacagatcc

SEQ ID NO: 5632145 - DNA, 25 bp, Homo sapien
agtcagatagcaagtgggtttcatt

SEQ ID NO: 5632146 - DNA, 25 bp, Homo sapien
caggcacagatcctgggaacacatg

SEQ ID NO: 5632147 - DNA, 25 bp, Homo sapien
agtgtgaaacaacttggtacctcct

SEQ ID NO: 5632148 - DNA, 25 bp, Homo sapien
agattcctctactgcgtgctgggat

SEQ ID NO: 5632149 - DNA, 25 bp, Homo sapien
tgatggcttcccactccgctgccac

SEQ ID NO: 5632150 - DNA, 25 bp, Homo sapien
agctgggtaacactgagtacaacac

SEQ ID NO: 5632151 - DNA, 25 bp, Homo sapien
atcgttcacagaccatctgtgtcgg

SEQ ID NO: 5632152 - DNA, 25 bp, Homo sapien
ccgacacagatggtctgtgaacgat

SEQ ID NO: 5632153 - DNA, 25 bp, Homo sapien
actcactactcaaccaactgcctgg

SEQ ID NO: 5632154 - DNA, 25 bp, Homo sapien
aggaaggtatctcatccaagcagaa

SEQ ID NO: 5632155 - DNA, 25 bp, Homo sapien
tgactgtgaggatggataactatat

SEQ ID NO: 5632156 - DNA, 25 bp, Homo sapien
aattttaactactccaggcagctga

SEQ ID NO: 5632157 - DNA, 25 bp, Homo sapien
tgggggaagcaatatgctcagaaaa

SEQ ID NO: 5632158 - DNA, 25 bp, Homo sapien
tcttcctaaaagagaaatatgtctc

SEQ ID NO: 5632159 - DNA, 25 bp, Homo sapien
caagcagaaaataagaccaacagtt

SEQ ID NO: 5632160 - DNA, 25 bp, Homo sapien
accaacagttgtccaggtctcagtg

SEQ ID NO: 5632161 - DNA, 25 bp, Homo sapien
gttgtccaggtctcagtggttctgc

SEQ ID NO: 5632162 - DNA, 25 bp, Homo sapien
gaaatagcaggaaggtatctcatcc

SEQ ID NO: 5632163 - DNA, 25 bp, Homo sapien
accaactgcctggtattcagctgtg

SEQ ID NO: 5632164 - DNA, 25 bp, Homo sapien
tgggagagttcttgcagctattacc

SEQ ID NO: 5632165 - DNA, 25 bp, Homo sapien
actcagccttttgcacagaagtccc

SEQ ID NO: 5632166 - DNA, 25 bp, Homo sapien
caaggctctcataagggcaatttac

SEQ ID NO: 5632167 - DNA, 25 bp, Homo sapien
cctggcttgtctgaggatcagttcc

SEQ ID NO: 5632168 - DNA, 25 bp, Homo sapien
ttaaagcacaacatactgaacaatt

SEQ ID NO: 5632169 - DNA, 25 bp, Homo sapien
actatagcctagacagcattcctcc

SEQ ID NO: 5632170 - DNA, 25 bp, Homo sapien
ttctccagggcctttggacagatgc

SEQ ID NO: 5632171 - DNA, 25 bp, Homo sapien
attgaaactggacaccctgatggac

SEQ ID NO: 5632172 - DNA, 25 bp, Homo sapien
cctccaagagagtcactatagccta

SEQ ID NO: 5632173 - DNA, 25 bp, Homo sapien
tttggacagatgcaaggctctcata

SEQ ID NO: 5632174 - DNA, 25 bp, Homo sapien
acagaagtccctgttgggagagttc

SEQ ID NO: 5632175 - DNA, 25 bp, Homo sapien
cacatcgcccagcagtcggcccggg

SEQ ID NO: 5632176 - DNA, 25 bp, Homo sapien
cccgggccgactgctgggcgatgtg

SEQ ID NO: 5632177 - DNA, 25 bp, Homo sapien
gtcggcccccgggtgccacatcgcc

SEQ ID NO: 5632178 - DNA, 25 bp, Homo sapien
ggcgatgtggcacccgggggccgac

SEQ ID NO: 5632179 - DNA, 25 bp, Homo sapien
agtcacaagcctgaagtgaggcctt

SEQ ID NO: 5632180 - DNA, 25 bp, Homo sapien
gaagtgaggccttggcacatagtca

SEQ ID NO: 5632181 - DNA, 25 bp, Homo sapien
cagctgccagcaatggacatgcagg

SEQ ID NO: 5632182 - DNA, 25 bp, Homo sapien
tgagtgcatgaggatcacagtcttc

SEQ ID NO: 5632183 - DNA, 25 bp, Homo sapien
aaaccacagtgtagctcccttaacc

SEQ ID NO: 5632184 - DNA, 25 bp, Homo sapien
tttaatgactgaagtcagctgccag

SEQ ID NO: 5632185 - DNA, 25 bp, Homo sapien
aactcaggtggcactgcagctttct

SEQ ID NO: 5632186 - DNA, 25 bp, Homo sapien
gggaagtgcctctgagtgcatgagg

SEQ ID NO: 5632187 - DNA, 25 bp, Homo sapien
gacatgcaggtaactatcgaagaag

SEQ ID NO: 5632188 - DNA, 25 bp, Homo sapien
acatagtcagtgagaatggtctttg

SEQ ID NO: 5632189 - DNA, 25 bp, Homo sapien
gtctttgacttagaagggaagtgcc

SEQ ID NO: 5632190 - DNA, 25 bp, Homo sapien
tggatgcacataacagtggagttac

SEQ ID NO: 5632191 - DNA, 25 bp, Homo sapien
caactgagatgatcagcagacctcc

SEQ ID NO: 5632192 - DNA, 25 bp, Homo sapien
ataatagtaggggtacttcaggtgg

SEQ ID NO: 5632193 - DNA, 25 bp, Homo sapien
gtgttgaaagaaacgagctgacaac

SEQ ID NO: 5632194 - DNA, 25 bp, Homo sapien
attgataagtcaagaacgcatgtta

SEQ ID NO: 5632195 - DNA, 25 bp, Homo sapien
gaagggaaatgaccctagaaagtca

SEQ ID NO: 5632196 - DNA, 25 bp, Homo sapien
aatgatagtggcatatatgtgggcc

SEQ ID NO: 5632197 - DNA, 25 bp, Homo sapien
tagaaagtcacagaaggataaaaca

SEQ ID NO: 5632198 - DNA, 25 bp, Homo sapien
aaattgaagaaaattgaagacagag

SEQ ID NO: 5632199 - DNA, 25 bp, Homo sapien
aaacgagctgacaacctagaattcc

SEQ ID NO: 5632200 - DNA, 25 bp, Homo sapien
ttaaacgcagtcagaggaaaatatt

SEQ ID NO: 5632201 - DNA, 25 bp, Homo sapien
gccaatgagagcgaatcaaactttc

SEQ ID NO: 5632202 - DNA, 25 bp, Homo sapien
tttggagaaattgcccatgaaggag

SEQ ID NO: 5632203 - DNA, 25 bp, Homo sapien
accctcagatggagtcgaagtgagt

SEQ ID NO: 5632204 - DNA, 25 bp, Homo sapien
ggaggtttggaaagattgcttgtga

SEQ ID NO: 5632205 - DNA, 25 bp, Homo sapien
caatttgaggaagagattagtgtct

SEQ ID NO: 5632206 - DNA, 25 bp, Homo sapien
attagtgtctcaagtatagcatttc

SEQ ID NO: 5632207 - DNA, 25 bp, Homo sapien
ctgctgtgtccagcatgtgatgggg

SEQ ID NO: 5632208 - DNA, 25 bp, Homo sapien
ttgctgtgttccgggatctccagtc

SEQ ID NO: 5632209 - DNA, 25 bp, Homo sapien
gaggggcagcactctttaagaccca

SEQ ID NO: 5632210 - DNA, 25 bp, Homo sapien
gatggggtgattcctatgagctctt

SEQ ID NO: 5632211 - DNA, 25 bp, Homo sapien
ctttcactgccaatgagagcgaatc

SEQ ID NO: 5632212 - DNA, 25 bp, Homo sapien
ttttgtaagcgaagaatcaagcatt

SEQ ID NO: 5632213 - DNA, 25 bp, Homo sapien
cagaagttttgtaagcgaagaatca

SEQ ID NO: 5632214 - DNA, 25 bp, Homo sapien
aaccaaaggaaagttagagtgatgt

SEQ ID NO: 5632215 - DNA, 25 bp, Homo sapien
aaagtgatgcttgctacaacatgac

SEQ ID NO: 5632216 - DNA, 25 bp, Homo sapien
aggaaagttagagtgatgtcatctc

SEQ ID NO: 5632217 - DNA, 25 bp, Homo sapien
gacaacagtgttctaagaaaacagt

SEQ ID NO: 5632218 - DNA, 25 bp, Homo sapien
atggctgatctatctgacaacagtg

SEQ ID NO: 5632219 - DNA, 25 bp, Homo sapien
cagccttataatagagatcagaaat

SEQ ID NO: 5632220 - DNA, 25 bp, Homo sapien
accatagttgttcaaaacagaagtt

SEQ ID NO: 5632221 - DNA, 25 bp, Homo sapien
aaaacaccaggcatggttgctcatg

SEQ ID NO: 5632222 - DNA, 25 bp, Homo sapien
tgtcatctctggttgaaaaacatag

SEQ ID NO: 5632223 - DNA, 25 bp, Homo sapien
agttaccagcatatggaactgggat

SEQ ID NO: 5632224 - DNA, 25 bp, Homo sapien
ctattggtagagatgaaagctaaag

SEQ ID NO: 5632225 - DNA, 25 bp, Homo sapien
aagctaaagcagaatgatggaatac

SEQ ID NO: 5632226 - DNA, 25 bp, Homo sapien
aatgatggaatacagttgatgaaac

SEQ ID NO: 5632227 - DNA, 25 bp, Homo sapien
acaggtgccactgtcaccacgcctg

SEQ ID NO: 5632228 - DNA, 25 bp, Homo sapien
gcagtggcgcaattttggcctactg

SEQ ID NO: 5632229 - DNA, 25 bp, Homo sapien
gatgtcaacacctaagggaatgttc

SEQ ID NO: 5632230 - DNA, 25 bp, Homo sapien
tagcttactgtcaggatgaagcctt

SEQ ID NO: 5632231 - DNA, 25 bp, Homo sapien
gaaccacacagcagagacaattgtc

SEQ ID NO: 5632232 - DNA, 25 bp, Homo sapien
cacaagtagctattggtagagatga

SEQ ID NO: 5632233 - DNA, 25 bp, Homo sapien
gaactgagttcactgatgtcaacac

SEQ ID NO: 5632234 - DNA, 25 bp, Homo sapien
ggtgtaccactttccatgaaggagt

SEQ ID NO: 5632235 - DNA, 25 bp, Homo sapien
actccttcatggaaagtggtacacc

SEQ ID NO: 5632236 - DNA, 25 bp, Homo sapien
aatacatggatatacacattgcatt

SEQ ID NO: 5632237 - DNA, 25 bp, Homo sapien
aatataactgggctgcaatcttcaa

SEQ ID NO: 5632238 - DNA, 25 bp, Homo sapien
tcttccttctgcaatacatggatat

SEQ ID NO: 5632239 - DNA, 25 bp, Homo sapien
tggatatacacattgcattgaagta

SEQ ID NO: 5632240 - DNA, 25 bp, Homo sapien
cctagggtttgatataagctcacat

SEQ ID NO: 5632241 - DNA, 25 bp, Homo sapien
taaagttgaatctcctagggtttga

SEQ ID NO: 5632242 - DNA, 25 bp, Homo sapien
agaggatggatcaattaagcacaga

SEQ ID NO: 5632243 - DNA, 25 bp, Homo sapien
aaatgtaaacagccacaaagcccag

SEQ ID NO: 5632244 - DNA, 25 bp, Homo sapien
gctcacatatctgcctttctccagc

SEQ ID NO: 5632245 - DNA, 25 bp, Homo sapien
tctccagcatctgccatccatgaaa

SEQ ID NO: 5632246 - DNA, 25 bp, Homo sapien
agcaaaatataactgggctgcaatc

SEQ ID NO: 5632247 - DNA, 25 bp, Homo sapien
tgccctgcggcctctgtgttctgcc

SEQ ID NO: 5632248 - DNA, 25 bp, Homo sapien
atggcatcaggctctagctgccttc

SEQ ID NO: 5632249 - DNA, 25 bp, Homo sapien
gcgcaatggcatcaggctctagctg

SEQ ID NO: 5632250 - DNA, 25 bp, Homo sapien
gcctctgccacgtgttctgacccca

SEQ ID NO: 5632251 - DNA, 25 bp, Homo sapien
tggtccaggcctctgccacgtgttc

SEQ ID NO: 5632252 - DNA, 25 bp, Homo sapien
tctgccacgtgttctgaccccaagc

SEQ ID NO: 5632253 - DNA, 25 bp, Homo sapien
cctgccctgcggcctctgtgttctg

SEQ ID NO: 5632254 - DNA, 25 bp, Homo sapien
caggcctctgccacgtgttctgacc

SEQ ID NO: 5632255 - DNA, 25 bp, Homo sapien
gtggtccaggcctctgccacgtgtt

SEQ ID NO: 5632256 - DNA, 25 bp, Homo sapien
tctgccttgccctttgatgaagtca

SEQ ID NO: 5632257 - DNA, 25 bp, Homo sapien
gcggcctctgtgttctgccttgccc

SEQ ID NO: 5632258 - DNA, 25 bp, Homo sapien
ggcactggttcaacaacgtaatttg

SEQ ID NO: 5632259 - DNA, 25 bp, Homo sapien
tctgtagtcttgtaagtctagtgat

SEQ ID NO: 5632260 - DNA, 25 bp, Homo sapien
attctccactggcaagcttcttcag

SEQ ID NO: 5632261 - DNA, 25 bp, Homo sapien
acgtaatttgtgtaactgagctttc

SEQ ID NO: 5632262 - DNA, 25 bp, Homo sapien
ttattgttttctgtgggttctgcct

SEQ ID NO: 5632263 - DNA, 25 bp, Homo sapien
cattatgggaagacagcattctgtt

SEQ ID NO: 5632264 - DNA, 25 bp, Homo sapien
gtttcctgggtaaactgccatcctc

SEQ ID NO: 5632265 - DNA, 25 bp, Homo sapien
gcttcttcagtattgtcattggctc

SEQ ID NO: 5632266 - DNA, 25 bp, Homo sapien
aagtctagtgataattgaatgccat

SEQ ID NO: 5632267 - DNA, 25 bp, Homo sapien
tgagagtatcattgcaaagctttgc

SEQ ID NO: 5632268 - DNA, 25 bp, Homo sapien
ggctctgtctgatccttactggttc

SEQ ID NO: 5632269 - DNA, 25 bp, Homo sapien
gagagggcaagctacttgcctgagc

SEQ ID NO: 5632270 - DNA, 25 bp, Homo sapien
tattgagaattgcaagccagcactt

SEQ ID NO: 5632271 - DNA, 25 bp, Homo sapien
cccatgcttttgaggacagggaaac

SEQ ID NO: 5632272 - DNA, 25 bp, Homo sapien
ctgagcaaacatagctcgcaggggg

SEQ ID NO: 5632273 - DNA, 25 bp, Homo sapien
ccagctgtgctgcccagcctccgtg

SEQ ID NO: 5632274 - DNA, 25 bp, Homo sapien
tgttcctgtggctcatggtacaacc

SEQ ID NO: 5632275 - DNA, 25 bp, Homo sapien
caacttgatgtttgaagggtgaggg

SEQ ID NO: 5632276 - DNA, 25 bp, Homo sapien
agcatccagaggggtctgcctttta

SEQ ID NO: 5632277 - DNA, 25 bp, Homo sapien
gctctcaagcccccagctgtgctgc

SEQ ID NO: 5632278 - DNA, 25 bp, Homo sapien
caccctgccaaatcactgcgtctgt

SEQ ID NO: 5632279 - DNA, 25 bp, Homo sapien
gagtggcttccgggctgtttattgt

SEQ ID NO: 5632280 - DNA, 25 bp, Homo sapien
tgggccacactgtcttgaaaagctg

SEQ ID NO: 5632281 - DNA, 25 bp, Homo sapien
gcagagccagcataacccaggtttt

SEQ ID NO: 5632282 - DNA, 25 bp, Homo sapien
tctggcttttcagtgaccacggggc

SEQ ID NO: 5632283 - DNA, 25 bp, Homo sapien
ttctctcggcctcaggaacaggaac

SEQ ID NO: 5632284 - DNA, 25 bp, Homo sapien
aggcacacagaggttgtatcacttg

SEQ ID NO: 5632285 - DNA, 25 bp, Homo sapien
acagcagcctggaagtaattcatca

SEQ ID NO: 5632286 - DNA, 25 bp, Homo sapien
gtgaccgcagcctctacccaccctg

SEQ ID NO: 5632287 - DNA, 25 bp, Homo sapien
tctgctgtcaggagttctctcggcc

SEQ ID NO: 5632288 - DNA, 25 bp, Homo sapien
atgcagggccaagattatgatcccc

SEQ ID NO: 5632289 - DNA, 25 bp, Homo sapien
accaagatatgcccactctgctgtc

SEQ ID NO: 5632290 - DNA, 25 bp, Homo sapien
aacgctcctgtaaggcatgcagggc

SEQ ID NO: 5632291 - DNA, 25 bp, Homo sapien
gcacccagacaaacaatgaataaag

SEQ ID NO: 5632292 - DNA, 25 bp, Homo sapien
catactgcagatgaacttgtagttc

SEQ ID NO: 5632293 - DNA, 25 bp, Homo sapien
aggttgggtccattaccaaatacta

SEQ ID NO: 5632294 - DNA, 25 bp, Homo sapien
attccaggcacaaaccaccgtgccc

SEQ ID NO: 5632295 - DNA, 25 bp, Homo sapien
aggtaatgatataaagcaacaattc

SEQ ID NO: 5632296 - DNA, 25 bp, Homo sapien
tgcccagccagcgcttcacttcttt

SEQ ID NO: 5632297 - DNA, 25 bp, Homo sapien
agaaagactgcctaaaaatattacc

SEQ ID NO: 5632298 - DNA, 25 bp, Homo sapien
actaagtcatgttgagaaaattatg

SEQ ID NO: 5632299 - DNA, 25 bp, Homo sapien
tgctcctagcacccagacaaacaat

SEQ ID NO: 5632300 - DNA, 25 bp, Homo sapien
atgtagagaccttaatcaaagactc

SEQ ID NO: 5632301 - DNA, 25 bp, Homo sapien
agaaggcctcctagtcaatagatcc

SEQ ID NO: 5632302 - DNA, 25 bp, Homo sapien
tctctgtgtctgcaatcccttctca

SEQ ID NO: 5632303 - DNA, 25 bp, Homo sapien
aatcaaaagagaattaaccaataac

SEQ ID NO: 5632304 - DNA, 25 bp, Homo sapien
atacacactgtaagccaacaattct

SEQ ID NO: 5632305 - DNA, 25 bp, Homo sapien
agagtcagctcctctggaaaggagt

SEQ ID NO: 5632306 - DNA, 25 bp, Homo sapien
cacactctgagtcatcacttccttc

SEQ ID NO: 5632307 - DNA, 25 bp, Homo sapien
ggagtcataacctgcaatgaaccca

SEQ ID NO: 5632308 - DNA, 25 bp, Homo sapien
aatgaacccaactctgtaacacaac

SEQ ID NO: 5632309 - DNA, 25 bp, Homo sapien
cagaatgacagtattaaaatgaaaa

SEQ ID NO: 5632310 - DNA, 25 bp, Homo sapien
ccattccatcgcataggatgttttc

SEQ ID NO: 5632311 - DNA, 25 bp, Homo sapien
cagataccacagatggactgcaaag

SEQ ID NO: 5632312 - DNA, 25 bp, Homo sapien
ttaaaatgaaaatgtgattagatca

SEQ ID NO: 5632313 - DNA, 25 bp, Homo sapien
gggtaccaagtgaggtccgacgaga

SEQ ID NO: 5632314 - DNA, 25 bp, Homo sapien
tctcgtcggacctcacttggtaccc

SEQ ID NO: 5632315 - DNA, 25 bp, Homo sapien
aaaacagttgagcattctgaatctg

SEQ ID NO: 5632316 - DNA, 25 bp, Homo sapien
tttttgccctgtgtattgccatata

SEQ ID NO: 5632317 - DNA, 25 bp, Homo sapien
tcctggtctcatcatttttgccctg

SEQ ID NO: 5632318 - DNA, 25 bp, Homo sapien
tcaaacatttggattagaatagtca

SEQ ID NO: 5632319 - DNA, 25 bp, Homo sapien
cttcacagagtaatacaggttgagt

SEQ ID NO: 5632320 - DNA, 25 bp, Homo sapien
tgaaatgcttgggactaaaagtgtt

SEQ ID NO: 5632321 - DNA, 25 bp, Homo sapien
gaaaatccaaaatctgaaatgctcc

SEQ ID NO: 5632322 - DNA, 25 bp, Homo sapien
ttggattagaatagtcaacctgtaa

SEQ ID NO: 5632323 - DNA, 25 bp, Homo sapien
atagaaaaacaggcaaaagataatt

SEQ ID NO: 5632324 - DNA, 25 bp, Homo sapien
tccttggaacattatgttggcactc

SEQ ID NO: 5632325 - DNA, 25 bp, Homo sapien
tacaggttgagtatctccctatttg

SEQ ID NO: 5632326 - DNA, 25 bp, Homo sapien
tctagggagaacacataaacacaga

SEQ ID NO: 5632327 - DNA, 25 bp, Homo sapien
aggactcacaagacaaacacagcct

SEQ ID NO: 5632328 - DNA, 25 bp, Homo sapien
gcattatgagtgctatttaagtcac

SEQ ID NO: 5632329 - DNA, 25 bp, Homo sapien
gcctagaactgtgcttacattgtgc

SEQ ID NO: 5632330 - DNA, 25 bp, Homo sapien
tacggatgatgctatctagggagaa

SEQ ID NO: 5632331 - DNA, 25 bp, Homo sapien
cacaagacaaacacagcctagaact

SEQ ID NO: 5632332 - DNA, 25 bp, Homo sapien
taagtcacttacggatgatgctatc

SEQ ID NO: 5632333 - DNA, 25 bp, Homo sapien
cagaagagttccaagaatcaaaccc

SEQ ID NO: 5632334 - DNA, 25 bp, Homo sapien
ctccaacatttggagggtggatcca

SEQ ID NO: 5632335 - DNA, 25 bp, Homo sapien
gaacccaaagtatccgagacaggtc

SEQ ID NO: 5632336 - DNA, 25 bp, Homo sapien
atcaaaccctaaggaactccaacat

SEQ ID NO: 5632337 - DNA, 25 bp, Homo sapien
ctgatggccataaacctctaaggtg

SEQ ID NO: 5632338 - DNA, 25 bp, Homo sapien
ccctcctaaaatccatgcttcctcc

SEQ ID NO: 5632339 - DNA, 25 bp, Homo sapien
ctctaaggtgttgtcatcctgaaaa

SEQ ID NO: 5632340 - DNA, 25 bp, Homo sapien
tataaaaggaaatatggtcataact

SEQ ID NO: 5632341 - DNA, 25 bp, Homo sapien
cttgttttccaaagagcaacctgtc

SEQ ID NO: 5632342 - DNA, 25 bp, Homo sapien
aagttatagggcatcgccacctagt

SEQ ID NO: 5632343 - DNA, 25 bp, Homo sapien
tagtagtaaattctcctgatggcca

SEQ ID NO: 5632344 - DNA, 25 bp, Homo sapien
taaaatcctgaaactaaataacatc

SEQ ID NO: 5632345 - DNA, 25 bp, Homo sapien
cttccatagtgctcgtgtgatgtac

SEQ ID NO: 5632346 - DNA, 25 bp, Homo sapien
gccacctagtggcagaatttcatgc

SEQ ID NO: 5632347 - DNA, 25 bp, Homo sapien
tggtatgtttaaagagtgagcaatc

SEQ ID NO: 5632348 - DNA, 25 bp, Homo sapien
attaaatcatgttgggagcagcaga

SEQ ID NO: 5632349 - DNA, 25 bp, Homo sapien
tgaagagatcaggaagactcatgta

SEQ ID NO: 5632350 - DNA, 25 bp, Homo sapien
acgtcaaaagaattctccccaaagc

SEQ ID NO: 5632351 - DNA, 25 bp, Homo sapien
aatgagataaccacataaaggtgct

SEQ ID NO: 5632352 - DNA, 25 bp, Homo sapien
agagaacaaacaagacaggtattaa

SEQ ID NO: 5632353 - DNA, 25 bp, Homo sapien
ataaaggtgctaatcatggagaatt

SEQ ID NO: 5632354 - DNA, 25 bp, Homo sapien
caaaccccgtttgaagagatcagga

SEQ ID NO: 5632355 - DNA, 25 bp, Homo sapien
agcagaaacaggttttcaagaaagt

SEQ ID NO: 5632356 - DNA, 25 bp, Homo sapien
gctcagtagccaagattaaatcatg

SEQ ID NO: 5632357 - DNA, 25 bp, Homo sapien
gaagactcatgtattccaggcaaca

SEQ ID NO: 5632358 - DNA, 25 bp, Homo sapien
catggatatattgggtataggtggg

SEQ ID NO: 5632359 - DNA, 25 bp, Homo sapien
tgattaaattgtgatggagccatac

SEQ ID NO: 5632360 - DNA, 25 bp, Homo sapien
ttagttggttctgcatgtatggttg

SEQ ID NO: 5632361 - DNA, 25 bp, Homo sapien
tttgtaggaacattggaacagatat

SEQ ID NO: 5632362 - DNA, 25 bp, Homo sapien
cagaaacaagtgtagaataaacaga

SEQ ID NO: 5632363 - DNA, 25 bp, Homo sapien
caaccaatgagcaattactgaaaat

SEQ ID NO: 5632364 - DNA, 25 bp, Homo sapien
agaataaacagaaacgtaccatcgt

SEQ ID NO: 5632365 - DNA, 25 bp, Homo sapien
ctcgacatgttggaggaaaaatgga

SEQ ID NO: 5632366 - DNA, 25 bp, Homo sapien
atgtagttaccagaagaattagttg

SEQ ID NO: 5632367 - DNA, 25 bp, Homo sapien
ccaaatgaggtatgcctatgattaa

SEQ ID NO: 5632368 - DNA, 25 bp, Homo sapien
ttggaacagatatgtagactcgaca

SEQ ID NO: 5632369 - DNA, 25 bp, Homo sapien
gcttgaggccaaaaatcactttgag

SEQ ID NO: 5632370 - DNA, 25 bp, Homo sapien
gcaaaaggaggctgaactcatcctt

SEQ ID NO: 5632371 - DNA, 25 bp, Homo sapien
acctactcctgcaataacaagccca

SEQ ID NO: 5632372 - DNA, 25 bp, Homo sapien
gtggccatcaccattctggaggatg

SEQ ID NO: 5632373 - DNA, 25 bp, Homo sapien
tcaccattctggaggatgagaagtt

SEQ ID NO: 5632374 - DNA, 25 bp, Homo sapien
attctggaggatgagaagttcaata

SEQ ID NO: 5632375 - DNA, 25 bp, Homo sapien
ctgcatcatcccatgaaagaagggc

SEQ ID NO: 5632376 - DNA, 25 bp, Homo sapien
acttccacgataatagcattgatct

SEQ ID NO: 5632377 - DNA, 25 bp, Homo sapien
aagcccacttccacgataatagcat

SEQ ID NO: 5632378 - DNA, 25 bp, Homo sapien
tactcctgcaataacaagcccactt

SEQ ID NO: 5632379 - DNA, 25 bp, Homo sapien
atcccatgaaagaagggcaaaaaga

SEQ ID NO: 5632380 - DNA, 25 bp, Homo sapien
tatcaagttgctggcatctggcaag

SEQ ID NO: 5632381 - DNA, 25 bp, Homo sapien
acacaaagaacctgtggtatttaac

SEQ ID NO: 5632382 - DNA, 25 bp, Homo sapien
gaaatgcgtttttgatggtggtgac

SEQ ID NO: 5632383 - DNA, 25 bp, Homo sapien
tggtgactggtgtgacctgcatttt

SEQ ID NO: 5632384 - DNA, 25 bp, Homo sapien
ggaaatgcacaaaaaggaagcaaac

SEQ ID NO: 5632385 - DNA, 25 bp, Homo sapien
agagcgtaacaaaggtcaaagtcat

SEQ ID NO: 5632386 - DNA, 25 bp, Homo sapien
aatgtacagaagcctgaaatgcgtt

SEQ ID NO: 5632387 - DNA, 25 bp, Homo sapien
gtcaaagtcatcagacctagtctag

SEQ ID NO: 5632388 - DNA, 25 bp, Homo sapien
cctgcattttccaaggtggtgtcac

SEQ ID NO: 5632389 - DNA, 25 bp, Homo sapien
ctgctattagcgaccaatgttttcc

SEQ ID NO: 5632390 - DNA, 25 bp, Homo sapien
aaggaagcaaactcttcgaaaattc

SEQ ID NO: 5632391 - DNA, 25 bp, Homo sapien
taaaaatcatcaatagaactcactc

SEQ ID NO: 5632392 - DNA, 25 bp, Homo sapien
tcagttagccgtagctgccatatcc

SEQ ID NO: 5632393 - DNA, 25 bp, Homo sapien
gagagagaaggaaattgtcttctta

SEQ ID NO: 5632394 - DNA, 25 bp, Homo sapien
gccatatccggcatcctagaacatt

SEQ ID NO: 5632395 - DNA, 25 bp, Homo sapien
cctgtgcaagtcacatggcaaattc

SEQ ID NO: 5632396 - DNA, 25 bp, Homo sapien
ccgggtgaatggccatcaccagaga

SEQ ID NO: 5632397 - DNA, 25 bp, Homo sapien
agagagccacatcaggctggtctga

SEQ ID NO: 5632398 - DNA, 25 bp, Homo sapien
attcactgtgtcaatgggagaccct

SEQ ID NO: 5632399 - DNA, 25 bp, Homo sapien
gccatcaccagagatcaacccaggg

SEQ ID NO: 5632400 - DNA, 25 bp, Homo sapien
gagcttctgacacctcccagggcac

SEQ ID NO: 5632401 - DNA, 25 bp, Homo sapien
cggattaaaggattgtgttctgtgt

SEQ ID NO: 5632402 - DNA, 25 bp, Homo sapien
tctgagtgtaaactgctccagtcct

SEQ ID NO: 5632403 - DNA, 25 bp, Homo sapien
cacgattgatttgtactgagttgac

SEQ ID NO: 5632404 - DNA, 25 bp, Homo sapien
aatgagcatagagcagttactcctc

SEQ ID NO: 5632405 - DNA, 25 bp, Homo sapien
aaggaatgagtgcaagtaaattgcc

SEQ ID NO: 5632406 - DNA, 25 bp, Homo sapien
atcactgacttgcatcgtggtttgc

SEQ ID NO: 5632407 - DNA, 25 bp, Homo sapien
aaagaattaagtaaggaatgagtgc

SEQ ID NO: 5632408 - DNA, 25 bp, Homo sapien
gcaagccagcaagcatgtgaataac

SEQ ID NO: 5632409 - DNA, 25 bp, Homo sapien
aagtaaattgccagggctgtcactt

SEQ ID NO: 5632410 - DNA, 25 bp, Homo sapien
actgagttgactttgcaaatctgat

SEQ ID NO: 5632411 - DNA, 25 bp, Homo sapien
ccttttgtgtggcctatactctccc

SEQ ID NO: 5632412 - DNA, 25 bp, Homo sapien
cccagttttaagaagcagttaccca

SEQ ID NO: 5632413 - DNA, 25 bp, Homo sapien
taagaagcagttacccagatgcctt

SEQ ID NO: 5632414 - DNA, 25 bp, Homo sapien
tgagctaccaggcctggccaaattc

SEQ ID NO: 5632415 - DNA, 25 bp, Homo sapien
tagaagcctactagagccttgaatt

SEQ ID NO: 5632416 - DNA, 25 bp, Homo sapien
cccaaggacaggatctgtgccttca

SEQ ID NO: 5632417 - DNA, 25 bp, Homo sapien
ccaagagcactctaaatgcctttcc

SEQ ID NO: 5632418 - DNA, 25 bp, Homo sapien
tgattctaagatagcactggcaaac

SEQ ID NO: 5632419 - DNA, 25 bp, Homo sapien
attaagcagattataactgagttgt

SEQ ID NO: 5632420 - DNA, 25 bp, Homo sapien
atgaaccagtgcacaaggtagttta

SEQ ID NO: 5632421 - DNA, 25 bp, Homo sapien
tgtattagaaattcctgggcacatc

SEQ ID NO: 5632422 - DNA, 25 bp, Homo sapien
tcttccaaggcagtattccccaaac

SEQ ID NO: 5632423 - DNA, 25 bp, Homo sapien
ttgaaccaaatatgaaccagtgcac

SEQ ID NO: 5632424 - DNA, 25 bp, Homo sapien
agcactggcaaactaaacaagatct

SEQ ID NO: 5632425 - DNA, 25 bp, Homo sapien
gtgagagagggcactcttgttttgt

SEQ ID NO: 5632426 - DNA, 25 bp, Homo sapien
tctgatgtgaaattatgtgatggta

SEQ ID NO: 5632427 - DNA, 25 bp, Homo sapien
ccttctgaaggagcttatgcaattc

SEQ ID NO: 5632428 - DNA, 25 bp, Homo sapien
ctgtggacatgttgagattcacctc

SEQ ID NO: 5632429 - DNA, 25 bp, Homo sapien
cttgacttggctctcgggttgaata

SEQ ID NO: 5632430 - DNA, 25 bp, Homo sapien
acacttgtagtgacatctgatgtga

SEQ ID NO: 5632431 - DNA, 25 bp, Homo sapien
ttggtatatagaaaggctactgatc

SEQ ID NO: 5632432 - DNA, 25 bp, Homo sapien
cagctttagtcagaagatacaatta

SEQ ID NO: 5632433 - DNA, 25 bp, Homo sapien
agttgtctatcaggtccaggaggct

SEQ ID NO: 5632434 - DNA, 25 bp, Homo sapien
ttcaaaaggctgattgctctggctc

SEQ ID NO: 5632435 - DNA, 25 bp, Homo sapien
agaagatacaattaaggtcagatac

SEQ ID NO: 5632436 - DNA, 25 bp, Homo sapien
agctttggctgctaaggaactcgag

SEQ ID NO: 5632437 - DNA, 25 bp, Homo sapien
gccccccagcgaagctttggctgct

SEQ ID NO: 5632438 - DNA, 25 bp, Homo sapien
cgaatttgggcttcgagcctgggaa

SEQ ID NO: 5632439 - DNA, 25 bp, Homo sapien
cccagtcgaatttgggcttcgagcc

SEQ ID NO: 5632440 - DNA, 25 bp, Homo sapien
tcgagaaacctctcccaaggggcga

SEQ ID NO: 5632441 - DNA, 25 bp, Homo sapien
cgggagcgctaacccagtcgaattt

SEQ ID NO: 5632442 - DNA, 25 bp, Homo sapien
ttttacacagcaggctcagaccgga

SEQ ID NO: 5632443 - DNA, 25 bp, Homo sapien
tccgccagccccgttgaagcggaag

SEQ ID NO: 5632444 - DNA, 25 bp, Homo sapien
ttgcttcaggacctcggcgtaagag

SEQ ID NO: 5632445 - DNA, 25 bp, Homo sapien
cacctccctcggcttcctgtgcccc

SEQ ID NO: 5632446 - DNA, 25 bp, Homo sapien
gcttcctgtgcccctcgagaaacct

SEQ ID NO: 5632447 - DNA, 25 bp, Homo sapien
atcattgatttggtagagtcagtac

SEQ ID NO: 5632448 - DNA, 25 bp, Homo sapien
ctagctaaaagaacacttggcaaac

SEQ ID NO: 5632449 - DNA, 25 bp, Homo sapien
aactaaaaggctatcattccaaatg

SEQ ID NO: 5632450 - DNA, 25 bp, Homo sapien
accaaaagtaagtctggaatgggca

SEQ ID NO: 5632451 - DNA, 25 bp, Homo sapien
atgattgggtctagtttgtagtacc

SEQ ID NO: 5632452 - DNA, 25 bp, Homo sapien
tttgtagtacccccggcagaatatc

SEQ ID NO: 5632453 - DNA, 25 bp, Homo sapien
ccggcagaatatcaaggtctcacca

SEQ ID NO: 5632454 - DNA, 25 bp, Homo sapien
caagcaagtaagcaatgattgggtc

SEQ ID NO: 5632455 - DNA, 25 bp, Homo sapien
ctccaagatggaattcagatgttct

SEQ ID NO: 5632456 - DNA, 25 bp, Homo sapien
ttggtagagtcagtactttagtgtc

SEQ ID NO: 5632457 - DNA, 25 bp, Homo sapien
agtctcagcatacactgcagtcact

SEQ ID NO: 5632458 - DNA, 25 bp, Homo sapien
agactctactaggtgatcagaaatc

SEQ ID NO: 5632459 - DNA, 25 bp, Homo sapien
ggcctgccccttggtgacctccttc

SEQ ID NO: 5632460 - DNA, 25 bp, Homo sapien
tccctgcaagctagttggggaggga

SEQ ID NO: 5632461 - DNA, 25 bp, Homo sapien
tcaagtacttggctcacaacagcac

SEQ ID NO: 5632462 - DNA, 25 bp, Homo sapien
acctgggtcacaggaaccataggga

SEQ ID NO: 5632463 - DNA, 25 bp, Homo sapien
cacataaagcctggcctgccccttg

SEQ ID NO: 5632464 - DNA, 25 bp, Homo sapien
taggtgatcagaaatccctgcaagc

SEQ ID NO: 5632465 - DNA, 25 bp, Homo sapien
cttcccttacgcctctagactctac

SEQ ID NO: 5632466 - DNA, 25 bp, Homo sapien
gatggtaccgtgtgctaaccccact

SEQ ID NO: 5632467 - DNA, 25 bp, Homo sapien
acaacagcactattcacataaagcc

SEQ ID NO: 5632468 - DNA, 25 bp, Homo sapien
ccactctgagacaaacctgggtcac

SEQ ID NO: 5632469 - DNA, 25 bp, Homo sapien
ttggcagaatcaacctggaatcctg

SEQ ID NO: 5632470 - DNA, 25 bp, Homo sapien
attactgcaagagtctcgagcatcc

SEQ ID NO: 5632471 - DNA, 25 bp, Homo sapien
ctcacatttggcagaatcaacctgg

SEQ ID NO: 5632472 - DNA, 25 bp, Homo sapien
ataagactatcagggaaatataatt

SEQ ID NO: 5632473 - DNA, 25 bp, Homo sapien
ttctagtctcacctgagtgcctcac

SEQ ID NO: 5632474 - DNA, 25 bp, Homo sapien
tgctcataagactatcagggaaata

SEQ ID NO: 5632475 - DNA, 25 bp, Homo sapien
gcaagagtctcgagcatcctgctgt

SEQ ID NO: 5632476 - DNA, 25 bp, Homo sapien
catttggcagaatcaacctggaatc

SEQ ID NO: 5632477 - DNA, 25 bp, Homo sapien
actgcaagagtctcgagcatcctgc

SEQ ID NO: 5632478 - DNA, 25 bp, Homo sapien
ctggaatcctgctcataagactatc

SEQ ID NO: 5632479 - DNA, 25 bp, Homo sapien
tgagtgcctcacatttggcagaatc

SEQ ID NO: 5632480 - DNA, 25 bp, Homo sapien
gagggtggtcagcctgtgaccacta

SEQ ID NO: 5632481 - DNA, 25 bp, Homo sapien
aaggccaaggaagaatcccatattc

SEQ ID NO: 5632482 - DNA, 25 bp, Homo sapien
tctctgggtctttgaaattcttaac

SEQ ID NO: 5632483 - DNA, 25 bp, Homo sapien
tcccatattcacggagggtggtcag

SEQ ID NO: 5632484 - DNA, 25 bp, Homo sapien
atgaaaaagatgcccttctccactt

SEQ ID NO: 5632485 - DNA, 25 bp, Homo sapien
tcccctgaggtgtatgaaaaagatg

SEQ ID NO: 5632486 - DNA, 25 bp, Homo sapien
gaatgccagaaagtaataagctaat

SEQ ID NO: 5632487 - DNA, 25 bp, Homo sapien
actagaaaggcacacagtaacattt

SEQ ID NO: 5632488 - DNA, 25 bp, Homo sapien
gtgaccactagaaaggcacacagta

SEQ ID NO: 5632489 - DNA, 25 bp, Homo sapien
ttaacagtcagattcgcagtgcagc

SEQ ID NO: 5632490 - DNA, 25 bp, Homo sapien
cagtgacttgtgtgaatgccagaaa

SEQ ID NO: 5632491 - DNA, 25 bp, Homo sapien
gaaatggtggcaaaggaattcttgc

SEQ ID NO: 5632492 - DNA, 25 bp, Homo sapien
ccagataccaagaattgaggcgatt

SEQ ID NO: 5632493 - DNA, 25 bp, Homo sapien
gctgcttggtatactgaagatgggc

SEQ ID NO: 5632494 - DNA, 25 bp, Homo sapien
ggtgagcataacagagttacctctc

SEQ ID NO: 5632495 - DNA, 25 bp, Homo sapien
gaggcgattatgccctgcatgctgc

SEQ ID NO: 5632496 - DNA, 25 bp, Homo sapien
ctgtagacaaacaacccagggattg

SEQ ID NO: 5632497 - DNA, 25 bp, Homo sapien
aaagccacctgaaccctggacagct

SEQ ID NO: 5632498 - DNA, 25 bp, Homo sapien
tattcagactgcaaggacactggct

SEQ ID NO: 5632499 - DNA, 25 bp, Homo sapien
catctccaggcaagttgaagcatgt

SEQ ID NO: 5632500 - DNA, 25 bp, Homo sapien
tccgcctgactagagaaatggtggc

SEQ ID NO: 5632501 - DNA, 25 bp, Homo sapien
aggacactggctcccaagcttcgac

SEQ ID NO: 5632502 - DNA, 25 bp, Homo sapien
tcctcctcaaaggggctctgaagtc

SEQ ID NO: 5632503 - DNA, 25 bp, Homo sapien
gggaatcccaacacagtggctgaga

SEQ ID NO: 5632504 - DNA, 25 bp, Homo sapien
agcctgcacactcaagcctgggtat

SEQ ID NO: 5632505 - DNA, 25 bp, Homo sapien
gatggtcctcatcatggatcctttt

SEQ ID NO: 5632506 - DNA, 25 bp, Homo sapien
gaggtgacatgcagcctgcacactc

SEQ ID NO: 5632507 - DNA, 25 bp, Homo sapien
caaaagccctgtggtatttcctccc

SEQ ID NO: 5632508 - DNA, 25 bp, Homo sapien
gaccagtgtcactaccagccaggtg

SEQ ID NO: 5632509 - DNA, 25 bp, Homo sapien
ctgaagtcaccatgtgtgggaggtg

SEQ ID NO: 5632510 - DNA, 25 bp, Homo sapien
aggagccaggcctcagccattcttt

SEQ ID NO: 5632511 - DNA, 25 bp, Homo sapien
gcccccatgcctcgctgtgctctgc

SEQ ID NO: 5632512 - DNA, 25 bp, Homo sapien
tcctcccatccgctgtccctcctcc

SEQ ID NO: 5632513 - DNA, 25 bp, Homo sapien
aaccaaagcaacaactccgcaagtt

SEQ ID NO: 5632514 - DNA, 25 bp, Homo sapien
caggtttttgtgggcatgtaagttt

SEQ ID NO: 5632515 - DNA, 25 bp, Homo sapien
ttcaaagaactatgtgtgatggctt

SEQ ID NO: 5632516 - DNA, 25 bp, Homo sapien
gctaggaacttccatatacaggttt

SEQ ID NO: 5632517 - DNA, 25 bp, Homo sapien
ttaatgcaaatacaaagatctgaat

SEQ ID NO: 5632518 - DNA, 25 bp, Homo sapien
tatctaggataaatgctcaagagtg

SEQ ID NO: 5632519 - DNA, 25 bp, Homo sapien
taaatagtatgtataataaggatgc

SEQ ID NO: 5632520 - DNA, 25 bp, Homo sapien
tctgtaaccaaagcaacaactccgc

SEQ ID NO: 5632521 - DNA, 25 bp, Homo sapien
tcttttccagagtagctgtaccatt

SEQ ID NO: 5632522 - DNA, 25 bp, Homo sapien
atgtataataaggatgctaggaact

SEQ ID NO: 5632523 - DNA, 25 bp, Homo sapien
aaactcagacattaatgcaaataca

SEQ ID NO: 5632524 - DNA, 25 bp, Homo sapien
aagtttggtcctaaaagccagagac

SEQ ID NO: 5632525 - DNA, 25 bp, Homo sapien
gtctctggcttttaggaccaaactt

SEQ ID NO: 5632526 - DNA, 25 bp, Homo sapien
agatgaaaatgtaaggtcacaggtt

SEQ ID NO: 5632527 - DNA, 25 bp, Homo sapien
ttttcagatgaaaatgtaaggtcac

SEQ ID NO: 5632528 - DNA, 25 bp, Homo sapien
agcagaattgcttaataatacaagt

SEQ ID NO: 5632529 - DNA, 25 bp, Homo sapien
acttaagtgtgccaaaaaagcaaac

SEQ ID NO: 5632530 - DNA, 25 bp, Homo sapien
caaaacaaagaatgttaggactagc

SEQ ID NO: 5632531 - DNA, 25 bp, Homo sapien
ggcaattggtgtccagcccctgctt

SEQ ID NO: 5632532 - DNA, 25 bp, Homo sapien
gaatgttaggactagcaatagcttc

SEQ ID NO: 5632533 - DNA, 25 bp, Homo sapien
ctcattacaatggtagagacagaaa

SEQ ID NO: 5632534 - DNA, 25 bp, Homo sapien
caattaaaaagtgacaggtgaggtt

SEQ ID NO: 5632535 - DNA, 25 bp, Homo sapien
ataatacaagttaggcaatatagta

SEQ ID NO: 5632536 - DNA, 25 bp, Homo sapien
atagcttcatagggcaattggtgtc

SEQ ID NO: 5632537 - DNA, 25 bp, Homo sapien
agttgaatagacaaacaaataacaa

SEQ ID NO: 5632538 - DNA, 25 bp, Homo sapien
tccccttacagttacatttatgatt

SEQ ID NO: 5632539 - DNA, 25 bp, Homo sapien
aagggaaatggttccagaagaaaca

SEQ ID NO: 5632540 - DNA, 25 bp, Homo sapien
gggaaatggttccagaagaaacatc

SEQ ID NO: 5632541 - DNA, 25 bp, Homo sapien
gattatattgcaggtgttaaaagaa

SEQ ID NO: 5632542 - DNA, 25 bp, Homo sapien
aggaaagttgaatagacaaacaaat

SEQ ID NO: 5632543 - DNA, 25 bp, Homo sapien
catttatgattatattgcaggtgtt

SEQ ID NO: 5632544 - DNA, 25 bp, Homo sapien
ggaggaaagttgaatagacaaacaa

SEQ ID NO: 5632545 - DNA, 25 bp, Homo sapien
agaatgattcacgaatcaggcagtg

SEQ ID NO: 5632546 - DNA, 25 bp, Homo sapien
aggaagttccaaaggacatatttta

SEQ ID NO: 5632547 - DNA, 25 bp, Homo sapien
catattttaggaagaagggaaatgg

SEQ ID NO: 5632548 - DNA, 25 bp, Homo sapien
tctagaataggctgaagaaatattg

SEQ ID NO: 5632549 - DNA, 25 bp, Homo sapien
agagtgcaagaaagaaatgatttat

SEQ ID NO: 5632550 - DNA, 25 bp, Homo sapien
ttactaaagagagtgcaagaaagaa

SEQ ID NO: 5632551 - DNA, 25 bp, Homo sapien
tcattacacgtagtacatgtgcatt

SEQ ID NO: 5632552 - DNA, 25 bp, Homo sapien
taaaagtgacagatatgctaattat

SEQ ID NO: 5632553 - DNA, 25 bp, Homo sapien
atgaaaactggttgaatatcacaag

SEQ ID NO: 5632554 - DNA, 25 bp, Homo sapien
tgcattaaaatgccagactgtactc

SEQ ID NO: 5632555 - DNA, 25 bp, Homo sapien
aatataataatgaccaaaaattcct

SEQ ID NO: 5632556 - DNA, 25 bp, Homo sapien
gccagactgtactccataaatatgc

SEQ ID NO: 5632557 - DNA, 25 bp, Homo sapien
attaagttactaaagagagtgcaag

SEQ ID NO: 5632558 - DNA, 25 bp, Homo sapien
aacctttgtcatatgtgataacatc

SEQ ID NO: 5632559 - DNA, 25 bp, Homo sapien
gtgatttgcacgtggctctgacttc

SEQ ID NO: 5632560 - DNA, 25 bp, Homo sapien
agtatagagacttcattgtagccat

SEQ ID NO: 5632561 - DNA, 25 bp, Homo sapien
agaaaaggtatcaaaccataatcat

SEQ ID NO: 5632562 - DNA, 25 bp, Homo sapien
gctctgacttcgttgggccctagcc

SEQ ID NO: 5632563 - DNA, 25 bp, Homo sapien
tgaatagcgctgcaaagaacatcct

SEQ ID NO: 5632564 - DNA, 25 bp, Homo sapien
aaatggattttgaaacagaacttac

SEQ ID NO: 5632565 - DNA, 25 bp, Homo sapien
tctgggtgactctcttcagagcaaa

SEQ ID NO: 5632566 - DNA, 25 bp, Homo sapien
ccgtttaacatagagtgatttgcac

SEQ ID NO: 5632567 - DNA, 25 bp, Homo sapien
atgtcacacatactgtggcattctc

SEQ ID NO: 5632568 - DNA, 25 bp, Homo sapien
gctgcaaagaacatccttgtggctt

SEQ ID NO: 5632569 - DNA, 25 bp, Homo sapien
tggtgaagtttgtattaaaatggat

SEQ ID NO: 5632570 - DNA, 25 bp, Homo sapien
atgtatctacccaagagggaacata

SEQ ID NO: 5632571 - DNA, 25 bp, Homo sapien
cattgaaatggggccaacttatacc

SEQ ID NO: 5632572 - DNA, 25 bp, Homo sapien
tccccacgagcgaacatctgggaca

SEQ ID NO: 5632573 - DNA, 25 bp, Homo sapien
ggaagtagtggtcagacagctgacc

SEQ ID NO: 5632574 - DNA, 25 bp, Homo sapien
caccaaacgctctatgtaatgctct

SEQ ID NO: 5632575 - DNA, 25 bp, Homo sapien
aagtggatagagtgaagccttccac

SEQ ID NO: 5632576 - DNA, 25 bp, Homo sapien
gccactttaggtgacgttgcagctc

SEQ ID NO: 5632577 - DNA, 25 bp, Homo sapien
ccttgtcggaagagtcttctgaacc

SEQ ID NO: 5632578 - DNA, 25 bp, Homo sapien
tgacgttgcagctcacaaacttgtg

SEQ ID NO: 5632579 - DNA, 25 bp, Homo sapien
gggagaggcctgcactatttgaaat

SEQ ID NO: 5632580 - DNA, 25 bp, Homo sapien
ctatttgaaatgtggtgaggaaaaa

SEQ ID NO: 5632581 - DNA, 25 bp, Homo sapien
ttgcagaaacaatcattgctagtac

SEQ ID NO: 5632582 - DNA, 25 bp, Homo sapien
ttgagatagtcctgtgcaaaaggct

SEQ ID NO: 5632583 - DNA, 25 bp, Homo sapien
catccatctgccaagaaaaactctg

SEQ ID NO: 5632584 - DNA, 25 bp, Homo sapien
ttgagaactaacactggaaagctat

SEQ ID NO: 5632585 - DNA, 25 bp, Homo sapien
ccaggccctgccactcgctaaatgt

SEQ ID NO: 5632586 - DNA, 25 bp, Homo sapien
atcaaataaggaaaaatggtatttc

SEQ ID NO: 5632587 - DNA, 25 bp, Homo sapien
actttaagaggcaatacagcagaga

SEQ ID NO: 5632588 - DNA, 25 bp, Homo sapien
gcaatacagcagagagttgaacaga

SEQ ID NO: 5632589 - DNA, 25 bp, Homo sapien
gtgattttggttatgctggtgtatt

SEQ ID NO: 5632590 - DNA, 25 bp, Homo sapien
agcttcttagggtttgagatagtcc

SEQ ID NO: 5632591 - DNA, 25 bp, Homo sapien
gagttgaacagactcccatccaggc

SEQ ID NO: 5632592 - DNA, 25 bp, Homo sapien
tgccggtgccgagtccctgtgcctc

SEQ ID NO: 5632593 - DNA, 25 bp, Homo sapien
gaggcacagggactcggcaccggca

SEQ ID NO: 5632594 - DNA, 25 bp, Homo sapien
tcacataaagcaagaggctagtttc

SEQ ID NO: 5632595 - DNA, 25 bp, Homo sapien
gaggctggactacagatgcaactgt

SEQ ID NO: 5632596 - DNA, 25 bp, Homo sapien
aaggagagctctatctgagcaggac

SEQ ID NO: 5632597 - DNA, 25 bp, Homo sapien
aactctactgagaaggaaagatttc

SEQ ID NO: 5632598 - DNA, 25 bp, Homo sapien
gagacaagtgggatctgcttatttt

SEQ ID NO: 5632599 - DNA, 25 bp, Homo sapien
ttcagctgcaagggcaactctactg

SEQ ID NO: 5632600 - DNA, 25 bp, Homo sapien
ggctcactagtaaagagatggaaga

SEQ ID NO: 5632601 - DNA, 25 bp, Homo sapien
ctggctacccagttaacggcaaaaa

SEQ ID NO: 5632602 - DNA, 25 bp, Homo sapien
ccaaacctgagtattgaggctggac

SEQ ID NO: 5632603 - DNA, 25 bp, Homo sapien
gataagacatcttgagttgggtcct

SEQ ID NO: 5632604 - DNA, 25 bp, Homo sapien
ggtttgaggatttcacaaggagagc

SEQ ID NO: 5632605 - DNA, 25 bp, Homo sapien
cttcttcgtctccagccgatggtgc

SEQ ID NO: 5632606 - DNA, 25 bp, Homo sapien
ggacagcgctttctacccaatcagg

SEQ ID NO: 5632607 - DNA, 25 bp, Homo sapien
tcaccttcaagagatttccggaccc

SEQ ID NO: 5632608 - DNA, 25 bp, Homo sapien
gtctccagccgatggtgctggctgc

SEQ ID NO: 5632609 - DNA, 25 bp, Homo sapien
attatgaagaagactcgcctgttgg

SEQ ID NO: 5632610 - DNA, 25 bp, Homo sapien
gtaggttattatgaagaagactcgc

SEQ ID NO: 5632611 - DNA, 25 bp, Homo sapien
accgtttatcttgcttggattcacc

SEQ ID NO: 5632612 - DNA, 25 bp, Homo sapien
attatctctgagtaggttattatga

SEQ ID NO: 5632613 - DNA, 25 bp, Homo sapien
cgcgcctcctctccgcaccgtttat

SEQ ID NO: 5632614 - DNA, 25 bp, Homo sapien
cctgttgggacagcgctttctaccc

SEQ ID NO: 5632615 - DNA, 25 bp, Homo sapien
tttccggacccatcaaacagccgcc

SEQ ID NO: 5632616 - DNA, 25 bp, Homo sapien
cccaaaggaagtgattgcaacacca

SEQ ID NO: 5632617 - DNA, 25 bp, Homo sapien
aggaagtgattgcaacaccaatggc

SEQ ID NO: 5632618 - DNA, 25 bp, Homo sapien
ataactctaagtaagaacaccatcc

SEQ ID NO: 5632619 - DNA, 25 bp, Homo sapien
aagttattcaacacaggctgtctac

SEQ ID NO: 5632620 - DNA, 25 bp, Homo sapien
tttgggtctttggatgctgacattc

SEQ ID NO: 5632621 - DNA, 25 bp, Homo sapien
tgctcttagtaacatgacaggtttt

SEQ ID NO: 5632622 - DNA, 25 bp, Homo sapien
tgaaggagagactaattatgaatgc

SEQ ID NO: 5632623 - DNA, 25 bp, Homo sapien
tgaaatttgtggaagactaagttat

SEQ ID NO: 5632624 - DNA, 25 bp, Homo sapien
tctgtgctaaccaagtagtttaatc

SEQ ID NO: 5632625 - DNA, 25 bp, Homo sapien
aatgttcaactaaagtgtgtctgtg

SEQ ID NO: 5632626 - DNA, 25 bp, Homo sapien
aatattcagtctgaaggagagacta

SEQ ID NO: 5632627 - DNA, 25 bp, Homo sapien
taaacatttgtgcgctcctgacccc

SEQ ID NO: 5632628 - DNA, 25 bp, Homo sapien
gtgactcacgtggagtataaacatt

SEQ ID NO: 5632629 - DNA, 25 bp, Homo sapien
gcagaagctctccggatatccagcc

SEQ ID NO: 5632630 - DNA, 25 bp, Homo sapien
aaggagaacgcgtgcttccaattcg

SEQ ID NO: 5632631 - DNA, 25 bp, Homo sapien
tcagatagaggatgactcaggctga

SEQ ID NO: 5632632 - DNA, 25 bp, Homo sapien
ctctgtggggctcccctacgtgtct

SEQ ID NO: 5632633 - DNA, 25 bp, Homo sapien
gatgactcaggctgatggcaacaga

SEQ ID NO: 5632634 - DNA, 25 bp, Homo sapien
ccgctccgggaaaatgtcccgctct

SEQ ID NO: 5632635 - DNA, 25 bp, Homo sapien
tctaacatcccgtggagagcagaag

SEQ ID NO: 5632636 - DNA, 25 bp, Homo sapien
tctcagacgatctgggtgatcacat

SEQ ID NO: 5632637 - DNA, 25 bp, Homo sapien
cttgacactccttccaccccgctcc

SEQ ID NO: 5632638 - DNA, 25 bp, Homo sapien
agtcaaatacccagacaatgaaagc

SEQ ID NO: 5632639 - DNA, 25 bp, Homo sapien
aataacagacatactgaataggctt

SEQ ID NO: 5632640 - DNA, 25 bp, Homo sapien
agtcactttcaatgcatgcccctgc

SEQ ID NO: 5632641 - DNA, 25 bp, Homo sapien
actgtagggtagtgttgctcagtca

SEQ ID NO: 5632642 - DNA, 25 bp, Homo sapien
tggctgccttaagatacaggctaac

SEQ ID NO: 5632643 - DNA, 25 bp, Homo sapien
caacataatgcctgctctgcctaag

SEQ ID NO: 5632644 - DNA, 25 bp, Homo sapien
cccagagattccgatatgctcctct

SEQ ID NO: 5632645 - DNA, 25 bp, Homo sapien
ttagagggctagacaaataattctt

SEQ ID NO: 5632646 - DNA, 25 bp, Homo sapien
agatacaggctaacagtcaaatacc

SEQ ID NO: 5632647 - DNA, 25 bp, Homo sapien
gctagaagccaattagagtttgact

SEQ ID NO: 5632648 - DNA, 25 bp, Homo sapien
gcaaatcatattttagagggctaga

SEQ ID NO: 5632649 - DNA, 25 bp, Homo sapien
taaatctaatagttaatggcagaac

SEQ ID NO: 5632650 - DNA, 25 bp, Homo sapien
ggaaaggtcttcattaagaatgttc

SEQ ID NO: 5632651 - DNA, 25 bp, Homo sapien
ctaatagttaatggcagaacactag

SEQ ID NO: 5632652 - DNA, 25 bp, Homo sapien
aaaactgctctagtgaagctgaggc

SEQ ID NO: 5632653 - DNA, 25 bp, Homo sapien
ctcaaaccttcaaccaataaatcta

SEQ ID NO: 5632654 - DNA, 25 bp, Homo sapien
tgttcattaacatcaggaaaaaaga

SEQ ID NO: 5632655 - DNA, 25 bp, Homo sapien
aacattcctcattaacggaaaggtc

SEQ ID NO: 5632656 - DNA, 25 bp, Homo sapien
aaagaaatctctcaaaccttcaacc

SEQ ID NO: 5632657 - DNA, 25 bp, Homo sapien
aacatcaggaaaaaagaaatctctc

SEQ ID NO: 5632658 - DNA, 25 bp, Homo sapien
ctgctctagtgaagctgaggcagga

SEQ ID NO: 5632659 - DNA, 25 bp, Homo sapien
tcctcattaacggaaaggtcttcat

SEQ ID NO: 5632660 - DNA, 25 bp, Homo sapien
tcttgttcgcatcccctggtgacca

SEQ ID NO: 5632661 - DNA, 25 bp, Homo sapien
aatataattaccatagggggtggtc

SEQ ID NO: 5632662 - DNA, 25 bp, Homo sapien
gttaccagtgtgggttcaagtcttc

SEQ ID NO: 5632663 - DNA, 25 bp, Homo sapien
ccgtggggatatgtacctcatctgc

SEQ ID NO: 5632664 - DNA, 25 bp, Homo sapien
agcagggcatgaagctttctgtttc

SEQ ID NO: 5632665 - DNA, 25 bp, Homo sapien
taccatacccgtggggatatgtacc

SEQ ID NO: 5632666 - DNA, 25 bp, Homo sapien
gctgcctggtgttctgtggtccaca

SEQ ID NO: 5632667 - DNA, 25 bp, Homo sapien
atctgacagatgcaaagtttgggtt

SEQ ID NO: 5632668 - DNA, 25 bp, Homo sapien
cttcagtcctcaggtcaaagcatcc

SEQ ID NO: 5632669 - DNA, 25 bp, Homo sapien
gtgaccacataaaagcagataagcc

SEQ ID NO: 5632670 - DNA, 25 bp, Homo sapien
tcccaggcttatctccaggacacct

SEQ ID NO: 5632671 - DNA, 25 bp, Homo sapien
tcgcagattttgaacaaggacttct

SEQ ID NO: 5632672 - DNA, 25 bp, Homo sapien
agaagtccttgttcaaaatctgcga

SEQ ID NO: 5632673 - DNA, 25 bp, Homo sapien
tgaggggtctgctatttaggcacat

SEQ ID NO: 5632674 - DNA, 25 bp, Homo sapien
gaatagtactgagaacgtaattgtc

SEQ ID NO: 5632675 - DNA, 25 bp, Homo sapien
tgggaatagtgaagtcactcactgc

SEQ ID NO: 5632676 - DNA, 25 bp, Homo sapien
cctgtgagaatttggcaacataagt

SEQ ID NO: 5632677 - DNA, 25 bp, Homo sapien
tggaattacagcaaagtgtctgcac

SEQ ID NO: 5632678 - DNA, 25 bp, Homo sapien
gtgtttgcatacctgaggggtctgc

SEQ ID NO: 5632679 - DNA, 25 bp, Homo sapien
tcgggaagtgtctaaaacatggaat

SEQ ID NO: 5632680 - DNA, 25 bp, Homo sapien
ggttatatagtgatggctcggaagg

SEQ ID NO: 5632681 - DNA, 25 bp, Homo sapien
ttgcaacaatatagaatagtactga

SEQ ID NO: 5632682 - DNA, 25 bp, Homo sapien
ttaagatcttgaaaagcacaaggtt

SEQ ID NO: 5632683 - DNA, 25 bp, Homo sapien
cgtgtttcactgttcgggaagtgtc

SEQ ID NO: 5632684 - DNA, 25 bp, Homo sapien
ggggagcagcattagtgtcttgtat

SEQ ID NO: 5632685 - DNA, 25 bp, Homo sapien
ctagggcactataccaagaaagatt

SEQ ID NO: 5632686 - DNA, 25 bp, Homo sapien
aggcataggaacaccccaaaaacta

SEQ ID NO: 5632687 - DNA, 25 bp, Homo sapien
gaggatatttttagagaggatttca

SEQ ID NO: 5632688 - DNA, 25 bp, Homo sapien
agcaaaagtgccaaataggttttac

SEQ ID NO: 5632689 - DNA, 25 bp, Homo sapien
gttagtaatggctgcctagggcact

SEQ ID NO: 5632690 - DNA, 25 bp, Homo sapien
tggatttggcccataggttgtgcgg

SEQ ID NO: 5632691 - DNA, 25 bp, Homo sapien
aagaatcccactcaggcataggaac

SEQ ID NO: 5632692 - DNA, 25 bp, Homo sapien
gaacactgcctagagcaaaagtgcc

SEQ ID NO: 5632693 - DNA, 25 bp, Homo sapien
gttgtgcggtctgccacctcctagc

SEQ ID NO: 5632694 - DNA, 25 bp, Homo sapien
aagggggctctgtgaattatcacct

SEQ ID NO: 5632695 - DNA, 25 bp, Homo sapien
gacaggactgggagattttgactgt

SEQ ID NO: 5632696 - DNA, 25 bp, Homo sapien
aggagctgactccataaagtgctta

SEQ ID NO: 5632697 - DNA, 25 bp, Homo sapien
ttgacatcagtgctgtagtcgtagc

SEQ ID NO: 5632698 - DNA, 25 bp, Homo sapien
aagccgtggtgcagtcttgttttga

SEQ ID NO: 5632699 - DNA, 25 bp, Homo sapien
tttgactgtcctttgctagctctac

SEQ ID NO: 5632700 - DNA, 25 bp, Homo sapien
agtgctgaaggagctgactccataa

SEQ ID NO: 5632701 - DNA, 25 bp, Homo sapien
tgaatgtgagcttcagaacaggaca

SEQ ID NO: 5632702 - DNA, 25 bp, Homo sapien
gaaatgatctcagctaatggaactg

SEQ ID NO: 5632703 - DNA, 25 bp, Homo sapien
agtcgtagctttaacctggggagga

SEQ ID NO: 5632704 - DNA, 25 bp, Homo sapien
tgagagtagtgataacttaccccaa

SEQ ID NO: 5632705 - DNA, 25 bp, Homo sapien
aatgtttggcctatggtgagctctc

SEQ ID NO: 5632706 - DNA, 25 bp, Homo sapien
atgatggtagaatttgggtaatctt

SEQ ID NO: 5632707 - DNA, 25 bp, Homo sapien
attgaaggtaaaacattagaggttc

SEQ ID NO: 5632708 - DNA, 25 bp, Homo sapien
tgcaacttccagattgagtaacact

SEQ ID NO: 5632709 - DNA, 25 bp, Homo sapien
ttggctggtttcaaatggtgagctg

SEQ ID NO: 5632710 - DNA, 25 bp, Homo sapien
agtccaggaataataatggtcatcc

SEQ ID NO: 5632711 - DNA, 25 bp, Homo sapien
attgggtttatgagaatcgtgtaca

SEQ ID NO: 5632712 - DNA, 25 bp, Homo sapien
acattagaggttcattgagaatctc

SEQ ID NO: 5632713 - DNA, 25 bp, Homo sapien
agctgaatgctgggtaatctctact

SEQ ID NO: 5632714 - DNA, 25 bp, Homo sapien
tcgtgacttttggtaattctggcat

SEQ ID NO: 5632715 - DNA, 25 bp, Homo sapien
ttgacattgtcaagctcattgcaac

SEQ ID NO: 5632716 - DNA, 25 bp, Homo sapien
atcccagtggcaaaatgatggtaga

SEQ ID NO: 5632717 - DNA, 25 bp, Homo sapien
gaactgtgaagaatttagctgatcg

SEQ ID NO: 5632718 - DNA, 25 bp, Homo sapien
cgatcagctaaattcttcacagttc

SEQ ID NO: 5632719 - DNA, 25 bp, Homo sapien
tgaaacaacgaaagtgtaggatctc

SEQ ID NO: 5632720 - DNA, 25 bp, Homo sapien
tatagctaacagagagcatgaggaa

SEQ ID NO: 5632721 - DNA, 25 bp, Homo sapien
acaattctggaagcaagaagtccga

SEQ ID NO: 5632722 - DNA, 25 bp, Homo sapien
gcatttagagcccatctggataatc

SEQ ID NO: 5632723 - DNA, 25 bp, Homo sapien
cgtcagtggttcctataggggaaaa

SEQ ID NO: 5632724 - DNA, 25 bp, Homo sapien
gaaaaggtgtgtgtattagtttgct

SEQ ID NO: 5632725 - DNA, 25 bp, Homo sapien
gaagcaagaagtccgaaatcagttt

SEQ ID NO: 5632726 - DNA, 25 bp, Homo sapien
tgagcttgtggccttatcgcacttc

SEQ ID NO: 5632727 - DNA, 25 bp, Homo sapien
tcttccaggcgcttgtggctgcctg

SEQ ID NO: 5632728 - DNA, 25 bp, Homo sapien
agcatgaggaacgtcagtggttcct

SEQ ID NO: 5632729 - DNA, 25 bp, Homo sapien
aggctccagggtagaatctactcct

SEQ ID NO: 5632730 - DNA, 25 bp, Homo sapien
gttatataaacaaagctggcatgaa

SEQ ID NO: 5632731 - DNA, 25 bp, Homo sapien
cactagaggatgccaaattattgtc

SEQ ID NO: 5632732 - DNA, 25 bp, Homo sapien
tccagtagatgcttgtagctgttgt

SEQ ID NO: 5632733 - DNA, 25 bp, Homo sapien
acatatcatttagttgtgcatgctt

SEQ ID NO: 5632734 - DNA, 25 bp, Homo sapien
tccattccccatcctcagacatttg

SEQ ID NO: 5632735 - DNA, 25 bp, Homo sapien
aggggaattgctgagtctcaagcac

SEQ ID NO: 5632736 - DNA, 25 bp, Homo sapien
tgctgagtctcaagcacacacatct

SEQ ID NO: 5632737 - DNA, 25 bp, Homo sapien
gcttgtagctgttgtgtattcattt

SEQ ID NO: 5632738 - DNA, 25 bp, Homo sapien
cttcaacttcactagaggatgccaa

SEQ ID NO: 5632739 - DNA, 25 bp, Homo sapien
gcatgtgagattcattccagtagat

SEQ ID NO: 5632740 - DNA, 25 bp, Homo sapien
aaagctggcatgaatgttcttaagc

SEQ ID NO: 5632741 - DNA, 25 bp, Homo sapien
ctccctgcaggaataaggggtaaaa

SEQ ID NO: 5632742 - DNA, 25 bp, Homo sapien
gggctaaagtggcattcagtgatcc

SEQ ID NO: 5632743 - DNA, 25 bp, Homo sapien
aggatgttacagaaaagctagccac

SEQ ID NO: 5632744 - DNA, 25 bp, Homo sapien
actccgggcagctgtcacccattca

SEQ ID NO: 5632745 - DNA, 25 bp, Homo sapien
aacgttaggtgttgtttggcaagaa

SEQ ID NO: 5632746 - DNA, 25 bp, Homo sapien
tgaagaaatgttcagtaacctgttt

SEQ ID NO: 5632747 - DNA, 25 bp, Homo sapien
tgacgctaattaaaacagagcctgc

SEQ ID NO: 5632748 - DNA, 25 bp, Homo sapien
agtgatcctgttctgtagacttttc

SEQ ID NO: 5632749 - DNA, 25 bp, Homo sapien
gtttggcaagaaaccacactgactg

SEQ ID NO: 5632750 - DNA, 25 bp, Homo sapien
ggaaaggaacctagctgcctgtatc

SEQ ID NO: 5632751 - DNA, 25 bp, Homo sapien
cagggcccgcctccctgcaggaata

SEQ ID NO: 5632752 - DNA, 25 bp, Homo sapien
gtgggccatgaaagttgtcctatca

SEQ ID NO: 5632753 - DNA, 25 bp, Homo sapien
atacttcttgtaggggaccattatt

SEQ ID NO: 5632754 - DNA, 25 bp, Homo sapien
aacatgagagcgttggtgatttttc

SEQ ID NO: 5632755 - DNA, 25 bp, Homo sapien
cagacagaccctcaggacattccaa

SEQ ID NO: 5632756 - DNA, 25 bp, Homo sapien
tgaccatgcagaataagtgaaggga

SEQ ID NO: 5632757 - DNA, 25 bp, Homo sapien
gtcttttgaagaggtgctgaccatg

SEQ ID NO: 5632758 - DNA, 25 bp, Homo sapien
tcatactctcaaaggggtgcaaata

SEQ ID NO: 5632759 - DNA, 25 bp, Homo sapien
catataagtaggtcagactgtggcc

SEQ ID NO: 5632760 - DNA, 25 bp, Homo sapien
ctttagaacaaaggagtacaaactg

SEQ ID NO: 5632761 - DNA, 25 bp, Homo sapien
ttcctgctaagagttcaaagtgggc

SEQ ID NO: 5632762 - DNA, 25 bp, Homo sapien
taaatagccttggcagagtctgcac

SEQ ID NO: 5632763 - DNA, 25 bp, Homo sapien
ggccgctatagaggatccaagctta

SEQ ID NO: 5632764 - DNA, 25 bp, Homo sapien
tgtatctcagaaaaattgcaggttc

SEQ ID NO: 5632765 - DNA, 25 bp, Homo sapien
tgcaataaagcaagtcacacaaatt

SEQ ID NO: 5632766 - DNA, 25 bp, Homo sapien
acgcgtgcatgcgacgtcatagctc

SEQ ID NO: 5632767 - DNA, 25 bp, Homo sapien
ttattgctgaaaatgctaatggtca

SEQ ID NO: 5632768 - DNA, 25 bp, Homo sapien
tagattcatatgtacaaaccaaaac

SEQ ID NO: 5632769 - DNA, 25 bp, Homo sapien
attcccgggtcgactactactacta

SEQ ID NO: 5632770 - DNA, 25 bp, Homo sapien
tactactaaattggcggccgcgtcc

SEQ ID NO: 5632771 - DNA, 25 bp, Homo sapien
tccagaccatcacaataaagcaact

SEQ ID NO: 5632772 - DNA, 25 bp, Homo sapien
ccatagcctgttagttgtcaatagc

SEQ ID NO: 5632773 - DNA, 25 bp, Homo sapien
aggatccaagcttacgtacgcgtgc

SEQ ID NO: 5632774 - DNA, 25 bp, Homo sapien
gtggaggaactattagcgtaagaga

SEQ ID NO: 5632775 - DNA, 25 bp, Homo sapien
aaagacatttacaagacagaaaata

SEQ ID NO: 5632776 - DNA, 25 bp, Homo sapien
ttaaagatattaaaggccaggcatg

SEQ ID NO: 5632777 - DNA, 25 bp, Homo sapien
tcagacagatgattttgcaactaat

SEQ ID NO: 5632778 - DNA, 25 bp, Homo sapien
agccctgagaataaacctagaattt

SEQ ID NO: 5632779 - DNA, 25 bp, Homo sapien
gcgtaagagataaggcatttcagcc

SEQ ID NO: 5632780 - DNA, 25 bp, Homo sapien
atgtaaggtgttagtaatatgagaa

SEQ ID NO: 5632781 - DNA, 25 bp, Homo sapien
cttgcccatggtttagccctgagaa

SEQ ID NO: 5632782 - DNA, 25 bp, Homo sapien
tttaattagtggaggaactattagc

SEQ ID NO: 5632783 - DNA, 25 bp, Homo sapien
tcagccaactgcaatttgtgaacct

SEQ ID NO: 5632784 - DNA, 25 bp, Homo sapien
gtaatatgagaaaactgggaattct

SEQ ID NO: 5632785 - DNA, 25 bp, Homo sapien
ggtactaagcctagtgccccataat

SEQ ID NO: 5632786 - DNA, 25 bp, Homo sapien
ccgggttagactacaaacaactcta

SEQ ID NO: 5632787 - DNA, 25 bp, Homo sapien
caaactggagtaaatacatgctgtt

SEQ ID NO: 5632788 - DNA, 25 bp, Homo sapien
tggctgccttagaaatgaaggtgtt

SEQ ID NO: 5632789 - DNA, 25 bp, Homo sapien
agaagtggtcacaaatcagacgttc

SEQ ID NO: 5632790 - DNA, 25 bp, Homo sapien
cccaatccaaagactcctgccaccc

SEQ ID NO: 5632791 - DNA, 25 bp, Homo sapien
cagcacatctgtggaaaactagaat

SEQ ID NO: 5632792 - DNA, 25 bp, Homo sapien
gaaaactagaatgcatgacgaggtg

SEQ ID NO: 5632793 - DNA, 25 bp, Homo sapien
atgtcatgggggttgtacaaattct

SEQ ID NO: 5632794 - DNA, 25 bp, Homo sapien
tttgcagccagagctacccaatcca

SEQ ID NO: 5632795 - DNA, 25 bp, Homo sapien
ctcctgccaccctagtccctgcctg

SEQ ID NO: 5632796 - DNA, 25 bp, Homo sapien
agcaaagtcttcggttagcaatttc

SEQ ID NO: 5632797 - DNA, 25 bp, Homo sapien
tccatcaggcaaatgtggtaatgtc

SEQ ID NO: 5632798 - DNA, 25 bp, Homo sapien
gtgtctgactggttataggccacct

SEQ ID NO: 5632799 - DNA, 25 bp, Homo sapien
tccagagggataatagccagtttaa

SEQ ID NO: 5632800 - DNA, 25 bp, Homo sapien
ggggcttcatgttgtctcctgtgtc

SEQ ID NO: 5632801 - DNA, 25 bp, Homo sapien
ctttggaggctaagcagtaaatggg

SEQ ID NO: 5632802 - DNA, 25 bp, Homo sapien
gacatcaagcagacctgggtttgct

SEQ ID NO: 5632803 - DNA, 25 bp, Homo sapien
ataggccacctatgcaacatggggc

SEQ ID NO: 5632804 - DNA, 25 bp, Homo sapien
ggttaacagcaagggctctgacatc

SEQ ID NO: 5632805 - DNA, 25 bp, Homo sapien
accccattaggtaaagcaatagaag

SEQ ID NO: 5632806 - DNA, 25 bp, Homo sapien
caaatgtggtaatgtcagaaaggga

SEQ ID NO: 5632807 - DNA, 25 bp, Homo sapien
tgcaaaattgctcatgggggacaaa

SEQ ID NO: 5632808 - DNA, 25 bp, Homo sapien
tggagatgttcagtccaactgcaca

SEQ ID NO: 5632809 - DNA, 25 bp, Homo sapien
gcaagttgtgttttccttagggagc

SEQ ID NO: 5632810 - DNA, 25 bp, Homo sapien
ccttagggagctgtcaaaataggga

SEQ ID NO: 5632811 - DNA, 25 bp, Homo sapien
ggagctgtcaaaatagggaatcttg

SEQ ID NO: 5632812 - DNA, 25 bp, Homo sapien
tatgtgtctttcgatgaactctgta

SEQ ID NO: 5632813 - DNA, 25 bp, Homo sapien
atctccaatggccatgagcttcaga

SEQ ID NO: 5632814 - DNA, 25 bp, Homo sapien
gttcagtccaactgcacagatgcaa

SEQ ID NO: 5632815 - DNA, 25 bp, Homo sapien
cagagagaagcttcgagaagctgtc

SEQ ID NO: 5632816 - DNA, 25 bp, Homo sapien
aacaagtgagactagacattgagga

SEQ ID NO: 5632817 - DNA, 25 bp, Homo sapien
aggaaaacaagtgagactagacatt

SEQ ID NO: 5632818 - DNA, 25 bp, Homo sapien
tttgtctagagtaggacatagatta

SEQ ID NO: 5632819 - DNA, 25 bp, Homo sapien
tttcacagctaaaccatgcctatca

SEQ ID NO: 5632820 - DNA, 25 bp, Homo sapien
ttcttgggtcatgaaatctagtttt

SEQ ID NO: 5632821 - DNA, 25 bp, Homo sapien
cagcgtaactacaaacttagatgtt

SEQ ID NO: 5632822 - DNA, 25 bp, Homo sapien
aacattagtgatctctagggctatc

SEQ ID NO: 5632823 - DNA, 25 bp, Homo sapien
aacttggactttgaatacaactcat

SEQ ID NO: 5632824 - DNA, 25 bp, Homo sapien
tagcctttacatgacttgcagagca

SEQ ID NO: 5632825 - DNA, 25 bp, Homo sapien
cattctagacactggatgatatttt

SEQ ID NO: 5632826 - DNA, 25 bp, Homo sapien
tcctgactgacttgttttcggtgtt

SEQ ID NO: 5632827 - DNA, 25 bp, Homo sapien
catagtatatgggacttgtggtttt

SEQ ID NO: 5632828 - DNA, 25 bp, Homo sapien
ctagggctatcttgcttcttgggtc

SEQ ID NO: 5632829 - DNA, 25 bp, Homo sapien
ggttgtatgaatgcagaacagggta

SEQ ID NO: 5632830 - DNA, 25 bp, Homo sapien
gccatgcaggaatataatagggttt

SEQ ID NO: 5632831 - DNA, 25 bp, Homo sapien
aaagtggatatcaccattcagcaac

SEQ ID NO: 5632832 - DNA, 25 bp, Homo sapien
aacacaaatgcctaccagcctaagc

SEQ ID NO: 5632833 - DNA, 25 bp, Homo sapien
ccagcctaagcagataacctgaaag

SEQ ID NO: 5632834 - DNA, 25 bp, Homo sapien
tctagcagcttgagttcaaggttta

SEQ ID NO: 5632835 - DNA, 25 bp, Homo sapien
agaaatctgaatgtctgggaaattc

SEQ ID NO: 5632836 - DNA, 25 bp, Homo sapien
cagaacagggtagagtactctttct

SEQ ID NO: 5632837 - DNA, 25 bp, Homo sapien
cgggttggcttaggttgtatgaatg

SEQ ID NO: 5632838 - DNA, 25 bp, Homo sapien
caaaacaagcctatagactaaatgc

SEQ ID NO: 5632839 - DNA, 25 bp, Homo sapien
acaatgcaactgaccatctagcagc

SEQ ID NO: 5632840 - DNA, 25 bp, Homo sapien
gcacgtagagactcaggtgactgaa

SEQ ID NO: 5632841 - DNA, 25 bp, Homo sapien
aaaattgcagctttgtagatgatta

SEQ ID NO: 5632842 - DNA, 25 bp, Homo sapien
gtggccacattggctcatggctgcc

SEQ ID NO: 5632843 - DNA, 25 bp, Homo sapien
cttcatacttggtggccacattggc

SEQ ID NO: 5632844 - DNA, 25 bp, Homo sapien
tgtagatgattattaagatgggccc

SEQ ID NO: 5632845 - DNA, 25 bp, Homo sapien
tattaagatgggcccaagaaaacag

SEQ ID NO: 5632846 - DNA, 25 bp, Homo sapien
atactgaacagtgcacgtagagact

SEQ ID NO: 5632847 - DNA, 25 bp, Homo sapien
agtacaatgatgttaggtcaggccg

SEQ ID NO: 5632848 - DNA, 25 bp, Homo sapien
cttggaaagccagtgtacattttac

SEQ ID NO: 5632849 - DNA, 25 bp, Homo sapien
ggtcaggccgccagctcatattgcc

SEQ ID NO: 5632850 - DNA, 25 bp, Homo sapien
ttcatgctaagtcttggaaagccag

SEQ ID NO: 5632851 - DNA, 25 bp, Homo sapien
aaaaaaactggtcagtggtggatgg

SEQ ID NO: 5632852 - DNA, 25 bp, Homo sapien
tgaatgaacctgccaaagattatgc

SEQ ID NO: 5632853 - DNA, 25 bp, Homo sapien
ggattgcccaagaagcacagaaaac

SEQ ID NO: 5632854 - DNA, 25 bp, Homo sapien
ggggaaggtaatgctatttgtcgat

SEQ ID NO: 5632855 - DNA, 25 bp, Homo sapien
gagcatggtaacaggccctcatctg

SEQ ID NO: 5632856 - DNA, 25 bp, Homo sapien
ccaaatgtgggctgaactgtaccaa

SEQ ID NO: 5632857 - DNA, 25 bp, Homo sapien
ccaatgggacttacctagaaaaata

SEQ ID NO: 5632858 - DNA, 25 bp, Homo sapien
atctgtatagctgaggtggaagaaa

SEQ ID NO: 5632859 - DNA, 25 bp, Homo sapien
aagaatgaacctaaatggctctaac

SEQ ID NO: 5632860 - DNA, 25 bp, Homo sapien
caataagttaaaagacccagacaaa

SEQ ID NO: 5632861 - DNA, 25 bp, Homo sapien
ggttacagcaatctgtggaagtgat

SEQ ID NO: 5632862 - DNA, 25 bp, Homo sapien
agattgtcagcgtctgaagtgataa

SEQ ID NO: 5632863 - DNA, 25 bp, Homo sapien
tgttcatgtggtctgaatccaacca

SEQ ID NO: 5632864 - DNA, 25 bp, Homo sapien
ctgaatccaaccacagatagaaaat

SEQ ID NO: 5632865 - DNA, 25 bp, Homo sapien
aaaatactttatgctggtgcctcct

SEQ ID NO: 5632866 - DNA, 25 bp, Homo sapien
cagtcagccctcagtgttcatgtgg

SEQ ID NO: 5632867 - DNA, 25 bp, Homo sapien
aaaatactagattgtcagcgtctga

SEQ ID NO: 5632868 - DNA, 25 bp, Homo sapien
gtcagcgtctgaagtgataaaatac

SEQ ID NO: 5632869 - DNA, 25 bp, Homo sapien
gtgcctcctcagtaacagacattca

SEQ ID NO: 5632870 - DNA, 25 bp, Homo sapien
ctcagtaacagacattcaaaactac

SEQ ID NO: 5632871 - DNA, 25 bp, Homo sapien
gtcagccctcagtgttcatgtggtc

SEQ ID NO: 5632872 - DNA, 25 bp, Homo sapien
gactgtgcctctgcactgtagcctg

SEQ ID NO: 5632873 - DNA, 25 bp, Homo sapien
atttggttctaaggggtagtccatg

SEQ ID NO: 5632874 - DNA, 25 bp, Homo sapien
atgagaatgaggccttgaagtataa

SEQ ID NO: 5632875 - DNA, 25 bp, Homo sapien
ggccttgaagtataaggaagcacgc

SEQ ID NO: 5632876 - DNA, 25 bp, Homo sapien
aagagacaaagcattaaacaataat

SEQ ID NO: 5632877 - DNA, 25 bp, Homo sapien
tgaagctgtattaggcatcaaacca

SEQ ID NO: 5632878 - DNA, 25 bp, Homo sapien
agctgcgatggaaaattgtagtctg

SEQ ID NO: 5632879 - DNA, 25 bp, Homo sapien
catagaaaaagataacgtctcattt

SEQ ID NO: 5632880 - DNA, 25 bp, Homo sapien
acatgaacaattatgctgtacatct

SEQ ID NO: 5632881 - DNA, 25 bp, Homo sapien
ttctaaggggtagtccatgaagaaa

SEQ ID NO: 5632882 - DNA, 25 bp, Homo sapien
aaaagataaaaaacagtgaattcat

SEQ ID NO: 5632883 - DNA, 25 bp, Homo sapien
tctaacactggaaatcttgatgata

SEQ ID NO: 5632884 - DNA, 25 bp, Homo sapien
cgcatgacttgaaaactgggcagat

SEQ ID NO: 5632885 - DNA, 25 bp, Homo sapien
gtaaagacagtgtgaccaggtttgt

SEQ ID NO: 5632886 - DNA, 25 bp, Homo sapien
gaagcttgatttggtgtggtgcaat

SEQ ID NO: 5632887 - DNA, 25 bp, Homo sapien
agggggaaaacatgcttatatagcc

SEQ ID NO: 5632888 - DNA, 25 bp, Homo sapien
tgttttcagggctgccgaatgagcc

SEQ ID NO: 5632889 - DNA, 25 bp, Homo sapien
taacagtgtccatgggtaattcgct

SEQ ID NO: 5632890 - DNA, 25 bp, Homo sapien
aattaacagtaataagtcacctcct

SEQ ID NO: 5632891 - DNA, 25 bp, Homo sapien
tagccaaggtacagatccagatgat

SEQ ID NO: 5632892 - DNA, 25 bp, Homo sapien
ctgggcagatcaatagataatcgaa

SEQ ID NO: 5632893 - DNA, 25 bp, Homo sapien
aagattcagtaggatagccaaattc

SEQ ID NO: 5632894 - DNA, 25 bp, Homo sapien
aagtgctttatctgaagggagaggg

SEQ ID NO: 5632895 - DNA, 25 bp, Homo sapien
tctacctccagaaagcaatgatgtt

SEQ ID NO: 5632896 - DNA, 25 bp, Homo sapien
agattttgaaatgcaggagataaac

SEQ ID NO: 5632897 - DNA, 25 bp, Homo sapien
gtgctaagaggaacataagaaaaac

SEQ ID NO: 5632898 - DNA, 25 bp, Homo sapien
gtaggtgacaaatgagcaatgcata

SEQ ID NO: 5632899 - DNA, 25 bp, Homo sapien
attgtgattagtagatgtgtattcc

SEQ ID NO: 5632900 - DNA, 25 bp, Homo sapien
taagaaaaacgaacatggtctgtgc

SEQ ID NO: 5632901 - DNA, 25 bp, Homo sapien
tatcaattggacacctcaagggcac

SEQ ID NO: 5632902 - DNA, 25 bp, Homo sapien
atggtctgtgccttagggagcttat

SEQ ID NO: 5632903 - DNA, 25 bp, Homo sapien
attagcagaggcaagctatactatc

SEQ ID NO: 5632904 - DNA, 25 bp, Homo sapien
tatgcaaaatctgggttaagggaga

SEQ ID NO: 5632905 - DNA, 25 bp, Homo sapien
caagggcacaaaattgcctggaact

SEQ ID NO: 5632906 - DNA, 25 bp, Homo sapien
ctttcaaggtaataggctcagtggg

SEQ ID NO: 5632907 - DNA, 25 bp, Homo sapien
ccctgaaaaatggttgagcagcgga

SEQ ID NO: 5632908 - DNA, 25 bp, Homo sapien
gctcagtgggcttgcatactaatgc

SEQ ID NO: 5632909 - DNA, 25 bp, Homo sapien
tcggatttcaccacaagaagggctg

SEQ ID NO: 5632910 - DNA, 25 bp, Homo sapien
tgggtgtccacctataatgggagtc

SEQ ID NO: 5632911 - DNA, 25 bp, Homo sapien
acatcgtggtggtcggatttcacca

SEQ ID NO: 5632912 - DNA, 25 bp, Homo sapien
atgggagtctagaaaaattcagtgc

SEQ ID NO: 5632913 - DNA, 25 bp, Homo sapien
agctggttgatacgtgtaggttgta

SEQ ID NO: 5632914 - DNA, 25 bp, Homo sapien
tccactggctttctgggtgtccacc

SEQ ID NO: 5632915 - DNA, 25 bp, Homo sapien
taacttctgctttggtggagtggga

SEQ ID NO: 5632916 - DNA, 25 bp, Homo sapien
agcgcctgcgacccttcgcctctca

SEQ ID NO: 5632917 - DNA, 25 bp, Homo sapien
agaataccacttgaactaggaggac

SEQ ID NO: 5632918 - DNA, 25 bp, Homo sapien
agtattacaaagcaatccatcacta

SEQ ID NO: 5632919 - DNA, 25 bp, Homo sapien
gtttcaactcacaaggccctcactt

SEQ ID NO: 5632920 - DNA, 25 bp, Homo sapien
tcgctggttccactgatgttccgcc

SEQ ID NO: 5632921 - DNA, 25 bp, Homo sapien
ctgatgttccgccaatcccaatttc

SEQ ID NO: 5632922 - DNA, 25 bp, Homo sapien
taaaactatggctcccgactatgtc

SEQ ID NO: 5632923 - DNA, 25 bp, Homo sapien
cttgaactaggaggacaataaaatt

SEQ ID NO: 5632924 - DNA, 25 bp, Homo sapien
taatacaataaatggaaagtgttcc

SEQ ID NO: 5632925 - DNA, 25 bp, Homo sapien
ccttcgtgagaaaatacaaacttat

SEQ ID NO: 5632926 - DNA, 25 bp, Homo sapien
ttaacttagcaatcgctggttccac

SEQ ID NO: 5632927 - DNA, 25 bp, Homo sapien
ttgaaatgaagatatctaatacaat

SEQ ID NO: 5632928 - DNA, 25 bp, Homo sapien
tggcaaacagatggaaaatcagtgc

SEQ ID NO: 5632929 - DNA, 25 bp, Homo sapien
ttcacccaggcagaggctctacata

SEQ ID NO: 5632930 - DNA, 25 bp, Homo sapien
tggccaggcagaagatgtttttcaa

SEQ ID NO: 5632931 - DNA, 25 bp, Homo sapien
ggagaagtcccaaccaatggcaaac

SEQ ID NO: 5632932 - DNA, 25 bp, Homo sapien
cttgtgcaagaccatggacatgtga

SEQ ID NO: 5632933 - DNA, 25 bp, Homo sapien
cagatggttggttagtccagtggtg

SEQ ID NO: 5632934 - DNA, 25 bp, Homo sapien
gtttccagggaagctcatgtctttc

SEQ ID NO: 5632935 - DNA, 25 bp, Homo sapien
ctgctgggaatctgagactgattgt

SEQ ID NO: 5632936 - DNA, 25 bp, Homo sapien
tcacaaccacatccaaacaagctag

SEQ ID NO: 5632937 - DNA, 25 bp, Homo sapien
tgggatcaaagtacagatggttggt

SEQ ID NO: 5632938 - DNA, 25 bp, Homo sapien
ctactagagctcaagactgagtggc

SEQ ID NO: 5632939 - DNA, 25 bp, Homo sapien
gaaaagcagtttgtaagtagaggac

SEQ ID NO: 5632940 - DNA, 25 bp, Homo sapien
gtctaagataaaactcataacacat

SEQ ID NO: 5632941 - DNA, 25 bp, Homo sapien
tgtaagtagaggactcgtaagtgca

SEQ ID NO: 5632942 - DNA, 25 bp, Homo sapien
aacaaacgtcgtatgtctgaacctt

SEQ ID NO: 5632943 - DNA, 25 bp, Homo sapien
gcacagacacggcagatagtcaata

SEQ ID NO: 5632944 - DNA, 25 bp, Homo sapien
cctagtacactgcaatggcacagac

SEQ ID NO: 5632945 - DNA, 25 bp, Homo sapien
ggactcgtaagtgcacctagtacac

SEQ ID NO: 5632946 - DNA, 25 bp, Homo sapien
tacaaggctgtagaaagattttaaa

SEQ ID NO: 5632947 - DNA, 25 bp, Homo sapien
ttacagatgatgttagtctaagata

SEQ ID NO: 5632948 - DNA, 25 bp, Homo sapien
gaaaaaggatacaaggctgtagaaa

SEQ ID NO: 5632949 - DNA, 25 bp, Homo sapien
acacagcaactgaatactggcgtat

SEQ ID NO: 5632950 - DNA, 25 bp, Homo sapien
tgtaagtagaaggtacctggctttg

SEQ ID NO: 5632951 - DNA, 25 bp, Homo sapien
ttgctgtatcactcacaagaacaat

SEQ ID NO: 5632952 - DNA, 25 bp, Homo sapien
aagcccatggtaattcccatatgtc

SEQ ID NO: 5632953 - DNA, 25 bp, Homo sapien
agtagacctccataagaattagatc

SEQ ID NO: 5632954 - DNA, 25 bp, Homo sapien
cctttgtcctaaaatgcacctctgc

SEQ ID NO: 5632955 - DNA, 25 bp, Homo sapien
aggactcaagaaagttccctttgtc

SEQ ID NO: 5632956 - DNA, 25 bp, Homo sapien
tgatttaaaggactcaagaaagttc

SEQ ID NO: 5632957 - DNA, 25 bp, Homo sapien
ctgcacacaaagagtaggcaattac

SEQ ID NO: 5632958 - DNA, 25 bp, Homo sapien
actcttccaacaagtagacctccat

SEQ ID NO: 5632959 - DNA, 25 bp, Homo sapien
gcacctctgcacacaaagagtaggc

SEQ ID NO: 5632960 - DNA, 25 bp, Homo sapien
tttgccaaataagaagacagcaatc

SEQ ID NO: 5632961 - DNA, 25 bp, Homo sapien
cagtcccgaattaaacgcagacgtc

SEQ ID NO: 5632962 - DNA, 25 bp, Homo sapien
ctggctctcggactactcagctgcc

SEQ ID NO: 5632963 - DNA, 25 bp, Homo sapien
ggaattgtatgggaaaaccgatgaa

SEQ ID NO: 5632964 - DNA, 25 bp, Homo sapien
agctggttaccatggacagcgctgg

SEQ ID NO: 5632965 - DNA, 25 bp, Homo sapien
ggctaacagccctcacggaattgta

SEQ ID NO: 5632966 - DNA, 25 bp, Homo sapien
ccgcacccccgtcctaccggctgac

SEQ ID NO: 5632967 - DNA, 25 bp, Homo sapien
tcgtctaccaagcagggctaacagc

SEQ ID NO: 5632968 - DNA, 25 bp, Homo sapien
cgtgaccctagaccgcatcggcttc

SEQ ID NO: 5632969 - DNA, 25 bp, Homo sapien
tcagctgccaaagcgcatccattgc

SEQ ID NO: 5632970 - DNA, 25 bp, Homo sapien
ctcacctaggcctgctacagcgttc

SEQ ID NO: 5632971 - DNA, 25 bp, Homo sapien
ttaagccacacaaaagctggttacc

SEQ ID NO: 5632972 - DNA, 25 bp, Homo sapien
aaataaagagaggaagttactctaa

SEQ ID NO: 5632973 - DNA, 25 bp, Homo sapien
ctgataaccccaccaaagaggaaat

SEQ ID NO: 5632974 - DNA, 25 bp, Homo sapien
ctatccgtcgaagatgattctgaat

SEQ ID NO: 5632975 - DNA, 25 bp, Homo sapien
tagaataccggaatactgacacata

SEQ ID NO: 5632976 - DNA, 25 bp, Homo sapien
agtccatgaggaccttgattaacct

SEQ ID NO: 5632977 - DNA, 25 bp, Homo sapien
ttcatttagtgagctgaagaaaaaa

SEQ ID NO: 5632978 - DNA, 25 bp, Homo sapien
aagtctgatagggcaaaagtgactg

SEQ ID NO: 5632979 - DNA, 25 bp, Homo sapien
aaccgcaaaggaaaccaatagtcac

SEQ ID NO: 5632980 - DNA, 25 bp, Homo sapien
aagggcctcaaggttcagtccatga

SEQ ID NO: 5632981 - DNA, 25 bp, Homo sapien
agaaaatacagcatcgttccacatt

SEQ ID NO: 5632982 - DNA, 25 bp, Homo sapien
agccctgagacagtcaatgacaaat

SEQ ID NO: 5632983 - DNA, 25 bp, Homo sapien
tctaagccagttatggttcacgtgc

SEQ ID NO: 5632984 - DNA, 25 bp, Homo sapien
ttaaaagatggtttcatagtcctgt

SEQ ID NO: 5632985 - DNA, 25 bp, Homo sapien
cccctcaagttggcatgaaatcagt

SEQ ID NO: 5632986 - DNA, 25 bp, Homo sapien
tctctagtatgaacaggaacatttt

SEQ ID NO: 5632987 - DNA, 25 bp, Homo sapien
ctataattatggaagtgacttttgt

SEQ ID NO: 5632988 - DNA, 25 bp, Homo sapien
ctaaagatcaagttgccaggactat

SEQ ID NO: 5632989 - DNA, 25 bp, Homo sapien
agcaacagaaacttcaaggaggttt

SEQ ID NO: 5632990 - DNA, 25 bp, Homo sapien
ggccaagggaattctctagtatgaa

SEQ ID NO: 5632991 - DNA, 25 bp, Homo sapien
atagtcctgtgagaggagtgtcttt

SEQ ID NO: 5632992 - DNA, 25 bp, Homo sapien
ccagagccagatgaagcaaaaatag

SEQ ID NO: 5632993 - DNA, 25 bp, Homo sapien
tggttcacgtgctccccgtactggc

SEQ ID NO: 5632994 - DNA, 25 bp, Homo sapien
aaaaatctgtgaattcagtcacccc

SEQ ID NO: 5632995 - DNA, 25 bp, Homo sapien
aagattcaaccgctagcaagtgttc

SEQ ID NO: 5632996 - DNA, 25 bp, Homo sapien
agagcaagcttgagatgaaatacat

SEQ ID NO: 5632997 - DNA, 25 bp, Homo sapien
ttcagtcaccccaaatgagagaggg

SEQ ID NO: 5632998 - DNA, 25 bp, Homo sapien
accgctagcaagtgttctgttggcc

SEQ ID NO: 5632999 - DNA, 25 bp, Homo sapien
tgaccttaataaccaaaggaagaga

SEQ ID NO: 5633000 - DNA, 25 bp, Homo sapien
aagaacaaagtgatagattagggga

SEQ ID NO: 5633001 - DNA, 25 bp, Homo sapien
tctcttgtttcggagcacgaaggcc

SEQ ID NO: 5633002 - DNA, 25 bp, Homo sapien
agaaagagcaagcttgagatgaaat

SEQ ID NO: 5633003 - DNA, 25 bp, Homo sapien
tcaccccaaatgagagaggggttgg

SEQ ID NO: 5633004 - DNA, 25 bp, Homo sapien
acatcttcgaaattctccccacccc

SEQ ID NO: 5633005 - DNA, 25 bp, Homo sapien
caacacacaggacatatgtagccac

SEQ ID NO: 5633006 - DNA, 25 bp, Homo sapien
ataaaagtagtgatgctggaaatgg

SEQ ID NO: 5633007 - DNA, 25 bp, Homo sapien
caaaccccaaaacgaccaaactgca

SEQ ID NO: 5633008 - DNA, 25 bp, Homo sapien
acaaacaaacagcaccaacacctac

SEQ ID NO: 5633009 - DNA, 25 bp, Homo sapien
gtagccactaagcatcagcagggcc

SEQ ID NO: 5633010 - DNA, 25 bp, Homo sapien
tccaatggagcagctgatttagtcc

SEQ ID NO: 5633011 - DNA, 25 bp, Homo sapien
ggtctgggtttaggattacagcatc

SEQ ID NO: 5633012 - DNA, 25 bp, Homo sapien
taaacacacaggggttactgaatgc

SEQ ID NO: 5633013 - DNA, 25 bp, Homo sapien
ctgtcacaactgaggtctgggttta

SEQ ID NO: 5633014 - DNA, 25 bp, Homo sapien
cttagtgctgggacatcaaagtaaa

SEQ ID NO: 5633015 - DNA, 25 bp, Homo sapien
tagagtgactaaagttcaggcctgc

SEQ ID NO: 5633016 - DNA, 25 bp, Homo sapien
ggtctgaatttgcccagctctgagc

SEQ ID NO: 5633017 - DNA, 25 bp, Homo sapien
tggagggtgtcgtcatcatcttaca

SEQ ID NO: 5633018 - DNA, 25 bp, Homo sapien
aatccactctaggtctgaatttgcc

SEQ ID NO: 5633019 - DNA, 25 bp, Homo sapien
cccactggagaaacacatggcatgt

SEQ ID NO: 5633020 - DNA, 25 bp, Homo sapien
aggtggcagagttgaaatccactct

SEQ ID NO: 5633021 - DNA, 25 bp, Homo sapien
cctatgggtctggtttttggaggat

SEQ ID NO: 5633022 - DNA, 25 bp, Homo sapien
gtacctgtgttcaccgagagctggc

SEQ ID NO: 5633023 - DNA, 25 bp, Homo sapien
cacggctcttggctctgcaggagct

SEQ ID NO: 5633024 - DNA, 25 bp, Homo sapien
acatggcatgttggggtctaccctt

SEQ ID NO: 5633025 - DNA, 25 bp, Homo sapien
tggcctcttgtcctatgggtctggt

SEQ ID NO: 5633026 - DNA, 25 bp, Homo sapien
gggtctaccctttggcaggtggcag

SEQ ID NO: 5633027 - DNA, 25 bp, Homo sapien
gctggaattttggaacccaactgcc

SEQ ID NO: 5633028 - DNA, 25 bp, Homo sapien
atttaatctgaggaggcagtatgcg

SEQ ID NO: 5633029 - DNA, 25 bp, Homo sapien
atcagttagcatgtcctaggaaaat

SEQ ID NO: 5633030 - DNA, 25 bp, Homo sapien
atgtggtggttaaacgctggaattt

SEQ ID NO: 5633031 - DNA, 25 bp, Homo sapien
atataggttgtgatgaacagtttac

SEQ ID NO: 5633032 - DNA, 25 bp, Homo sapien
aactcccagtatcctggccgggctc

SEQ ID NO: 5633033 - DNA, 25 bp, Homo sapien
ccagtcaatgtggtggttaaacgct

SEQ ID NO: 5633034 - DNA, 25 bp, Homo sapien
taggcaagcctaaactatgtgataa

SEQ ID NO: 5633035 - DNA, 25 bp, Homo sapien
tatgtgataaatatgtaacctacca

SEQ ID NO: 5633036 - DNA, 25 bp, Homo sapien
aactgcctgggtttgatttagactc

SEQ ID NO: 5633037 - DNA, 25 bp, Homo sapien
ctaacccatccttgaccagctgtgt

SEQ ID NO: 5633038 - DNA, 25 bp, Homo sapien
tgagtcaggacttagttattaaatc

SEQ ID NO: 5633039 - DNA, 25 bp, Homo sapien
caacactaaacaggactgaggggaa

SEQ ID NO: 5633040 - DNA, 25 bp, Homo sapien
tatgaaagtatcagaactgggattt

SEQ ID NO: 5633041 - DNA, 25 bp, Homo sapien
atcagaactgggattttaagagtct

SEQ ID NO: 5633042 - DNA, 25 bp, Homo sapien
caaaacaacacctgtctctgtgggt

SEQ ID NO: 5633043 - DNA, 25 bp, Homo sapien
tcctgagggttaattatcatccagt

SEQ ID NO: 5633044 - DNA, 25 bp, Homo sapien
ttggtaacataatttgagtcaggac

SEQ ID NO: 5633045 - DNA, 25 bp, Homo sapien
aaaagttcagataagtcacttgccc

SEQ ID NO: 5633046 - DNA, 25 bp, Homo sapien
caaaacacacaattatgaaagtatc

SEQ ID NO: 5633047 - DNA, 25 bp, Homo sapien
ttaagagtctagattcataagttac

SEQ ID NO: 5633048 - DNA, 25 bp, Homo sapien
agtcacttgccctcaaaacacacaa

SEQ ID NO: 5633049 - DNA, 25 bp, Homo sapien
gaaaggatatgcattgtactgtgct

SEQ ID NO: 5633050 - DNA, 25 bp, Homo sapien
aaaaaattcttctagagccttgcac

SEQ ID NO: 5633051 - DNA, 25 bp, Homo sapien
acaatgccagttcttgaaatatttc

SEQ ID NO: 5633052 - DNA, 25 bp, Homo sapien
acaaagaacgaccacctggaaagtg

SEQ ID NO: 5633053 - DNA, 25 bp, Homo sapien
ttatggagccacattgctcactgca

SEQ ID NO: 5633054 - DNA, 25 bp, Homo sapien
cttctagagccttgcacacaatgcc

SEQ ID NO: 5633055 - DNA, 25 bp, Homo sapien
acgtggctgaaaggatatgcattgt

SEQ ID NO: 5633056 - DNA, 25 bp, Homo sapien
tactgtgcttatggagccacattgc

SEQ ID NO: 5633057 - DNA, 25 bp, Homo sapien
aaataaacaaagacgtggctgaaag

SEQ ID NO: 5633058 - DNA, 25 bp, Homo sapien
agagccttgcacacaatgccagttc

SEQ ID NO: 5633059 - DNA, 25 bp, Homo sapien
aatgaaataaacaaagacgtggctg

SEQ ID NO: 5633060 - DNA, 25 bp, Homo sapien
ataacaaaactcagctaggtaacat

SEQ ID NO: 5633061 - DNA, 25 bp, Homo sapien
ccttttattagcacctaggggggca

SEQ ID NO: 5633062 - DNA, 25 bp, Homo sapien
gaaaccttcgcaacaagaacaacaa

SEQ ID NO: 5633063 - DNA, 25 bp, Homo sapien
ttcaccgtacattcagtcacaaata

SEQ ID NO: 5633064 - DNA, 25 bp, Homo sapien
agctaggtaacattatgacagtttc

SEQ ID NO: 5633065 - DNA, 25 bp, Homo sapien
cagcaagaagctcacaaatgttcat

SEQ ID NO: 5633066 - DNA, 25 bp, Homo sapien
tatttgaaaccttcgcaacaagaac

SEQ ID NO: 5633067 - DNA, 25 bp, Homo sapien
tgacagtttcaccgtacattcagtc

SEQ ID NO: 5633068 - DNA, 25 bp, Homo sapien
aaaacagcaagaagctcacaaatgt

SEQ ID NO: 5633069 - DNA, 25 bp, Homo sapien
aatctataaaacagcaagaagctca

SEQ ID NO: 5633070 - DNA, 25 bp, Homo sapien
ttttttgcacaagatcactacactc

SEQ ID NO: 5633071 - DNA, 25 bp, Homo sapien
atagtatctcacaagggttctctgc

SEQ ID NO: 5633072 - DNA, 25 bp, Homo sapien
cacagcacctgagctgccactgcca

SEQ ID NO: 5633073 - DNA, 25 bp, Homo sapien
gtcttggggatggttgtcttacata

SEQ ID NO: 5633074 - DNA, 25 bp, Homo sapien
tggagcacttcctacccacagcacc

SEQ ID NO: 5633075 - DNA, 25 bp, Homo sapien
gtcattccagtgaaaaatctcaact

SEQ ID NO: 5633076 - DNA, 25 bp, Homo sapien
aatcccagtcatggatgccatacac

SEQ ID NO: 5633077 - DNA, 25 bp, Homo sapien
gtaatatatggcctaaagaaatccc

SEQ ID NO: 5633078 - DNA, 25 bp, Homo sapien
cactgccagggcacctacctatggc

SEQ ID NO: 5633079 - DNA, 25 bp, Homo sapien
tactgctaccacaatactgctgctg

SEQ ID NO: 5633080 - DNA, 25 bp, Homo sapien
tacacattagaaaacttagactcaa

SEQ ID NO: 5633081 - DNA, 25 bp, Homo sapien
tacacttctaacctgcagcatcccc

SEQ ID NO: 5633082 - DNA, 25 bp, Homo sapien
aaactgacccaatgaggcagtcaac

SEQ ID NO: 5633083 - DNA, 25 bp, Homo sapien
taaactctagggtaggatttggaca

SEQ ID NO: 5633084 - DNA, 25 bp, Homo sapien
tgggcacatcagaaataaaggtgag

SEQ ID NO: 5633085 - DNA, 25 bp, Homo sapien
gagaatgtttcagactgggcacatc

SEQ ID NO: 5633086 - DNA, 25 bp, Homo sapien
atgagagaaacctgagctgtgttta

SEQ ID NO: 5633087 - DNA, 25 bp, Homo sapien
aggtacaagaagaatggttgactgt

SEQ ID NO: 5633088 - DNA, 25 bp, Homo sapien
gctgcaatagctcaggaaaggtaca

SEQ ID NO: 5633089 - DNA, 25 bp, Homo sapien
atttggacacctgtaggagagaaag

SEQ ID NO: 5633090 - DNA, 25 bp, Homo sapien
ccagagaggaatctgctgcaatagc

SEQ ID NO: 5633091 - DNA, 25 bp, Homo sapien
aaatcctgtgaaggtaaactgaccc

SEQ ID NO: 5633092 - DNA, 25 bp, Homo sapien
atgggctataaaccaagggaaggat

SEQ ID NO: 5633093 - DNA, 25 bp, Homo sapien
ccagcccacctgagtatcgtaacat

SEQ ID NO: 5633094 - DNA, 25 bp, Homo sapien
tctctgacttgcccgtgaggactgg

SEQ ID NO: 5633095 - DNA, 25 bp, Homo sapien
gtgggttcagttaccaaagcaaagc

SEQ ID NO: 5633096 - DNA, 25 bp, Homo sapien
gtaactagcgtaatggttggtgtat

SEQ ID NO: 5633097 - DNA, 25 bp, Homo sapien
tataacactgagaaaagctgagctg

SEQ ID NO: 5633098 - DNA, 25 bp, Homo sapien
agtggcaatagtgataccagacctc

SEQ ID NO: 5633099 - DNA, 25 bp, Homo sapien
aactagaggcacatgggattctttg

SEQ ID NO: 5633100 - DNA, 25 bp, Homo sapien
atttggctacaggtctctagggaag

SEQ ID NO: 5633101 - DNA, 25 bp, Homo sapien
ctacgtgatctctgagggcttgttc

SEQ ID NO: 5633102 - DNA, 25 bp, Homo sapien
ggagaatgaacggactacgtgatct

SEQ ID NO: 5633103 - DNA, 25 bp, Homo sapien
cctagaatctccagaggaatgtttc

SEQ ID NO: 5633104 - DNA, 25 bp, Homo sapien
gggcagaggctctcagtgttcacaa

SEQ ID NO: 5633105 - DNA, 25 bp, Homo sapien
tataacctggaagctccctgcctcg

SEQ ID NO: 5633106 - DNA, 25 bp, Homo sapien
cattatacctcaagccggcattcac

SEQ ID NO: 5633107 - DNA, 25 bp, Homo sapien
tgggggtcagatatgcctcattata

SEQ ID NO: 5633108 - DNA, 25 bp, Homo sapien
aacgtacctataacctggaagctcc

SEQ ID NO: 5633109 - DNA, 25 bp, Homo sapien
ctcttttacattctgggcagaggct

SEQ ID NO: 5633110 - DNA, 25 bp, Homo sapien
ctaaggcctctaaccatctgaatgg

SEQ ID NO: 5633111 - DNA, 25 bp, Homo sapien
tattgcaacccagacatttcctttc

SEQ ID NO: 5633112 - DNA, 25 bp, Homo sapien
ctccttggccagggcgcttttaaaa

SEQ ID NO: 5633113 - DNA, 25 bp, Homo sapien
gagagattgtttcaggccatgaggg

SEQ ID NO: 5633114 - DNA, 25 bp, Homo sapien
gccggcattcacatcaacgcagacc

SEQ ID NO: 5633115 - DNA, 25 bp, Homo sapien
gtgttatataaatagccatccagat

SEQ ID NO: 5633116 - DNA, 25 bp, Homo sapien
ggtgcagctgagaaacaggtttttg

SEQ ID NO: 5633117 - DNA, 25 bp, Homo sapien
taaatagccatccagattgggagga

SEQ ID NO: 5633118 - DNA, 25 bp, Homo sapien
cagtgaatgacaggatgcatctctt

SEQ ID NO: 5633119 - DNA, 25 bp, Homo sapien
aatgaaacgacgtgctgccgtcctt

SEQ ID NO: 5633120 - DNA, 25 bp, Homo sapien
tgacaggatgcatctcttgtgccaa

SEQ ID NO: 5633121 - DNA, 25 bp, Homo sapien
tttccagtgaatgacaggatgcatc

SEQ ID NO: 5633122 - DNA, 25 bp, Homo sapien
ttcacatatccagaaagggagaatt

SEQ ID NO: 5633123 - DNA, 25 bp, Homo sapien
acgtgctgccgtcctttgaaagttt

SEQ ID NO: 5633124 - DNA, 25 bp, Homo sapien
cctagagggctaagcatccatccct

SEQ ID NO: 5633125 - DNA, 25 bp, Homo sapien
aggtttttgtctaggccagaggaac

SEQ ID NO: 5633126 - DNA, 25 bp, Homo sapien
taaatgagcagtaagaagaaaacta

SEQ ID NO: 5633127 - DNA, 25 bp, Homo sapien
agctgacattctaagcaggggagac

SEQ ID NO: 5633128 - DNA, 25 bp, Homo sapien
actgtgtgccgggtactattctagc

SEQ ID NO: 5633129 - DNA, 25 bp, Homo sapien
taagcttctactgtgtgccgggtac

SEQ ID NO: 5633130 - DNA, 25 bp, Homo sapien
gcgcagtggctcatatctacaacca

SEQ ID NO: 5633131 - DNA, 25 bp, Homo sapien
gcaggccggactacttgagtccagg

SEQ ID NO: 5633132 - DNA, 25 bp, Homo sapien
agcaaataaatgagcagtaagaaga

SEQ ID NO: 5633133 - DNA, 25 bp, Homo sapien
ggagacggtcaataaataagcaaat

SEQ ID NO: 5633134 - DNA, 25 bp, Homo sapien
acatagcgaaatcccgtctgaaaaa

SEQ ID NO: 5633135 - DNA, 25 bp, Homo sapien
agaaaagtctttctggtaaggtgat

SEQ ID NO: 5633136 - DNA, 25 bp, Homo sapien
tatctacaaccacagcactttggga

SEQ ID NO: 5633137 - DNA, 25 bp, Homo sapien
cctctcatccaactcccggaccggc

SEQ ID NO: 5633138 - DNA, 25 bp, Homo sapien
tgcgtcccttgtgcggacatagagc

SEQ ID NO: 5633139 - DNA, 25 bp, Homo sapien
tcgcccctgcgtcctggacgcccct

SEQ ID NO: 5633140 - DNA, 25 bp, Homo sapien
catccaactcccggaccggccttgg

SEQ ID NO: 5633141 - DNA, 25 bp, Homo sapien
acgcccctgcgtcccttgtgcggac

SEQ ID NO: 5633142 - DNA, 25 bp, Homo sapien
ccagggaactccaatcctctcatcc

SEQ ID NO: 5633143 - DNA, 25 bp, Homo sapien
cctgcgtcctggacgcccctgcgtc

SEQ ID NO: 5633144 - DNA, 25 bp, Homo sapien
tcccttgtgcggacatagagcacag

SEQ ID NO: 5633145 - DNA, 25 bp, Homo sapien
acactgcccagatgcgtaactggaa

SEQ ID NO: 5633146 - DNA, 25 bp, Homo sapien
ccccaataggaggagcatcctgggg

SEQ ID NO: 5633147 - DNA, 25 bp, Homo sapien
gcccagatgcgtaactggaagccag

SEQ ID NO: 5633148 - DNA, 25 bp, Homo sapien
tgggagttacacttgagagaatgac

SEQ ID NO: 5633149 - DNA, 25 bp, Homo sapien
gataaggtgccttagagactggaaa

SEQ ID NO: 5633150 - DNA, 25 bp, Homo sapien
agccatcgtaagggatagatcctaa

SEQ ID NO: 5633151 - DNA, 25 bp, Homo sapien
ttaggtaagataatgataaggtgcc

SEQ ID NO: 5633152 - DNA, 25 bp, Homo sapien
ctggagtagcaagagtcattcattt

SEQ ID NO: 5633153 - DNA, 25 bp, Homo sapien
tgatgctttgcactgggagttacac

SEQ ID NO: 5633154 - DNA, 25 bp, Homo sapien
gagggcgcttatccagaagttagga

SEQ ID NO: 5633155 - DNA, 25 bp, Homo sapien
ctaatgcagtgcgttgtcccagtga

SEQ ID NO: 5633156 - DNA, 25 bp, Homo sapien
ccaggtcaccttaggcaagtcattg

SEQ ID NO: 5633157 - DNA, 25 bp, Homo sapien
cacaggattattaggaagtttaggt

SEQ ID NO: 5633158 - DNA, 25 bp, Homo sapien
agactggaaaaccctgagccatcgt

SEQ ID NO: 5633159 - DNA, 25 bp, Homo sapien
cttgatatcaggtgggtaaagcata

SEQ ID NO: 5633160 - DNA, 25 bp, Homo sapien
tggtgacctcagacactctgaattt

SEQ ID NO: 5633161 - DNA, 25 bp, Homo sapien
gcatagtaagaacttgataaagagc

SEQ ID NO: 5633162 - DNA, 25 bp, Homo sapien
gtgtgtgttgagtgattcatgagct

SEQ ID NO: 5633163 - DNA, 25 bp, Homo sapien
ctggtaccagctctagatcttcctc

SEQ ID NO: 5633164 - DNA, 25 bp, Homo sapien
taagtgttgtcagcagtgaaaaggg

SEQ ID NO: 5633165 - DNA, 25 bp, Homo sapien
ccctctctggcctggtaccagctct

SEQ ID NO: 5633166 - DNA, 25 bp, Homo sapien
gggctgagcacagatctgcttgatg

SEQ ID NO: 5633167 - DNA, 25 bp, Homo sapien
gtgggtaaagcatagtaagaacttg

SEQ ID NO: 5633168 - DNA, 25 bp, Homo sapien
cagtgaaaagggaatatgctcctct

SEQ ID NO: 5633169 - DNA, 25 bp, Homo sapien
gataaagagcattccctctctggcc

SEQ ID NO: 5633170 - DNA, 25 bp, Homo sapien
ccaggcacctgcttggtttagaggc

SEQ ID NO: 5633171 - DNA, 25 bp, Homo sapien
tggcagaaggaaagtaacacttact

SEQ ID NO: 5633172 - DNA, 25 bp, Homo sapien
acctggcccgttaatgtgatttttc

SEQ ID NO: 5633173 - DNA, 25 bp, Homo sapien
ctgcagttaccagagcaaggtgaga

SEQ ID NO: 5633174 - DNA, 25 bp, Homo sapien
ttgccaaagttagtggcagaaggaa

SEQ ID NO: 5633175 - DNA, 25 bp, Homo sapien
caaggttttgatgcttcagtgagtg

SEQ ID NO: 5633176 - DNA, 25 bp, Homo sapien
taacagcaaagtgagtcttcccatc

SEQ ID NO: 5633177 - DNA, 25 bp, Homo sapien
tgagaccctatgatgtacctggccc

SEQ ID NO: 5633178 - DNA, 25 bp, Homo sapien
agtcacctgggactagcaaggtttt

SEQ ID NO: 5633179 - DNA, 25 bp, Homo sapien
agccccactgatggtctgtcctgac

SEQ ID NO: 5633180 - DNA, 25 bp, Homo sapien
tgaaacccgactcaggatcccattt

SEQ ID NO: 5633181 - DNA, 25 bp, Homo sapien
atctggtaggtcatggtagcttcat

SEQ ID NO: 5633182 - DNA, 25 bp, Homo sapien
caatatattcagcagtatcagttac

SEQ ID NO: 5633183 - DNA, 25 bp, Homo sapien
tcatacagtaagtttcaagggccac

SEQ ID NO: 5633184 - DNA, 25 bp, Homo sapien
agtcctttccttcgttagaggcatc

SEQ ID NO: 5633185 - DNA, 25 bp, Homo sapien
aggtcatggtagcttcatcagaaac

SEQ ID NO: 5633186 - DNA, 25 bp, Homo sapien
aatagattaattttggcaggcgttg

SEQ ID NO: 5633187 - DNA, 25 bp, Homo sapien
catttgggtatgtgaactgttcgct

SEQ ID NO: 5633188 - DNA, 25 bp, Homo sapien
tatcagttacaaccatttgggtatg

SEQ ID NO: 5633189 - DNA, 25 bp, Homo sapien
ttaattttggcaggcgttggaaatc

SEQ ID NO: 5633190 - DNA, 25 bp, Homo sapien
aagggccacaatggtatggcctctt

SEQ ID NO: 5633191 - DNA, 25 bp, Homo sapien
ggagggcttcagtgtagtaaatcta

SEQ ID NO: 5633192 - DNA, 25 bp, Homo sapien
aagaggtttagtgaactcacggttc

SEQ ID NO: 5633193 - DNA, 25 bp, Homo sapien
atttaggtatagaaagaaggttgta

SEQ ID NO: 5633194 - DNA, 25 bp, Homo sapien
caatctggccaaaatatagaaaaaa

SEQ ID NO: 5633195 - DNA, 25 bp, Homo sapien
tatgtgacttggatacttgacacca

SEQ ID NO: 5633196 - DNA, 25 bp, Homo sapien
tgtcagattcaccctcccaccataa

SEQ ID NO: 5633197 - DNA, 25 bp, Homo sapien
ggggagaactcacaatcatgataga

SEQ ID NO: 5633198 - DNA, 25 bp, Homo sapien
tagaaagaaggttgtatagctttac

SEQ ID NO: 5633199 - DNA, 25 bp, Homo sapien
ggatacttgacaccaaatagcttgt

SEQ ID NO: 5633200 - DNA, 25 bp, Homo sapien
ataaaaaactatacaatctggccaa

SEQ ID NO: 5633201 - DNA, 25 bp, Homo sapien
caccaaatagcttgtgtcagattca

SEQ ID NO: 5633202 - DNA, 25 bp, Homo sapien
ttagtgaactcacggttccacatgg

SEQ ID NO: 5633203 - DNA, 25 bp, Homo sapien
tacatgaaaaatacaggcaggctaa

SEQ ID NO: 5633204 - DNA, 25 bp, Homo sapien
caggcaggctaatattgcaaacaac

SEQ ID NO: 5633205 - DNA, 25 bp, Homo sapien
aggtctgagcctgaaaacaaacgtt

SEQ ID NO: 5633206 - DNA, 25 bp, Homo sapien
taaaagaaaagaccatcagttctta

SEQ ID NO: 5633207 - DNA, 25 bp, Homo sapien
gttcttaaggtctgagcctgaaaac

SEQ ID NO: 5633208 - DNA, 25 bp, Homo sapien
agcaatgacccaatgtcactgtagt

SEQ ID NO: 5633209 - DNA, 25 bp, Homo sapien
tcagaactgcttagacttttgtgta

SEQ ID NO: 5633210 - DNA, 25 bp, Homo sapien
ttagattcagtaacatgattaactc

SEQ ID NO: 5633211 - DNA, 25 bp, Homo sapien
aaaggtttacatgaaaaatacaggc

SEQ ID NO: 5633212 - DNA, 25 bp, Homo sapien
gatgaataaattagaggggtggttc

SEQ ID NO: 5633213 - DNA, 25 bp, Homo sapien
aaacaacatgtaatttcaaagagga

SEQ ID NO: 5633214 - DNA, 25 bp, Homo sapien
ggtctgaccatcaggccaatcacaa

SEQ ID NO: 5633215 - DNA, 25 bp, Homo sapien
aatcacaaagtagctctggagagaa

SEQ ID NO: 5633216 - DNA, 25 bp, Homo sapien
catctttgcagtcctcacgagtctc

SEQ ID NO: 5633217 - DNA, 25 bp, Homo sapien
ccagggaggaccatctttgcagtcc

SEQ ID NO: 5633218 - DNA, 25 bp, Homo sapien
accatcaggccaatcacaaagtagc

SEQ ID NO: 5633219 - DNA, 25 bp, Homo sapien
gagaaggaagttaatcacagagtaa

SEQ ID NO: 5633220 - DNA, 25 bp, Homo sapien
tcctgcggttaaacacatggcactt

SEQ ID NO: 5633221 - DNA, 25 bp, Homo sapien
gccaggaactttctggtcagagatt

SEQ ID NO: 5633222 - DNA, 25 bp, Homo sapien
cttttcttaactttggcagcattga

SEQ ID NO: 5633223 - DNA, 25 bp, Homo sapien
ggcagcattgaaaaccagggccatt

SEQ ID NO: 5633224 - DNA, 25 bp, Homo sapien
cacgagtctcctggttcccgctctt

SEQ ID NO: 5633225 - DNA, 25 bp, Homo sapien
ttagccatcttggacctgctgggtc

SEQ ID NO: 5633226 - DNA, 25 bp, Homo sapien
ctttccatgtgagggtaaaagtaag

SEQ ID NO: 5633227 - DNA, 25 bp, Homo sapien
cagtgtcaaagactgtcagagtgac

SEQ ID NO: 5633228 - DNA, 25 bp, Homo sapien
acctgctgggtcactggcatgttat

SEQ ID NO: 5633229 - DNA, 25 bp, Homo sapien
acctaaacccaggtcaggaaagcaa

SEQ ID NO: 5633230 - DNA, 25 bp, Homo sapien
aggaaaatatgggtctataagttga

SEQ ID NO: 5633231 - DNA, 25 bp, Homo sapien
atttagcaatagataccaactttcc

SEQ ID NO: 5633232 - DNA, 25 bp, Homo sapien
aaattagccatcttggttagccatc

SEQ ID NO: 5633233 - DNA, 25 bp, Homo sapien
aattttaagcacacaggcatttcct

SEQ ID NO: 5633234 - DNA, 25 bp, Homo sapien
tactgaacctcaaagttagatttac

SEQ ID NO: 5633235 - DNA, 25 bp, Homo sapien
ctgccactagcagtcgctctcattc

SEQ ID NO: 5633236 - DNA, 25 bp, Homo sapien
atggccgtggcttagaatagtctat

SEQ ID NO: 5633237 - DNA, 25 bp, Homo sapien
gaatagtctatcagaggcagcaatc

SEQ ID NO: 5633238 - DNA, 25 bp, Homo sapien
aacgttagaagaaacaagcatgctt

SEQ ID NO: 5633239 - DNA, 25 bp, Homo sapien
aattgcattggtagccaacagttac

SEQ ID NO: 5633240 - DNA, 25 bp, Homo sapien
caacagttacaaattgggcatttca

SEQ ID NO: 5633241 - DNA, 25 bp, Homo sapien
gacacatgcttgttaggagaagaac

SEQ ID NO: 5633242 - DNA, 25 bp, Homo sapien
ctgttctgttaaggacatgcatgtc

SEQ ID NO: 5633243 - DNA, 25 bp, Homo sapien
aggagaagaactgtcccacctgtct

SEQ ID NO: 5633244 - DNA, 25 bp, Homo sapien
tttctccacgagatggccgtggctt

SEQ ID NO: 5633245 - DNA, 25 bp, Homo sapien
gtcccacctgtctgagaactacctt

SEQ ID NO: 5633246 - DNA, 25 bp, Homo sapien
ccagattagctaatgggcagatgag

SEQ ID NO: 5633247 - DNA, 25 bp, Homo sapien
cagctggagggtgttactgtctcca

SEQ ID NO: 5633248 - DNA, 25 bp, Homo sapien
tgtgtcccttggaggggacagttca

SEQ ID NO: 5633249 - DNA, 25 bp, Homo sapien
ggtgtcgcgatcacaatgccatgct

SEQ ID NO: 5633250 - DNA, 25 bp, Homo sapien
ggcatgagatcccatatggagcatc

SEQ ID NO: 5633251 - DNA, 25 bp, Homo sapien
ggctctgaattaaagaaggggccaa

SEQ ID NO: 5633252 - DNA, 25 bp, Homo sapien
gttatgtgctggaggctttgccttt

SEQ ID NO: 5633253 - DNA, 25 bp, Homo sapien
gtacggtgattggcctatggctctg

SEQ ID NO: 5633254 - DNA, 25 bp, Homo sapien
agctgggactcaccctgggtgtcgc

SEQ ID NO: 5633255 - DNA, 25 bp, Homo sapien
ttgtaaatgaagaaagtacggtgat

SEQ ID NO: 5633256 - DNA, 25 bp, Homo sapien
ttgtatctggaagccttgccatgtt

SEQ ID NO: 5633257 - DNA, 25 bp, Homo sapien
tgcctgaggctctgtgtcccttgga

SEQ ID NO: 5633258 - DNA, 25 bp, Homo sapien
tacctaaggttactgtgatcatcac

SEQ ID NO: 5633259 - DNA, 25 bp, Homo sapien
caattatatgagaaactaaagaaga

SEQ ID NO: 5633260 - DNA, 25 bp, Homo sapien
aagaaggaaaaaccatcagtgaaca

SEQ ID NO: 5633261 - DNA, 25 bp, Homo sapien
caaaatgcattgttagattatgtga

SEQ ID NO: 5633262 - DNA, 25 bp, Homo sapien
taaatgcaaaactaagatattcacc

SEQ ID NO: 5633263 - DNA, 25 bp, Homo sapien
gatagtgattgcattgattctgctt

SEQ ID NO: 5633264 - DNA, 25 bp, Homo sapien
aagaaattagactcagatgctatat

SEQ ID NO: 5633265 - DNA, 25 bp, Homo sapien
atcagtgaacactcaagtaataatc

SEQ ID NO: 5633266 - DNA, 25 bp, Homo sapien
tatagaatatgatagtgattgcatt

SEQ ID NO: 5633267 - DNA, 25 bp, Homo sapien
gatcatcacttaggagttttgaatc

SEQ ID NO: 5633268 - DNA, 25 bp, Homo sapien
atctgttaggaaaaactatagaata

SEQ ID NO: 5633269 - DNA, 25 bp, Homo sapien
tatgctatcctcaaacgacagtcct

SEQ ID NO: 5633270 - DNA, 25 bp, Homo sapien
tgtaaaggagatgctgccaattttc

SEQ ID NO: 5633271 - DNA, 25 bp, Homo sapien
aaccatcacagcaaacctagagttt

SEQ ID NO: 5633272 - DNA, 25 bp, Homo sapien
tcctaaagatgaatactgttaagaa

SEQ ID NO: 5633273 - DNA, 25 bp, Homo sapien
cacatatgtgaaacgagtattagtc

SEQ ID NO: 5633274 - DNA, 25 bp, Homo sapien
atctgggccaaaagtggttaccaaa

SEQ ID NO: 5633275 - DNA, 25 bp, Homo sapien
acgctgaattttacaacctggttgc

SEQ ID NO: 5633276 - DNA, 25 bp, Homo sapien
ttcacacgtgtaaacaaaaccttca

SEQ ID NO: 5633277 - DNA, 25 bp, Homo sapien
ttcacccatctcacacacagcactc

SEQ ID NO: 5633278 - DNA, 25 bp, Homo sapien
aggaactggaaccaaactggtaata

SEQ ID NO: 5633279 - DNA, 25 bp, Homo sapien
caaaaaagccatgtgattcagttac

SEQ ID NO: 5633280 - DNA, 25 bp, Homo sapien
gagatgaggtgctacttggataagc

SEQ ID NO: 5633281 - DNA, 25 bp, Homo sapien
tgggggcaaagtcaatagctttcac

SEQ ID NO: 5633282 - DNA, 25 bp, Homo sapien
catccagcccaaatttcaacggtgc

SEQ ID NO: 5633283 - DNA, 25 bp, Homo sapien
attcacggctagataaacacagatc

SEQ ID NO: 5633284 - DNA, 25 bp, Homo sapien
atttctagggccaacaagtaccatc

SEQ ID NO: 5633285 - DNA, 25 bp, Homo sapien
atcctctaggcagtggttctgaatc

SEQ ID NO: 5633286 - DNA, 25 bp, Homo sapien
gctacttggataagcaggtaggaga

SEQ ID NO: 5633287 - DNA, 25 bp, Homo sapien
aacggtgctgagattaagaaacact

SEQ ID NO: 5633288 - DNA, 25 bp, Homo sapien
tcacagagccccataataaagaatc

SEQ ID NO: 5633289 - DNA, 25 bp, Homo sapien
tacaatccccaggtctcacagagcc

SEQ ID NO: 5633290 - DNA, 25 bp, Homo sapien
agtacatgaactttctgggggcaaa

SEQ ID NO: 5633291 - DNA, 25 bp, Homo sapien
gaccatacgtctacttgtatgtcat

SEQ ID NO: 5633292 - DNA, 25 bp, Homo sapien
atgacatacaagtagacgtatggtc

SEQ ID NO: 5633293 - DNA, 25 bp, Homo sapien
agactggaagaaaaaatgttattta

SEQ ID NO: 5633294 - DNA, 25 bp, Homo sapien
ggatgaaaatatcactgaaattcat

SEQ ID NO: 5633295 - DNA, 25 bp, Homo sapien
tcacttgtataattaaaggagactc

SEQ ID NO: 5633296 - DNA, 25 bp, Homo sapien
tgtcatgcccattaaaagtgccagc

SEQ ID NO: 5633297 - DNA, 25 bp, Homo sapien
tacatacataggaaaatatctttat

SEQ ID NO: 5633298 - DNA, 25 bp, Homo sapien
atgcccattaaaagtgccagcaaat

SEQ ID NO: 5633299 - DNA, 25 bp, Homo sapien
attaatttcagaacttgaatggcat

SEQ ID NO: 5633300 - DNA, 25 bp, Homo sapien
cagattcagaaacactgtcatgccc

SEQ ID NO: 5633301 - DNA, 25 bp, Homo sapien
ttgtataattaaaggagactcagat

SEQ ID NO: 5633302 - DNA, 25 bp, Homo sapien
gagactcagattcagaaacactgtc

SEQ ID NO: 5633303 - DNA, 25 bp, Homo sapien
aatacagaatacaagtgcctttctc

SEQ ID NO: 5633304 - DNA, 25 bp, Homo sapien
gaacagttgggatcaagagcttatt

SEQ ID NO: 5633305 - DNA, 25 bp, Homo sapien
tcagtagatttgtttgtacagatcc

SEQ ID NO: 5633306 - DNA, 25 bp, Homo sapien
atgggaaattgtattacctgctttt

SEQ ID NO: 5633307 - DNA, 25 bp, Homo sapien
cctcatatggagaatagagacccaa

SEQ ID NO: 5633308 - DNA, 25 bp, Homo sapien
actaataatgccacaatggtgtgtg

SEQ ID NO: 5633309 - DNA, 25 bp, Homo sapien
agagacccaaagaacagttgggatc

SEQ ID NO: 5633310 - DNA, 25 bp, Homo sapien
gagctttaggctaagggcagtaaat

SEQ ID NO: 5633311 - DNA, 25 bp, Homo sapien
tcaagggaaccctcatatggagaat

SEQ ID NO: 5633312 - DNA, 25 bp, Homo sapien
aggtcagggaacccttcctgcaact

SEQ ID NO: 5633313 - DNA, 25 bp, Homo sapien
gagtggaagataaggagtatttcag

SEQ ID NO: 5633314 - DNA, 25 bp, Homo sapien
tcctgcaactgccgtttctcaagtg

SEQ ID NO: 5633315 - DNA, 25 bp, Homo sapien
agaggaatatatttcaggctgtagc

SEQ ID NO: 5633316 - DNA, 25 bp, Homo sapien
agactactacccacagcacactgct

SEQ ID NO: 5633317 - DNA, 25 bp, Homo sapien
tgactccccagttaaagtgtacgta

SEQ ID NO: 5633318 - DNA, 25 bp, Homo sapien
ggaacatggccaaacagactactac

SEQ ID NO: 5633319 - DNA, 25 bp, Homo sapien
aggaaacaggaaatttaagaatcag

SEQ ID NO: 5633320 - DNA, 25 bp, Homo sapien
tagaagaccccctagaagcagggaa

SEQ ID NO: 5633321 - DNA, 25 bp, Homo sapien
ccaggatttagggcaaacaattatt

SEQ ID NO: 5633322 - DNA, 25 bp, Homo sapien
ttgagccgttattcttgggaatctc

SEQ ID NO: 5633323 - DNA, 25 bp, Homo sapien
agatataacttggagatgcactgcc

SEQ ID NO: 5633324 - DNA, 25 bp, Homo sapien
gctttatgagataagaatccctccc

SEQ ID NO: 5633325 - DNA, 25 bp, Homo sapien
gtattaaaatagataggcaggacac

SEQ ID NO: 5633326 - DNA, 25 bp, Homo sapien
ggaaagagtttcagtgatagccact

SEQ ID NO: 5633327 - DNA, 25 bp, Homo sapien
ggtatacaacaataactttgaccac

SEQ ID NO: 5633328 - DNA, 25 bp, Homo sapien
ttgaccacatgataggagaagtgag

SEQ ID NO: 5633329 - DNA, 25 bp, Homo sapien
aaagccacagaagactttattctct

SEQ ID NO: 5633330 - DNA, 25 bp, Homo sapien
caaaagtatacatcccatcgctggt

SEQ ID NO: 5633331 - DNA, 25 bp, Homo sapien
ttggaccataagtcattcccagagc

SEQ ID NO: 5633332 - DNA, 25 bp, Homo sapien
cagtgatagccactaaagccacaga

SEQ ID NO: 5633333 - DNA, 25 bp, Homo sapien
gagaagtgagaaatgtagccaattt

SEQ ID NO: 5633334 - DNA, 25 bp, Homo sapien
ctacagaaagtacagaaacctaaaa

SEQ ID NO: 5633335 - DNA, 25 bp, Homo sapien
taactttgaccacatgataggagaa

SEQ ID NO: 5633336 - DNA, 25 bp, Homo sapien
tttttgctaattataaggctgaaat

SEQ ID NO: 5633337 - DNA, 25 bp, Homo sapien
tggaaagtgagacaggctatctctt

SEQ ID NO: 5633338 - DNA, 25 bp, Homo sapien
aagaagcagctgtttagtcctggcc

SEQ ID NO: 5633339 - DNA, 25 bp, Homo sapien
tagtgactgctacctctggaaagtg

SEQ ID NO: 5633340 - DNA, 25 bp, Homo sapien
gtaagtggaacccaggaaatgatta

SEQ ID NO: 5633341 - DNA, 25 bp, Homo sapien
tttagtcctggccacacacaaactc

SEQ ID NO: 5633342 - DNA, 25 bp, Homo sapien
tgaaaagatgaccacaacataacat

SEQ ID NO: 5633343 - DNA, 25 bp, Homo sapien
agtgcttgtgacattgttggtgctc

SEQ ID NO: 5633344 - DNA, 25 bp, Homo sapien
ccaagctgcttaatagtgtgatttc

SEQ ID NO: 5633345 - DNA, 25 bp, Homo sapien
ctggccacacaaattataggttatg

SEQ ID NO: 5633346 - DNA, 25 bp, Homo sapien
ataggttatgtgggtagtgatattt

SEQ ID NO: 5633347 - DNA, 25 bp, Homo sapien
aagatacatgaggaaaaggatttaa

SEQ ID NO: 5633348 - DNA, 25 bp, Homo sapien
tctaacctcaagaagcatgtagagg

SEQ ID NO: 5633349 - DNA, 25 bp, Homo sapien
agcacccagggctgtttctcaacca

SEQ ID NO: 5633350 - DNA, 25 bp, Homo sapien
taatgtttgggatgtgtcagcaccc

SEQ ID NO: 5633351 - DNA, 25 bp, Homo sapien
gataccacaccaaacatgtagaggt

SEQ ID NO: 5633352 - DNA, 25 bp, Homo sapien
tcccagtcaaatcatccatatagcc

SEQ ID NO: 5633353 - DNA, 25 bp, Homo sapien
aatcatctagcaacgttgagggtct

SEQ ID NO: 5633354 - DNA, 25 bp, Homo sapien
ctatttaatgtttgggatgtgtcag

SEQ ID NO: 5633355 - DNA, 25 bp, Homo sapien
ctctgtgctagataccacaccaaac

SEQ ID NO: 5633356 - DNA, 25 bp, Homo sapien
atatagccaatcatctagcaacgtt

SEQ ID NO: 5633357 - DNA, 25 bp, Homo sapien
ccaaacatgtagaggtgtctaacct

SEQ ID NO: 5633358 - DNA, 25 bp, Homo sapien
tgcacagcgtttcttattactccat

SEQ ID NO: 5633359 - DNA, 25 bp, Homo sapien
gatggaaaatgggtcaccacagaaa

SEQ ID NO: 5633360 - DNA, 25 bp, Homo sapien
agagcctgtttattgtgtacggacc

SEQ ID NO: 5633361 - DNA, 25 bp, Homo sapien
acaaaaacatctactacaaggagga

SEQ ID NO: 5633362 - DNA, 25 bp, Homo sapien
gaaggcaaatgatcagtggtaaaat

SEQ ID NO: 5633363 - DNA, 25 bp, Homo sapien
ctcttcaggccgtagtgaaaatgga

SEQ ID NO: 5633364 - DNA, 25 bp, Homo sapien
caaattgggctaaccagatggaaaa

SEQ ID NO: 5633365 - DNA, 25 bp, Homo sapien
tttgtgactggaaattgaataaaac

SEQ ID NO: 5633366 - DNA, 25 bp, Homo sapien
taacaacgtcagctaaaaatacaga

SEQ ID NO: 5633367 - DNA, 25 bp, Homo sapien
cgtagtgaaaatggagtacatcatc

SEQ ID NO: 5633368 - DNA, 25 bp, Homo sapien
ctacaaggaggattactagtctctt

SEQ ID NO: 5633369 - DNA, 25 bp, Homo sapien
tgtgtacggaccaactgtgcaagca

SEQ ID NO: 5633370 - DNA, 25 bp, Homo sapien
gccgaggcttgcagtactgagccta

SEQ ID NO: 5633371 - DNA, 25 bp, Homo sapien
actgagcctaagttgccggctgaag

SEQ ID NO: 5633372 - DNA, 25 bp, Homo sapien
atgagtctcccagcttagggtgttc

SEQ ID NO: 5633373 - DNA, 25 bp, Homo sapien
ggggtgtccaagatgagtctcccag

SEQ ID NO: 5633374 - DNA, 25 bp, Homo sapien
tattctggcccgtcttgtggtcata

SEQ ID NO: 5633375 - DNA, 25 bp, Homo sapien
ctggctttcccctggcattttcttc

SEQ ID NO: 5633376 - DNA, 25 bp, Homo sapien
aggtcacattttaaccccaggtatc

SEQ ID NO: 5633377 - DNA, 25 bp, Homo sapien
tggcccgtcttgtggtcataggtca

SEQ ID NO: 5633378 - DNA, 25 bp, Homo sapien
ggatgggagagaacatttcccacaa

SEQ ID NO: 5633379 - DNA, 25 bp, Homo sapien
gcctttaggccaaacgtggtggctc

SEQ ID NO: 5633380 - DNA, 25 bp, Homo sapien
ctggcctcgtctaaaggtcgggagg

SEQ ID NO: 5633381 - DNA, 25 bp, Homo sapien
tgtctggaccccacctgagtgtggc

SEQ ID NO: 5633382 - DNA, 25 bp, Homo sapien
ggcgcctctccgtggctgatgaagg

SEQ ID NO: 5633383 - DNA, 25 bp, Homo sapien
cccatgcctggttggtcgtctgggt

SEQ ID NO: 5633384 - DNA, 25 bp, Homo sapien
ggtcctgcccgccgtggctttcttc

SEQ ID NO: 5633385 - DNA, 25 bp, Homo sapien
ccaagtgtgtctggaccccacctga

SEQ ID NO: 5633386 - DNA, 25 bp, Homo sapien
taaccgccatgctgagagggttaca

SEQ ID NO: 5633387 - DNA, 25 bp, Homo sapien
ggctgtaaccgccatgctgagaggg

SEQ ID NO: 5633388 - DNA, 25 bp, Homo sapien
accctttgcgtgtatgagatgcagg

SEQ ID NO: 5633389 - DNA, 25 bp, Homo sapien
ttcacaaacccatgcctggttggtc

SEQ ID NO: 5633390 - DNA, 25 bp, Homo sapien
acctggctccccgtgcatggggaca

SEQ ID NO: 5633391 - DNA, 25 bp, Homo sapien
tcccctccccttcagggcggcagga

SEQ ID NO: 5633392 - DNA, 25 bp, Homo sapien
ctgggatataggctctgcaggtttg

SEQ ID NO: 5633393 - DNA, 25 bp, Homo sapien
atcagaaaatctcagccatacttcc

SEQ ID NO: 5633394 - DNA, 25 bp, Homo sapien
actacagcagccttacagccttcag

SEQ ID NO: 5633395 - DNA, 25 bp, Homo sapien
ttcagtttcaagctgggatataggc

SEQ ID NO: 5633396 - DNA, 25 bp, Homo sapien
agtggctctttctggtactacagca

SEQ ID NO: 5633397 - DNA, 25 bp, Homo sapien
ttgtgtcagaaatttgagtgattac

SEQ ID NO: 5633398 - DNA, 25 bp, Homo sapien
agtgattacaaaatatccaagtgac

SEQ ID NO: 5633399 - DNA, 25 bp, Homo sapien
cagacatgcatttcaaaagccagtt

SEQ ID NO: 5633400 - DNA, 25 bp, Homo sapien
tgtaaatgtatcctggttagtcatg

SEQ ID NO: 5633401 - DNA, 25 bp, Homo sapien
ataggctctgcaggtttgtagaacc

SEQ ID NO: 5633402 - DNA, 25 bp, Homo sapien
aaaagccagttatctcccacgtgtt

SEQ ID NO: 5633403 - DNA, 25 bp, Homo sapien
aaatggagatactgagcaaaaaaat

SEQ ID NO: 5633404 - DNA, 25 bp, Homo sapien
acaatatattcacgagagagcagcc

SEQ ID NO: 5633405 - DNA, 25 bp, Homo sapien
tctaacgtggaactaagcaatttaa

SEQ ID NO: 5633406 - DNA, 25 bp, Homo sapien
agccggtgatctcaatatggccctc

SEQ ID NO: 5633407 - DNA, 25 bp, Homo sapien
cttatcagatgggaagtgaaaagat

SEQ ID NO: 5633408 - DNA, 25 bp, Homo sapien
cagcagctagcacttatcagatggg

SEQ ID NO: 5633409 - DNA, 25 bp, Homo sapien
tgctgtcatggatagttgtatattc

SEQ ID NO: 5633410 - DNA, 25 bp, Homo sapien
atgacctagtctcaggaaaaatgta

SEQ ID NO: 5633411 - DNA, 25 bp, Homo sapien
tctgggacagaaattgattaaacta

SEQ ID NO: 5633412 - DNA, 25 bp, Homo sapien
gcctgatgcgctgctctagagatga

SEQ ID NO: 5633413 - DNA, 25 bp, Homo sapien
tattccagtgccagaaaaaagtaac

SEQ ID NO: 5633414 - DNA, 25 bp, Homo sapien
ggtgctcccccagaggccctctggt

SEQ ID NO: 5633415 - DNA, 25 bp, Homo sapien
cctctcgtctttgggctagggtagg

SEQ ID NO: 5633416 - DNA, 25 bp, Homo sapien
attctggaaagcaaacctctcgtct

SEQ ID NO: 5633417 - DNA, 25 bp, Homo sapien
accagaccccagtcgccttgccagt

SEQ ID NO: 5633418 - DNA, 25 bp, Homo sapien
tagctttctgagtagaaggaaatgc

SEQ ID NO: 5633419 - DNA, 25 bp, Homo sapien
gcgtttcatgggagaagtttgtttc

SEQ ID NO: 5633420 - DNA, 25 bp, Homo sapien
ggccaagatatagtccccggtgctg

SEQ ID NO: 5633421 - DNA, 25 bp, Homo sapien
gccagttatccctggggtgctcccc

SEQ ID NO: 5633422 - DNA, 25 bp, Homo sapien
tatagggactctagccttaggcttc

SEQ ID NO: 5633423 - DNA, 25 bp, Homo sapien
acatgcacgaggtctcttagctttc

SEQ ID NO: 5633424 - DNA, 25 bp, Homo sapien
agtagaaggaaatgctgagtatttt

SEQ ID NO: 5633425 - DNA, 25 bp, Homo sapien
caactaggttcaaccctgatggtcc

SEQ ID NO: 5633426 - DNA, 25 bp, Homo sapien
ggcgagacccctcagtgtgaaaggg

SEQ ID NO: 5633427 - DNA, 25 bp, Homo sapien
ccctgatggtccaagaaggatatgc

SEQ ID NO: 5633428 - DNA, 25 bp, Homo sapien
tgagcagttcagtggttaggtctct

SEQ ID NO: 5633429 - DNA, 25 bp, Homo sapien
aaccattcatgctcatgctggactt

SEQ ID NO: 5633430 - DNA, 25 bp, Homo sapien
acctctctaggaaccccaagtgggc

SEQ ID NO: 5633431 - DNA, 25 bp, Homo sapien
cttaaccaagaaagatagagcaaac

SEQ ID NO: 5633432 - DNA, 25 bp, Homo sapien
ctcgtggcaaaatcacacgccatcc

SEQ ID NO: 5633433 - DNA, 25 bp, Homo sapien
cacgccatcctccaaggggcgagac

SEQ ID NO: 5633434 - DNA, 25 bp, Homo sapien
ccaagaaagatagagcaaaccattc

SEQ ID NO: 5633435 - DNA, 25 bp, Homo sapien
tgggctccccacttggtatttttgc

SEQ ID NO: 5633436 - DNA, 25 bp, Homo sapien
aggaaaactgtaaaagcttggtggc

SEQ ID NO: 5633437 - DNA, 25 bp, Homo sapien
cagcatgactagattagggcataac

SEQ ID NO: 5633438 - DNA, 25 bp, Homo sapien
tacagtatggatattcagcatgact

SEQ ID NO: 5633439 - DNA, 25 bp, Homo sapien
tgaagtgtgaagtactacagattac

SEQ ID NO: 5633440 - DNA, 25 bp, Homo sapien
gaaatgccatataaagttcccctac

SEQ ID NO: 5633441 - DNA, 25 bp, Homo sapien
tagggcataacagaaatgaagccca

SEQ ID NO: 5633442 - DNA, 25 bp, Homo sapien
ctgagccatgcattgttactgaact

SEQ ID NO: 5633443 - DNA, 25 bp, Homo sapien
atgaagcccagtattgtaggttaaa

SEQ ID NO: 5633444 - DNA, 25 bp, Homo sapien
atattccacaatctgagccatgcat

SEQ ID NO: 5633445 - DNA, 25 bp, Homo sapien
aaacttgatgtaataagagctgagc

SEQ ID NO: 5633446 - DNA, 25 bp, Homo sapien
gcttggtggcaaagctatattacca

SEQ ID NO: 5633447 - DNA, 25 bp, Homo sapien
acgatggggttacatctggataaac

SEQ ID NO: 5633448 - DNA, 25 bp, Homo sapien
tcaaaagtcgaaataacctctctcc

SEQ ID NO: 5633449 - DNA, 25 bp, Homo sapien
gcacaggctctaaggaactctgcca

SEQ ID NO: 5633450 - DNA, 25 bp, Homo sapien
tggcagagaatgagactttcaagta

SEQ ID NO: 5633451 - DNA, 25 bp, Homo sapien
agggaccatctataaaagcatcatt

SEQ ID NO: 5633452 - DNA, 25 bp, Homo sapien
agcccctgggatctcaccacagctt

SEQ ID NO: 5633453 - DNA, 25 bp, Homo sapien
aaggaagtacagatgctccgccatt

SEQ ID NO: 5633454 - DNA, 25 bp, Homo sapien
tgggtaatgagaaatgtgcaattgg

SEQ ID NO: 5633455 - DNA, 25 bp, Homo sapien
gaatcattgtaagctagggaccatc

SEQ ID NO: 5633456 - DNA, 25 bp, Homo sapien
actttcaagtaattggcacaggctc

SEQ ID NO: 5633457 - DNA, 25 bp, Homo sapien
aagttgaaatgcattgggttacatc

SEQ ID NO: 5633458 - DNA, 25 bp, Homo sapien
tgaaagaaaacaatggatgagtaga

SEQ ID NO: 5633459 - DNA, 25 bp, Homo sapien
gttgaacctggccaactgggaaatg

SEQ ID NO: 5633460 - DNA, 25 bp, Homo sapien
atccaaggatatgtcagctagaagc

SEQ ID NO: 5633461 - DNA, 25 bp, Homo sapien
tgatgcaggaacagaatttggtaat

SEQ ID NO: 5633462 - DNA, 25 bp, Homo sapien
ggtactgaggaatatagactagcac

SEQ ID NO: 5633463 - DNA, 25 bp, Homo sapien
aatggagtgaccaactacgaaagga

SEQ ID NO: 5633464 - DNA, 25 bp, Homo sapien
ggactgggcagaaaatcactccagc

SEQ ID NO: 5633465 - DNA, 25 bp, Homo sapien
ttccagcagtaaaggtggtgtacaa

SEQ ID NO: 5633466 - DNA, 25 bp, Homo sapien
agaggtaaccaggaagttgaacctg

SEQ ID NO: 5633467 - DNA, 25 bp, Homo sapien
caagactcaagaactaaggactggg

SEQ ID NO: 5633468 - DNA, 25 bp, Homo sapien
actctgattcctaagtgggggtgaa

SEQ ID NO: 5633469 - DNA, 25 bp, Homo sapien
ctcaaagataccgagattgagggcg

SEQ ID NO: 5633470 - DNA, 25 bp, Homo sapien
gcaaaggaggcaaatataacccaga

SEQ ID NO: 5633471 - DNA, 25 bp, Homo sapien
gaggaataatgataatgacagacaa

SEQ ID NO: 5633472 - DNA, 25 bp, Homo sapien
tataacccagaaaggctagggaaga

SEQ ID NO: 5633473 - DNA, 25 bp, Homo sapien
ataatgacagacaaatatgggagtg

SEQ ID NO: 5633474 - DNA, 25 bp, Homo sapien
gagtgcacgcacaccaaaggtcttt

SEQ ID NO: 5633475 - DNA, 25 bp, Homo sapien
ttaatacacaacccagcccctgttc

SEQ ID NO: 5633476 - DNA, 25 bp, Homo sapien
agggccaggtgcctgactcagataa

SEQ ID NO: 5633477 - DNA, 25 bp, Homo sapien
ccaaaccccagccttccactctgtc

SEQ ID NO: 5633478 - DNA, 25 bp, Homo sapien
gctggaactccagacctggacctgt

SEQ ID NO: 5633479 - DNA, 25 bp, Homo sapien
tgcctgactcagataagacaagagc

SEQ ID NO: 5633480 - DNA, 25 bp, Homo sapien
tgactgatagcgtttgagccacaag

SEQ ID NO: 5633481 - DNA, 25 bp, Homo sapien
ctgccactcactagctgggaaatct

SEQ ID NO: 5633482 - DNA, 25 bp, Homo sapien
ttgtacagtcagaaatgcagcaaat

SEQ ID NO: 5633483 - DNA, 25 bp, Homo sapien
gctgggaaatctacaagtcacctta

SEQ ID NO: 5633484 - DNA, 25 bp, Homo sapien
ttaggttttggaacccagctctgcc

SEQ ID NO: 5633485 - DNA, 25 bp, Homo sapien
tcaacaataaaatggccagcaatgc

SEQ ID NO: 5633486 - DNA, 25 bp, Homo sapien
agcacatgcttgatacagactaggt

SEQ ID NO: 5633487 - DNA, 25 bp, Homo sapien
ttaaatctagaagtctgtttccctc

SEQ ID NO: 5633488 - DNA, 25 bp, Homo sapien
cacagagcagtaaggttaaattaac

SEQ ID NO: 5633489 - DNA, 25 bp, Homo sapien
tgatacagactaggtgtgaaatttc

SEQ ID NO: 5633490 - DNA, 25 bp, Homo sapien
atagcgtttgagccacaaggcaagg

SEQ ID NO: 5633491 - DNA, 25 bp, Homo sapien
aaaagctctatatgaaggggagccc

SEQ ID NO: 5633492 - DNA, 25 bp, Homo sapien
ctatatgaaggggagcccaaattag

SEQ ID NO: 5633493 - DNA, 25 bp, Homo sapien
cttccaacgcagtccagctgtggct

SEQ ID NO: 5633494 - DNA, 25 bp, Homo sapien
gtgaaaatgtgcctgatgaacttga

SEQ ID NO: 5633495 - DNA, 25 bp, Homo sapien
acatccttcaaagccacgctggttt

SEQ ID NO: 5633496 - DNA, 25 bp, Homo sapien
ccatgtgaaccaactggcctaagct

SEQ ID NO: 5633497 - DNA, 25 bp, Homo sapien
agttgtgtgggtccaacaaagagta

SEQ ID NO: 5633498 - DNA, 25 bp, Homo sapien
gttctgccaggtgtagtgaaaatgt

SEQ ID NO: 5633499 - DNA, 25 bp, Homo sapien
ggtccaacaaagagtaacagaatta

SEQ ID NO: 5633500 - DNA, 25 bp, Homo sapien
gaaccaactggcctaagctgacctc

SEQ ID NO: 5633501 - DNA, 25 bp, Homo sapien
gcccaaattaggagatgaaaacgca

SEQ ID NO: 5633502 - DNA, 25 bp, Homo sapien
gattgttcttaggatggagtgaggt

SEQ ID NO: 5633503 - DNA, 25 bp, Homo sapien
actaggagatcaggacaagttatga

SEQ ID NO: 5633504 - DNA, 25 bp, Homo sapien
cagatgcgaagattgttcttaggat

SEQ ID NO: 5633505 - DNA, 25 bp, Homo sapien
aaaaatgactcaagatggcgaacaa

SEQ ID NO: 5633506 - DNA, 25 bp, Homo sapien
aaactgagcattctggcaaccaaaa

SEQ ID NO: 5633507 - DNA, 25 bp, Homo sapien
ataacacctagtatacagcagtttc

SEQ ID NO: 5633508 - DNA, 25 bp, Homo sapien
gatggcgaacaagatacagtaaaat

SEQ ID NO: 5633509 - DNA, 25 bp, Homo sapien
agttagggatacaaactgagcattc

SEQ ID NO: 5633510 - DNA, 25 bp, Homo sapien
tttagttcatagcagaaagtccaga

SEQ ID NO: 5633511 - DNA, 25 bp, Homo sapien
acatacaaatgagcactaggagatc

SEQ ID NO: 5633512 - DNA, 25 bp, Homo sapien
caaccaaaatgagaaggtcatttgc

SEQ ID NO: 5633513 - DNA, 25 bp, Homo sapien
gcaaaggaatattagaagcaatcag

SEQ ID NO: 5633514 - DNA, 25 bp, Homo sapien
agagtttaaaacgctgaccaggtaa

SEQ ID NO: 5633515 - DNA, 25 bp, Homo sapien
aatcagcaccaaaaaatatgtcagg

SEQ ID NO: 5633516 - DNA, 25 bp, Homo sapien
tggtgaagtcatgttaagtgacaaa

SEQ ID NO: 5633517 - DNA, 25 bp, Homo sapien
tcagattatggtacggtaaggaaga

SEQ ID NO: 5633518 - DNA, 25 bp, Homo sapien
atggacagagggaaactatctgatg

SEQ ID NO: 5633519 - DNA, 25 bp, Homo sapien
atataacagtaacgacggtgatgat

SEQ ID NO: 5633520 - DNA, 25 bp, Homo sapien
tatgtcaggtgaacttataagctgt

SEQ ID NO: 5633521 - DNA, 25 bp, Homo sapien
caggtaattacggttggtggactat

SEQ ID NO: 5633522 - DNA, 25 bp, Homo sapien
cacagcacctgtatatagagcccat

SEQ ID NO: 5633523 - DNA, 25 bp, Homo sapien
aggaagagtaacagaatgaaatatg

SEQ ID NO: 5633524 - DNA, 25 bp, Homo sapien
gtcaggcggatctcaaactctcgac

SEQ ID NO: 5633525 - DNA, 25 bp, Homo sapien
gcccgtctttcctgagcccagtgga

SEQ ID NO: 5633526 - DNA, 25 bp, Homo sapien
gatccccaccatctggcaagctgcc

SEQ ID NO: 5633527 - DNA, 25 bp, Homo sapien
ttttgcaaatgtgtaaagaagaaag

SEQ ID NO: 5633528 - DNA, 25 bp, Homo sapien
tgtctgaacttctgtggaggtctgg

SEQ ID NO: 5633529 - DNA, 25 bp, Homo sapien
ggagacagccccactcaccctgttc

SEQ ID NO: 5633530 - DNA, 25 bp, Homo sapien
gggctacaggactggctactttgct

SEQ ID NO: 5633531 - DNA, 25 bp, Homo sapien
gggttgtagagccactgtctgaact

SEQ ID NO: 5633532 - DNA, 25 bp, Homo sapien
aatagccagcaaggactgttattag

SEQ ID NO: 5633533 - DNA, 25 bp, Homo sapien
tagtatagaggtttaatagccagca

SEQ ID NO: 5633534 - DNA, 25 bp, Homo sapien
gcctgaaagtgctagtatagaggtt

SEQ ID NO: 5633535 - DNA, 25 bp, Homo sapien
tatcttgaactgatggagagcaata

SEQ ID NO: 5633536 - DNA, 25 bp, Homo sapien
atgttccagttgacactacctgtgt

SEQ ID NO: 5633537 - DNA, 25 bp, Homo sapien
tgatggagagcaataggaattcttt

SEQ ID NO: 5633538 - DNA, 25 bp, Homo sapien
ttctatagtcaggcaagtctctttc

SEQ ID NO: 5633539 - DNA, 25 bp, Homo sapien
atactgagtaattttgacgggtcaa

SEQ ID NO: 5633540 - DNA, 25 bp, Homo sapien
aaaacctaagcagtgactaattttc

SEQ ID NO: 5633541 - DNA, 25 bp, Homo sapien
aaagtacatcatggatctagaattc

SEQ ID NO: 5633542 - DNA, 25 bp, Homo sapien
acttagtcccagtttggcagactta

SEQ ID NO: 5633543 - DNA, 25 bp, Homo sapien
tctaagaaaccgaagaatctatacc

SEQ ID NO: 5633544 - DNA, 25 bp, Homo sapien
agtagcaggacaaatggacttttgt

SEQ ID NO: 5633545 - DNA, 25 bp, Homo sapien
tggaaaacggctttaggcagctcaa

SEQ ID NO: 5633546 - DNA, 25 bp, Homo sapien
caggcttccagggttaggccaaaaa

SEQ ID NO: 5633547 - DNA, 25 bp, Homo sapien
gtgataatgtatgagaaagcgcttt

SEQ ID NO: 5633548 - DNA, 25 bp, Homo sapien
cagctcggttggccctgaaattgct

SEQ ID NO: 5633549 - DNA, 25 bp, Homo sapien
gagtcagcccaactagggtgggctc

SEQ ID NO: 5633550 - DNA, 25 bp, Homo sapien
tgcatgaacattaggttggatccat

SEQ ID NO: 5633551 - DNA, 25 bp, Homo sapien
ggatccatgcaaaataagttacgcc

SEQ ID NO: 5633552 - DNA, 25 bp, Homo sapien
aggcaaacagggtatctgctgccct

SEQ ID NO: 5633553 - DNA, 25 bp, Homo sapien
atcatacacgcttggaaggaagact

SEQ ID NO: 5633554 - DNA, 25 bp, Homo sapien
gacctctgcactcagggaggcaaac

SEQ ID NO: 5633555 - DNA, 25 bp, Homo sapien
gctgggcagtacacagaatacaatc

SEQ ID NO: 5633556 - DNA, 25 bp, Homo sapien
aaactgtgaagccctgtacaaatgc

SEQ ID NO: 5633557 - DNA, 25 bp, Homo sapien
cacgatcaagacccaggctacatgc

SEQ ID NO: 5633558 - DNA, 25 bp, Homo sapien
cacgcaagccatccagaacaacagg

SEQ ID NO: 5633559 - DNA, 25 bp, Homo sapien
ggccctcaacggctcgcaaatcggt

SEQ ID NO: 5633560 - DNA, 25 bp, Homo sapien
cgggtcgtcaccgactgcgactaca

SEQ ID NO: 5633561 - DNA, 25 bp, Homo sapien
gactgcgactacatggccctcaacg

SEQ ID NO: 5633562 - DNA, 25 bp, Homo sapien
gagcgcatctgggaacagtttaacc

SEQ ID NO: 5633563 - DNA, 25 bp, Homo sapien
agggtgctcatcactggctcgctca

SEQ ID NO: 5633564 - DNA, 25 bp, Homo sapien
tttggaagaatttgagcgcatctgg

SEQ ID NO: 5633565 - DNA, 25 bp, Homo sapien
aagtttgccatcgtggacaagaggg

SEQ ID NO: 5633566 - DNA, 25 bp, Homo sapien
gctcgctcaactggaccacgcaagc

SEQ ID NO: 5633567 - DNA, 25 bp, Homo sapien
tgttcgccttctccagcccgcagct

SEQ ID NO: 5633568 - DNA, 25 bp, Homo sapien
ttcttcagccggatggaagtacttg

SEQ ID NO: 5633569 - DNA, 25 bp, Homo sapien
taattgtcacttagggtaggctcca

SEQ ID NO: 5633570 - DNA, 25 bp, Homo sapien
agtagagggacctgatgtttagaga

SEQ ID NO: 5633571 - DNA, 25 bp, Homo sapien
gaagtacttggaggctggtctcata

SEQ ID NO: 5633572 - DNA, 25 bp, Homo sapien
gcagtgctaataacagggactctgg

SEQ ID NO: 5633573 - DNA, 25 bp, Homo sapien
ccaagaggattctgtcgcaccagga

SEQ ID NO: 5633574 - DNA, 25 bp, Homo sapien
gatgtttagagaagcagtaaaaccc

SEQ ID NO: 5633575 - DNA, 25 bp, Homo sapien
ccaggacaggaatgcacccttgttt

SEQ ID NO: 5633576 - DNA, 25 bp, Homo sapien
agagtaactctgtgccatggaatcc

SEQ ID NO: 5633577 - DNA, 25 bp, Homo sapien
ccacctgatgttgctgttgggctgg

SEQ ID NO: 5633578 - DNA, 25 bp, Homo sapien
gactctggagacaagatcagcaatc

SEQ ID NO: 5633579 - DNA, 25 bp, Homo sapien
cagagtgggatttacagatataaga

SEQ ID NO: 5633580 - DNA, 25 bp, Homo sapien
atgggtcttaggagcggttatccat

SEQ ID NO: 5633581 - DNA, 25 bp, Homo sapien
tggtaaactagagataatatccatc

SEQ ID NO: 5633582 - DNA, 25 bp, Homo sapien
tgattgtgcttgcgattggataggc

SEQ ID NO: 5633583 - DNA, 25 bp, Homo sapien
gctgtcaacaaggcaagcaaagtgg

SEQ ID NO: 5633584 - DNA, 25 bp, Homo sapien
gacttggagtacaggttgatttgtt

SEQ ID NO: 5633585 - DNA, 25 bp, Homo sapien
gtaacctcaggaaaactcgctaatc

SEQ ID NO: 5633586 - DNA, 25 bp, Homo sapien
aagcaaagtggtctgacttggagta

SEQ ID NO: 5633587 - DNA, 25 bp, Homo sapien
agcggttatccattgaaaaggaggt

SEQ ID NO: 5633588 - DNA, 25 bp, Homo sapien
ccacctttacggaatgtctggggcg

SEQ ID NO: 5633589 - DNA, 25 bp, Homo sapien
ttgatttgttgtggctttgaaggag

SEQ ID NO: 5633590 - DNA, 25 bp, Homo sapien
tcccagtgattgcagaaactctctg

SEQ ID NO: 5633591 - DNA, 25 bp, Homo sapien
ctgaaataacaaatcgtgtcaatag

SEQ ID NO: 5633592 - DNA, 25 bp, Homo sapien
acaaatcgtgtcaatagaaagtcat

SEQ ID NO: 5633593 - DNA, 25 bp, Homo sapien
tccaacattagactgacagacttct

SEQ ID NO: 5633594 - DNA, 25 bp, Homo sapien
ttcttgcaaagactatcagatcatc

SEQ ID NO: 5633595 - DNA, 25 bp, Homo sapien
tatttcccagtgattgcagaaactc

SEQ ID NO: 5633596 - DNA, 25 bp, Homo sapien
aacctgagatgcttcccttatgatc

SEQ ID NO: 5633597 - DNA, 25 bp, Homo sapien
attaaagggtatgactgtgctacca

SEQ ID NO: 5633598 - DNA, 25 bp, Homo sapien
gttatatgcatgaagcatttgtgct

SEQ ID NO: 5633599 - DNA, 25 bp, Homo sapien
tgcaaagactatcagatcatccaac

SEQ ID NO: 5633600 - DNA, 25 bp, Homo sapien
tctccaaatactgcaataaaaacct

SEQ ID NO: 5633601 - DNA, 25 bp, Homo sapien
tattacagaatatagtcaccatcat

SEQ ID NO: 5633602 - DNA, 25 bp, Homo sapien
atagctccaaagtgcttatgatctc

SEQ ID NO: 5633603 - DNA, 25 bp, Homo sapien
ccatggaagtagaaatagacaagaa

SEQ ID NO: 5633604 - DNA, 25 bp, Homo sapien
cagtaccatggaagtagaaatagac

SEQ ID NO: 5633605 - DNA, 25 bp, Homo sapien
gaagtagaaatagacaagaagttta

SEQ ID NO: 5633606 - DNA, 25 bp, Homo sapien
caagaagtttatagctccaaagtgc

SEQ ID NO: 5633607 - DNA, 25 bp, Homo sapien
attggggtgatttacttaactatgc

SEQ ID NO: 5633608 - DNA, 25 bp, Homo sapien
agtgcttatgatctctttgggcaga

SEQ ID NO: 5633609 - DNA, 25 bp, Homo sapien
tttgggcagatagtacacgcttttt

SEQ ID NO: 5633610 - DNA, 25 bp, Homo sapien
agaagagaatatcagtaccatggaa

SEQ ID NO: 5633611 - DNA, 25 bp, Homo sapien
actgacaagattacatgaaagaaaa

SEQ ID NO: 5633612 - DNA, 25 bp, Homo sapien
tgtacatctacataagggaaccctg

SEQ ID NO: 5633613 - DNA, 25 bp, Homo sapien
agaagaatcaccatctgttagtgac

SEQ ID NO: 5633614 - DNA, 25 bp, Homo sapien
agaaaactgctaatacccttatttc

SEQ ID NO: 5633615 - DNA, 25 bp, Homo sapien
tattttgtgtactaggatgtcctct

SEQ ID NO: 5633616 - DNA, 25 bp, Homo sapien
aaactatgaaatgattttgacaata

SEQ ID NO: 5633617 - DNA, 25 bp, Homo sapien
aaagaacttaacgacaagtataata

SEQ ID NO: 5633618 - DNA, 25 bp, Homo sapien
cataagggaaccctgtgcgttttac

SEQ ID NO: 5633619 - DNA, 25 bp, Homo sapien
tcttgtttagacagatttgtgttac

SEQ ID NO: 5633620 - DNA, 25 bp, Homo sapien
tttggtctagactggtgtgaaacag

SEQ ID NO: 5633621 - DNA, 25 bp, Homo sapien
ttgtgttactaattagaaaactgct

SEQ ID NO: 5633622 - DNA, 25 bp, Homo sapien
tttagggatgaattaatttatcttc

SEQ ID NO: 5633623 - DNA, 25 bp, Homo sapien
aatagggacttcgaacagaagccat

SEQ ID NO: 5633624 - DNA, 25 bp, Homo sapien
ggctaggtctgtgcaaaagtacccc

SEQ ID NO: 5633625 - DNA, 25 bp, Homo sapien
gtgaaagtggattgctgcatctatg

SEQ ID NO: 5633626 - DNA, 25 bp, Homo sapien
ggaagaagctgacaaatacagtatt

SEQ ID NO: 5633627 - DNA, 25 bp, Homo sapien
atcagataagggaattcatggagta

SEQ ID NO: 5633628 - DNA, 25 bp, Homo sapien
gttgggtcagagtgataatccattc

SEQ ID NO: 5633629 - DNA, 25 bp, Homo sapien
cttcgaacagaagccattgagtgca

SEQ ID NO: 5633630 - DNA, 25 bp, Homo sapien
cattagaaatgtgcagttgggtcag

SEQ ID NO: 5633631 - DNA, 25 bp, Homo sapien
gagtcaccagtgtcaggtgttgttt

SEQ ID NO: 5633632 - DNA, 25 bp, Homo sapien
agtaccccaaagtctgaggaagttg

SEQ ID NO: 5633633 - DNA, 25 bp, Homo sapien
ttgtccatggggttttgtgaaagtg

SEQ ID NO: 5633634 - DNA, 25 bp, Homo sapien
aggtttgagttttaggcccagcagc

SEQ ID NO: 5633635 - DNA, 25 bp, Homo sapien
atgggatggtccttcatatttgagt

SEQ ID NO: 5633636 - DNA, 25 bp, Homo sapien
gtatgtcaagtttacgtacgtagta

SEQ ID NO: 5633637 - DNA, 25 bp, Homo sapien
ctccgtattggcatcgaggacagtg

SEQ ID NO: 5633638 - DNA, 25 bp, Homo sapien
ttcacataaggcgttgctccatggg

SEQ ID NO: 5633639 - DNA, 25 bp, Homo sapien
gtccatgtagctatatggagagctt

SEQ ID NO: 5633640 - DNA, 25 bp, Homo sapien
gaggatagagagcacgtacctctaa

SEQ ID NO: 5633641 - DNA, 25 bp, Homo sapien
ggacagtggtccttatcaggcccaa

SEQ ID NO: 5633642 - DNA, 25 bp, Homo sapien
cccagcagccacccttacccctctt

SEQ ID NO: 5633643 - DNA, 25 bp, Homo sapien
atctattaccaaggtaagtgggcaa

SEQ ID NO: 5633644 - DNA, 25 bp, Homo sapien
tggagagctttatcccctcagggaa

SEQ ID NO: 5633645 - DNA, 25 bp, Homo sapien
tcatgatccatcctccgggggaagc

SEQ ID NO: 5633646 - DNA, 25 bp, Homo sapien
gtgtgctttggtgctcaaggcttca

SEQ ID NO: 5633647 - DNA, 25 bp, Homo sapien
gaaaagatgctcaacttcaccggta

SEQ ID NO: 5633648 - DNA, 25 bp, Homo sapien
cccaaagtactggccagcctgggga

SEQ ID NO: 5633649 - DNA, 25 bp, Homo sapien
tgctttggtgctcaaggcttcaggg

SEQ ID NO: 5633650 - DNA, 25 bp, Homo sapien
actgttggtgtgcctgccccaagag

SEQ ID NO: 5633651 - DNA, 25 bp, Homo sapien
tcaacttcaccggtagtcaggggaa

SEQ ID NO: 5633652 - DNA, 25 bp, Homo sapien
ttaacatttttgggtctagcagatt

SEQ ID NO: 5633653 - DNA, 25 bp, Homo sapien
agactcctactggggtctagaggac

SEQ ID NO: 5633654 - DNA, 25 bp, Homo sapien
accacgctggtgcttagactcctac

SEQ ID NO: 5633655 - DNA, 25 bp, Homo sapien
gaaaagcaattccactcttcatgat

SEQ ID NO: 5633656 - DNA, 25 bp, Homo sapien
ctgtggataagatttgtggtgaaaa

SEQ ID NO: 5633657 - DNA, 25 bp, Homo sapien
atctacttagcactccagcatcagg

SEQ ID NO: 5633658 - DNA, 25 bp, Homo sapien
ttaaatgcatttcctcccttctcct

SEQ ID NO: 5633659 - DNA, 25 bp, Homo sapien
atcaacacttctgtgaagggcgtca

SEQ ID NO: 5633660 - DNA, 25 bp, Homo sapien
accaattaccttccttccgtgctga

SEQ ID NO: 5633661 - DNA, 25 bp, Homo sapien
ttcctgtggataagatttgtggtga

SEQ ID NO: 5633662 - DNA, 25 bp, Homo sapien
ccttctcctaagaaagcccatttcc

SEQ ID NO: 5633663 - DNA, 25 bp, Homo sapien
caacacttctgtgaagggcgtcagg

SEQ ID NO: 5633664 - DNA, 25 bp, Homo sapien
agcatcaggaccaccatcgtttatt

SEQ ID NO: 5633665 - DNA, 25 bp, Homo sapien
atttgtggtgaaaatggaaccagct

SEQ ID NO: 5633666 - DNA, 25 bp, Homo sapien
ccttccttccgtgctgattaaatgc

SEQ ID NO: 5633667 - DNA, 25 bp, Homo sapien
cttgtagagatggatagtgataatg

SEQ ID NO: 5633668 - DNA, 25 bp, Homo sapien
caacaatgtgagtgtacttaatgtc

SEQ ID NO: 5633669 - DNA, 25 bp, Homo sapien
tcagtgataagcccatggatgatgg

SEQ ID NO: 5633670 - DNA, 25 bp, Homo sapien
ctagactctaaatttcatgatgaac

SEQ ID NO: 5633671 - DNA, 25 bp, Homo sapien
acagagtttaagtctgggaagatta

SEQ ID NO: 5633672 - DNA, 25 bp, Homo sapien
tatctcagtgataagcccatggatg

SEQ ID NO: 5633673 - DNA, 25 bp, Homo sapien
gagagaaaatgggaattagtgttta

SEQ ID NO: 5633674 - DNA, 25 bp, Homo sapien
taaaagtgtcatgcacttgtatccc

SEQ ID NO: 5633675 - DNA, 25 bp, Homo sapien
atggatgatggtattctttccacct

SEQ ID NO: 5633676 - DNA, 25 bp, Homo sapien
tagtgtttattaggtacagagttta

SEQ ID NO: 5633677 - DNA, 25 bp, Homo sapien
tataaatgacaaggtcaatttaacc

SEQ ID NO: 5633678 - DNA, 25 bp, Homo sapien
cgcccatcagggtctagactgtgat

SEQ ID NO: 5633679 - DNA, 25 bp, Homo sapien
aacagcactactgagatcgcccatc

SEQ ID NO: 5633680 - DNA, 25 bp, Homo sapien
acttcaaagctgggttagagatgag

SEQ ID NO: 5633681 - DNA, 25 bp, Homo sapien
ccactttgccataaggaaagcgggt

SEQ ID NO: 5633682 - DNA, 25 bp, Homo sapien
aatagggctgcctctggatagcatt

SEQ ID NO: 5633683 - DNA, 25 bp, Homo sapien
gctaaattactggccaggtaggacg

SEQ ID NO: 5633684 - DNA, 25 bp, Homo sapien
aggaagaagaatgcaatgaccatat

SEQ ID NO: 5633685 - DNA, 25 bp, Homo sapien
tgtaaaagaaccacagcagctattt

SEQ ID NO: 5633686 - DNA, 25 bp, Homo sapien
actgtcttagcaggaaagtacattc

SEQ ID NO: 5633687 - DNA, 25 bp, Homo sapien
gtcagtgaaccagtgaaggtcttca

SEQ ID NO: 5633688 - DNA, 25 bp, Homo sapien
cagtcagcaaagttctgagtgctcc

SEQ ID NO: 5633689 - DNA, 25 bp, Homo sapien
gctcctccaagagaaattagtgaag

SEQ ID NO: 5633690 - DNA, 25 bp, Homo sapien
tgaagttaaaatggccactggttac

SEQ ID NO: 5633691 - DNA, 25 bp, Homo sapien
gacaaatcatcttaacatctccctt

SEQ ID NO: 5633692 - DNA, 25 bp, Homo sapien
catctcccttaccatccggaagtat

SEQ ID NO: 5633693 - DNA, 25 bp, Homo sapien
taacgcattgaattaaacagaaata

SEQ ID NO: 5633694 - DNA, 25 bp, Homo sapien
tggctgtattgaccaatgctaaaga

SEQ ID NO: 5633695 - DNA, 25 bp, Homo sapien
tcaaatcagggtcttcaacattttc

SEQ ID NO: 5633696 - DNA, 25 bp, Homo sapien
aagtgggatactagctttgtctcta

SEQ ID NO: 5633697 - DNA, 25 bp, Homo sapien
ttggactgatttaagattatgaacc

SEQ ID NO: 5633698 - DNA, 25 bp, Homo sapien
ttgatctcaccaagtgggatactag

SEQ ID NO: 5633699 - DNA, 25 bp, Homo sapien
ctttcaggttaaactgctaacaatt

SEQ ID NO: 5633700 - DNA, 25 bp, Homo sapien
ttacaaatggactatggcaaagggt

SEQ ID NO: 5633701 - DNA, 25 bp, Homo sapien
tgttattgattagatggagaagctt

SEQ ID NO: 5633702 - DNA, 25 bp, Homo sapien
aatagggtgtccaggctgtaaatga

SEQ ID NO: 5633703 - DNA, 25 bp, Homo sapien
aaaagtggagatacctgtgccatgt

SEQ ID NO: 5633704 - DNA, 25 bp, Homo sapien
gacacacgtcgtacaaaagccttca

SEQ ID NO: 5633705 - DNA, 25 bp, Homo sapien
gggtctggccagagtcttgcctgac

SEQ ID NO: 5633706 - DNA, 25 bp, Homo sapien
agaagtctggtgtgcatcgaacatt

SEQ ID NO: 5633707 - DNA, 25 bp, Homo sapien
ggcagtagggagaataattctgagc

SEQ ID NO: 5633708 - DNA, 25 bp, Homo sapien
taagcccctagcctactgagacttc

SEQ ID NO: 5633709 - DNA, 25 bp, Homo sapien
atggagaagcttagggctacatctt

SEQ ID NO: 5633710 - DNA, 25 bp, Homo sapien
aattctgagccacatgagagcatgg

SEQ ID NO: 5633711 - DNA, 25 bp, Homo sapien
gcgatatccgttcatgggagagagg

SEQ ID NO: 5633712 - DNA, 25 bp, Homo sapien
gggcaaaaaaactaagagtgcggca

SEQ ID NO: 5633713 - DNA, 25 bp, Homo sapien
aaggagaagtatttggctaagaaga

SEQ ID NO: 5633714 - DNA, 25 bp, Homo sapien
ctggcctgttgttatgggttctgac

SEQ ID NO: 5633715 - DNA, 25 bp, Homo sapien
tttccagagtagctacctgcaactg

SEQ ID NO: 5633716 - DNA, 25 bp, Homo sapien
attacaggtatggtatgaggtcttt

SEQ ID NO: 5633717 - DNA, 25 bp, Homo sapien
ctactaccattaaggggactaagac

SEQ ID NO: 5633718 - DNA, 25 bp, Homo sapien
acccaaacctcacagtagtggcaat

SEQ ID NO: 5633719 - DNA, 25 bp, Homo sapien
ggagagaggcacacctactaccatt

SEQ ID NO: 5633720 - DNA, 25 bp, Homo sapien
tgatactaaggaagttcagctacac

SEQ ID NO: 5633721 - DNA, 25 bp, Homo sapien
aggggactaagacgaaaattatcaa

SEQ ID NO: 5633722 - DNA, 25 bp, Homo sapien
gaactggctgccactcccaattctc

SEQ ID NO: 5633723 - DNA, 25 bp, Homo sapien
aatttcctgccgaactggctgccac

SEQ ID NO: 5633724 - DNA, 25 bp, Homo sapien
gaaaaggacatgtgtcacccaggct

SEQ ID NO: 5633725 - DNA, 25 bp, Homo sapien
agtaaagtcgcattgcttcccacac

SEQ ID NO: 5633726 - DNA, 25 bp, Homo sapien
caggggatattgtaaagggtcaata

SEQ ID NO: 5633727 - DNA, 25 bp, Homo sapien
gtcttaggaaaaggacatgtgtcac

SEQ ID NO: 5633728 - DNA, 25 bp, Homo sapien
tcagggagaacttgccttcaactct

SEQ ID NO: 5633729 - DNA, 25 bp, Homo sapien
ttcagaagaaaaccctaaacataca

SEQ ID NO: 5633730 - DNA, 25 bp, Homo sapien
aaacatacatttacaggggatattg

SEQ ID NO: 5633731 - DNA, 25 bp, Homo sapien
gagaaggaatgtattgccactagct

SEQ ID NO: 5633732 - DNA, 25 bp, Homo sapien
aaagggtcaataacagtaaagtcgc

SEQ ID NO: 5633733 - DNA, 25 bp, Homo sapien
atctgctgttaacaagaaataagga

SEQ ID NO: 5633734 - DNA, 25 bp, Homo sapien
gcccaggcttgattgcatgaatgaa

SEQ ID NO: 5633735 - DNA, 25 bp, Homo sapien
gaactcactgttttagcggttagcc

SEQ ID NO: 5633736 - DNA, 25 bp, Homo sapien
agagtgtattatggataaggtagtt

SEQ ID NO: 5633737 - DNA, 25 bp, Homo sapien
atcaagccataccatgaaatactcc

SEQ ID NO: 5633738 - DNA, 25 bp, Homo sapien
aagatgtgcagggagttacataatt

SEQ ID NO: 5633739 - DNA, 25 bp, Homo sapien
tgaaatactccaattgcagtcaatc

SEQ ID NO: 5633740 - DNA, 25 bp, Homo sapien
actgatgtagtatatgggagatttg

SEQ ID NO: 5633741 - DNA, 25 bp, Homo sapien
gtttgaagaccactgatgtagtata

SEQ ID NO: 5633742 - DNA, 25 bp, Homo sapien
tttagcggttagccaatcttccttc

SEQ ID NO: 5633743 - DNA, 25 bp, Homo sapien
tctatttaaagatgtgcagggagtt

SEQ ID NO: 5633744 - DNA, 25 bp, Homo sapien
acttagtaaactacaatacattaac

SEQ ID NO: 5633745 - DNA, 25 bp, Homo sapien
aaacagaaaagaatacaaaatagta

SEQ ID NO: 5633746 - DNA, 25 bp, Homo sapien
ggaaaatatgtagacagggactaga

SEQ ID NO: 5633747 - DNA, 25 bp, Homo sapien
tgagaaaatactatgcagctaaaaa

SEQ ID NO: 5633748 - DNA, 25 bp, Homo sapien
caaaatagtataactaaggctacac

SEQ ID NO: 5633749 - DNA, 25 bp, Homo sapien
aagaacaggaaagagtttatatata

SEQ ID NO: 5633750 - DNA, 25 bp, Homo sapien
atcttatgtaaaagaacaggaaaga

SEQ ID NO: 5633751 - DNA, 25 bp, Homo sapien
taactaaggctacacataagggaaa

SEQ ID NO: 5633752 - DNA, 25 bp, Homo sapien
gttaagatgtagaactatgcttaga

SEQ ID NO: 5633753 - DNA, 25 bp, Homo sapien
aaggctacacataagggaaaatatg

SEQ ID NO: 5633754 - DNA, 25 bp, Homo sapien
ttaacatgagaaaatactatgcagc

SEQ ID NO: 5633755 - DNA, 25 bp, Homo sapien
gaagcaacatatgagactgtgagca

SEQ ID NO: 5633756 - DNA, 25 bp, Homo sapien
agagaagacagaattacactttgcg

SEQ ID NO: 5633757 - DNA, 25 bp, Homo sapien
gttagtttggagaagcaacatatga

SEQ ID NO: 5633758 - DNA, 25 bp, Homo sapien
aaaggaacacagatgaaacaaaaca

SEQ ID NO: 5633759 - DNA, 25 bp, Homo sapien
aaggcagcaaaaaattgattacatg

SEQ ID NO: 5633760 - DNA, 25 bp, Homo sapien
tacactttgcgaagaggccatgaaa

SEQ ID NO: 5633761 - DNA, 25 bp, Homo sapien
gattacatgatgccatgtggaatcc

SEQ ID NO: 5633762 - DNA, 25 bp, Homo sapien
actgtgagcaatcagtgcaaggcag

SEQ ID NO: 5633763 - DNA, 25 bp, Homo sapien
tcccctcaaagcaccaaacactgaa

SEQ ID NO: 5633764 - DNA, 25 bp, Homo sapien
gaagaggccatgaaaatagccactt

SEQ ID NO: 5633765 - DNA, 25 bp, Homo sapien
gccatgtggaatccaagagaaaagg

SEQ ID NO: 5633766 - DNA, 25 bp, Homo sapien
ttttggaaaaagtgctgatgattta

SEQ ID NO: 5633767 - DNA, 25 bp, Homo sapien
aggcatagcctatcttctgaagtaa

SEQ ID NO: 5633768 - DNA, 25 bp, Homo sapien
caaggaaatcaaagataacattatt

SEQ ID NO: 5633769 - DNA, 25 bp, Homo sapien
taaaaaggcaattagatggatttcc

SEQ ID NO: 5633770 - DNA, 25 bp, Homo sapien
cccaatgaccagtaaagggtaggga

SEQ ID NO: 5633771 - DNA, 25 bp, Homo sapien
cctaatagcttaaggaggtaaggtc

SEQ ID NO: 5633772 - DNA, 25 bp, Homo sapien
gtcacacaacgctgtgaatgtacta

SEQ ID NO: 5633773 - DNA, 25 bp, Homo sapien
cttcccaatgggcttgctctttaca

SEQ ID NO: 5633774 - DNA, 25 bp, Homo sapien
tgcagttcagtcagtttaccaaaac

SEQ ID NO: 5633775 - DNA, 25 bp, Homo sapien
aatgttagttcactagaaccaggtt

SEQ ID NO: 5633776 - DNA, 25 bp, Homo sapien
aggaggtaaggtctctaaaatgtta

SEQ ID NO: 5633777 - DNA, 25 bp, Homo sapien
gatatgcaaatataaaacaagttca

SEQ ID NO: 5633778 - DNA, 25 bp, Homo sapien
tgggctacaaggactattattgact

SEQ ID NO: 5633779 - DNA, 25 bp, Homo sapien
acagaatcaattcccattgggctac

SEQ ID NO: 5633780 - DNA, 25 bp, Homo sapien
attcccattgggctacaaggactat

SEQ ID NO: 5633781 - DNA, 25 bp, Homo sapien
attattgtagcaagctggtatgaac

SEQ ID NO: 5633782 - DNA, 25 bp, Homo sapien
agcttaaaatcctagtctcaacaac

SEQ ID NO: 5633783 - DNA, 25 bp, Homo sapien
tagcaagctggtatgaactgtgtca

SEQ ID NO: 5633784 - DNA, 25 bp, Homo sapien
ctagtctcaacaactgtcataatgc

SEQ ID NO: 5633785 - DNA, 25 bp, Homo sapien
gtcataatgcaaaaataccaaactt

SEQ ID NO: 5633786 - DNA, 25 bp, Homo sapien
aatggtacagacaataaacagaatc

SEQ ID NO: 5633787 - DNA, 25 bp, Homo sapien
taactggtagcaaaatggtacagac

SEQ ID NO: 5633788 - DNA, 25 bp, Homo sapien
ctgggtaacagagatatgcaaagta

SEQ ID NO: 5633789 - DNA, 25 bp, Homo sapien
gtgcacagtgtctgggatcctcttt

SEQ ID NO: 5633790 - DNA, 25 bp, Homo sapien
gcattgcagagagctggtaacattt

SEQ ID NO: 5633791 - DNA, 25 bp, Homo sapien
cagcagtcccctggtcccagtgcct

SEQ ID NO: 5633792 - DNA, 25 bp, Homo sapien
taagccacacagtgagcaaaagaca

SEQ ID NO: 5633793 - DNA, 25 bp, Homo sapien
cagtgccttctgcgagacgtcttct

SEQ ID NO: 5633794 - DNA, 25 bp, Homo sapien
ttcctactggatccaggacgagcgc

SEQ ID NO: 5633795 - DNA, 25 bp, Homo sapien
gcccacccaagtttgcagggatgtc

SEQ ID NO: 5633796 - DNA, 25 bp, Homo sapien
ttgagtagcaactaagtgcagggca

SEQ ID NO: 5633797 - DNA, 25 bp, Homo sapien
gtgcagggcacaattctagacatag

SEQ ID NO: 5633798 - DNA, 25 bp, Homo sapien
agggaaggtcaatgtgctgcattgc

SEQ ID NO: 5633799 - DNA, 25 bp, Homo sapien
aaggggtactcctggacatagatag

SEQ ID NO: 5633800 - DNA, 25 bp, Homo sapien
ttcaagctggtgtcttacaaagaac

SEQ ID NO: 5633801 - DNA, 25 bp, Homo sapien
aactatgctgccagaaaaagcactt

SEQ ID NO: 5633802 - DNA, 25 bp, Homo sapien
gagtatatccagtggactagggctt

SEQ ID NO: 5633803 - DNA, 25 bp, Homo sapien
cagtggactagggcttctggtttca

SEQ ID NO: 5633804 - DNA, 25 bp, Homo sapien
ctggtttcaggacattcaagctggt

SEQ ID NO: 5633805 - DNA, 25 bp, Homo sapien
taaactgcacaagcaagtggctctt

SEQ ID NO: 5633806 - DNA, 25 bp, Homo sapien
acacacataaaagaagaacgccatt

SEQ ID NO: 5633807 - DNA, 25 bp, Homo sapien
aaaatgtttctgccccgcccctctc

SEQ ID NO: 5633808 - DNA, 25 bp, Homo sapien
cttcaaggtagataatgtgcagtcc

SEQ ID NO: 5633809 - DNA, 25 bp, Homo sapien
tgtgcagtccctataaaggcaaaca

SEQ ID NO: 5633810 - DNA, 25 bp, Homo sapien
gagaagtccccaacggcagacattt

SEQ ID NO: 5633811 - DNA, 25 bp, Homo sapien
gaaaaaccaggctgctccaaagttc

SEQ ID NO: 5633812 - DNA, 25 bp, Homo sapien
tcttctaaaggcagcacactaaccc

SEQ ID NO: 5633813 - DNA, 25 bp, Homo sapien
ttttacaattggacaggtgttgcca

SEQ ID NO: 5633814 - DNA, 25 bp, Homo sapien
accatctgattaggcaagaacgttt

SEQ ID NO: 5633815 - DNA, 25 bp, Homo sapien
gggagaacatacagaggcttcattc

SEQ ID NO: 5633816 - DNA, 25 bp, Homo sapien
tggagcatgtttccatgggagaaca

SEQ ID NO: 5633817 - DNA, 25 bp, Homo sapien
agacaaatcctagaagcagaattgc

SEQ ID NO: 5633818 - DNA, 25 bp, Homo sapien
cactaacccaatgtggggatgagaa

SEQ ID NO: 5633819 - DNA, 25 bp, Homo sapien
ccaggcagctcttaggacttcccag

SEQ ID NO: 5633820 - DNA, 25 bp, Homo sapien
caatcgatacccccagctactacgc

SEQ ID NO: 5633821 - DNA, 25 bp, Homo sapien
tatccgatgttccagcacagaaaac

SEQ ID NO: 5633822 - DNA, 25 bp, Homo sapien
cgctgctggcgtactgctaacagac

SEQ ID NO: 5633823 - DNA, 25 bp, Homo sapien
tgagaaattcatggttgggccctga

SEQ ID NO: 5633824 - DNA, 25 bp, Homo sapien
aagtaactgagaaaaacatcgcgct

SEQ ID NO: 5633825 - DNA, 25 bp, Homo sapien
ctagtctccgaatggtaggacaaaa

SEQ ID NO: 5633826 - DNA, 25 bp, Homo sapien
cctgaaagacaggattccgctgctg

SEQ ID NO: 5633827 - DNA, 25 bp, Homo sapien
atggtaggacaaaaactagacagtt

SEQ ID NO: 5633828 - DNA, 25 bp, Homo sapien
tggataacggggtcatctgttcatt

SEQ ID NO: 5633829 - DNA, 25 bp, Homo sapien
gctaagggcatgaatgagaaattca

SEQ ID NO: 5633830 - DNA, 25 bp, Homo sapien
gctaacagacctggataacggggtc

SEQ ID NO: 5633831 - DNA, 25 bp, Homo sapien
gtggagatggtataagcgtttccct

SEQ ID NO: 5633832 - DNA, 25 bp, Homo sapien
catgctgtgtacactgtgaaccagt

SEQ ID NO: 5633833 - DNA, 25 bp, Homo sapien
aaggtttctgcctgatggaggttgc

SEQ ID NO: 5633834 - DNA, 25 bp, Homo sapien
ctaatggctccatgctgtgtacact

SEQ ID NO: 5633835 - DNA, 25 bp, Homo sapien
agggtgcaaatacagcagtgccttt

SEQ ID NO: 5633836 - DNA, 25 bp, Homo sapien
gtccagtttgacaccccaaaagatc

SEQ ID NO: 5633837 - DNA, 25 bp, Homo sapien
ctgaggtaaagagtgcccaaaatat

SEQ ID NO: 5633838 - DNA, 25 bp, Homo sapien
tcaacagtacctaacgacaggtcaa

SEQ ID NO: 5633839 - DNA, 25 bp, Homo sapien
ttcctcatgtgaggattgcagaagg

SEQ ID NO: 5633840 - DNA, 25 bp, Homo sapien
tcttcctgagtttaaagagcattcc

SEQ ID NO: 5633841 - DNA, 25 bp, Homo sapien
agtaaattttacagagaagacctca

SEQ ID NO: 5633842 - DNA, 25 bp, Homo sapien
gacaggtcaaaatatagggtgcaaa

SEQ ID NO: 5633843 - DNA, 25 bp, Homo sapien
ctctgacttcagagcacaggatggg

SEQ ID NO: 5633844 - DNA, 25 bp, Homo sapien
tcataccaaggcctgcatagaaatc

SEQ ID NO: 5633845 - DNA, 25 bp, Homo sapien
aatctaggattgactaagaaaattt

SEQ ID NO: 5633846 - DNA, 25 bp, Homo sapien
ccgtatacaagcaatggacatttca

SEQ ID NO: 5633847 - DNA, 25 bp, Homo sapien
ggagccaagtgcaataaaataatat

SEQ ID NO: 5633848 - DNA, 25 bp, Homo sapien
tctgtcaatgtacatctggcacttt

SEQ ID NO: 5633849 - DNA, 25 bp, Homo sapien
ttgctatggattgcagtactgagtt

SEQ ID NO: 5633850 - DNA, 25 bp, Homo sapien
gagccacaaataatactctgacttc

SEQ ID NO: 5633851 - DNA, 25 bp, Homo sapien
aattgtgaaatatgcagtggtctgt

SEQ ID NO: 5633852 - DNA, 25 bp, Homo sapien
cagtggtctgttattgcaaaattaa

SEQ ID NO: 5633853 - DNA, 25 bp, Homo sapien
atggacatttcatagagccacaaat

SEQ ID NO: 5633854 - DNA, 25 bp, Homo sapien
aaatcatgagcttggcacttttgtg

SEQ ID NO: 5633855 - DNA, 25 bp, Homo sapien
tttcacattaaagacagggaaagaa

SEQ ID NO: 5633856 - DNA, 25 bp, Homo sapien
gtgattaatctgaaagggtgtctac

SEQ ID NO: 5633857 - DNA, 25 bp, Homo sapien
aaaccgaaaaccaaaatcatgagct

SEQ ID NO: 5633858 - DNA, 25 bp, Homo sapien
tttgtgtctttgatatgggttattt

SEQ ID NO: 5633859 - DNA, 25 bp, Homo sapien
atatctcaatacagacaagtgaaaa

SEQ ID NO: 5633860 - DNA, 25 bp, Homo sapien
acgcacaccaactttaaactgcacg

SEQ ID NO: 5633861 - DNA, 25 bp, Homo sapien
cacgtgttttgtgcccaaactccct

SEQ ID NO: 5633862 - DNA, 25 bp, Homo sapien
taagcaagcccaagagtcattgtat

SEQ ID NO: 5633863 - DNA, 25 bp, Homo sapien
caaactccctgcatctgtggctata

SEQ ID NO: 5633864 - DNA, 25 bp, Homo sapien
tataacacgttacaagagagaagga

SEQ ID NO: 5633865 - DNA, 25 bp, Homo sapien
cttggaagctttcaagagtcggagg

SEQ ID NO: 5633866 - DNA, 25 bp, Homo sapien
actgagacctcagtatgaaggactg

SEQ ID NO: 5633867 - DNA, 25 bp, Homo sapien
aaattcaaaggcgttagtttgcttc

SEQ ID NO: 5633868 - DNA, 25 bp, Homo sapien
tcaagcaatccaaaccacatcaccc

SEQ ID NO: 5633869 - DNA, 25 bp, Homo sapien
gcaggatcctttagggacgcaactc

SEQ ID NO: 5633870 - DNA, 25 bp, Homo sapien
ttacattaatgactgaggcgcaagg

SEQ ID NO: 5633871 - DNA, 25 bp, Homo sapien
aaaaggagtggaagtaattatactc

SEQ ID NO: 5633872 - DNA, 25 bp, Homo sapien
caatatgtgacctctggatgtgttt

SEQ ID NO: 5633873 - DNA, 25 bp, Homo sapien
tcacatgagccttcggttgcccaat

SEQ ID NO: 5633874 - DNA, 25 bp, Homo sapien
ttcactcatttcttgcagcaggatc

SEQ ID NO: 5633875 - DNA, 25 bp, Homo sapien
gaggcgcaaggtttttgtggctcta

SEQ ID NO: 5633876 - DNA, 25 bp, Homo sapien
atcaaagtggaagggaccattttca

SEQ ID NO: 5633877 - DNA, 25 bp, Homo sapien
ctgggattatttcagcaggctttac

SEQ ID NO: 5633878 - DNA, 25 bp, Homo sapien
caccaacccaaaatcaggccaacag

SEQ ID NO: 5633879 - DNA, 25 bp, Homo sapien
tgaagctcccatcaggcactacacc

SEQ ID NO: 5633880 - DNA, 25 bp, Homo sapien
caggctttacaagagtttggaactc

SEQ ID NO: 5633881 - DNA, 25 bp, Homo sapien
caaaagctccccacaccaggaacta

SEQ ID NO: 5633882 - DNA, 25 bp, Homo sapien
cagacaaggtacctgttaaaacata

SEQ ID NO: 5633883 - DNA, 25 bp, Homo sapien
gaccattttcagtactggccatgcc

SEQ ID NO: 5633884 - DNA, 25 bp, Homo sapien
acctagttaacctgggattatttca

SEQ ID NO: 5633885 - DNA, 25 bp, Homo sapien
caccaggaactaaccaccaacccaa

SEQ ID NO: 5633886 - DNA, 25 bp, Homo sapien
cccaaaatcaggccaacagacaagg

SEQ ID NO: 5633887 - DNA, 25 bp, Homo sapien
tgccaaaatcaaatgtcagatgctt

SEQ ID NO: 5633888 - DNA, 25 bp, Homo sapien
agatgcttttagtaacaggattatt

SEQ ID NO: 5633889 - DNA, 25 bp, Homo sapien
tgaagaacaatgatctggtagttgc

SEQ ID NO: 5633890 - DNA, 25 bp, Homo sapien
cattgttaattgctgggttagtttc

SEQ ID NO: 5633891 - DNA, 25 bp, Homo sapien
ctggcttgaagaacaatgatctggt

SEQ ID NO: 5633892 - DNA, 25 bp, Homo sapien
tcaaggacatagattctggaagtcc

SEQ ID NO: 5633893 - DNA, 25 bp, Homo sapien
tagttgtactcagcatgcctttttt

SEQ ID NO: 5633894 - DNA, 25 bp, Homo sapien
ttctgggaacttgcagccttttaat

SEQ ID NO: 5633895 - DNA, 25 bp, Homo sapien
tatgcccactgactttctgggaact

SEQ ID NO: 5633896 - DNA, 25 bp, Homo sapien
gctttgggctccagcagaaaatctg

SEQ ID NO: 5633897 - DNA, 25 bp, Homo sapien
gaggggtgtcaaatcatcaaggaca

SEQ ID NO: 5633898 - DNA, 25 bp, Homo sapien
taaaaagcagtggaagcttagcaga

SEQ ID NO: 5633899 - DNA, 25 bp, Homo sapien
atatgggctaccagtcttgagaagt

SEQ ID NO: 5633900 - DNA, 25 bp, Homo sapien
gtgagggcatgcaaatgtaaaaaag

SEQ ID NO: 5633901 - DNA, 25 bp, Homo sapien
gaccagcgtgtttgctccaggctat

SEQ ID NO: 5633902 - DNA, 25 bp, Homo sapien
tccaggctatgttgaaatagtatgc

SEQ ID NO: 5633903 - DNA, 25 bp, Homo sapien
tgagtttgcccaggtaatggggcca

SEQ ID NO: 5633904 - DNA, 25 bp, Homo sapien
tcagaactgctgaagaacagagtga

SEQ ID NO: 5633905 - DNA, 25 bp, Homo sapien
cttgagaagcacaagttcagaactg

SEQ ID NO: 5633906 - DNA, 25 bp, Homo sapien
tgttgaaatagtatgcaggttggtc

SEQ ID NO: 5633907 - DNA, 25 bp, Homo sapien
gtgtgttctgggatctactagttct

SEQ ID NO: 5633908 - DNA, 25 bp, Homo sapien
tccacaaaggcacaatatgggctac

SEQ ID NO: 5633909 - DNA, 25 bp, Homo sapien
tggggcagcctgattttttacttcc

SEQ ID NO: 5633910 - DNA, 25 bp, Homo sapien
tctaaaggcccaagagttgccagca

SEQ ID NO: 5633911 - DNA, 25 bp, Homo sapien
cccaaacccaagcccgccatggaaa

SEQ ID NO: 5633912 - DNA, 25 bp, Homo sapien
gccagcatctcacttggggcagcct

SEQ ID NO: 5633913 - DNA, 25 bp, Homo sapien
atatgccagggttattcgagcaagg

SEQ ID NO: 5633914 - DNA, 25 bp, Homo sapien
gaaaaagcctgagacgttctaagat

SEQ ID NO: 5633915 - DNA, 25 bp, Homo sapien
tctaagattctgacgcctgaggcca

SEQ ID NO: 5633916 - DNA, 25 bp, Homo sapien
atttgcctcagatcctcagggaaga

SEQ ID NO: 5633917 - DNA, 25 bp, Homo sapien
ccctgcagaagggctcaaaatgagg

SEQ ID NO: 5633918 - DNA, 25 bp, Homo sapien
atgaggttttggaaatctaaaggcc

SEQ ID NO: 5633919 - DNA, 25 bp, Homo sapien
gagcaagggagtaaaccacatttgc

SEQ ID NO: 5633920 - DNA, 25 bp, Homo sapien
ctgaggtgaagagtttattttttta

SEQ ID NO: 5633921 - DNA, 25 bp, Homo sapien
ctcaggggtcaccccctgcagggac

SEQ ID NO: 5633922 - DNA, 25 bp, Homo sapien
actaagactgctgtaccgaacaagc

SEQ ID NO: 5633923 - DNA, 25 bp, Homo sapien
tgctcctgcatcaggtgcccagccg

SEQ ID NO: 5633924 - DNA, 25 bp, Homo sapien
aggtccaccctcgggtcaaaggtca

SEQ ID NO: 5633925 - DNA, 25 bp, Homo sapien
gggtcaaaggtcaacgtgcactttc

SEQ ID NO: 5633926 - DNA, 25 bp, Homo sapien
gtgcacgtgtgtgcgtgtgcacaga

SEQ ID NO: 5633927 - DNA, 25 bp, Homo sapien
cgtttcatcctggccccgggctgtg

SEQ ID NO: 5633928 - DNA, 25 bp, Homo sapien
gtgtgtatgtacgagtgtgcacgtg

SEQ ID NO: 5633929 - DNA, 25 bp, Homo sapien
tttatcatcaggagacaggatgggt

SEQ ID NO: 5633930 - DNA, 25 bp, Homo sapien
agcaacccgcttcccatgctcctgc

SEQ ID NO: 5633931 - DNA, 25 bp, Homo sapien
atcttgcacatcctcataaacttca

SEQ ID NO: 5633932 - DNA, 25 bp, Homo sapien
gagatagcccaaaataaaatgcaaa

SEQ ID NO: 5633933 - DNA, 25 bp, Homo sapien
tatctcctttgctcagggaccattc

SEQ ID NO: 5633934 - DNA, 25 bp, Homo sapien
cacatctgtgatcccctaaccccaa

SEQ ID NO: 5633935 - DNA, 25 bp, Homo sapien
gtagccaatatcacagtcgtcatta

SEQ ID NO: 5633936 - DNA, 25 bp, Homo sapien
aaaagaagctgagatagcccaaaat

SEQ ID NO: 5633937 - DNA, 25 bp, Homo sapien
gctcagggaccattctacctaagcc

SEQ ID NO: 5633938 - DNA, 25 bp, Homo sapien
tataggcatgagcttctagtaaaag

SEQ ID NO: 5633939 - DNA, 25 bp, Homo sapien
cattctacctaagccagtccacatc

SEQ ID NO: 5633940 - DNA, 25 bp, Homo sapien
aagccagtccacatctgtgatcccc

SEQ ID NO: 5633941 - DNA, 25 bp, Homo sapien
aaagtaaatctgcttatcttgcaca

SEQ ID NO: 5633942 - DNA, 25 bp, Homo sapien
gtcaatgcctgcacaggagcgattt

SEQ ID NO: 5633943 - DNA, 25 bp, Homo sapien
agagtacttttgatcggtagggttc

SEQ ID NO: 5633944 - DNA, 25 bp, Homo sapien
tttgatcggtagggttcaaatattc

SEQ ID NO: 5633945 - DNA, 25 bp, Homo sapien
gacacccagagccaaataatgcttc

SEQ ID NO: 5633946 - DNA, 25 bp, Homo sapien
gtcatgacacagctgtcaatgcctg

SEQ ID NO: 5633947 - DNA, 25 bp, Homo sapien
aagggatataaatagtctatagatt

SEQ ID NO: 5633948 - DNA, 25 bp, Homo sapien
ttaacatcatgaaagtgacagtatc

SEQ ID NO: 5633949 - DNA, 25 bp, Homo sapien
aagaatgagctcactgaaaaactct

SEQ ID NO: 5633950 - DNA, 25 bp, Homo sapien
tggtcaggcagctgtcatgacacag

SEQ ID NO: 5633951 - DNA, 25 bp, Homo sapien
accttactatggtcaggcagctgtc

SEQ ID NO: 5633952 - DNA, 25 bp, Homo sapien
aggagcgatttgttaaagaatgagc

SEQ ID NO: 5633953 - DNA, 25 bp, Homo sapien
acggcaccgaggtattggttcttgg

SEQ ID NO: 5633954 - DNA, 25 bp, Homo sapien
ccaagaaccaatacctcggtgccgt

SEQ ID NO: 5633955 - DNA, 25 bp, Homo sapien
gttttcaccagtggagatggcaatc

SEQ ID NO: 5633956 - DNA, 25 bp, Homo sapien
gcttaaccagttgtaggagcacaat

SEQ ID NO: 5633957 - DNA, 25 bp, Homo sapien
tatgcacaacaacccaggctaccac

SEQ ID NO: 5633958 - DNA, 25 bp, Homo sapien
aggtgtcacatcatggtacgggaag

SEQ ID NO: 5633959 - DNA, 25 bp, Homo sapien
accatcaactggaatgggaccgttc

SEQ ID NO: 5633960 - DNA, 25 bp, Homo sapien
ttttccaagcctgactcctgcccac

SEQ ID NO: 5633961 - DNA, 25 bp, Homo sapien
gctgggatgcaaaagcctaatgtgg

SEQ ID NO: 5633962 - DNA, 25 bp, Homo sapien
tgactcattctgtatggggcgtttc

SEQ ID NO: 5633963 - DNA, 25 bp, Homo sapien
aatggtgttcataggcttgggtcta

SEQ ID NO: 5633964 - DNA, 25 bp, Homo sapien
gtatggggcatttcaacacactacc

SEQ ID NO: 5633965 - DNA, 25 bp, Homo sapien
acatggaccaagacgacggttttca

SEQ ID NO: 5633966 - DNA, 25 bp, Homo sapien
ccccgccaacgccccttctgatgtt

SEQ ID NO: 5633967 - DNA, 25 bp, Homo sapien
cccgcctgcacttcaggccccctgt

SEQ ID NO: 5633968 - DNA, 25 bp, Homo sapien
cccctgtctcccggagtgatggtgg

SEQ ID NO: 5633969 - DNA, 25 bp, Homo sapien
cagcagccctcccgcctgcacttca

SEQ ID NO: 5633970 - DNA, 25 bp, Homo sapien
tctcccgggattctggtgagtactg

SEQ ID NO: 5633971 - DNA, 25 bp, Homo sapien
tgttgaacacgggttctctggcagg

SEQ ID NO: 5633972 - DNA, 25 bp, Homo sapien
tgcacccttcacaaatgcccacagc

SEQ ID NO: 5633973 - DNA, 25 bp, Homo sapien
cccttaaacacctcctgcacccttc

SEQ ID NO: 5633974 - DNA, 25 bp, Homo sapien
ccaccccaccctgcatggctagagg

SEQ ID NO: 5633975 - DNA, 25 bp, Homo sapien
gtgggtccccatgatgccgtgaccc

SEQ ID NO: 5633976 - DNA, 25 bp, Homo sapien
cccttctgatgttgaacacgggttc

SEQ ID NO: 5633977 - DNA, 25 bp, Homo sapien
ctgatttccagagttgccatatgat

SEQ ID NO: 5633978 - DNA, 25 bp, Homo sapien
aaagcaaaagctacaagaaacaatt

SEQ ID NO: 5633979 - DNA, 25 bp, Homo sapien
ggcaaacacaacacatggctgggag

SEQ ID NO: 5633980 - DNA, 25 bp, Homo sapien
aagatatcatggcataagtgaaaat

SEQ ID NO: 5633981 - DNA, 25 bp, Homo sapien
aaaagtcactaaacaagcaaataca

SEQ ID NO: 5633982 - DNA, 25 bp, Homo sapien
cacgggaaaaattacgggacatata

SEQ ID NO: 5633983 - DNA, 25 bp, Homo sapien
ggcaaacaatgaccaaaagataacc

SEQ ID NO: 5633984 - DNA, 25 bp, Homo sapien
accacagagcaatgcagttggcaaa

SEQ ID NO: 5633985 - DNA, 25 bp, Homo sapien
tgagttttcaactagaagcccccta

SEQ ID NO: 5633986 - DNA, 25 bp, Homo sapien
gaaaaaagaataggtggctgaattc

SEQ ID NO: 5633987 - DNA, 25 bp, Homo sapien
agccccctagcagagcaggtatttt

SEQ ID NO: 5633988 - DNA, 25 bp, Homo sapien
cggccagtgatgataatgacccacg

SEQ ID NO: 5633989 - DNA, 25 bp, Homo sapien
atattagaagagctacctgtgggga

SEQ ID NO: 5633990 - DNA, 25 bp, Homo sapien
gacccacgaattgaatcacgaactc

SEQ ID NO: 5633991 - DNA, 25 bp, Homo sapien
tcagcatcatttggggtgcgataac

SEQ ID NO: 5633992 - DNA, 25 bp, Homo sapien
tggtcaacatcactgggagagtatg

SEQ ID NO: 5633993 - DNA, 25 bp, Homo sapien
caaataaagccttgctgcggccagt

SEQ ID NO: 5633994 - DNA, 25 bp, Homo sapien
agttccataagggtcatgtacatgt

SEQ ID NO: 5633995 - DNA, 25 bp, Homo sapien
atctgatgtccagaagggaaaaaga

SEQ ID NO: 5633996 - DNA, 25 bp, Homo sapien
cacattgtgtagtggttagaggcaa

SEQ ID NO: 5633997 - DNA, 25 bp, Homo sapien
gaggcaagggattatatgtacacac

SEQ ID NO: 5633998 - DNA, 25 bp, Homo sapien
actggaggtaatattggtcaacatc

SEQ ID NO: 5633999 - DNA, 25 bp, Homo sapien
agtgaaaagacctacatgaaccatc

SEQ ID NO: 5634000 - DNA, 25 bp, Homo sapien
atcacggctgataacagacggccat

SEQ ID NO: 5634001 - DNA, 25 bp, Homo sapien
catccacgctccaaatggcaaatac

SEQ ID NO: 5634002 - DNA, 25 bp, Homo sapien
ctgggttttgatatgtggaaatgaa

SEQ ID NO: 5634003 - DNA, 25 bp, Homo sapien
tgctgagtagattacgaaatgttcc

SEQ ID NO: 5634004 - DNA, 25 bp, Homo sapien
tgatatgtggaaatgaatgtggtta

SEQ ID NO: 5634005 - DNA, 25 bp, Homo sapien
agacggccatcacaaacaccctctg

SEQ ID NO: 5634006 - DNA, 25 bp, Homo sapien
atgaaccatcgaaaagttggaattc

SEQ ID NO: 5634007 - DNA, 25 bp, Homo sapien
ttgatgaaagggccttcataagtat

SEQ ID NO: 5634008 - DNA, 25 bp, Homo sapien
tatatttagaaatggctgtgagatt

SEQ ID NO: 5634009 - DNA, 25 bp, Homo sapien
gatagatgacagtgaaaagacctac

SEQ ID NO: 5634010 - DNA, 25 bp, Homo sapien
tttctggaactcaaggtgcctaaag

SEQ ID NO: 5634011 - DNA, 25 bp, Homo sapien
ctttaggcaccttgagttccagaaa

SEQ ID NO: 5634012 - DNA, 25 bp, Homo sapien
cctggctgttgttggaactgatttc

SEQ ID NO: 5634013 - DNA, 25 bp, Homo sapien
cccggagacgctatgtcacacctga

SEQ ID NO: 5634014 - DNA, 25 bp, Homo sapien
cacacctgaaggattaggtactttc

SEQ ID NO: 5634015 - DNA, 25 bp, Homo sapien
tacaaaatgatatgaggagaggtaa

SEQ ID NO: 5634016 - DNA, 25 bp, Homo sapien
gcacccatcttgagaaggaggaggg

SEQ ID NO: 5634017 - DNA, 25 bp, Homo sapien
gaggtaagttcagggtctgagttcc

SEQ ID NO: 5634018 - DNA, 25 bp, Homo sapien
ccaaacctcggaactgcacccatct

SEQ ID NO: 5634019 - DNA, 25 bp, Homo sapien
atgctaggcagtaataagttctgtc

SEQ ID NO: 5634020 - DNA, 25 bp, Homo sapien
gtgattcagaagatgtgagacaccc

SEQ ID NO: 5634021 - DNA, 25 bp, Homo sapien
taagtgcagctggcagacactctat

SEQ ID NO: 5634022 - DNA, 25 bp, Homo sapien
caactttgttgtgaaggcagatatt

SEQ ID NO: 5634023 - DNA, 25 bp, Homo sapien
aaagggatatgcaccgatcaatctc

SEQ ID NO: 5634024 - DNA, 25 bp, Homo sapien
caggtgtatgctggctaatacttcc

SEQ ID NO: 5634025 - DNA, 25 bp, Homo sapien
agctaaagtaattcccagatttttc

SEQ ID NO: 5634026 - DNA, 25 bp, Homo sapien
acctgatgtggtattactaacaaat

SEQ ID NO: 5634027 - DNA, 25 bp, Homo sapien
ctgagtcaagaccatttgtgttata

SEQ ID NO: 5634028 - DNA, 25 bp, Homo sapien
aaatctgagtagtagagacttttaa

SEQ ID NO: 5634029 - DNA, 25 bp, Homo sapien
ttagctcatgggaaccttgaactcc

SEQ ID NO: 5634030 - DNA, 25 bp, Homo sapien
aatacttccacagagctcagccaaa

SEQ ID NO: 5634031 - DNA, 25 bp, Homo sapien
cagagctcagccaaaaataagtttt

SEQ ID NO: 5634032 - DNA, 25 bp, Homo sapien
tccaaaacctaacaaagggatatgc

SEQ ID NO: 5634033 - DNA, 25 bp, Homo sapien
ggagagcattagcacaatttttagc

SEQ ID NO: 5634034 - DNA, 25 bp, Homo sapien
cacataactcaaggtctagagattt

SEQ ID NO: 5634035 - DNA, 25 bp, Homo sapien
agcattctggcctatctgtgcatac

SEQ ID NO: 5634036 - DNA, 25 bp, Homo sapien
ctctccaagaatttagggtactctc

SEQ ID NO: 5634037 - DNA, 25 bp, Homo sapien
gcctctgaagacttacacataactc

SEQ ID NO: 5634038 - DNA, 25 bp, Homo sapien
gaagaatgtgttcctcattgtgatc

SEQ ID NO: 5634039 - DNA, 25 bp, Homo sapien
tgtgcatactatgtggagtggaact

SEQ ID NO: 5634040 - DNA, 25 bp, Homo sapien
atgagtcctccacaataagcccttt

SEQ ID NO: 5634041 - DNA, 25 bp, Homo sapien
tccccctttcttgaagcgactatac

SEQ ID NO: 5634042 - DNA, 25 bp, Homo sapien
agcggttatctgtgacatctcttcc

SEQ ID NO: 5634043 - DNA, 25 bp, Homo sapien
tctacttctaagctcaaactgttca

SEQ ID NO: 5634044 - DNA, 25 bp, Homo sapien
aggagataacccagggaaacacact

SEQ ID NO: 5634045 - DNA, 25 bp, Homo sapien
gcaagccagttgacctcagacagtg

SEQ ID NO: 5634046 - DNA, 25 bp, Homo sapien
ccttgaggagctcgcactctgatag

SEQ ID NO: 5634047 - DNA, 25 bp, Homo sapien
ctgcagaccaaggattggattagag

SEQ ID NO: 5634048 - DNA, 25 bp, Homo sapien
agtgtctggactcttggtaagccct

SEQ ID NO: 5634049 - DNA, 25 bp, Homo sapien
ggcagtgcctgataacagagagctg

SEQ ID NO: 5634050 - DNA, 25 bp, Homo sapien
gaaagcagactgcacaagtaacttt

SEQ ID NO: 5634051 - DNA, 25 bp, Homo sapien
attgctgttgattgagccctggtgc

SEQ ID NO: 5634052 - DNA, 25 bp, Homo sapien
ggtagggaggaagacttcattccca

SEQ ID NO: 5634053 - DNA, 25 bp, Homo sapien
ctgtccaatgctgtcaggcaccctg

SEQ ID NO: 5634054 - DNA, 25 bp, Homo sapien
gtgagaccaacatgagaaaacatac

SEQ ID NO: 5634055 - DNA, 25 bp, Homo sapien
ggggtaagagtggctctacatagtt

SEQ ID NO: 5634056 - DNA, 25 bp, Homo sapien
aggagcacagtagctttcgggaatt

SEQ ID NO: 5634057 - DNA, 25 bp, Homo sapien
cagtgatgcccaagtctgtaccttc

SEQ ID NO: 5634058 - DNA, 25 bp, Homo sapien
acttaaggcatcaaccggatgtatc

SEQ ID NO: 5634059 - DNA, 25 bp, Homo sapien
cggtccccagatggaggatattatt

SEQ ID NO: 5634060 - DNA, 25 bp, Homo sapien
gatgtatcagagagctgctgtgcac

SEQ ID NO: 5634061 - DNA, 25 bp, Homo sapien
attggttgtccttgtgtgtggcttc

SEQ ID NO: 5634062 - DNA, 25 bp, Homo sapien
ggcccagaagatacttgtaagaagc

SEQ ID NO: 5634063 - DNA, 25 bp, Homo sapien
atgagaaacatgattggttgtcctt

SEQ ID NO: 5634064 - DNA, 25 bp, Homo sapien
ctaggttaagaagattatgagaaac

SEQ ID NO: 5634065 - DNA, 25 bp, Homo sapien
aagaaagcttacaacaaacatgtcc

SEQ ID NO: 5634066 - DNA, 25 bp, Homo sapien
aggatattatttgcaaggggagatg

SEQ ID NO: 5634067 - DNA, 25 bp, Homo sapien
acttactggaggcatttccgtgttc

SEQ ID NO: 5634068 - DNA, 25 bp, Homo sapien
atgcacctggttcttaggtttggat

SEQ ID NO: 5634069 - DNA, 25 bp, Homo sapien
gggacagctccaattactagaacat

SEQ ID NO: 5634070 - DNA, 25 bp, Homo sapien
agggcccttggagatcatttgaacc

SEQ ID NO: 5634071 - DNA, 25 bp, Homo sapien
agtcctttgcctggggattttgcag

SEQ ID NO: 5634072 - DNA, 25 bp, Homo sapien
atcatttgaaccaagctctagctcc

SEQ ID NO: 5634073 - DNA, 25 bp, Homo sapien
ggcaataactgattcttaatgcacc

SEQ ID NO: 5634074 - DNA, 25 bp, Homo sapien
accacacccggcaataactgattct

SEQ ID NO: 5634075 - DNA, 25 bp, Homo sapien
tgcagcctgtacttactggaggcat

SEQ ID NO: 5634076 - DNA, 25 bp, Homo sapien
tagctcctttggtcttggggacagc

SEQ ID NO: 5634077 - DNA, 25 bp, Homo sapien
ccacacagtcctttgcctggggatt

SEQ ID NO: 5634078 - DNA, 25 bp, Homo sapien
attaccctcaacaaaggagtactga

SEQ ID NO: 5634079 - DNA, 25 bp, Homo sapien
aggcagcattagggaatttgttgaa

SEQ ID NO: 5634080 - DNA, 25 bp, Homo sapien
cttctgttgcttagtgggagaagcc

SEQ ID NO: 5634081 - DNA, 25 bp, Homo sapien
acagcaaagataagcatacatgatt

SEQ ID NO: 5634082 - DNA, 25 bp, Homo sapien
aaaggagtactgagttagaaaaata

SEQ ID NO: 5634083 - DNA, 25 bp, Homo sapien
aaagcagatgtaatagagatgaaaa

SEQ ID NO: 5634084 - DNA, 25 bp, Homo sapien
taaaacatccatatgcttaggcagc

SEQ ID NO: 5634085 - DNA, 25 bp, Homo sapien
ttgttgaaagtatcatacgacatcc

SEQ ID NO: 5634086 - DNA, 25 bp, Homo sapien
taccatcagtaattctggcgtatta

SEQ ID NO: 5634087 - DNA, 25 bp, Homo sapien
aatagaatatgaactaaaatgtttt

SEQ ID NO: 5634088 - DNA, 25 bp, Homo sapien
cacccagtggcaacataagtcttta

SEQ ID NO: 5634089 - DNA, 25 bp, Homo sapien
ggactgcagtttcataggcacagcc

SEQ ID NO: 5634090 - DNA, 25 bp, Homo sapien
gaagtgtaggctgctacgtctcgga

SEQ ID NO: 5634091 - DNA, 25 bp, Homo sapien
tgccaaaggctacctaggagccctt

SEQ ID NO: 5634092 - DNA, 25 bp, Homo sapien
gccttaagtggaaatgacagtgttg

SEQ ID NO: 5634093 - DNA, 25 bp, Homo sapien
catcaagatcttggggctgcttagc

SEQ ID NO: 5634094 - DNA, 25 bp, Homo sapien
ttagagtccctacaggtcctggaac

SEQ ID NO: 5634095 - DNA, 25 bp, Homo sapien
ctttgcccttgagagaagtgtaggc

SEQ ID NO: 5634096 - DNA, 25 bp, Homo sapien
tctccagtgtggaccagaatgaaac

SEQ ID NO: 5634097 - DNA, 25 bp, Homo sapien
acgtctcggaagtcagctcctgctt

SEQ ID NO: 5634098 - DNA, 25 bp, Homo sapien
ttttctagaaaatcccaggctgggc

SEQ ID NO: 5634099 - DNA, 25 bp, Homo sapien
agggttcatcccctgtgcgtgggcc

SEQ ID NO: 5634100 - DNA, 25 bp, Homo sapien
ctgttcttctgattagcgatgggga

SEQ ID NO: 5634101 - DNA, 25 bp, Homo sapien
gagacaaagttcgggactttcacca

SEQ ID NO: 5634102 - DNA, 25 bp, Homo sapien
cgggactttcaccaacctgttcttc

SEQ ID NO: 5634103 - DNA, 25 bp, Homo sapien
cctgtgagaatttggatcaggtggg

SEQ ID NO: 5634104 - DNA, 25 bp, Homo sapien
gcagatttcctggccagttgtcctc

SEQ ID NO: 5634105 - DNA, 25 bp, Homo sapien
ggggacctgtgagaatttggatcag

SEQ ID NO: 5634106 - DNA, 25 bp, Homo sapien
gttcttctgattagcgatggggatg

SEQ ID NO: 5634107 - DNA, 25 bp, Homo sapien
acctgttcttctgattagcgatggg

SEQ ID NO: 5634108 - DNA, 25 bp, Homo sapien
ttcctggccagttgtcctctgggtg

SEQ ID NO: 5634109 - DNA, 25 bp, Homo sapien
cctggccagttgtcctctgggtggg

SEQ ID NO: 5634110 - DNA, 25 bp, Homo sapien
ttcttctgattagcgatggggatgg

SEQ ID NO: 5634111 - DNA, 25 bp, Homo sapien
tcggggtcagtggtaacacctataa

SEQ ID NO: 5634112 - DNA, 25 bp, Homo sapien
ctaatccatgggcagtacctgcatt

SEQ ID NO: 5634113 - DNA, 25 bp, Homo sapien
gtggcaaccacggacttctgctctt

SEQ ID NO: 5634114 - DNA, 25 bp, Homo sapien
aaaccaaagcaaaaagacactgctc

SEQ ID NO: 5634115 - DNA, 25 bp, Homo sapien
gcagagtggaaatgcatcctagatt

SEQ ID NO: 5634116 - DNA, 25 bp, Homo sapien
gtttgttgcagagtggaaatgcatc

SEQ ID NO: 5634117 - DNA, 25 bp, Homo sapien
ctagattggattaagctaagaggct

SEQ ID NO: 5634118 - DNA, 25 bp, Homo sapien
agcctcactgacatctcaattgccc

SEQ ID NO: 5634119 - DNA, 25 bp, Homo sapien
cactgctcaaagctaatccatgggc

SEQ ID NO: 5634120 - DNA, 25 bp, Homo sapien
attaagctaagaggcttgagaggtg

SEQ ID NO: 5634121 - DNA, 25 bp, Homo sapien
gttctgacagccaacttgatcattc

SEQ ID NO: 5634122 - DNA, 25 bp, Homo sapien
cccttccttcctcggaagcgtcctc

SEQ ID NO: 5634123 - DNA, 25 bp, Homo sapien
tgtcagcttgtcgggaagttgaaat

SEQ ID NO: 5634124 - DNA, 25 bp, Homo sapien
ttcctcggaagcgtcctctcaccac

SEQ ID NO: 5634125 - DNA, 25 bp, Homo sapien
gggcgtcctctccccccaccgctgc

SEQ ID NO: 5634126 - DNA, 25 bp, Homo sapien
ctctccccccaccgctgcaggagca

SEQ ID NO: 5634127 - DNA, 25 bp, Homo sapien
cggggcgtcctctgcgccattcact

SEQ ID NO: 5634128 - DNA, 25 bp, Homo sapien
ccgccttccttccgcaggggcgtcc

SEQ ID NO: 5634129 - DNA, 25 bp, Homo sapien
tgcgccattcacttgtcagcttgtc

SEQ ID NO: 5634130 - DNA, 25 bp, Homo sapien
ctcaccacaccgcttcaagagcccc

SEQ ID NO: 5634131 - DNA, 25 bp, Homo sapien
cgccccttttcccccacaggagcgc

SEQ ID NO: 5634132 - DNA, 25 bp, Homo sapien
cgcttcaagagcccccccttccttc

SEQ ID NO: 5634133 - DNA, 25 bp, Homo sapien
cttcaaagctgatcaaaaggggcaa

SEQ ID NO: 5634134 - DNA, 25 bp, Homo sapien
tctgaggttgtgtgtccctaggact

SEQ ID NO: 5634135 - DNA, 25 bp, Homo sapien
gaattgggttgaatgttaggacaga

SEQ ID NO: 5634136 - DNA, 25 bp, Homo sapien
ggcaaagagtgtgcctgtggtatga

SEQ ID NO: 5634137 - DNA, 25 bp, Homo sapien
acccagactgatgagatagcctcat

SEQ ID NO: 5634138 - DNA, 25 bp, Homo sapien
aggactaggtaggatctctcttgct

SEQ ID NO: 5634139 - DNA, 25 bp, Homo sapien
tgtgaaataggatttgagtcccaac

SEQ ID NO: 5634140 - DNA, 25 bp, Homo sapien
ggcccatcttagaaggtcaggaagg

SEQ ID NO: 5634141 - DNA, 25 bp, Homo sapien
gccaggaagaagtttgcacttgatg

SEQ ID NO: 5634142 - DNA, 25 bp, Homo sapien
cagacatgttggaccgtaattgctt

SEQ ID NO: 5634143 - DNA, 25 bp, Homo sapien
ggaaaaggttggaccagacatgttg

SEQ ID NO: 5634144 - DNA, 25 bp, Homo sapien
ctagaggtatatttattcgagtaag

SEQ ID NO: 5634145 - DNA, 25 bp, Homo sapien
gaactgacagattaaacatcaggtc

SEQ ID NO: 5634146 - DNA, 25 bp, Homo sapien
caggtctttgtcacatcagttagat

SEQ ID NO: 5634147 - DNA, 25 bp, Homo sapien
agtgtgccaaattttctgaactgac

SEQ ID NO: 5634148 - DNA, 25 bp, Homo sapien
tttctctagagcaagattctgttct

SEQ ID NO: 5634149 - DNA, 25 bp, Homo sapien
ttcgagtaagttaaggtcttagcta

SEQ ID NO: 5634150 - DNA, 25 bp, Homo sapien
gtcaggttaaatgatgattaagaaa

SEQ ID NO: 5634151 - DNA, 25 bp, Homo sapien
ttagtatgaagtattactagaggta

SEQ ID NO: 5634152 - DNA, 25 bp, Homo sapien
ataaagcagaaatgtcaggttaaat

SEQ ID NO: 5634153 - DNA, 25 bp, Homo sapien
tttgggaataatattgcagaaacac

SEQ ID NO: 5634154 - DNA, 25 bp, Homo sapien
ttaaggtcttagctaacattgaaat

SEQ ID NO: 5634155 - DNA, 25 bp, Homo sapien
tgtggggcttcatatgctcctaggt

SEQ ID NO: 5634156 - DNA, 25 bp, Homo sapien
tgactgctcctgtggtgcctctgtg

SEQ ID NO: 5634157 - DNA, 25 bp, Homo sapien
aggctcctccttctatgactgctcc

SEQ ID NO: 5634158 - DNA, 25 bp, Homo sapien
ggcatgcccactcaccctatcaggt

SEQ ID NO: 5634159 - DNA, 25 bp, Homo sapien
caggatggtttgaggctcctccttc

SEQ ID NO: 5634160 - DNA, 25 bp, Homo sapien
gctcctaggtattttaggcatgccc

SEQ ID NO: 5634161 - DNA, 25 bp, Homo sapien
gcctctgtggacaggattcacatct

SEQ ID NO: 5634162 - DNA, 25 bp, Homo sapien
gaacacaattagcatcaggatggtt

SEQ ID NO: 5634163 - DNA, 25 bp, Homo sapien
ttcagctctgaacacaattagcatc

SEQ ID NO: 5634164 - DNA, 25 bp, Homo sapien
tctatgactgctcctgtggtgcctc

SEQ ID NO: 5634165 - DNA, 25 bp, Homo sapien
aggattcacatctttgtggggcttc

SEQ ID NO: 5634166 - DNA, 25 bp, Homo sapien
actacgaagagaaatcacactgtgc

SEQ ID NO: 5634167 - DNA, 25 bp, Homo sapien
ctgcacatgaaacccaaggaccatg

SEQ ID NO: 5634168 - DNA, 25 bp, Homo sapien
tgcctcctgagtaaggaatgcaggc

SEQ ID NO: 5634169 - DNA, 25 bp, Homo sapien
actgaaagagcctcccagcccttct

SEQ ID NO: 5634170 - DNA, 25 bp, Homo sapien
ttcaaatgtgagcaatggcaacaaa

SEQ ID NO: 5634171 - DNA, 25 bp, Homo sapien
aattcaagtgacctagaccagctgg

SEQ ID NO: 5634172 - DNA, 25 bp, Homo sapien
cagtgtccaaggactccctggccag

SEQ ID NO: 5634173 - DNA, 25 bp, Homo sapien
gctgaatcagcacaaaatcccactt

SEQ ID NO: 5634174 - DNA, 25 bp, Homo sapien
aggaccatgtacgcccactacgaag

SEQ ID NO: 5634175 - DNA, 25 bp, Homo sapien
ggcagtggctaccgctccctgtatc

SEQ ID NO: 5634176 - DNA, 25 bp, Homo sapien
ttctaatgaaggcctggttctctgg

SEQ ID NO: 5634177 - DNA, 25 bp, Homo sapien
tccgaggttctaagcctaggtgctc

SEQ ID NO: 5634178 - DNA, 25 bp, Homo sapien
acgcttctagctgtcatgattccaa

SEQ ID NO: 5634179 - DNA, 25 bp, Homo sapien
gaattgagggagcttcacgcttcta

SEQ ID NO: 5634180 - DNA, 25 bp, Homo sapien
ctccaataaacccagtgagagccag

SEQ ID NO: 5634181 - DNA, 25 bp, Homo sapien
gcaccggagggttatccccatgtcg

SEQ ID NO: 5634182 - DNA, 25 bp, Homo sapien
ccccagtatgtggaattgagggagc

SEQ ID NO: 5634183 - DNA, 25 bp, Homo sapien
ggctcccctaggaagcatctggcaa

SEQ ID NO: 5634184 - DNA, 25 bp, Homo sapien
caagattctacgacatgtgggagag

SEQ ID NO: 5634185 - DNA, 25 bp, Homo sapien
catggtctttaatctcctggaggct

SEQ ID NO: 5634186 - DNA, 25 bp, Homo sapien
agtgttgggatcaaattctggctcc

SEQ ID NO: 5634187 - DNA, 25 bp, Homo sapien
gagccatcgggttggccatgttatg

SEQ ID NO: 5634188 - DNA, 25 bp, Homo sapien
tcctgcgtgtcgcaggaagtgacgt

SEQ ID NO: 5634189 - DNA, 25 bp, Homo sapien
gggctgttaccctatccgcggcgaa

SEQ ID NO: 5634190 - DNA, 25 bp, Homo sapien
ggcgaaggcctcctcactcggcccg

SEQ ID NO: 5634191 - DNA, 25 bp, Homo sapien
gcggcgggctgttaccctatccgcg

SEQ ID NO: 5634192 - DNA, 25 bp, Homo sapien
ggggaaatcagtgacgacgataata

SEQ ID NO: 5634193 - DNA, 25 bp, Homo sapien
accgcaccgacccagtccgttagga

SEQ ID NO: 5634194 - DNA, 25 bp, Homo sapien
tgttaccctatccgcggcgaaggcc

SEQ ID NO: 5634195 - DNA, 25 bp, Homo sapien
caccgacccagtccgttaggaaaga

SEQ ID NO: 5634196 - DNA, 25 bp, Homo sapien
ggagcctttgtttcctgcgtgtcgc

SEQ ID NO: 5634197 - DNA, 25 bp, Homo sapien
agatactccggccccggcctccagt

SEQ ID NO: 5634198 - DNA, 25 bp, Homo sapien
acagccgctaccagagtccctttct

SEQ ID NO: 5634199 - DNA, 25 bp, Homo sapien
gggcctctccgaggcccgtgcccgc

SEQ ID NO: 5634200 - DNA, 25 bp, Homo sapien
gcgggcacgggcctcggagaggccc

SEQ ID NO: 5634201 - DNA, 25 bp, Homo sapien
taagtgactaaaatcaagatgcaga

SEQ ID NO: 5634202 - DNA, 25 bp, Homo sapien
agccaaccaagtaattggaaaatgc

SEQ ID NO: 5634203 - DNA, 25 bp, Homo sapien
attgcatatggattgaagcttgctt

SEQ ID NO: 5634204 - DNA, 25 bp, Homo sapien
ttgtaggcaaatgtggcttatttac

SEQ ID NO: 5634205 - DNA, 25 bp, Homo sapien
tctgcaattcatccaggaaggtctc

SEQ ID NO: 5634206 - DNA, 25 bp, Homo sapien
tacctctagtgaatgggattgttgg

SEQ ID NO: 5634207 - DNA, 25 bp, Homo sapien
ctacccaatcacagaagaaaaaccc

SEQ ID NO: 5634208 - DNA, 25 bp, Homo sapien
gatgcagaactgtatgcagagtatg

SEQ ID NO: 5634209 - DNA, 25 bp, Homo sapien
accctcctgatgagcaactggtaat

SEQ ID NO: 5634210 - DNA, 25 bp, Homo sapien
tacagcaagaggtactgatacgaga

SEQ ID NO: 5634211 - DNA, 25 bp, Homo sapien
attcgcataagcgaataggaggatg

SEQ ID NO: 5634212 - DNA, 25 bp, Homo sapien
atctgtaattccacatgcaaccccc

SEQ ID NO: 5634213 - DNA, 25 bp, Homo sapien
atatcaaattgtggatctgcttgtt

SEQ ID NO: 5634214 - DNA, 25 bp, Homo sapien
gaaagtataatgaattgcctgtagc

SEQ ID NO: 5634215 - DNA, 25 bp, Homo sapien
aatgttaaaaaggatgctagccgtt

SEQ ID NO: 5634216 - DNA, 25 bp, Homo sapien
gctagccgttgattcctggcatgct

SEQ ID NO: 5634217 - DNA, 25 bp, Homo sapien
caatggttcggtttggtacatatcc

SEQ ID NO: 5634218 - DNA, 25 bp, Homo sapien
tctgaatatggtaacaaggaaatcc

SEQ ID NO: 5634219 - DNA, 25 bp, Homo sapien
acaacgttaaaaggatttagtgcat

SEQ ID NO: 5634220 - DNA, 25 bp, Homo sapien
aaggtagatcataaatcgaaaacat

SEQ ID NO: 5634221 - DNA, 25 bp, Homo sapien
agtacattaaagttaaaggtagatc

SEQ ID NO: 5634222 - DNA, 25 bp, Homo sapien
acccccatacacactcacaagatct

SEQ ID NO: 5634223 - DNA, 25 bp, Homo sapien
agtaaaaaggagtattcagtgtttg

SEQ ID NO: 5634224 - DNA, 25 bp, Homo sapien
gcagacaccacagagtcttgtgttg

SEQ ID NO: 5634225 - DNA, 25 bp, Homo sapien
tcttgtgttggagagctaagccaag

SEQ ID NO: 5634226 - DNA, 25 bp, Homo sapien
ttaaagcctcccaaaagtcagatcc

SEQ ID NO: 5634227 - DNA, 25 bp, Homo sapien
ttattaacagagaaaatccaaagct

SEQ ID NO: 5634228 - DNA, 25 bp, Homo sapien
atatctaggtaagtattaaaatttc

SEQ ID NO: 5634229 - DNA, 25 bp, Homo sapien
tatttgcacaatgaaagaattttgc

SEQ ID NO: 5634230 - DNA, 25 bp, Homo sapien
agggaagtgcaatcataatcactta

SEQ ID NO: 5634231 - DNA, 25 bp, Homo sapien
ttctcaacagtgagagtagtgggca

SEQ ID NO: 5634232 - DNA, 25 bp, Homo sapien
taaaaaccttgtgtgcaatgatttc

SEQ ID NO: 5634233 - DNA, 25 bp, Homo sapien
tttctttccaaggtacacattcgag

SEQ ID NO: 5634234 - DNA, 25 bp, Homo sapien
agaaacaaatggttgtagtggtaac

SEQ ID NO: 5634235 - DNA, 25 bp, Homo sapien
acactggggtagtgcttcctgatac

SEQ ID NO: 5634236 - DNA, 25 bp, Homo sapien
tcctgatactgggttgaaagaagca

SEQ ID NO: 5634237 - DNA, 25 bp, Homo sapien
ctgaaaagttgtaataaagtcctag

SEQ ID NO: 5634238 - DNA, 25 bp, Homo sapien
gtctgtgtgctacctggctcagcac

SEQ ID NO: 5634239 - DNA, 25 bp, Homo sapien
aaatactcccttcgccatgccttcc

SEQ ID NO: 5634240 - DNA, 25 bp, Homo sapien
tcaatttgagggtgtggttgttatt

SEQ ID NO: 5634241 - DNA, 25 bp, Homo sapien
tgttgcacacaaagagatgcatgct

SEQ ID NO: 5634242 - DNA, 25 bp, Homo sapien
cctgagcatgcgaattatgtgagcc

SEQ ID NO: 5634243 - DNA, 25 bp, Homo sapien
tataaacagtactgcctggagtgtt

SEQ ID NO: 5634244 - DNA, 25 bp, Homo sapien
gttgaaagaagcagaaggctatttt

SEQ ID NO: 5634245 - DNA, 25 bp, Homo sapien
actcgttaggactttcaggtagctt

SEQ ID NO: 5634246 - DNA, 25 bp, Homo sapien
ttacagtacctgacccttgcacctt

SEQ ID NO: 5634247 - DNA, 25 bp, Homo sapien
tcagtgttctagttcctcaggccag

SEQ ID NO: 5634248 - DNA, 25 bp, Homo sapien
ttgttccgtacatgtgtgactcagt

SEQ ID NO: 5634249 - DNA, 25 bp, Homo sapien
gatgtgagtagacagaatttgggtc

SEQ ID NO: 5634250 - DNA, 25 bp, Homo sapien
gactcagtggttagccaaagatgtg

SEQ ID NO: 5634251 - DNA, 25 bp, Homo sapien
tgacaggtaattatcttggttagac

SEQ ID NO: 5634252 - DNA, 25 bp, Homo sapien
cttgcaccttgaaaatggggactca

SEQ ID NO: 5634253 - DNA, 25 bp, Homo sapien
ttggttagactagaactgcaaactc

SEQ ID NO: 5634254 - DNA, 25 bp, Homo sapien
tgtttcttaagtggaagctctggtc

SEQ ID NO: 5634255 - DNA, 25 bp, Homo sapien
aatggggactcactttacagctttc

SEQ ID NO: 5634256 - DNA, 25 bp, Homo sapien
tggcaaatttaccactacaaaggtc

SEQ ID NO: 5634257 - DNA, 25 bp, Homo sapien
aaataattctaaggttctgtagttc

SEQ ID NO: 5634258 - DNA, 25 bp, Homo sapien
aaacaagtacaatatcctggcataa

SEQ ID NO: 5634259 - DNA, 25 bp, Homo sapien
tcagacaaaatccacctgctgtgta

SEQ ID NO: 5634260 - DNA, 25 bp, Homo sapien
gaaaacttcctgccttgggagagac

SEQ ID NO: 5634261 - DNA, 25 bp, Homo sapien
catgggagacaggttatacctttcc

SEQ ID NO: 5634262 - DNA, 25 bp, Homo sapien
atgtaatacttgaaaacttcctgcc

SEQ ID NO: 5634263 - DNA, 25 bp, Homo sapien
atatcctggcataaaactatctttc

SEQ ID NO: 5634264 - DNA, 25 bp, Homo sapien
cttgggagagactaaacccgattca

SEQ ID NO: 5634265 - DNA, 25 bp, Homo sapien
tgtagttcaatagtgaaacaagtac

SEQ ID NO: 5634266 - DNA, 25 bp, Homo sapien
tacaaaggtctttcatgggagacag

SEQ ID NO: 5634267 - DNA, 25 bp, Homo sapien
ccccagttccatggagcaggggaaa

SEQ ID NO: 5634268 - DNA, 25 bp, Homo sapien
atcaataggcaaattacaggctggg

SEQ ID NO: 5634269 - DNA, 25 bp, Homo sapien
agacggaaacctaacagtaaatcca

SEQ ID NO: 5634270 - DNA, 25 bp, Homo sapien
aggctgggcacgatgtttcattcct

SEQ ID NO: 5634271 - DNA, 25 bp, Homo sapien
aagcagaaacaaccacttgaaatgc

SEQ ID NO: 5634272 - DNA, 25 bp, Homo sapien
tgctactctggcagcatgcatttgc

SEQ ID NO: 5634273 - DNA, 25 bp, Homo sapien
attccatggactcaggtcaagattt

SEQ ID NO: 5634274 - DNA, 25 bp, Homo sapien
gaatatgatggaaccaaatcagact

SEQ ID NO: 5634275 - DNA, 25 bp, Homo sapien
caacagaatagtataaaagaaaagc

SEQ ID NO: 5634276 - DNA, 25 bp, Homo sapien
tggcagcatgcatttgcccatcctc

SEQ ID NO: 5634277 - DNA, 25 bp, Homo sapien
gtaagtctctggtttcaatccttcc

SEQ ID NO: 5634278 - DNA, 25 bp, Homo sapien
gtgtcccaatgttaagtcagttctc

SEQ ID NO: 5634279 - DNA, 25 bp, Homo sapien
ccagggcttccagtatttgtagtga

SEQ ID NO: 5634280 - DNA, 25 bp, Homo sapien
gatcatgtatgaaagcaagtattta

SEQ ID NO: 5634281 - DNA, 25 bp, Homo sapien
tgaaaagtaactcaggatctagcct

SEQ ID NO: 5634282 - DNA, 25 bp, Homo sapien
aatgtaaatgcctgaaaagtaactc

SEQ ID NO: 5634283 - DNA, 25 bp, Homo sapien
catctcacacctgttggagggcatt

SEQ ID NO: 5634284 - DNA, 25 bp, Homo sapien
agtgatagtgtgaatccattaggtc

SEQ ID NO: 5634285 - DNA, 25 bp, Homo sapien
aaggtgaatgatatgttagagataa

SEQ ID NO: 5634286 - DNA, 25 bp, Homo sapien
cccaaatgaaaccccagggcttcca

SEQ ID NO: 5634287 - DNA, 25 bp, Homo sapien
taccctattgcttcgaatgtgtccc

SEQ ID NO: 5634288 - DNA, 25 bp, Homo sapien
aaggcctctgtgcaaatctgatatc

SEQ ID NO: 5634289 - DNA, 25 bp, Homo sapien
acagaagaagaacctgtcactttat

SEQ ID NO: 5634290 - DNA, 25 bp, Homo sapien
ttctgggttgaaactacattatacc

SEQ ID NO: 5634291 - DNA, 25 bp, Homo sapien
accaatttgtctgtgacagaagaag

SEQ ID NO: 5634292 - DNA, 25 bp, Homo sapien
cttatgaaacaggtcagaaatgggg

SEQ ID NO: 5634293 - DNA, 25 bp, Homo sapien
tgcttctgattacaaagacctttcc

SEQ ID NO: 5634294 - DNA, 25 bp, Homo sapien
tgcttggaatgcttatgaaacaggt

SEQ ID NO: 5634295 - DNA, 25 bp, Homo sapien
ctctttgatgggcagccattttttc

SEQ ID NO: 5634296 - DNA, 25 bp, Homo sapien
aaactgcctctaataacttaaccac

SEQ ID NO: 5634297 - DNA, 25 bp, Homo sapien
gagagcagaggtaaaactataattt

SEQ ID NO: 5634298 - DNA, 25 bp, Homo sapien
ataacttaaccacgaattcaaatta

SEQ ID NO: 5634299 - DNA, 25 bp, Homo sapien
atcctaccctctttgatgggcagcc

SEQ ID NO: 5634300 - DNA, 25 bp, Homo sapien
atttcatgaaggtgggtactctgtt

SEQ ID NO: 5634301 - DNA, 25 bp, Homo sapien
aaccatgccattagggagcagtttt

SEQ ID NO: 5634302 - DNA, 25 bp, Homo sapien
agcattatggcatgaaacagaactc

SEQ ID NO: 5634303 - DNA, 25 bp, Homo sapien
tctaatctcagaatgtggtacagca

SEQ ID NO: 5634304 - DNA, 25 bp, Homo sapien
ggagtcagggagttacccagttcca

SEQ ID NO: 5634305 - DNA, 25 bp, Homo sapien
agttccagtatagtgccactgacgc

SEQ ID NO: 5634306 - DNA, 25 bp, Homo sapien
gcaggccaactgctttagaatgtgc

SEQ ID NO: 5634307 - DNA, 25 bp, Homo sapien
gtgccactgacgcttaagtagcctc

SEQ ID NO: 5634308 - DNA, 25 bp, Homo sapien
gcatgtcggcaagtctgtgttccta

SEQ ID NO: 5634309 - DNA, 25 bp, Homo sapien
ccaaattgatgcgagtctggagtca

SEQ ID NO: 5634310 - DNA, 25 bp, Homo sapien
ttagagattagtcgtgaggctacaa

SEQ ID NO: 5634311 - DNA, 25 bp, Homo sapien
ctcctgtagaaaagccaacatatcc

SEQ ID NO: 5634312 - DNA, 25 bp, Homo sapien
aagaatggctttatagcagatgctc

SEQ ID NO: 5634313 - DNA, 25 bp, Homo sapien
ccggatccagctgaattagttgcac

SEQ ID NO: 5634314 - DNA, 25 bp, Homo sapien
aacaatgagcttactagatgacctt

SEQ ID NO: 5634315 - DNA, 25 bp, Homo sapien
atgtgcaacaggtctagcaggatga

SEQ ID NO: 5634316 - DNA, 25 bp, Homo sapien
agcagatgctctgaactgggtcttt

SEQ ID NO: 5634317 - DNA, 25 bp, Homo sapien
gttgcacacagcaagttgcgggaga

SEQ ID NO: 5634318 - DNA, 25 bp, Homo sapien
agcctgaaagctagtgctcttaaca

SEQ ID NO: 5634319 - DNA, 25 bp, Homo sapien
ccaacatatcctaggctgagggtcc

SEQ ID NO: 5634320 - DNA, 25 bp, Homo sapien
tgaaatagtgcctgcccctagtatc

SEQ ID NO: 5634321 - DNA, 25 bp, Homo sapien
ggctgagggtccttttccggatcca

SEQ ID NO: 5634322 - DNA, 25 bp, Homo sapien
cataaaaggagtagataaatcaggt

SEQ ID NO: 5634323 - DNA, 25 bp, Homo sapien
aggagtagataaatcaggtgtgagt

SEQ ID NO: 5634324 - DNA, 25 bp, Homo sapien
ttgagagatgtaactaaatgcccta

SEQ ID NO: 5634325 - DNA, 25 bp, Homo sapien
atacacaaaacagtaaatgttctac

SEQ ID NO: 5634326 - DNA, 25 bp, Homo sapien
gcataggtcatacttggaaacttca

SEQ ID NO: 5634327 - DNA, 25 bp, Homo sapien
attagctaagaaaaagcataggtca

SEQ ID NO: 5634328 - DNA, 25 bp, Homo sapien
tggaaacttcagacaaaactcattt

SEQ ID NO: 5634329 - DNA, 25 bp, Homo sapien
actcagtgacagaaagaaaaaatac

SEQ ID NO: 5634330 - DNA, 25 bp, Homo sapien
atgttctacatgaaatcactcagtg

SEQ ID NO: 5634331 - DNA, 25 bp, Homo sapien
aaagatgagcatataacatcaatat

SEQ ID NO: 5634332 - DNA, 25 bp, Homo sapien
aaaccagtcacaaattgagagatgt

SEQ ID NO: 5634333 - DNA, 25 bp, Homo sapien
gggtcttagtaggctcaatgggaag

SEQ ID NO: 5634334 - DNA, 25 bp, Homo sapien
agcagatcacgaaatacacaaggac

SEQ ID NO: 5634335 - DNA, 25 bp, Homo sapien
ctctacgagaacagataagcaattc

SEQ ID NO: 5634336 - DNA, 25 bp, Homo sapien
accacagagtggcagtgtctcattt

SEQ ID NO: 5634337 - DNA, 25 bp, Homo sapien
gggagggttgattaaataggctcta

SEQ ID NO: 5634338 - DNA, 25 bp, Homo sapien
gcctaggaaaccaccatcagaaagc

SEQ ID NO: 5634339 - DNA, 25 bp, Homo sapien
ttcccagaaccaggccaccaaggaa

SEQ ID NO: 5634340 - DNA, 25 bp, Homo sapien
agatattgaatacttgggagggttg

SEQ ID NO: 5634341 - DNA, 25 bp, Homo sapien
tctatgatcaggaaatgacgtctct

SEQ ID NO: 5634342 - DNA, 25 bp, Homo sapien
tacacaaggacaagattagaaaatg

SEQ ID NO: 5634343 - DNA, 25 bp, Homo sapien
tcaatgggaaggatcatcgttctta

SEQ ID NO: 5634344 - DNA, 25 bp, Homo sapien
tgaagctttgggctgccttgtgcat

SEQ ID NO: 5634345 - DNA, 25 bp, Homo sapien
agcgttccacctggtactagcattt

SEQ ID NO: 5634346 - DNA, 25 bp, Homo sapien
ggtgtcaagtaaaggtgtcattcct

SEQ ID NO: 5634347 - DNA, 25 bp, Homo sapien
ataatcatggctattggtaaaatca

SEQ ID NO: 5634348 - DNA, 25 bp, Homo sapien
tcatttgtatgccgaagggtgtcaa

SEQ ID NO: 5634349 - DNA, 25 bp, Homo sapien
aggaaatggacagagtcctgttgca

SEQ ID NO: 5634350 - DNA, 25 bp, Homo sapien
tttggagaaacacccacgcctgtta

SEQ ID NO: 5634351 - DNA, 25 bp, Homo sapien
tagcccattgttcgtaactattgga

SEQ ID NO: 5634352 - DNA, 25 bp, Homo sapien
ttgtgcatgaataatttttggagaa

SEQ ID NO: 5634353 - DNA, 25 bp, Homo sapien
tcctgttgcagaaatagcgttccac

SEQ ID NO: 5634354 - DNA, 25 bp, Homo sapien
aggtgtcattccttggaagagccat

SEQ ID NO: 5634355 - DNA, 25 bp, Homo sapien
cggcgtaccgaactgcccaccctaa

SEQ ID NO: 5634356 - DNA, 25 bp, Homo sapien
tggaaagagccctagatttgaagca

SEQ ID NO: 5634357 - DNA, 25 bp, Homo sapien
cctgctatcctctgtgccttggctg

SEQ ID NO: 5634358 - DNA, 25 bp, Homo sapien
aacacagctgtcaccggcgctgtcg

SEQ ID NO: 5634359 - DNA, 25 bp, Homo sapien
gtgatcacttaaccccttcgagtcc

SEQ ID NO: 5634360 - DNA, 25 bp, Homo sapien
aggccttgcgtcagtgtgatcactt

SEQ ID NO: 5634361 - DNA, 25 bp, Homo sapien
cccttcgagtccaatttgtaaaatg

SEQ ID NO: 5634362 - DNA, 25 bp, Homo sapien
aaagagccctagatttgaagcaaga

SEQ ID NO: 5634363 - DNA, 25 bp, Homo sapien
ctgcccaccctaacacagctgtcac

SEQ ID NO: 5634364 - DNA, 25 bp, Homo sapien
ggttccaggccttgcgtcagtgtga

SEQ ID NO: 5634365 - DNA, 25 bp, Homo sapien
tgaagcaagactgacccaggttcca

SEQ ID NO: 5634366 - DNA, 25 bp, Homo sapien
actgctgaaggcgctccctgtttct

SEQ ID NO: 5634367 - DNA, 25 bp, Homo sapien
aaacaagaaaatggcctataaccgc

SEQ ID NO: 5634368 - DNA, 25 bp, Homo sapien
tatctctcgggttttagcaggttcc

SEQ ID NO: 5634369 - DNA, 25 bp, Homo sapien
cggagctaaactcataagcggaccc

SEQ ID NO: 5634370 - DNA, 25 bp, Homo sapien
ttaatcaggaacagtcccagatgat

SEQ ID NO: 5634371 - DNA, 25 bp, Homo sapien
ggagaggccgtctgtctttctgatc

SEQ ID NO: 5634372 - DNA, 25 bp, Homo sapien
tgatgagatgcgcgctttcccacta

SEQ ID NO: 5634373 - DNA, 25 bp, Homo sapien
ctgaaccctccctcggcaaacctga

SEQ ID NO: 5634374 - DNA, 25 bp, Homo sapien
tataaccgcatagactgctgaaggc

SEQ ID NO: 5634375 - DNA, 25 bp, Homo sapien
actagcttggatgcaaatcgcgctt

SEQ ID NO: 5634376 - DNA, 25 bp, Homo sapien
gcaaatcgcgcttgggttttgggag

SEQ ID NO: 5634377 - DNA, 25 bp, Homo sapien
ccatagtgctgaccgcccacagaaa

SEQ ID NO: 5634378 - DNA, 25 bp, Homo sapien
attcaatgtgtcaggtaaaaattct

SEQ ID NO: 5634379 - DNA, 25 bp, Homo sapien
gaaagaaatcaagactaactcaaat

SEQ ID NO: 5634380 - DNA, 25 bp, Homo sapien
tctgtctggaaaacatgaggcacta

SEQ ID NO: 5634381 - DNA, 25 bp, Homo sapien
actcaaatcagactgtgggcaggga

SEQ ID NO: 5634382 - DNA, 25 bp, Homo sapien
ccactaatggacccggtagtgaagc

SEQ ID NO: 5634383 - DNA, 25 bp, Homo sapien
cactggacactggacagagtgttag

SEQ ID NO: 5634384 - DNA, 25 bp, Homo sapien
ggtagtgaagcacctcctgagtgcc

SEQ ID NO: 5634385 - DNA, 25 bp, Homo sapien
acagaaagctcattggtgtgaaatg

SEQ ID NO: 5634386 - DNA, 25 bp, Homo sapien
ggtttatctacaaagagatgtgctc

SEQ ID NO: 5634387 - DNA, 25 bp, Homo sapien
tttggaagtctgtctggaaaacatg

SEQ ID NO: 5634388 - DNA, 25 bp, Homo sapien
aataaaggagcagttaactaggctc

SEQ ID NO: 5634389 - DNA, 25 bp, Homo sapien
ggatgagggatatgtgatgtttcca

SEQ ID NO: 5634390 - DNA, 25 bp, Homo sapien
tgctcagtgctgagtcacggatgag

SEQ ID NO: 5634391 - DNA, 25 bp, Homo sapien
atcatcagtattgacgagaaccatc

SEQ ID NO: 5634392 - DNA, 25 bp, Homo sapien
actttaagtgctccaggaaccggtc

SEQ ID NO: 5634393 - DNA, 25 bp, Homo sapien
tgctgagtgtgaagtagttgctcca

SEQ ID NO: 5634394 - DNA, 25 bp, Homo sapien
acagggcctgaacctaaaaagatgt

SEQ ID NO: 5634395 - DNA, 25 bp, Homo sapien
gctaagtcctagtgaggcaagctga

SEQ ID NO: 5634396 - DNA, 25 bp, Homo sapien
tgcagaacaataaaaagacggcacg

SEQ ID NO: 5634397 - DNA, 25 bp, Homo sapien
ggcagcatagtaaatacacgagggc

SEQ ID NO: 5634398 - DNA, 25 bp, Homo sapien
gggacagatgcaaacaataagactt

SEQ ID NO: 5634399 - DNA, 25 bp, Homo sapien
gctgttctcactaactcggctgccc

SEQ ID NO: 5634400 - DNA, 25 bp, Homo sapien
tacgtcaccgtgttgctctggaaga

SEQ ID NO: 5634401 - DNA, 25 bp, Homo sapien
ttccaacagcaactcaaagcaaact

SEQ ID NO: 5634402 - DNA, 25 bp, Homo sapien
gcggcctctacctgggaccaggcta

SEQ ID NO: 5634403 - DNA, 25 bp, Homo sapien
attaaccttctcaacgcagcgtctt

SEQ ID NO: 5634404 - DNA, 25 bp, Homo sapien
gtccactgggaacgctttacgtcac

SEQ ID NO: 5634405 - DNA, 25 bp, Homo sapien
aataagagcaagccgatcattaacc

SEQ ID NO: 5634406 - DNA, 25 bp, Homo sapien
ctccgccgcccgttgcggcctctac

SEQ ID NO: 5634407 - DNA, 25 bp, Homo sapien
ggcccacggcgctactaactactcc

SEQ ID NO: 5634408 - DNA, 25 bp, Homo sapien
gtgttgctctggaagacagagactg

SEQ ID NO: 5634409 - DNA, 25 bp, Homo sapien
tctaaacgccaccgcggctgttctc

SEQ ID NO: 5634410 - DNA, 25 bp, Homo sapien
gagccttccttttagcgatgccgct

SEQ ID NO: 5634411 - DNA, 25 bp, Homo sapien
tggactttgccaagcgtttcactga

SEQ ID NO: 5634412 - DNA, 25 bp, Homo sapien
tccaccattcccccaagcgtggtgt

SEQ ID NO: 5634413 - DNA, 25 bp, Homo sapien
ctttgccaagcgtttcactgagcct

SEQ ID NO: 5634414 - DNA, 25 bp, Homo sapien
cgaacgctctgccttgtgaagcgcc

SEQ ID NO: 5634415 - DNA, 25 bp, Homo sapien
tgccaagcgtttcactgagccttcc

SEQ ID NO: 5634416 - DNA, 25 bp, Homo sapien
cggcgcggcttggactttgccaagc

SEQ ID NO: 5634417 - DNA, 25 bp, Homo sapien
cttttagcgatgccgcttcccgggg

SEQ ID NO: 5634418 - DNA, 25 bp, Homo sapien
gccgagccaaagacgtttccaactc

SEQ ID NO: 5634419 - DNA, 25 bp, Homo sapien
ggggccgaacgctctgccttgtgaa

SEQ ID NO: 5634420 - DNA, 25 bp, Homo sapien
acgctctgccttgtgaagcgccggg

SEQ ID NO: 5634421 - DNA, 25 bp, Homo sapien
aatggggacaataatggaacccact

SEQ ID NO: 5634422 - DNA, 25 bp, Homo sapien
acagccacagtgtgctatgggttgg

SEQ ID NO: 5634423 - DNA, 25 bp, Homo sapien
agctgagtttgaacgtagctctgcc

SEQ ID NO: 5634424 - DNA, 25 bp, Homo sapien
agagctgagtttgaacgtagctctg

SEQ ID NO: 5634425 - DNA, 25 bp, Homo sapien
atgcttaaggcaccctgttgagtgt

SEQ ID NO: 5634426 - DNA, 25 bp, Homo sapien
ggggacaataatggaacccacttca

SEQ ID NO: 5634427 - DNA, 25 bp, Homo sapien
caataatggaacccacttcagattg

SEQ ID NO: 5634428 - DNA, 25 bp, Homo sapien
ctgttgagtgtggtgaccaccagtg

SEQ ID NO: 5634429 - DNA, 25 bp, Homo sapien
agtttgaacgtagctctgccaccta

SEQ ID NO: 5634430 - DNA, 25 bp, Homo sapien
cgggccatgcttaaggcaccctgtt

SEQ ID NO: 5634431 - DNA, 25 bp, Homo sapien
tgagtttgaacgtagctctgccacc

SEQ ID NO: 5634432 - DNA, 25 bp, Homo sapien
gaaggggctgtcacatcaaaaagcc

SEQ ID NO: 5634433 - DNA, 25 bp, Homo sapien
taagggatccttacatagttccaag

SEQ ID NO: 5634434 - DNA, 25 bp, Homo sapien
cagaggctcctgtgctcatgaccct

SEQ ID NO: 5634435 - DNA, 25 bp, Homo sapien
aaagcccaaacatgtgattagagat

SEQ ID NO: 5634436 - DNA, 25 bp, Homo sapien
ctagtggactctattaggaaggctt

SEQ ID NO: 5634437 - DNA, 25 bp, Homo sapien
ttatggaactatctaagggatcctt

SEQ ID NO: 5634438 - DNA, 25 bp, Homo sapien
tcccctaacttcctaggaggagaga

SEQ ID NO: 5634439 - DNA, 25 bp, Homo sapien
ctaacttcctaggaggagagaagaa

SEQ ID NO: 5634440 - DNA, 25 bp, Homo sapien
tgtgctcatgacccttccagtcctc

SEQ ID NO: 5634441 - DNA, 25 bp, Homo sapien
aggaaggcttattatggaactatct

SEQ ID NO: 5634442 - DNA, 25 bp, Homo sapien
agagattggaaatttcaaacccacc

SEQ ID NO: 5634443 - DNA, 25 bp, Homo sapien
atagggttgtgaataagaatatgtt

SEQ ID NO: 5634444 - DNA, 25 bp, Homo sapien
tattactttggaagtggcaccactg

SEQ ID NO: 5634445 - DNA, 25 bp, Homo sapien
cagaagaaagtgttacctagtggtc

SEQ ID NO: 5634446 - DNA, 25 bp, Homo sapien
tggtgagagagttagatacaacact

SEQ ID NO: 5634447 - DNA, 25 bp, Homo sapien
tctgctgctccctagctgtgtcatc

SEQ ID NO: 5634448 - DNA, 25 bp, Homo sapien
atccaaagttccagtgcatagccca

SEQ ID NO: 5634449 - DNA, 25 bp, Homo sapien
ttaaccatctggtgagagagttaga

SEQ ID NO: 5634450 - DNA, 25 bp, Homo sapien
gttctgcaacagaagaaagtgttac

SEQ ID NO: 5634451 - DNA, 25 bp, Homo sapien
aaattagagaagttgcatagggttg

SEQ ID NO: 5634452 - DNA, 25 bp, Homo sapien
tgatagcaaacatgtggacagttgt

SEQ ID NO: 5634453 - DNA, 25 bp, Homo sapien
gtcagtctggtttgaatcctggttc

SEQ ID NO: 5634454 - DNA, 25 bp, Homo sapien
gtagaggactcgtaagtgcacctag

SEQ ID NO: 5634455 - DNA, 25 bp, Homo sapien
gaaaagcagtttgtaagtagaggac

SEQ ID NO: 5634456 - DNA, 25 bp, Homo sapien
taacctagtgaaactcagccaatag

SEQ ID NO: 5634457 - DNA, 25 bp, Homo sapien
aaggatacaaggctgtagaaagatt

SEQ ID NO: 5634458 - DNA, 25 bp, Homo sapien
tatgattcatcaaacacagcaactg

SEQ ID NO: 5634459 - DNA, 25 bp, Homo sapien
tgtctgaacctttgcctggagtttc

SEQ ID NO: 5634460 - DNA, 25 bp, Homo sapien
ttacagatgatgttagtctaagata

SEQ ID NO: 5634461 - DNA, 25 bp, Homo sapien
acacagcaactgaatactggcgtat

SEQ ID NO: 5634462 - DNA, 25 bp, Homo sapien
tagtacactgcaatggcacagacac

SEQ ID NO: 5634463 - DNA, 25 bp, Homo sapien
aaaacaaacgtcgtatgtctgaacc

SEQ ID NO: 5634464 - DNA, 25 bp, Homo sapien
gcacagacacggcagatagtcaata

SEQ ID NO: 5634465 - DNA, 25 bp, Homo sapien
caaaaaccgtagtccaggcaacagg

SEQ ID NO: 5634466 - DNA, 25 bp, Homo sapien
ggtgagttttgagaagtccatttgt

SEQ ID NO: 5634467 - DNA, 25 bp, Homo sapien
atgaaaagcaaaaaccgtagtccag

SEQ ID NO: 5634468 - DNA, 25 bp, Homo sapien
agatgtatggacttaaaaccaagat

SEQ ID NO: 5634469 - DNA, 25 bp, Homo sapien
ccaggcaacaggaatttatagtagc

SEQ ID NO: 5634470 - DNA, 25 bp, Homo sapien
atagtagcagcataattagaccacc

SEQ ID NO: 5634471 - DNA, 25 bp, Homo sapien
tggcaaagcaaagagtctccaaaaa

SEQ ID NO: 5634472 - DNA, 25 bp, Homo sapien
cctctggagtcaaaagaactgccaa

SEQ ID NO: 5634473 - DNA, 25 bp, Homo sapien
ttctgcagtaaaaatctaatggttt

SEQ ID NO: 5634474 - DNA, 25 bp, Homo sapien
ctatcagatgggaagttattgctaa

SEQ ID NO: 5634475 - DNA, 25 bp, Homo sapien
tagaccaccaatctgagctcattct

SEQ ID NO: 5634476 - DNA, 25 bp, Homo sapien
ttaaagtactgagcatgtttcaaat

SEQ ID NO: 5634477 - DNA, 25 bp, Homo sapien
tgacttcttgcagacaggtagccat

SEQ ID NO: 5634478 - DNA, 25 bp, Homo sapien
tgcagacaggtagccataatgattt

SEQ ID NO: 5634479 - DNA, 25 bp, Homo sapien
ttaacacagaaatcactcagcttac

SEQ ID NO: 5634480 - DNA, 25 bp, Homo sapien
tcccccagttttagccgagatacca

SEQ ID NO: 5634481 - DNA, 25 bp, Homo sapien
agccgagataccagtttctcctgac

SEQ ID NO: 5634482 - DNA, 25 bp, Homo sapien
atttgtacataatcagagaacatta

SEQ ID NO: 5634483 - DNA, 25 bp, Homo sapien
agcaaagacgacaccagtttttccc

SEQ ID NO: 5634484 - DNA, 25 bp, Homo sapien
tgtatttactgggagaatgggaaaa

SEQ ID NO: 5634485 - DNA, 25 bp, Homo sapien
aagagttaagtacacccctatatta

SEQ ID NO: 5634486 - DNA, 25 bp, Homo sapien
aaaataagcaaagacgacaccagtt

SEQ ID NO: 5634487 - DNA, 25 bp, Homo sapien
gttcactcccctgtggaagaacagt

SEQ ID NO: 5634488 - DNA, 25 bp, Homo sapien
ttgccatcttgaacagagtatgtgt

SEQ ID NO: 5634489 - DNA, 25 bp, Homo sapien
ttcagagtgtaataaggggattaga

SEQ ID NO: 5634490 - DNA, 25 bp, Homo sapien
aaggaattttgggttgatatgtttg

SEQ ID NO: 5634491 - DNA, 25 bp, Homo sapien
gattagacgggatgaccaacctaaa

SEQ ID NO: 5634492 - DNA, 25 bp, Homo sapien
gtggaagaacagtaaattgccttaa

SEQ ID NO: 5634493 - DNA, 25 bp, Homo sapien
tgtgccttaaggaattttgggttga

SEQ ID NO: 5634494 - DNA, 25 bp, Homo sapien
taccattagccaaaagaacatcatt

SEQ ID NO: 5634495 - DNA, 25 bp, Homo sapien
accaacctaaatcaccaggcacagt

SEQ ID NO: 5634496 - DNA, 25 bp, Homo sapien
gagtgggaagatcaacttcagagtg

SEQ ID NO: 5634497 - DNA, 25 bp, Homo sapien
aggcagacagttcaattctcatttc

SEQ ID NO: 5634498 - DNA, 25 bp, Homo sapien
caaagggagacataatagaatactg

SEQ ID NO: 5634499 - DNA, 25 bp, Homo sapien
aggagcagtgagtccttaggtattg

SEQ ID NO: 5634500 - DNA, 25 bp, Homo sapien
gagcagtgagtccttaggtattgat

SEQ ID NO: 5634501 - DNA, 25 bp, Homo sapien
ccttcttagttgggtgttaggagtc

SEQ ID NO: 5634502 - DNA, 25 bp, Homo sapien
gagtcaaagggagacataatagaat

SEQ ID NO: 5634503 - DNA, 25 bp, Homo sapien
agagttagtccttcttagttgggtg

SEQ ID NO: 5634504 - DNA, 25 bp, Homo sapien
gaatactgtcttatttggtggcagg

SEQ ID NO: 5634505 - DNA, 25 bp, Homo sapien
aggacattcagagttagtccttctt

SEQ ID NO: 5634506 - DNA, 25 bp, Homo sapien
gggaattttcacctgagttagcaag

SEQ ID NO: 5634507 - DNA, 25 bp, Homo sapien
caggggtaagggaattttcacctga

SEQ ID NO: 5634508 - DNA, 25 bp, Homo sapien
ttcttagttgggtgttaggagtcaa

SEQ ID NO: 5634509 - DNA, 25 bp, Homo sapien
atttgtctggaggaagttagaattt

SEQ ID NO: 5634510 - DNA, 25 bp, Homo sapien
ctacaatagcagaatgagttgactc

SEQ ID NO: 5634511 - DNA, 25 bp, Homo sapien
aacccagtggattgtcataggccta

SEQ ID NO: 5634512 - DNA, 25 bp, Homo sapien
agtctgtcggaggcattcatttgtc

SEQ ID NO: 5634513 - DNA, 25 bp, Homo sapien
gtgaagagagcacaagctttgaact

SEQ ID NO: 5634514 - DNA, 25 bp, Homo sapien
gactcaacaataaggtagcgtagac

SEQ ID NO: 5634515 - DNA, 25 bp, Homo sapien
atgaggatgtagataaaaatgccat

SEQ ID NO: 5634516 - DNA, 25 bp, Homo sapien
cagacaacaaaattgaagatgagga

SEQ ID NO: 5634517 - DNA, 25 bp, Homo sapien
tgctggaccaatttgcaggctggag

SEQ ID NO: 5634518 - DNA, 25 bp, Homo sapien
ttccagaccaaggtcctggaggtga

SEQ ID NO: 5634519 - DNA, 25 bp, Homo sapien
tccaaaaatataagactgaggtaat

SEQ ID NO: 5634520 - DNA, 25 bp, Homo sapien
gggaagctgctctgtgaatgtgaga

SEQ ID NO: 5634521 - DNA, 25 bp, Homo sapien
actcagggaaaataaaaggctataa

SEQ ID NO: 5634522 - DNA, 25 bp, Homo sapien
agcccccatctactccccaccccca

SEQ ID NO: 5634523 - DNA, 25 bp, Homo sapien
aaggtttaagtgttactcggcgtca

SEQ ID NO: 5634524 - DNA, 25 bp, Homo sapien
ggttcccgattccgtgccgctttga

SEQ ID NO: 5634525 - DNA, 25 bp, Homo sapien
aaccagacaagaacgcccatcatga

SEQ ID NO: 5634526 - DNA, 25 bp, Homo sapien
cgattccgtgccgctttgagggaag

SEQ ID NO: 5634527 - DNA, 25 bp, Homo sapien
tttcttatttcaggagggaggacaa

SEQ ID NO: 5634528 - DNA, 25 bp, Homo sapien
acaagctggaaaaccatttgagatc

SEQ ID NO: 5634529 - DNA, 25 bp, Homo sapien
ctccccacccccagctatgaatttc

SEQ ID NO: 5634530 - DNA, 25 bp, Homo sapien
attgctccccacaaagaaaacaaat

SEQ ID NO: 5634531 - DNA, 25 bp, Homo sapien
gcagagccaagagtaacctatgccc

SEQ ID NO: 5634532 - DNA, 25 bp, Homo sapien
tgtaaaaagcgcacgttgaggtaaa

SEQ ID NO: 5634533 - DNA, 25 bp, Homo sapien
gcttgccttccggaagtcaggcctc

SEQ ID NO: 5634534 - DNA, 25 bp, Homo sapien
aatccctcctggaaggactggcatt

SEQ ID NO: 5634535 - DNA, 25 bp, Homo sapien
atacatgccaagctggagccaaaga

SEQ ID NO: 5634536 - DNA, 25 bp, Homo sapien
ctgcaattagtcctgtacgggtggt

SEQ ID NO: 5634537 - DNA, 25 bp, Homo sapien
gtgcaggaagctttgccaacacctc

SEQ ID NO: 5634538 - DNA, 25 bp, Homo sapien
cagcccactctgatgggggcctgca

SEQ ID NO: 5634539 - DNA, 25 bp, Homo sapien
atgcccaagagcagctacaaggcag

SEQ ID NO: 5634540 - DNA, 25 bp, Homo sapien
tcgtcaggaatcaccaggtggttgc

SEQ ID NO: 5634541 - DNA, 25 bp, Homo sapien
gcaggccaccggacgcctgaatatc

SEQ ID NO: 5634542 - DNA, 25 bp, Homo sapien
gatgtgccattgtcgtgaaatcttc

SEQ ID NO: 5634543 - DNA, 25 bp, Homo sapien
gaactgaagtcacgcaggaataaac

SEQ ID NO: 5634544 - DNA, 25 bp, Homo sapien
aggtgatatttggttagcaacgtcc

SEQ ID NO: 5634545 - DNA, 25 bp, Homo sapien
attagctccatgtgccactgggagt

SEQ ID NO: 5634546 - DNA, 25 bp, Homo sapien
ctttaggatgttctgatgtgccatt

SEQ ID NO: 5634547 - DNA, 25 bp, Homo sapien
gagacattccagtttaccggcagtg

SEQ ID NO: 5634548 - DNA, 25 bp, Homo sapien
atgctacagcccccaaaatacgttt

SEQ ID NO: 5634549 - DNA, 25 bp, Homo sapien
tgattggaatatggtctgcagagat

SEQ ID NO: 5634550 - DNA, 25 bp, Homo sapien
ggctgtctccctctgtaccggaaac

SEQ ID NO: 5634551 - DNA, 25 bp, Homo sapien
gcagagatcaaccagaattagctcc

SEQ ID NO: 5634552 - DNA, 25 bp, Homo sapien
cggaaacacgggatgactataagtg

SEQ ID NO: 5634553 - DNA, 25 bp, Homo sapien
ttacagcaatcttcagtggttaaag

SEQ ID NO: 5634554 - DNA, 25 bp, Homo sapien
aactgtccttggtaagatctccttc

SEQ ID NO: 5634555 - DNA, 25 bp, Homo sapien
gactagtcagtcaactgtccttggt

SEQ ID NO: 5634556 - DNA, 25 bp, Homo sapien
gatatgaaacaatctgagactagtc

SEQ ID NO: 5634557 - DNA, 25 bp, Homo sapien
ctgccaacttacgaataggtaaaac

SEQ ID NO: 5634558 - DNA, 25 bp, Homo sapien
tgacaaaaggtaaatccctagctac

SEQ ID NO: 5634559 - DNA, 25 bp, Homo sapien
acgcccagttatctagtttactctt

SEQ ID NO: 5634560 - DNA, 25 bp, Homo sapien
gatctccttcttgacagccatgtgg

SEQ ID NO: 5634561 - DNA, 25 bp, Homo sapien
aatccctagctaccaccagaatgtt

SEQ ID NO: 5634562 - DNA, 25 bp, Homo sapien
ttcagtggttaaagcaaaactgtac

SEQ ID NO: 5634563 - DNA, 25 bp, Homo sapien
ttgacagccatgtggattctatcac

SEQ ID NO: 5634564 - DNA, 25 bp, Homo sapien
tagatttattgcagactggcctcaa

SEQ ID NO: 5634565 - DNA, 25 bp, Homo sapien
tggcctcaagctcccagactatatt

SEQ ID NO: 5634566 - DNA, 25 bp, Homo sapien
ctaggagaaattgtcagtttaaaaa

SEQ ID NO: 5634567 - DNA, 25 bp, Homo sapien
tagagaagacatttaacccacccat

SEQ ID NO: 5634568 - DNA, 25 bp, Homo sapien
tattttggataactgttgcaattat

SEQ ID NO: 5634569 - DNA, 25 bp, Homo sapien
aatcatgggctcactaggagaaatt

SEQ ID NO: 5634570 - DNA, 25 bp, Homo sapien
gggttgaaatgccagcttttgagac

SEQ ID NO: 5634571 - DNA, 25 bp, Homo sapien
aaatcttaaggttgatgcatgcctc

SEQ ID NO: 5634572 - DNA, 25 bp, Homo sapien
ttatagacctagagaagacatttaa

SEQ ID NO: 5634573 - DNA, 25 bp, Homo sapien
tagacctagagaagacatttaaccc

SEQ ID NO: 5634574 - DNA, 25 bp, Homo sapien
cattatttaggggttgaaatgccag

SEQ ID NO: 5634575 - DNA, 25 bp, Homo sapien
ctggctaaggccgcactccctttgc

SEQ ID NO: 5634576 - DNA, 25 bp, Homo sapien
ctaggtcctcctgtcaacatgtgtt

SEQ ID NO: 5634577 - DNA, 25 bp, Homo sapien
tggccataaccactagaccgcacgt

SEQ ID NO: 5634578 - DNA, 25 bp, Homo sapien
tggggaacacaactaaaaagaatgc

SEQ ID NO: 5634579 - DNA, 25 bp, Homo sapien
acttgttctggtaaaggtcatgggg

SEQ ID NO: 5634580 - DNA, 25 bp, Homo sapien
aaaagaatgcagtaaaactggcatc

SEQ ID NO: 5634581 - DNA, 25 bp, Homo sapien
taaaactggcatcataagctctctc

SEQ ID NO: 5634582 - DNA, 25 bp, Homo sapien
gggaaccttgcttttctgggcattg

SEQ ID NO: 5634583 - DNA, 25 bp, Homo sapien
cccagttcagcaaatccaaagatac

SEQ ID NO: 5634584 - DNA, 25 bp, Homo sapien
tgggcattgggtcaagaccacacag

SEQ ID NO: 5634585 - DNA, 25 bp, Homo sapien
aatttgaccacatttgagcccagtt

SEQ ID NO: 5634586 - DNA, 25 bp, Homo sapien
gggggaccctgcaaatgattcaggc

SEQ ID NO: 5634587 - DNA, 25 bp, Homo sapien
cgacatcacaggttcacaagccagg

SEQ ID NO: 5634588 - DNA, 25 bp, Homo sapien
tctgcctacgcaacagccataaaag

SEQ ID NO: 5634589 - DNA, 25 bp, Homo sapien
ccagggcagaaaacacttgcactgc

SEQ ID NO: 5634590 - DNA, 25 bp, Homo sapien
gaagcaggaattttgcctggtaaga

SEQ ID NO: 5634591 - DNA, 25 bp, Homo sapien
aagatttgacacccctggcatcaac

SEQ ID NO: 5634592 - DNA, 25 bp, Homo sapien
cataaaagtgtcaaggaacaatctt

SEQ ID NO: 5634593 - DNA, 25 bp, Homo sapien
acccctggcatcaactctgtgaagc

SEQ ID NO: 5634594 - DNA, 25 bp, Homo sapien
ctgcagtcccgacatcacaggttca

SEQ ID NO: 5634595 - DNA, 25 bp, Homo sapien
gtcacccagtctctgtcacagccac

SEQ ID NO: 5634596 - DNA, 25 bp, Homo sapien
agccactcaactctgcctacgcaac

SEQ ID NO: 5634597 - DNA, 25 bp, Homo sapien
catagtatctatgaaagtgacattc

SEQ ID NO: 5634598 - DNA, 25 bp, Homo sapien
aattacccacaaaactgaaatagat

SEQ ID NO: 5634599 - DNA, 25 bp, Homo sapien
attttaagacgttcagaatctgctt

SEQ ID NO: 5634600 - DNA, 25 bp, Homo sapien
ctgcttcagcatagaaataaggcca

SEQ ID NO: 5634601 - DNA, 25 bp, Homo sapien
tttagctaggtatgcaattcaaaat

SEQ ID NO: 5634602 - DNA, 25 bp, Homo sapien
cattttattggacaagttgggtaat

SEQ ID NO: 5634603 - DNA, 25 bp, Homo sapien
ctgaatgtgcttttatacttgccaa

SEQ ID NO: 5634604 - DNA, 25 bp, Homo sapien
tggacaagttgggtaatattaattc

SEQ ID NO: 5634605 - DNA, 25 bp, Homo sapien
tatgaaagtgacattctgaatgtgc

SEQ ID NO: 5634606 - DNA, 25 bp, Homo sapien
tcagcatctgataatgaacagattt

SEQ ID NO: 5634607 - DNA, 25 bp, Homo sapien
ggccaaacagctcttgtgaaacatc

SEQ ID NO: 5634608 - DNA, 25 bp, Homo sapien
gaatcatgaacagggtcactgccac

SEQ ID NO: 5634609 - DNA, 25 bp, Homo sapien
ctatagattagggagttgagcatca

SEQ ID NO: 5634610 - DNA, 25 bp, Homo sapien
gcagagagaaacaagctcccatcta

SEQ ID NO: 5634611 - DNA, 25 bp, Homo sapien
catctggtgacatctctggagaact

SEQ ID NO: 5634612 - DNA, 25 bp, Homo sapien
gtgggatcagacataaatagcaagt

SEQ ID NO: 5634613 - DNA, 25 bp, Homo sapien
tcactgccactagaacaatgcttgc

SEQ ID NO: 5634614 - DNA, 25 bp, Homo sapien
agcatagtaaatgtcaggctgaatc

SEQ ID NO: 5634615 - DNA, 25 bp, Homo sapien
aaataagaataaactgaggcattac

SEQ ID NO: 5634616 - DNA, 25 bp, Homo sapien
aagtcaagtgatttggagaatactc

SEQ ID NO: 5634617 - DNA, 25 bp, Homo sapien
ataaagtgagtgctgatttgtggga

SEQ ID NO: 5634618 - DNA, 25 bp, Homo sapien
ctcacatgaaagtcctgggtgacac

SEQ ID NO: 5634619 - DNA, 25 bp, Homo sapien
tctgatgcagcaatagaaattttct

SEQ ID NO: 5634620 - DNA, 25 bp, Homo sapien
aaggactgaggtatgttttttgtgt

SEQ ID NO: 5634621 - DNA, 25 bp, Homo sapien
ttaggacacactaaggactgaggta

SEQ ID NO: 5634622 - DNA, 25 bp, Homo sapien
ttctattaaaggacgattctctcat

SEQ ID NO: 5634623 - DNA, 25 bp, Homo sapien
tcctggaaaactgcggttgctctga

SEQ ID NO: 5634624 - DNA, 25 bp, Homo sapien
ataagccatccaattccagtgcaac

SEQ ID NO: 5634625 - DNA, 25 bp, Homo sapien
ctaataagtgaatatgtgttaattt

SEQ ID NO: 5634626 - DNA, 25 bp, Homo sapien
aaatgatgtgatgctatctgggatt

SEQ ID NO: 5634627 - DNA, 25 bp, Homo sapien
gggaattttccaaccgcatggccat

SEQ ID NO: 5634628 - DNA, 25 bp, Homo sapien
tttgaaatcctatggtgggggtgaa

SEQ ID NO: 5634629 - DNA, 25 bp, Homo sapien
caaccgcatggccattggaatttcc

SEQ ID NO: 5634630 - DNA, 25 bp, Homo sapien
tgttgataagggaagtcactgaaaa

SEQ ID NO: 5634631 - DNA, 25 bp, Homo sapien
aagacaagcattccctggcgaggga

SEQ ID NO: 5634632 - DNA, 25 bp, Homo sapien
ctagtagcttctagctgggggctat

SEQ ID NO: 5634633 - DNA, 25 bp, Homo sapien
acgctgttcgcttctgtgctggtat

SEQ ID NO: 5634634 - DNA, 25 bp, Homo sapien
gcagggctcacgtacaaccgttcta

SEQ ID NO: 5634635 - DNA, 25 bp, Homo sapien
gctgggggctattctgacttgttga

SEQ ID NO: 5634636 - DNA, 25 bp, Homo sapien
gaagacacatggactcccacgctgt

SEQ ID NO: 5634637 - DNA, 25 bp, Homo sapien
gctgatggcttaatcacaggcaggg

SEQ ID NO: 5634638 - DNA, 25 bp, Homo sapien
gacttgttgatgcccacgacatatc

SEQ ID NO: 5634639 - DNA, 25 bp, Homo sapien
cttgaagatctgccctggatccctc

SEQ ID NO: 5634640 - DNA, 25 bp, Homo sapien
tgaaaatgtgatatttggagaagac

SEQ ID NO: 5634641 - DNA, 25 bp, Homo sapien
gttttcctgaggcgcggccttccaa

SEQ ID NO: 5634642 - DNA, 25 bp, Homo sapien
ctaccatcctgttttcctgaggcgc

SEQ ID NO: 5634643 - DNA, 25 bp, Homo sapien
ccaattgccccggctccgctaggag

SEQ ID NO: 5634644 - DNA, 25 bp, Homo sapien
ttccaattgccccggctccgctagg

SEQ ID NO: 5634645 - DNA, 25 bp, Homo sapien
ggctcggtgccattcactaccatcc

SEQ ID NO: 5634646 - DNA, 25 bp, Homo sapien
ccttccaattgccccggctccgcta

SEQ ID NO: 5634647 - DNA, 25 bp, Homo sapien
ggcggctcggtgccattcactacca

SEQ ID NO: 5634648 - DNA, 25 bp, Homo sapien
cccgaccgcacttcagtccggggcg

SEQ ID NO: 5634649 - DNA, 25 bp, Homo sapien
atcctgttttcctgaggcgcggcct

SEQ ID NO: 5634650 - DNA, 25 bp, Homo sapien
ccatcctgttttcctgaggcgcggc

SEQ ID NO: 5634651 - DNA, 25 bp, Homo sapien
gcggccccgaccgcacttcagtccg

SEQ ID NO: 5634652 - DNA, 25 bp, Homo sapien
tggttacctgggtcctaggtctgcc

SEQ ID NO: 5634653 - DNA, 25 bp, Homo sapien
ttgaggtcttttcagggccaacagt

SEQ ID NO: 5634654 - DNA, 25 bp, Homo sapien
agggggaactgtgacctttcaatgt

SEQ ID NO: 5634655 - DNA, 25 bp, Homo sapien
gaacagattgggctacggtccataa

SEQ ID NO: 5634656 - DNA, 25 bp, Homo sapien
gctctcctgtggactcagttgcctc

SEQ ID NO: 5634657 - DNA, 25 bp, Homo sapien
tgtaaaatgaacagattgggctacg

SEQ ID NO: 5634658 - DNA, 25 bp, Homo sapien
gtccatgagaaaagctacttgagag

SEQ ID NO: 5634659 - DNA, 25 bp, Homo sapien
ccgatggggacttaagtccatgaga

SEQ ID NO: 5634660 - DNA, 25 bp, Homo sapien
gggccaacagttggttctgaagttc

SEQ ID NO: 5634661 - DNA, 25 bp, Homo sapien
tccctccgtgtcaccgatggggact

SEQ ID NO: 5634662 - DNA, 25 bp, Homo sapien
tcttagcctgagactgcttcatggg

SEQ ID NO: 5634663 - DNA, 25 bp, Homo sapien
ctctcgcaccacgctggactcgttt

SEQ ID NO: 5634664 - DNA, 25 bp, Homo sapien
gaacgatcagtatttggaagccaac

SEQ ID NO: 5634665 - DNA, 25 bp, Homo sapien
agagcttgactaatgactattggac

SEQ ID NO: 5634666 - DNA, 25 bp, Homo sapien
gtcaacattatgctggtaagagaat

SEQ ID NO: 5634667 - DNA, 25 bp, Homo sapien
cttgtaaaaaggacgattaaatcac

SEQ ID NO: 5634668 - DNA, 25 bp, Homo sapien
taagagaatgtttaggaacgatcag

SEQ ID NO: 5634669 - DNA, 25 bp, Homo sapien
cttactgaacaaagtaacggagagc

SEQ ID NO: 5634670 - DNA, 25 bp, Homo sapien
aaggaagttgtgcaaaggtcaacat

SEQ ID NO: 5634671 - DNA, 25 bp, Homo sapien
cagaaatgtgagcaccaaagaaaga

SEQ ID NO: 5634672 - DNA, 25 bp, Homo sapien
taaataccagaccacagagcttgac

SEQ ID NO: 5634673 - DNA, 25 bp, Homo sapien
aaaatgccaggtagccaatggcttc

SEQ ID NO: 5634674 - DNA, 25 bp, Homo sapien
agcaacaaaagcggacgtgaataaa

SEQ ID NO: 5634675 - DNA, 25 bp, Homo sapien
tgcctccatgcctttctagctacaa

SEQ ID NO: 5634676 - DNA, 25 bp, Homo sapien
tcttctaaggctggtttattcataa

SEQ ID NO: 5634677 - DNA, 25 bp, Homo sapien
tgaatgtgctgaatttaagaccaag

SEQ ID NO: 5634678 - DNA, 25 bp, Homo sapien
agtcaagttaaactaggaagaggtc

SEQ ID NO: 5634679 - DNA, 25 bp, Homo sapien
ctgaatttaagaccaagtttgcctc

SEQ ID NO: 5634680 - DNA, 25 bp, Homo sapien
aggaacagcttaacagaggaatagt

SEQ ID NO: 5634681 - DNA, 25 bp, Homo sapien
tctagttttgctggcgttgggacaa

SEQ ID NO: 5634682 - DNA, 25 bp, Homo sapien
aacagaggaatagtcaagttaaact

SEQ ID NO: 5634683 - DNA, 25 bp, Homo sapien
caaaagcggacgtgaataaaaatga

SEQ ID NO: 5634684 - DNA, 25 bp, Homo sapien
gttaaactaggaagaggtccagtga

SEQ ID NO: 5634685 - DNA, 25 bp, Homo sapien
gttgccaagggtagactacaatgtc

SEQ ID NO: 5634686 - DNA, 25 bp, Homo sapien
actcctggatttcaaagtggtcctc

SEQ ID NO: 5634687 - DNA, 25 bp, Homo sapien
attagaaaaattatgcatgaaaaaa

SEQ ID NO: 5634688 - DNA, 25 bp, Homo sapien
aatcctgtgattctggggttttttg

SEQ ID NO: 5634689 - DNA, 25 bp, Homo sapien
tagccatatgcaataacatgacaat

SEQ ID NO: 5634690 - DNA, 25 bp, Homo sapien
gcagcttggcaaaagtcaccatcaa

SEQ ID NO: 5634691 - DNA, 25 bp, Homo sapien
gtactcgttgatctaaatgttgcat

SEQ ID NO: 5634692 - DNA, 25 bp, Homo sapien
aaaggaatgagctatagccatatgc

SEQ ID NO: 5634693 - DNA, 25 bp, Homo sapien
ccacacaatccaagtagcagcagct

SEQ ID NO: 5634694 - DNA, 25 bp, Homo sapien
gcttctcgtgcacaggtactcgttg

SEQ ID NO: 5634695 - DNA, 25 bp, Homo sapien
gaaaccatccctgtgcttctcgtgc

SEQ ID NO: 5634696 - DNA, 25 bp, Homo sapien
gcctgctaagaaagaaaggtttctg

SEQ ID NO: 5634697 - DNA, 25 bp, Homo sapien
taagaaatagaggttaacgctgtaa

SEQ ID NO: 5634698 - DNA, 25 bp, Homo sapien
agaaaggtttctgtctggtctctcc

SEQ ID NO: 5634699 - DNA, 25 bp, Homo sapien
gggacacaggcttgtttttctcaca

SEQ ID NO: 5634700 - DNA, 25 bp, Homo sapien
tgtgcataataaaccgggacctttc

SEQ ID NO: 5634701 - DNA, 25 bp, Homo sapien
cccagcttgcaactaataataccgc

SEQ ID NO: 5634702 - DNA, 25 bp, Homo sapien
tacatcttgtttagggtgacatttc

SEQ ID NO: 5634703 - DNA, 25 bp, Homo sapien
attgggcgtaatcagaaattcagat

SEQ ID NO: 5634704 - DNA, 25 bp, Homo sapien
aacgctgtaaaaggtcaactaattc

SEQ ID NO: 5634705 - DNA, 25 bp, Homo sapien
ttcaatgtttgttagcccagcttgc

SEQ ID NO: 5634706 - DNA, 25 bp, Homo sapien
atcgatgtgcataataaaccgggac

SEQ ID NO: 5634707 - DNA, 25 bp, Homo sapien
tgcaccaattccacatccagtttcc

SEQ ID NO: 5634708 - DNA, 25 bp, Homo sapien
tctttgcgatagggaaaatagtatg

SEQ ID NO: 5634709 - DNA, 25 bp, Homo sapien
gaacatgttaagagtaaaaggagtc

SEQ ID NO: 5634710 - DNA, 25 bp, Homo sapien
gcgatagggaaaatagtatgtcatt

SEQ ID NO: 5634711 - DNA, 25 bp, Homo sapien
tatgactcaagttacccaatggttt

SEQ ID NO: 5634712 - DNA, 25 bp, Homo sapien
gcagtcagagaattgcaccaattcc

SEQ ID NO: 5634713 - DNA, 25 bp, Homo sapien
aggatgtcacaccacaccagacctc

SEQ ID NO: 5634714 - DNA, 25 bp, Homo sapien
gtcattctggtgtttagccggagtc

SEQ ID NO: 5634715 - DNA, 25 bp, Homo sapien
cttatacaggatgtcacaccacacc

SEQ ID NO: 5634716 - DNA, 25 bp, Homo sapien
gatgtgagtacaaacatatggtttc

SEQ ID NO: 5634717 - DNA, 25 bp, Homo sapien
ggttttgtggccagatgtgagtaca

SEQ ID NO: 5634718 - DNA, 25 bp, Homo sapien
tttcccaccaccacccgagaacatc

SEQ ID NO: 5634719 - DNA, 25 bp, Homo sapien
gcctgtctggccaaaactccctttc

SEQ ID NO: 5634720 - DNA, 25 bp, Homo sapien
caaagcgtactggttcggtctaggt

SEQ ID NO: 5634721 - DNA, 25 bp, Homo sapien
actccgaatggttttcaaagcgtac

SEQ ID NO: 5634722 - DNA, 25 bp, Homo sapien
gccgagcgtgtatgcatgtacatat

SEQ ID NO: 5634723 - DNA, 25 bp, Homo sapien
gggcagagaccataaataagagcta

SEQ ID NO: 5634724 - DNA, 25 bp, Homo sapien
gctctctgacttagggaatgccaat

SEQ ID NO: 5634725 - DNA, 25 bp, Homo sapien
aagagctaatgaatacacatggtgt

SEQ ID NO: 5634726 - DNA, 25 bp, Homo sapien
ctaccatcctcgggatgagggaaac

SEQ ID NO: 5634727 - DNA, 25 bp, Homo sapien
tttccctaccaaccacagcctgtct

SEQ ID NO: 5634728 - DNA, 25 bp, Homo sapien
atgccaataaatacccgaaacaatc

SEQ ID NO: 5634729 - DNA, 25 bp, Homo sapien
ccccttcatgataaataaaagtaag

SEQ ID NO: 5634730 - DNA, 25 bp, Homo sapien
ggcagcaggaagaatcccctgaaat

SEQ ID NO: 5634731 - DNA, 25 bp, Homo sapien
ctcaccccaactctgaaactccatc

SEQ ID NO: 5634732 - DNA, 25 bp, Homo sapien
ctctgaaactccatcacaagtcctc

SEQ ID NO: 5634733 - DNA, 25 bp, Homo sapien
ccaaaaatgaggctcagtttgaagg

SEQ ID NO: 5634734 - DNA, 25 bp, Homo sapien
tttatgatgctgtctatagtccctc

SEQ ID NO: 5634735 - DNA, 25 bp, Homo sapien
cctaccacctccaaaaatgaggctc

SEQ ID NO: 5634736 - DNA, 25 bp, Homo sapien
actcctcagctcttacaacccctcc

SEQ ID NO: 5634737 - DNA, 25 bp, Homo sapien
atcacaagtcctcacactcctcagc

SEQ ID NO: 5634738 - DNA, 25 bp, Homo sapien
cttcatgggctacccttctcacccc

SEQ ID NO: 5634739 - DNA, 25 bp, Homo sapien
ctgtctatagtccctcttctggccc

SEQ ID NO: 5634740 - DNA, 25 bp, Homo sapien
tgtagacgtaaagaaccatttgctc

SEQ ID NO: 5634741 - DNA, 25 bp, Homo sapien
taagcaaagctaaccagattcctgg

SEQ ID NO: 5634742 - DNA, 25 bp, Homo sapien
ttcattggaattagcactgtacatc

SEQ ID NO: 5634743 - DNA, 25 bp, Homo sapien
cagattcctggagtattacgcatca

SEQ ID NO: 5634744 - DNA, 25 bp, Homo sapien
tagttgatatggaaattattacatc

SEQ ID NO: 5634745 - DNA, 25 bp, Homo sapien
aggattagactcaagtcctatccct

SEQ ID NO: 5634746 - DNA, 25 bp, Homo sapien
atgctactagtgactgtactcatgc

SEQ ID NO: 5634747 - DNA, 25 bp, Homo sapien
aatgtgttaagcaaagctaaccaga

SEQ ID NO: 5634748 - DNA, 25 bp, Homo sapien
ctctaatgtcatccagtgtaactgc

SEQ ID NO: 5634749 - DNA, 25 bp, Homo sapien
aagaaaatgtagacgtaaagaacca

SEQ ID NO: 5634750 - DNA, 25 bp, Homo sapien
actgctaagagttaggattagactc

SEQ ID NO: 5634751 - DNA, 25 bp, Homo sapien
taaaggaaatcattcagactgacca

SEQ ID NO: 5634752 - DNA, 25 bp, Homo sapien
aacaacttaggctgaaagaatcatt

SEQ ID NO: 5634753 - DNA, 25 bp, Homo sapien
tgagggtacctggctaatgtgaaca

SEQ ID NO: 5634754 - DNA, 25 bp, Homo sapien
cactgataacaatatggagcttaac

SEQ ID NO: 5634755 - DNA, 25 bp, Homo sapien
gaacagactgcccagcgtcaccttg

SEQ ID NO: 5634756 - DNA, 25 bp, Homo sapien
ttcatttcgccgtaaagccttcatc

SEQ ID NO: 5634757 - DNA, 25 bp, Homo sapien
agtccccctaagacagcagtgtgtc

SEQ ID NO: 5634758 - DNA, 25 bp, Homo sapien
ataggtatgggaacttcttggttgg

SEQ ID NO: 5634759 - DNA, 25 bp, Homo sapien
tcttggttggtatctcttgagggta

SEQ ID NO: 5634760 - DNA, 25 bp, Homo sapien
caaaacatgctataagaaaccactc

SEQ ID NO: 5634761 - DNA, 25 bp, Homo sapien
agactgaccagtgcacgtatatcac

SEQ ID NO: 5634762 - DNA, 25 bp, Homo sapien
aaacatgggaactcacacatacatt

SEQ ID NO: 5634763 - DNA, 25 bp, Homo sapien
tgacattgggggattattataatta

SEQ ID NO: 5634764 - DNA, 25 bp, Homo sapien
caaagtagaggcaatgtaggctact

SEQ ID NO: 5634765 - DNA, 25 bp, Homo sapien
tcaaataaagaagttacctggctta

SEQ ID NO: 5634766 - DNA, 25 bp, Homo sapien
gttatggaatgccaaacataggcaa

SEQ ID NO: 5634767 - DNA, 25 bp, Homo sapien
gcaatgtaggctactttgggaggct

SEQ ID NO: 5634768 - DNA, 25 bp, Homo sapien
aacataggcaatgtatgtaagtttt

SEQ ID NO: 5634769 - DNA, 25 bp, Homo sapien
agttacctggcttaaaaatagctac

SEQ ID NO: 5634770 - DNA, 25 bp, Homo sapien
acaaacaggcaaaacatcttgaaag

SEQ ID NO: 5634771 - DNA, 25 bp, Homo sapien
aaattgccaataaacatgggaactc

SEQ ID NO: 5634772 - DNA, 25 bp, Homo sapien
attcatttctaggcaggatgagggt

SEQ ID NO: 5634773 - DNA, 25 bp, Homo sapien
gaaagaaacttacgcgaaaggatca

SEQ ID NO: 5634774 - DNA, 25 bp, Homo sapien
cgacacctaccggccttccagaatc

SEQ ID NO: 5634775 - DNA, 25 bp, Homo sapien
ctttccgttgaggtcacaccctggc

SEQ ID NO: 5634776 - DNA, 25 bp, Homo sapien
ttttggtcatcctgtgccctgcctc

SEQ ID NO: 5634777 - DNA, 25 bp, Homo sapien
gaaggtcaaatgtcgcccgacacct

SEQ ID NO: 5634778 - DNA, 25 bp, Homo sapien
acgccgcactgagcgcccttagtct

SEQ ID NO: 5634779 - DNA, 25 bp, Homo sapien
tcttgcaggccagagttgtgtaaaa

SEQ ID NO: 5634780 - DNA, 25 bp, Homo sapien
cttacagtcaagattggtggctttc

SEQ ID NO: 5634781 - DNA, 25 bp, Homo sapien
tatgaagcacgtaggctcttgcagg

SEQ ID NO: 5634782 - DNA, 25 bp, Homo sapien
cgttaggtcataagtaaactcagcc

SEQ ID NO: 5634783 - DNA, 25 bp, Homo sapien
gccctgcctcagttggtgactaacc

SEQ ID NO: 5634784 - DNA, 25 bp, Homo sapien
tctctcctgtaacggaacccttgga

SEQ ID NO: 5634785 - DNA, 25 bp, Homo sapien
tctgcaggatgccagtctatgagga

SEQ ID NO: 5634786 - DNA, 25 bp, Homo sapien
tgccagtctatgaggaccaaaagct

SEQ ID NO: 5634787 - DNA, 25 bp, Homo sapien
gacctgttgcagcatctcagcccct

SEQ ID NO: 5634788 - DNA, 25 bp, Homo sapien
cagttctccaagccaagaagctctt

SEQ ID NO: 5634789 - DNA, 25 bp, Homo sapien
cggaacccttggagagcctctattt

SEQ ID NO: 5634790 - DNA, 25 bp, Homo sapien
ttatttagaaaatgagacctcttac

SEQ ID NO: 5634791 - DNA, 25 bp, Homo sapien
acaatagcagcccgtgacctgttgc

SEQ ID NO: 5634792 - DNA, 25 bp, Homo sapien
aaagtgtttacaatagcagcccgtg

SEQ ID NO: 5634793 - DNA, 25 bp, Homo sapien
ggaccaaaagctcattccctgggaa

SEQ ID NO: 5634794 - DNA, 25 bp, Homo sapien
aaaaagtcatgtggtattaaatgtc

SEQ ID NO: 5634795 - DNA, 25 bp, Homo sapien
tgagaagaggatttcacaaactttc

SEQ ID NO: 5634796 - DNA, 25 bp, Homo sapien
tgatgtagtgatgctgttaaccctc

SEQ ID NO: 5634797 - DNA, 25 bp, Homo sapien
ccggcccacacaactcaatgcacac

SEQ ID NO: 5634798 - DNA, 25 bp, Homo sapien
tagtgaacatggcatctaaaacctc

SEQ ID NO: 5634799 - DNA, 25 bp, Homo sapien
tgccaatagcaaatgatgtagtgat

SEQ ID NO: 5634800 - DNA, 25 bp, Homo sapien
ggcagaccaggatatctcaggaatt

SEQ ID NO: 5634801 - DNA, 25 bp, Homo sapien
attgaaaaacaacaccagcaacaac

SEQ ID NO: 5634802 - DNA, 25 bp, Homo sapien
tcagaccactgggaaaacttttctc

SEQ ID NO: 5634803 - DNA, 25 bp, Homo sapien
catggagaaagcatactcaacagcc

SEQ ID NO: 5634804 - DNA, 25 bp, Homo sapien
ggcaatagaggcacaccatcttcga

SEQ ID NO: 5634805 - DNA, 25 bp, Homo sapien
cctctgtttgctgcaggcagaccag

SEQ ID NO: 5634806 - DNA, 25 bp, Homo sapien
tacactgattaaattgggaagaaat

SEQ ID NO: 5634807 - DNA, 25 bp, Homo sapien
aaaagtccagaggttatcaagtccc

SEQ ID NO: 5634808 - DNA, 25 bp, Homo sapien
gtgagtactcgaggcattcagtgtg

SEQ ID NO: 5634809 - DNA, 25 bp, Homo sapien
caggaacccatcaggctgggcttta

SEQ ID NO: 5634810 - DNA, 25 bp, Homo sapien
caaggaaactgcaccgtcaaaagtc

SEQ ID NO: 5634811 - DNA, 25 bp, Homo sapien
tactcgaggcattcagtgtgtgagg

SEQ ID NO: 5634812 - DNA, 25 bp, Homo sapien
attgggaagaaattcttgcggacat

SEQ ID NO: 5634813 - DNA, 25 bp, Homo sapien
aaatgtgagtactcgaggcattcag

SEQ ID NO: 5634814 - DNA, 25 bp, Homo sapien
tcttagtgctctaccttcatcgagg

SEQ ID NO: 5634815 - DNA, 25 bp, Homo sapien
gcattcagtgtgtgaggcacaggaa

SEQ ID NO: 5634816 - DNA, 25 bp, Homo sapien
tgcaccgtcaaaagtccagaggtta

SEQ ID NO: 5634817 - DNA, 25 bp, Homo sapien
acacagattgctcacagggaacttc

SEQ ID NO: 5634818 - DNA, 25 bp, Homo sapien
agggacagccacagaattgcattgg

SEQ ID NO: 5634819 - DNA, 25 bp, Homo sapien
ttggactactttggcaagatgggca

SEQ ID NO: 5634820 - DNA, 25 bp, Homo sapien
cctcattgaagtgtgtttggactac

SEQ ID NO: 5634821 - DNA, 25 bp, Homo sapien
aattcagtgggtcaggatatgaaga

SEQ ID NO: 5634822 - DNA, 25 bp, Homo sapien
aattgcattggagggtatgcctttc

SEQ ID NO: 5634823 - DNA, 25 bp, Homo sapien
gaagactttggttcaagctcgctga

SEQ ID NO: 5634824 - DNA, 25 bp, Homo sapien
agaaagggaccatgaaccctaactc

SEQ ID NO: 5634825 - DNA, 25 bp, Homo sapien
agctcgctgaagacacacagattgc

SEQ ID NO: 5634826 - DNA, 25 bp, Homo sapien
ctctataaatagcacaggagggaat

SEQ ID NO: 5634827 - DNA, 25 bp, Homo sapien
caagatgggcaagtagcaattgctt

SEQ ID NO: 5634828 - DNA, 25 bp, Homo sapien
atgcgtgaggctggtcaccttttca

SEQ ID NO: 5634829 - DNA, 25 bp, Homo sapien
ttctcttacgatgcgtgaggctggt

SEQ ID NO: 5634830 - DNA, 25 bp, Homo sapien
agggctgtttctcctcaggctcacc

SEQ ID NO: 5634831 - DNA, 25 bp, Homo sapien
caaaggaatttgggtgtagttagag

SEQ ID NO: 5634832 - DNA, 25 bp, Homo sapien
tgcagaatttctgcagaggtggtgc

SEQ ID NO: 5634833 - DNA, 25 bp, Homo sapien
tttgcttaagagccacatgtgtttc

SEQ ID NO: 5634834 - DNA, 25 bp, Homo sapien
atgcacttcttggcagagggacctt

SEQ ID NO: 5634835 - DNA, 25 bp, Homo sapien
gagtacaatgtacaatggtgtcatc

SEQ ID NO: 5634836 - DNA, 25 bp, Homo sapien
cccacacagtcaacagggctgtttc

SEQ ID NO: 5634837 - DNA, 25 bp, Homo sapien
gggaccttcaggttgcttccagccc

SEQ ID NO: 5634838 - DNA, 25 bp, Homo sapien
tccttcttggagactgtgccaggta

SEQ ID NO: 5634839 - DNA, 25 bp, Homo sapien
tatacttgcagagtgctgtatgggc

SEQ ID NO: 5634840 - DNA, 25 bp, Homo sapien
ttgctctcaactgaggctgggagac

SEQ ID NO: 5634841 - DNA, 25 bp, Homo sapien
ccacctccaccgggtgagtgaagag

SEQ ID NO: 5634842 - DNA, 25 bp, Homo sapien
agaggtggagcactatacttgcaga

SEQ ID NO: 5634843 - DNA, 25 bp, Homo sapien
tcttttaagagtgcagacagtctcc

SEQ ID NO: 5634844 - DNA, 25 bp, Homo sapien
aacttagagactattaggaggtgtg

SEQ ID NO: 5634845 - DNA, 25 bp, Homo sapien
gatgttagaaaggtggacccacctc

SEQ ID NO: 5634846 - DNA, 25 bp, Homo sapien
ttaggaggtgtgtctagatgttaga

SEQ ID NO: 5634847 - DNA, 25 bp, Homo sapien
ggtgtgacatgagcttaggcagtaa

SEQ ID NO: 5634848 - DNA, 25 bp, Homo sapien
ctcatgcacaccttccacagggcca

SEQ ID NO: 5634849 - DNA, 25 bp, Homo sapien
tggagtcccgcagctcccatcactc

SEQ ID NO: 5634850 - DNA, 25 bp, Homo sapien
tcagtgatttgtactgaggagcagc

SEQ ID NO: 5634851 - DNA, 25 bp, Homo sapien
agcctgggcctttgggataccaggg

SEQ ID NO: 5634852 - DNA, 25 bp, Homo sapien
tgtcagctgtggcttgagaagatga

SEQ ID NO: 5634853 - DNA, 25 bp, Homo sapien
gttcctctgcggcaatggccactgc

SEQ ID NO: 5634854 - DNA, 25 bp, Homo sapien
gagcagctaaatggatgtttgggtt

SEQ ID NO: 5634855 - DNA, 25 bp, Homo sapien
gggagctgcctcgtgcatcttcgcg

SEQ ID NO: 5634856 - DNA, 25 bp, Homo sapien
gttcagcatccctggctaaggagct

SEQ ID NO: 5634857 - DNA, 25 bp, Homo sapien
catcttcgcgtccccagaaactggc

SEQ ID NO: 5634858 - DNA, 25 bp, Homo sapien
tggcagtttgcaagatgcatgaggc

SEQ ID NO: 5634859 - DNA, 25 bp, Homo sapien
gccactgctcctcgaggacagggag

SEQ ID NO: 5634860 - DNA, 25 bp, Homo sapien
ccaccagggataatgtcagtgggaa

SEQ ID NO: 5634861 - DNA, 25 bp, Homo sapien
tgtgggtatttaaagaataaggcca

SEQ ID NO: 5634862 - DNA, 25 bp, Homo sapien
aagaataaggccaggcaactctgtc

SEQ ID NO: 5634863 - DNA, 25 bp, Homo sapien
tgaagtcttctaatcactagggctc

SEQ ID NO: 5634864 - DNA, 25 bp, Homo sapien
caatgttgtggacaatggggatata

SEQ ID NO: 5634865 - DNA, 25 bp, Homo sapien
ctaagcaccagtcaatgttgtggac

SEQ ID NO: 5634866 - DNA, 25 bp, Homo sapien
gttgcagtcctatagtgtgggtatt

SEQ ID NO: 5634867 - DNA, 25 bp, Homo sapien
gtccttgagcaccttactaagcacc

SEQ ID NO: 5634868 - DNA, 25 bp, Homo sapien
agggctctgtattttgttgcagtcc

SEQ ID NO: 5634869 - DNA, 25 bp, Homo sapien
aggccaggcaactctgtctctagtc

SEQ ID NO: 5634870 - DNA, 25 bp, Homo sapien
cagaaaggatactgccaaaaaggca

SEQ ID NO: 5634871 - DNA, 25 bp, Homo sapien
aaatttaccaaatacaggatccttc

SEQ ID NO: 5634872 - DNA, 25 bp, Homo sapien
ttcccccacttcactacccatcctc

SEQ ID NO: 5634873 - DNA, 25 bp, Homo sapien
tcccttcaaatcaccaaacaccagc

SEQ ID NO: 5634874 - DNA, 25 bp, Homo sapien
gaacctacccatgcccactgcctgc

SEQ ID NO: 5634875 - DNA, 25 bp, Homo sapien
gtccaattagggttacattcaaatg

SEQ ID NO: 5634876 - DNA, 25 bp, Homo sapien
gagaaactcatcagggtccccagta

SEQ ID NO: 5634877 - DNA, 25 bp, Homo sapien
ctgaggttcagacccccttcccttc

SEQ ID NO: 5634878 - DNA, 25 bp, Homo sapien
tcagttgagcaggctaagcttgagg

SEQ ID NO: 5634879 - DNA, 25 bp, Homo sapien
agaggagagggatactgtttttaaa

SEQ ID NO: 5634880 - DNA, 25 bp, Homo sapien
ctaatcacaaaaccagaacctaccc

SEQ ID NO: 5634881 - DNA, 25 bp, Homo sapien
gggtccccagtaagtgacaagcttc

SEQ ID NO: 5634882 - DNA, 25 bp, Homo sapien
gtccatactgaaagggagaaaattc

SEQ ID NO: 5634883 - DNA, 25 bp, Homo sapien
tggtggtgaatgtgtgccacatgtt

SEQ ID NO: 5634884 - DNA, 25 bp, Homo sapien
caagatcatcaggcctcgttcagta

SEQ ID NO: 5634885 - DNA, 25 bp, Homo sapien
tttcagcctcttgtggtccagctac

SEQ ID NO: 5634886 - DNA, 25 bp, Homo sapien
ttaatttatggtggtgaatgtgtgc

SEQ ID NO: 5634887 - DNA, 25 bp, Homo sapien
tgttcaggactgggtctattgcatt

SEQ ID NO: 5634888 - DNA, 25 bp, Homo sapien
cagaggtgaatgtggtttctaccaa

SEQ ID NO: 5634889 - DNA, 25 bp, Homo sapien
tttaaatgtagatgtcctgccttgt

SEQ ID NO: 5634890 - DNA, 25 bp, Homo sapien
gttggtctcataagtcaagatcatc

SEQ ID NO: 5634891 - DNA, 25 bp, Homo sapien
agagaaatgcatagatcgcagagct

SEQ ID NO: 5634892 - DNA, 25 bp, Homo sapien
gtcctgccttgtatagagatagaac

SEQ ID NO: 5634893 - DNA, 25 bp, Homo sapien
gtatagagatagaactttagatatt

SEQ ID NO: 5634894 - DNA, 25 bp, Homo sapien
cttccaaggagcattttcagcagag

SEQ ID NO: 5634895 - DNA, 25 bp, Homo sapien
ttgagtcaagcagttgtgaacctaa

SEQ ID NO: 5634896 - DNA, 25 bp, Homo sapien
gaatgaggcttgtggataagatcta

SEQ ID NO: 5634897 - DNA, 25 bp, Homo sapien
gagaaggctggcttgagtctcttct

SEQ ID NO: 5634898 - DNA, 25 bp, Homo sapien
gaaccggggataatcactagtgaat

SEQ ID NO: 5634899 - DNA, 25 bp, Homo sapien
caatgagcctcaatcgatgccagtt

SEQ ID NO: 5634900 - DNA, 25 bp, Homo sapien
gatgccagtttgagctacgcgatgt

SEQ ID NO: 5634901 - DNA, 25 bp, Homo sapien
tcagggtaccgtgaggtcacatatt

SEQ ID NO: 5634902 - DNA, 25 bp, Homo sapien
gcacccaatcagcatgaatccaccc

SEQ ID NO: 5634903 - DNA, 25 bp, Homo sapien
tccaggaagctggtcacctgacatt

SEQ ID NO: 5634904 - DNA, 25 bp, Homo sapien
agctacgcgatgttttccaggcctg

SEQ ID NO: 5634905 - DNA, 25 bp, Homo sapien
gctctctacaaaattctaacagttc

SEQ ID NO: 5634906 - DNA, 25 bp, Homo sapien
cactttaagatacacaaaaacatcc

SEQ ID NO: 5634907 - DNA, 25 bp, Homo sapien
ttagtgatacaggaacaaagcaaaa

SEQ ID NO: 5634908 - DNA, 25 bp, Homo sapien
actatgcgttattcaaattgatgcc

SEQ ID NO: 5634909 - DNA, 25 bp, Homo sapien
ttttccatccatctaagagtctcaa

SEQ ID NO: 5634910 - DNA, 25 bp, Homo sapien
taacttaaaacacatgaacacactt

SEQ ID NO: 5634911 - DNA, 25 bp, Homo sapien
tgagaaacaatattgggacatgttc

SEQ ID NO: 5634912 - DNA, 25 bp, Homo sapien
ttctctagagataaaaccataactt

SEQ ID NO: 5634913 - DNA, 25 bp, Homo sapien
taacagttcattagtgatacaggaa

SEQ ID NO: 5634914 - DNA, 25 bp, Homo sapien
tacaagcttcttaaactatgcgtta

SEQ ID NO: 5634915 - DNA, 25 bp, Homo sapien
gatttagaagtcatcattgcttttt

SEQ ID NO: 5634916 - DNA, 25 bp, Homo sapien
cacaatatatgccagggcaagggag

SEQ ID NO: 5634917 - DNA, 25 bp, Homo sapien
gatactatgttaggatgtggcagcc

SEQ ID NO: 5634918 - DNA, 25 bp, Homo sapien
gacagctgaagcttggctggtcctt

SEQ ID NO: 5634919 - DNA, 25 bp, Homo sapien
agctcacagggatcatgctgaatca

SEQ ID NO: 5634920 - DNA, 25 bp, Homo sapien
acccagaccgagttgagttccttga

SEQ ID NO: 5634921 - DNA, 25 bp, Homo sapien
tactgcaacagagaacatggagtga

SEQ ID NO: 5634922 - DNA, 25 bp, Homo sapien
ccttcctgcctgaaaggtgtgtgtg

SEQ ID NO: 5634923 - DNA, 25 bp, Homo sapien
tccttgataagatggagaggtgttg

SEQ ID NO: 5634924 - DNA, 25 bp, Homo sapien
caggagattgtgagaaccagctcac

SEQ ID NO: 5634925 - DNA, 25 bp, Homo sapien
tacctgtcaaaggccaccactgggc

SEQ ID NO: 5634926 - DNA, 25 bp, Homo sapien
gttaggatgtggcagcctccactct

SEQ ID NO: 5634927 - DNA, 25 bp, Homo sapien
ggcaagacagtgacagtccgtctct

SEQ ID NO: 5634928 - DNA, 25 bp, Homo sapien
gcctaggattttgagagtccagggc

SEQ ID NO: 5634929 - DNA, 25 bp, Homo sapien
cccagttgggtgcaatgcttcatgc

SEQ ID NO: 5634930 - DNA, 25 bp, Homo sapien
aaggaaagtggtaaaataagcttga

SEQ ID NO: 5634931 - DNA, 25 bp, Homo sapien
catataaaaagaaagtgggtgaaag

SEQ ID NO: 5634932 - DNA, 25 bp, Homo sapien
gctgatgcggtggcacattcctata

SEQ ID NO: 5634933 - DNA, 25 bp, Homo sapien
aaggaaagaatttagattggtcatt

SEQ ID NO: 5634934 - DNA, 25 bp, Homo sapien
gcaccagtcgggattgcactacaat

SEQ ID NO: 5634935 - DNA, 25 bp, Homo sapien
gattggtcattagagaataacttcc

SEQ ID NO: 5634936 - DNA, 25 bp, Homo sapien
aaaataagcttgacggcaccagtcg

SEQ ID NO: 5634937 - DNA, 25 bp, Homo sapien
tacaaccttgtgaacggctgtcaac

SEQ ID NO: 5634938 - DNA, 25 bp, Homo sapien
tctgacccgctactgtctgaaactt

SEQ ID NO: 5634939 - DNA, 25 bp, Homo sapien
ggtctgggtgcgtttgccaccctct

SEQ ID NO: 5634940 - DNA, 25 bp, Homo sapien
ttgttctaaatgaggaaaagtggtg

SEQ ID NO: 5634941 - DNA, 25 bp, Homo sapien
cggttgctccttgtccttgggtatg

SEQ ID NO: 5634942 - DNA, 25 bp, Homo sapien
aagagcgaggtggctttcgctcgtt

SEQ ID NO: 5634943 - DNA, 25 bp, Homo sapien
gcattcgtctttagccaccggcctc

SEQ ID NO: 5634944 - DNA, 25 bp, Homo sapien
ctcctccctccggttgctccttgtc

SEQ ID NO: 5634945 - DNA, 25 bp, Homo sapien
ctttcgctcgtttctgacccgctac

SEQ ID NO: 5634946 - DNA, 25 bp, Homo sapien
atggaaggaaaaaactcacttgttc

SEQ ID NO: 5634947 - DNA, 25 bp, Homo sapien
gcgggtgtaactcatgcccctccca

SEQ ID NO: 5634948 - DNA, 25 bp, Homo sapien
agtggtgctggcattcgtctttagc

SEQ ID NO: 5634949 - DNA, 25 bp, Homo sapien
tccgtccttagctcgccaccctccc

SEQ ID NO: 5634950 - DNA, 25 bp, Homo sapien
ttcctccgtccttagctcgccaccc

SEQ ID NO: 5634951 - DNA, 25 bp, Homo sapien
gattgccagtgaccaccgagctgaa

SEQ ID NO: 5634952 - DNA, 25 bp, Homo sapien
ccaggcacaaggtccccaacactgg

SEQ ID NO: 5634953 - DNA, 25 bp, Homo sapien
ccttagctcgccaccctcccagcag

SEQ ID NO: 5634954 - DNA, 25 bp, Homo sapien
tgcaagtggtgctaacacgtgagca

SEQ ID NO: 5634955 - DNA, 25 bp, Homo sapien
ggtgccaccattccttcctccgtcc

SEQ ID NO: 5634956 - DNA, 25 bp, Homo sapien
ggaggccacctcatgaccccatccc

SEQ ID NO: 5634957 - DNA, 25 bp, Homo sapien
accctcccagcagggtgtctgggca

SEQ ID NO: 5634958 - DNA, 25 bp, Homo sapien
accccatcccgctgcccagattgcc

SEQ ID NO: 5634959 - DNA, 25 bp, Homo sapien
caaggtccccaacactggggtgtgg

SEQ ID NO: 5634960 - DNA, 25 bp, Homo sapien
aatgtttatagaaaaggcacgtaag

SEQ ID NO: 5634961 - DNA, 25 bp, Homo sapien
cttacgtgccttttctataaacatt

SEQ ID NO: 5634962 - DNA, 25 bp, Homo sapien
tctcccatactgcaatccaggcagg

SEQ ID NO: 5634963 - DNA, 25 bp, Homo sapien
ccaaagctccgtaattacagggttc

SEQ ID NO: 5634964 - DNA, 25 bp, Homo sapien
agctgctctgctggtctcaccgagt

SEQ ID NO: 5634965 - DNA, 25 bp, Homo sapien
tgagtctaacctcagctgctctgct

SEQ ID NO: 5634966 - DNA, 25 bp, Homo sapien
gctagaatttgaacagggtcctgcc

SEQ ID NO: 5634967 - DNA, 25 bp, Homo sapien
ttacagggttcaactctgcctccag

SEQ ID NO: 5634968 - DNA, 25 bp, Homo sapien
ttctgagatcagaaacggaagtttc

SEQ ID NO: 5634969 - DNA, 25 bp, Homo sapien
catgacaaaatttgtggaaatgttc

SEQ ID NO: 5634970 - DNA, 25 bp, Homo sapien
ttacttccaggttctgagatcagaa

SEQ ID NO: 5634971 - DNA, 25 bp, Homo sapien
tctgcctccagaataaccatgacaa

SEQ ID NO: 5634972 - DNA, 25 bp, Homo sapien
cagcccaatttggatccacatctgc

SEQ ID NO: 5634973 - DNA, 25 bp, Homo sapien
attaatacataaccacccttgccct

SEQ ID NO: 5634974 - DNA, 25 bp, Homo sapien
taatggtgttaactctggaaagtag

SEQ ID NO: 5634975 - DNA, 25 bp, Homo sapien
acccttgcccttatgaagtacagta

SEQ ID NO: 5634976 - DNA, 25 bp, Homo sapien
acatatacttgagtaagaatatttc

SEQ ID NO: 5634977 - DNA, 25 bp, Homo sapien
agtggatgcctgaaatcgcagatca

SEQ ID NO: 5634978 - DNA, 25 bp, Homo sapien
tgcccttatgaagtacagtagtacc

SEQ ID NO: 5634979 - DNA, 25 bp, Homo sapien
agctgaagggaagcctcagtatttt

SEQ ID NO: 5634980 - DNA, 25 bp, Homo sapien
atatataaatgcatggagaaggggc

SEQ ID NO: 5634981 - DNA, 25 bp, Homo sapien
tgaagggaagcctcagtattttctc

SEQ ID NO: 5634982 - DNA, 25 bp, Homo sapien
taactctggaaagtagagctgaagg

SEQ ID NO: 5634983 - DNA, 25 bp, Homo sapien
tgaaatcgcagatcataccgaatcc

SEQ ID NO: 5634984 - DNA, 25 bp, Homo sapien
ttagaggcatcatattaactgagtg

SEQ ID NO: 5634985 - DNA, 25 bp, Homo sapien
ctcatctgggctttagtaagcaccc

SEQ ID NO: 5634986 - DNA, 25 bp, Homo sapien
ttagatgagacaggccacttatctt

SEQ ID NO: 5634987 - DNA, 25 bp, Homo sapien
tttagatgatcagagcagtttagtt

SEQ ID NO: 5634988 - DNA, 25 bp, Homo sapien
tagtaagcacccaataaaatcatat

SEQ ID NO: 5634989 - DNA, 25 bp, Homo sapien
cagtttagtttgctggctgcatcct

SEQ ID NO: 5634990 - DNA, 25 bp, Homo sapien
tgtctctacagggcttggtacacgg

SEQ ID NO: 5634991 - DNA, 25 bp, Homo sapien
gcatcctttagaacaaggggcccta

SEQ ID NO: 5634992 - DNA, 25 bp, Homo sapien
gaacgtctgcactcctccaaatgcc

SEQ ID NO: 5634993 - DNA, 25 bp, Homo sapien
gtggttattctgtgggaaacatatc

SEQ ID NO: 5634994 - DNA, 25 bp, Homo sapien
tgactcagtgtacagttcacgtccc

SEQ ID NO: 5634995 - DNA, 25 bp, Homo sapien
gactcgaatctgaaacctctgggga

SEQ ID NO: 5634996 - DNA, 25 bp, Homo sapien
ttgagctccagacccttagcctctc

SEQ ID NO: 5634997 - DNA, 25 bp, Homo sapien
tcccaaggcaacgtcgaaatctcca

SEQ ID NO: 5634998 - DNA, 25 bp, Homo sapien
ggtaagagactcgaactgatgctct

SEQ ID NO: 5634999 - DNA, 25 bp, Homo sapien
tctccaaatacagtgggcctgacgg

SEQ ID NO: 5635000 - DNA, 25 bp, Homo sapien
gggcctctcccagaatggaaccctc

SEQ ID NO: 5635001 - DNA, 25 bp, Homo sapien
aactgatgctctctaaggattcttc

SEQ ID NO: 5635002 - DNA, 25 bp, Homo sapien
aatacagttcctgcccgcatggggg

SEQ ID NO: 5635003 - DNA, 25 bp, Homo sapien
ccagacccttagcctctccgggccc

SEQ ID NO: 5635004 - DNA, 25 bp, Homo sapien
agccgtcctgcacagtccaggcacc

SEQ ID NO: 5635005 - DNA, 25 bp, Homo sapien
cagcagcaaggttgactcgaatctg

SEQ ID NO: 5635006 - DNA, 25 bp, Homo sapien
tctgggatgaggttatttatgaaaa

SEQ ID NO: 5635007 - DNA, 25 bp, Homo sapien
caggagatgtgaactcaatgtgacg

SEQ ID NO: 5635008 - DNA, 25 bp, Homo sapien
gcagcagtggtcaatacaggaatgc

SEQ ID NO: 5635009 - DNA, 25 bp, Homo sapien
gaactcaatgtgacgagtgacggca

SEQ ID NO: 5635010 - DNA, 25 bp, Homo sapien
aacaaaacagccacaacaccttccc

SEQ ID NO: 5635011 - DNA, 25 bp, Homo sapien
agggcataaaatatgacatgatccc

SEQ ID NO: 5635012 - DNA, 25 bp, Homo sapien
tttctatgacactggatggctgcat

SEQ ID NO: 5635013 - DNA, 25 bp, Homo sapien
accaggcttgtaatagataaataac

SEQ ID NO: 5635014 - DNA, 25 bp, Homo sapien
taggagcagcgctgacctgaattta

SEQ ID NO: 5635015 - DNA, 25 bp, Homo sapien
tttatgaaaatgagccaatgcccaa

SEQ ID NO: 5635016 - DNA, 25 bp, Homo sapien
gtcaatacaggaatgcaaaccaggt

SEQ ID NO: 5635017 - DNA, 25 bp, Homo sapien
gggtggctcagcttctgatgcctcc

SEQ ID NO: 5635018 - DNA, 25 bp, Homo sapien
ccttcgttctggggtccaggctgag

SEQ ID NO: 5635019 - DNA, 25 bp, Homo sapien
gcagacatgctcagtagacagctcc

SEQ ID NO: 5635020 - DNA, 25 bp, Homo sapien
tgtggctctctggaacatgccgttc

SEQ ID NO: 5635021 - DNA, 25 bp, Homo sapien
ctcaggtttcttgtcggccacgggt

SEQ ID NO: 5635022 - DNA, 25 bp, Homo sapien
aattcagaaaagtgcagacatgctc

SEQ ID NO: 5635023 - DNA, 25 bp, Homo sapien
taaagtaaatagacaggcttgctta

SEQ ID NO: 5635024 - DNA, 25 bp, Homo sapien
acatattggtcggctcttgctaggc

SEQ ID NO: 5635025 - DNA, 25 bp, Homo sapien
caaaacaactcgcaagcctgggtcg

SEQ ID NO: 5635026 - DNA, 25 bp, Homo sapien
ctgggtcgatcacagcaaccaagtt

SEQ ID NO: 5635027 - DNA, 25 bp, Homo sapien
tcccagagatttcaccggcatccct

SEQ ID NO: 5635028 - DNA, 25 bp, Homo sapien
gaaaaatgaaggtgtgattggttac

SEQ ID NO: 5635029 - DNA, 25 bp, Homo sapien
ctatagcccgtgagccatgtgttgt

SEQ ID NO: 5635030 - DNA, 25 bp, Homo sapien
gtctcatgggcccgcctctgtcacc

SEQ ID NO: 5635031 - DNA, 25 bp, Homo sapien
tccttcccgtcaggacaagtcgctg

SEQ ID NO: 5635032 - DNA, 25 bp, Homo sapien
ctcctagctctgctagatggggccc

SEQ ID NO: 5635033 - DNA, 25 bp, Homo sapien
agggtccttcccgtcaggacaagtc

SEQ ID NO: 5635034 - DNA, 25 bp, Homo sapien
gccctatagcccgtgagccatgtgt

SEQ ID NO: 5635035 - DNA, 25 bp, Homo sapien
ccatgtgttgtctcatgggcccgcc

SEQ ID NO: 5635036 - DNA, 25 bp, Homo sapien
gtcctggctgaggcatgcatttgtg

SEQ ID NO: 5635037 - DNA, 25 bp, Homo sapien
aaagctttagaaaaatgaaggtgtg

SEQ ID NO: 5635038 - DNA, 25 bp, Homo sapien
ttagaaaaatgaaggtgtgattggt

SEQ ID NO: 5635039 - DNA, 25 bp, Homo sapien
cggtggtgccgggcgaggaaggagg

SEQ ID NO: 5635040 - DNA, 25 bp, Homo sapien
cctccttcctcgcccggcaccaccg

SEQ ID NO: 5635041 - DNA, 25 bp, Homo sapien
ggcggtggtgccgggcgaggaagga

SEQ ID NO: 5635042 - DNA, 25 bp, Homo sapien
tccttcctcgcccggcaccaccgcc

SEQ ID NO: 5635043 - DNA, 25 bp, Homo sapien
cctggggacttatgacaactgaaca

SEQ ID NO: 5635044 - DNA, 25 bp, Homo sapien
ctggcagagctttcggatctcagtt

SEQ ID NO: 5635045 - DNA, 25 bp, Homo sapien
aaggtgttagacaactgctcgcctc

SEQ ID NO: 5635046 - DNA, 25 bp, Homo sapien
taaactagggctggcctcttccgac

SEQ ID NO: 5635047 - DNA, 25 bp, Homo sapien
atgtcctagtccagatccgggcatg

SEQ ID NO: 5635048 - DNA, 25 bp, Homo sapien
tggtgttgagcaggcaacttgtgaa

SEQ ID NO: 5635049 - DNA, 25 bp, Homo sapien
caagtcgattgcattggtggctttc

SEQ ID NO: 5635050 - DNA, 25 bp, Homo sapien
catcactgccggcagcaaaagctga

SEQ ID NO: 5635051 - DNA, 25 bp, Homo sapien
aaagctgactggaagccatgtccta

SEQ ID NO: 5635052 - DNA, 25 bp, Homo sapien
gggcatgcacaccggctggtgttga

SEQ ID NO: 5635053 - DNA, 25 bp, Homo sapien
gcagagggaaccgctgcctttcttc

SEQ ID NO: 5635054 - DNA, 25 bp, Homo sapien
gactctccactgagctggttaacac

SEQ ID NO: 5635055 - DNA, 25 bp, Homo sapien
aaaaggctgtcaccccgactctcca

SEQ ID NO: 5635056 - DNA, 25 bp, Homo sapien
atccttcaagtccatgtgacctgat

SEQ ID NO: 5635057 - DNA, 25 bp, Homo sapien
tcaacactggaaaccgtgggcatta

SEQ ID NO: 5635058 - DNA, 25 bp, Homo sapien
ctcactaggaatgatatggacaggc

SEQ ID NO: 5635059 - DNA, 25 bp, Homo sapien
tgacaactgctaaaagagcattatt

SEQ ID NO: 5635060 - DNA, 25 bp, Homo sapien
tggtactatcgtagctcactaggaa

SEQ ID NO: 5635061 - DNA, 25 bp, Homo sapien
agggtgaaaaaggctgtcaccccga

SEQ ID NO: 5635062 - DNA, 25 bp, Homo sapien
ttagccatccgtggatgacaactgc

SEQ ID NO: 5635063 - DNA, 25 bp, Homo sapien
accgtgggcattaccttaggaatag

SEQ ID NO: 5635064 - DNA, 25 bp, Homo sapien
aggccccaccttcaacactggaaac

SEQ ID NO: 5635065 - DNA, 25 bp, Homo sapien
gctgagatatcaaccttaacctttc

SEQ ID NO: 5635066 - DNA, 25 bp, Homo sapien
gcagcctgccagtcccaggcctggg

SEQ ID NO: 5635067 - DNA, 25 bp, Homo sapien
agtcccaggcctgggtgaaaaagaa

SEQ ID NO: 5635068 - DNA, 25 bp, Homo sapien
tgatctgtgattattgcaagaattc

SEQ ID NO: 5635069 - DNA, 25 bp, Homo sapien
agccatgcagcctgccagtcccagg

SEQ ID NO: 5635070 - DNA, 25 bp, Homo sapien
cagcctcagccacaaagccatgcag

SEQ ID NO: 5635071 - DNA, 25 bp, Homo sapien
ccctatgacctaataaaaaatccaa

SEQ ID NO: 5635072 - DNA, 25 bp, Homo sapien
gcaagaattcaaaatactacatcac

SEQ ID NO: 5635073 - DNA, 25 bp, Homo sapien
catcactttgcatggacagaacctc

SEQ ID NO: 5635074 - DNA, 25 bp, Homo sapien
gaggggactttgataggctctgctt

SEQ ID NO: 5635075 - DNA, 25 bp, Homo sapien
gcatggacagaacctccctatgacc

SEQ ID NO: 5635076 - DNA, 25 bp, Homo sapien
gaaaggtctttagatgaggccaaag

SEQ ID NO: 5635077 - DNA, 25 bp, Homo sapien
ctttggcctcatctaaagacctttc

SEQ ID NO: 5635078 - DNA, 25 bp, Homo sapien
cacactttagatgacagaatggcat

SEQ ID NO: 5635079 - DNA, 25 bp, Homo sapien
ttaaatgttgcccagagcagaattt

SEQ ID NO: 5635080 - DNA, 25 bp, Homo sapien
cataaaataagtaccataaagcgcc

SEQ ID NO: 5635081 - DNA, 25 bp, Homo sapien
agttactgcctggagatactatctc

SEQ ID NO: 5635082 - DNA, 25 bp, Homo sapien
gaatggcatcaatcttatgagagtt

SEQ ID NO: 5635083 - DNA, 25 bp, Homo sapien
tgtcaacagacttccctagaaccat

SEQ ID NO: 5635084 - DNA, 25 bp, Homo sapien
gagagttaatacgaaagttactgcc

SEQ ID NO: 5635085 - DNA, 25 bp, Homo sapien
ataaagcgcctttgagaccctccaa

SEQ ID NO: 5635086 - DNA, 25 bp, Homo sapien
catcagactccagactcagggtcat

SEQ ID NO: 5635087 - DNA, 25 bp, Homo sapien
agaaccattcatacccacaggtgat

SEQ ID NO: 5635088 - DNA, 25 bp, Homo sapien
cccacaggtgatagatttcttgtcc

SEQ ID NO: 5635089 - DNA, 25 bp, Homo sapien
agttgggagaaagagtttacaagta

SEQ ID NO: 5635090 - DNA, 25 bp, Homo sapien
ccactgttgaaactgggtgatggga

SEQ ID NO: 5635091 - DNA, 25 bp, Homo sapien
cttaaatatcactacctggtcttgc

SEQ ID NO: 5635092 - DNA, 25 bp, Homo sapien
gagtttacaagtacaacagcacagt

SEQ ID NO: 5635093 - DNA, 25 bp, Homo sapien
ttgtggagaagaaaagtcctctgat

SEQ ID NO: 5635094 - DNA, 25 bp, Homo sapien
gatatagatggaataggattgacca

SEQ ID NO: 5635095 - DNA, 25 bp, Homo sapien
aagtacaacagcacagtaaaagaac

SEQ ID NO: 5635096 - DNA, 25 bp, Homo sapien
agatggaataggattgaccactgtt

SEQ ID NO: 5635097 - DNA, 25 bp, Homo sapien
gcacagtaaaagaactgaggtaaat

SEQ ID NO: 5635098 - DNA, 25 bp, Homo sapien
tttagtccaagtgttgaaatgtcac

SEQ ID NO: 5635099 - DNA, 25 bp, Homo sapien
ctgtgtcatttagatttgaaacatc

SEQ ID NO: 5635100 - DNA, 25 bp, Homo sapien
acacccttcctagaaagtcctaaca

SEQ ID NO: 5635101 - DNA, 25 bp, Homo sapien
tcaaactacagcaactggtaatttt

SEQ ID NO: 5635102 - DNA, 25 bp, Homo sapien
ttacctcccacatgggaaggagggc

SEQ ID NO: 5635103 - DNA, 25 bp, Homo sapien
tttaaacctcaaactacagcaactg

SEQ ID NO: 5635104 - DNA, 25 bp, Homo sapien
cctagaaagtcctaacaaatcttac

SEQ ID NO: 5635105 - DNA, 25 bp, Homo sapien
tcatgcaacacttttcttactggat

SEQ ID NO: 5635106 - DNA, 25 bp, Homo sapien
tcttactggattcccaaactcttta

SEQ ID NO: 5635107 - DNA, 25 bp, Homo sapien
aacaaatcttacctcccacatggga

SEQ ID NO: 5635108 - DNA, 25 bp, Homo sapien
aggagggccaacctgttaaactcac

SEQ ID NO: 5635109 - DNA, 25 bp, Homo sapien
caaatcccacccattcttcaaagcc

SEQ ID NO: 5635110 - DNA, 25 bp, Homo sapien
tcttcaaagccaagttcacatccct

SEQ ID NO: 5635111 - DNA, 25 bp, Homo sapien
gaatggattgacttcctgcctagaa

SEQ ID NO: 5635112 - DNA, 25 bp, Homo sapien
tactcagctgactggtaatttcttc

SEQ ID NO: 5635113 - DNA, 25 bp, Homo sapien
atggtgatacaaatagttatccgtc

SEQ ID NO: 5635114 - DNA, 25 bp, Homo sapien
tccagcttcatgaatatggtgatac

SEQ ID NO: 5635115 - DNA, 25 bp, Homo sapien
acgactcccagtgcagacaattgtt

SEQ ID NO: 5635116 - DNA, 25 bp, Homo sapien
aatcactaatgagaggatcagaggt

SEQ ID NO: 5635117 - DNA, 25 bp, Homo sapien
acctctgtcagtgccaaatgtttac

SEQ ID NO: 5635118 - DNA, 25 bp, Homo sapien
ctgtacctcgtacgactcccagtgc

SEQ ID NO: 5635119 - DNA, 25 bp, Homo sapien
actcagtgaattactcagctgactg

SEQ ID NO: 5635120 - DNA, 25 bp, Homo sapien
tatccgtctaacctctgtcagtgcc

SEQ ID NO: 5635121 - DNA, 25 bp, Homo sapien
atgatacaagtaatggaaaatattc

SEQ ID NO: 5635122 - DNA, 25 bp, Homo sapien
ggttagtgtgacctttggagtccag

SEQ ID NO: 5635123 - DNA, 25 bp, Homo sapien
tggcagatggtataaaatacacatt

SEQ ID NO: 5635124 - DNA, 25 bp, Homo sapien
ttatagactgtgcttaccaggtttc

SEQ ID NO: 5635125 - DNA, 25 bp, Homo sapien
aaatccatatggcttgcaatacctt

SEQ ID NO: 5635126 - DNA, 25 bp, Homo sapien
taaagcacggttgtcaaaatccata

SEQ ID NO: 5635127 - DNA, 25 bp, Homo sapien
ccaggtttcaggccttcggttgatt

SEQ ID NO: 5635128 - DNA, 25 bp, Homo sapien
gagtagaattgtgctgatggtatgt

SEQ ID NO: 5635129 - DNA, 25 bp, Homo sapien
ctaggtaaatgcactaggttagtgt

SEQ ID NO: 5635130 - DNA, 25 bp, Homo sapien
caatacctttgcgctgtgctactta

SEQ ID NO: 5635131 - DNA, 25 bp, Homo sapien
aattaagacaatatactggcacttc

SEQ ID NO: 5635132 - DNA, 25 bp, Homo sapien
attatgatggtgaagagcaagatta

SEQ ID NO: 5635133 - DNA, 25 bp, Homo sapien
gcactatttaataatggcagacctt

SEQ ID NO: 5635134 - DNA, 25 bp, Homo sapien
tgttcttgaacatgggagtcctatt

SEQ ID NO: 5635135 - DNA, 25 bp, Homo sapien
ttttgccaataacgtggactctaat

SEQ ID NO: 5635136 - DNA, 25 bp, Homo sapien
tcaaaagactatgagcaaaccagat

SEQ ID NO: 5635137 - DNA, 25 bp, Homo sapien
ccactcaaatcgagctgcagtaggc

SEQ ID NO: 5635138 - DNA, 25 bp, Homo sapien
tcctatgaagaaaccctttagacac

SEQ ID NO: 5635139 - DNA, 25 bp, Homo sapien
atttggggtcaacaaccactgttcc

SEQ ID NO: 5635140 - DNA, 25 bp, Homo sapien
aatggttgatttagctagatgtaat

SEQ ID NO: 5635141 - DNA, 25 bp, Homo sapien
taacaacggtgatgtgttcttgaac

SEQ ID NO: 5635142 - DNA, 25 bp, Homo sapien
acttactgctgaagtgagaaaaaaa

SEQ ID NO: 5635143 - DNA, 25 bp, Homo sapien
gatgtaatatctagtagcaataacc

SEQ ID NO: 5635144 - DNA, 25 bp, Homo sapien
gccaaagctagtccccgtctggctt

SEQ ID NO: 5635145 - DNA, 25 bp, Homo sapien
ctagtccccgtctggcttaggggcc

SEQ ID NO: 5635146 - DNA, 25 bp, Homo sapien
ctggccaacatagtgaaacttcatc

SEQ ID NO: 5635147 - DNA, 25 bp, Homo sapien
agccacagagcaagactccgtctca

SEQ ID NO: 5635148 - DNA, 25 bp, Homo sapien
agctcctgctttaaagccagttttt

SEQ ID NO: 5635149 - DNA, 25 bp, Homo sapien
caaaagcctacagacctacacacta

SEQ ID NO: 5635150 - DNA, 25 bp, Homo sapien
agaaccacttgaacacagccaggag

SEQ ID NO: 5635151 - DNA, 25 bp, Homo sapien
ctagaaatacaaaattagcggggcg

SEQ ID NO: 5635152 - DNA, 25 bp, Homo sapien
ttgtggttaccatcaaaagcctaca

SEQ ID NO: 5635153 - DNA, 25 bp, Homo sapien
gtgacagggtgctctaaccccagct

SEQ ID NO: 5635154 - DNA, 25 bp, Homo sapien
tgtactccagcctgagccacagagc

SEQ ID NO: 5635155 - DNA, 25 bp, Homo sapien
tcagcccatctcaaggggcacttgc

SEQ ID NO: 5635156 - DNA, 25 bp, Homo sapien
atcatcatcacgttcagcccatctc

SEQ ID NO: 5635157 - DNA, 25 bp, Homo sapien
aaaagagacctaattcttatattcc

SEQ ID NO: 5635158 - DNA, 25 bp, Homo sapien
ctctgtcaccactggacccctcacc

SEQ ID NO: 5635159 - DNA, 25 bp, Homo sapien
ttatattcccaacctcaagacttct

SEQ ID NO: 5635160 - DNA, 25 bp, Homo sapien
ggccacagatcatcatcacgttcag

SEQ ID NO: 5635161 - DNA, 25 bp, Homo sapien
gtcaccactggacccctcaccaggg

SEQ ID NO: 5635162 - DNA, 25 bp, Homo sapien
gacaccatctctggacccacactga

SEQ ID NO: 5635163 - DNA, 25 bp, Homo sapien
aacctcaagacttctatcatctccc

SEQ ID NO: 5635164 - DNA, 25 bp, Homo sapien
gtgccttgccacatgctcttcccta

SEQ ID NO: 5635165 - DNA, 25 bp, Homo sapien
tctctggacccacactgagctctgt

SEQ ID NO: 5635166 - DNA, 25 bp, Homo sapien
ttccctgtaggagtggatcatgaag

SEQ ID NO: 5635167 - DNA, 25 bp, Homo sapien
tgaagttgggaaagctgcttaattt

SEQ ID NO: 5635168 - DNA, 25 bp, Homo sapien
ttacagagtttgacatacatgggtt

SEQ ID NO: 5635169 - DNA, 25 bp, Homo sapien
gaagaatcaacagattgaggcaacc

SEQ ID NO: 5635170 - DNA, 25 bp, Homo sapien
caatatcctacgggggcatgataga

SEQ ID NO: 5635171 - DNA, 25 bp, Homo sapien
tggggtcagatagatgtacttactc

SEQ ID NO: 5635172 - DNA, 25 bp, Homo sapien
caggtgtccccaggcaatatcctac

SEQ ID NO: 5635173 - DNA, 25 bp, Homo sapien
ttgaggcaaccatccggtcagttac

SEQ ID NO: 5635174 - DNA, 25 bp, Homo sapien
agctgttcctggacaaaatctgagc

SEQ ID NO: 5635175 - DNA, 25 bp, Homo sapien
gcatgatagaaaagggtaactctgg

SEQ ID NO: 5635176 - DNA, 25 bp, Homo sapien
gtcaccagatgccttggtaaagttc

SEQ ID NO: 5635177 - DNA, 25 bp, Homo sapien
aacagtaactggcaaacgtaacaac

SEQ ID NO: 5635178 - DNA, 25 bp, Homo sapien
tggcaaacgtaacaacaggaaattg

SEQ ID NO: 5635179 - DNA, 25 bp, Homo sapien
gctgtttcgagcttcgcgtcgcgtg

SEQ ID NO: 5635180 - DNA, 25 bp, Homo sapien
accaaaacagtaactggcaaacgta

SEQ ID NO: 5635181 - DNA, 25 bp, Homo sapien
ccacccacggaaacgatgccttatg

SEQ ID NO: 5635182 - DNA, 25 bp, Homo sapien
atgccttatgaggaagctaacccgg

SEQ ID NO: 5635183 - DNA, 25 bp, Homo sapien
cggaaacgatgccttatgaggaagc

SEQ ID NO: 5635184 - DNA, 25 bp, Homo sapien
gtaacaacaggaaattgtagggcag

SEQ ID NO: 5635185 - DNA, 25 bp, Homo sapien
ggaaggaacgctgtttcgagcttcg

SEQ ID NO: 5635186 - DNA, 25 bp, Homo sapien
gcctgcgcctgagcctctacaagag

SEQ ID NO: 5635187 - DNA, 25 bp, Homo sapien
ctgagcctctacaagagggaaggaa

SEQ ID NO: 5635188 - DNA, 25 bp, Homo sapien
gaggtatacctttaagcaattagac

SEQ ID NO: 5635189 - DNA, 25 bp, Homo sapien
tttcccagttcaaaatgtcaaattc

SEQ ID NO: 5635190 - DNA, 25 bp, Homo sapien
tgcctctggtcctcaaacagctgcc

SEQ ID NO: 5635191 - DNA, 25 bp, Homo sapien
acatttccaagctgtttcccagttc

SEQ ID NO: 5635192 - DNA, 25 bp, Homo sapien
cctcaaacagctgccttctagcatc

SEQ ID NO: 5635193 - DNA, 25 bp, Homo sapien
caatttggaatcttagaggtatacc

SEQ ID NO: 5635194 - DNA, 25 bp, Homo sapien
cttctagcatcaatcaatttggaat

SEQ ID NO: 5635195 - DNA, 25 bp, Homo sapien
tgcatataagccatgcctctggtcc

SEQ ID NO: 5635196 - DNA, 25 bp, Homo sapien
taatactgtctttctgtgatccaat

SEQ ID NO: 5635197 - DNA, 25 bp, Homo sapien
tcattttgcatataagccatgcctc

SEQ ID NO: 5635198 - DNA, 25 bp, Homo sapien
agcaattagacttacatatacatac

SEQ ID NO: 5635199 - DNA, 25 bp, Homo sapien
ggctccgtccctcccgccaccgaga

SEQ ID NO: 5635200 - DNA, 25 bp, Homo sapien
tctcggtggcgggagggacggagcc

SEQ ID NO: 5635201 - DNA, 25 bp, Homo sapien
ggaggctccgtccctcccgccaccg

SEQ ID NO: 5635202 - DNA, 25 bp, Homo sapien
cggtggcgggagggacggagcctcc

SEQ ID NO: 5635203 - DNA, 25 bp, Homo sapien
gctcccggaccggaggctccgtccc

SEQ ID NO: 5635204 - DNA, 25 bp, Homo sapien
gggacggagcctccggtccgggagc

SEQ ID NO: 5635205 - DNA, 25 bp, Homo sapien
aaacaagccattcccacaggatctt

SEQ ID NO: 5635206 - DNA, 25 bp, Homo sapien
taaggtttggttacagcagaaatgt

SEQ ID NO: 5635207 - DNA, 25 bp, Homo sapien
tcacaaaattggctaagtattgaaa

SEQ ID NO: 5635208 - DNA, 25 bp, Homo sapien
atatcccctagaaagcctggaccac

SEQ ID NO: 5635209 - DNA, 25 bp, Homo sapien
tcacacaccccaccagcaatctgaa

SEQ ID NO: 5635210 - DNA, 25 bp, Homo sapien
tattgccaagctgcctttctgaaac

SEQ ID NO: 5635211 - DNA, 25 bp, Homo sapien
ttttacacaccaatcagcaacatac

SEQ ID NO: 5635212 - DNA, 25 bp, Homo sapien
aaacaaacgaaatcacaaaattggc

SEQ ID NO: 5635213 - DNA, 25 bp, Homo sapien
aaagcctggaccacttcacacaccc

SEQ ID NO: 5635214 - DNA, 25 bp, Homo sapien
ttgcccattgacaaacaagccattc

SEQ ID NO: 5635215 - DNA, 25 bp, Homo sapien
tccaaattaccagaagagtaaaatc

SEQ ID NO: 5635216 - DNA, 25 bp, Homo sapien
attggtcaatttgtgcctgatttcc

SEQ ID NO: 5635217 - DNA, 25 bp, Homo sapien
tacatgacttagaactgcttactta

SEQ ID NO: 5635218 - DNA, 25 bp, Homo sapien
aaggcaccttagaacagatcaggac

SEQ ID NO: 5635219 - DNA, 25 bp, Homo sapien
tttagttagccaggtttcatcatcc

SEQ ID NO: 5635220 - DNA, 25 bp, Homo sapien
aataatcccagtaaaagagagcaaa

SEQ ID NO: 5635221 - DNA, 25 bp, Homo sapien
tttcaggaaacagacaattgcattg

SEQ ID NO: 5635222 - DNA, 25 bp, Homo sapien
cagcttctagggagacaagttaata

SEQ ID NO: 5635223 - DNA, 25 bp, Homo sapien
agaacagatcaggacttaaaaactc

SEQ ID NO: 5635224 - DNA, 25 bp, Homo sapien
gcaaatggcatgagaattggtcaat

SEQ ID NO: 5635225 - DNA, 25 bp, Homo sapien
atttaaggcgaaaaatctcagcttc

SEQ ID NO: 5635226 - DNA, 25 bp, Homo sapien
tgcaaattaagaacttcagaatcac

SEQ ID NO: 5635227 - DNA, 25 bp, Homo sapien
tgtcacacaggtacagacacagtgt

SEQ ID NO: 5635228 - DNA, 25 bp, Homo sapien
aaagtaatactagcccaatcaagtc

SEQ ID NO: 5635229 - DNA, 25 bp, Homo sapien
acacacaagatcaactaatagaaat

SEQ ID NO: 5635230 - DNA, 25 bp, Homo sapien
tgcaaacagcttaatcttccttaga

SEQ ID NO: 5635231 - DNA, 25 bp, Homo sapien
aagtctagcttgaagaatctaattc

SEQ ID NO: 5635232 - DNA, 25 bp, Homo sapien
atagtagtagctacttaagagaagc

SEQ ID NO: 5635233 - DNA, 25 bp, Homo sapien
acagacacagtgtagatggtattgt

SEQ ID NO: 5635234 - DNA, 25 bp, Homo sapien
taagagaagcaacttcacaaatttc

SEQ ID NO: 5635235 - DNA, 25 bp, Homo sapien
agcagggtagctaaagaaaactgta

SEQ ID NO: 5635236 - DNA, 25 bp, Homo sapien
caagaaatagaatcaaaagacagat

SEQ ID NO: 5635237 - DNA, 25 bp, Homo sapien
cagatatgaatgactacacacaaga

SEQ ID NO: 5635238 - DNA, 25 bp, Homo sapien
tactcaacgtaggcatctgggtttg

SEQ ID NO: 5635239 - DNA, 25 bp, Homo sapien
gaggtggctgttatcagttcaaagt

SEQ ID NO: 5635240 - DNA, 25 bp, Homo sapien
gctgtgtcggatgatcaagctgctt

SEQ ID NO: 5635241 - DNA, 25 bp, Homo sapien
ctgttatcagttcaaagtgaggggc

SEQ ID NO: 5635242 - DNA, 25 bp, Homo sapien
tttatttgggacaaggctgtgtcgg

SEQ ID NO: 5635243 - DNA, 25 bp, Homo sapien
atggaccagacagactactcaacgt

SEQ ID NO: 5635244 - DNA, 25 bp, Homo sapien
ggcgactgtctcaaggtaaaggaat

SEQ ID NO: 5635245 - DNA, 25 bp, Homo sapien
aagctgcttattatggctaatgagt

SEQ ID NO: 5635246 - DNA, 25 bp, Homo sapien
ttttgaaagcagcgtcctgttggga

SEQ ID NO: 5635247 - DNA, 25 bp, Homo sapien
ccacctgcctctttagcccccaccc

SEQ ID NO: 5635248 - DNA, 25 bp, Homo sapien
tttagtttttgaaagcagcgtcctg

SEQ ID NO: 5635249 - DNA, 25 bp, Homo sapien
taacagccctctaatgaaatgatgc

SEQ ID NO: 5635250 - DNA, 25 bp, Homo sapien
tatctcacgaggaaggaaatttttc

SEQ ID NO: 5635251 - DNA, 25 bp, Homo sapien
gtaaaagcctcaggacaggtctgac

SEQ ID NO: 5635252 - DNA, 25 bp, Homo sapien
taatagctaatggcacgtgcttatc

SEQ ID NO: 5635253 - DNA, 25 bp, Homo sapien
gactcaaaaagggtgactaggttga

SEQ ID NO: 5635254 - DNA, 25 bp, Homo sapien
atagacatccaagatgaaggcgctg

SEQ ID NO: 5635255 - DNA, 25 bp, Homo sapien
cggaaggcaccaaagatccacatga

SEQ ID NO: 5635256 - DNA, 25 bp, Homo sapien
ttcatggaatggcatgtgtggattc

SEQ ID NO: 5635257 - DNA, 25 bp, Homo sapien
aaggccccacgtcctaacactacca

SEQ ID NO: 5635258 - DNA, 25 bp, Homo sapien
aatgatgctgtggttaaatgagttc

SEQ ID NO: 5635259 - DNA, 25 bp, Homo sapien
taacactaccatagtgggggtgagc

SEQ ID NO: 5635260 - DNA, 25 bp, Homo sapien
ctcattatgtgatataggcaagaaa

SEQ ID NO: 5635261 - DNA, 25 bp, Homo sapien
tataaagttcttgggttgtggtgat

SEQ ID NO: 5635262 - DNA, 25 bp, Homo sapien
tgcatagcttcaaagagttcacagc

SEQ ID NO: 5635263 - DNA, 25 bp, Homo sapien
tgagtgacaagtgtctggcaagatg

SEQ ID NO: 5635264 - DNA, 25 bp, Homo sapien
agtagacggccaccctttcccatct

SEQ ID NO: 5635265 - DNA, 25 bp, Homo sapien
ggtgaaatgagtgacaagtgtctgg

SEQ ID NO: 5635266 - DNA, 25 bp, Homo sapien
aaactacattgtgaggcaggatacg

SEQ ID NO: 5635267 - DNA, 25 bp, Homo sapien
tgggtcatagacttgagaatgatga

SEQ ID NO: 5635268 - DNA, 25 bp, Homo sapien
cagggcaactaactgaggaactctt

SEQ ID NO: 5635269 - DNA, 25 bp, Homo sapien
gggaaaaggctgagtcttacagtct

SEQ ID NO: 5635270 - DNA, 25 bp, Homo sapien
cttacagtcttgggctcgtcctctt

SEQ ID NO: 5635271 - DNA, 25 bp, Homo sapien
acaaacagatgatgaaacaccaaag

SEQ ID NO: 5635272 - DNA, 25 bp, Homo sapien
tgccagttacctctgaacgggaggg

SEQ ID NO: 5635273 - DNA, 25 bp, Homo sapien
aacaccactgatcaacatgaaaacc

SEQ ID NO: 5635274 - DNA, 25 bp, Homo sapien
actgatcaacatgaaaaccaggatg

SEQ ID NO: 5635275 - DNA, 25 bp, Homo sapien
aagatttctctgcaaggaggctttg

SEQ ID NO: 5635276 - DNA, 25 bp, Homo sapien
ccaggatgccagttacctctgaacg

SEQ ID NO: 5635277 - DNA, 25 bp, Homo sapien
tttctctgcaaggaggctttgttcc

SEQ ID NO: 5635278 - DNA, 25 bp, Homo sapien
accaaagtacaagatttctctgcaa

SEQ ID NO: 5635279 - DNA, 25 bp, Homo sapien
gtacaagatttctctgcaaggaggc

SEQ ID NO: 5635280 - DNA, 25 bp, Homo sapien
ttcactaacccacatcttcaacatt

SEQ ID NO: 5635281 - DNA, 25 bp, Homo sapien
actttaaacaccactgatcaacatg

SEQ ID NO: 5635282 - DNA, 25 bp, Homo sapien
ctatttctccacgaagggagggagg

SEQ ID NO: 5635283 - DNA, 25 bp, Homo sapien
gcctcccaaggagcctctcacttac

SEQ ID NO: 5635284 - DNA, 25 bp, Homo sapien
ctggcctcccaaggagcctctcact

SEQ ID NO: 5635285 - DNA, 25 bp, Homo sapien
aaggagcctctcacttacccagggc

SEQ ID NO: 5635286 - DNA, 25 bp, Homo sapien
acagctactcaatctgtcctcccac

SEQ ID NO: 5635287 - DNA, 25 bp, Homo sapien
actgccaactgcctcaagtctggtc

SEQ ID NO: 5635288 - DNA, 25 bp, Homo sapien
agtctggtcctcaggctcaaccggg

SEQ ID NO: 5635289 - DNA, 25 bp, Homo sapien
actcaatctgtcctcccacagccat

SEQ ID NO: 5635290 - DNA, 25 bp, Homo sapien
cgcggactgccaactgcctcaagtc

SEQ ID NO: 5635291 - DNA, 25 bp, Homo sapien
ctcaagtctggtcctcaggctcaac

SEQ ID NO: 5635292 - DNA, 25 bp, Homo sapien
gccggaggaaagctgtttctatttc

SEQ ID NO: 5635293 - DNA, 25 bp, Homo sapien
gttagagatggttaggtagaaccta

SEQ ID NO: 5635294 - DNA, 25 bp, Homo sapien
ctccttgacagcggtgttagagatg

SEQ ID NO: 5635295 - DNA, 25 bp, Homo sapien
gtaccataggctgctaagagtgttc

SEQ ID NO: 5635296 - DNA, 25 bp, Homo sapien
tcacagaagtatgggctcactaata

SEQ ID NO: 5635297 - DNA, 25 bp, Homo sapien
aatagaataccaacaggattcctgt

SEQ ID NO: 5635298 - DNA, 25 bp, Homo sapien
aaaacaattgaactgctgcttacaa

SEQ ID NO: 5635299 - DNA, 25 bp, Homo sapien
atggcaacacaagtgagaatgagag

SEQ ID NO: 5635300 - DNA, 25 bp, Homo sapien
atttgtgtggttgttagtaatgtac

SEQ ID NO: 5635301 - DNA, 25 bp, Homo sapien
tacccagaatataaacctcagcaaa

SEQ ID NO: 5635302 - DNA, 25 bp, Homo sapien
agaacctatattacggaagtcagcc

SEQ ID NO: 5635303 - DNA, 25 bp, Homo sapien
cttttggaatggcaacacaagtgag

SEQ ID NO: 5635304 - DNA, 25 bp, Homo sapien
tctaattataaggactgttgctttc

SEQ ID NO: 5635305 - DNA, 25 bp, Homo sapien
tttagtgatttaagactgtggttac

SEQ ID NO: 5635306 - DNA, 25 bp, Homo sapien
tatttaacagtttgacatggggtcc

SEQ ID NO: 5635307 - DNA, 25 bp, Homo sapien
agactgtggttactatcccataggc

SEQ ID NO: 5635308 - DNA, 25 bp, Homo sapien
tcccataggcagaaaaaactcagta

SEQ ID NO: 5635309 - DNA, 25 bp, Homo sapien
tcatttgggtatgcaaaacttttgc

SEQ ID NO: 5635310 - DNA, 25 bp, Homo sapien
agtactgtagctgaaaaataatgta

SEQ ID NO: 5635311 - DNA, 25 bp, Homo sapien
tcaatgggacattatacaaaaatac

SEQ ID NO: 5635312 - DNA, 25 bp, Homo sapien
ccttccacacggtatatgccttata

SEQ ID NO: 5635313 - DNA, 25 bp, Homo sapien
cagtttgacatggggtccacagtac

SEQ ID NO: 5635314 - DNA, 25 bp, Homo sapien
ttctacaaagtaacagatatgcagc

SEQ ID NO: 5635315 - DNA, 25 bp, Homo sapien
cattgttagctggctggactccatt

SEQ ID NO: 5635316 - DNA, 25 bp, Homo sapien
gtaaaattcagatatggtgttcaga

SEQ ID NO: 5635317 - DNA, 25 bp, Homo sapien
agtcccaaggacagaggttttagaa

SEQ ID NO: 5635318 - DNA, 25 bp, Homo sapien
atcaccaaagtgaaactcctatgta

SEQ ID NO: 5635319 - DNA, 25 bp, Homo sapien
agactcacgtccactgcaaatcact

SEQ ID NO: 5635320 - DNA, 25 bp, Homo sapien
tccacctctgcaggacagactgaaa

SEQ ID NO: 5635321 - DNA, 25 bp, Homo sapien
ttactgcaccagatcccatgttatt

SEQ ID NO: 5635322 - DNA, 25 bp, Homo sapien
tcccccagctacccagtccacctct

SEQ ID NO: 5635323 - DNA, 25 bp, Homo sapien
gcaggacagactgaaaatcactagc

SEQ ID NO: 5635324 - DNA, 25 bp, Homo sapien
ccaactgataataggacttactctt

SEQ ID NO: 5635325 - DNA, 25 bp, Homo sapien
aatcactagctgaaatcaccaaagt

SEQ ID NO: 5635326 - DNA, 25 bp, Homo sapien
ttgttgtgtgctgttagccctgagc

SEQ ID NO: 5635327 - DNA, 25 bp, Homo sapien
ggccttgcttgcagccagcctactc

SEQ ID NO: 5635328 - DNA, 25 bp, Homo sapien
cttgcttgcttttctacgcggccac

SEQ ID NO: 5635329 - DNA, 25 bp, Homo sapien
gctagagccgcaaccagctccatct

SEQ ID NO: 5635330 - DNA, 25 bp, Homo sapien
gtgaaactgacatactcctgagctg

SEQ ID NO: 5635331 - DNA, 25 bp, Homo sapien
ctgttagccctgagcatgagacaga

SEQ ID NO: 5635332 - DNA, 25 bp, Homo sapien
tgcagccagcctactccacagcttc

SEQ ID NO: 5635333 - DNA, 25 bp, Homo sapien
aacaggatcagagaaatccaatgac

SEQ ID NO: 5635334 - DNA, 25 bp, Homo sapien
aagcagctgtgacgatatgtaggtc

SEQ ID NO: 5635335 - DNA, 25 bp, Homo sapien
aaccagtagaaacagtaaatgtcaa

SEQ ID NO: 5635336 - DNA, 25 bp, Homo sapien
actcctgagctgatatacaagtgtt

SEQ ID NO: 5635337 - DNA, 25 bp, Homo sapien
tagaaggctaagatgtttcaaatgc

SEQ ID NO: 5635338 - DNA, 25 bp, Homo sapien
caatgcaatattcagttccaaaacc

SEQ ID NO: 5635339 - DNA, 25 bp, Homo sapien
tgaacctatgaaatgtcagagtttt

SEQ ID NO: 5635340 - DNA, 25 bp, Homo sapien
gtgcctggccgtgatagttcttatt

SEQ ID NO: 5635341 - DNA, 25 bp, Homo sapien
taatttagccaaggataactgaacc

SEQ ID NO: 5635342 - DNA, 25 bp, Homo sapien
ggctacaaagtacatcccagaatat

SEQ ID NO: 5635343 - DNA, 25 bp, Homo sapien
ataaaagaatggcttctgaatacaa

SEQ ID NO: 5635344 - DNA, 25 bp, Homo sapien
tgtaaagctcaaatagtcatacctc

SEQ ID NO: 5635345 - DNA, 25 bp, Homo sapien
taagctcagataatgctagtgaaac

SEQ ID NO: 5635346 - DNA, 25 bp, Homo sapien
ctcttctgccagtgaaaaaatccaa

SEQ ID NO: 5635347 - DNA, 25 bp, Homo sapien
gaatacaaagccatgcagaacttca

SEQ ID NO: 5635348 - DNA, 25 bp, Homo sapien
aatagcatttcaaggggctcgagga

SEQ ID NO: 5635349 - DNA, 25 bp, Homo sapien
ttgaaaatagctagcctgggtgaca

SEQ ID NO: 5635350 - DNA, 25 bp, Homo sapien
tatgggctctggttccaaagcaata

SEQ ID NO: 5635351 - DNA, 25 bp, Homo sapien
ggtgacattcacagtgagacccttt

SEQ ID NO: 5635352 - DNA, 25 bp, Homo sapien
ttatccacatatgggctctggttcc

SEQ ID NO: 5635353 - DNA, 25 bp, Homo sapien
tcatgcctgcatcatcaagagtaat

SEQ ID NO: 5635354 - DNA, 25 bp, Homo sapien
gaacaaccattcccagccaaaggct

SEQ ID NO: 5635355 - DNA, 25 bp, Homo sapien
atcatcaagagtaatgctacctacc

SEQ ID NO: 5635356 - DNA, 25 bp, Homo sapien
attataggcgtgaacaaccattccc

SEQ ID NO: 5635357 - DNA, 25 bp, Homo sapien
gagcactggtgttttgatagcattc

SEQ ID NO: 5635358 - DNA, 25 bp, Homo sapien
atgttgtctgggctgttctccagct

SEQ ID NO: 5635359 - DNA, 25 bp, Homo sapien
aagatgcagcctttctcagttccgc

SEQ ID NO: 5635360 - DNA, 25 bp, Homo sapien
tcctgaaaaggcaagtaatatataa

SEQ ID NO: 5635361 - DNA, 25 bp, Homo sapien
cacttccggctaactacaaatcatc

SEQ ID NO: 5635362 - DNA, 25 bp, Homo sapien
ctctctgtgatatccctctcccttc

SEQ ID NO: 5635363 - DNA, 25 bp, Homo sapien
ccgcattctgaattagatgtttctc

SEQ ID NO: 5635364 - DNA, 25 bp, Homo sapien
ctctaaggcttaatgattcaatgct

SEQ ID NO: 5635365 - DNA, 25 bp, Homo sapien
tcaatacccagaaatcacctctaag

SEQ ID NO: 5635366 - DNA, 25 bp, Homo sapien
taatacaatgaacttccaagaactc

SEQ ID NO: 5635367 - DNA, 25 bp, Homo sapien
ttatagtacccctgcctctagtttc

SEQ ID NO: 5635368 - DNA, 25 bp, Homo sapien
aatgaaacttatcctgaaaaggcaa

SEQ ID NO: 5635369 - DNA, 25 bp, Homo sapien
aacattaataacagttcccaccttc

SEQ ID NO: 5635370 - DNA, 25 bp, Homo sapien
aacaaaagccattaagtatctagaa

SEQ ID NO: 5635371 - DNA, 25 bp, Homo sapien
actgaaataaagacacaccaggtac

SEQ ID NO: 5635372 - DNA, 25 bp, Homo sapien
aagtagttcatcaatgttacaatcc

SEQ ID NO: 5635373 - DNA, 25 bp, Homo sapien
caatccttagacaaaaaccaacagt

SEQ ID NO: 5635374 - DNA, 25 bp, Homo sapien
aaccaacagtttagtacatagtaat

SEQ ID NO: 5635375 - DNA, 25 bp, Homo sapien
gtcgtaaagatgtcaataatgattc

SEQ ID NO: 5635376 - DNA, 25 bp, Homo sapien
agagaaaaactcaatgtcgtaaaga

SEQ ID NO: 5635377 - DNA, 25 bp, Homo sapien
ctttctaatactatggcagaggaga

SEQ ID NO: 5635378 - DNA, 25 bp, Homo sapien
ttactaaagcacataaaagaatacc

SEQ ID NO: 5635379 - DNA, 25 bp, Homo sapien
agacacaccaggtacaagagaaaaa

SEQ ID NO: 5635380 - DNA, 25 bp, Homo sapien
aatactatggcagaggagaaatatt

SEQ ID NO: 5635381 - DNA, 25 bp, Homo sapien
gagacggactttaggagctgtattt

SEQ ID NO: 5635382 - DNA, 25 bp, Homo sapien
gccttgtcctaagagcagcctaacc

SEQ ID NO: 5635383 - DNA, 25 bp, Homo sapien
agcctaaccaaggagacggacttta

SEQ ID NO: 5635384 - DNA, 25 bp, Homo sapien
aggcagcgtgtcataagttttgggt

SEQ ID NO: 5635385 - DNA, 25 bp, Homo sapien
ttatcgacagtctctgcatgccagt

SEQ ID NO: 5635386 - DNA, 25 bp, Homo sapien
ttggttgcaggtatagctcacttat

SEQ ID NO: 5635387 - DNA, 25 bp, Homo sapien
atccaaatctgaaatgactaacgca

SEQ ID NO: 5635388 - DNA, 25 bp, Homo sapien
tctgcatgccagttagcaggagtgc

SEQ ID NO: 5635389 - DNA, 25 bp, Homo sapien
caggagccagtgctaactccaggaa

SEQ ID NO: 5635390 - DNA, 25 bp, Homo sapien
gacatttccaggataaaggcagcgt

SEQ ID NO: 5635391 - DNA, 25 bp, Homo sapien
gcccatgaggtacacaagccttgtc

SEQ ID NO: 5635392 - DNA, 25 bp, Homo sapien
ttcaatacctccaggcactgtgcag

SEQ ID NO: 5635393 - DNA, 25 bp, Homo sapien
gccaaacagaaaagaagccaaatca

SEQ ID NO: 5635394 - DNA, 25 bp, Homo sapien
tctgcacgctattggcactaactgc

SEQ ID NO: 5635395 - DNA, 25 bp, Homo sapien
ctgctggcagggagatttttcagaa

SEQ ID NO: 5635396 - DNA, 25 bp, Homo sapien
agaaaagaagccaaatcattgcatc

SEQ ID NO: 5635397 - DNA, 25 bp, Homo sapien
gaggtacagagacagttactaaaca

SEQ ID NO: 5635398 - DNA, 25 bp, Homo sapien
tccattcccggctgagctgtcctca

SEQ ID NO: 5635399 - DNA, 25 bp, Homo sapien
ttatccaggaacaagccagtgctca

SEQ ID NO: 5635400 - DNA, 25 bp, Homo sapien
tgtcctcatccagaggtacagagac

SEQ ID NO: 5635401 - DNA, 25 bp, Homo sapien
actgacattctggtctcctcaccca

SEQ ID NO: 5635402 - DNA, 25 bp, Homo sapien
cccacacagcaggataggtattatt

SEQ ID NO: 5635403 - DNA, 25 bp, Homo sapien
taatgtgtgcccaaaagagactatg

SEQ ID NO: 5635404 - DNA, 25 bp, Homo sapien
atctctcttgttgccatcaggaatt

SEQ ID NO: 5635405 - DNA, 25 bp, Homo sapien
gggccagtctgtccaaaggggacag

SEQ ID NO: 5635406 - DNA, 25 bp, Homo sapien
gttgccatcaggaattgaagacagg

SEQ ID NO: 5635407 - DNA, 25 bp, Homo sapien
agtctgtccaaaggggacagcaggt

SEQ ID NO: 5635408 - DNA, 25 bp, Homo sapien
ggaaacagtcagagaatctctcttg

SEQ ID NO: 5635409 - DNA, 25 bp, Homo sapien
gtgtgcccaaaagagactatggcat

SEQ ID NO: 5635410 - DNA, 25 bp, Homo sapien
gagaatgacatccttggaaacagtc

SEQ ID NO: 5635411 - DNA, 25 bp, Homo sapien
tataatgtgtgcccaaaagagacta

SEQ ID NO: 5635412 - DNA, 25 bp, Homo sapien
tgaggctgagaatgacatccttgga

SEQ ID NO: 5635413 - DNA, 25 bp, Homo sapien
cttgttgccatcaggaattgaagac

SEQ ID NO: 5635414 - DNA, 25 bp, Homo sapien
attgtctcaaagattgttgggtttt

SEQ ID NO: 5635415 - DNA, 25 bp, Homo sapien
agaagaggggcattcctatcaatct

SEQ ID NO: 5635416 - DNA, 25 bp, Homo sapien
aataggtaagacagattacttgctt

SEQ ID NO: 5635417 - DNA, 25 bp, Homo sapien
tttcctgagtaaacaacatggcaac

SEQ ID NO: 5635418 - DNA, 25 bp, Homo sapien
tccaagccttcaggtatcttctgac

SEQ ID NO: 5635419 - DNA, 25 bp, Homo sapien
ttctgacttactgggcagctgtcgg

SEQ ID NO: 5635420 - DNA, 25 bp, Homo sapien
tggggcttttcctgagtaaacaaca

SEQ ID NO: 5635421 - DNA, 25 bp, Homo sapien
acgcaggtagaagaacactgttcta

SEQ ID NO: 5635422 - DNA, 25 bp, Homo sapien
gtatcataggtcatggcaagttctc

SEQ ID NO: 5635423 - DNA, 25 bp, Homo sapien
tatttttcatatagagccaaagctc

SEQ ID NO: 5635424 - DNA, 25 bp, Homo sapien
agagccaaagctcttggtgacacca

SEQ ID NO: 5635425 - DNA, 25 bp, Homo sapien
gaaatggatcagggcctgagatgat

SEQ ID NO: 5635426 - DNA, 25 bp, Homo sapien
tcaataaatgcaggtcttcagcccc

SEQ ID NO: 5635427 - DNA, 25 bp, Homo sapien
gccagcaaggtattcgggctgcttg

SEQ ID NO: 5635428 - DNA, 25 bp, Homo sapien
acgtggcatgtagtaagtgatcaat

SEQ ID NO: 5635429 - DNA, 25 bp, Homo sapien
atcctaaacgaaatacgtggcatgt

SEQ ID NO: 5635430 - DNA, 25 bp, Homo sapien
gctaagctggctgtcaaataatacc

SEQ ID NO: 5635431 - DNA, 25 bp, Homo sapien
ccaatgaagtggtctgccatgctac

SEQ ID NO: 5635432 - DNA, 25 bp, Homo sapien
agctctgcctctaccgtggggtata

SEQ ID NO: 5635433 - DNA, 25 bp, Homo sapien
tactacccgggtttactgcatctaa

SEQ ID NO: 5635434 - DNA, 25 bp, Homo sapien
atatctgctcaggtctccgggtgca

SEQ ID NO: 5635435 - DNA, 25 bp, Homo sapien
ggtaggcagctgctatgccagcaag

SEQ ID NO: 5635436 - DNA, 25 bp, Homo sapien
gaatctgatgtgggacattcaagct

SEQ ID NO: 5635437 - DNA, 25 bp, Homo sapien
ggtgaggaagtttggacatcttgaa

SEQ ID NO: 5635438 - DNA, 25 bp, Homo sapien
aagccaggtttggaccatccagtac

SEQ ID NO: 5635439 - DNA, 25 bp, Homo sapien
agggactctgggaaaacagctatta

SEQ ID NO: 5635440 - DNA, 25 bp, Homo sapien
ttttcagtagagctcagccaaaggc

SEQ ID NO: 5635441 - DNA, 25 bp, Homo sapien
gatgccactgataaaatcaagggac

SEQ ID NO: 5635442 - DNA, 25 bp, Homo sapien
aaggagaacatagttgaggtgtctc

SEQ ID NO: 5635443 - DNA, 25 bp, Homo sapien
tgtaagaagaactatgatgccactg

SEQ ID NO: 5635444 - DNA, 25 bp, Homo sapien
aactggacctcaagtaagaaggcag

SEQ ID NO: 5635445 - DNA, 25 bp, Homo sapien
tgctccacagcctagaagccaggtt

SEQ ID NO: 5635446 - DNA, 25 bp, Homo sapien
taatagcttggtgaggaagtttgga

SEQ ID NO: 5635447 - DNA, 25 bp, Homo sapien
caaagccagcaatggtgcatctctc

SEQ ID NO: 5635448 - DNA, 25 bp, Homo sapien
tgctaaatatctcgtgaagtaagtc

SEQ ID NO: 5635449 - DNA, 25 bp, Homo sapien
gttctgcagattagaggtccaacac

SEQ ID NO: 5635450 - DNA, 25 bp, Homo sapien
ctcaaaacagactagcaaagtacct

SEQ ID NO: 5635451 - DNA, 25 bp, Homo sapien
ggtccaacacaggcttcactgggct

SEQ ID NO: 5635452 - DNA, 25 bp, Homo sapien
aggctgcctgcaactccctggctta

SEQ ID NO: 5635453 - DNA, 25 bp, Homo sapien
aaagacgaccaaaaactagcctgag

SEQ ID NO: 5635454 - DNA, 25 bp, Homo sapien
aactccctggcttatggccccttcc

SEQ ID NO: 5635455 - DNA, 25 bp, Homo sapien
tctgggaaaatgatagtgctaaata

SEQ ID NO: 5635456 - DNA, 25 bp, Homo sapien
agtctcaattctacaggctgcctgc

SEQ ID NO: 5635457 - DNA, 25 bp, Homo sapien
tcttagaaagggatttgtgactttg

SEQ ID NO: 5635458 - DNA, 25 bp, Homo sapien
ggagaagtgaatataacagtgtctt

SEQ ID NO: 5635459 - DNA, 25 bp, Homo sapien
attaatcagtagatccaggactcgc

SEQ ID NO: 5635460 - DNA, 25 bp, Homo sapien
gcttacattttatggtgcatggacc

SEQ ID NO: 5635461 - DNA, 25 bp, Homo sapien
tggaaagcacttatcctctcagggc

SEQ ID NO: 5635462 - DNA, 25 bp, Homo sapien
tgcaaagacagagcgagattaatca

SEQ ID NO: 5635463 - DNA, 25 bp, Homo sapien
aggactcgctagcctgtgacctcta

SEQ ID NO: 5635464 - DNA, 25 bp, Homo sapien
atcctctcagggctgcaaagacaga

SEQ ID NO: 5635465 - DNA, 25 bp, Homo sapien
tacaaagcccttagcacaataaatg

SEQ ID NO: 5635466 - DNA, 25 bp, Homo sapien
gtgcatggaccaatgttgtttctgc

SEQ ID NO: 5635467 - DNA, 25 bp, Homo sapien
ttagtggcttttttaggtgctggga

SEQ ID NO: 5635468 - DNA, 25 bp, Homo sapien
ctcctcagagcatacttctgcaggc

SEQ ID NO: 5635469 - DNA, 25 bp, Homo sapien
atctacacccacacttcacttccct

SEQ ID NO: 5635470 - DNA, 25 bp, Homo sapien
tcattatgagcatcagtccttgggc

SEQ ID NO: 5635471 - DNA, 25 bp, Homo sapien
taatcaagtcctgctggtttgaggg

SEQ ID NO: 5635472 - DNA, 25 bp, Homo sapien
catataagatcatgaactcgtactc

SEQ ID NO: 5635473 - DNA, 25 bp, Homo sapien
tgagggaagcctatgttctgacaat

SEQ ID NO: 5635474 - DNA, 25 bp, Homo sapien
tcacccagctgaaatccttatccac

SEQ ID NO: 5635475 - DNA, 25 bp, Homo sapien
cccatattagcctgaagaaaattcc

SEQ ID NO: 5635476 - DNA, 25 bp, Homo sapien
attaggcagagttcattccattcgc

SEQ ID NO: 5635477 - DNA, 25 bp, Homo sapien
tctggcacaacttattaggtatctc

SEQ ID NO: 5635478 - DNA, 25 bp, Homo sapien
gcgattttgagttcttgagggaagc

SEQ ID NO: 5635479 - DNA, 25 bp, Homo sapien
aaatggctcccagagtgcgattttg

SEQ ID NO: 5635480 - DNA, 25 bp, Homo sapien
caggcatgagcgacctcatgggtgt

SEQ ID NO: 5635481 - DNA, 25 bp, Homo sapien
tcatgggtgtagattttgcgaacag

SEQ ID NO: 5635482 - DNA, 25 bp, Homo sapien
ttaaatcgttttgggatgcggcaag

SEQ ID NO: 5635483 - DNA, 25 bp, Homo sapien
cagaatcttggcccccctgcacctt

SEQ ID NO: 5635484 - DNA, 25 bp, Homo sapien
gatgatattgggctgctttgttgtc

SEQ ID NO: 5635485 - DNA, 25 bp, Homo sapien
ggcattacaggcacgcgtcatcgtg

SEQ ID NO: 5635486 - DNA, 25 bp, Homo sapien
atctcagttcgccacaacctctacc

SEQ ID NO: 5635487 - DNA, 25 bp, Homo sapien
agttaatagccatcatgacaacccc

SEQ ID NO: 5635488 - DNA, 25 bp, Homo sapien
gatgcggcaagcaacacataagtta

SEQ ID NO: 5635489 - DNA, 25 bp, Homo sapien
ttatacctcgatgtgagtcacctta

SEQ ID NO: 5635490 - DNA, 25 bp, Homo sapien
ttgcgaacagataaaggtagatgat

SEQ ID NO: 5635491 - DNA, 25 bp, Homo sapien
caaaaaggaaagaagacacctagta

SEQ ID NO: 5635492 - DNA, 25 bp, Homo sapien
tactaggtgtcttctttcctttttg

SEQ ID NO: 5635493 - DNA, 25 bp, Homo sapien
agcggagttgtcctctctgcccctc

SEQ ID NO: 5635494 - DNA, 25 bp, Homo sapien
tgaggctgtgctaccccccacttgg

SEQ ID NO: 5635495 - DNA, 25 bp, Homo sapien
gccaaagcggagttgtcctctctgc

SEQ ID NO: 5635496 - DNA, 25 bp, Homo sapien
accagtctgggctacctgatttcct

SEQ ID NO: 5635497 - DNA, 25 bp, Homo sapien
ccttgctgtccccccaccaggccag

SEQ ID NO: 5635498 - DNA, 25 bp, Homo sapien
ccacgacccttcccccagactctgc

SEQ ID NO: 5635499 - DNA, 25 bp, Homo sapien
catagattccccctacaatggatgt

SEQ ID NO: 5635500 - DNA, 25 bp, Homo sapien
ggaacactagactgcccaaggtcag

SEQ ID NO: 5635501 - DNA, 25 bp, Homo sapien
gatttcctggtctatatgctgcagc

SEQ ID NO: 5635502 - DNA, 25 bp, Homo sapien
ctggggaagcagaatcatagattcc

SEQ ID NO: 5635503 - DNA, 25 bp, Homo sapien
ataacaagggaccttgctgtccccc

SEQ ID NO: 5635504 - DNA, 25 bp, Homo sapien
tgaattaggtcaataacaatcataa

SEQ ID NO: 5635505 - DNA, 25 bp, Homo sapien
agtgtaatgggtagataattctgcc

SEQ ID NO: 5635506 - DNA, 25 bp, Homo sapien
catattagagaacccctggaattgt

SEQ ID NO: 5635507 - DNA, 25 bp, Homo sapien
agggactgtgctaagtactcatgac

SEQ ID NO: 5635508 - DNA, 25 bp, Homo sapien
aacagaagcaataatgctaacatgg

SEQ ID NO: 5635509 - DNA, 25 bp, Homo sapien
gcaccatccatggaagggattcagt

SEQ ID NO: 5635510 - DNA, 25 bp, Homo sapien
tgttagactatgggtgccttaagtt

SEQ ID NO: 5635511 - DNA, 25 bp, Homo sapien
atgtttattgtgtcagggactgtgc

SEQ ID NO: 5635512 - DNA, 25 bp, Homo sapien
taattcaattcaaccaaagtgtgct

SEQ ID NO: 5635513 - DNA, 25 bp, Homo sapien
tgaggggcatctctaaacagaagca

SEQ ID NO: 5635514 - DNA, 25 bp, Homo sapien
acagtcctatgaatgaggggcatct

SEQ ID NO: 5635515 - DNA, 25 bp, Homo sapien
ctgaacatcaggaaaacattccacc

SEQ ID NO: 5635516 - DNA, 25 bp, Homo sapien
acttgagaaatggaaaaaacaagtc

SEQ ID NO: 5635517 - DNA, 25 bp, Homo sapien
aaagggaccccaatgcctagatgtc

SEQ ID NO: 5635518 - DNA, 25 bp, Homo sapien
cttttcttctgcaaggagggaggca

SEQ ID NO: 5635519 - DNA, 25 bp, Homo sapien
cacctgaatctttaaagggacccca

SEQ ID NO: 5635520 - DNA, 25 bp, Homo sapien
aacaagtcacttacaaatgaggctg

SEQ ID NO: 5635521 - DNA, 25 bp, Homo sapien
gcaggcaggaagaatcctgaacatc

SEQ ID NO: 5635522 - DNA, 25 bp, Homo sapien
cttacaaatgaggctgagacaaagg

SEQ ID NO: 5635523 - DNA, 25 bp, Homo sapien
tttatctaacacaatgacttcgctg

SEQ ID NO: 5635524 - DNA, 25 bp, Homo sapien
taacacaatgacttcgctgtacttc

SEQ ID NO: 5635525 - DNA, 25 bp, Homo sapien
gcggatcacttgagaaatggaaaaa

SEQ ID NO: 5635526 - DNA, 25 bp, Homo sapien
gaaaagtttagagccatagagagac

SEQ ID NO: 5635527 - DNA, 25 bp, Homo sapien
ggtcagcaaaatatggcccaaaggc

SEQ ID NO: 5635528 - DNA, 25 bp, Homo sapien
tcatgcacataaggaaactaaggtt

SEQ ID NO: 5635529 - DNA, 25 bp, Homo sapien
tacaagtctgtggccgctttcacgc

SEQ ID NO: 5635530 - DNA, 25 bp, Homo sapien
tgagagatctgaactcaggaagtct

SEQ ID NO: 5635531 - DNA, 25 bp, Homo sapien
actgaagttgtataaaggctgggca

SEQ ID NO: 5635532 - DNA, 25 bp, Homo sapien
ttggccaaggtcagatagctagtta

SEQ ID NO: 5635533 - DNA, 25 bp, Homo sapien
aggtaggcagcatttatgaaaacgc

SEQ ID NO: 5635534 - DNA, 25 bp, Homo sapien
gactttgagcatacttggccaaggt

SEQ ID NO: 5635535 - DNA, 25 bp, Homo sapien
attgagtacttgcaacagagactac

SEQ ID NO: 5635536 - DNA, 25 bp, Homo sapien
catagagagacagattaaccagaaa

SEQ ID NO: 5635537 - DNA, 25 bp, Homo sapien
ttttgagagctttggaaactgaatt

SEQ ID NO: 5635538 - DNA, 25 bp, Homo sapien
ttgagtcgttggaactgtaagccac

SEQ ID NO: 5635539 - DNA, 25 bp, Homo sapien
taacatacagcgtttaacacgaacc

SEQ ID NO: 5635540 - DNA, 25 bp, Homo sapien
aacacgaacctgatacctgtagaaa

SEQ ID NO: 5635541 - DNA, 25 bp, Homo sapien
gagtatcgggacaattgagtcgttg

SEQ ID NO: 5635542 - DNA, 25 bp, Homo sapien
atcgggacaattgagtcgttggaac

SEQ ID NO: 5635543 - DNA, 25 bp, Homo sapien
cgccccaaaccgcatcactccgtac

SEQ ID NO: 5635544 - DNA, 25 bp, Homo sapien
ggaaactgaattaaaatgtctacac

SEQ ID NO: 5635545 - DNA, 25 bp, Homo sapien
atacctgtagaaagaactgagtatc

SEQ ID NO: 5635546 - DNA, 25 bp, Homo sapien
tgaaaatggtgcaaaagtttcattc

SEQ ID NO: 5635547 - DNA, 25 bp, Homo sapien
gttggaactgtaagccacgccccaa

SEQ ID NO: 5635548 - DNA, 25 bp, Homo sapien
gttgcaatcttgggcaggaaaatca

SEQ ID NO: 5635549 - DNA, 25 bp, Homo sapien
ctaaaagcagctagcaataagatta

SEQ ID NO: 5635550 - DNA, 25 bp, Homo sapien
agaaagtgaccattccttgaagtgc

SEQ ID NO: 5635551 - DNA, 25 bp, Homo sapien
tctaaacagtctgtagttctacata

SEQ ID NO: 5635552 - DNA, 25 bp, Homo sapien
aacagtctcagcattctaaacagtc

SEQ ID NO: 5635553 - DNA, 25 bp, Homo sapien
gttgttgcaatcttgggcaggaaaa

SEQ ID NO: 5635554 - DNA, 25 bp, Homo sapien
gaccattccttgaagtgctactgtt

SEQ ID NO: 5635555 - DNA, 25 bp, Homo sapien
aagcagctagcaataagattatggc

SEQ ID NO: 5635556 - DNA, 25 bp, Homo sapien
caagaaaagacttttgctaaaagca

SEQ ID NO: 5635557 - DNA, 25 bp, Homo sapien
tttgttgttgcaatcttgggcagga

SEQ ID NO: 5635558 - DNA, 25 bp, Homo sapien
agattatggctatcaaaccagtttc

SEQ ID NO: 5635559 - DNA, 25 bp, Homo sapien
cagaaagagcaatgccaccaacatc

SEQ ID NO: 5635560 - DNA, 25 bp, Homo sapien
cagaaagtgaaataactaactgccc

SEQ ID NO: 5635561 - DNA, 25 bp, Homo sapien
aaatgaaacatgagtcacctcgtag

SEQ ID NO: 5635562 - DNA, 25 bp, Homo sapien
cacctcgtaggatataagaatcttc

SEQ ID NO: 5635563 - DNA, 25 bp, Homo sapien
caggatttcccatgctcgagttgtt

SEQ ID NO: 5635564 - DNA, 25 bp, Homo sapien
aactgcatggaagattaccaaagtt

SEQ ID NO: 5635565 - DNA, 25 bp, Homo sapien
gcttgtgacttgcaagggaacactg

SEQ ID NO: 5635566 - DNA, 25 bp, Homo sapien
ccattcgggcataaatgggcaaagt

SEQ ID NO: 5635567 - DNA, 25 bp, Homo sapien
gagtcttgcattacaccattcgggc

SEQ ID NO: 5635568 - DNA, 25 bp, Homo sapien
tgcaaatgtgatagagtgaatgaaa

SEQ ID NO: 5635569 - DNA, 25 bp, Homo sapien
tgcaagggaacactgcaaactgcat

SEQ ID NO: 5635570 - DNA, 25 bp, Homo sapien
cagattatccaaagatgtatcacac

SEQ ID NO: 5635571 - DNA, 25 bp, Homo sapien
gctgccacaggtttttaatagataa

SEQ ID NO: 5635572 - DNA, 25 bp, Homo sapien
tcaactatatgccaccacaagagaa

SEQ ID NO: 5635573 - DNA, 25 bp, Homo sapien
tagataatgcaaatgacaatcaact

SEQ ID NO: 5635574 - DNA, 25 bp, Homo sapien
gcaagaagacactagaacatatggt

SEQ ID NO: 5635575 - DNA, 25 bp, Homo sapien
actagaacatatggtcaataatacc

SEQ ID NO: 5635576 - DNA, 25 bp, Homo sapien
taccacaacttacgaatatgatttc

SEQ ID NO: 5635577 - DNA, 25 bp, Homo sapien
taaatctgcaagaagacactagaac

SEQ ID NO: 5635578 - DNA, 25 bp, Homo sapien
caataataccatgagctgccacagg

SEQ ID NO: 5635579 - DNA, 25 bp, Homo sapien
tctcatacgtatcaaggaagaaaaa

SEQ ID NO: 5635580 - DNA, 25 bp, Homo sapien
tataaatcgaatcatgaatacactg

SEQ ID NO: 5635581 - DNA, 25 bp, Homo sapien
gtgcagcaatggccttgaagtaaac

SEQ ID NO: 5635582 - DNA, 25 bp, Homo sapien
acacagtgatcttgcagtcatagtc

SEQ ID NO: 5635583 - DNA, 25 bp, Homo sapien
cacgtagaggcagacctgcttcagt

SEQ ID NO: 5635584 - DNA, 25 bp, Homo sapien
ctgcttcagtggcaggaaatacagg

SEQ ID NO: 5635585 - DNA, 25 bp, Homo sapien
aaggacaaccgaatctctcttgact

SEQ ID NO: 5635586 - DNA, 25 bp, Homo sapien
ttccatcagcgttaagaggattgct

SEQ ID NO: 5635587 - DNA, 25 bp, Homo sapien
tctaccatctagctccccaggccac

SEQ ID NO: 5635588 - DNA, 25 bp, Homo sapien
aagaggattgctactggatcacaaa

SEQ ID NO: 5635589 - DNA, 25 bp, Homo sapien
aatggatgcaataacaatcttggtc

SEQ ID NO: 5635590 - DNA, 25 bp, Homo sapien
tggatcacaaaagccgcaccaagga

SEQ ID NO: 5635591 - DNA, 25 bp, Homo sapien
agaggctacaggaatccacaaaacc

SEQ ID NO: 5635592 - DNA, 25 bp, Homo sapien
attctgatagctcccaaataactta

SEQ ID NO: 5635593 - DNA, 25 bp, Homo sapien
agccaccatgcctgagtttagattt

SEQ ID NO: 5635594 - DNA, 25 bp, Homo sapien
agttacaagtgtcaggctctgttaa

SEQ ID NO: 5635595 - DNA, 25 bp, Homo sapien
gttcctaggctcaggccttcctccc

SEQ ID NO: 5635596 - DNA, 25 bp, Homo sapien
tctgacagctaatagatagataata

SEQ ID NO: 5635597 - DNA, 25 bp, Homo sapien
cacagttcaggaccctcagtaagct

SEQ ID NO: 5635598 - DNA, 25 bp, Homo sapien
caccttgagttcctaggctcaggcc

SEQ ID NO: 5635599 - DNA, 25 bp, Homo sapien
gtcaggctctgttaaagctctaggc

SEQ ID NO: 5635600 - DNA, 25 bp, Homo sapien
taaagctctaggcaaacacagataa

SEQ ID NO: 5635601 - DNA, 25 bp, Homo sapien
aaatcagacccaaacccctgccttc

SEQ ID NO: 5635602 - DNA, 25 bp, Homo sapien
aggcaaacacagataaatcagaccc

SEQ ID NO: 5635603 - DNA, 25 bp, Homo sapien
ggccatcaggtcacccggcttccca

SEQ ID NO: 5635604 - DNA, 25 bp, Homo sapien
cacagtagcttggataggagtgtgg

SEQ ID NO: 5635605 - DNA, 25 bp, Homo sapien
ttgcacgccagccttggcccctggc

SEQ ID NO: 5635606 - DNA, 25 bp, Homo sapien
agctttacagggcttggtgtgagta

SEQ ID NO: 5635607 - DNA, 25 bp, Homo sapien
ggcagctagctatggccacagttgc

SEQ ID NO: 5635608 - DNA, 25 bp, Homo sapien
gtaaactcataaagggcagctagct

SEQ ID NO: 5635609 - DNA, 25 bp, Homo sapien
cccaagtaccaaccagcaagggtgg

SEQ ID NO: 5635610 - DNA, 25 bp, Homo sapien
agtgccatcagagttcccaagtacc

SEQ ID NO: 5635611 - DNA, 25 bp, Homo sapien
ggtggaagagctcttacacacaaat

SEQ ID NO: 5635612 - DNA, 25 bp, Homo sapien
tcattttccgaggtggccatcaggt

SEQ ID NO: 5635613 - DNA, 25 bp, Homo sapien
ggggacagccctttgtaaactcata

SEQ ID NO: 5635614 - DNA, 25 bp, Homo sapien
catacagtgtttcggagctgatggc

SEQ ID NO: 5635615 - DNA, 25 bp, Homo sapien
ccaacatcacacagctagcagtata

SEQ ID NO: 5635616 - DNA, 25 bp, Homo sapien
cctgagtgtgctgccccttgtagtt

SEQ ID NO: 5635617 - DNA, 25 bp, Homo sapien
ccttccacaggaatgatgcagtcct

SEQ ID NO: 5635618 - DNA, 25 bp, Homo sapien
ggctcccaaaccactgcactgacct

SEQ ID NO: 5635619 - DNA, 25 bp, Homo sapien
aagagatgcattctgccctggtctt

SEQ ID NO: 5635620 - DNA, 25 bp, Homo sapien
ccttatccaggaaagccaagagaaa

SEQ ID NO: 5635621 - DNA, 25 bp, Homo sapien
cttaattccctgagtgtgctgcccc

SEQ ID NO: 5635622 - DNA, 25 bp, Homo sapien
cttgtagttgccacctatgagatag

SEQ ID NO: 5635623 - DNA, 25 bp, Homo sapien
cactgacctgcctttatgaacactg

SEQ ID NO: 5635624 - DNA, 25 bp, Homo sapien
cttgtctcctgcaggcacactccgg

SEQ ID NO: 5635625 - DNA, 25 bp, Homo sapien
gggtgcgtccccacactcgccctga

SEQ ID NO: 5635626 - DNA, 25 bp, Homo sapien
tcagggcgagtgtggggacgcaccc

SEQ ID NO: 5635627 - DNA, 25 bp, Homo sapien
ggcttccccgctggggttgtctgac

SEQ ID NO: 5635628 - DNA, 25 bp, Homo sapien
aagagtgattttggaggagtcacac

SEQ ID NO: 5635629 - DNA, 25 bp, Homo sapien
ggaagggctgacctcaggattttat

SEQ ID NO: 5635630 - DNA, 25 bp, Homo sapien
tgtctgacgcgaacgccttcctggc

SEQ ID NO: 5635631 - DNA, 25 bp, Homo sapien
tgacctccataacagcagacaaaat

SEQ ID NO: 5635632 - DNA, 25 bp, Homo sapien
gaagcagcatcatcagcgaactgtg

SEQ ID NO: 5635633 - DNA, 25 bp, Homo sapien
tggaggagtcacacttagatgtttc

SEQ ID NO: 5635634 - DNA, 25 bp, Homo sapien
acaaggattcatggatggaaaactg

SEQ ID NO: 5635635 - DNA, 25 bp, Homo sapien
actgagactcagagaatgatcacat

SEQ ID NO: 5635636 - DNA, 25 bp, Homo sapien
gacaaaattggaagcaagagtgatt

SEQ ID NO: 5635637 - DNA, 25 bp, Homo sapien
ctcgtgacagtcctacatgaaaaat

SEQ ID NO: 5635638 - DNA, 25 bp, Homo sapien
gctcaagggatgctcccactcagcc

SEQ ID NO: 5635639 - DNA, 25 bp, Homo sapien
ggaactacaagtgtacactgtgcca

SEQ ID NO: 5635640 - DNA, 25 bp, Homo sapien
aggcaaattgcctaggtgctctgtt

SEQ ID NO: 5635641 - DNA, 25 bp, Homo sapien
aagatctcagcaagctctcaactcc

SEQ ID NO: 5635642 - DNA, 25 bp, Homo sapien
gacaaggcattggcttaaatgatcc

SEQ ID NO: 5635643 - DNA, 25 bp, Homo sapien
cactgtgccatgcttgatttgcctt

SEQ ID NO: 5635644 - DNA, 25 bp, Homo sapien
ctccgctataagacaaggcattggc

SEQ ID NO: 5635645 - DNA, 25 bp, Homo sapien
ttttagggataccgaaggacataca

SEQ ID NO: 5635646 - DNA, 25 bp, Homo sapien
aggaaaagccaagacgaaattgaaa

SEQ ID NO: 5635647 - DNA, 25 bp, Homo sapien
ccgaaggacatacagtgcaatacaa

SEQ ID NO: 5635648 - DNA, 25 bp, Homo sapien
tcaagtcctggattgtgtgcaaaaa

SEQ ID NO: 5635649 - DNA, 25 bp, Homo sapien
agctgggccttgaaagcccaaagga

SEQ ID NO: 5635650 - DNA, 25 bp, Homo sapien
tcttgcaggtcacatttctctggac

SEQ ID NO: 5635651 - DNA, 25 bp, Homo sapien
accagagtgggttgccctatccctt

SEQ ID NO: 5635652 - DNA, 25 bp, Homo sapien
attcctgagtgacccattgtgtatt

SEQ ID NO: 5635653 - DNA, 25 bp, Homo sapien
agacaagctcactgactccgagggc

SEQ ID NO: 5635654 - DNA, 25 bp, Homo sapien
gaggagctaatactttagctgggcc

SEQ ID NO: 5635655 - DNA, 25 bp, Homo sapien
ttgtgtattaggtcccagcaaaaac

SEQ ID NO: 5635656 - DNA, 25 bp, Homo sapien
ggtccttttggacaaggaggcagca

SEQ ID NO: 5635657 - DNA, 25 bp, Homo sapien
aaaacacaaagacaagctcactgac

SEQ ID NO: 5635658 - DNA, 25 bp, Homo sapien
tctggacccattttaattgcaattc

SEQ ID NO: 5635659 - DNA, 25 bp, Homo sapien
atgggatcttagagatggaaataaa

SEQ ID NO: 5635660 - DNA, 25 bp, Homo sapien
cgtagcccagcttatggtcttcatt

SEQ ID NO: 5635661 - DNA, 25 bp, Homo sapien
gtttcagtacaagctgaagcagaac

SEQ ID NO: 5635662 - DNA, 25 bp, Homo sapien
ggtggcaactcgggcctgtcttcat

SEQ ID NO: 5635663 - DNA, 25 bp, Homo sapien
tttgcctccgcaccagcgctcaggc

SEQ ID NO: 5635664 - DNA, 25 bp, Homo sapien
gagctgaaatgcaagcagcattccc

SEQ ID NO: 5635665 - DNA, 25 bp, Homo sapien
tcttcatttgcctggatggacgagc

SEQ ID NO: 5635666 - DNA, 25 bp, Homo sapien
gaactccatgatgctgtgcctgagc

SEQ ID NO: 5635667 - DNA, 25 bp, Homo sapien
gcccctcgtcctgagggaccgtagc

SEQ ID NO: 5635668 - DNA, 25 bp, Homo sapien
aacaaggcatgttctgaagtgcgtt

SEQ ID NO: 5635669 - DNA, 25 bp, Homo sapien
gtgaaatccacatagcagtggtctt

SEQ ID NO: 5635670 - DNA, 25 bp, Homo sapien
agcattccctgtgtgcccctcgtcc

SEQ ID NO: 5635671 - DNA, 25 bp, Homo sapien
tatgtagctacagcataatatgcta

SEQ ID NO: 5635672 - DNA, 25 bp, Homo sapien
gaaataagacataaaacattccaaa

SEQ ID NO: 5635673 - DNA, 25 bp, Homo sapien
tatgcccatgcatgttgttatactt

SEQ ID NO: 5635674 - DNA, 25 bp, Homo sapien
ttcttgtctatggacattgaggtta

SEQ ID NO: 5635675 - DNA, 25 bp, Homo sapien
gaaaagtacagaggataatacaaca

SEQ ID NO: 5635676 - DNA, 25 bp, Homo sapien
tccaggtacccaccacccagcattt

SEQ ID NO: 5635677 - DNA, 25 bp, Homo sapien
tttgattcaggtagcttaagtttat

SEQ ID NO: 5635678 - DNA, 25 bp, Homo sapien
cttttcccagaagtgaacatttctc

SEQ ID NO: 5635679 - DNA, 25 bp, Homo sapien
tacaacaaatatccaggtacccacc

SEQ ID NO: 5635680 - DNA, 25 bp, Homo sapien
ccctatcaccgaggatcctgcatcc

SEQ ID NO: 5635681 - DNA, 25 bp, Homo sapien
ccaaataccctatcaccgaggatcc

SEQ ID NO: 5635682 - DNA, 25 bp, Homo sapien
cctaccgtccactcccggagaagta

SEQ ID NO: 5635683 - DNA, 25 bp, Homo sapien
tacttctccgggagtggacggtagg

SEQ ID NO: 5635684 - DNA, 25 bp, Homo sapien
gagggccactgatactcctaccgtc

SEQ ID NO: 5635685 - DNA, 25 bp, Homo sapien
gacggtaggagtatcagtggccctc

SEQ ID NO: 5635686 - DNA, 25 bp, Homo sapien
gcatatagggaacctaccgagtgtc

SEQ ID NO: 5635687 - DNA, 25 bp, Homo sapien
gtgtcaagcactggtggaaacaaga

SEQ ID NO: 5635688 - DNA, 25 bp, Homo sapien
cagtgaccagtgatagatcagtgat

SEQ ID NO: 5635689 - DNA, 25 bp, Homo sapien
ttcctcacctgaggggaaatcacag

SEQ ID NO: 5635690 - DNA, 25 bp, Homo sapien
gcactgctgtgaaacctacactacc

SEQ ID NO: 5635691 - DNA, 25 bp, Homo sapien
tatgtaagacctaagctgcactgct

SEQ ID NO: 5635692 - DNA, 25 bp, Homo sapien
aaccacggagaaaaatatcagtgat

SEQ ID NO: 5635693 - DNA, 25 bp, Homo sapien
gatggaaaacaactgcccgatgatt

SEQ ID NO: 5635694 - DNA, 25 bp, Homo sapien
atgattttagatttgagagtgacac

SEQ ID NO: 5635695 - DNA, 25 bp, Homo sapien
acaagaaggaataaggctcctgctg

SEQ ID NO: 5635696 - DNA, 25 bp, Homo sapien
ccaaacaaggatatgatggaaaaca

SEQ ID NO: 5635697 - DNA, 25 bp, Homo sapien
tgtgctcgccgcgtgactcagctaa

SEQ ID NO: 5635698 - DNA, 25 bp, Homo sapien
ttttccatacctgggcagagggaag

SEQ ID NO: 5635699 - DNA, 25 bp, Homo sapien
acagccttgtttatagtaaaggtga

SEQ ID NO: 5635700 - DNA, 25 bp, Homo sapien
tcaggaaaggaacagtttattgaaa

SEQ ID NO: 5635701 - DNA, 25 bp, Homo sapien
actcagctaatgctaccggggttgg

SEQ ID NO: 5635702 - DNA, 25 bp, Homo sapien
ccttttccatacctgggcagaggga

SEQ ID NO: 5635703 - DNA, 25 bp, Homo sapien
aaaggtgaatgacatgattccactt

SEQ ID NO: 5635704 - DNA, 25 bp, Homo sapien
actttacacgataatgaaaaaactc

SEQ ID NO: 5635705 - DNA, 25 bp, Homo sapien
acaaatctgttgtgtgctcgccgcg

SEQ ID NO: 5635706 - DNA, 25 bp, Homo sapien
agctgctacaaatctgttgtgtgct

SEQ ID NO: 5635707 - DNA, 25 bp, Homo sapien
tagtaaaggtgaatgacatgattcc

SEQ ID NO: 5635708 - DNA, 25 bp, Homo sapien
ctttcctgaacaatgagggaagggt

SEQ ID NO: 5635709 - DNA, 25 bp, Homo sapien
cagaaaaatcgaaacaggaaaacaa

SEQ ID NO: 5635710 - DNA, 25 bp, Homo sapien
aggaaaacaaaagattcaggagcct

SEQ ID NO: 5635711 - DNA, 25 bp, Homo sapien
ggaccgtgatgagtagttcctcgca

SEQ ID NO: 5635712 - DNA, 25 bp, Homo sapien
tgcagttacacagccccctccatcc

SEQ ID NO: 5635713 - DNA, 25 bp, Homo sapien
actgtcacgtggcctaagctttcct

SEQ ID NO: 5635714 - DNA, 25 bp, Homo sapien
cctccatccaggaccgtgatgagta

SEQ ID NO: 5635715 - DNA, 25 bp, Homo sapien
gtagttcctcgcagggctccctgga

SEQ ID NO: 5635716 - DNA, 25 bp, Homo sapien
aagcagctgctgacataatcattgt

SEQ ID NO: 5635717 - DNA, 25 bp, Homo sapien
aaagattcaggagcttggattctca

SEQ ID NO: 5635718 - DNA, 25 bp, Homo sapien
taaaagagatgagtagtcctagaaa

SEQ ID NO: 5635719 - DNA, 25 bp, Homo sapien
agccaatgaagaaacttccagactc

SEQ ID NO: 5635720 - DNA, 25 bp, Homo sapien
tacaaaaataggcagtattctttct

SEQ ID NO: 5635721 - DNA, 25 bp, Homo sapien
gaatgtaagaagccaatgaagaaac

SEQ ID NO: 5635722 - DNA, 25 bp, Homo sapien
ttgcaaacaagtagtttccacagtc

SEQ ID NO: 5635723 - DNA, 25 bp, Homo sapien
agtgtcacaggccaagcacagtaaa

SEQ ID NO: 5635724 - DNA, 25 bp, Homo sapien
tccatgaaattaagtgtcacaggcc

SEQ ID NO: 5635725 - DNA, 25 bp, Homo sapien
tggtttccaataaagcaatgactat

SEQ ID NO: 5635726 - DNA, 25 bp, Homo sapien
tagattttagaaggagcagtaagtt

SEQ ID NO: 5635727 - DNA, 25 bp, Homo sapien
ttgtgactagcaaagttggaatgta

SEQ ID NO: 5635728 - DNA, 25 bp, Homo sapien
gtctcttttacaaaggccttgtgac

SEQ ID NO: 5635729 - DNA, 25 bp, Homo sapien
aaggccttgtgactagcaaagttgg

SEQ ID NO: 5635730 - DNA, 25 bp, Homo sapien
ctgtaaggtagggatccattttttc

SEQ ID NO: 5635731 - DNA, 25 bp, Homo sapien
tataaaaccagaggtctactgccag

SEQ ID NO: 5635732 - DNA, 25 bp, Homo sapien
ggtcataaagatattgccctgtatt

SEQ ID NO: 5635733 - DNA, 25 bp, Homo sapien
gcagatattaacacaaatgccagtg

SEQ ID NO: 5635734 - DNA, 25 bp, Homo sapien
atatagcaaacaacaggctcaaacc

SEQ ID NO: 5635735 - DNA, 25 bp, Homo sapien
ggtctactgccagaggaaaagaact

SEQ ID NO: 5635736 - DNA, 25 bp, Homo sapien
cctttatgagctgtagttcttgttt

SEQ ID NO: 5635737 - DNA, 25 bp, Homo sapien
tgcatatactgtaaggtagggatcc

SEQ ID NO: 5635738 - DNA, 25 bp, Homo sapien
gaaaagaactccttcaagataccag

SEQ ID NO: 5635739 - DNA, 25 bp, Homo sapien
cctgtgaaggtaaaagtattgctct

SEQ ID NO: 5635740 - DNA, 25 bp, Homo sapien
agatgaatgtaaatctaagcagatc

SEQ ID NO: 5635741 - DNA, 25 bp, Homo sapien
actcgtagctgcaacaaaactctcc

SEQ ID NO: 5635742 - DNA, 25 bp, Homo sapien
tagtgcttacttttggattggaaca

SEQ ID NO: 5635743 - DNA, 25 bp, Homo sapien
cataaaatgagacttagtgcttact

SEQ ID NO: 5635744 - DNA, 25 bp, Homo sapien
gaagtctaacacaaacaaagctatt

SEQ ID NO: 5635745 - DNA, 25 bp, Homo sapien
gtaagtaaatctcagttgtctagac

SEQ ID NO: 5635746 - DNA, 25 bp, Homo sapien
aagaaatggtggtctcataaaatga

SEQ ID NO: 5635747 - DNA, 25 bp, Homo sapien
gtgatattaagaaatggtggtctca

SEQ ID NO: 5635748 - DNA, 25 bp, Homo sapien
tttcagatatggcagaaagacaaag

SEQ ID NO: 5635749 - DNA, 25 bp, Homo sapien
cttttggattggaacaagttcaaag

SEQ ID NO: 5635750 - DNA, 25 bp, Homo sapien
aatacaagtagaagtgaagtctaac

SEQ ID NO: 5635751 - DNA, 25 bp, Homo sapien
catacaaactcgtagctgcaacaaa

SEQ ID NO: 5635752 - DNA, 25 bp, Homo sapien
tgaccctggattctgctctcagccc

SEQ ID NO: 5635753 - DNA, 25 bp, Homo sapien
tgctcagagctgaaaaaaacctgct

SEQ ID NO: 5635754 - DNA, 25 bp, Homo sapien
gagtgggtgctgttcccgaatgtac

SEQ ID NO: 5635755 - DNA, 25 bp, Homo sapien
gcctgggaatcagacatgaccctgg

SEQ ID NO: 5635756 - DNA, 25 bp, Homo sapien
gacctcaaaactggacaacatgaac

SEQ ID NO: 5635757 - DNA, 25 bp, Homo sapien
catcctactgcaggcctgtgtggct

SEQ ID NO: 5635758 - DNA, 25 bp, Homo sapien
gtgatccacatggccagccccaacc

SEQ ID NO: 5635759 - DNA, 25 bp, Homo sapien
gtacccattcgacaggtgagacatc

SEQ ID NO: 5635760 - DNA, 25 bp, Homo sapien
ttcccctcatgaggcccaagtgatc

SEQ ID NO: 5635761 - DNA, 25 bp, Homo sapien
tcctcatggtggcttcgtagagtgg

SEQ ID NO: 5635762 - DNA, 25 bp, Homo sapien
ctcaccccaaggctgcctgatatgc

SEQ ID NO: 5635763 - DNA, 25 bp, Homo sapien
gagccagaattgtctcaaagcgtac

SEQ ID NO: 5635764 - DNA, 25 bp, Homo sapien
agataaaaattctgacggagggatt

SEQ ID NO: 5635765 - DNA, 25 bp, Homo sapien
acaagcctcgagggctttgagtaga

SEQ ID NO: 5635766 - DNA, 25 bp, Homo sapien
tgatgcttttgaccttgcgcttccc

SEQ ID NO: 5635767 - DNA, 25 bp, Homo sapien
ggagggatttgtggacttgattttc

SEQ ID NO: 5635768 - DNA, 25 bp, Homo sapien
gttagcaagtttatactgatccatc

SEQ ID NO: 5635769 - DNA, 25 bp, Homo sapien
tcctcaggttctacagagccagaat

SEQ ID NO: 5635770 - DNA, 25 bp, Homo sapien
attaagattaggaaagtctctgagc

SEQ ID NO: 5635771 - DNA, 25 bp, Homo sapien
aggcctgcgaggtgtttacaagcct

SEQ ID NO: 5635772 - DNA, 25 bp, Homo sapien
ccagaaaggattaagattaggaaag

SEQ ID NO: 5635773 - DNA, 25 bp, Homo sapien
tttaagtgattcctggtatccagaa

SEQ ID NO: 5635774 - DNA, 25 bp, Homo sapien
cccccgtgagggtgcccgacaccac

SEQ ID NO: 5635775 - DNA, 25 bp, Homo sapien
gtggtgtcgggcaccctcacggggg

SEQ ID NO: 5635776 - DNA, 25 bp, Homo sapien
gtgatgctgggacaggtccctcaac

SEQ ID NO: 5635777 - DNA, 25 bp, Homo sapien
aatgtgaatggcctgtgctcaaaca

SEQ ID NO: 5635778 - DNA, 25 bp, Homo sapien
acaggtccctcaacttctctgagcc

SEQ ID NO: 5635779 - DNA, 25 bp, Homo sapien
ttaaaatgcaaacaacaaagggagc

SEQ ID NO: 5635780 - DNA, 25 bp, Homo sapien
agggagccaccctcatagggctgtt

SEQ ID NO: 5635781 - DNA, 25 bp, Homo sapien
ggcctgtgctcaaacaccaggtctg

SEQ ID NO: 5635782 - DNA, 25 bp, Homo sapien
gtgaatggcctgtgctcaaacacca

SEQ ID NO: 5635783 - DNA, 25 bp, Homo sapien
agaatacagggagttaccgatgttg

SEQ ID NO: 5635784 - DNA, 25 bp, Homo sapien
ctctgagcctcactcccagttcctt

SEQ ID NO: 5635785 - DNA, 25 bp, Homo sapien
aggcagtgagcaccctattgctgga

SEQ ID NO: 5635786 - DNA, 25 bp, Homo sapien
atcagccatgtgatgctgggacagg

SEQ ID NO: 5635787 - DNA, 25 bp, Homo sapien
caaaagaacataagcaattgatgaa

SEQ ID NO: 5635788 - DNA, 25 bp, Homo sapien
tctagttgaaatggagttgcaatgc

SEQ ID NO: 5635789 - DNA, 25 bp, Homo sapien
gttgcaatgcaagtctatacagagt

SEQ ID NO: 5635790 - DNA, 25 bp, Homo sapien
cacctaccctctaatgaagcattca

SEQ ID NO: 5635791 - DNA, 25 bp, Homo sapien
gttcagacactgatgacttcttcaa

SEQ ID NO: 5635792 - DNA, 25 bp, Homo sapien
taagcaattgatgaaagactgtcac

SEQ ID NO: 5635793 - DNA, 25 bp, Homo sapien
tatacagagtaaattttcaaaggat

SEQ ID NO: 5635794 - DNA, 25 bp, Homo sapien
cacttgctgagatcatatagctaat

SEQ ID NO: 5635795 - DNA, 25 bp, Homo sapien
tctgagtaaacattctagttgaaat

SEQ ID NO: 5635796 - DNA, 25 bp, Homo sapien
aaatagtttaaagaacagaatattc

SEQ ID NO: 5635797 - DNA, 25 bp, Homo sapien
gactaaatagctcaagttcagacac

SEQ ID NO: 5635798 - DNA, 25 bp, Homo sapien
ggcagttccagtccagatctaaaaa

SEQ ID NO: 5635799 - DNA, 25 bp, Homo sapien
ttttcataatgctggtcatgggacc

SEQ ID NO: 5635800 - DNA, 25 bp, Homo sapien
aaggatgtcctaaccctaactttca

SEQ ID NO: 5635801 - DNA, 25 bp, Homo sapien
ctccaggtgcccagcgactccctgg

SEQ ID NO: 5635802 - DNA, 25 bp, Homo sapien
gtgcctagcctgattacaaaaacca

SEQ ID NO: 5635803 - DNA, 25 bp, Homo sapien
cagatgtgtgccaccccgatgaact

SEQ ID NO: 5635804 - DNA, 25 bp, Homo sapien
gtgtgccaccccgatgaactaattt

SEQ ID NO: 5635805 - DNA, 25 bp, Homo sapien
ggagaggcatcgacgatacctccag

SEQ ID NO: 5635806 - DNA, 25 bp, Homo sapien
aggcatcgacgatacctccaggtgc

SEQ ID NO: 5635807 - DNA, 25 bp, Homo sapien
tggtcatgggacccttatcaatcct

SEQ ID NO: 5635808 - DNA, 25 bp, Homo sapien
cacactgtgtccttcccactctcgc

SEQ ID NO: 5635809 - DNA, 25 bp, Homo sapien
agggtgcattaatgctaactctgcc

SEQ ID NO: 5635810 - DNA, 25 bp, Homo sapien
atggtgattgccaggtcttgaggaa

SEQ ID NO: 5635811 - DNA, 25 bp, Homo sapien
caaactgcagttggataatggtctt

SEQ ID NO: 5635812 - DNA, 25 bp, Homo sapien
ggtgcctagatcaaagggtgcatta

SEQ ID NO: 5635813 - DNA, 25 bp, Homo sapien
acgcagagcctgtcttacctgcctc

SEQ ID NO: 5635814 - DNA, 25 bp, Homo sapien
ctagatcaaagggtgcattaatgct

SEQ ID NO: 5635815 - DNA, 25 bp, Homo sapien
ttacctgcctccaggtgcctagatc

SEQ ID NO: 5635816 - DNA, 25 bp, Homo sapien
cctgcctccaggtgcctagatcaaa

SEQ ID NO: 5635817 - DNA, 25 bp, Homo sapien
ttaatgctaactctgccaagcaaac

SEQ ID NO: 5635818 - DNA, 25 bp, Homo sapien
aactgcagttggataatggtcttaa

SEQ ID NO: 5635819 - DNA, 25 bp, Homo sapien
cctccaggtgcctagatcaaagggt

SEQ ID NO: 5635820 - DNA, 25 bp, Homo sapien
cttgtacatttggaaggaacagtaa

SEQ ID NO: 5635821 - DNA, 25 bp, Homo sapien
aaaatttcagctacttagagagtcc

SEQ ID NO: 5635822 - DNA, 25 bp, Homo sapien
tgtacatttggaaggaacagtaatt

SEQ ID NO: 5635823 - DNA, 25 bp, Homo sapien
caaccctttggtgcttacctgcatt

SEQ ID NO: 5635824 - DNA, 25 bp, Homo sapien
tcagctacttagagagtcctcaacc

SEQ ID NO: 5635825 - DNA, 25 bp, Homo sapien
ggaaggaacagtaattccaatccat

SEQ ID NO: 5635826 - DNA, 25 bp, Homo sapien
tgcttacctgcatttgggaaccaat

SEQ ID NO: 5635827 - DNA, 25 bp, Homo sapien
agagagtcctcaaccctttggtgct

SEQ ID NO: 5635828 - DNA, 25 bp, Homo sapien
tggtgcttacctgcatttgggaacc

SEQ ID NO: 5635829 - DNA, 25 bp, Homo sapien
cactgcactgcacacagcctcaatt

SEQ ID NO: 5635830 - DNA, 25 bp, Homo sapien
ctgcacacagcctcaattcatctat

SEQ ID NO: 5635831 - DNA, 25 bp, Homo sapien
tcagcaaaggatctttgggcaaggg

SEQ ID NO: 5635832 - DNA, 25 bp, Homo sapien
gcttcgctcagttgcagagcccctc

SEQ ID NO: 5635833 - DNA, 25 bp, Homo sapien
cgatccagcctcacgcctgagcagt

SEQ ID NO: 5635834 - DNA, 25 bp, Homo sapien
gctccacgtgtaaggatctggctga

SEQ ID NO: 5635835 - DNA, 25 bp, Homo sapien
gctctgacgtcaggctccagctttc

SEQ ID NO: 5635836 - DNA, 25 bp, Homo sapien
ttccagcctcctagcccgcagcttc

SEQ ID NO: 5635837 - DNA, 25 bp, Homo sapien
aacaacaaaagcaagcagcctcgaa

SEQ ID NO: 5635838 - DNA, 25 bp, Homo sapien
caaaaacagaacactcagcaaagga

SEQ ID NO: 5635839 - DNA, 25 bp, Homo sapien
cagcctcgaaccctacgatccagcc

SEQ ID NO: 5635840 - DNA, 25 bp, Homo sapien
gggtgatgtccgagttaaaagctct

SEQ ID NO: 5635841 - DNA, 25 bp, Homo sapien
gcctgagcagtctgcccgtatgagc

SEQ ID NO: 5635842 - DNA, 25 bp, Homo sapien
gaccactgcaccacattactgactc

SEQ ID NO: 5635843 - DNA, 25 bp, Homo sapien
atgaaagctggttaataattggtaa

SEQ ID NO: 5635844 - DNA, 25 bp, Homo sapien
aatatttaatggctcctagagggag

SEQ ID NO: 5635845 - DNA, 25 bp, Homo sapien
ctcaccacatctggaccactgcacc

SEQ ID NO: 5635846 - DNA, 25 bp, Homo sapien
gctgctgctactaaggttcagatcc

SEQ ID NO: 5635847 - DNA, 25 bp, Homo sapien
cttttggctggaaaagaacaatggt

SEQ ID NO: 5635848 - DNA, 25 bp, Homo sapien
ctaaaaatagagtgaaaggacttga

SEQ ID NO: 5635849 - DNA, 25 bp, Homo sapien
ttcctatttagaaacagagggcctg

SEQ ID NO: 5635850 - DNA, 25 bp, Homo sapien
ccgaccattgagacccgtaatatcc

SEQ ID NO: 5635851 - DNA, 25 bp, Homo sapien
tgaaaggacttgagaccagagataa

SEQ ID NO: 5635852 - DNA, 25 bp, Homo sapien
agaccagagataaccgaccattgag

SEQ ID NO: 5635853 - DNA, 25 bp, Homo sapien
tgggtgtttatatagagggtctcct

SEQ ID NO: 5635854 - DNA, 25 bp, Homo sapien
gagttggtgacatggcatctttgtc

SEQ ID NO: 5635855 - DNA, 25 bp, Homo sapien
catgcccccgtctgaggtacagtca

SEQ ID NO: 5635856 - DNA, 25 bp, Homo sapien
gtggagtgttcctacagtcagagct

SEQ ID NO: 5635857 - DNA, 25 bp, Homo sapien
gggggaaatacagctagtcaccagc

SEQ ID NO: 5635858 - DNA, 25 bp, Homo sapien
ggtacagtcactgcgccttgccctc

SEQ ID NO: 5635859 - DNA, 25 bp, Homo sapien
caccagactctgggtggtgtggttt

SEQ ID NO: 5635860 - DNA, 25 bp, Homo sapien
tcaccagctaccggacagctggagc

SEQ ID NO: 5635861 - DNA, 25 bp, Homo sapien
gggctattgctggtcacagtcgctg

SEQ ID NO: 5635862 - DNA, 25 bp, Homo sapien
ggctcaggatgtctgtgtgatgcct

SEQ ID NO: 5635863 - DNA, 25 bp, Homo sapien
ttcctgacaccagatgcctacccag

SEQ ID NO: 5635864 - DNA, 25 bp, Homo sapien
gtggatgtttacttgctggtggtct

SEQ ID NO: 5635865 - DNA, 25 bp, Homo sapien
acacagctttgcacagtggatgttt

SEQ ID NO: 5635866 - DNA, 25 bp, Homo sapien
taggtggtcattcggcaatcaactg

SEQ ID NO: 5635867 - DNA, 25 bp, Homo sapien
gccaccacagtgggttggtggtgag

SEQ ID NO: 5635868 - DNA, 25 bp, Homo sapien
ggtgagatgtttaccaacaggaggt

SEQ ID NO: 5635869 - DNA, 25 bp, Homo sapien
cagggccaaaagatgtctacactca

SEQ ID NO: 5635870 - DNA, 25 bp, Homo sapien
ggtggctctgaaaaagctgcaagtc

SEQ ID NO: 5635871 - DNA, 25 bp, Homo sapien
gactctagaaagctccaatcctccc

SEQ ID NO: 5635872 - DNA, 25 bp, Homo sapien
ctcatatgttgctgggactaaaggt

SEQ ID NO: 5635873 - DNA, 25 bp, Homo sapien
taagatcaacattggcagctgtgcc

SEQ ID NO: 5635874 - DNA, 25 bp, Homo sapien
ttcagtccaacccggcctgtgcttc

SEQ ID NO: 5635875 - DNA, 25 bp, Homo sapien
ggtgcgggatgcctgttcccacttg

SEQ ID NO: 5635876 - DNA, 25 bp, Homo sapien
ggcttgaaggcatgagcaaaataca

SEQ ID NO: 5635877 - DNA, 25 bp, Homo sapien
gagctgccaaagaaccagatgcttc

SEQ ID NO: 5635878 - DNA, 25 bp, Homo sapien
tatatataaggacgggacttggaaa

SEQ ID NO: 5635879 - DNA, 25 bp, Homo sapien
gactatgtgatagatgcaggagaaa

SEQ ID NO: 5635880 - DNA, 25 bp, Homo sapien
caatttggcggtgaaaaaccctgtg

SEQ ID NO: 5635881 - DNA, 25 bp, Homo sapien
acgtgaaaatgccaggaaccctttc

SEQ ID NO: 5635882 - DNA, 25 bp, Homo sapien
atgcccagaaactgggacgtgaaaa

SEQ ID NO: 5635883 - DNA, 25 bp, Homo sapien
agaggctttgcaagtgcaaacagac

SEQ ID NO: 5635884 - DNA, 25 bp, Homo sapien
tttggtctgaggccatgcaaaatga

SEQ ID NO: 5635885 - DNA, 25 bp, Homo sapien
gtgttactcccaggcttgaaggcat

SEQ ID NO: 5635886 - DNA, 25 bp, Homo sapien
aaggcactgcccctggctctaactt

SEQ ID NO: 5635887 - DNA, 25 bp, Homo sapien
ctgcagctgctgactttccaccctc

SEQ ID NO: 5635888 - DNA, 25 bp, Homo sapien
tacaaagtacatctagctgggaccc

SEQ ID NO: 5635889 - DNA, 25 bp, Homo sapien
agccttctacaaagtacatctagct

SEQ ID NO: 5635890 - DNA, 25 bp, Homo sapien
tttccaccctcagtcaaaagcacat

SEQ ID NO: 5635891 - DNA, 25 bp, Homo sapien
cctggctctaacttcttgggctgca

SEQ ID NO: 5635892 - DNA, 25 bp, Homo sapien
aaaaaagggaatagcacattaatcc

SEQ ID NO: 5635893 - DNA, 25 bp, Homo sapien
ggctgagcacacgcaggattatttt

SEQ ID NO: 5635894 - DNA, 25 bp, Homo sapien
gggaatagcacattaatcctggagt

SEQ ID NO: 5635895 - DNA, 25 bp, Homo sapien
tctacaaagtacatctagctgggac

SEQ ID NO: 5635896 - DNA, 25 bp, Homo sapien
tgatttctttagacccccaagcttc

SEQ ID NO: 5635897 - DNA, 25 bp, Homo sapien
gataccagctgcattgagtggcatc

SEQ ID NO: 5635898 - DNA, 25 bp, Homo sapien
tttccaacactcacaaaagcagcct

SEQ ID NO: 5635899 - DNA, 25 bp, Homo sapien
cctcagagacaccaacaaaacatct

SEQ ID NO: 5635900 - DNA, 25 bp, Homo sapien
ggtcctgagaatctgcagcagagac

SEQ ID NO: 5635901 - DNA, 25 bp, Homo sapien
ctgtggtgctacctccatggatacc

SEQ ID NO: 5635902 - DNA, 25 bp, Homo sapien
acccacccacctacagcttgcattc

SEQ ID NO: 5635903 - DNA, 25 bp, Homo sapien
tcccaagcctcaagtgtgatgcctg

SEQ ID NO: 5635904 - DNA, 25 bp, Homo sapien
gcctcatgggggtcccctcagagac

SEQ ID NO: 5635905 - DNA, 25 bp, Homo sapien
ttctgtctcctgcctggacccagac

SEQ ID NO: 5635906 - DNA, 25 bp, Homo sapien
taaaagagcttgtgtgatttctgtc

SEQ ID NO: 5635907 - DNA, 25 bp, Homo sapien
ctgagattcagccccatgtcccttc

SEQ ID NO: 5635908 - DNA, 25 bp, Homo sapien
gggagagaagtcatactgaactata

SEQ ID NO: 5635909 - DNA, 25 bp, Homo sapien
aacctattccagaggttgaggggag

SEQ ID NO: 5635910 - DNA, 25 bp, Homo sapien
acaaggtctcagtatcatttttctc

SEQ ID NO: 5635911 - DNA, 25 bp, Homo sapien
tttttaagagattgggtcatgcttt

SEQ ID NO: 5635912 - DNA, 25 bp, Homo sapien
tgtgcgcctccatgtccagctattc

SEQ ID NO: 5635913 - DNA, 25 bp, Homo sapien
tgaaaaatgaataatatgttgccat

SEQ ID NO: 5635914 - DNA, 25 bp, Homo sapien
ttacaggtgtgcgcctccatgtcca

SEQ ID NO: 5635915 - DNA, 25 bp, Homo sapien
atataggtatatatgaaacttgata

SEQ ID NO: 5635916 - DNA, 25 bp, Homo sapien
cattaagggctctaatcagaaattc

SEQ ID NO: 5635917 - DNA, 25 bp, Homo sapien
tataccagtgttaagccaatgttac

SEQ ID NO: 5635918 - DNA, 25 bp, Homo sapien
agagattgggtcatgctttgttgct

SEQ ID NO: 5635919 - DNA, 25 bp, Homo sapien
gcaaacagcctgaagaaaagggtta

SEQ ID NO: 5635920 - DNA, 25 bp, Homo sapien
gatggaaatgtgagtgcaaacctca

SEQ ID NO: 5635921 - DNA, 25 bp, Homo sapien
aagaaaaatccaagatgacgctgac

SEQ ID NO: 5635922 - DNA, 25 bp, Homo sapien
tgacgctgacgtttctggctctgag

SEQ ID NO: 5635923 - DNA, 25 bp, Homo sapien
atggaagtaaggagatataattgag

SEQ ID NO: 5635924 - DNA, 25 bp, Homo sapien
tctgtaggacagattgcttatgggg

SEQ ID NO: 5635925 - DNA, 25 bp, Homo sapien
agatataattgagagtgagagagct

SEQ ID NO: 5635926 - DNA, 25 bp, Homo sapien
ggctctgagtaaatgagtgtacaac

SEQ ID NO: 5635927 - DNA, 25 bp, Homo sapien
aacctcaggtccagagacaccagtt

SEQ ID NO: 5635928 - DNA, 25 bp, Homo sapien
aggaaagagcttatgagaaagcttt

SEQ ID NO: 5635929 - DNA, 25 bp, Homo sapien
tgtgtaggacgagttatctgtagga

SEQ ID NO: 5635930 - DNA, 25 bp, Homo sapien
ggctatggctcagctggactgttac

SEQ ID NO: 5635931 - DNA, 25 bp, Homo sapien
caactataacaagggcatgaaggga

SEQ ID NO: 5635932 - DNA, 25 bp, Homo sapien
agtataagaggccaagaaaaattac

SEQ ID NO: 5635933 - DNA, 25 bp, Homo sapien
aggtccaaagtaccagtgctgggat

SEQ ID NO: 5635934 - DNA, 25 bp, Homo sapien
agggccaacatcagtgtaacaggaa

SEQ ID NO: 5635935 - DNA, 25 bp, Homo sapien
accgaaggcctctggtcagacatgt

SEQ ID NO: 5635936 - DNA, 25 bp, Homo sapien
gtgaggttattgcttacaggtctgc

SEQ ID NO: 5635937 - DNA, 25 bp, Homo sapien
aggacccacacataaagcagcaact

SEQ ID NO: 5635938 - DNA, 25 bp, Homo sapien
ttctcacagcaagagtataagaggc

SEQ ID NO: 5635939 - DNA, 25 bp, Homo sapien
aaaattacacaagaacaccgaaggc

SEQ ID NO: 5635940 - DNA, 25 bp, Homo sapien
agcagcaactacctgagaaaagttc

SEQ ID NO: 5635941 - DNA, 25 bp, Homo sapien
agtagcacacaatactgttagtgac

SEQ ID NO: 5635942 - DNA, 25 bp, Homo sapien
ctcttgtgtaaatggcttcaaattc

SEQ ID NO: 5635943 - DNA, 25 bp, Homo sapien
cacacccagccattaaactcttagt

SEQ ID NO: 5635944 - DNA, 25 bp, Homo sapien
tgtaatggtatttgtttggatccta

SEQ ID NO: 5635945 - DNA, 25 bp, Homo sapien
ttaaactcttagtagcacacaatac

SEQ ID NO: 5635946 - DNA, 25 bp, Homo sapien
tgttagtgacagcacagtactctat

SEQ ID NO: 5635947 - DNA, 25 bp, Homo sapien
agtgcaatggtgtgatctcgactca

SEQ ID NO: 5635948 - DNA, 25 bp, Homo sapien
tctaaaaatttgatcagcactccta

SEQ ID NO: 5635949 - DNA, 25 bp, Homo sapien
gacagcacagtactctatagtcctc

SEQ ID NO: 5635950 - DNA, 25 bp, Homo sapien
ctatagtcctcaactctgcacagat

SEQ ID NO: 5635951 - DNA, 25 bp, Homo sapien
ttcttttgtggaatgggtaaggcat

SEQ ID NO: 5635952 - DNA, 25 bp, Homo sapien
agcactactagcaaattatgaagtt

SEQ ID NO: 5635953 - DNA, 25 bp, Homo sapien
gagcttgcatacataagaagttcca

SEQ ID NO: 5635954 - DNA, 25 bp, Homo sapien
gttaaatgcaacatgggccaaggaa

SEQ ID NO: 5635955 - DNA, 25 bp, Homo sapien
atacataagaagttccagaggagaa

SEQ ID NO: 5635956 - DNA, 25 bp, Homo sapien
agtttggaaatttgttgtagtatat

SEQ ID NO: 5635957 - DNA, 25 bp, Homo sapien
taagaagttccagaggagaaaacat

SEQ ID NO: 5635958 - DNA, 25 bp, Homo sapien
cctggtgtaaaattttagttagcac

SEQ ID NO: 5635959 - DNA, 25 bp, Homo sapien
gagtatgaagtccaacaatgaagtc

SEQ ID NO: 5635960 - DNA, 25 bp, Homo sapien
aattaggatattatgcacctgacac

SEQ ID NO: 5635961 - DNA, 25 bp, Homo sapien
gagaaaacatgacattcagttaaat

SEQ ID NO: 5635962 - DNA, 25 bp, Homo sapien
ttcccatcagagtatgaagtccaac

SEQ ID NO: 5635963 - DNA, 25 bp, Homo sapien
acaaacattttcgacctgagaaaag

SEQ ID NO: 5635964 - DNA, 25 bp, Homo sapien
cttttctcaggtcgaaaatgtttgt

SEQ ID NO: 5635965 - DNA, 25 bp, Homo sapien
ttacaggtttacgttggttgcagca

SEQ ID NO: 5635966 - DNA, 25 bp, Homo sapien
gtcgctttaggggctttgactggga

SEQ ID NO: 5635967 - DNA, 25 bp, Homo sapien
ttgactgggagtttgtttatctctc

SEQ ID NO: 5635968 - DNA, 25 bp, Homo sapien
aaagtggctcgtttagaaaggagtg

SEQ ID NO: 5635969 - DNA, 25 bp, Homo sapien
ggcctccatgcattcactaatacac

SEQ ID NO: 5635970 - DNA, 25 bp, Homo sapien
tgctttaaattacagagtctcctca

SEQ ID NO: 5635971 - DNA, 25 bp, Homo sapien
gtgagagtaggccatgttaacatgg

SEQ ID NO: 5635972 - DNA, 25 bp, Homo sapien
tcattagggcagcattggcctccat

SEQ ID NO: 5635973 - DNA, 25 bp, Homo sapien
tatcacgtctcattagggcagcatt

SEQ ID NO: 5635974 - DNA, 25 bp, Homo sapien
caacttctgacgccaaaagtggctc

SEQ ID NO: 5635975 - DNA, 25 bp, Homo sapien
ggcactgtcgctttaggggctttga

SEQ ID NO: 5635976 - DNA, 25 bp, Homo sapien
tcaggtaagcgaatctggtgaaact

SEQ ID NO: 5635977 - DNA, 25 bp, Homo sapien
cagcaccctgtgcctccgtgtccag

SEQ ID NO: 5635978 - DNA, 25 bp, Homo sapien
ggacgggacaaaacccatcacctca

SEQ ID NO: 5635979 - DNA, 25 bp, Homo sapien
gcattgaggttgatgcaaggatcag

SEQ ID NO: 5635980 - DNA, 25 bp, Homo sapien
acacactaataactgtgggcaagtc

SEQ ID NO: 5635981 - DNA, 25 bp, Homo sapien
gggcaagtcacaccagcaccctgtg

SEQ ID NO: 5635982 - DNA, 25 bp, Homo sapien
tggtgaaacttgcccccagctcggc

SEQ ID NO: 5635983 - DNA, 25 bp, Homo sapien
ggggctgacaactgcattgaggttg

SEQ ID NO: 5635984 - DNA, 25 bp, Homo sapien
gcggctactccctcaggtgcagcac

SEQ ID NO: 5635985 - DNA, 25 bp, Homo sapien
cagctcggctcagtgatgctgctgt

SEQ ID NO: 5635986 - DNA, 25 bp, Homo sapien
ccgtgtccaggtctgaaaaatgggg

SEQ ID NO: 5635987 - DNA, 25 bp, Homo sapien
agacaccagccaaagaatcacaaga

SEQ ID NO: 5635988 - DNA, 25 bp, Homo sapien
gcaaggaattcgacatcagcagagc

SEQ ID NO: 5635989 - DNA, 25 bp, Homo sapien
catgttaggatcagacatcaagtgc

SEQ ID NO: 5635990 - DNA, 25 bp, Homo sapien
gttgtctgtgttggtgagactcttt

SEQ ID NO: 5635991 - DNA, 25 bp, Homo sapien
caaagaatcacaagagaaactggct

SEQ ID NO: 5635992 - DNA, 25 bp, Homo sapien
cattcttccgtgggtaatgggttga

SEQ ID NO: 5635993 - DNA, 25 bp, Homo sapien
gtgctagtctacctgcggccctgag

SEQ ID NO: 5635994 - DNA, 25 bp, Homo sapien
acaagagaaactggctgatagaatt

SEQ ID NO: 5635995 - DNA, 25 bp, Homo sapien
catcaagtgctagtctacctgcggc

SEQ ID NO: 5635996 - DNA, 25 bp, Homo sapien
ggaccgagtgttgtctgtgttggtg

SEQ ID NO: 5635997 - DNA, 25 bp, Homo sapien
agcagagcaggttttccatgttagg

SEQ ID NO: 5635998 - DNA, 25 bp, Homo sapien
gagacacacaaatcgcctgaacccg

SEQ ID NO: 5635999 - DNA, 25 bp, Homo sapien
ctcaacctggtgaaagctagagcag

SEQ ID NO: 5636000 - DNA, 25 bp, Homo sapien
gttagatcactggagaggctttaaa

SEQ ID NO: 5636001 - DNA, 25 bp, Homo sapien
ctggggctggtcttttgcctccaac

SEQ ID NO: 5636002 - DNA, 25 bp, Homo sapien
tggttctcagccctgcaggttagat

SEQ ID NO: 5636003 - DNA, 25 bp, Homo sapien
ttctagagtagtccgtatggcccta

SEQ ID NO: 5636004 - DNA, 25 bp, Homo sapien
aggtgctgtccagccgtggttctca

SEQ ID NO: 5636005 - DNA, 25 bp, Homo sapien
agtggcccagtgtcaccctcaacct

SEQ ID NO: 5636006 - DNA, 25 bp, Homo sapien
tctacaccaaagccaggtggaggag

SEQ ID NO: 5636007 - DNA, 25 bp, Homo sapien
gcttggtggagccaggctcctgagt

SEQ ID NO: 5636008 - DNA, 25 bp, Homo sapien
ctggaggcatctagaactgtcatca

SEQ ID NO: 5636009 - DNA, 25 bp, Homo sapien
accactggatgccccgcaacttcca

SEQ ID NO: 5636010 - DNA, 25 bp, Homo sapien
tgctaggattacagaggtattcttg

SEQ ID NO: 5636011 - DNA, 25 bp, Homo sapien
ggatgccccgcaacttccatggtga

SEQ ID NO: 5636012 - DNA, 25 bp, Homo sapien
aaaggctggaaaaatgctttattct

SEQ ID NO: 5636013 - DNA, 25 bp, Homo sapien
agggcctctgcatttattagctaaa

SEQ ID NO: 5636014 - DNA, 25 bp, Homo sapien
gtggctagtgtgtcttagcagctga

SEQ ID NO: 5636015 - DNA, 25 bp, Homo sapien
gtttggaagccattagccacacggg

SEQ ID NO: 5636016 - DNA, 25 bp, Homo sapien
ccagggtgttcttgaactattggcc

SEQ ID NO: 5636017 - DNA, 25 bp, Homo sapien
tcttagcagctgactttaaaaattt

SEQ ID NO: 5636018 - DNA, 25 bp, Homo sapien
cagaacttcagtgatgaaaacagtt

SEQ ID NO: 5636019 - DNA, 25 bp, Homo sapien
atatagtttgtagaagaaaggctgg

SEQ ID NO: 5636020 - DNA, 25 bp, Homo sapien
gaccgtcttcccttcaacgggccac

SEQ ID NO: 5636021 - DNA, 25 bp, Homo sapien
gtggcccgttgaagggaagacggtc

SEQ ID NO: 5636022 - DNA, 25 bp, Homo sapien
aactaatggtgtgtctgtgatccaa

SEQ ID NO: 5636023 - DNA, 25 bp, Homo sapien
caaatcccacatgtcccatccctgc

SEQ ID NO: 5636024 - DNA, 25 bp, Homo sapien
caaagcaggcccttgagccatagtt

SEQ ID NO: 5636025 - DNA, 25 bp, Homo sapien
tgtgtctgtgatccaataaaacttt

SEQ ID NO: 5636026 - DNA, 25 bp, Homo sapien
aaaactcttcaagaaccctcttctc

SEQ ID NO: 5636027 - DNA, 25 bp, Homo sapien
cttgagccatagtttgctccctgct

SEQ ID NO: 5636028 - DNA, 25 bp, Homo sapien
accatctcccttaggatcccttgcc

SEQ ID NO: 5636029 - DNA, 25 bp, Homo sapien
gctccctgctttacacaaatcccac

SEQ ID NO: 5636030 - DNA, 25 bp, Homo sapien
ccatccctgctgaaaactcttcaag

SEQ ID NO: 5636031 - DNA, 25 bp, Homo sapien
tccccaaaagcccttgcaccatctc

SEQ ID NO: 5636032 - DNA, 25 bp, Homo sapien
cttctcatctcttaggggttaccct

SEQ ID NO: 5636033 - DNA, 25 bp, Homo sapien
gggctgacaggctcccaatcctcct

SEQ ID NO: 5636034 - DNA, 25 bp, Homo sapien
ctcgatccccccttttttgtgtgta

SEQ ID NO: 5636035 - DNA, 25 bp, Homo sapien
cttttttgtgtgtacctatgggtgg

SEQ ID NO: 5636036 - DNA, 25 bp, Homo sapien
cttactcctctccactttgggaacc

SEQ ID NO: 5636037 - DNA, 25 bp, Homo sapien
ttgggaacccttttgcctcggctgc

SEQ ID NO: 5636038 - DNA, 25 bp, Homo sapien
ctcaaacccctgacctcaagtgttc

SEQ ID NO: 5636039 - DNA, 25 bp, Homo sapien
aacccctgacctcaagtgttccacc

SEQ ID NO: 5636040 - DNA, 25 bp, Homo sapien
tgagccaccgtgtctggcctcgatc

SEQ ID NO: 5636041 - DNA, 25 bp, Homo sapien
ccttttgcctcggctgctgggtggg

SEQ ID NO: 5636042 - DNA, 25 bp, Homo sapien
gggagcgagatccatcattacagaa

SEQ ID NO: 5636043 - DNA, 25 bp, Homo sapien
catcattacagaaatgaggacgggg

SEQ ID NO: 5636044 - DNA, 25 bp, Homo sapien
gcgggtgtcacacctgcatcaccgc

SEQ ID NO: 5636045 - DNA, 25 bp, Homo sapien
cgggcagctctgcttctaaatctcc

SEQ ID NO: 5636046 - DNA, 25 bp, Homo sapien
agtattcgctgcgggcagctctgct

SEQ ID NO: 5636047 - DNA, 25 bp, Homo sapien
ccgcgtgcagctccggctaacgcgg

SEQ ID NO: 5636048 - DNA, 25 bp, Homo sapien
tcctctactcagcgggatcagatcc

SEQ ID NO: 5636049 - DNA, 25 bp, Homo sapien
ttattcctcgagttttgtaaccagc

SEQ ID NO: 5636050 - DNA, 25 bp, Homo sapien
ccttctgatcgaaggctgggtgtgg

SEQ ID NO: 5636051 - DNA, 25 bp, Homo sapien
ccccgcgctacagagcgcgcggggc

SEQ ID NO: 5636052 - DNA, 25 bp, Homo sapien
gcccgggcattaaaagtattcgctg

SEQ ID NO: 5636053 - DNA, 25 bp, Homo sapien
gggaggctcctgggtcctctactca

SEQ ID NO: 5636054 - DNA, 25 bp, Homo sapien
ggccgcaaggtctccggatttgcag

SEQ ID NO: 5636055 - DNA, 25 bp, Homo sapien
aggggcctccttaacagctgtccag

SEQ ID NO: 5636056 - DNA, 25 bp, Homo sapien
ggtctctcactggcagaatggagtt

SEQ ID NO: 5636057 - DNA, 25 bp, Homo sapien
ggggaaattcctgtgaaactgtgat

SEQ ID NO: 5636058 - DNA, 25 bp, Homo sapien
gccagggacctcgctaagaaatatt

SEQ ID NO: 5636059 - DNA, 25 bp, Homo sapien
ggcacggtgtgagtcaccgtccacc

SEQ ID NO: 5636060 - DNA, 25 bp, Homo sapien
ctcagagtctggccttctgctgggc

SEQ ID NO: 5636061 - DNA, 25 bp, Homo sapien
aatattggcaatatgaggggaaatt

SEQ ID NO: 5636062 - DNA, 25 bp, Homo sapien
tatccctttcggagctccagcctgc

SEQ ID NO: 5636063 - DNA, 25 bp, Homo sapien
ttataacagtctctggccagggacc

SEQ ID NO: 5636064 - DNA, 25 bp, Homo sapien
tcacagacgatgacatggagatttg

SEQ ID NO: 5636065 - DNA, 25 bp, Homo sapien
gctgagcccaagcagagtttctacg

SEQ ID NO: 5636066 - DNA, 25 bp, Homo sapien
ctggatcaaagtaacgacggttaag

SEQ ID NO: 5636067 - DNA, 25 bp, Homo sapien
caactccaggactgctagagtggga

SEQ ID NO: 5636068 - DNA, 25 bp, Homo sapien
acccacgactaagaagcgctgtgtt

SEQ ID NO: 5636069 - DNA, 25 bp, Homo sapien
tgttaccacaaatggatgaaaaagg

SEQ ID NO: 5636070 - DNA, 25 bp, Homo sapien
ttggctggaattcccgatctccacc

SEQ ID NO: 5636071 - DNA, 25 bp, Homo sapien
acgacggttaagtacactcctgatc

SEQ ID NO: 5636072 - DNA, 25 bp, Homo sapien
tccatgagcacaactccaggactgc

SEQ ID NO: 5636073 - DNA, 25 bp, Homo sapien
cccagggaccccatttctctttggc

SEQ ID NO: 5636074 - DNA, 25 bp, Homo sapien
ctatcgtttacaagactagactgag

SEQ ID NO: 5636075 - DNA, 25 bp, Homo sapien
ctaagggcttcacacaaattacctc

SEQ ID NO: 5636076 - DNA, 25 bp, Homo sapien
ctccatggcaccagtccccccatca

SEQ ID NO: 5636077 - DNA, 25 bp, Homo sapien
agatgggctccttagtcactgtttt

SEQ ID NO: 5636078 - DNA, 25 bp, Homo sapien
tgtagtacaaagatagctgcaaaag

SEQ ID NO: 5636079 - DNA, 25 bp, Homo sapien
gctgcaaaagatgggctccttagtc

SEQ ID NO: 5636080 - DNA, 25 bp, Homo sapien
cttcagatagtgtaccttgaggggg

SEQ ID NO: 5636081 - DNA, 25 bp, Homo sapien
aagcaattatgtaagtgtaaatgtt

SEQ ID NO: 5636082 - DNA, 25 bp, Homo sapien
atcctggaatgtattaggaaataaa

SEQ ID NO: 5636083 - DNA, 25 bp, Homo sapien
aaaatgagtatgaccagcagtaatt

SEQ ID NO: 5636084 - DNA, 25 bp, Homo sapien
agcagtaattaattagcagaggcac

SEQ ID NO: 5636085 - DNA, 25 bp, Homo sapien
gcagaggcactatttatgtaatggt

SEQ ID NO: 5636086 - DNA, 25 bp, Homo sapien
ttctgcagctgaatttatccctgtc

SEQ ID NO: 5636087 - DNA, 25 bp, Homo sapien
aaggaagcattgtaagcagcattct

SEQ ID NO: 5636088 - DNA, 25 bp, Homo sapien
gacgatgggccaggatttactccca

SEQ ID NO: 5636089 - DNA, 25 bp, Homo sapien
tggttatgcccttatgagagctggt

SEQ ID NO: 5636090 - DNA, 25 bp, Homo sapien
atcctgtgaaattatccacgggtcc

SEQ ID NO: 5636091 - DNA, 25 bp, Homo sapien
tgggggttcacactgattttaattg

SEQ ID NO: 5636092 - DNA, 25 bp, Homo sapien
tgatcctcacatgatatgctcacca

SEQ ID NO: 5636093 - DNA, 25 bp, Homo sapien
ccaactcattggccctacatatctc

SEQ ID NO: 5636094 - DNA, 25 bp, Homo sapien
tccacgggtccttgaaatagaatac

SEQ ID NO: 5636095 - DNA, 25 bp, Homo sapien
gctagtctgaataggtttatacatc

SEQ ID NO: 5636096 - DNA, 25 bp, Homo sapien
taggagcctatgtagtctagtcttt

SEQ ID NO: 5636097 - DNA, 25 bp, Homo sapien
gagagctggttgattgccatattcc

SEQ ID NO: 5636098 - DNA, 25 bp, Homo sapien
caacatttatgacagacgatgggcc

SEQ ID NO: 5636099 - DNA, 25 bp, Homo sapien
caagataatgccaaaatgaggactt

SEQ ID NO: 5636100 - DNA, 25 bp, Homo sapien
agggctaaaaatgaaatctgatgtc

SEQ ID NO: 5636101 - DNA, 25 bp, Homo sapien
taaagccgagctcggagtctcaatt

SEQ ID NO: 5636102 - DNA, 25 bp, Homo sapien
tggaaggtttggattaaagtctcac

SEQ ID NO: 5636103 - DNA, 25 bp, Homo sapien
ctatttgtaggagaaattgggtcga

SEQ ID NO: 5636104 - DNA, 25 bp, Homo sapien
tttgcatgaggtatcatcggttgtc

SEQ ID NO: 5636105 - DNA, 25 bp, Homo sapien
caagaaaaattctgagtgtgggagg

SEQ ID NO: 5636106 - DNA, 25 bp, Homo sapien
cataactgtcaggcaagaaaaattc

SEQ ID NO: 5636107 - DNA, 25 bp, Homo sapien
tttcagagaagttggcacctatttg

SEQ ID NO: 5636108 - DNA, 25 bp, Homo sapien
cctattttacttggagcagccctcc

SEQ ID NO: 5636109 - DNA, 25 bp, Homo sapien
tgtgttttgcccaaagtaaagccga

SEQ ID NO: 5636110 - DNA, 25 bp, Homo sapien
taacactttagacgtttctttagta

SEQ ID NO: 5636111 - DNA, 25 bp, Homo sapien
tactaaagaaacgtctaaagtgtta

SEQ ID NO: 5636112 - DNA, 25 bp, Homo sapien
atgctgtgactcagaacatacagtc

SEQ ID NO: 5636113 - DNA, 25 bp, Homo sapien
atttcatagatgaggaagtagagat

SEQ ID NO: 5636114 - DNA, 25 bp, Homo sapien
ttggtttgcatgatgaaggaggtaa

SEQ ID NO: 5636115 - DNA, 25 bp, Homo sapien
tgccagcagacagcacaacttcctt

SEQ ID NO: 5636116 - DNA, 25 bp, Homo sapien
gtattgcccacagtaaaaattacac

SEQ ID NO: 5636117 - DNA, 25 bp, Homo sapien
tacaatctgtaaggtggaaagtcat

SEQ ID NO: 5636118 - DNA, 25 bp, Homo sapien
agctggcacttgaacccacatctcc

SEQ ID NO: 5636119 - DNA, 25 bp, Homo sapien
ctgaatggatctgatgggtcaggaa

SEQ ID NO: 5636120 - DNA, 25 bp, Homo sapien
catgaggctgaagaaatgatcttgt

SEQ ID NO: 5636121 - DNA, 25 bp, Homo sapien
tggaaagtcatgggtgtttaacttc

SEQ ID NO: 5636122 - DNA, 25 bp, Homo sapien
aatcaagggctaacggaacttacat

SEQ ID NO: 5636123 - DNA, 25 bp, Homo sapien
gccgccggtcccaggtcacctggct

SEQ ID NO: 5636124 - DNA, 25 bp, Homo sapien
agccaggtgacctgggaccggcggc

SEQ ID NO: 5636125 - DNA, 25 bp, Homo sapien
acggtggcctgaacaccaggatatt

SEQ ID NO: 5636126 - DNA, 25 bp, Homo sapien
ctgaaatatggaaatcctcccacac

SEQ ID NO: 5636127 - DNA, 25 bp, Homo sapien
gggatatatatagctaggtagggaa

SEQ ID NO: 5636128 - DNA, 25 bp, Homo sapien
attcaaaagggaaatcgatgagagt

SEQ ID NO: 5636129 - DNA, 25 bp, Homo sapien
gagcccctctcttgggtgtccccgc

SEQ ID NO: 5636130 - DNA, 25 bp, Homo sapien
gggagacaggactatgcctttctcc

SEQ ID NO: 5636131 - DNA, 25 bp, Homo sapien
gccatacacatatgaagggcttgcc

SEQ ID NO: 5636132 - DNA, 25 bp, Homo sapien
atcgatgagagtccttttccagcca

SEQ ID NO: 5636133 - DNA, 25 bp, Homo sapien
tgcctgagcctgttccacaactctc

SEQ ID NO: 5636134 - DNA, 25 bp, Homo sapien
acacacactccaaaactcaattccc

SEQ ID NO: 5636135 - DNA, 25 bp, Homo sapien
tgtccccgcccactaatatcacctc

SEQ ID NO: 5636136 - DNA, 25 bp, Homo sapien
gggccataaccatcatttcagactt

SEQ ID NO: 5636137 - DNA, 25 bp, Homo sapien
ccatggaaagatctgaagcagaaga

SEQ ID NO: 5636138 - DNA, 25 bp, Homo sapien
agtgtttctgggccataaccatcat

SEQ ID NO: 5636139 - DNA, 25 bp, Homo sapien
ttggaagaatgatcaaaagttacct

SEQ ID NO: 5636140 - DNA, 25 bp, Homo sapien
ccagaggttgcagattattcgagaa

SEQ ID NO: 5636141 - DNA, 25 bp, Homo sapien
tggaaagatctgaagcagaagagta

SEQ ID NO: 5636142 - DNA, 25 bp, Homo sapien
cttcaaagtggatcagtgtagctac

SEQ ID NO: 5636143 - DNA, 25 bp, Homo sapien
tgatcaaaagttacctaggtcaggg

SEQ ID NO: 5636144 - DNA, 25 bp, Homo sapien
gaagcagaagagtaaatctcatgag

SEQ ID NO: 5636145 - DNA, 25 bp, Homo sapien
actaggaagactacacgtgacagaa

SEQ ID NO: 5636146 - DNA, 25 bp, Homo sapien
tcagtgtagctacaggccctaggaa

SEQ ID NO: 5636147 - DNA, 25 bp, Homo sapien
acagggaaaagtgtgactatactct

SEQ ID NO: 5636148 - DNA, 25 bp, Homo sapien
tttggttgtgtaagtgcatatgggt

SEQ ID NO: 5636149 - DNA, 25 bp, Homo sapien
ttagaaataggtatagtgactggtg

SEQ ID NO: 5636150 - DNA, 25 bp, Homo sapien
atatgaaaggtataagagaaagaaa

SEQ ID NO: 5636151 - DNA, 25 bp, Homo sapien
acatactggtgcaggagctagttgt

SEQ ID NO: 5636152 - DNA, 25 bp, Homo sapien
actggtgggactttgggtctcccaa

SEQ ID NO: 5636153 - DNA, 25 bp, Homo sapien
gtgcatatgggtgctgagttgacaa

SEQ ID NO: 5636154 - DNA, 25 bp, Homo sapien
ttagattacagaccataacagggaa

SEQ ID NO: 5636155 - DNA, 25 bp, Homo sapien
gttgtattacatcaggcagaagcat

SEQ ID NO: 5636156 - DNA, 25 bp, Homo sapien
aggggtaggctgtgctctattatct

SEQ ID NO: 5636157 - DNA, 25 bp, Homo sapien
caggatccattgccagtagtacacc

SEQ ID NO: 5636158 - DNA, 25 bp, Homo sapien
tatcccttcaaccaaaatgtcccaa

SEQ ID NO: 5636159 - DNA, 25 bp, Homo sapien
aatgtcccaaaagtgtaccgcttta

SEQ ID NO: 5636160 - DNA, 25 bp, Homo sapien
tttcagtcccgtatccagcagtaac

SEQ ID NO: 5636161 - DNA, 25 bp, Homo sapien
aacacggtttatgtaagactcagga

SEQ ID NO: 5636162 - DNA, 25 bp, Homo sapien
aaaagccattttcagtcccgtatcc

SEQ ID NO: 5636163 - DNA, 25 bp, Homo sapien
cagcagtaactgatcattcgatgtg

SEQ ID NO: 5636164 - DNA, 25 bp, Homo sapien
gttcatggttctcataacacggttt

SEQ ID NO: 5636165 - DNA, 25 bp, Homo sapien
aactgatcattcgatgtggcggtgg

SEQ ID NO: 5636166 - DNA, 25 bp, Homo sapien
atcctgaaggccactatctttatgt

SEQ ID NO: 5636167 - DNA, 25 bp, Homo sapien
tttatactaatgcaggcatgcatat

SEQ ID NO: 5636168 - DNA, 25 bp, Homo sapien
tttatgtaagactcaggaaaaagcc

SEQ ID NO: 5636169 - DNA, 25 bp, Homo sapien
gaatggttggcctagaaagaagcca

SEQ ID NO: 5636170 - DNA, 25 bp, Homo sapien
caagctcaaaatgggcccagtgaat

SEQ ID NO: 5636171 - DNA, 25 bp, Homo sapien
ttttgtgccaagcaaagcagaacat

SEQ ID NO: 5636172 - DNA, 25 bp, Homo sapien
aaagaagccactggatgaattcttc

SEQ ID NO: 5636173 - DNA, 25 bp, Homo sapien
tatctctgggttatgacctggggtt

SEQ ID NO: 5636174 - DNA, 25 bp, Homo sapien
catgtactgaagtctgggtaaatgt

SEQ ID NO: 5636175 - DNA, 25 bp, Homo sapien
tcaagatggtcagtggactttggat

SEQ ID NO: 5636176 - DNA, 25 bp, Homo sapien
ctaacttggtagcactgaggaaaaa

SEQ ID NO: 5636177 - DNA, 25 bp, Homo sapien
ccatgaacaaaagttagcttgatcc

SEQ ID NO: 5636178 - DNA, 25 bp, Homo sapien
gagagacagattgtggtcaagctca

SEQ ID NO: 5636179 - DNA, 25 bp, Homo sapien
ggcccagtgaatggacagtatctct

SEQ ID NO: 5636180 - DNA, 25 bp, Homo sapien
tcagatgaaaacagtattagaatac

SEQ ID NO: 5636181 - DNA, 25 bp, Homo sapien
ccaaagttaggaaattacaagatat

SEQ ID NO: 5636182 - DNA, 25 bp, Homo sapien
tgctagccagctcgtctccagaaaa

SEQ ID NO: 5636183 - DNA, 25 bp, Homo sapien
agtggttcacatctgctagccagct

SEQ ID NO: 5636184 - DNA, 25 bp, Homo sapien
gaaaaaagtacagcacagaaaatat

SEQ ID NO: 5636185 - DNA, 25 bp, Homo sapien
gctcagtggctgctttattcccatc

SEQ ID NO: 5636186 - DNA, 25 bp, Homo sapien
taagacaccaatgccagtggttcac

SEQ ID NO: 5636187 - DNA, 25 bp, Homo sapien
gctagtggtggcccctaagacacca

SEQ ID NO: 5636188 - DNA, 25 bp, Homo sapien
taagccccattctagaaggttggac

SEQ ID NO: 5636189 - DNA, 25 bp, Homo sapien
gggcctgtccaagcaattacccagc

SEQ ID NO: 5636190 - DNA, 25 bp, Homo sapien
ctagaaggttggactaaaatactaa

SEQ ID NO: 5636191 - DNA, 25 bp, Homo sapien
acctcaaaggagatgtctgctgatg

SEQ ID NO: 5636192 - DNA, 25 bp, Homo sapien
ttgtacattaaggggcgctcaagta

SEQ ID NO: 5636193 - DNA, 25 bp, Homo sapien
gtgattcggaaaccacgaagccaac

SEQ ID NO: 5636194 - DNA, 25 bp, Homo sapien
ctgctcagactccggcactactgtc

SEQ ID NO: 5636195 - DNA, 25 bp, Homo sapien
ttaaagtttcaggccaaatcggaga

SEQ ID NO: 5636196 - DNA, 25 bp, Homo sapien
cgaagccaacgtaaactgctcagac

SEQ ID NO: 5636197 - DNA, 25 bp, Homo sapien
tcctaaaccaagtaagtgtcacaac

SEQ ID NO: 5636198 - DNA, 25 bp, Homo sapien
acataattcccgacagaaaagaggc

SEQ ID NO: 5636199 - DNA, 25 bp, Homo sapien
gtgtcacaactggggaacataattc

SEQ ID NO: 5636200 - DNA, 25 bp, Homo sapien
caaatcggagagcaccgtaatccta

SEQ ID NO: 5636201 - DNA, 25 bp, Homo sapien
caaagagaaaggatttagaaacatc

SEQ ID NO: 5636202 - DNA, 25 bp, Homo sapien
cttggattgaagccaaatataagtc

SEQ ID NO: 5636203 - DNA, 25 bp, Homo sapien
caccactgagtttgctcttggattg

SEQ ID NO: 5636204 - DNA, 25 bp, Homo sapien
agctagtcatgcagaaaaaagtggg

SEQ ID NO: 5636205 - DNA, 25 bp, Homo sapien
aagtgggttctcataagctgatgcc

SEQ ID NO: 5636206 - DNA, 25 bp, Homo sapien
ctggcccatcttgctaaggtctgtc

SEQ ID NO: 5636207 - DNA, 25 bp, Homo sapien
ggaaagaaatgttgcatcgatttct

SEQ ID NO: 5636208 - DNA, 25 bp, Homo sapien
ttccaccaacatgtgcacagaaatg

SEQ ID NO: 5636209 - DNA, 25 bp, Homo sapien
ttatacaaacagcccagacaggaaa

SEQ ID NO: 5636210 - DNA, 25 bp, Homo sapien
cagaaatggagctgttcaccactga

SEQ ID NO: 5636211 - DNA, 25 bp, Homo sapien
cttccagcatgtttgggggatagag

SEQ ID NO: 5636212 - DNA, 25 bp, Homo sapien
tccttacaagctagtcatgcagaaa

SEQ ID NO: 5636213 - DNA, 25 bp, Homo sapien
gagtagggcttaaagagccagaagt

SEQ ID NO: 5636214 - DNA, 25 bp, Homo sapien
tggcttcaggagaccccctttccca

SEQ ID NO: 5636215 - DNA, 25 bp, Homo sapien
ctgtgtggccaaagacctgtacagg

SEQ ID NO: 5636216 - DNA, 25 bp, Homo sapien
gtgctttcattgggacacagcgcag

SEQ ID NO: 5636217 - DNA, 25 bp, Homo sapien
agaagaaaagccaaggatgatgtta

SEQ ID NO: 5636218 - DNA, 25 bp, Homo sapien
ggcacagttttggggagtacaatgc

SEQ ID NO: 5636219 - DNA, 25 bp, Homo sapien
cgcaaaaagttaacctggctggcac

SEQ ID NO: 5636220 - DNA, 25 bp, Homo sapien
actaaggcgtctagaacgagatatc

SEQ ID NO: 5636221 - DNA, 25 bp, Homo sapien
caaaattagagcttgagtagggctt

SEQ ID NO: 5636222 - DNA, 25 bp, Homo sapien
agacacgcacaaatcagccagctct

SEQ ID NO: 5636223 - DNA, 25 bp, Homo sapien
gaggggatggtttctcaacccaaga

SEQ ID NO: 5636224 - DNA, 25 bp, Homo sapien
cccggccgctctacccagcaacttt

SEQ ID NO: 5636225 - DNA, 25 bp, Homo sapien
gctttacggaagcgtcttggacagg

SEQ ID NO: 5636226 - DNA, 25 bp, Homo sapien
cggtgctgagatgtgttacgttctc

SEQ ID NO: 5636227 - DNA, 25 bp, Homo sapien
ttatggatggaaacaaataaggaag

SEQ ID NO: 5636228 - DNA, 25 bp, Homo sapien
gctcccggtgtctcctcccggccgc

SEQ ID NO: 5636229 - DNA, 25 bp, Homo sapien
ataaggaagagtcaattttgctgag

SEQ ID NO: 5636230 - DNA, 25 bp, Homo sapien
agaaactgatacagtagcctccttc

SEQ ID NO: 5636231 - DNA, 25 bp, Homo sapien
tgtgttacgttctcatctccccatc

SEQ ID NO: 5636232 - DNA, 25 bp, Homo sapien
ggaagagtcaattttgctgagcccc

SEQ ID NO: 5636233 - DNA, 25 bp, Homo sapien
ttccgtgctttgttccccgactgga

SEQ ID NO: 5636234 - DNA, 25 bp, Homo sapien
ccgactggaaatgctttacggaagc

SEQ ID NO: 5636235 - DNA, 25 bp, Homo sapien
cctaatacagcctcaaagtcctttt

SEQ ID NO: 5636236 - DNA, 25 bp, Homo sapien
caccaaccaatcacagaactctctc

SEQ ID NO: 5636237 - DNA, 25 bp, Homo sapien
taacagactggacccagagactagg

SEQ ID NO: 5636238 - DNA, 25 bp, Homo sapien
ctactaggcagacatcaccaaccaa

SEQ ID NO: 5636239 - DNA, 25 bp, Homo sapien
gagatggttgatcactcagagagtt

SEQ ID NO: 5636240 - DNA, 25 bp, Homo sapien
tacattcagttgcagattgagatag

SEQ ID NO: 5636241 - DNA, 25 bp, Homo sapien
cactcagagagtttagctggagagg

SEQ ID NO: 5636242 - DNA, 25 bp, Homo sapien
ctatctctggcaggcctcagatttc

SEQ ID NO: 5636243 - DNA, 25 bp, Homo sapien
ttcaggattctaacagactggaccc

SEQ ID NO: 5636244 - DNA, 25 bp, Homo sapien
ttttcagtaaatgctccaggcagcc

SEQ ID NO: 5636245 - DNA, 25 bp, Homo sapien
aggcagccattacaaatcaatcaga

SEQ ID NO: 5636246 - DNA, 25 bp, Homo sapien
caatactaaaatgggagttacatat

SEQ ID NO: 5636247 - DNA, 25 bp, Homo sapien
tctctaccagaccatgtgaattgac

SEQ ID NO: 5636248 - DNA, 25 bp, Homo sapien
attcaagggcttacagtgctcatgg

SEQ ID NO: 5636249 - DNA, 25 bp, Homo sapien
tgctggaacccagtactcctcctgc

SEQ ID NO: 5636250 - DNA, 25 bp, Homo sapien
agtgctcatggaagtgatcaccctt

SEQ ID NO: 5636251 - DNA, 25 bp, Homo sapien
ctcttattaaatgctggaacccagt

SEQ ID NO: 5636252 - DNA, 25 bp, Homo sapien
agattgtactgaaactaaaagaaac

SEQ ID NO: 5636253 - DNA, 25 bp, Homo sapien
caaaatcaatcaagaaagatggtaa

SEQ ID NO: 5636254 - DNA, 25 bp, Homo sapien
acctgaatagtagagcattagagtc

SEQ ID NO: 5636255 - DNA, 25 bp, Homo sapien
gaaaaaatgtgacagtattctatcc

SEQ ID NO: 5636256 - DNA, 25 bp, Homo sapien
aaagatggtaaaaatgtagatttaa

SEQ ID NO: 5636257 - DNA, 25 bp, Homo sapien
gcagaatgtgaatgatagtggaaga

SEQ ID NO: 5636258 - DNA, 25 bp, Homo sapien
acgccctctcccattgtccagtcat

SEQ ID NO: 5636259 - DNA, 25 bp, Homo sapien
ggagtaggaattcctgtggtgagtt

SEQ ID NO: 5636260 - DNA, 25 bp, Homo sapien
ccgtgatgcagctttaccctgtgtc

SEQ ID NO: 5636261 - DNA, 25 bp, Homo sapien
atttggagtctggggttaactcttg

SEQ ID NO: 5636262 - DNA, 25 bp, Homo sapien
cttgttgtttggtccgtgatgcagc

SEQ ID NO: 5636263 - DNA, 25 bp, Homo sapien
ttggaaagatatgtcacagtcagcc

SEQ ID NO: 5636264 - DNA, 25 bp, Homo sapien
gtggtgagttactgatcctgatgtt

SEQ ID NO: 5636265 - DNA, 25 bp, Homo sapien
aatttacagagtcattggaaaaaca

SEQ ID NO: 5636266 - DNA, 25 bp, Homo sapien
ttataaatgatcacgccctctccca

SEQ ID NO: 5636267 - DNA, 25 bp, Homo sapien
acagtcagccactagtgaagaattc

SEQ ID NO: 5636268 - DNA, 25 bp, Homo sapien
acagtcggccttaggtcctggtaaa

SEQ ID NO: 5636269 - DNA, 25 bp, Homo sapien
gtggaacaggtagcctgcttgccac

SEQ ID NO: 5636270 - DNA, 25 bp, Homo sapien
cctggtaaagaaaaacctgcaatgt

SEQ ID NO: 5636271 - DNA, 25 bp, Homo sapien
ctgctgtgacacttgtggaacaggt

SEQ ID NO: 5636272 - DNA, 25 bp, Homo sapien
attaaagccttctgtggtggagggt

SEQ ID NO: 5636273 - DNA, 25 bp, Homo sapien
ggcaacagcagaaggtttactagat

SEQ ID NO: 5636274 - DNA, 25 bp, Homo sapien
aagaatggttggtgataaattggtc

SEQ ID NO: 5636275 - DNA, 25 bp, Homo sapien
ctttccctgaaagagctgtgaggtc

SEQ ID NO: 5636276 - DNA, 25 bp, Homo sapien
aaaggcactttcacaggcactctgc

SEQ ID NO: 5636277 - DNA, 25 bp, Homo sapien
ggactgaagagatcaactgaactgc

SEQ ID NO: 5636278 - DNA, 25 bp, Homo sapien
ggagggtatcttatcacagtcggcc

SEQ ID NO: 5636279 - DNA, 25 bp, Homo sapien
aatcagtgtagcaaaaacggaaagt

SEQ ID NO: 5636280 - DNA, 25 bp, Homo sapien
ccagcacaacataaatcagtgtagc

SEQ ID NO: 5636281 - DNA, 25 bp, Homo sapien
ccacccaggaggcttagacttaaaa

SEQ ID NO: 5636282 - DNA, 25 bp, Homo sapien
ctcaacggtttcaaattccttgggc

SEQ ID NO: 5636283 - DNA, 25 bp, Homo sapien
gtttgctaactagcactggcagata

SEQ ID NO: 5636284 - DNA, 25 bp, Homo sapien
ccatgactggagcatatgttgaaac

SEQ ID NO: 5636285 - DNA, 25 bp, Homo sapien
taaggtctggtcaaaggcttgtaca

SEQ ID NO: 5636286 - DNA, 25 bp, Homo sapien
cagttcactctgaaaaagggcgctg

SEQ ID NO: 5636287 - DNA, 25 bp, Homo sapien
aggtaaaaatgcttttgcaagtcac

SEQ ID NO: 5636288 - DNA, 25 bp, Homo sapien
aaacttgtccccgctcccctctgtc

SEQ ID NO: 5636289 - DNA, 25 bp, Homo sapien
ggccaaagtctgccatgactggagc

SEQ ID NO: 5636290 - DNA, 25 bp, Homo sapien
aaaccggctttggataactgtaatg

SEQ ID NO: 5636291 - DNA, 25 bp, Homo sapien
agcatcggcatctgcgtttcttggc

SEQ ID NO: 5636292 - DNA, 25 bp, Homo sapien
caggctgataggaataaacttgaat

SEQ ID NO: 5636293 - DNA, 25 bp, Homo sapien
gcttccagaagacaatcgccttggc

SEQ ID NO: 5636294 - DNA, 25 bp, Homo sapien
atcgccttggcatcagggcagctat

SEQ ID NO: 5636295 - DNA, 25 bp, Homo sapien
atccccgagtcactagagggagaga

SEQ ID NO: 5636296 - DNA, 25 bp, Homo sapien
agttggagaattcacggctcctgct

SEQ ID NO: 5636297 - DNA, 25 bp, Homo sapien
agacggagttgattaagcatcggca

SEQ ID NO: 5636298 - DNA, 25 bp, Homo sapien
gcagtgatgaggaacctcacacggc

SEQ ID NO: 5636299 - DNA, 25 bp, Homo sapien
aattatccccgagagctcgcaggga

SEQ ID NO: 5636300 - DNA, 25 bp, Homo sapien
ctgctcccctggaatcaaacgtgat

SEQ ID NO: 5636301 - DNA, 25 bp, Homo sapien
aagtcttgacgcactgctatggctc

SEQ ID NO: 5636302 - DNA, 25 bp, Homo sapien
gggggtatgagatagtatgctctgc

SEQ ID NO: 5636303 - DNA, 25 bp, Homo sapien
gtggggcactacagtggtcttcaga

SEQ ID NO: 5636304 - DNA, 25 bp, Homo sapien
caggcccctccgtgtgcttccagaa

SEQ ID NO: 5636305 - DNA, 25 bp, Homo sapien
tggagggccagcctcaacctggcca

SEQ ID NO: 5636306 - DNA, 25 bp, Homo sapien
cttcagacaatgaggctgtaagcac

SEQ ID NO: 5636307 - DNA, 25 bp, Homo sapien
ctcaacctggccatgagcctgtgca

SEQ ID NO: 5636308 - DNA, 25 bp, Homo sapien
gagatagtatgctctgccagccagg

SEQ ID NO: 5636309 - DNA, 25 bp, Homo sapien
ccctccgagcctgctcctggggtag

SEQ ID NO: 5636310 - DNA, 25 bp, Homo sapien
acaacgcctggcccttcatcaagtc

SEQ ID NO: 5636311 - DNA, 25 bp, Homo sapien
gagtcctactctgtaaagggggcac

SEQ ID NO: 5636312 - DNA, 25 bp, Homo sapien
tgaaagacactcggtattactatga

SEQ ID NO: 5636313 - DNA, 25 bp, Homo sapien
tcttgactacaaatgaaatagggcc

SEQ ID NO: 5636314 - DNA, 25 bp, Homo sapien
ttgaactgaaagacactcggtatta

SEQ ID NO: 5636315 - DNA, 25 bp, Homo sapien
atggttctttacagagagagctctt

SEQ ID NO: 5636316 - DNA, 25 bp, Homo sapien
cgcccggcctatgttattagtttct

SEQ ID NO: 5636317 - DNA, 25 bp, Homo sapien
atcatagttttattgctggtaccac

SEQ ID NO: 5636318 - DNA, 25 bp, Homo sapien
acacagaacacatttgttcgacctc

SEQ ID NO: 5636319 - DNA, 25 bp, Homo sapien
agagagagctcttgactacaaatga

SEQ ID NO: 5636320 - DNA, 25 bp, Homo sapien
tgttcgacctccaaatttgaaagta

SEQ ID NO: 5636321 - DNA, 25 bp, Homo sapien
ttgctggtaccactgtttgagggaa

SEQ ID NO: 5636322 - DNA, 25 bp, Homo sapien
ccactgtttgagggaaccatggttc

SEQ ID NO: 5636323 - DNA, 25 bp, Homo sapien
cacttaaagtagagaatccggtctc

SEQ ID NO: 5636324 - DNA, 25 bp, Homo sapien
caatccttcgtcggtagccagcttc

SEQ ID NO: 5636325 - DNA, 25 bp, Homo sapien
agaatccggtctcacagaggtatgt

SEQ ID NO: 5636326 - DNA, 25 bp, Homo sapien
ttatccaaaatgaaggaagtgatgc

SEQ ID NO: 5636327 - DNA, 25 bp, Homo sapien
gaaggaagtgatgctgtattttcaa

SEQ ID NO: 5636328 - DNA, 25 bp, Homo sapien
ctaccctcaggggataatgtatatt

SEQ ID NO: 5636329 - DNA, 25 bp, Homo sapien
gataagtgagcttgcttcttgcttg

SEQ ID NO: 5636330 - DNA, 25 bp, Homo sapien
tctcagcaagctcaggatagtcatt

SEQ ID NO: 5636331 - DNA, 25 bp, Homo sapien
taggttggattgatgacaatgctac

SEQ ID NO: 5636332 - DNA, 25 bp, Homo sapien
tgatgacaatgctaccctcagggga

SEQ ID NO: 5636333 - DNA, 25 bp, Homo sapien
aataaatacgacaaatatgaggaaa

SEQ ID NO: 5636334 - DNA, 25 bp, Homo sapien
tcgctcatcaaggcggagatcatgg

SEQ ID NO: 5636335 - DNA, 25 bp, Homo sapien
cacgccttctttagagggcatgacg

SEQ ID NO: 5636336 - DNA, 25 bp, Homo sapien
gggagacgtcctgcacaagtccctg

SEQ ID NO: 5636337 - DNA, 25 bp, Homo sapien
atcgccttggagcacgccttcttta

SEQ ID NO: 5636338 - DNA, 25 bp, Homo sapien
ccctccccagtaggaaagatgtcgg

SEQ ID NO: 5636339 - DNA, 25 bp, Homo sapien
ttcgcagagcactgccgccactatg

SEQ ID NO: 5636340 - DNA, 25 bp, Homo sapien
gcaactggacgtgcacatcgccttg

SEQ ID NO: 5636341 - DNA, 25 bp, Homo sapien
gattgccagtgaccaccgagctgaa

SEQ ID NO: 5636342 - DNA, 25 bp, Homo sapien
tgcaccggtccatcagcaccaaggt

SEQ ID NO: 5636343 - DNA, 25 bp, Homo sapien
gagacctcaccaagcaccactcgct

SEQ ID NO: 5636344 - DNA, 25 bp, Homo sapien
ggcgagaacacgcccttcgcagagc

SEQ ID NO: 5636345 - DNA, 25 bp, Homo sapien
gtgtgtgtgttaggctattaaaaaa

SEQ ID NO: 5636346 - DNA, 25 bp, Homo sapien
aatctcatatcctcttgctgggttc

SEQ ID NO: 5636347 - DNA, 25 bp, Homo sapien
ctttctgttcaggattgaggtcatc

SEQ ID NO: 5636348 - DNA, 25 bp, Homo sapien
ctctccattatcatgcacgcctttc

SEQ ID NO: 5636349 - DNA, 25 bp, Homo sapien
tagtcataaggcagtcagcttgctt

SEQ ID NO: 5636350 - DNA, 25 bp, Homo sapien
cataaggcagtcagcttgcttgtgt

SEQ ID NO: 5636351 - DNA, 25 bp, Homo sapien
catgcacgcctttctgttcaggatt

SEQ ID NO: 5636352 - DNA, 25 bp, Homo sapien
gtcaagtattagtcataaggcagtc

SEQ ID NO: 5636353 - DNA, 25 bp, Homo sapien
ctctacagacacattacagaaaaag

SEQ ID NO: 5636354 - DNA, 25 bp, Homo sapien
tgctgggttctgtcaagtattagtc

SEQ ID NO: 5636355 - DNA, 25 bp, Homo sapien
agtattagtcataaggcagtcagct

SEQ ID NO: 5636356 - DNA, 25 bp, Homo sapien
tctggatgtcgtttcttagtgggtc

SEQ ID NO: 5636357 - DNA, 25 bp, Homo sapien
gtactgccccaacactgcctgccat

SEQ ID NO: 5636358 - DNA, 25 bp, Homo sapien
gccatttttgggtgctgagctaatc

SEQ ID NO: 5636359 - DNA, 25 bp, Homo sapien
gtgcccggccggctacctcattcta

SEQ ID NO: 5636360 - DNA, 25 bp, Homo sapien
tttcagttatcatcccaccacaatt

SEQ ID NO: 5636361 - DNA, 25 bp, Homo sapien
cttagtgggtcaaatgagatatata

SEQ ID NO: 5636362 - DNA, 25 bp, Homo sapien
tgcctgccatttttgggtgctgagc

SEQ ID NO: 5636363 - DNA, 25 bp, Homo sapien
gggtgctgagctaatcaattacctc

SEQ ID NO: 5636364 - DNA, 25 bp, Homo sapien
cctcattctagtactgccccaacac

SEQ ID NO: 5636365 - DNA, 25 bp, Homo sapien
tattgctgctgtaccaaattatcac

SEQ ID NO: 5636366 - DNA, 25 bp, Homo sapien
ttagctcctttctggatgtcgtttc

SEQ ID NO: 5636367 - DNA, 25 bp, Homo sapien
ggacttattaagggatcagtttggc

SEQ ID NO: 5636368 - DNA, 25 bp, Homo sapien
tcagggaatgatctcctgtgaagct

SEQ ID NO: 5636369 - DNA, 25 bp, Homo sapien
cagaagaaagacctattggacttat

SEQ ID NO: 5636370 - DNA, 25 bp, Homo sapien
ttagagatctatgtatgccagttca

SEQ ID NO: 5636371 - DNA, 25 bp, Homo sapien
atgatgattgatttgcttggatttc

SEQ ID NO: 5636372 - DNA, 25 bp, Homo sapien
atcatggacactgaaaagagcatat

SEQ ID NO: 5636373 - DNA, 25 bp, Homo sapien
attaagggatcagtttggccagttt

SEQ ID NO: 5636374 - DNA, 25 bp, Homo sapien
aaaaattcagggaatgatctcctgt

SEQ ID NO: 5636375 - DNA, 25 bp, Homo sapien
atatacagttgaatagtgttgaata

SEQ ID NO: 5636376 - DNA, 25 bp, Homo sapien
cacccccagaagaaagacctattgg

SEQ ID NO: 5636377 - DNA, 25 bp, Homo sapien
gtctcccttggagtgattttggata

SEQ ID NO: 5636378 - DNA, 25 bp, Homo sapien
gtagtaacctttgttcctcgttcac

SEQ ID NO: 5636379 - DNA, 25 bp, Homo sapien
gtgaacgaggaacaaaggttactac

SEQ ID NO: 5636380 - DNA, 25 bp, Homo sapien
tgacttgtcctaaatgacacaatca

SEQ ID NO: 5636381 - DNA, 25 bp, Homo sapien
atcaaagggctttactgtctgtacc

SEQ ID NO: 5636382 - DNA, 25 bp, Homo sapien
acaggcataagcatccactataggc

SEQ ID NO: 5636383 - DNA, 25 bp, Homo sapien
aagcatccactataggccaaggtac

SEQ ID NO: 5636384 - DNA, 25 bp, Homo sapien
gtctgtacccagatgctcattgtta

SEQ ID NO: 5636385 - DNA, 25 bp, Homo sapien
aacatgattaacagtattatggttt

SEQ ID NO: 5636386 - DNA, 25 bp, Homo sapien
ccactataggccaaggtactttgta

SEQ ID NO: 5636387 - DNA, 25 bp, Homo sapien
tcatacagcaatcaaagggctttac

SEQ ID NO: 5636388 - DNA, 25 bp, Homo sapien
tttataaggaagtctaaaattcata

SEQ ID NO: 5636389 - DNA, 25 bp, Homo sapien
aagttgcagtctaagtcttaacttt

SEQ ID NO: 5636390 - DNA, 25 bp, Homo sapien
aaattcttacctcaagagatcttcc

SEQ ID NO: 5636391 - DNA, 25 bp, Homo sapien
caattatcctggagtagggcaggca

SEQ ID NO: 5636392 - DNA, 25 bp, Homo sapien
tccaaacacacaaagatgtcagtgc

SEQ ID NO: 5636393 - DNA, 25 bp, Homo sapien
agcttgttgctctagaaagttgttc

SEQ ID NO: 5636394 - DNA, 25 bp, Homo sapien
aggtaaacaaaggatgctgtagcta

SEQ ID NO: 5636395 - DNA, 25 bp, Homo sapien
gggtggatccgtgttccagtcacct

SEQ ID NO: 5636396 - DNA, 25 bp, Homo sapien
gtttttgtaacaagcatgtgctgct

SEQ ID NO: 5636397 - DNA, 25 bp, Homo sapien
agtaggatttggaagtagctttttc

SEQ ID NO: 5636398 - DNA, 25 bp, Homo sapien
tataagatattaagtgccaacgtgt

SEQ ID NO: 5636399 - DNA, 25 bp, Homo sapien
atcttgtctttggggtaagtaggat

SEQ ID NO: 5636400 - DNA, 25 bp, Homo sapien
gccaacgtgttttatgaaagactat

SEQ ID NO: 5636401 - DNA, 25 bp, Homo sapien
caccttcctccaggggtggatccgt

SEQ ID NO: 5636402 - DNA, 25 bp, Homo sapien
tatggatatggaaatatgggactac

SEQ ID NO: 5636403 - DNA, 25 bp, Homo sapien
aggaagcaatgagtctgaatgtaga

SEQ ID NO: 5636404 - DNA, 25 bp, Homo sapien
aaggacacacaacagaagttactac

SEQ ID NO: 5636405 - DNA, 25 bp, Homo sapien
agaaaacgacatgaaagaaaaaaga

SEQ ID NO: 5636406 - DNA, 25 bp, Homo sapien
gtagagttcacaggactaatgagca

SEQ ID NO: 5636407 - DNA, 25 bp, Homo sapien
tattgagtgggaaaaacagatcata

SEQ ID NO: 5636408 - DNA, 25 bp, Homo sapien
ctagggatcaagttcaaaagcattt

SEQ ID NO: 5636409 - DNA, 25 bp, Homo sapien
aagaaaggcactcaagtattgctgc

SEQ ID NO: 5636410 - DNA, 25 bp, Homo sapien
gaatacagatgtaagacaccgaacc

SEQ ID NO: 5636411 - DNA, 25 bp, Homo sapien
tgctgttttggtgaagaatggagaa

SEQ ID NO: 5636412 - DNA, 25 bp, Homo sapien
gacaccgaacccagcctacctaaca

SEQ ID NO: 5636413 - DNA, 25 bp, Homo sapien
cctgggtccttcatgacgatgtgaa

SEQ ID NO: 5636414 - DNA, 25 bp, Homo sapien
ttcacatcgtcatgaaggacccagg

SEQ ID NO: 5636415 - DNA, 25 bp, Homo sapien
atacacagaagtttgcacagattct

SEQ ID NO: 5636416 - DNA, 25 bp, Homo sapien
ctgaaacaccttcatagacccttgc

SEQ ID NO: 5636417 - DNA, 25 bp, Homo sapien
acatataatagaagcctgataaata

SEQ ID NO: 5636418 - DNA, 25 bp, Homo sapien
aaacactgataaacccaacactgat

SEQ ID NO: 5636419 - DNA, 25 bp, Homo sapien
attcatcaagtcaagcatcttctcc

SEQ ID NO: 5636420 - DNA, 25 bp, Homo sapien
ttgtggaattaatgaataactgttt

SEQ ID NO: 5636421 - DNA, 25 bp, Homo sapien
cagtgcctcacatataatagaagcc

SEQ ID NO: 5636422 - DNA, 25 bp, Homo sapien
tgaaacaggttcagaaatgattgca

SEQ ID NO: 5636423 - DNA, 25 bp, Homo sapien
attacttcctagatggttcctttac

SEQ ID NO: 5636424 - DNA, 25 bp, Homo sapien
ttattgccaatcattccgtgtttaa

SEQ ID NO: 5636425 - DNA, 25 bp, Homo sapien
tggttcctttacagccatgcccagc

SEQ ID NO: 5636426 - DNA, 25 bp, Homo sapien
atgctggaaattttgagagtggtgg

SEQ ID NO: 5636427 - DNA, 25 bp, Homo sapien
atagaaattgataaaggataagctt

SEQ ID NO: 5636428 - DNA, 25 bp, Homo sapien
caggtgaagctgtgagatttgtttt

SEQ ID NO: 5636429 - DNA, 25 bp, Homo sapien
caaggactccttatggccactcatc

SEQ ID NO: 5636430 - DNA, 25 bp, Homo sapien
gctaaaggctagtaagatggacttg

SEQ ID NO: 5636431 - DNA, 25 bp, Homo sapien
tgtaacaaactaccgtggagaccac

SEQ ID NO: 5636432 - DNA, 25 bp, Homo sapien
cattttttgatgggctagagaggtg

SEQ ID NO: 5636433 - DNA, 25 bp, Homo sapien
ataggtacctaatagcagcaggctt

SEQ ID NO: 5636434 - DNA, 25 bp, Homo sapien
tggagaccacgcatcaggttcattc

SEQ ID NO: 5636435 - DNA, 25 bp, Homo sapien
gatggacttgagtttaaggtgctgc

SEQ ID NO: 5636436 - DNA, 25 bp, Homo sapien
gggaatctcataaatgtgggacctc

SEQ ID NO: 5636437 - DNA, 25 bp, Homo sapien
tgcaaatacagaagtcagacaagaa

SEQ ID NO: 5636438 - DNA, 25 bp, Homo sapien
aacaatgccaccgtgttgaacacac

SEQ ID NO: 5636439 - DNA, 25 bp, Homo sapien
ggcaagcaatctgttgtatggaatc

SEQ ID NO: 5636440 - DNA, 25 bp, Homo sapien
attaaagtgaaaacaggagtgatag

SEQ ID NO: 5636441 - DNA, 25 bp, Homo sapien
ataagagcccatcatgcagtactgc

SEQ ID NO: 5636442 - DNA, 25 bp, Homo sapien
tcattatgaagtcagggagaacaat

SEQ ID NO: 5636443 - DNA, 25 bp, Homo sapien
gacaagaagcaccaagaacttaaaa

SEQ ID NO: 5636444 - DNA, 25 bp, Homo sapien
ctaacgatatctggctgcaggtggg

SEQ ID NO: 5636445 - DNA, 25 bp, Homo sapien
taagcactaacccaggcaagcaatc

SEQ ID NO: 5636446 - DNA, 25 bp, Homo sapien
acaaagataagaattagcagatagt

SEQ ID NO: 5636447 - DNA, 25 bp, Homo sapien
gccagcctagcatccaaattacttc

SEQ ID NO: 5636448 - DNA, 25 bp, Homo sapien
attcaaaaggaacgtaaagaacaca

SEQ ID NO: 5636449 - DNA, 25 bp, Homo sapien
aaggggcagtaaagaatctgtaact

SEQ ID NO: 5636450 - DNA, 25 bp, Homo sapien
tcatggggaaataccagactgcaaa

SEQ ID NO: 5636451 - DNA, 25 bp, Homo sapien
gacatgagtcaaaccgaacttcagc

SEQ ID NO: 5636452 - DNA, 25 bp, Homo sapien
gaagagaaggaccacgactattaca

SEQ ID NO: 5636453 - DNA, 25 bp, Homo sapien
atagggcagaactgcacaggtcttt

SEQ ID NO: 5636454 - DNA, 25 bp, Homo sapien
taaagttcagacataaaaaggggca

SEQ ID NO: 5636455 - DNA, 25 bp, Homo sapien
atgcctcccaaggcaatgggactcc

SEQ ID NO: 5636456 - DNA, 25 bp, Homo sapien
acaaggacgtgttaaatcaaggcac

SEQ ID NO: 5636457 - DNA, 25 bp, Homo sapien
gaatcactgaaacgagccatatgcc

SEQ ID NO: 5636458 - DNA, 25 bp, Homo sapien
tacaaggccgcaaaatcatttccac

SEQ ID NO: 5636459 - DNA, 25 bp, Homo sapien
gggtggataagtcttcagtacctta

SEQ ID NO: 5636460 - DNA, 25 bp, Homo sapien
gaactagcatttagcataatacagc

SEQ ID NO: 5636461 - DNA, 25 bp, Homo sapien
tcagtaccttacctgcaggcaattc

SEQ ID NO: 5636462 - DNA, 25 bp, Homo sapien
ggatataagctccatcacggctagt

SEQ ID NO: 5636463 - DNA, 25 bp, Homo sapien
aacaagtttatagcaaagagggaac

SEQ ID NO: 5636464 - DNA, 25 bp, Homo sapien
caaagagggaacatttttagtggta

SEQ ID NO: 5636465 - DNA, 25 bp, Homo sapien
taagttatctaaagcatcaagagtt

SEQ ID NO: 5636466 - DNA, 25 bp, Homo sapien
tcaagagttaaaatgcactgggggt

SEQ ID NO: 5636467 - DNA, 25 bp, Homo sapien
gttttataacgaatggagtctccta

SEQ ID NO: 5636468 - DNA, 25 bp, Homo sapien
ttgtaggctttgaataactgtttta

SEQ ID NO: 5636469 - DNA, 25 bp, Homo sapien
tgattacttgattagtgtcgatctc

SEQ ID NO: 5636470 - DNA, 25 bp, Homo sapien
aacacaggaaattatcaggcaagct

SEQ ID NO: 5636471 - DNA, 25 bp, Homo sapien
ctgggtaaagcaaacagatgtgttt

SEQ ID NO: 5636472 - DNA, 25 bp, Homo sapien
ttaatgccaacgcagccctgaatta

SEQ ID NO: 5636473 - DNA, 25 bp, Homo sapien
gactcaggttttaaggactcatctc

SEQ ID NO: 5636474 - DNA, 25 bp, Homo sapien
aaaatagctgttcaaatgccaaaat

SEQ ID NO: 5636475 - DNA, 25 bp, Homo sapien
tactaaacaatatgaagatgaaacc

SEQ ID NO: 5636476 - DNA, 25 bp, Homo sapien
attgcaggctgtaaaactggacctt

SEQ ID NO: 5636477 - DNA, 25 bp, Homo sapien
attagagaaagataaaggactactc

SEQ ID NO: 5636478 - DNA, 25 bp, Homo sapien
gaatgctgactaccagagaactatt

SEQ ID NO: 5636479 - DNA, 25 bp, Homo sapien
tgacttttgaagggtgtattgaatt

SEQ ID NO: 5636480 - DNA, 25 bp, Homo sapien
caagctgccttaaatgaatgctgac

SEQ ID NO: 5636481 - DNA, 25 bp, Homo sapien
tagaatgctgacatctacaggattc

SEQ ID NO: 5636482 - DNA, 25 bp, Homo sapien
ctagaatccagaaggctttagaatc

SEQ ID NO: 5636483 - DNA, 25 bp, Homo sapien
atagaatcctggaactaatgaatcc

SEQ ID NO: 5636484 - DNA, 25 bp, Homo sapien
gcatgctagcatcttgacgtcttaa

SEQ ID NO: 5636485 - DNA, 25 bp, Homo sapien
taatgaatccagtaaataaagaacc

SEQ ID NO: 5636486 - DNA, 25 bp, Homo sapien
tagaaccgtgatggtgttagcatgc

SEQ ID NO: 5636487 - DNA, 25 bp, Homo sapien
cctgatggtactttagaatgctgac

SEQ ID NO: 5636488 - DNA, 25 bp, Homo sapien
aatcttgatgtcttggagttcctgg

SEQ ID NO: 5636489 - DNA, 25 bp, Homo sapien
ggctaaacaccaggctcatagaatc

SEQ ID NO: 5636490 - DNA, 25 bp, Homo sapien
agatggggtgcatttgcgccatttt

SEQ ID NO: 5636491 - DNA, 25 bp, Homo sapien
gatggggtgcatttgcgccatttcc

SEQ ID NO: 5636492 - DNA, 25 bp, Homo sapien
agtctactgatttgaggggaaaaaa

SEQ ID NO: 5636493 - DNA, 25 bp, Homo sapien
taagcctccaaataaacaggtataa

SEQ ID NO: 5636494 - DNA, 25 bp, Homo sapien
tttacactgatatgacagacctgac

SEQ ID NO: 5636495 - DNA, 25 bp, Homo sapien
taaacaggtataaaatttcagtcta

SEQ ID NO: 5636496 - DNA, 25 bp, Homo sapien
cttgcctagccattctaccccaaat

SEQ ID NO: 5636497 - DNA, 25 bp, Homo sapien
acactgatatgacagacctgacccc

SEQ ID NO: 5636498 - DNA, 25 bp, Homo sapien
aacaaatgtcaacttgcctagccat

SEQ ID NO: 5636499 - DNA, 25 bp, Homo sapien
tgatatgacagacctgaccccaggg

SEQ ID NO: 5636500 - DNA, 25 bp, Homo sapien
ttcagtctactgatttgaggggaaa

SEQ ID NO: 5636501 - DNA, 25 bp, Homo sapien
ataatcactaagacattaaaggctt

SEQ ID NO: 5636502 - DNA, 25 bp, Homo sapien
ataaaaccaagataatcactaagac

SEQ ID NO: 5636503 - DNA, 25 bp, Homo sapien
gaaaaatacaacaggagaactgacg

SEQ ID NO: 5636504 - DNA, 25 bp, Homo sapien
atcaatcaaacagaagcaatatatt

SEQ ID NO: 5636505 - DNA, 25 bp, Homo sapien
aaactgacaaaatagccttgctctc

SEQ ID NO: 5636506 - DNA, 25 bp, Homo sapien
aataatttcaggtaggattcagctc

SEQ ID NO: 5636507 - DNA, 25 bp, Homo sapien
ttagggagccatacatactgacaga

SEQ ID NO: 5636508 - DNA, 25 bp, Homo sapien
caggagaactgacgcattctgtagt

SEQ ID NO: 5636509 - DNA, 25 bp, Homo sapien
ttccccggaagatgcaacataaatc

SEQ ID NO: 5636510 - DNA, 25 bp, Homo sapien
actcagatgattagccttaacagac

SEQ ID NO: 5636511 - DNA, 25 bp, Homo sapien
tactgacagaaaaagacacaaaatc

SEQ ID NO: 5636512 - DNA, 25 bp, Homo sapien
atactgaatactggctatgaacatc

SEQ ID NO: 5636513 - DNA, 25 bp, Homo sapien
gcaaaagggaactagccataaacca

SEQ ID NO: 5636514 - DNA, 25 bp, Homo sapien
acaggcactaaacttcaatggatac

SEQ ID NO: 5636515 - DNA, 25 bp, Homo sapien
ggttgataaagcactggctcagtcc

SEQ ID NO: 5636516 - DNA, 25 bp, Homo sapien
taaagaaagttcttgatacctgttc

SEQ ID NO: 5636517 - DNA, 25 bp, Homo sapien
cacatggtgatgatgtgttgggttg

SEQ ID NO: 5636518 - DNA, 25 bp, Homo sapien
tctagagtatgcacatggtgatgat

SEQ ID NO: 5636519 - DNA, 25 bp, Homo sapien
tgtgttgggttgataaagcactggc

SEQ ID NO: 5636520 - DNA, 25 bp, Homo sapien
aaggccgtagaacatatttgaaatc

SEQ ID NO: 5636521 - DNA, 25 bp, Homo sapien
gcactggctcagtcctacaggcact

SEQ ID NO: 5636522 - DNA, 25 bp, Homo sapien
cagtaaggccgtagaacatatttga

SEQ ID NO: 5636523 - DNA, 25 bp, Homo sapien
tgagaaattggaatgctaagttaca

SEQ ID NO: 5636524 - DNA, 25 bp, Homo sapien
aacacgttaagagcctctgtaactt

SEQ ID NO: 5636525 - DNA, 25 bp, Homo sapien
tcttgacacataggagccaactctg

SEQ ID NO: 5636526 - DNA, 25 bp, Homo sapien
cagaaacccgaaacactactggttc

SEQ ID NO: 5636527 - DNA, 25 bp, Homo sapien
cttttcttgacacataggagccaac

SEQ ID NO: 5636528 - DNA, 25 bp, Homo sapien
aacccacccaaacacacatccatcc

SEQ ID NO: 5636529 - DNA, 25 bp, Homo sapien
caactttgtggccaagctccttcac

SEQ ID NO: 5636530 - DNA, 25 bp, Homo sapien
tctggttcccatctcctcctgcctt

SEQ ID NO: 5636531 - DNA, 25 bp, Homo sapien
tgaacatgttcaaaatatcctaatc

SEQ ID NO: 5636532 - DNA, 25 bp, Homo sapien
cagtctgtgctcaactttgtggcca

SEQ ID NO: 5636533 - DNA, 25 bp, Homo sapien
ataggggatactcagtctgtgctca

SEQ ID NO: 5636534 - DNA, 25 bp, Homo sapien
aaatcagaaacccgaaacactactg

SEQ ID NO: 5636535 - DNA, 25 bp, Homo sapien
tcacctctgataactgaaacatatg

SEQ ID NO: 5636536 - DNA, 25 bp, Homo sapien
ttgttaaatgtgagcatgtaatcca

SEQ ID NO: 5636537 - DNA, 25 bp, Homo sapien
agttcaaggtcattgccacaaagcc

SEQ ID NO: 5636538 - DNA, 25 bp, Homo sapien
cttggctagcatgacatgtgctcac

SEQ ID NO: 5636539 - DNA, 25 bp, Homo sapien
gtgctaaatccagatacaggctctc

SEQ ID NO: 5636540 - DNA, 25 bp, Homo sapien
aaaacaaagcattccgatttgggaa

SEQ ID NO: 5636541 - DNA, 25 bp, Homo sapien
agaactagatttgttggcaactggc

SEQ ID NO: 5636542 - DNA, 25 bp, Homo sapien
gcagggtgtataaataatgcctctc

SEQ ID NO: 5636543 - DNA, 25 bp, Homo sapien
tgccacaaagccttaggtaactatc

SEQ ID NO: 5636544 - DNA, 25 bp, Homo sapien
aagaaactgtatagaactagatttg

SEQ ID NO: 5636545 - DNA, 25 bp, Homo sapien
ccagccactccagaaactgaaacac

SEQ ID NO: 5636546 - DNA, 25 bp, Homo sapien
ttaatgtgcacattgcagggtgtat

SEQ ID NO: 5636547 - DNA, 25 bp, Homo sapien
atacatcctgaaagttatttgatca

SEQ ID NO: 5636548 - DNA, 25 bp, Homo sapien
aaaggaacatatctggttagctggt

SEQ ID NO: 5636549 - DNA, 25 bp, Homo sapien
attaaacagaaaattacattaccac

SEQ ID NO: 5636550 - DNA, 25 bp, Homo sapien
gagtatgctccattcaggtaaaatc

SEQ ID NO: 5636551 - DNA, 25 bp, Homo sapien
gacagtaccactgtgcctgtaaaaa

SEQ ID NO: 5636552 - DNA, 25 bp, Homo sapien
tagctggtattccattgaaagtatc

SEQ ID NO: 5636553 - DNA, 25 bp, Homo sapien
acatgttaaaaacagaataagacaa

SEQ ID NO: 5636554 - DNA, 25 bp, Homo sapien
atttgatcataagatgtaattcctt

SEQ ID NO: 5636555 - DNA, 25 bp, Homo sapien
ctatgtagaaatatgagtatgctcc

SEQ ID NO: 5636556 - DNA, 25 bp, Homo sapien
ttaccacatgaaaccaccaaatatc

SEQ ID NO: 5636557 - DNA, 25 bp, Homo sapien
ctgtgcctgtaaaaagtactgtaat

SEQ ID NO: 5636558 - DNA, 25 bp, Homo sapien
gagagtcgtccatgtgccaggtcgc

SEQ ID NO: 5636559 - DNA, 25 bp, Homo sapien
gcgacctggcacatggacgactctc

SEQ ID NO: 5636560 - DNA, 25 bp, Homo sapien
attgagtcacataatggttacatct

SEQ ID NO: 5636561 - DNA, 25 bp, Homo sapien
tggacaccagttataagtgggatgc

SEQ ID NO: 5636562 - DNA, 25 bp, Homo sapien
taagtgggatgcttgctgttaccat

SEQ ID NO: 5636563 - DNA, 25 bp, Homo sapien
aaaggaccatgcctgaatatgaatg

SEQ ID NO: 5636564 - DNA, 25 bp, Homo sapien
ttgctgttaccatgggtcccaactt

SEQ ID NO: 5636565 - DNA, 25 bp, Homo sapien
ttggcaggtgttatataaaatgaag

SEQ ID NO: 5636566 - DNA, 25 bp, Homo sapien
tccctgtaaggagatcaaataaagg

SEQ ID NO: 5636567 - DNA, 25 bp, Homo sapien
tcactcgaatgctaaaggaccatgc

SEQ ID NO: 5636568 - DNA, 25 bp, Homo sapien
tattaggttgttcttggcaggtgtt

SEQ ID NO: 5636569 - DNA, 25 bp, Homo sapien
caccaaaataggagaattagtcacc

SEQ ID NO: 5636570 - DNA, 25 bp, Homo sapien
agtcaccatggaagatagatccctg

SEQ ID NO: 5636571 - DNA, 25 bp, Homo sapien
gggctggactccagcatcctgactc

SEQ ID NO: 5636572 - DNA, 25 bp, Homo sapien
tgtgctgcagagacctgttgcgtaa

SEQ ID NO: 5636573 - DNA, 25 bp, Homo sapien
ctgagtaactgtggattgtctaacc

SEQ ID NO: 5636574 - DNA, 25 bp, Homo sapien
ctgttgcgtaacactgagtaactgt

SEQ ID NO: 5636575 - DNA, 25 bp, Homo sapien
accgcacccggcccatattacagtt

SEQ ID NO: 5636576 - DNA, 25 bp, Homo sapien
acttggggtctcaacgtctcagtcc

SEQ ID NO: 5636577 - DNA, 25 bp, Homo sapien
tcagtcctgccctatgccccgagac

SEQ ID NO: 5636578 - DNA, 25 bp, Homo sapien
attaacaaaatgagatgggatctgc

SEQ ID NO: 5636579 - DNA, 25 bp, Homo sapien
ccccagttcgtgctctgtgctgcag

SEQ ID NO: 5636580 - DNA, 25 bp, Homo sapien
cttttgctaccggccagcagtccag

SEQ ID NO: 5636581 - DNA, 25 bp, Homo sapien
attactcgtggtaggagaaatgtgt

SEQ ID NO: 5636582 - DNA, 25 bp, Homo sapien
agcccctctacgtggaattttcttc

SEQ ID NO: 5636583 - DNA, 25 bp, Homo sapien
tatgcccttacaattgctggaaaat

SEQ ID NO: 5636584 - DNA, 25 bp, Homo sapien
caggaggattaaatgtgataaagta

SEQ ID NO: 5636585 - DNA, 25 bp, Homo sapien
aaacataggatgaatcaactgtatt

SEQ ID NO: 5636586 - DNA, 25 bp, Homo sapien
cataaagactttaaagcccctctac

SEQ ID NO: 5636587 - DNA, 25 bp, Homo sapien
tgggaatcatacctacctcaaagca

SEQ ID NO: 5636588 - DNA, 25 bp, Homo sapien
aagcattgacaggaggattaaatgt

SEQ ID NO: 5636589 - DNA, 25 bp, Homo sapien
tcattcgcagaagaaacccttgata

SEQ ID NO: 5636590 - DNA, 25 bp, Homo sapien
ttaggcttggaagatataaatagct

SEQ ID NO: 5636591 - DNA, 25 bp, Homo sapien
gacggcgcagcctggctctatcatt

SEQ ID NO: 5636592 - DNA, 25 bp, Homo sapien
tgtaaaccaacgttaggctagagga

SEQ ID NO: 5636593 - DNA, 25 bp, Homo sapien
tcaatcggtatggaaaaccggagac

SEQ ID NO: 5636594 - DNA, 25 bp, Homo sapien
ccagaagattggccaccttgtttta

SEQ ID NO: 5636595 - DNA, 25 bp, Homo sapien
aagcagccctgaactatcaatcggt

SEQ ID NO: 5636596 - DNA, 25 bp, Homo sapien
tctacacagccaatcccaatctacc

SEQ ID NO: 5636597 - DNA, 25 bp, Homo sapien
ccaagacagttctcccaatgtggcc

SEQ ID NO: 5636598 - DNA, 25 bp, Homo sapien
tgaagagctccaagacccactaatc

SEQ ID NO: 5636599 - DNA, 25 bp, Homo sapien
aaccggagaccatacataagaaatc

SEQ ID NO: 5636600 - DNA, 25 bp, Homo sapien
caatttcaaagagactttagaaggg

SEQ ID NO: 5636601 - DNA, 25 bp, Homo sapien
cttaaaacctctacacagccaatcc

SEQ ID NO: 5636602 - DNA, 25 bp, Homo sapien
aatcatctgtaggtggcagtagaag

SEQ ID NO: 5636603 - DNA, 25 bp, Homo sapien
aaactgtgtgagtactcctacattc

SEQ ID NO: 5636604 - DNA, 25 bp, Homo sapien
tgctcaaacactggacagtaggaag

SEQ ID NO: 5636605 - DNA, 25 bp, Homo sapien
tgatgccttaaacactagacaactc

SEQ ID NO: 5636606 - DNA, 25 bp, Homo sapien
tttatctatgaaagaagagaaacga

SEQ ID NO: 5636607 - DNA, 25 bp, Homo sapien
acatgaaactactgtgctcaaacac

SEQ ID NO: 5636608 - DNA, 25 bp, Homo sapien
aacaaggcagatcctatgataaccc

SEQ ID NO: 5636609 - DNA, 25 bp, Homo sapien
ggacagtaggaagcacagtattttt

SEQ ID NO: 5636610 - DNA, 25 bp, Homo sapien
tatctatgaaagaagagaaacgaac

SEQ ID NO: 5636611 - DNA, 25 bp, Homo sapien
aaactactgtgctcaaacactggac

SEQ ID NO: 5636612 - DNA, 25 bp, Homo sapien
ctgtgctcaaacactggacagtagg

SEQ ID NO: 5636613 - DNA, 25 bp, Homo sapien
agaaacgaacaaggcagatcctatg

SEQ ID NO: 5636614 - DNA, 25 bp, Homo sapien
taaacactagacaactcagcagatt

SEQ ID NO: 5636615 - DNA, 25 bp, Homo sapien
ttaattggtatgcctaactctcccc

SEQ ID NO: 5636616 - DNA, 25 bp, Homo sapien
cttaatggcattttgggattagctt

SEQ ID NO: 5636617 - DNA, 25 bp, Homo sapien
tcacctggaccacttgagttgttat

SEQ ID NO: 5636618 - DNA, 25 bp, Homo sapien
gatggaaaatttggattactgctgt

SEQ ID NO: 5636619 - DNA, 25 bp, Homo sapien
aaaaggatcacccactgatggattc

SEQ ID NO: 5636620 - DNA, 25 bp, Homo sapien
ctttaccattgagtcccaggaaata

SEQ ID NO: 5636621 - DNA, 25 bp, Homo sapien
cttcaacagtaccaagagtcgtatt

SEQ ID NO: 5636622 - DNA, 25 bp, Homo sapien
ttcatgttggattcactgtgagttc

SEQ ID NO: 5636623 - DNA, 25 bp, Homo sapien
ttggaaaattaaagtgataagcact

SEQ ID NO: 5636624 - DNA, 25 bp, Homo sapien
acgtgtgtgtgacatgaagtataac

SEQ ID NO: 5636625 - DNA, 25 bp, Homo sapien
tgtgcagtggtggtaataaaattgt

SEQ ID NO: 5636626 - DNA, 25 bp, Homo sapien
tttgccctgtaatgaaagaaaccaa

SEQ ID NO: 5636627 - DNA, 25 bp, Homo sapien
agaattgactgcctggctgtgtggg

SEQ ID NO: 5636628 - DNA, 25 bp, Homo sapien
aggcgaaggatacgcatcaactcaa

SEQ ID NO: 5636629 - DNA, 25 bp, Homo sapien
ctggagcttgcaattggtgtggcaa

SEQ ID NO: 5636630 - DNA, 25 bp, Homo sapien
ttacacagcagctacgacagaaaga

SEQ ID NO: 5636631 - DNA, 25 bp, Homo sapien
tctcagtccacagggagaactttgc

SEQ ID NO: 5636632 - DNA, 25 bp, Homo sapien
aaagatagctctcaggcgaaggata

SEQ ID NO: 5636633 - DNA, 25 bp, Homo sapien
aaaaggatgattacaaagatagctc

SEQ ID NO: 5636634 - DNA, 25 bp, Homo sapien
gaggacacccacctggtgacctctc

SEQ ID NO: 5636635 - DNA, 25 bp, Homo sapien
tcaccctgtgggatctgacactatc

SEQ ID NO: 5636636 - DNA, 25 bp, Homo sapien
ttataatcggttggccagaagcaca

SEQ ID NO: 5636637 - DNA, 25 bp, Homo sapien
actgtcagtgtctgtttgcagcctt

SEQ ID NO: 5636638 - DNA, 25 bp, Homo sapien
agaggtagaaagctgtcaaatacct

SEQ ID NO: 5636639 - DNA, 25 bp, Homo sapien
atgccttccatccagttgttttgct

SEQ ID NO: 5636640 - DNA, 25 bp, Homo sapien
tcttttgccattgggactgcttgtc

SEQ ID NO: 5636641 - DNA, 25 bp, Homo sapien
gttttgctgtatctcatgccaactt

SEQ ID NO: 5636642 - DNA, 25 bp, Homo sapien
aaagcctttttataagtgccaccta

SEQ ID NO: 5636643 - DNA, 25 bp, Homo sapien
gtgccacctaacacattcatgggct

SEQ ID NO: 5636644 - DNA, 25 bp, Homo sapien
gtcagacacacttcattgcagcctt

SEQ ID NO: 5636645 - DNA, 25 bp, Homo sapien
acaggcctggagtctggttcattct

SEQ ID NO: 5636646 - DNA, 25 bp, Homo sapien
cacattcatgggctgcttccctggg

SEQ ID NO: 5636647 - DNA, 25 bp, Homo sapien
cattgggactgcttgtcagacacac

SEQ ID NO: 5636648 - DNA, 25 bp, Homo sapien
ccaggttctaggagacaaatagctt

SEQ ID NO: 5636649 - DNA, 25 bp, Homo sapien
aaggggaacaactgattgtcttttc

SEQ ID NO: 5636650 - DNA, 25 bp, Homo sapien
ctggacaggatcacagagtcaataa

SEQ ID NO: 5636651 - DNA, 25 bp, Homo sapien
caaatagcttctggtattgtgcccc

SEQ ID NO: 5636652 - DNA, 25 bp, Homo sapien
ggttctgaacaatgtgtaggcccac

SEQ ID NO: 5636653 - DNA, 25 bp, Homo sapien
aactgagtgatgtgggtctcctgta

SEQ ID NO: 5636654 - DNA, 25 bp, Homo sapien
acagagtcaataaacccagagccag

SEQ ID NO: 5636655 - DNA, 25 bp, Homo sapien
accagactctcccaccaggtgtcct

SEQ ID NO: 5636656 - DNA, 25 bp, Homo sapien
gtgggtctcctgtaaggtaagtgga

SEQ ID NO: 5636657 - DNA, 25 bp, Homo sapien
tcaaacaagttgtgagtagaggaag

SEQ ID NO: 5636658 - DNA, 25 bp, Homo sapien
gccccagtcctacttgtgcagttcc

SEQ ID NO: 5636659 - DNA, 25 bp, Homo sapien
aaagagaacgatctgaccatcatcc

SEQ ID NO: 5636660 - DNA, 25 bp, Homo sapien
tttcgggtaattcccagtgaggaca

SEQ ID NO: 5636661 - DNA, 25 bp, Homo sapien
tgaggacaacctcatcagtgaagtt

SEQ ID NO: 5636662 - DNA, 25 bp, Homo sapien
aggtcagcaaaagagaacgatctga

SEQ ID NO: 5636663 - DNA, 25 bp, Homo sapien
cgggtaattcccagtgaggacaacc

SEQ ID NO: 5636664 - DNA, 25 bp, Homo sapien
cagcaaaagagaacgatctgaccat

SEQ ID NO: 5636665 - DNA, 25 bp, Homo sapien
ttacaccatcagaaaatactcattt

SEQ ID NO: 5636666 - DNA, 25 bp, Homo sapien
atcatcctaggacagctacaattac

SEQ ID NO: 5636667 - DNA, 25 bp, Homo sapien
ctgaccatcatcctaggacagctac

SEQ ID NO: 5636668 - DNA, 25 bp, Homo sapien
ctaggacagctacaattacaccatc

SEQ ID NO: 5636669 - DNA, 25 bp, Homo sapien
aatactcattttcgggtaattccca

SEQ ID NO: 5636670 - DNA, 25 bp, Homo sapien
ttcctgcagctatccgagaagcgaa

SEQ ID NO: 5636671 - DNA, 25 bp, Homo sapien
gagaaatgagaacagaatcccaatc

SEQ ID NO: 5636672 - DNA, 25 bp, Homo sapien
aatgctgatatgggagtaactgttc

SEQ ID NO: 5636673 - DNA, 25 bp, Homo sapien
gagaagcgaagaaatcttgccaagt

SEQ ID NO: 5636674 - DNA, 25 bp, Homo sapien
atccccatgtaccgagggtaggtat

SEQ ID NO: 5636675 - DNA, 25 bp, Homo sapien
ctatctgtcctggctgatcagtatc

SEQ ID NO: 5636676 - DNA, 25 bp, Homo sapien
atttaagaaggccaaatagaaaata

SEQ ID NO: 5636677 - DNA, 25 bp, Homo sapien
ctctggctttgacagcacttggtcc

SEQ ID NO: 5636678 - DNA, 25 bp, Homo sapien
gggtaggtatcgcagtttccagcag

SEQ ID NO: 5636679 - DNA, 25 bp, Homo sapien
tcacttacgtgagctatccccatgt

SEQ ID NO: 5636680 - DNA, 25 bp, Homo sapien
tccagcagaaaacccctatctgtcc

SEQ ID NO: 5636681 - DNA, 25 bp, Homo sapien
ttagcaccagctttgaaataagttg

SEQ ID NO: 5636682 - DNA, 25 bp, Homo sapien
atgagcatatgtaacaaattgggac

SEQ ID NO: 5636683 - DNA, 25 bp, Homo sapien
aatatgtccaggccaaaatgttgtc

SEQ ID NO: 5636684 - DNA, 25 bp, Homo sapien
tataacaacagctgctaattccctc

SEQ ID NO: 5636685 - DNA, 25 bp, Homo sapien
aataaagttcaaaaatggagtcatc

SEQ ID NO: 5636686 - DNA, 25 bp, Homo sapien
ttgtgaaagttggatcagtttaaat

SEQ ID NO: 5636687 - DNA, 25 bp, Homo sapien
taaaactagataatttgcaaaggtc

SEQ ID NO: 5636688 - DNA, 25 bp, Homo sapien
ttgcaaaggtcaacccaatgctccc

SEQ ID NO: 5636689 - DNA, 25 bp, Homo sapien
gagaagtaccagttcactctaggtt

SEQ ID NO: 5636690 - DNA, 25 bp, Homo sapien
tttatgaagtctggcaacaatccct

SEQ ID NO: 5636691 - DNA, 25 bp, Homo sapien
tgtctgaactacagcaagctactcc

SEQ ID NO: 5636692 - DNA, 25 bp, Homo sapien
tcatgtaaaatgagcgttctgatct

SEQ ID NO: 5636693 - DNA, 25 bp, Homo sapien
caccccacctggcaagatcttatat

SEQ ID NO: 5636694 - DNA, 25 bp, Homo sapien
gcccaatgacagactaaatgagaaa

SEQ ID NO: 5636695 - DNA, 25 bp, Homo sapien
cacaactcactaagtctccagatga

SEQ ID NO: 5636696 - DNA, 25 bp, Homo sapien
gttaatgggtaaagagcttcaaatc

SEQ ID NO: 5636697 - DNA, 25 bp, Homo sapien
tattcaagatattacacaactcact

SEQ ID NO: 5636698 - DNA, 25 bp, Homo sapien
tgacagtttgacaatgcccaatgac

SEQ ID NO: 5636699 - DNA, 25 bp, Homo sapien
atctaggaagttaacaaccattcta

SEQ ID NO: 5636700 - DNA, 25 bp, Homo sapien
agaaattaggaggcagcttgatttt

SEQ ID NO: 5636701 - DNA, 25 bp, Homo sapien
actaagtctccagatgaaaaccaga

SEQ ID NO: 5636702 - DNA, 25 bp, Homo sapien
tctgatctctgacacacaaagctat

SEQ ID NO: 5636703 - DNA, 25 bp, Homo sapien
atctgtactcgacctggctcggagc

SEQ ID NO: 5636704 - DNA, 25 bp, Homo sapien
gtccacttgccaatgggaaaacatc

SEQ ID NO: 5636705 - DNA, 25 bp, Homo sapien
gcccttctcccaggcgctgtcgcgg

SEQ ID NO: 5636706 - DNA, 25 bp, Homo sapien
gggaggtcctagcactgcaccctcc

SEQ ID NO: 5636707 - DNA, 25 bp, Homo sapien
gccaacaccaacacttctgaagaac

SEQ ID NO: 5636708 - DNA, 25 bp, Homo sapien
gccactggtcacaccagcgcagcag

SEQ ID NO: 5636709 - DNA, 25 bp, Homo sapien
aaacagggcttctgtgccaacacca

SEQ ID NO: 5636710 - DNA, 25 bp, Homo sapien
ccacccccagcagccactggtcaca

SEQ ID NO: 5636711 - DNA, 25 bp, Homo sapien
gccggcgatccgtgcccttctccca

SEQ ID NO: 5636712 - DNA, 25 bp, Homo sapien
ctgaagaacgttctcgtccacttgc

SEQ ID NO: 5636713 - DNA, 25 bp, Homo sapien
tgccaatgggaaaacatctgtactc

SEQ ID NO: 5636714 - DNA, 25 bp, Homo sapien
gagctgcacttcaagagccatcttc

SEQ ID NO: 5636715 - DNA, 25 bp, Homo sapien
tcctccagagagccttccgatgatc

SEQ ID NO: 5636716 - DNA, 25 bp, Homo sapien
atggacctacattgagaaacagctt

SEQ ID NO: 5636717 - DNA, 25 bp, Homo sapien
atgtaccctgggatcagtagagtga

SEQ ID NO: 5636718 - DNA, 25 bp, Homo sapien
cttgaaatcggtggctgtcatgtgt

SEQ ID NO: 5636719 - DNA, 25 bp, Homo sapien
cagaagccaaaagtcccaatgttat

SEQ ID NO: 5636720 - DNA, 25 bp, Homo sapien
tcaagatacagatgtcctatggacc

SEQ ID NO: 5636721 - DNA, 25 bp, Homo sapien
gtgtggtcatggccttcacaggatc

SEQ ID NO: 5636722 - DNA, 25 bp, Homo sapien
gacctcgggccagctttcagcatct

SEQ ID NO: 5636723 - DNA, 25 bp, Homo sapien
acaggatcccagtcggtgcaattca

SEQ ID NO: 5636724 - DNA, 25 bp, Homo sapien
ctcctccgcttgctggttgtggacc

SEQ ID NO: 5636725 - DNA, 25 bp, Homo sapien
tagtgcagagacacaaaagaataaa

SEQ ID NO: 5636726 - DNA, 25 bp, Homo sapien
agggcattagtgcagagacacaaaa

SEQ ID NO: 5636727 - DNA, 25 bp, Homo sapien
tctacgtcagcaacaatggaggaaa

SEQ ID NO: 5636728 - DNA, 25 bp, Homo sapien
ccaggatagagcacaaatgcaatgt

SEQ ID NO: 5636729 - DNA, 25 bp, Homo sapien
gaataaaatgtgaatggagctgaat

SEQ ID NO: 5636730 - DNA, 25 bp, Homo sapien
tgaactgaaggagttttgtagaggg

SEQ ID NO: 5636731 - DNA, 25 bp, Homo sapien
tgaatgaaaagccacctaggggtta

SEQ ID NO: 5636732 - DNA, 25 bp, Homo sapien
tcataaatgaatcctggtctgtttc

SEQ ID NO: 5636733 - DNA, 25 bp, Homo sapien
ggagctgaattgaaataacactgag

SEQ ID NO: 5636734 - DNA, 25 bp, Homo sapien
tcagggtaaagatcaaattattagg

SEQ ID NO: 5636735 - DNA, 25 bp, Homo sapien
cctaggggttagcatattgaaggga

SEQ ID NO: 5636736 - DNA, 25 bp, Homo sapien
ggggacatttccacacttgagcgct

SEQ ID NO: 5636737 - DNA, 25 bp, Homo sapien
ttgagcgcttctctgttgctttggt

SEQ ID NO: 5636738 - DNA, 25 bp, Homo sapien
gggctacctgatgcaaaggctctga

SEQ ID NO: 5636739 - DNA, 25 bp, Homo sapien
caagcccacctgtcgctcggcctgg

SEQ ID NO: 5636740 - DNA, 25 bp, Homo sapien
gtcaggagcacaatgttgcagaagg

SEQ ID NO: 5636741 - DNA, 25 bp, Homo sapien
actgtggtcctacagtgagctggag

SEQ ID NO: 5636742 - DNA, 25 bp, Homo sapien
ttccagtggcttccaaaagaagtgc

SEQ ID NO: 5636743 - DNA, 25 bp, Homo sapien
tggatacagacttgactgtggtcct

SEQ ID NO: 5636744 - DNA, 25 bp, Homo sapien
gggctgagctccatctgcggctttg

SEQ ID NO: 5636745 - DNA, 25 bp, Homo sapien
agctccatctgcggctttgtcgggg

SEQ ID NO: 5636746 - DNA, 25 bp, Homo sapien
catccctcaatttccagtggcttcc

SEQ ID NO: 5636747 - DNA, 25 bp, Homo sapien
tcttgcttaagactgagcgaggctt

SEQ ID NO: 5636748 - DNA, 25 bp, Homo sapien
atttctagcaacagcgcctgaacgc

SEQ ID NO: 5636749 - DNA, 25 bp, Homo sapien
ccctggattctcagtgctgcgggcg

SEQ ID NO: 5636750 - DNA, 25 bp, Homo sapien
gccatgctgccttcaaaacagagta

SEQ ID NO: 5636751 - DNA, 25 bp, Homo sapien
cggcaagctgccttcagtctgtgct

SEQ ID NO: 5636752 - DNA, 25 bp, Homo sapien
tgtgttcaccctgccatgctgcctt

SEQ ID NO: 5636753 - DNA, 25 bp, Homo sapien
cgccatcccgcctgcccctggattc

SEQ ID NO: 5636754 - DNA, 25 bp, Homo sapien
aaccgcggcaagctgccttcagtct

SEQ ID NO: 5636755 - DNA, 25 bp, Homo sapien
acagagatttctagcaacagcgcct

SEQ ID NO: 5636756 - DNA, 25 bp, Homo sapien
agtctgtgcttgtgttcaccctgcc

SEQ ID NO: 5636757 - DNA, 25 bp, Homo sapien
aaacagagtaaagacagagatttct

SEQ ID NO: 5636758 - DNA, 25 bp, Homo sapien
ccccttagaaagctgactgggaatt

SEQ ID NO: 5636759 - DNA, 25 bp, Homo sapien
accatttgagcgcttggcacaaaac

SEQ ID NO: 5636760 - DNA, 25 bp, Homo sapien
aggtcatgtgtggccacagctgttg

SEQ ID NO: 5636761 - DNA, 25 bp, Homo sapien
ttgcaatgatttcatgagaggcttc

SEQ ID NO: 5636762 - DNA, 25 bp, Homo sapien
cccttagcccccaccccttgctgtc

SEQ ID NO: 5636763 - DNA, 25 bp, Homo sapien
cccctctgagattctgggggtgggt

SEQ ID NO: 5636764 - DNA, 25 bp, Homo sapien
gctgactgggaattgcaagtcgact

SEQ ID NO: 5636765 - DNA, 25 bp, Homo sapien
aattgcaagtcgactggtgcttccc

SEQ ID NO: 5636766 - DNA, 25 bp, Homo sapien
ttagccacagatcgcctgagcaacg

SEQ ID NO: 5636767 - DNA, 25 bp, Homo sapien
gatatgaacagtaatcagcagccac

SEQ ID NO: 5636768 - DNA, 25 bp, Homo sapien
tcccagattagccacagatcgcctg

SEQ ID NO: 5636769 - DNA, 25 bp, Homo sapien
cataaaaagtgatttggcctatttt

SEQ ID NO: 5636770 - DNA, 25 bp, Homo sapien
aaaacatgattgcataaaaagtgat

SEQ ID NO: 5636771 - DNA, 25 bp, Homo sapien
tgcaatgagaccactgtataaaaca

SEQ ID NO: 5636772 - DNA, 25 bp, Homo sapien
gacataccagcatgataaggatacc

SEQ ID NO: 5636773 - DNA, 25 bp, Homo sapien
ttctacatcagggtcatgctgatac

SEQ ID NO: 5636774 - DNA, 25 bp, Homo sapien
ttagggtgtatattgacataccagc

SEQ ID NO: 5636775 - DNA, 25 bp, Homo sapien
taccataccagtcctcagaaaatac

SEQ ID NO: 5636776 - DNA, 25 bp, Homo sapien
taaggataccgtaaaaagtgcagaa

SEQ ID NO: 5636777 - DNA, 25 bp, Homo sapien
tccatagcagtacatatagcaatac

SEQ ID NO: 5636778 - DNA, 25 bp, Homo sapien
aataatagaatacaaggcacaatca

SEQ ID NO: 5636779 - DNA, 25 bp, Homo sapien
atagaaatggtaagtatgttggttt

SEQ ID NO: 5636780 - DNA, 25 bp, Homo sapien
ggcttctgtgtgctactgacgtacc

SEQ ID NO: 5636781 - DNA, 25 bp, Homo sapien
gatggtaaacaatcagtcctacctc

SEQ ID NO: 5636782 - DNA, 25 bp, Homo sapien
gctccaggtccaaaaggtcacaaga

SEQ ID NO: 5636783 - DNA, 25 bp, Homo sapien
tctgtgtgctactgacgtacccatc

SEQ ID NO: 5636784 - DNA, 25 bp, Homo sapien
gtcacaagaggtcatgttctccagc

SEQ ID NO: 5636785 - DNA, 25 bp, Homo sapien
aaaaggtcacaagaggtcatgttct

SEQ ID NO: 5636786 - DNA, 25 bp, Homo sapien
agaggcttctgtgtgctactgacgt

SEQ ID NO: 5636787 - DNA, 25 bp, Homo sapien
aacaatcagtcctacctccgcgggg

SEQ ID NO: 5636788 - DNA, 25 bp, Homo sapien
gcagggattgtcctgggccctgcac

SEQ ID NO: 5636789 - DNA, 25 bp, Homo sapien
ttctgcacatctggcacatgcaggg

SEQ ID NO: 5636790 - DNA, 25 bp, Homo sapien
taagcatgagatgtttgagaaggtg

SEQ ID NO: 5636791 - DNA, 25 bp, Homo sapien
tccgcctgtataccatgggggattg

SEQ ID NO: 5636792 - DNA, 25 bp, Homo sapien
cataatccacggatgctcaagtccc

SEQ ID NO: 5636793 - DNA, 25 bp, Homo sapien
ggcatagaaatgggatattcagtac

SEQ ID NO: 5636794 - DNA, 25 bp, Homo sapien
cctaatataaaatggtgcagtgttt

SEQ ID NO: 5636795 - DNA, 25 bp, Homo sapien
tctgcagataccataatccacggat

SEQ ID NO: 5636796 - DNA, 25 bp, Homo sapien
aagtcaagcaacagtatgaattaat

SEQ ID NO: 5636797 - DNA, 25 bp, Homo sapien
gcacggaattaagtcaagcaacagt

SEQ ID NO: 5636798 - DNA, 25 bp, Homo sapien
ataaatcaccttaggaaaaactgaa

SEQ ID NO: 5636799 - DNA, 25 bp, Homo sapien
gggattggttacaggactctctctg

SEQ ID NO: 5636800 - DNA, 25 bp, Homo sapien
taagaatatatagtcatccgcctgt

SEQ ID NO: 5636801 - DNA, 25 bp, Homo sapien
acaaaaaacagatatcacagttata

SEQ ID NO: 5636802 - DNA, 25 bp, Homo sapien
ctcagggtgatgtctgactgtccaa

SEQ ID NO: 5636803 - DNA, 25 bp, Homo sapien
ggtcagtagagcaggtttcctggct

SEQ ID NO: 5636804 - DNA, 25 bp, Homo sapien
cccctgtccctagctcttggccctc

SEQ ID NO: 5636805 - DNA, 25 bp, Homo sapien
cccatgaaatgcaataccacagtac

SEQ ID NO: 5636806 - DNA, 25 bp, Homo sapien
aataactgcacataatacaccctcc

SEQ ID NO: 5636807 - DNA, 25 bp, Homo sapien
agagcaggtttcctggctaaaggaa

SEQ ID NO: 5636808 - DNA, 25 bp, Homo sapien
gaaagcttccatcaggtagctttac

SEQ ID NO: 5636809 - DNA, 25 bp, Homo sapien
cctccctaccacctgggccagtctc

SEQ ID NO: 5636810 - DNA, 25 bp, Homo sapien
taatcgttcaggccacataggtaag

SEQ ID NO: 5636811 - DNA, 25 bp, Homo sapien
tgggccagtctcttccccctgtccc

SEQ ID NO: 5636812 - DNA, 25 bp, Homo sapien
ctgactgtccaagtcacggggtcag

SEQ ID NO: 5636813 - DNA, 25 bp, Homo sapien
ttgtcaccaagcaattcaagtattt

SEQ ID NO: 5636814 - DNA, 25 bp, Homo sapien
gccagctatgtgtctctaggaaaat

SEQ ID NO: 5636815 - DNA, 25 bp, Homo sapien
gttgagctggcctaatgacacctcc

SEQ ID NO: 5636816 - DNA, 25 bp, Homo sapien
tgagcctcataaggaaagcaagtgt

SEQ ID NO: 5636817 - DNA, 25 bp, Homo sapien
ttcacgaaacaataaatggtaagga

SEQ ID NO: 5636818 - DNA, 25 bp, Homo sapien
gggcaggaaatgagcctcataagga

SEQ ID NO: 5636819 - DNA, 25 bp, Homo sapien
acctccgaaagtctcagggtgttcc

SEQ ID NO: 5636820 - DNA, 25 bp, Homo sapien
aatacaaatgtgttaagggaggaaa

SEQ ID NO: 5636821 - DNA, 25 bp, Homo sapien
ccgtcattaggacgctgaaaccggg

SEQ ID NO: 5636822 - DNA, 25 bp, Homo sapien
ccgaacccagtgaggctccctcttg

SEQ ID NO: 5636823 - DNA, 25 bp, Homo sapien
ttgcgagctctaatgtaaaaacatc

SEQ ID NO: 5636824 - DNA, 25 bp, Homo sapien
tgggaccccgccacgacgatccccg

SEQ ID NO: 5636825 - DNA, 25 bp, Homo sapien
cggggatcgtcgtggcggggtccca

SEQ ID NO: 5636826 - DNA, 25 bp, Homo sapien
aaaggaagcgtcagtgtcatatcca

SEQ ID NO: 5636827 - DNA, 25 bp, Homo sapien
gcagaagtttgaagctgtgggttgc

SEQ ID NO: 5636828 - DNA, 25 bp, Homo sapien
catatccatgtcatgaggggcctgg

SEQ ID NO: 5636829 - DNA, 25 bp, Homo sapien
aagtgtagagcagaagtttgaagct

SEQ ID NO: 5636830 - DNA, 25 bp, Homo sapien
cgatggctgtagtgacagaagtgta

SEQ ID NO: 5636831 - DNA, 25 bp, Homo sapien
tggagcggtgacttccaagcttctt

SEQ ID NO: 5636832 - DNA, 25 bp, Homo sapien
ctgtcatgggttctccagcaaagga

SEQ ID NO: 5636833 - DNA, 25 bp, Homo sapien
tcaaacacttagagcaagaagcctg

SEQ ID NO: 5636834 - DNA, 25 bp, Homo sapien
cgcagcccttggtaccagagcctgc

SEQ ID NO: 5636835 - DNA, 25 bp, Homo sapien
ttcttatgtggcagactggaaaccc

SEQ ID NO: 5636836 - DNA, 25 bp, Homo sapien
ctggaaacccgaagttatgatgctc

SEQ ID NO: 5636837 - DNA, 25 bp, Homo sapien
gcagtgtttctgtatcaactccacg

SEQ ID NO: 5636838 - DNA, 25 bp, Homo sapien
gtccccagcccttgcagtgtttctg

SEQ ID NO: 5636839 - DNA, 25 bp, Homo sapien
aattgcagttgaaatggatacacat

SEQ ID NO: 5636840 - DNA, 25 bp, Homo sapien
tgatggaacactgttgtaacatcta

SEQ ID NO: 5636841 - DNA, 25 bp, Homo sapien
tcagcttttatccaccgggtttatc

SEQ ID NO: 5636842 - DNA, 25 bp, Homo sapien
tggaaaagtggtatttgatggaaca

SEQ ID NO: 5636843 - DNA, 25 bp, Homo sapien
ggatacacattctggtggtaagatt

SEQ ID NO: 5636844 - DNA, 25 bp, Homo sapien
ttccacgaactaagccctgtcccca

SEQ ID NO: 5636845 - DNA, 25 bp, Homo sapien
ggagaacggtgccttgtcagttttc

SEQ ID NO: 5636846 - DNA, 25 bp, Homo sapien
ccgggtttatcctgttgcaaagcag

SEQ ID NO: 5636847 - DNA, 25 bp, Homo sapien
ggtgctgcctgtgtattccacgaac

SEQ ID NO: 5636848 - DNA, 25 bp, Homo sapien
ttcaagagaatggatagaaaaaaga

SEQ ID NO: 5636849 - DNA, 25 bp, Homo sapien
attatagatgcaattaaatggtaaa

SEQ ID NO: 5636850 - DNA, 25 bp, Homo sapien
tgatgccacatcggtatcatgtttt

SEQ ID NO: 5636851 - DNA, 25 bp, Homo sapien
ggctggaggctaaaaaaagatctca

SEQ ID NO: 5636852 - DNA, 25 bp, Homo sapien
tggtaaaagatagaattaagtagtc

SEQ ID NO: 5636853 - DNA, 25 bp, Homo sapien
gggatgtgcaatgacccagaaagga

SEQ ID NO: 5636854 - DNA, 25 bp, Homo sapien
tgatactaccgggatgtgcaatgac

SEQ ID NO: 5636855 - DNA, 25 bp, Homo sapien
aaaagatctcacagaggtaaagaat

SEQ ID NO: 5636856 - DNA, 25 bp, Homo sapien
tgaaagaataatcatctgaccaggg

SEQ ID NO: 5636857 - DNA, 25 bp, Homo sapien
tcttaatgatactaccgggatgtgc

SEQ ID NO: 5636858 - DNA, 25 bp, Homo sapien
ctcacagaggtaaagaatagaatga

SEQ ID NO: 5636859 - DNA, 25 bp, Homo sapien
ttatagtataagaactgtggcaata

SEQ ID NO: 5636860 - DNA, 25 bp, Homo sapien
gttcacatgaataaaggaagttgaa

SEQ ID NO: 5636861 - DNA, 25 bp, Homo sapien
tatccaggtatgatatatggttata

SEQ ID NO: 5636862 - DNA, 25 bp, Homo sapien
gaacaaagaaatctctatgtgtgtc

SEQ ID NO: 5636863 - DNA, 25 bp, Homo sapien
cttataatggaaaaagtgggagaaa

SEQ ID NO: 5636864 - DNA, 25 bp, Homo sapien
cgtatatatcgtttgagccattttt

SEQ ID NO: 5636865 - DNA, 25 bp, Homo sapien
taagtcataccatggaaatatgccc

SEQ ID NO: 5636866 - DNA, 25 bp, Homo sapien
aaggaagttgaagaacgtatatatc

SEQ ID NO: 5636867 - DNA, 25 bp, Homo sapien
ttcaagcgatgggattttggtgtga

SEQ ID NO: 5636868 - DNA, 25 bp, Homo sapien
ggaaatatgcccatgatatgttcac

SEQ ID NO: 5636869 - DNA, 25 bp, Homo sapien
atgggattttggtgtgagctatttt

SEQ ID NO: 5636870 - DNA, 25 bp, Homo sapien
tatcactgtagggatcccagagacc

SEQ ID NO: 5636871 - DNA, 25 bp, Homo sapien
tcatctgccccacctctagagtgtc

SEQ ID NO: 5636872 - DNA, 25 bp, Homo sapien
agaaccgtgttctcaaacttgcatc

SEQ ID NO: 5636873 - DNA, 25 bp, Homo sapien
agtttctgtgatctagaaccgtgtt

SEQ ID NO: 5636874 - DNA, 25 bp, Homo sapien
aaaagtggcacttgttacaaaacca

SEQ ID NO: 5636875 - DNA, 25 bp, Homo sapien
acaggtcagtgtgagcttgaactag

SEQ ID NO: 5636876 - DNA, 25 bp, Homo sapien
tattgtgactataaaagtggcactt

SEQ ID NO: 5636877 - DNA, 25 bp, Homo sapien
gtgtctgatcagtagctttggggtg

SEQ ID NO: 5636878 - DNA, 25 bp, Homo sapien
acctctagagtgtctgatcagtagc

SEQ ID NO: 5636879 - DNA, 25 bp, Homo sapien
ctgagatttatcactgtagggatcc

SEQ ID NO: 5636880 - DNA, 25 bp, Homo sapien
tgagcttgaactagactgcgcctgc

SEQ ID NO: 5636881 - DNA, 25 bp, Homo sapien
tttggtccagtcagtgaagcacctt

SEQ ID NO: 5636882 - DNA, 25 bp, Homo sapien
cttggaccccatcaccagacggtag

SEQ ID NO: 5636883 - DNA, 25 bp, Homo sapien
tagcacgatgcctggtacaaagtag

SEQ ID NO: 5636884 - DNA, 25 bp, Homo sapien
tataaaacagtatttcggaaaatgc

SEQ ID NO: 5636885 - DNA, 25 bp, Homo sapien
tggtacaaagtaggcgcccaataaa

SEQ ID NO: 5636886 - DNA, 25 bp, Homo sapien
agagagcaagagtcagcatgttttc

SEQ ID NO: 5636887 - DNA, 25 bp, Homo sapien
agtgcctgccacaaataagaaaaaa

SEQ ID NO: 5636888 - DNA, 25 bp, Homo sapien
taaccagagattagcacgatgcctg

SEQ ID NO: 5636889 - DNA, 25 bp, Homo sapien
ttctgggcataacacagtgcctgcc

SEQ ID NO: 5636890 - DNA, 25 bp, Homo sapien
agtgaagcaccttggaccccatcac

SEQ ID NO: 5636891 - DNA, 25 bp, Homo sapien
ggcgcccaataaataggtgaagaaa

SEQ ID NO: 5636892 - DNA, 25 bp, Homo sapien
ccagaacctcaatagtgtgtaagtc

SEQ ID NO: 5636893 - DNA, 25 bp, Homo sapien
tttgagggaagtcagaaaaaatcaa

SEQ ID NO: 5636894 - DNA, 25 bp, Homo sapien
actctcaaagtaaaagatttcaacc

SEQ ID NO: 5636895 - DNA, 25 bp, Homo sapien
tttagatgaagcaaccagagtatat

SEQ ID NO: 5636896 - DNA, 25 bp, Homo sapien
ctcaatagtgtgtaagtccaagtgc

SEQ ID NO: 5636897 - DNA, 25 bp, Homo sapien
gtgcccccactaacacactagggat

SEQ ID NO: 5636898 - DNA, 25 bp, Homo sapien
aacacactagggatgactaacagag

SEQ ID NO: 5636899 - DNA, 25 bp, Homo sapien
gatttgtaatttttgagggaagtca

SEQ ID NO: 5636900 - DNA, 25 bp, Homo sapien
aatgcttgaattaatccagaacctc

SEQ ID NO: 5636901 - DNA, 25 bp, Homo sapien
gggatgactaacagaggatcgatta

SEQ ID NO: 5636902 - DNA, 25 bp, Homo sapien
cctttgtaactgctgggtttatgtt

SEQ ID NO: 5636903 - DNA, 25 bp, Homo sapien
gcaagatgcgtgatttgagcaagtc

SEQ ID NO: 5636904 - DNA, 25 bp, Homo sapien
gaaggcaagccacctttcaggccca

SEQ ID NO: 5636905 - DNA, 25 bp, Homo sapien
tgggacatgggctgctccacttgta

SEQ ID NO: 5636906 - DNA, 25 bp, Homo sapien
acagaggctctaaacacccaagaac

SEQ ID NO: 5636907 - DNA, 25 bp, Homo sapien
ttacaccattcaggctggccagggt

SEQ ID NO: 5636908 - DNA, 25 bp, Homo sapien
caaaagaaaaccgccttgcggctgc

SEQ ID NO: 5636909 - DNA, 25 bp, Homo sapien
actctgaaagccacgtctgggccag

SEQ ID NO: 5636910 - DNA, 25 bp, Homo sapien
tccatgtagcctgcttcgctggtta

SEQ ID NO: 5636911 - DNA, 25 bp, Homo sapien
tggcttggtggcttccagcaaatca

SEQ ID NO: 5636912 - DNA, 25 bp, Homo sapien
tgcagcagtggcacatcctacttcc

SEQ ID NO: 5636913 - DNA, 25 bp, Homo sapien
tgatttgagcaagtccatggtgaag

SEQ ID NO: 5636914 - DNA, 25 bp, Homo sapien
tccgtcctcctctgcttccgagacg

SEQ ID NO: 5636915 - DNA, 25 bp, Homo sapien
cgtctcggaagcagaggaggacgga

SEQ ID NO: 5636916 - DNA, 25 bp, Homo sapien
aacttcataggggccagaatacatt

SEQ ID NO: 5636917 - DNA, 25 bp, Homo sapien
ccgccatgttggatctcaggcttgc

SEQ ID NO: 5636918 - DNA, 25 bp, Homo sapien
cttcctcgtgcatctccgtggcctc

SEQ ID NO: 5636919 - DNA, 25 bp, Homo sapien
aaataggtcagcagcctcgctggag

SEQ ID NO: 5636920 - DNA, 25 bp, Homo sapien
gcacacccattcctgcccgggggct

SEQ ID NO: 5636921 - DNA, 25 bp, Homo sapien
cttcattcgggcttcactaaacttc

SEQ ID NO: 5636922 - DNA, 25 bp, Homo sapien
agggacaaaactgagcttgtcctgt

SEQ ID NO: 5636923 - DNA, 25 bp, Homo sapien
gactctgaggttaatcaccacccac

SEQ ID NO: 5636924 - DNA, 25 bp, Homo sapien
cgggggcttttgtcctcgctgttcc

SEQ ID NO: 5636925 - DNA, 25 bp, Homo sapien
gtaaaatagctgattgtggaggttt

SEQ ID NO: 5636926 - DNA, 25 bp, Homo sapien
gcagcacttccggcttgctctccgc

SEQ ID NO: 5636927 - DNA, 25 bp, Homo sapien
gaggacacaaatgcagaaacaacaa

SEQ ID NO: 5636928 - DNA, 25 bp, Homo sapien
gacccccaacagctgtacaaccaac

SEQ ID NO: 5636929 - DNA, 25 bp, Homo sapien
ttgatgacaatctggcaggcatatc

SEQ ID NO: 5636930 - DNA, 25 bp, Homo sapien
tggaaaaagaatagcttcacatggg

SEQ ID NO: 5636931 - DNA, 25 bp, Homo sapien
ctccatctggggcttgctactggca

SEQ ID NO: 5636932 - DNA, 25 bp, Homo sapien
caaagctccaaatgggtggaagtgg

SEQ ID NO: 5636933 - DNA, 25 bp, Homo sapien
tggcacatgaggttaaatggaaaac

SEQ ID NO: 5636934 - DNA, 25 bp, Homo sapien
cctgggcagctttatggcacatgag

SEQ ID NO: 5636935 - DNA, 25 bp, Homo sapien
tagacgactcctctggcaaagctcc

SEQ ID NO: 5636936 - DNA, 25 bp, Homo sapien
ctatagaaactgtcccctgccccac

SEQ ID NO: 5636937 - DNA, 25 bp, Homo sapien
tcacatgggatagatgacccccaac

SEQ ID NO: 5636938 - DNA, 25 bp, Homo sapien
gaagacgaaatatcaaggaagactt

SEQ ID NO: 5636939 - DNA, 25 bp, Homo sapien
tacgcagagtaaagctaactgtaac

SEQ ID NO: 5636940 - DNA, 25 bp, Homo sapien
taactgtaacaactgaagacgaaat

SEQ ID NO: 5636941 - DNA, 25 bp, Homo sapien
tggtatgggatagaggatctttatt

SEQ ID NO: 5636942 - DNA, 25 bp, Homo sapien
ctgggaaaatttgttatatgggcat

SEQ ID NO: 5636943 - DNA, 25 bp, Homo sapien
ttcaaaaattaaagagcaggtagct

SEQ ID NO: 5636944 - DNA, 25 bp, Homo sapien
ctggtgcacagaaaatattgcagcc

SEQ ID NO: 5636945 - DNA, 25 bp, Homo sapien
aaacaaatgatgacagcatactgtt

SEQ ID NO: 5636946 - DNA, 25 bp, Homo sapien
atgtgttagagaaataagaccacaa

SEQ ID NO: 5636947 - DNA, 25 bp, Homo sapien
gaggggagtgctacatctcgttctc

SEQ ID NO: 5636948 - DNA, 25 bp, Homo sapien
attgaggttggctcgtatggtatgg

SEQ ID NO: 5636949 - DNA, 25 bp, Homo sapien
ctggttctacagggggtcccctgga

SEQ ID NO: 5636950 - DNA, 25 bp, Homo sapien
cagtaacattgagtcccaaagcaaa

SEQ ID NO: 5636951 - DNA, 25 bp, Homo sapien
agagccggcctttccgggctcacca

SEQ ID NO: 5636952 - DNA, 25 bp, Homo sapien
aaaatgaggtcagtaacattgagtc

SEQ ID NO: 5636953 - DNA, 25 bp, Homo sapien
gccctgctcatggccctgcctggct

SEQ ID NO: 5636954 - DNA, 25 bp, Homo sapien
aggatttaggggtgaacacccaaga

SEQ ID NO: 5636955 - DNA, 25 bp, Homo sapien
actcaattcagtcatggggaccagc

SEQ ID NO: 5636956 - DNA, 25 bp, Homo sapien
ctcaccacgtagcttcctccccggc

SEQ ID NO: 5636957 - DNA, 25 bp, Homo sapien
actcacctttagggtgggctcctgg

SEQ ID NO: 5636958 - DNA, 25 bp, Homo sapien
cccaagatcccgggtccatgagatt

SEQ ID NO: 5636959 - DNA, 25 bp, Homo sapien
gtgaacacccaagatcccgggtcca

SEQ ID NO: 5636960 - DNA, 25 bp, Homo sapien
ccgaacgtctcgtgaggtaaactca

SEQ ID NO: 5636961 - DNA, 25 bp, Homo sapien
tgagtttacctcacgagacgttcgg

SEQ ID NO: 5636962 - DNA, 25 bp, Homo sapien
ggaaggggaaaatcatcttgctgtt

SEQ ID NO: 5636963 - DNA, 25 bp, Homo sapien
tagatctggaattgcatgggagaaa

SEQ ID NO: 5636964 - DNA, 25 bp, Homo sapien
agatttatggaccctgagatattct

SEQ ID NO: 5636965 - DNA, 25 bp, Homo sapien
gagaatgatggcagcatgcctgaag

SEQ ID NO: 5636966 - DNA, 25 bp, Homo sapien
caataaactcaataagcaggtctgc

SEQ ID NO: 5636967 - DNA, 25 bp, Homo sapien
tgcctgaaccatgagacaagaattc

SEQ ID NO: 5636968 - DNA, 25 bp, Homo sapien
tgctgttatgtgctgctctgcttcc

SEQ ID NO: 5636969 - DNA, 25 bp, Homo sapien
gaatgcacagaaatagttaacacaa

SEQ ID NO: 5636970 - DNA, 25 bp, Homo sapien
catgcctgaaggaacttgcagacag

SEQ ID NO: 5636971 - DNA, 25 bp, Homo sapien
agcaggtctgcttgtagatctggaa

SEQ ID NO: 5636972 - DNA, 25 bp, Homo sapien
ctaacagaggcaactatagtacatt

SEQ ID NO: 5636973 - DNA, 25 bp, Homo sapien
cccgtccggccagtcccacggtgga

SEQ ID NO: 5636974 - DNA, 25 bp, Homo sapien
tccaccgtgggactggccggacggg

SEQ ID NO: 5636975 - DNA, 25 bp, Homo sapien
tttgtagaatatagctgaacaccag

SEQ ID NO: 5636976 - DNA, 25 bp, Homo sapien
ggtcacacagttccccttcaacctc

SEQ ID NO: 5636977 - DNA, 25 bp, Homo sapien
agcataagataattacaaagaacat

SEQ ID NO: 5636978 - DNA, 25 bp, Homo sapien
cttcaacctccttcccgaccacctg

SEQ ID NO: 5636979 - DNA, 25 bp, Homo sapien
gaagggcctacaacccgctcctcca

SEQ ID NO: 5636980 - DNA, 25 bp, Homo sapien
agaagtgggtgctgctatctccatt

SEQ ID NO: 5636981 - DNA, 25 bp, Homo sapien
aactaggcctcagtcccacccttgc

SEQ ID NO: 5636982 - DNA, 25 bp, Homo sapien
cccacccttgcctctcaggatccac

SEQ ID NO: 5636983 - DNA, 25 bp, Homo sapien
cagatgtgtcagctaagcataagat

SEQ ID NO: 5636984 - DNA, 25 bp, Homo sapien
tcccgaccacctgtaactaggcctc

SEQ ID NO: 5636985 - DNA, 25 bp, Homo sapien
cattttacagatgtgtcagctaagc

SEQ ID NO: 5636986 - DNA, 25 bp, Homo sapien
agctactatagaacaaatgaaaaat

SEQ ID NO: 5636987 - DNA, 25 bp, Homo sapien
agtactttaggaatatgcagatgtt

SEQ ID NO: 5636988 - DNA, 25 bp, Homo sapien
ttgacatgccaactttgttcctatc

SEQ ID NO: 5636989 - DNA, 25 bp, Homo sapien
tatggtctggtgagtaaaatgaaac

SEQ ID NO: 5636990 - DNA, 25 bp, Homo sapien
tgactaatctcaagaaacaagtaat

SEQ ID NO: 5636991 - DNA, 25 bp, Homo sapien
cacagcttaatatggtctggtgagt

SEQ ID NO: 5636992 - DNA, 25 bp, Homo sapien
atcagtgttgtctgtcaccaatttc

SEQ ID NO: 5636993 - DNA, 25 bp, Homo sapien
aactattagtgctgccaatgcccac

SEQ ID NO: 5636994 - DNA, 25 bp, Homo sapien
aatgaaaccacaatttaggtaacta

SEQ ID NO: 5636995 - DNA, 25 bp, Homo sapien
aatggggcaaaattattgttgtaaa

SEQ ID NO: 5636996 - DNA, 25 bp, Homo sapien
ttgggcaaatgaccacaccaaataa

SEQ ID NO: 5636997 - DNA, 25 bp, Homo sapien
atcattgaggcaacatcaaagagta

SEQ ID NO: 5636998 - DNA, 25 bp, Homo sapien
ctatatgactgtggattatgaccat

SEQ ID NO: 5636999 - DNA, 25 bp, Homo sapien
tgcatggcatgctactgtcctgaat

SEQ ID NO: 5637000 - DNA, 25 bp, Homo sapien
aaatgcactgttaggtgacatcatc

SEQ ID NO: 5637001 - DNA, 25 bp, Homo sapien
acagtcatgtgtattgatgggggca

SEQ ID NO: 5637002 - DNA, 25 bp, Homo sapien
ttacaaaatgagaagactcagcatt

SEQ ID NO: 5637003 - DNA, 25 bp, Homo sapien
gtcaagaagaaagcaatgccagtaa

SEQ ID NO: 5637004 - DNA, 25 bp, Homo sapien
gatgggggcacttctgataaatgca

SEQ ID NO: 5637005 - DNA, 25 bp, Homo sapien
taggctacaaacttgcatggcatgc

SEQ ID NO: 5637006 - DNA, 25 bp, Homo sapien
attggtgcagaactcagctttggtc

SEQ ID NO: 5637007 - DNA, 25 bp, Homo sapien
atgagaagactcagcattggtgcag

SEQ ID NO: 5637008 - DNA, 25 bp, Homo sapien
ctttgagtcccgccaggggctcgtc

SEQ ID NO: 5637009 - DNA, 25 bp, Homo sapien
gacgagcccctggcgggactcaaag

SEQ ID NO: 5637010 - DNA, 25 bp, Homo sapien
tttgactgtggttttgaaagcccca

SEQ ID NO: 5637011 - DNA, 25 bp, Homo sapien
ttaactgcaacagtgggcaaaaagc

SEQ ID NO: 5637012 - DNA, 25 bp, Homo sapien
cctgagctgaaacaatcctctcaca

SEQ ID NO: 5637013 - DNA, 25 bp, Homo sapien
aaatcaccaacatacctagggttat

SEQ ID NO: 5637014 - DNA, 25 bp, Homo sapien
tttaaatgctgttaggtcacctttc

SEQ ID NO: 5637015 - DNA, 25 bp, Homo sapien
tgaaagccccataaatataaaatat

SEQ ID NO: 5637016 - DNA, 25 bp, Homo sapien
catgttactcaggcttgggttctta

SEQ ID NO: 5637017 - DNA, 25 bp, Homo sapien
caacagtgggcaaaaagcttctttt

SEQ ID NO: 5637018 - DNA, 25 bp, Homo sapien
cacaagtttgccagttaactgcaac

SEQ ID NO: 5637019 - DNA, 25 bp, Homo sapien
ataatttaaagaccttgtgcatctc

SEQ ID NO: 5637020 - DNA, 25 bp, Homo sapien
catttgttgctaaaccagttctgtt

SEQ ID NO: 5637021 - DNA, 25 bp, Homo sapien
agtagtccagcaagactataagtcc

SEQ ID NO: 5637022 - DNA, 25 bp, Homo sapien
acaaatcaaagttgggccttacagt

SEQ ID NO: 5637023 - DNA, 25 bp, Homo sapien
gagtcatgatgatggtcagagaatc

SEQ ID NO: 5637024 - DNA, 25 bp, Homo sapien
tgatggtcagagaatctacagacac

SEQ ID NO: 5637025 - DNA, 25 bp, Homo sapien
cagacactaaacaatgaagttggtc

SEQ ID NO: 5637026 - DNA, 25 bp, Homo sapien
ttggtcaaatgacaagaaagccatt

SEQ ID NO: 5637027 - DNA, 25 bp, Homo sapien
aatagacaagacattgagtcatgat

SEQ ID NO: 5637028 - DNA, 25 bp, Homo sapien
tgggccttacagttcttgcacatgc

SEQ ID NO: 5637029 - DNA, 25 bp, Homo sapien
tataaattggcaagcaagacaaatc

SEQ ID NO: 5637030 - DNA, 25 bp, Homo sapien
ttccctgttgcaaatctaagatatc

SEQ ID NO: 5637031 - DNA, 25 bp, Homo sapien
gtaagttccaaagcgagtttagctc

SEQ ID NO: 5637032 - DNA, 25 bp, Homo sapien
ttagtctccctcggagctgggacca

SEQ ID NO: 5637033 - DNA, 25 bp, Homo sapien
ctcaagcgatcctgtatccttagtc

SEQ ID NO: 5637034 - DNA, 25 bp, Homo sapien
ccaggctcaagcgatcctgtatcct

SEQ ID NO: 5637035 - DNA, 25 bp, Homo sapien
tggcacgtgccaccattcctggcta

SEQ ID NO: 5637036 - DNA, 25 bp, Homo sapien
taccatccctaaaggagtgggtgtg

SEQ ID NO: 5637037 - DNA, 25 bp, Homo sapien
gatgaccaataaaaccgagacccca

SEQ ID NO: 5637038 - DNA, 25 bp, Homo sapien
atccttagtctccctcggagctggg

SEQ ID NO: 5637039 - DNA, 25 bp, Homo sapien
gggaccactggcacgtgccaccatt

SEQ ID NO: 5637040 - DNA, 25 bp, Homo sapien
aaaaccgagaccccaatgtctacca

SEQ ID NO: 5637041 - DNA, 25 bp, Homo sapien
aggatgaccaataaaaccgagaccc

SEQ ID NO: 5637042 - DNA, 25 bp, Homo sapien
tgtctaccatccctaaaggagtggg

SEQ ID NO: 5637043 - DNA, 25 bp, Homo sapien
tgttctggaggccaaaagtcaaaga

SEQ ID NO: 5637044 - DNA, 25 bp, Homo sapien
tggccctggctctgatgaccatctc

SEQ ID NO: 5637045 - DNA, 25 bp, Homo sapien
tcctggcttgcagaaggccactttc

SEQ ID NO: 5637046 - DNA, 25 bp, Homo sapien
cttgcaaaggtgatctgagcagtag

SEQ ID NO: 5637047 - DNA, 25 bp, Homo sapien
ggccccaggagcacttcactgcttc

SEQ ID NO: 5637048 - DNA, 25 bp, Homo sapien
agtcaaagatcgatgagctcacaga

SEQ ID NO: 5637049 - DNA, 25 bp, Homo sapien
tttcctcgtgcctcctgacagcatc

SEQ ID NO: 5637050 - DNA, 25 bp, Homo sapien
actgcttctcagggtagtaggtctt

SEQ ID NO: 5637051 - DNA, 25 bp, Homo sapien
aggaggagccaccgccttttttaga

SEQ ID NO: 5637052 - DNA, 25 bp, Homo sapien
ggggaggcctctcttcctggcttgc

SEQ ID NO: 5637053 - DNA, 25 bp, Homo sapien
tgacagcatcttccatggccctggc

SEQ ID NO: 5637054 - DNA, 25 bp, Homo sapien
aagggattgcagatttaaggaatgt

SEQ ID NO: 5637055 - DNA, 25 bp, Homo sapien
gcagacgacaaagtaactttactgg

SEQ ID NO: 5637056 - DNA, 25 bp, Homo sapien
agttgtatgcagaagggtgtcataa

SEQ ID NO: 5637057 - DNA, 25 bp, Homo sapien
caaaagccattgaatagttgtatgc

SEQ ID NO: 5637058 - DNA, 25 bp, Homo sapien
tgaagggacaactactttgagacct

SEQ ID NO: 5637059 - DNA, 25 bp, Homo sapien
ttgcaggctttgaacaagggattgc

SEQ ID NO: 5637060 - DNA, 25 bp, Homo sapien
taaaagggcatagtggtcctaatgg

SEQ ID NO: 5637061 - DNA, 25 bp, Homo sapien
tggctacccacaagatggacaagtc

SEQ ID NO: 5637062 - DNA, 25 bp, Homo sapien
tgtcggtgcattcagtgaagggaca

SEQ ID NO: 5637063 - DNA, 25 bp, Homo sapien
actttactgggccaggttgtcggtg

SEQ ID NO: 5637064 - DNA, 25 bp, Homo sapien
ctttgcttcaaggagctcatgctct

SEQ ID NO: 5637065 - DNA, 25 bp, Homo sapien
agcacacgcgctacacagttaaatg

SEQ ID NO: 5637066 - DNA, 25 bp, Homo sapien
aggagcatgcagacccaagcttaga

SEQ ID NO: 5637067 - DNA, 25 bp, Homo sapien
acacagttaaatggttgacaacgtc

SEQ ID NO: 5637068 - DNA, 25 bp, Homo sapien
cacatgataagcataaaggacggca

SEQ ID NO: 5637069 - DNA, 25 bp, Homo sapien
gcgtcactgaaattcctgggaaaac

SEQ ID NO: 5637070 - DNA, 25 bp, Homo sapien
aagtggaatgttaaagcacacgcgc

SEQ ID NO: 5637071 - DNA, 25 bp, Homo sapien
cagaccccaggtataaacataagtg

SEQ ID NO: 5637072 - DNA, 25 bp, Homo sapien
gccactagagcattaaagatgaatt

SEQ ID NO: 5637073 - DNA, 25 bp, Homo sapien
gacggcagctgaacagtcacatttg

SEQ ID NO: 5637074 - DNA, 25 bp, Homo sapien
taggtaacataaaaagcgtcactga

SEQ ID NO: 5637075 - DNA, 25 bp, Homo sapien
tttaaaatacagataccaagtgcta

SEQ ID NO: 5637076 - DNA, 25 bp, Homo sapien
gttatgtttggaaagtgtaaatgag

SEQ ID NO: 5637077 - DNA, 25 bp, Homo sapien
atgtaagcccccctacgatagccat

SEQ ID NO: 5637078 - DNA, 25 bp, Homo sapien
gcagggtaggcgtatcactgtcata

SEQ ID NO: 5637079 - DNA, 25 bp, Homo sapien
gatgctatcaagtgcgtcaggtacc

SEQ ID NO: 5637080 - DNA, 25 bp, Homo sapien
ccccagccacctacagaaatctcac

SEQ ID NO: 5637081 - DNA, 25 bp, Homo sapien
aatgcttctagttcaggcggcaggt

SEQ ID NO: 5637082 - DNA, 25 bp, Homo sapien
ggcaggtctccagtagttcagtcag

SEQ ID NO: 5637083 - DNA, 25 bp, Homo sapien
aggcttaggattctgggaaaccatt

SEQ ID NO: 5637084 - DNA, 25 bp, Homo sapien
cagccttatttggagggttggaaag

SEQ ID NO: 5637085 - DNA, 25 bp, Homo sapien
agttcagtcagtaggtagagaaaga

SEQ ID NO: 5637086 - DNA, 25 bp, Homo sapien
gtgtaaatgaggatgctgtaacagc

SEQ ID NO: 5637087 - DNA, 25 bp, Homo sapien
atgtagcaacctgactctggttctc

SEQ ID NO: 5637088 - DNA, 25 bp, Homo sapien
ttgaaaccatgaaacctgatacagt

SEQ ID NO: 5637089 - DNA, 25 bp, Homo sapien
aaccaactgattatgaaaatgacac

SEQ ID NO: 5637090 - DNA, 25 bp, Homo sapien
cgatacggggtgttgaatcctattt

SEQ ID NO: 5637091 - DNA, 25 bp, Homo sapien
ttaataaaatgcttgtctgtgacct

SEQ ID NO: 5637092 - DNA, 25 bp, Homo sapien
agtatagatgtcctggtgttagacc

SEQ ID NO: 5637093 - DNA, 25 bp, Homo sapien
ttaaagggcataaaaattcacatca

SEQ ID NO: 5637094 - DNA, 25 bp, Homo sapien
acaagttattacacgatacggggtg

SEQ ID NO: 5637095 - DNA, 25 bp, Homo sapien
atgcaaacatactggacgtcaaata

SEQ ID NO: 5637096 - DNA, 25 bp, Homo sapien
ttacagatgactacaatgaagaaat

SEQ ID NO: 5637097 - DNA, 25 bp, Homo sapien
ctcttaggaacagtatgcaaacata

SEQ ID NO: 5637098 - DNA, 25 bp, Homo sapien
agggctaagctggaacttcagagcc

SEQ ID NO: 5637099 - DNA, 25 bp, Homo sapien
acaagaggtccccttcgtctcactc

SEQ ID NO: 5637100 - DNA, 25 bp, Homo sapien
gatttcttcaagatacaagaggtcc

SEQ ID NO: 5637101 - DNA, 25 bp, Homo sapien
tgctatcaccaaacctcagggctaa

SEQ ID NO: 5637102 - DNA, 25 bp, Homo sapien
tggctgctatcaccaaacctcaggg

SEQ ID NO: 5637103 - DNA, 25 bp, Homo sapien
cttcaagatacaagaggtccccttc

SEQ ID NO: 5637104 - DNA, 25 bp, Homo sapien
cgtctcactctggtgactccactgt

SEQ ID NO: 5637105 - DNA, 25 bp, Homo sapien
gaagaagacatttaagatttgttct

SEQ ID NO: 5637106 - DNA, 25 bp, Homo sapien
ttatttattgctctgggactggctt

SEQ ID NO: 5637107 - DNA, 25 bp, Homo sapien
ctttgcttgaagaagacatttaaga

SEQ ID NO: 5637108 - DNA, 25 bp, Homo sapien
ctaagctggaacttcagagcccttg

SEQ ID NO: 5637109 - DNA, 25 bp, Homo sapien
ccagattgggcctagatttacttcc

SEQ ID NO: 5637110 - DNA, 25 bp, Homo sapien
atgtgctccagaattaaacaaagat

SEQ ID NO: 5637111 - DNA, 25 bp, Homo sapien
acttccatggcactttgatgttccc

SEQ ID NO: 5637112 - DNA, 25 bp, Homo sapien
ggaaatcatccacccagattgggcc

SEQ ID NO: 5637113 - DNA, 25 bp, Homo sapien
ttcttctagaaagggtactgtgttg

SEQ ID NO: 5637114 - DNA, 25 bp, Homo sapien
tccactggtagaggaactcacagga

SEQ ID NO: 5637115 - DNA, 25 bp, Homo sapien
gatcagcctccactggtagaggaac

SEQ ID NO: 5637116 - DNA, 25 bp, Homo sapien
cattgaacgtacaaaagacacatgg

SEQ ID NO: 5637117 - DNA, 25 bp, Homo sapien
ctgcagggaattcattgaacgtaca

SEQ ID NO: 5637118 - DNA, 25 bp, Homo sapien
tcccagacaacctgcagggaattca

SEQ ID NO: 5637119 - DNA, 25 bp, Homo sapien
ttaaacaaagatatcccagacaacc

SEQ ID NO: 5637120 - DNA, 25 bp, Homo sapien
taggcatacatgtcagatatgatgc

SEQ ID NO: 5637121 - DNA, 25 bp, Homo sapien
tgatacaggtaaaaaacactatgaa

SEQ ID NO: 5637122 - DNA, 25 bp, Homo sapien
taacacaaagagttggaacacacat

SEQ ID NO: 5637123 - DNA, 25 bp, Homo sapien
gtaaaggccttgataagacaaagac

SEQ ID NO: 5637124 - DNA, 25 bp, Homo sapien
caagtgcagttgccaaaaagagaaa

SEQ ID NO: 5637125 - DNA, 25 bp, Homo sapien
ttaacgccatgatccatgggggagc

SEQ ID NO: 5637126 - DNA, 25 bp, Homo sapien
tgggtgggtctgaaatcttgcactt

SEQ ID NO: 5637127 - DNA, 25 bp, Homo sapien
ataatacacagggaagtgatacagg

SEQ ID NO: 5637128 - DNA, 25 bp, Homo sapien
tcagtacattttaagcaagtgcagt

SEQ ID NO: 5637129 - DNA, 25 bp, Homo sapien
tcaaaagtagagaaagcaaacatca

SEQ ID NO: 5637130 - DNA, 25 bp, Homo sapien
tgctaagaatagtaagtgtcctgta

SEQ ID NO: 5637131 - DNA, 25 bp, Homo sapien
gtggcttggtgagtgctcttcactt

SEQ ID NO: 5637132 - DNA, 25 bp, Homo sapien
aaggtgaggcacagttaacatgcta

SEQ ID NO: 5637133 - DNA, 25 bp, Homo sapien
ttcacttcaggtcaaggtgaggcac

SEQ ID NO: 5637134 - DNA, 25 bp, Homo sapien
catgtacttacctgtgtgactggag

SEQ ID NO: 5637135 - DNA, 25 bp, Homo sapien
aatgacagagaagactagataccta

SEQ ID NO: 5637136 - DNA, 25 bp, Homo sapien
tggccctctgtgagtagagtgctaa

SEQ ID NO: 5637137 - DNA, 25 bp, Homo sapien
ccaattctcagggaacccagacttc

SEQ ID NO: 5637138 - DNA, 25 bp, Homo sapien
agaggcttcctgtggttgaactgat

SEQ ID NO: 5637139 - DNA, 25 bp, Homo sapien
ggtatcatgaaaaggccactggact

SEQ ID NO: 5637140 - DNA, 25 bp, Homo sapien
gactggaggtgagatgttttaccta

SEQ ID NO: 5637141 - DNA, 25 bp, Homo sapien
gtaaagctcccgatgccagacttcc

SEQ ID NO: 5637142 - DNA, 25 bp, Homo sapien
aagaggtgtataatgactggttgac

SEQ ID NO: 5637143 - DNA, 25 bp, Homo sapien
atttaagcagtgtcatcccgatccc

SEQ ID NO: 5637144 - DNA, 25 bp, Homo sapien
atatccagtggagactaataaattt

SEQ ID NO: 5637145 - DNA, 25 bp, Homo sapien
aatccaatggaataggtagtaaaat

SEQ ID NO: 5637146 - DNA, 25 bp, Homo sapien
atgactaggtttaggttcagttttc

SEQ ID NO: 5637147 - DNA, 25 bp, Homo sapien
ttgttgaatcacatcaagaggtgta

SEQ ID NO: 5637148 - DNA, 25 bp, Homo sapien
gtctggatgacaagaataggtttca

SEQ ID NO: 5637149 - DNA, 25 bp, Homo sapien
tattagtttagacctagagatgact

SEQ ID NO: 5637150 - DNA, 25 bp, Homo sapien
gacaagaataggtttcaggtggtgg

SEQ ID NO: 5637151 - DNA, 25 bp, Homo sapien
gttcagttttcgggggtctggatga

SEQ ID NO: 5637152 - DNA, 25 bp, Homo sapien
attataagggtaatgaatgggttca

SEQ ID NO: 5637153 - DNA, 25 bp, Homo sapien
catacctcctgcaagcgatataacc

SEQ ID NO: 5637154 - DNA, 25 bp, Homo sapien
caaagtactataaactgggtgacat

SEQ ID NO: 5637155 - DNA, 25 bp, Homo sapien
ttgcagactgccagcttcccattgc

SEQ ID NO: 5637156 - DNA, 25 bp, Homo sapien
ccctcatatggtggaaagacagcta

SEQ ID NO: 5637157 - DNA, 25 bp, Homo sapien
ttgtacagagaacatttgagtaaca

SEQ ID NO: 5637158 - DNA, 25 bp, Homo sapien
tgagggtcctcttctggttgcagac

SEQ ID NO: 5637159 - DNA, 25 bp, Homo sapien
aacacaacacagagagtttacatgt

SEQ ID NO: 5637160 - DNA, 25 bp, Homo sapien
gtggaaagacagctagctagctctc

SEQ ID NO: 5637161 - DNA, 25 bp, Homo sapien
tgagttcacggtgctagaacggtga

SEQ ID NO: 5637162 - DNA, 25 bp, Homo sapien
tctggagactgaagtctgagttcac

SEQ ID NO: 5637163 - DNA, 25 bp, Homo sapien
tgagtaacagttttcccaagcaaag

SEQ ID NO: 5637164 - DNA, 25 bp, Homo sapien
agttctgttccgggcctggcctctt

SEQ ID NO: 5637165 - DNA, 25 bp, Homo sapien
ccgggcctggcctcttgcttcatct

SEQ ID NO: 5637166 - DNA, 25 bp, Homo sapien
tctaagccccataccaggggtctcc

SEQ ID NO: 5637167 - DNA, 25 bp, Homo sapien
accaggggtctccatccctgtcacc

SEQ ID NO: 5637168 - DNA, 25 bp, Homo sapien
ttcacaatttttgggaccaggccga

SEQ ID NO: 5637169 - DNA, 25 bp, Homo sapien
agggcggcgttcacaatttttggga

SEQ ID NO: 5637170 - DNA, 25 bp, Homo sapien
ttggcctaccaacacggcaagtatc

SEQ ID NO: 5637171 - DNA, 25 bp, Homo sapien
tggcccgcgtagctccttcggccga

SEQ ID NO: 5637172 - DNA, 25 bp, Homo sapien
ttccccaaacgcctgtcactctgca

SEQ ID NO: 5637173 - DNA, 25 bp, Homo sapien
agctccttcggccgaatgagcgctg

SEQ ID NO: 5637174 - DNA, 25 bp, Homo sapien
cactctgcagccttgtgactgactg

SEQ ID NO: 5637175 - DNA, 25 bp, Homo sapien
gttaaccaactaggctacatgctac

SEQ ID NO: 5637176 - DNA, 25 bp, Homo sapien
tctgccgataaacttggagtatgga

SEQ ID NO: 5637177 - DNA, 25 bp, Homo sapien
tctacaataaggagacacccaccaa

SEQ ID NO: 5637178 - DNA, 25 bp, Homo sapien
agagcgtgtttctgggctacaccca

SEQ ID NO: 5637179 - DNA, 25 bp, Homo sapien
ggagtatggaaaatatcaagttaac

SEQ ID NO: 5637180 - DNA, 25 bp, Homo sapien
catgctacaacagagtagggcagag

SEQ ID NO: 5637181 - DNA, 25 bp, Homo sapien
tgggctacacccagatctaggttct

SEQ ID NO: 5637182 - DNA, 25 bp, Homo sapien
aaacagatattcccatcggcctttt

SEQ ID NO: 5637183 - DNA, 25 bp, Homo sapien
atcggccttttggggaatgttctct

SEQ ID NO: 5637184 - DNA, 25 bp, Homo sapien
aaggagacacccaccaaacagatat

SEQ ID NO: 5637185 - DNA, 25 bp, Homo sapien
aatggtgtcaagtttgataacctgt

SEQ ID NO: 5637186 - DNA, 25 bp, Homo sapien
gtccaggtaattacacccatgaggt

SEQ ID NO: 5637187 - DNA, 25 bp, Homo sapien
agtgcaggacttaaaataaggcttc

SEQ ID NO: 5637188 - DNA, 25 bp, Homo sapien
aggaatactatagctgtgcactggt

SEQ ID NO: 5637189 - DNA, 25 bp, Homo sapien
ttaaactcgggaccgtatatatctg

SEQ ID NO: 5637190 - DNA, 25 bp, Homo sapien
ccctacagagggccttttaatgatt

SEQ ID NO: 5637191 - DNA, 25 bp, Homo sapien
tatcagcacagcgtgactgcctatc

SEQ ID NO: 5637192 - DNA, 25 bp, Homo sapien
ccatgaggttaacctgccttagtgc

SEQ ID NO: 5637193 - DNA, 25 bp, Homo sapien
tgcactccatcaagtgtcaggccac

SEQ ID NO: 5637194 - DNA, 25 bp, Homo sapien
tgcctatcagtgacaatataagtga

SEQ ID NO: 5637195 - DNA, 25 bp, Homo sapien
gcccaagtatacatatgctgcactc

SEQ ID NO: 5637196 - DNA, 25 bp, Homo sapien
tcaggccacattctatcagcacagc

SEQ ID NO: 5637197 - DNA, 25 bp, Homo sapien
cttatcactaggttgggggaaataa

SEQ ID NO: 5637198 - DNA, 25 bp, Homo sapien
aaagctttcctcatgagtggcaaaa

SEQ ID NO: 5637199 - DNA, 25 bp, Homo sapien
gcccataggaatacccgcaaaggac

SEQ ID NO: 5637200 - DNA, 25 bp, Homo sapien
tgaatcatatgcattgagggtgggc

SEQ ID NO: 5637201 - DNA, 25 bp, Homo sapien
gaataaaacctctcttactgcccat

SEQ ID NO: 5637202 - DNA, 25 bp, Homo sapien
gacttcattgatccagacagggcca

SEQ ID NO: 5637203 - DNA, 25 bp, Homo sapien
tccagacagggccatttgccaatcc

SEQ ID NO: 5637204 - DNA, 25 bp, Homo sapien
tacccgcaaaggacttcattgatcc

SEQ ID NO: 5637205 - DNA, 25 bp, Homo sapien
tcttactgcccataggaatacccgc

SEQ ID NO: 5637206 - DNA, 25 bp, Homo sapien
caatcccttatcactaggttggggg

SEQ ID NO: 5637207 - DNA, 25 bp, Homo sapien
cattgatccagacagggccatttgc

SEQ ID NO: 5637208 - DNA, 25 bp, Homo sapien
cagctgctagctttatgtccccggc

SEQ ID NO: 5637209 - DNA, 25 bp, Homo sapien
cctcagcactcaccctggtatcctc

SEQ ID NO: 5637210 - DNA, 25 bp, Homo sapien
ggtatcctcaccacagctgctagct

SEQ ID NO: 5637211 - DNA, 25 bp, Homo sapien
taatcattaaaaacaggaagcccag

SEQ ID NO: 5637212 - DNA, 25 bp, Homo sapien
gatagggtctggccatgttgtccag

SEQ ID NO: 5637213 - DNA, 25 bp, Homo sapien
ttgtccaggctgtcaaaagcttttt

SEQ ID NO: 5637214 - DNA, 25 bp, Homo sapien
ggcttcttcctagctgggagcatgc

SEQ ID NO: 5637215 - DNA, 25 bp, Homo sapien
caaaagctttttgaggctgaggctt

SEQ ID NO: 5637216 - DNA, 25 bp, Homo sapien
agcccaggtccctcaccctcagcac

SEQ ID NO: 5637217 - DNA, 25 bp, Homo sapien
tgggagcatgcctgttcccagtgcc

SEQ ID NO: 5637218 - DNA, 25 bp, Homo sapien
tttgaggctgaggcttaatcattaa

SEQ ID NO: 5637219 - DNA, 25 bp, Homo sapien
agaacctagaaaactcccctggcca

SEQ ID NO: 5637220 - DNA, 25 bp, Homo sapien
gtactgatggatggctagttcacca

SEQ ID NO: 5637221 - DNA, 25 bp, Homo sapien
tgacaacgtggctctcagaacctag

SEQ ID NO: 5637222 - DNA, 25 bp, Homo sapien
tgtgtgatgtttaacttcaaagccc

SEQ ID NO: 5637223 - DNA, 25 bp, Homo sapien
ggtgggcgctgtcagatattccctt

SEQ ID NO: 5637224 - DNA, 25 bp, Homo sapien
ggatggctagttcaccagcatctcc

SEQ ID NO: 5637225 - DNA, 25 bp, Homo sapien
tccttgaccctgctttcattggccc

SEQ ID NO: 5637226 - DNA, 25 bp, Homo sapien
ttcccttccttggcctgcgctggtc

SEQ ID NO: 5637227 - DNA, 25 bp, Homo sapien
gctggtcctgtccttgaccctgctt

SEQ ID NO: 5637228 - DNA, 25 bp, Homo sapien
aaaatcttgtttatagacagctgtg

SEQ ID NO: 5637229 - DNA, 25 bp, Homo sapien
cttcaaagcccagggatgacaacgt

SEQ ID NO: 5637230 - DNA, 25 bp, Homo sapien
cccctgtcctggtccacacctggtg

SEQ ID NO: 5637231 - DNA, 25 bp, Homo sapien
acatccagggaaaatcctcagactg

SEQ ID NO: 5637232 - DNA, 25 bp, Homo sapien
ataaaaggattctggtgagaagatt

SEQ ID NO: 5637233 - DNA, 25 bp, Homo sapien
gcagggtgtcttcgcttaaggtccc

SEQ ID NO: 5637234 - DNA, 25 bp, Homo sapien
gtagagtgaccaactgacctggttt

SEQ ID NO: 5637235 - DNA, 25 bp, Homo sapien
aggcacagagaaatggtggtttcta

SEQ ID NO: 5637236 - DNA, 25 bp, Homo sapien
agggcctccccacagtcaagggaac

SEQ ID NO: 5637237 - DNA, 25 bp, Homo sapien
caaaagagatataaaaaggatagat

SEQ ID NO: 5637238 - DNA, 25 bp, Homo sapien
ttagcactgagaggctacatccagg

SEQ ID NO: 5637239 - DNA, 25 bp, Homo sapien
tggctgctggtgacaaagaatccaa

SEQ ID NO: 5637240 - DNA, 25 bp, Homo sapien
cctggtttgcctgggactgtcccat

SEQ ID NO: 5637241 - DNA, 25 bp, Homo sapien
cagaccctcacggtcttccccgccc

SEQ ID NO: 5637242 - DNA, 25 bp, Homo sapien
tcctctctctcccaaggtcctgctc

SEQ ID NO: 5637243 - DNA, 25 bp, Homo sapien
tcttattccccagaccctcacggtc

SEQ ID NO: 5637244 - DNA, 25 bp, Homo sapien
taatgaccgccttggttactgtggc

SEQ ID NO: 5637245 - DNA, 25 bp, Homo sapien
ggagaaaggcttagtttgctgtttc

SEQ ID NO: 5637246 - DNA, 25 bp, Homo sapien
ccgccttggttactgtggcggggtg

SEQ ID NO: 5637247 - DNA, 25 bp, Homo sapien
aggtcctgctcacttgctcactgtc

SEQ ID NO: 5637248 - DNA, 25 bp, Homo sapien
ccctgttgcatcaccccaggttgga

SEQ ID NO: 5637249 - DNA, 25 bp, Homo sapien
gttggagaaaggcttagtttgctgt

SEQ ID NO: 5637250 - DNA, 25 bp, Homo sapien
ttttcttcagtgtgccccagtccct

SEQ ID NO: 5637251 - DNA, 25 bp, Homo sapien
ttctcctcttaatgaccgccttggt

SEQ ID NO: 5637252 - DNA, 25 bp, Homo sapien
cctgcccgtgtgtaacttagctcac

SEQ ID NO: 5637253 - DNA, 25 bp, Homo sapien
caactgactctctgtgacacactgc

SEQ ID NO: 5637254 - DNA, 25 bp, Homo sapien
ggagcactttgcaagtctgttttat

SEQ ID NO: 5637255 - DNA, 25 bp, Homo sapien
taacagatttaagtggcgatgggaa

SEQ ID NO: 5637256 - DNA, 25 bp, Homo sapien
ctcaaccaagggattggctcccaac

SEQ ID NO: 5637257 - DNA, 25 bp, Homo sapien
gcgatgggaatcctagattgcctcc

SEQ ID NO: 5637258 - DNA, 25 bp, Homo sapien
tggctcccaactgactctctgtgac

SEQ ID NO: 5637259 - DNA, 25 bp, Homo sapien
aaacacagaaatccctgcccgtgtg

SEQ ID NO: 5637260 - DNA, 25 bp, Homo sapien
ccatacactagatttgtcacaaagc

SEQ ID NO: 5637261 - DNA, 25 bp, Homo sapien
aaagagccatatatggaaatacttc

SEQ ID NO: 5637262 - DNA, 25 bp, Homo sapien
atacttcctcaaccaagggattggc

SEQ ID NO: 5637263 - DNA, 25 bp, Homo sapien
cacaggcataccataaacatgattt

SEQ ID NO: 5637264 - DNA, 25 bp, Homo sapien
gcggatgtcatgagatgtacaaggt

SEQ ID NO: 5637265 - DNA, 25 bp, Homo sapien
gtagaatcacaatggagagagctat

SEQ ID NO: 5637266 - DNA, 25 bp, Homo sapien
tgaagttcaaaggctgcagacatgg

SEQ ID NO: 5637267 - DNA, 25 bp, Homo sapien
actccaatggttcagatacagaatc

SEQ ID NO: 5637268 - DNA, 25 bp, Homo sapien
cagatgccagaaagtaaccatctct

SEQ ID NO: 5637269 - DNA, 25 bp, Homo sapien
ctcctgaaagattgcatgtttagat

SEQ ID NO: 5637270 - DNA, 25 bp, Homo sapien
tagacatgttcattgactgcggatg

SEQ ID NO: 5637271 - DNA, 25 bp, Homo sapien
gctgcagacatggataatacacaac

SEQ ID NO: 5637272 - DNA, 25 bp, Homo sapien
tgaaaacaacacatgtggaaattac

SEQ ID NO: 5637273 - DNA, 25 bp, Homo sapien
ataacaaagtacttgctgaagtggg

SEQ ID NO: 5637274 - DNA, 25 bp, Homo sapien
ggctagagttaaagacttcaatgac

SEQ ID NO: 5637275 - DNA, 25 bp, Homo sapien
attgcgctaactcaagcactgtgca

SEQ ID NO: 5637276 - DNA, 25 bp, Homo sapien
agttctgcctttacctgtgtgtgtt

SEQ ID NO: 5637277 - DNA, 25 bp, Homo sapien
tctgtgtctgcggttcctggaacat

SEQ ID NO: 5637278 - DNA, 25 bp, Homo sapien
aagcactgtgcaatgtggcaagatt

SEQ ID NO: 5637279 - DNA, 25 bp, Homo sapien
ttagagtcaggctagagttaaagac

SEQ ID NO: 5637280 - DNA, 25 bp, Homo sapien
ggagattaggtgaaccctggcctta

SEQ ID NO: 5637281 - DNA, 25 bp, Homo sapien
caatgtggcaagattgcacagagag

SEQ ID NO: 5637282 - DNA, 25 bp, Homo sapien
cctggccttagagtcaggctagagt

SEQ ID NO: 5637283 - DNA, 25 bp, Homo sapien
ctctttatggggctttgactagggg

SEQ ID NO: 5637284 - DNA, 25 bp, Homo sapien
ctttcaacaactctttatggggctt

SEQ ID NO: 5637285 - DNA, 25 bp, Homo sapien
ggcaacagagtttaactaatgtaac

SEQ ID NO: 5637286 - DNA, 25 bp, Homo sapien
catgtgcccccttcaaatcccttcc

SEQ ID NO: 5637287 - DNA, 25 bp, Homo sapien
gacaagattggtccatgtgccccct

SEQ ID NO: 5637288 - DNA, 25 bp, Homo sapien
agtcctccaggaatattaaaaagct

SEQ ID NO: 5637289 - DNA, 25 bp, Homo sapien
ggttactagaaatgtacattcccag

SEQ ID NO: 5637290 - DNA, 25 bp, Homo sapien
aatctgacaagattggtccatgtgc

SEQ ID NO: 5637291 - DNA, 25 bp, Homo sapien
caagggactaaatccaatctgacaa

SEQ ID NO: 5637292 - DNA, 25 bp, Homo sapien
taaaaagctaaaatctgccagacat

SEQ ID NO: 5637293 - DNA, 25 bp, Homo sapien
caggttcaagggactaaatccaatc

SEQ ID NO: 5637294 - DNA, 25 bp, Homo sapien
cgagaaacagtctcaaaacaagtcc

SEQ ID NO: 5637295 - DNA, 25 bp, Homo sapien
tggtttcctaacgagaaacagtctc

SEQ ID NO: 5637296 - DNA, 25 bp, Homo sapien
tacttgtctaccgaccgaggcagtg

SEQ ID NO: 5637297 - DNA, 25 bp, Homo sapien
cctggctcaggaagttgaatttcat

SEQ ID NO: 5637298 - DNA, 25 bp, Homo sapien
tcgcacccgtgctggtgataacttc

SEQ ID NO: 5637299 - DNA, 25 bp, Homo sapien
tcctcccttccggctgggctgtctg

SEQ ID NO: 5637300 - DNA, 25 bp, Homo sapien
ctccccacactcgggagcgacagaa

SEQ ID NO: 5637301 - DNA, 25 bp, Homo sapien
tctccttgtttggcaggtagtccca

SEQ ID NO: 5637302 - DNA, 25 bp, Homo sapien
cgaggcagtgcctccctcttaggga

SEQ ID NO: 5637303 - DNA, 25 bp, Homo sapien
tggggcgctctaaaatgagtgttga

SEQ ID NO: 5637304 - DNA, 25 bp, Homo sapien
acggaatcccagtggttgtaggtgt

SEQ ID NO: 5637305 - DNA, 25 bp, Homo sapien
gcgagaccgtgacacttcctggctc

SEQ ID NO: 5637306 - DNA, 25 bp, Homo sapien
aagcctttgtggtttggggctctgc

SEQ ID NO: 5637307 - DNA, 25 bp, Homo sapien
ctgataaaagttctagagtccgtga

SEQ ID NO: 5637308 - DNA, 25 bp, Homo sapien
aaaactgaaggcatctttctgaccc

SEQ ID NO: 5637309 - DNA, 25 bp, Homo sapien
gacactgaccaaaactgaaggcatc

SEQ ID NO: 5637310 - DNA, 25 bp, Homo sapien
catgcttggcctaaacagacttaac

SEQ ID NO: 5637311 - DNA, 25 bp, Homo sapien
tgacccaatcacctactcaggatcc

SEQ ID NO: 5637312 - DNA, 25 bp, Homo sapien
agacttaacttttagacactgacca

SEQ ID NO: 5637313 - DNA, 25 bp, Homo sapien
ctagagtccgtgaaagaaactaagg

SEQ ID NO: 5637314 - DNA, 25 bp, Homo sapien
cctaagcttacatcaaattcacaac

SEQ ID NO: 5637315 - DNA, 25 bp, Homo sapien
cgtgaaagaaactaaggataaaaga

SEQ ID NO: 5637316 - DNA, 25 bp, Homo sapien
actcaggatccctccccccaatgtt

SEQ ID NO: 5637317 - DNA, 25 bp, Homo sapien
ttagacactgaccaaaactgaaggc

SEQ ID NO: 5637318 - DNA, 25 bp, Homo sapien
aaggtactggttcccagactgtgat

SEQ ID NO: 5637319 - DNA, 25 bp, Homo sapien
agactgtgatggacataaagaaaga

SEQ ID NO: 5637320 - DNA, 25 bp, Homo sapien
agtatttgccaaagccttgcgtctt

SEQ ID NO: 5637321 - DNA, 25 bp, Homo sapien
ttcctaggcagtcagtatagggcag

SEQ ID NO: 5637322 - DNA, 25 bp, Homo sapien
atggacataaagaaagagcaataga

SEQ ID NO: 5637323 - DNA, 25 bp, Homo sapien
gtgcttcaaggtactggttcccaga

SEQ ID NO: 5637324 - DNA, 25 bp, Homo sapien
tcaaggatagtgcttcaaggtactg

SEQ ID NO: 5637325 - DNA, 25 bp, Homo sapien
tgatggacataaagaaagagcaata

SEQ ID NO: 5637326 - DNA, 25 bp, Homo sapien
cacctctttcctaggcagtcagtat

SEQ ID NO: 5637327 - DNA, 25 bp, Homo sapien
ggatagtgcttcaaggtactggttc

SEQ ID NO: 5637328 - DNA, 25 bp, Homo sapien
caaagccttgcgtcttcctccaccc

SEQ ID NO: 5637329 - DNA, 25 bp, Homo sapien
ctggccaactctccttcaggcctca

SEQ ID NO: 5637330 - DNA, 25 bp, Homo sapien
ggcctcagcacagacattccctctc

SEQ ID NO: 5637331 - DNA, 25 bp, Homo sapien
acacagtagtgagatattccttttc

SEQ ID NO: 5637332 - DNA, 25 bp, Homo sapien
cctctcctaagaacctgcctgaagc

SEQ ID NO: 5637333 - DNA, 25 bp, Homo sapien
ctagacttcttctgaggctagacca

SEQ ID NO: 5637334 - DNA, 25 bp, Homo sapien
ggtgcggccccatgtgccacgcacc

SEQ ID NO: 5637335 - DNA, 25 bp, Homo sapien
ctgcttaaaaccctctgaggggtcc

SEQ ID NO: 5637336 - DNA, 25 bp, Homo sapien
gctctcagttccctggccaactctc

SEQ ID NO: 5637337 - DNA, 25 bp, Homo sapien
aaaaccctctgaggggtcccatctc

SEQ ID NO: 5637338 - DNA, 25 bp, Homo sapien
attccctctcctaagaacctgcctg

SEQ ID NO: 5637339 - DNA, 25 bp, Homo sapien
gccatgaacacagtagtgagatatt

SEQ ID NO: 5637340 - DNA, 25 bp, Homo sapien
cccgcctcccgggcggcctattaca

SEQ ID NO: 5637341 - DNA, 25 bp, Homo sapien
tgtttcaaggtgcaaccccacctcc

SEQ ID NO: 5637342 - DNA, 25 bp, Homo sapien
tatttcaaggtgcaaactccgcctc

SEQ ID NO: 5637343 - DNA, 25 bp, Homo sapien
ctcccaggcggcctatttcaagggg

SEQ ID NO: 5637344 - DNA, 25 bp, Homo sapien
cggcctgtttcaaggtgcaacccca

SEQ ID NO: 5637345 - DNA, 25 bp, Homo sapien
ctcccaggcggcctgtttcaaggtg

SEQ ID NO: 5637346 - DNA, 25 bp, Homo sapien
ctccgcctcccaggcggcctgtttc

SEQ ID NO: 5637347 - DNA, 25 bp, Homo sapien
cggcctatttcaaggggcaagccct

SEQ ID NO: 5637348 - DNA, 25 bp, Homo sapien
gcctcctgggcagtctatttcaagg

SEQ ID NO: 5637349 - DNA, 25 bp, Homo sapien
cctgggcagtctatttcaaggtgca

SEQ ID NO: 5637350 - DNA, 25 bp, Homo sapien
ccccacctcccaggcggcctatttc

SEQ ID NO: 5637351 - DNA, 25 bp, Homo sapien
agtaattaacagaccccgccagaga

SEQ ID NO: 5637352 - DNA, 25 bp, Homo sapien
aggaaagctggaatcaacaagatat

SEQ ID NO: 5637353 - DNA, 25 bp, Homo sapien
ttccagtctcccaaacacaagtatg

SEQ ID NO: 5637354 - DNA, 25 bp, Homo sapien
cctaccctggtagcataggctgtgc

SEQ ID NO: 5637355 - DNA, 25 bp, Homo sapien
tgactaatcaaggaaagctggaatc

SEQ ID NO: 5637356 - DNA, 25 bp, Homo sapien
atttctaaggcatctaatggggggc

SEQ ID NO: 5637357 - DNA, 25 bp, Homo sapien
tgatcacactgagctgcccaccttc

SEQ ID NO: 5637358 - DNA, 25 bp, Homo sapien
gcctggccatcatgcggcaggttct

SEQ ID NO: 5637359 - DNA, 25 bp, Homo sapien
aacaagatatgggtaaaaagatgct

SEQ ID NO: 5637360 - DNA, 25 bp, Homo sapien
cctctgagcctggccatcatgcggc

SEQ ID NO: 5637361 - DNA, 25 bp, Homo sapien
cggcaggttctgcgcctctgatcac

SEQ ID NO: 5637362 - DNA, 25 bp, Homo sapien
atcactatcgctgagagaacaggct

SEQ ID NO: 5637363 - DNA, 25 bp, Homo sapien
tgctccactttgggtgtaggtaagg

SEQ ID NO: 5637364 - DNA, 25 bp, Homo sapien
ctgcagccaggctcattaatgtctc

SEQ ID NO: 5637365 - DNA, 25 bp, Homo sapien
ccattctgtatgggtcaggcttccc

SEQ ID NO: 5637366 - DNA, 25 bp, Homo sapien
gcctcaaagtaagcccagagtggac

SEQ ID NO: 5637367 - DNA, 25 bp, Homo sapien
gagaatctgactgcagtgtgctcca

SEQ ID NO: 5637368 - DNA, 25 bp, Homo sapien
tacagattccggccccacaggaagt

SEQ ID NO: 5637369 - DNA, 25 bp, Homo sapien
cctgcctagagtgccctccccattc

SEQ ID NO: 5637370 - DNA, 25 bp, Homo sapien
ggctcaccaatccacagaacaggcc

SEQ ID NO: 5637371 - DNA, 25 bp, Homo sapien
aggagtgccagcttggctcaccaat

SEQ ID NO: 5637372 - DNA, 25 bp, Homo sapien
aatccaatggtgaatccaggcagtt

SEQ ID NO: 5637373 - DNA, 25 bp, Homo sapien
tatgaatagcacttatttggtggtc

SEQ ID NO: 5637374 - DNA, 25 bp, Homo sapien
ggtgtttccagtttgccagtttctc

SEQ ID NO: 5637375 - DNA, 25 bp, Homo sapien
ctagcatctggtctaggatgtatgc

SEQ ID NO: 5637376 - DNA, 25 bp, Homo sapien
ggtctaggatgtatgcagcaaaaag

SEQ ID NO: 5637377 - DNA, 25 bp, Homo sapien
aagttccctagagaatacatcatct

SEQ ID NO: 5637378 - DNA, 25 bp, Homo sapien
tggaagtagaagtcctcaattctag

SEQ ID NO: 5637379 - DNA, 25 bp, Homo sapien
aaaacacagggaacttacctccatg

SEQ ID NO: 5637380 - DNA, 25 bp, Homo sapien
ttccagagatgaatagggaaaatac

SEQ ID NO: 5637381 - DNA, 25 bp, Homo sapien
aacatcaagagcaatactgagtaat

SEQ ID NO: 5637382 - DNA, 25 bp, Homo sapien
atgaatagggaaaatacatctaccc

SEQ ID NO: 5637383 - DNA, 25 bp, Homo sapien
tctgagttgctaaaacatcaagagc

SEQ ID NO: 5637384 - DNA, 25 bp, Homo sapien
taaatgacctgcggccaaaagatct

SEQ ID NO: 5637385 - DNA, 25 bp, Homo sapien
cgtgtgcatttgacaggggtcttct

SEQ ID NO: 5637386 - DNA, 25 bp, Homo sapien
cgtggttaacgcgtgtgcatttgac

SEQ ID NO: 5637387 - DNA, 25 bp, Homo sapien
gacgaagctcctggcaaggaataag

SEQ ID NO: 5637388 - DNA, 25 bp, Homo sapien
gaataagtgactaaaccatggctgt

SEQ ID NO: 5637389 - DNA, 25 bp, Homo sapien
cctcagtgccaggttcatctgtgct

SEQ ID NO: 5637390 - DNA, 25 bp, Homo sapien
tgagtcgtccttgggtaacacgtgg

SEQ ID NO: 5637391 - DNA, 25 bp, Homo sapien
aggggtcttctgtaataatggggtg

SEQ ID NO: 5637392 - DNA, 25 bp, Homo sapien
gtcctaaaggatgactgagtcgtcc

SEQ ID NO: 5637393 - DNA, 25 bp, Homo sapien
aataatggggtgattctcacgcgtg

SEQ ID NO: 5637394 - DNA, 25 bp, Homo sapien
gcggccaaaagatctccccacctca

SEQ ID NO: 5637395 - DNA, 25 bp, Homo sapien
tcagctggagactttaaatttccta

SEQ ID NO: 5637396 - DNA, 25 bp, Homo sapien
ctcttgagctttttaaggtgttttc

SEQ ID NO: 5637397 - DNA, 25 bp, Homo sapien
attgggcagttcagcgcctactttc

SEQ ID NO: 5637398 - DNA, 25 bp, Homo sapien
gggcagactcaactggcgagatttt

SEQ ID NO: 5637399 - DNA, 25 bp, Homo sapien
actggcgagattttaactggagggt

SEQ ID NO: 5637400 - DNA, 25 bp, Homo sapien
tacttgtggatttattgggcagttc

SEQ ID NO: 5637401 - DNA, 25 bp, Homo sapien
ttgagcacggcttctttcaatgctt

SEQ ID NO: 5637402 - DNA, 25 bp, Homo sapien
agcatcttaccttgagcacggcttc

SEQ ID NO: 5637403 - DNA, 25 bp, Homo sapien
tatgagtcattcagctcagcccttt

SEQ ID NO: 5637404 - DNA, 25 bp, Homo sapien
gtggatttattgggcagttcagcgc

SEQ ID NO: 5637405 - DNA, 25 bp, Homo sapien
agcgcctactttcatgggcagactc

SEQ ID NO: 5637406 - DNA, 25 bp, Homo sapien
aaggatatttaaagcgaaggcaatc

SEQ ID NO: 5637407 - DNA, 25 bp, Homo sapien
ggggaccggaatctatgtagtaaca

SEQ ID NO: 5637408 - DNA, 25 bp, Homo sapien
tggacgctactggataggctctaca

SEQ ID NO: 5637409 - DNA, 25 bp, Homo sapien
atctatgtagtaacaggaggagtgt

SEQ ID NO: 5637410 - DNA, 25 bp, Homo sapien
tccatgttttacagggcagagtatt

SEQ ID NO: 5637411 - DNA, 25 bp, Homo sapien
tatcttcatcggtcacaaaggaata

SEQ ID NO: 5637412 - DNA, 25 bp, Homo sapien
aaagcgaaggcaatcttccagcttc

SEQ ID NO: 5637413 - DNA, 25 bp, Homo sapien
tagtacacaattcagaccatccttc

SEQ ID NO: 5637414 - DNA, 25 bp, Homo sapien
ccagcttctgtggactgagtcttac

SEQ ID NO: 5637415 - DNA, 25 bp, Homo sapien
tggtacagtggacgctactggatag

SEQ ID NO: 5637416 - DNA, 25 bp, Homo sapien
ctagtaccagtgtaaaattgcttct

SEQ ID NO: 5637417 - DNA, 25 bp, Homo sapien
cgcctggcactctcacccgaagaca

SEQ ID NO: 5637418 - DNA, 25 bp, Homo sapien
catccgcttgtccccctccaagatc

SEQ ID NO: 5637419 - DNA, 25 bp, Homo sapien
acccgaagacaagcccatccgcttg

SEQ ID NO: 5637420 - DNA, 25 bp, Homo sapien
cagagccctctgagtgtccagactt

SEQ ID NO: 5637421 - DNA, 25 bp, Homo sapien
cccagccacctagaaatgtcagact

SEQ ID NO: 5637422 - DNA, 25 bp, Homo sapien
agcgagtcccagccacctagaaatg

SEQ ID NO: 5637423 - DNA, 25 bp, Homo sapien
ctgagtgtccagactttgtggaggg

SEQ ID NO: 5637424 - DNA, 25 bp, Homo sapien
ggcactctcacccgaagacaagccc

SEQ ID NO: 5637425 - DNA, 25 bp, Homo sapien
cccctccaagatcacagagccgctg

SEQ ID NO: 5637426 - DNA, 25 bp, Homo sapien
ctgatgtgccgctcccggctgatgg

SEQ ID NO: 5637427 - DNA, 25 bp, Homo sapien
tgtccccctccaagatcacagagcc

SEQ ID NO: 5637428 - DNA, 25 bp, Homo sapien
tctgctctgatcagggaaggacaaa

SEQ ID NO: 5637429 - DNA, 25 bp, Homo sapien
tttcttcacagagctaaagcaatac

SEQ ID NO: 5637430 - DNA, 25 bp, Homo sapien
gtggggaatttctagaagtcccatc

SEQ ID NO: 5637431 - DNA, 25 bp, Homo sapien
attaacccagtcctgtgtggggaat

SEQ ID NO: 5637432 - DNA, 25 bp, Homo sapien
ctatggtacggtgatgtttatctgc

SEQ ID NO: 5637433 - DNA, 25 bp, Homo sapien
gaagtcccatctatggtacggtgat

SEQ ID NO: 5637434 - DNA, 25 bp, Homo sapien
ttcacagagctaaagcaatacctta

SEQ ID NO: 5637435 - DNA, 25 bp, Homo sapien
aacccagtcctgtgtggggaatttc

SEQ ID NO: 5637436 - DNA, 25 bp, Homo sapien
ctgtgtggggaatttctagaagtcc

SEQ ID NO: 5637437 - DNA, 25 bp, Homo sapien
ttatctgctctgatcagggaaggac

SEQ ID NO: 5637438 - DNA, 25 bp, Homo sapien
aagcaataccttagaattaacccag

SEQ ID NO: 5637439 - DNA, 25 bp, Homo sapien
agaggcagttggtacacagtaccct

SEQ ID NO: 5637440 - DNA, 25 bp, Homo sapien
gagatgaggcaatttgcccaaggac

SEQ ID NO: 5637441 - DNA, 25 bp, Homo sapien
ccctagttagtcctgaaagctacgc

SEQ ID NO: 5637442 - DNA, 25 bp, Homo sapien
gctggccacgcgtcctccttccgca

SEQ ID NO: 5637443 - DNA, 25 bp, Homo sapien
catcccgcctggatctagcagggct

SEQ ID NO: 5637444 - DNA, 25 bp, Homo sapien
atttgcccaaggacccacagatgga

SEQ ID NO: 5637445 - DNA, 25 bp, Homo sapien
gtagcatcagtctcctcccaggcct

SEQ ID NO: 5637446 - DNA, 25 bp, Homo sapien
gaaagctacgcattcgaggctcaga

SEQ ID NO: 5637447 - DNA, 25 bp, Homo sapien
agcccaggcctgtacaagccactgt

SEQ ID NO: 5637448 - DNA, 25 bp, Homo sapien
actcctcccccaagccaggtaccca

SEQ ID NO: 5637449 - DNA, 25 bp, Homo sapien
gggcagggtttcagtcacctctcca

SEQ ID NO: 5637450 - DNA, 25 bp, Homo sapien
gttctagctgaatggtcaagatgtc

SEQ ID NO: 5637451 - DNA, 25 bp, Homo sapien
gaaaaactgagaagaattacaacgc

SEQ ID NO: 5637452 - DNA, 25 bp, Homo sapien
gtttaaaactgaagtagacatattc

SEQ ID NO: 5637453 - DNA, 25 bp, Homo sapien
aacacaggatagagtttgtagttac

SEQ ID NO: 5637454 - DNA, 25 bp, Homo sapien
gttgctgccagggttctagctgaat

SEQ ID NO: 5637455 - DNA, 25 bp, Homo sapien
gggactggaatgattgaatagcaat

SEQ ID NO: 5637456 - DNA, 25 bp, Homo sapien
caaaaagctctgtgcatagcaactt

SEQ ID NO: 5637457 - DNA, 25 bp, Homo sapien
ctatacagtgtgaaaatgaaacctt

SEQ ID NO: 5637458 - DNA, 25 bp, Homo sapien
agtggcacaaaaataacttgggact

SEQ ID NO: 5637459 - DNA, 25 bp, Homo sapien
ataacttgggactggaatgattgaa

SEQ ID NO: 5637460 - DNA, 25 bp, Homo sapien
cttactgtacaaaaggtagagaagt

SEQ ID NO: 5637461 - DNA, 25 bp, Homo sapien
tcaagttacaatgtgagtgacatac

SEQ ID NO: 5637462 - DNA, 25 bp, Homo sapien
ctagtgaaaatataggtatagattc

SEQ ID NO: 5637463 - DNA, 25 bp, Homo sapien
aagaaggaaaaccaatagaatttca

SEQ ID NO: 5637464 - DNA, 25 bp, Homo sapien
ttgatgattctggcctgcatgtctc

SEQ ID NO: 5637465 - DNA, 25 bp, Homo sapien
aggtacatagacagagtttgaaaac

SEQ ID NO: 5637466 - DNA, 25 bp, Homo sapien
agaattcagaatgtaggagttaaga

SEQ ID NO: 5637467 - DNA, 25 bp, Homo sapien
catttgcaggtttggagataagaac

SEQ ID NO: 5637468 - DNA, 25 bp, Homo sapien
tctctctaggaggcatcgttacaat

SEQ ID NO: 5637469 - DNA, 25 bp, Homo sapien
tctaaagttggcaaaaggtacatag

SEQ ID NO: 5637470 - DNA, 25 bp, Homo sapien
gagaagtgaaaatacaggaaatagt

SEQ ID NO: 5637471 - DNA, 25 bp, Homo sapien
tgatagaaagacgtaataatgacag

SEQ ID NO: 5637472 - DNA, 25 bp, Homo sapien
taaagctactcagacgttaatctta

SEQ ID NO: 5637473 - DNA, 25 bp, Homo sapien
ctgcctgggtaaccttggccttata

SEQ ID NO: 5637474 - DNA, 25 bp, Homo sapien
aagaactccttgggttagttggctg

SEQ ID NO: 5637475 - DNA, 25 bp, Homo sapien
ccaaggtacaccaagcaaacctgat

SEQ ID NO: 5637476 - DNA, 25 bp, Homo sapien
caggactttgtatgagattttgtgg

SEQ ID NO: 5637477 - DNA, 25 bp, Homo sapien
gggctgctactggtcttacatttaa

SEQ ID NO: 5637478 - DNA, 25 bp, Homo sapien
tgtggcttcttgttacaggactttg

SEQ ID NO: 5637479 - DNA, 25 bp, Homo sapien
tcattggctttggttggctgctgag

SEQ ID NO: 5637480 - DNA, 25 bp, Homo sapien
ggaggaccatttgaaagcgcctact

SEQ ID NO: 5637481 - DNA, 25 bp, Homo sapien
agcgcctacttctccaaggtacacc

SEQ ID NO: 5637482 - DNA, 25 bp, Homo sapien
aacgaaggtggaagatctctatagt

SEQ ID NO: 5637483 - DNA, 25 bp, Homo sapien
aggctctagcccagtcccggttaat

SEQ ID NO: 5637484 - DNA, 25 bp, Homo sapien
ggacttggatacttaggctggactt

SEQ ID NO: 5637485 - DNA, 25 bp, Homo sapien
tctcagtggccagagcatcttggag

SEQ ID NO: 5637486 - DNA, 25 bp, Homo sapien
tctggagaggcctacctcctgtcca

SEQ ID NO: 5637487 - DNA, 25 bp, Homo sapien
acttggtctgtcttcagcagcaacc

SEQ ID NO: 5637488 - DNA, 25 bp, Homo sapien
ttgaggaatgcccttgggtaaatcc

SEQ ID NO: 5637489 - DNA, 25 bp, Homo sapien
cctacctcctgtccaggtgggctcc

SEQ ID NO: 5637490 - DNA, 25 bp, Homo sapien
ctccattgagagcacctctggccac

SEQ ID NO: 5637491 - DNA, 25 bp, Homo sapien
tcctggagtcttgaagtaggagtgg

SEQ ID NO: 5637492 - DNA, 25 bp, Homo sapien
cctctctggtgtggtctggagaggc

SEQ ID NO: 5637493 - DNA, 25 bp, Homo sapien
cagctatgggctggattccactctc

SEQ ID NO: 5637494 - DNA, 25 bp, Homo sapien
tccacaactacaaaacaagagtgaa

SEQ ID NO: 5637495 - DNA, 25 bp, Homo sapien
tgagcacaagccctttgaataaaaa

SEQ ID NO: 5637496 - DNA, 25 bp, Homo sapien
aaaacaagagtgaatcagaaagaag

SEQ ID NO: 5637497 - DNA, 25 bp, Homo sapien
aactacaaaacaagagtgaatcaga

SEQ ID NO: 5637498 - DNA, 25 bp, Homo sapien
ctacaaaacaagagtgaatcagaaa

SEQ ID NO: 5637499 - DNA, 25 bp, Homo sapien
aaatgtccacaactacaaaacaaga

SEQ ID NO: 5637500 - DNA, 25 bp, Homo sapien
acaaaacaagagtgaatcagaaaga

SEQ ID NO: 5637501 - DNA, 25 bp, Homo sapien
ataaaaagtcttcttaaatgtccac

SEQ ID NO: 5637502 - DNA, 25 bp, Homo sapien
atgtccacaactacaaaacaagagt

SEQ ID NO: 5637503 - DNA, 25 bp, Homo sapien
cccagcactttgggactacaggcat

SEQ ID NO: 5637504 - DNA, 25 bp, Homo sapien
tgtccacaactacaaaacaagagtg

SEQ ID NO: 5637505 - DNA, 25 bp, Homo sapien
gaaaaattagagtcctcttattagt

SEQ ID NO: 5637506 - DNA, 25 bp, Homo sapien
actaataagaggactctaatttttc

SEQ ID NO: 5637507 - DNA, 25 bp, Homo sapien
aggctcatcacgtatttgacattat

SEQ ID NO: 5637508 - DNA, 25 bp, Homo sapien
ataatgtcaaatacgtgatgagcct

SEQ ID NO: 5637509 - DNA, 25 bp, Homo sapien
gtttgccgttcggtccagaacttgt

SEQ ID NO: 5637510 - DNA, 25 bp, Homo sapien
acaagttctggaccgaacggcaaac

SEQ ID NO: 5637511 - DNA, 25 bp, Homo sapien
ggtacggtggccccacggacgccca

SEQ ID NO: 5637512 - DNA, 25 bp, Homo sapien
tgggcgtccgtggggccaccgtacc

SEQ ID NO: 5637513 - DNA, 25 bp, Homo sapien
gtttcccgtagggttctgtccctca

SEQ ID NO: 5637514 - DNA, 25 bp, Homo sapien
tgagggacagaaccctacgggaaac

SEQ ID NO: 5637515 - DNA, 25 bp, Homo sapien
gtacacttctattccggtaagacgt

SEQ ID NO: 5637516 - DNA, 25 bp, Homo sapien
acgtcttaccggaatagaagtgtac

SEQ ID NO: 5637517 - DNA, 25 bp, Homo sapien
aactgtattggcgactaaggatcaa

SEQ ID NO: 5637518 - DNA, 25 bp, Homo sapien
ttgatccttagtcgccaatacagtt

SEQ ID NO: 5637519 - DNA, 25 bp, Homo sapien
gcagcggcaccgaggcggctcggga

SEQ ID NO: 5637520 - DNA, 25 bp, Homo sapien
tcccgagccgcctcggtgccgctgc

SEQ ID NO: 5637521 - DNA, 25 bp, Homo sapien
tccgcgtccgcagcggcaccgaggc

SEQ ID NO: 5637522 - DNA, 25 bp, Homo sapien
gcctcggtgccgctgcggacgcgga

SEQ ID NO: 5637523 - DNA, 25 bp, Homo sapien
aaagtactgtttaacttctcaagaa

SEQ ID NO: 5637524 - DNA, 25 bp, Homo sapien
ttcttgagaagttaaacagtacttt

SEQ ID NO: 5637525 - DNA, 25 bp, Homo sapien
attctgttactaatgaaaactcgaa

SEQ ID NO: 5637526 - DNA, 25 bp, Homo sapien
ttcgagttttcattagtaacagaat

SEQ ID NO: 5637527 - DNA, 25 bp, Homo sapien
gagtaatcacatcattcaccaaagt

SEQ ID NO: 5637528 - DNA, 25 bp, Homo sapien
actttggtgaatgatgtgattactc

SEQ ID NO: 5637529 - DNA, 25 bp, Homo sapien
gtcccggtgccccccgagcgggtga

SEQ ID NO: 5637530 - DNA, 25 bp, Homo sapien
tcacccgctcggggggcaccgggac

SEQ ID NO: 5637531 - DNA, 25 bp, Homo sapien
gggacagaacaggtaagccactatg

SEQ ID NO: 5637532 - DNA, 25 bp, Homo sapien
catagtggcttacctgttctgtccc

SEQ ID NO: 5637533 - DNA, 25 bp, Homo sapien
aaaggaacatagtgaagtaaacgtg

SEQ ID NO: 5637534 - DNA, 25 bp, Homo sapien
cacgtttacttcactatgttccttt

SEQ ID NO: 5637535 - DNA, 25 bp, Homo sapien
ccgggactgtccactactgaagaga

SEQ ID NO: 5637536 - DNA, 25 bp, Homo sapien
tctcttcagtagtggacagtcccgg

SEQ ID NO: 5637537 - DNA, 25 bp, Homo sapien
gtacctctgaggagggcccctcagg

SEQ ID NO: 5637538 - DNA, 25 bp, Homo sapien
cctgaggggccctcctcagaggtac

SEQ ID NO: 5637539 - DNA, 25 bp, Homo sapien
tcccctcggtcccagaggtagtcgg

SEQ ID NO: 5637540 - DNA, 25 bp, Homo sapien
ccgactacctctgggaccgagggga

SEQ ID NO: 5637541 - DNA, 25 bp, Homo sapien
tcgttctcggctttcgacagcgggt

SEQ ID NO: 5637542 - DNA, 25 bp, Homo sapien
acccgctgtcgaaagccgagaacga

SEQ ID NO: 5637543 - DNA, 25 bp, Homo sapien
gggtgggcggcaccgcagacgaagg

SEQ ID NO: 5637544 - DNA, 25 bp, Homo sapien
ccttcgtctgcggtgccgcccaccc

SEQ ID NO: 5637545 - DNA, 25 bp, Homo sapien
ggagccggtccgtggacgtacattt

SEQ ID NO: 5637546 - DNA, 25 bp, Homo sapien
aaatgtacgtccacggaccggctcc

SEQ ID NO: 5637547 - DNA, 25 bp, Homo sapien
acgttagattcgtctgcatggtcct

SEQ ID NO: 5637548 - DNA, 25 bp, Homo sapien
aggaccatgcagacgaatctaacgt

SEQ ID NO: 5637549 - DNA, 25 bp, Homo sapien
gactcaggtcctggtataactgacc

SEQ ID NO: 5637550 - DNA, 25 bp, Homo sapien
ggtcagttataccaggacctgagtc

SEQ ID NO: 5637551 - DNA, 25 bp, Homo sapien
atctttcggtagtcttgagtcttcc

SEQ ID NO: 5637552 - DNA, 25 bp, Homo sapien
ggaagactcaagactaccgaaagat

SEQ ID NO: 5637553 - DNA, 25 bp, Homo sapien
gacggccatggtagcacggaagtag

SEQ ID NO: 5637554 - DNA, 25 bp, Homo sapien
ctacttccgtgctaccatggccgtc

SEQ ID NO: 5637555 - DNA, 25 bp, Homo sapien
cccatctgaaggtgtgagctatact

SEQ ID NO: 5637556 - DNA, 25 bp, Homo sapien
agtatagctcacaccttcagatggg

SEQ ID NO: 5637557 - DNA, 25 bp, Homo sapien
gagacttctaggttctagcatagat

SEQ ID NO: 5637558 - DNA, 25 bp, Homo sapien
atctatgctagaacctagaagtctc

SEQ ID NO: 5637559 - DNA, 25 bp, Homo sapien
ccccgactcgaaaagctagagacct

SEQ ID NO: 5637560 - DNA, 25 bp, Homo sapien
aggtctctagcttttcgagtcgggg

SEQ ID NO: 5637561 - DNA, 25 bp, Homo sapien
atatacggtgtaactgtctctgaag

SEQ ID NO: 5637562 - DNA, 25 bp, Homo sapien
cttcagagacagttacaccgtatat

SEQ ID NO: 5637563 - DNA, 25 bp, Homo sapien
cctgttgagtcgtgtctgcgggcct

SEQ ID NO: 5637564 - DNA, 25 bp, Homo sapien
aggcccgcagacacgactcaacagg

SEQ ID NO: 5637565 - DNA, 25 bp, Homo sapien
ggtcgcgtcgctgggcccggactcg

SEQ ID NO: 5637566 - DNA, 25 bp, Homo sapien
cgagtccgggcccagcgacgcgacc

SEQ ID NO: 5637567 - DNA, 25 bp, Homo sapien
cggtcgcgtcgctgggcccggactc

SEQ ID NO: 5637568 - DNA, 25 bp, Homo sapien
gagtccgggcccagcgacgcgaccg

SEQ ID NO: 5637569 - DNA, 25 bp, Homo sapien
tcggtcgcgtcgctgggcccggact

SEQ ID NO: 5637570 - DNA, 25 bp, Homo sapien
agtccgggcccagcgacgcgaccga

SEQ ID NO: 5637571 - DNA, 25 bp, Homo sapien
aagtcaatgtcaaagattgtcgaca

SEQ ID NO: 5637572 - DNA, 25 bp, Homo sapien
tgtcgacaatctttgacattgactt

SEQ ID NO: 5637573 - DNA, 25 bp, Homo sapien
ctgacttttaaattttatatagtgt

SEQ ID NO: 5637574 - DNA, 25 bp, Homo sapien
acactatataaaatttaaaagtcag

SEQ ID NO: 5637575 - DNA, 25 bp, Homo sapien
atctcctgacttttaaattttatat

SEQ ID NO: 5637576 - DNA, 25 bp, Homo sapien
atataaaatttaaaagtcaggagat

SEQ ID NO: 5637577 - DNA, 25 bp, Homo sapien
gggacacaccagtggaatccttccg

SEQ ID NO: 5637578 - DNA, 25 bp, Homo sapien
cggaaggattccactggtgtgtccc

SEQ ID NO: 5637579 - DNA, 25 bp, Homo sapien
ggagtattccagacaacaggagtaa

SEQ ID NO: 5637580 - DNA, 25 bp, Homo sapien
ttactcctgttgtctggaatactcc

SEQ ID NO: 5637581 - DNA, 25 bp, Homo sapien
aatcagtaatacaagatttgagtac

SEQ ID NO: 5637582 - DNA, 25 bp, Homo sapien
gtactcaaatcttgtattactgatt

SEQ ID NO: 5637583 - DNA, 25 bp, Homo sapien
gaaaacatcatgtatttattctaaa

SEQ ID NO: 5637584 - DNA, 25 bp, Homo sapien
tttagaataaatacatgatgttttc

SEQ ID NO: 5637585 - DNA, 25 bp, Homo sapien
ctcccataaggccaacgtcataatt

SEQ ID NO: 5637586 - DNA, 25 bp, Homo sapien
aattatgacgttggccttatgggag

SEQ ID NO: 5637587 - DNA, 25 bp, Homo sapien
gcctcctggcccccgccgccgagac

SEQ ID NO: 5637588 - DNA, 25 bp, Homo sapien
gtctcggcggcgggggccaggaggc

SEQ ID NO: 5637589 - DNA, 25 bp, Homo sapien
gacgccccgtctggcccccggcctc

SEQ ID NO: 5637590 - DNA, 25 bp, Homo sapien
gaggccgggggccagacggggcgtc

SEQ ID NO: 5637591 - DNA, 25 bp, Homo sapien
accgtatttgaagttgcattactct

SEQ ID NO: 5637592 - DNA, 25 bp, Homo sapien
agagtaatgcaacttcaaatacggt

SEQ ID NO: 5637593 - DNA, 25 bp, Homo sapien
gatttccgagactggatccgtacat

SEQ ID NO: 5637594 - DNA, 25 bp, Homo sapien
atgtacggatccagtctcggaaatc

SEQ ID NO: 5637595 - DNA, 25 bp, Homo sapien
cgcgggactcgagcggtccaccgaa

SEQ ID NO: 5637596 - DNA, 25 bp, Homo sapien
ttcggtggaccgctcgagtcccgcg

SEQ ID NO: 5637597 - DNA, 25 bp, Homo sapien
accgcgggactcgagcggtccaccg

SEQ ID NO: 5637598 - DNA, 25 bp, Homo sapien
cggtggaccgctcgagtcccgcggt

SEQ ID NO: 5637599 - DNA, 25 bp, Homo sapien
tcctgacgcgttaaacgacaaagaa

SEQ ID NO: 5637600 - DNA, 25 bp, Homo sapien
ttctttgtcgtttaacgcgtcagga

SEQ ID NO: 5637601 - DNA, 25 bp, Homo sapien
acctgagaaatgaatctacaagaag

SEQ ID NO: 5637602 - DNA, 25 bp, Homo sapien
cttcttgtagattcatttctcaggt

SEQ ID NO: 5637603 - DNA, 25 bp, Homo sapien
attataatcgaagtaatattctacc

SEQ ID NO: 5637604 - DNA, 25 bp, Homo sapien
ggtagaatattacttcgattataat

SEQ ID NO: 5637605 - DNA, 25 bp, Homo sapien
aattataatcgaagtaatattctac

SEQ ID NO: 5637606 - DNA, 25 bp, Homo sapien
gtagaatattacttcgattataatt

SEQ ID NO: 5637607 - DNA, 25 bp, Homo sapien
aggtcctcgctggtcgctggaggtg

SEQ ID NO: 5637608 - DNA, 25 bp, Homo sapien
cacctccagcgaccagcgaggacct

SEQ ID NO: 5637609 - DNA, 25 bp, Homo sapien
aacattttatactttactgtgagta

SEQ ID NO: 5637610 - DNA, 25 bp, Homo sapien
tactcacagtaaagtataaaatgtt

SEQ ID NO: 5637611 - DNA, 25 bp, Homo sapien
gaccacttcaacattttatacttta

SEQ ID NO: 5637612 - DNA, 25 bp, Homo sapien
taaagtataaaatgttgaagtggtc

SEQ ID NO: 5637613 - DNA, 25 bp, Homo sapien
caccggcgtagtttcgcctccgagg

SEQ ID NO: 5637614 - DNA, 25 bp, Homo sapien
cctcggaggcgaaactacgccggtg

SEQ ID NO: 5637615 - DNA, 25 bp, Homo sapien
ggtgagccggcgtccgaaccggacc

SEQ ID NO: 5637616 - DNA, 25 bp, Homo sapien
ggtccggttcggacgccggctcacc

SEQ ID NO: 5637617 - DNA, 25 bp, Homo sapien
ccacttcccggtgggcgcgggctcg

SEQ ID NO: 5637618 - DNA, 25 bp, Homo sapien
cgagcccgcgcccaccgggaagtgg

SEQ ID NO: 5637619 - DNA, 25 bp, Homo sapien
ttggtagaaattcaaatattaacgt

SEQ ID NO: 5637620 - DNA, 25 bp, Homo sapien
acgttaatatttgaatttctaccaa

SEQ ID NO: 5637621 - DNA, 25 bp, Homo sapien
agttggtagaaattcaaatattaac

SEQ ID NO: 5637622 - DNA, 25 bp, Homo sapien
gttaatatttgaatttctaccaact

SEQ ID NO: 5637623 - DNA, 25 bp, Homo sapien
cgccgggcggcctcccctgccgtct

SEQ ID NO: 5637624 - DNA, 25 bp, Homo sapien
agacggcaggggaggccgcccggcg

SEQ ID NO: 5637625 - DNA, 25 bp, Homo sapien
tcgccgggcggcctcccctgccgtc

SEQ ID NO: 5637626 - DNA, 25 bp, Homo sapien
gacggcaggggaggccgcccggcga

SEQ ID NO: 5637627 - DNA, 25 bp, Homo sapien
gtctcgccgggcggcctcccctgcc

SEQ ID NO: 5637628 - DNA, 25 bp, Homo sapien
ggcaggggaggccgcccggcgagac

SEQ ID NO: 5637629 - DNA, 25 bp, Homo sapien
tccgtctcgccgggcggcctcccct

SEQ ID NO: 5637630 - DNA, 25 bp, Homo sapien
aggggaggccgcccggcgagacgga

SEQ ID NO: 5637631 - DNA, 25 bp, Homo sapien
agattgactgattagttgtttctac

SEQ ID NO: 5637632 - DNA, 25 bp, Homo sapien
gtagaaacaactaatcagtcaatct

SEQ ID NO: 5637633 - DNA, 25 bp, Homo sapien
cgggtcaggctcacggtccggtctc

SEQ ID NO: 5637634 - DNA, 25 bp, Homo sapien
gagaccggaccgtgagcctgacccg

SEQ ID NO: 5637635 - DNA, 25 bp, Homo sapien
ttcgggcgaacccgaaggctcccag

SEQ ID NO: 5637636 - DNA, 25 bp, Homo sapien
ctgggagccttcgggttcgcccgaa

SEQ ID NO: 5637637 - DNA, 25 bp, Homo sapien
accagtattaaccttctatttggag

SEQ ID NO: 5637638 - DNA, 25 bp, Homo sapien
ctccaaatagaaggttaatactggt

SEQ ID NO: 5637639 - DNA, 25 bp, Homo sapien
ccgagtactcgttcccggctcgtgg

SEQ ID NO: 5637640 - DNA, 25 bp, Homo sapien
ccacgagccgggaacgagtactcgg

SEQ ID NO: 5637641 - DNA, 25 bp, Homo sapien
cgctccaatgacgattcggtacact

SEQ ID NO: 5637642 - DNA, 25 bp, Homo sapien
agtgtaccgaatcgtcattggagcg

SEQ ID NO: 5637643 - DNA, 25 bp, Homo sapien
gatacgtattatgtttttaagtatg

SEQ ID NO: 5637644 - DNA, 25 bp, Homo sapien
catacttaaaaacataatacgtatc

SEQ ID NO: 5637645 - DNA, 25 bp, Homo sapien
ttatccgacgtgcacatgtagtttt

SEQ ID NO: 5637646 - DNA, 25 bp, Homo sapien
aaaactacatgtgcacgtcggataa

SEQ ID NO: 5637647 - DNA, 25 bp, Homo sapien
ttgacttgttttcgttgcagaagga

SEQ ID NO: 5637648 - DNA, 25 bp, Homo sapien
tccttctgcaacgaaaacaagtcaa

SEQ ID NO: 5637649 - DNA, 25 bp, Homo sapien
ctcgtcccgacacagcgtctcgttc

SEQ ID NO: 5637650 - DNA, 25 bp, Homo sapien
gaacgagacgctgtgtcgggacgag

SEQ ID NO: 5637651 - DNA, 25 bp, Homo sapien
cgtaggctcaacactaaagacccga

SEQ ID NO: 5637652 - DNA, 25 bp, Homo sapien
tcgggtctttagtgttgagcctacg

SEQ ID NO: 5637653 - DNA, 25 bp, Homo sapien
actgtgagggggacctgacgccacg

SEQ ID NO: 5637654 - DNA, 25 bp, Homo sapien
cgtggcgtcaggtccccctcacagt

SEQ ID NO: 5637655 - DNA, 25 bp, Homo sapien
tcaaggggaaatcgtccaccagaga

SEQ ID NO: 5637656 - DNA, 25 bp, Homo sapien
tctctggtggacgatttccccttga

SEQ ID NO: 5637657 - DNA, 25 bp, Homo sapien
ggttgttaatttatattaactgact

SEQ ID NO: 5637658 - DNA, 25 bp, Homo sapien
agtcagttaatataaattaacaacc

SEQ ID NO: 5637659 - DNA, 25 bp, Homo sapien
aaggcgcgacgaggcctgtctcgac

SEQ ID NO: 5637660 - DNA, 25 bp, Homo sapien
gtcgagacaggcctcgtcgcgcctt

SEQ ID NO: 5637661 - DNA, 25 bp, Homo sapien
cggcgagcgcgtcacgccggtccac

SEQ ID NO: 5637662 - DNA, 25 bp, Homo sapien
gtggaccggcgtgacgcgctcgccg

SEQ ID NO: 5637663 - DNA, 25 bp, Homo sapien
ctcagtgaaggtgccgacacaggtg

SEQ ID NO: 5637664 - DNA, 25 bp, Homo sapien
cacctgtgtcggcaccttcactgag

SEQ ID NO: 5637665 - DNA, 25 bp, Homo sapien
gtctcggcattaccccgacccggag

SEQ ID NO: 5637666 - DNA, 25 bp, Homo sapien
ctccgggtcggggtaatgccgagac

SEQ ID NO: 5637667 - DNA, 25 bp, Homo sapien
ggagtgtccctccttggctccctgg

SEQ ID NO: 5637668 - DNA, 25 bp, Homo sapien
ccagggagccaaggagggacactcc

SEQ ID NO: 5637669 - DNA, 25 bp, Homo sapien
taaacctcatttacaatattggaat

SEQ ID NO: 5637670 - DNA, 25 bp, Homo sapien
attccaatattgtaaatgaggttta

SEQ ID NO: 5637671 - DNA, 25 bp, Homo sapien
tctttttaaacctcatttacaatat

SEQ ID NO: 5637672 - DNA, 25 bp, Homo sapien
atattgtaaatgaggtttaaaaaga

SEQ ID NO: 5637673 - DNA, 25 bp, Homo sapien
aacatcgacgggtcggccgttccat

SEQ ID NO: 5637674 - DNA, 25 bp, Homo sapien
atggaacggccgacccgtcgatgtt

SEQ ID NO: 5637675 - DNA, 25 bp, Homo sapien
cgacttatccggagtggcgtccagg

SEQ ID NO: 5637676 - DNA, 25 bp, Homo sapien
cctggacgccactccggataagtcg

SEQ ID NO: 5637677 - DNA, 25 bp, Homo sapien
tgacaacacgcaaacacgacctact

SEQ ID NO: 5637678 - DNA, 25 bp, Homo sapien
agtaggtcgtgtttgcgtgttgtca

SEQ ID NO: 5637679 - DNA, 25 bp, Homo sapien
ggtcaaccttatagaatcagaaaag

SEQ ID NO: 5637680 - DNA, 25 bp, Homo sapien
cttttctgattctataaggttgacc

SEQ ID NO: 5637681 - DNA, 25 bp, Homo sapien
gtcacgcgtcaggtccgtgttacct

SEQ ID NO: 5637682 - DNA, 25 bp, Homo sapien
aggtaacacggacctgacgcgtgac

SEQ ID NO: 5637683 - DNA, 25 bp, Homo sapien
gtgtcgcagttcctcggccttcacg

SEQ ID NO: 5637684 - DNA, 25 bp, Homo sapien
cgtgaaggccgaggaactgcgacac

SEQ ID NO: 5637685 - DNA, 25 bp, Homo sapien
gacagtttgcgctccccgacccgga

SEQ ID NO: 5637686 - DNA, 25 bp, Homo sapien
tccgggtcggggagcgcaaactgtc

SEQ ID NO: 5637687 - DNA, 25 bp, Homo sapien
cgacccggatccggcggaggtgctt

SEQ ID NO: 5637688 - DNA, 25 bp, Homo sapien
aagcacctccgccggatccgggtcg

SEQ ID NO: 5637689 - DNA, 25 bp, Homo sapien
gacaacttttaaccagttcctgaaa

SEQ ID NO: 5637690 - DNA, 25 bp, Homo sapien
tttcaggaactggttaaaagttgtc

SEQ ID NO: 5637691 - DNA, 25 bp, Homo sapien
agtgaatatccctttgtaaacctta

SEQ ID NO: 5637692 - DNA, 25 bp, Homo sapien
taaggtttacaaagggatattcact

SEQ ID NO: 5637693 - DNA, 25 bp, Homo sapien
caagcctcgggcagaccgaccgcgg

SEQ ID NO: 5637694 - DNA, 25 bp, Homo sapien
ccgcggtcggtctgcccgaggcttg

SEQ ID NO: 5637695 - DNA, 25 bp, Homo sapien
gacccctccgcgagcggatgcccag

SEQ ID NO: 5637696 - DNA, 25 bp, Homo sapien
ctgggcatccgctcgcggaggggtc

SEQ ID NO: 5637697 - DNA, 25 bp, Homo sapien
tgactgactgaccttgagaggtgga

SEQ ID NO: 5637698 - DNA, 25 bp, Homo sapien
tccacctctcaaggtcagtcagtca

SEQ ID NO: 5637699 - DNA, 25 bp, Homo sapien
gaaccgtaaacactcgagttatacc

SEQ ID NO: 5637700 - DNA, 25 bp, Homo sapien
ggtataactcgagtgtttacggttc

SEQ ID NO: 5637701 - DNA, 25 bp, Homo sapien
gaggtatctcagggaacccagaggt

SEQ ID NO: 5637702 - DNA, 25 bp, Homo sapien
acctctgggttccctgagatacctc

SEQ ID NO: 5637703 - DNA, 25 bp, Homo sapien
gactcagaacagacctgactgtggt

SEQ ID NO: 5637704 - DNA, 25 bp, Homo sapien
accacagtcaggtctgttctgagtc

SEQ ID NO: 5637705 - DNA, 25 bp, Homo sapien
ctcggatccgggacgacgccgtcgt

SEQ ID NO: 5637706 - DNA, 25 bp, Homo sapien
acgacggcgtcgtcccggatccgag

SEQ ID NO: 5637707 - DNA, 25 bp, Homo sapien
tgtcgagggacggtaggaggaggag

SEQ ID NO: 5637708 - DNA, 25 bp, Homo sapien
ctcctcctcctaccgtccctcgaca

SEQ ID NO: 5637709 - DNA, 25 bp, Homo sapien
acactagtcccgtagcgtccagacc

SEQ ID NO: 5637710 - DNA, 25 bp, Homo sapien
ggtctggacgctacgggactagtgt

SEQ ID NO: 5637711 - DNA, 25 bp, Homo sapien
gaagaagtcatgatagaagaacaaa

SEQ ID NO: 5637712 - DNA, 25 bp, Homo sapien
tttgttcttctatcatgacttcttc

SEQ ID NO: 5637713 - DNA, 25 bp, Homo sapien
gaggcggtaggcgggacgacggagg

SEQ ID NO: 5637714 - DNA, 25 bp, Homo sapien
cctccgtcgtcccgcctaccgcctc

SEQ ID NO: 5637715 - DNA, 25 bp, Homo sapien
taccgtagaaagtagaagctagaac

SEQ ID NO: 5637716 - DNA, 25 bp, Homo sapien
gttctagcttctactttctacggta

SEQ ID NO: 5637717 - DNA, 25 bp, Homo sapien
gtgggctgtacgaggccggcggtcg

SEQ ID NO: 5637718 - DNA, 25 bp, Homo sapien
cgaccgccggcctcgtacagcccac

SEQ ID NO: 5637719 - DNA, 25 bp, Homo sapien
aaccgacacttggggagaacagctc

SEQ ID NO: 5637720 - DNA, 25 bp, Homo sapien
gagctgttctccccaagtgtcggtt

SEQ ID NO: 5637721 - DNA, 25 bp, Homo sapien
gaggacgtctatatggctttttctt

SEQ ID NO: 5637722 - DNA, 25 bp, Homo sapien
aagaaaaagccatatagacgtcctc

SEQ ID NO: 5637723 - DNA, 25 bp, Homo sapien
gccggcgtcgtcaatgaactcggtc

SEQ ID NO: 5637724 - DNA, 25 bp, Homo sapien
gaccgagttcattgacgacgccggc

SEQ ID NO: 5637725 - DNA, 25 bp, Homo sapien
tttccagaatcttcattataagaac

SEQ ID NO: 5637726 - DNA, 25 bp, Homo sapien
gttcttataatgaagattctggaaa

SEQ ID NO: 5637727 - DNA, 25 bp, Homo sapien
accctccttctctgcgggcgtgggg

SEQ ID NO: 5637728 - DNA, 25 bp, Homo sapien
ccccacgcccgcagagaaggagggt

SEQ ID NO: 5637729 - DNA, 25 bp, Homo sapien
gcagcccgacggagaagggcccctg

SEQ ID NO: 5637730 - DNA, 25 bp, Homo sapien
caggggcccttctccgtcgggctgc

SEQ ID NO: 5637731 - DNA, 25 bp, Homo sapien
attctatatttatactttttgtaag

SEQ ID NO: 5637732 - DNA, 25 bp, Homo sapien
cttacaaaaagtataaatatagaat

SEQ ID NO: 5637733 - DNA, 25 bp, Homo sapien
atattctctgtacaatatcttcttt

SEQ ID NO: 5637734 - DNA, 25 bp, Homo sapien
aaagaagatattgtacagagaatat

SEQ ID NO: 5637735 - DNA, 25 bp, Homo sapien
aatattctctgtacaatatcttctt

SEQ ID NO: 5637736 - DNA, 25 bp, Homo sapien
aagaagatattgtacagagaatatt

SEQ ID NO: 5637737 - DNA, 25 bp, Homo sapien
tcgaagacaaggtaaatttaagatc

SEQ ID NO: 5637738 - DNA, 25 bp, Homo sapien
gatcttaaatttaccttgtcttcga

SEQ ID NO: 5637739 - DNA, 25 bp, Homo sapien
aagtcaacctaatgttaaatcaggt

SEQ ID NO: 5637740 - DNA, 25 bp, Homo sapien
acctgatttaacattaggttgactt

SEQ ID NO: 5637741 - DNA, 25 bp, Homo sapien
atgacagtatatatggtaaatagta

SEQ ID NO: 5637742 - DNA, 25 bp, Homo sapien
tactatttaccatatatactgtcat

SEQ ID NO: 5637743 - DNA, 25 bp, Homo sapien
agtgtttactgtcagaacctagttt

SEQ ID NO: 5637744 - DNA, 25 bp, Homo sapien
aaactaggttctgacagtaaacact

SEQ ID NO: 5637745 - DNA, 25 bp, Homo sapien
attaaagattgtaatcctaagacta

SEQ ID NO: 5637746 - DNA, 25 bp, Homo sapien
tagtcttaggattacaatctttaat

SEQ ID NO: 5637747 - DNA, 25 bp, Homo sapien
gacacacttcaactacatctttata

SEQ ID NO: 5637748 - DNA, 25 bp, Homo sapien
tataaagatgtagttgaagtgtgtc

SEQ ID NO: 5637749 - DNA, 25 bp, Homo sapien
tccccgtccggagctcgggtccggc

SEQ ID NO: 5637750 - DNA, 25 bp, Homo sapien
gccggacccgagctccggacgggga

SEQ ID NO: 5637751 - DNA, 25 bp, Homo sapien
cgtctccgccgagcctcagggctca

SEQ ID NO: 5637752 - DNA, 25 bp, Homo sapien
tgagccctgaggctcggcggagacg

SEQ ID NO: 5637753 - DNA, 25 bp, Homo sapien
agatttagtagtaagaatccggtcg

SEQ ID NO: 5637754 - DNA, 25 bp, Homo sapien
cgaccggattcttactactaaatct

SEQ ID NO: 5637755 - DNA, 25 bp, Homo sapien
tgggacccggactatcctgagtaat

SEQ ID NO: 5637756 - DNA, 25 bp, Homo sapien
attactcaggatagtccgggtccca

SEQ ID NO: 5637757 - DNA, 25 bp, Homo sapien
tccctccggacacgcctacgacacc

SEQ ID NO: 5637758 - DNA, 25 bp, Homo sapien
ggtgtcgtaggcgtgtccggaggga

SEQ ID NO: 5637759 - DNA, 25 bp, Homo sapien
tgcagtcgtagggacacccgcgtgt

SEQ ID NO: 5637760 - DNA, 25 bp, Homo sapien
acacgcgggtgtccctacgactgca

SEQ ID NO: 5637761 - DNA, 25 bp, Homo sapien
ttaattatcttagtcgtcatgatga

SEQ ID NO: 5637762 - DNA, 25 bp, Homo sapien
tcatcatgacgactaagataattaa

SEQ ID NO: 5637763 - DNA, 25 bp, Homo sapien
acttctgaggccgtggtttcactgg

SEQ ID NO: 5637764 - DNA, 25 bp, Homo sapien
ccagtgaaaccacggcctcagaagt

SEQ ID NO: 5637765 - DNA, 25 bp, Homo sapien
gcgcctccctctagcccggacgggc

SEQ ID NO: 5637766 - DNA, 25 bp, Homo sapien
gcccgtccgggctagagggaggcgc

SEQ ID NO: 5637767 - DNA, 25 bp, Homo sapien
aaacttctagtgatcttacaagtga

SEQ ID NO: 5637768 - DNA, 25 bp, Homo sapien
tcacttgtaagatcactagaagttt

SEQ ID NO: 5637769 - DNA, 25 bp, Homo sapien
caaagagagaaagatatctcgaatg

SEQ ID NO: 5637770 - DNA, 25 bp, Homo sapien
cattcgagatatctttctctctttg

SEQ ID NO: 5637771 - DNA, 25 bp, Homo sapien
agcaaccgaccgctacacagaccga

SEQ ID NO: 5637772 - DNA, 25 bp, Homo sapien
tcggtctgtgtagcggtcggttgct

SEQ ID NO: 5637773 - DNA, 25 bp, Homo sapien
cactggtttggacgatctttcaaag

SEQ ID NO: 5637774 - DNA, 25 bp, Homo sapien
ctttgaaagatcgtccaaaccagtg

SEQ ID NO: 5637775 - DNA, 25 bp, Homo sapien
tacgactggcgtttgggaacatcac

SEQ ID NO: 5637776 - DNA, 25 bp, Homo sapien
gtgatgttcccaaacgccagtcgta

SEQ ID NO: 5637777 - DNA, 25 bp, Homo sapien
gattcacttcatcatctcgttgtag

SEQ ID NO: 5637778 - DNA, 25 bp, Homo sapien
ctacaacgagatgatgaagtgaatc

SEQ ID NO: 5637779 - DNA, 25 bp, Homo sapien
gtggacgacacaccccttgtgaccg

SEQ ID NO: 5637780 - DNA, 25 bp, Homo sapien
cggtcacaaggggtgtgtcgtccac

SEQ ID NO: 5637781 - DNA, 25 bp, Homo sapien
aggagacttcttatcagttaggaac

SEQ ID NO: 5637782 - DNA, 25 bp, Homo sapien
gttcctaactgataagaagtctcct

SEQ ID NO: 5637783 - DNA, 25 bp, Homo sapien
cgatcgtaggaaaaggcgtcacaat

SEQ ID NO: 5637784 - DNA, 25 bp, Homo sapien
attgtgacgccttttcctacgatcg

SEQ ID NO: 5637785 - DNA, 25 bp, Homo sapien
accgaacgtaatatcaatgggcacg

SEQ ID NO: 5637786 - DNA, 25 bp, Homo sapien
cgtgcccattgatattacgttcggt

SEQ ID NO: 5637787 - DNA, 25 bp, Homo sapien
ctcggcgccacgactatggacgcgg

SEQ ID NO: 5637788 - DNA, 25 bp, Homo sapien
ccgcgtccatagtcgtggcgccgag

SEQ ID NO: 5637789 - DNA, 25 bp, Homo sapien
aagtaatttcactaacataggttat

SEQ ID NO: 5637790 - DNA, 25 bp, Homo sapien
ataacctatgttagtgaaattactt

SEQ ID NO: 5637791 - DNA, 25 bp, Homo sapien
acttttgtcgattagcgattgtcgc

SEQ ID NO: 5637792 - DNA, 25 bp, Homo sapien
gcgacaatcgctaatcgacaaaagt

SEQ ID NO: 5637793 - DNA, 25 bp, Homo sapien
gaggggtctatgattcggtcgttcg

SEQ ID NO: 5637794 - DNA, 25 bp, Homo sapien
cgaacgaccgaatcatagacccctc

SEQ ID NO: 5637795 - DNA, 25 bp, Homo sapien
aacacaccttgttaggtaccaatgt

SEQ ID NO: 5637796 - DNA, 25 bp, Homo sapien
acattggtacctaacaaggtgtgtt

SEQ ID NO: 5637797 - DNA, 25 bp, Homo sapien
ctcgaaaaagggtctaagactgtta

SEQ ID NO: 5637798 - DNA, 25 bp, Homo sapien
taacagtcttagaccctttttcgag

SEQ ID NO: 5637799 - DNA, 25 bp, Homo sapien
gggaccctgtgtcgtccggcccagg

SEQ ID NO: 5637800 - DNA, 25 bp, Homo sapien
cctgggccggacgacacagggtccc

SEQ ID NO: 5637801 - DNA, 25 bp, Homo sapien
agacccctcgcgtcgcctcgtttag

SEQ ID NO: 5637802 - DNA, 25 bp, Homo sapien
ctaaacgaggcgacgcgaggggtct

SEQ ID NO: 5637803 - DNA, 25 bp, Homo sapien
aaaatatttcagtagcaatttagac

SEQ ID NO: 5637804 - DNA, 25 bp, Homo sapien
gtctaaattgctactgaaatatttt

SEQ ID NO: 5637805 - DNA, 25 bp, Homo sapien
tctactatctcacatgtttacttat

SEQ ID NO: 5637806 - DNA, 25 bp, Homo sapien
ataagtaaacatgtgagatagtaga

SEQ ID NO: 5637807 - DNA, 25 bp, Homo sapien
ccgacaaagagatagggcaccttat

SEQ ID NO: 5637808 - DNA, 25 bp, Homo sapien
ataaggtgccctatctctttgtcgg

SEQ ID NO: 5637809 - DNA, 25 bp, Homo sapien
tgacacagtaatccttaatataaat

SEQ ID NO: 5637810 - DNA, 25 bp, Homo sapien
atttatattaaggattactgtgtca

SEQ ID NO: 5637811 - DNA, 25 bp, Homo sapien
cccgtgtgtgtccccggttgagagg

SEQ ID NO: 5637812 - DNA, 25 bp, Homo sapien
cctctcaaccggggacacacacggg

SEQ ID NO: 5637813 - DNA, 25 bp, Homo sapien
cgagaagacgatagagacttctgga

SEQ ID NO: 5637814 - DNA, 25 bp, Homo sapien
tccagaagtctctatcgtcttctcg

SEQ ID NO: 5637815 - DNA, 25 bp, Homo sapien
ccgtcatcccactaataagtaaaaa

SEQ ID NO: 5637816 - DNA, 25 bp, Homo sapien
tttttacttattagtgggatgacgg

SEQ ID NO: 5637817 - DNA, 25 bp, Homo sapien
cgtcagacacctcaattttggtaaa

SEQ ID NO: 5637818 - DNA, 25 bp, Homo sapien
tttaccaaaattgaggtgtctgacg

SEQ ID NO: 5637819 - DNA, 25 bp, Homo sapien
agtcccgtcggaagagtccggagga

SEQ ID NO: 5637820 - DNA, 25 bp, Homo sapien
tcctccggactcttccgacgggact

SEQ ID NO: 5637821 - DNA, 25 bp, Homo sapien
ccggactctccctggggcggccgta

SEQ ID NO: 5637822 - DNA, 25 bp, Homo sapien
tacggccgccccagggagagtccgg

SEQ ID NO: 5637823 - DNA, 25 bp, Homo sapien
gacaggtttaatatatttcacagaa

SEQ ID NO: 5637824 - DNA, 25 bp, Homo sapien
ttctgtgaaatatattaaacctgtc

SEQ ID NO: 5637825 - DNA, 25 bp, Homo sapien
tggggtcgcgaccgtcggttcgcga

SEQ ID NO: 5637826 - DNA, 25 bp, Homo sapien
tcgcgaaccgacggtcgcgacccca

SEQ ID NO: 5637827 - DNA, 25 bp, Homo sapien
ggggtcgcgaccgtcggttcgcgag

SEQ ID NO: 5637828 - DNA, 25 bp, Homo sapien
ctcgcgaaccgacggtcgcgacccc

SEQ ID NO: 5637829 - DNA, 25 bp, Homo sapien
actgtcgtccattcccgaaagaggg

SEQ ID NO: 5637830 - DNA, 25 bp, Homo sapien
ccctctttcgggaatggacgacagt

SEQ ID NO: 5637831 - DNA, 25 bp, Homo sapien
actcaagaggtgttgacgtagatac

SEQ ID NO: 5637832 - DNA, 25 bp, Homo sapien
gtatctacgtcaacacctcttgagt

SEQ ID NO: 5637833 - DNA, 25 bp, Homo sapien
ctccacagaggaacagacaggtccc

SEQ ID NO: 5637834 - DNA, 25 bp, Homo sapien
gggacctgtctgttcctctgtggag

SEQ ID NO: 5637835 - DNA, 25 bp, Homo sapien
cctactctactcttcctacgcctct

SEQ ID NO: 5637836 - DNA, 25 bp, Homo sapien
agaggcgtaggaagagtagagtagg

SEQ ID NO: 5637837 - DNA, 25 bp, Homo sapien
gtctttgtgactctaaaaaactgaa

SEQ ID NO: 5637838 - DNA, 25 bp, Homo sapien
ttcagttttttagagtcacaaagac

SEQ ID NO: 5637839 - DNA, 25 bp, Homo sapien
tcgtccgagaccctagcccgaacac

SEQ ID NO: 5637840 - DNA, 25 bp, Homo sapien
gtgttcgggctagggtctcggacga

SEQ ID NO: 5637841 - DNA, 25 bp, Homo sapien
cgatcatcaagtgacgaacggttct

SEQ ID NO: 5637842 - DNA, 25 bp, Homo sapien
agaaccgttcgtcacttgatgatcg

SEQ ID NO: 5637843 - DNA, 25 bp, Homo sapien
gagaagatagcttaagggaaggaaa

SEQ ID NO: 5637844 - DNA, 25 bp, Homo sapien
tttccttcccttaagctatcttctc

SEQ ID NO: 5637845 - DNA, 25 bp, Homo sapien
gtattgaaaatagacgatagacgac

SEQ ID NO: 5637846 - DNA, 25 bp, Homo sapien
gtcgtctatcgtctattttcaatac

SEQ ID NO: 5637847 - DNA, 25 bp, Homo sapien
ttcctagactctcgccgggaagtat

SEQ ID NO: 5637848 - DNA, 25 bp, Homo sapien
atacttcccggcgagagtctaggaa

SEQ ID NO: 5637849 - DNA, 25 bp, Homo sapien
ctcgggtgggagtgcagacaattca

SEQ ID NO: 5637850 - DNA, 25 bp, Homo sapien
tgaattgtctgcactcccacccgag

SEQ ID NO: 5637851 - DNA, 25 bp, Homo sapien
cggctccctctagtgtcatttttga

SEQ ID NO: 5637852 - DNA, 25 bp, Homo sapien
tcaaaaatgacactagagggagccg

SEQ ID NO: 5637853 - DNA, 25 bp, Homo sapien
gtagacactataccgccatcctcgt

SEQ ID NO: 5637854 - DNA, 25 bp, Homo sapien
acgaggatggcggtatagtgtctac

SEQ ID NO: 5637855 - DNA, 25 bp, Homo sapien
aggccgagccgtcgcagcgtcgacg

SEQ ID NO: 5637856 - DNA, 25 bp, Homo sapien
cgtcgacgctgcgacggctcggcct

SEQ ID NO: 5637857 - DNA, 25 bp, Homo sapien
cacttaccgtggtcaccgcaagact

SEQ ID NO: 5637858 - DNA, 25 bp, Homo sapien
agtcttgcggtgaccacggtaagtg

SEQ ID NO: 5637859 - DNA, 25 bp, Homo sapien
gaagcgtgtcgtcatcagaagattt

SEQ ID NO: 5637860 - DNA, 25 bp, Homo sapien
aaatcttctgatgacgacacgcttc

SEQ ID NO: 5637861 - DNA, 25 bp, Homo sapien
tctaaacggtggtaatgataatacc

SEQ ID NO: 5637862 - DNA, 25 bp, Homo sapien
ggtattatcattaccaccgtttaga

SEQ ID NO: 5637863 - DNA, 25 bp, Homo sapien
tagaaagaaatattactacaacttc

SEQ ID NO: 5637864 - DNA, 25 bp, Homo sapien
gaagttgtagtaatatttctttcta

SEQ ID NO: 5637865 - DNA, 25 bp, Homo sapien
cgaagggtgaggacaacagaaaaga

SEQ ID NO: 5637866 - DNA, 25 bp, Homo sapien
tcttttctgttgtcctcacccttcg

SEQ ID NO: 5637867 - DNA, 25 bp, Homo sapien
tcccgacacttctgtgtcgacgagg

SEQ ID NO: 5637868 - DNA, 25 bp, Homo sapien
cctcgtcgacacagaagtgtcggga

SEQ ID NO: 5637869 - DNA, 25 bp, Homo sapien
actaataaagaacaccacaactccc

SEQ ID NO: 5637870 - DNA, 25 bp, Homo sapien
gggagttgtggtgttctttattagt

SEQ ID NO: 5637871 - DNA, 25 bp, Homo sapien
tatcattatagcttggtttttaaac

SEQ ID NO: 5637872 - DNA, 25 bp, Homo sapien
gtttaaaaaccaagctataatgata

SEQ ID NO: 5637873 - DNA, 25 bp, Homo sapien
tcggcgtccacgtcgtaggacaccg

SEQ ID NO: 5637874 - DNA, 25 bp, Homo sapien
cggtgtcctacgacgtggacgccga

SEQ ID NO: 5637875 - DNA, 25 bp, Homo sapien
acaacgactcagttacaataggttt

SEQ ID NO: 5637876 - DNA, 25 bp, Homo sapien
aaacctattgtaactgagtcgttgt

SEQ ID NO: 5637877 - DNA, 25 bp, Homo sapien
ggactatcgagaatttcaagcaaat

SEQ ID NO: 5637878 - DNA, 25 bp, Homo sapien
atttgcttgaaattctcgatagtcc

SEQ ID NO: 5637879 - DNA, 25 bp, Homo sapien
ctttgtagaacagtaatagggcgac

SEQ ID NO: 5637880 - DNA, 25 bp, Homo sapien
gtcgccctattactgttctacaaag

SEQ ID NO: 5637881 - DNA, 25 bp, Homo sapien
cccagacgacccaggagaggtgagg

SEQ ID NO: 5637882 - DNA, 25 bp, Homo sapien
cctcacctctcctgggtcgtctggg

SEQ ID NO: 5637883 - DNA, 25 bp, Homo sapien
aatcctgggagtacatgtcggagac

SEQ ID NO: 5637884 - DNA, 25 bp, Homo sapien
gtctccgacatgtactcccaggatt

SEQ ID NO: 5637885 - DNA, 25 bp, Homo sapien
ttttgagaacaaatatcaacatcag

SEQ ID NO: 5637886 - DNA, 25 bp, Homo sapien
ctgatgttgatatttgttctcaaaa

SEQ ID NO: 5637887 - DNA, 25 bp, Homo sapien
cttcggtctaacttgacctccctgt

SEQ ID NO: 5637888 - DNA, 25 bp, Homo sapien
acagggaggtcaagttagaccgaag

SEQ ID NO: 5637889 - DNA, 25 bp, Homo sapien
tcaaaactccagtttatccccttct

SEQ ID NO: 5637890 - DNA, 25 bp, Homo sapien
agaaggggataaactggagttttga

SEQ ID NO: 5637891 - DNA, 25 bp, Homo sapien
gaccgtcacttgtaatttccgaact

SEQ ID NO: 5637892 - DNA, 25 bp, Homo sapien
agttcggaaattacaagtgacggtc

SEQ ID NO: 5637893 - DNA, 25 bp, Homo sapien
ttattagagatgatcaagtattttt

SEQ ID NO: 5637894 - DNA, 25 bp, Homo sapien
aaaaatacttgatcatctctaataa

SEQ ID NO: 5637895 - DNA, 25 bp, Homo sapien
tactgcgccccccttaacccggtgc

SEQ ID NO: 5637896 - DNA, 25 bp, Homo sapien
gcaccgggttaaggggggcgcagta

SEQ ID NO: 5637897 - DNA, 25 bp, Homo sapien
cgaccgaaccccatgcacgccccga

SEQ ID NO: 5637898 - DNA, 25 bp, Homo sapien
tcggggcgtgcatggggttcggtcg

SEQ ID NO: 5637899 - DNA, 25 bp, Homo sapien
ccgggagagagcactcacgagacgt

SEQ ID NO: 5637900 - DNA, 25 bp, Homo sapien
acgtctcgtgagtgctctctcccgg

SEQ ID NO: 5637901 - DNA, 25 bp, Homo sapien
atgacgtgtggtaaacgaaaataag

SEQ ID NO: 5637902 - DNA, 25 bp, Homo sapien
cttattttcgtttaccacacgtcat

SEQ ID NO: 5637903 - DNA, 25 bp, Homo sapien
gtttgacttccgaaagaccatttaa

SEQ ID NO: 5637904 - DNA, 25 bp, Homo sapien
ttaaatggtctttcggaagtcaaac

SEQ ID NO: 5637905 - DNA, 25 bp, Homo sapien
accttcggtccttgcgccctgtcga

SEQ ID NO: 5637906 - DNA, 25 bp, Homo sapien
tcgacagggcgcaaggaccgaaggt

SEQ ID NO: 5637907 - DNA, 25 bp, Homo sapien
aatttggtcagttcccgcctcaccg

SEQ ID NO: 5637908 - DNA, 25 bp, Homo sapien
cggtgaggcgggaactgaccaaatt

SEQ ID NO: 5637909 - DNA, 25 bp, Homo sapien
ctccagactcctcgtgagtggaagg

SEQ ID NO: 5637910 - DNA, 25 bp, Homo sapien
ccttccactcacgaggagtctggag

SEQ ID NO: 5637911 - DNA, 25 bp, Homo sapien
cttagatgttcgtacaagtgttagg

SEQ ID NO: 5637912 - DNA, 25 bp, Homo sapien
cctaacacttgtacgaacatctaag

SEQ ID NO: 5637913 - DNA, 25 bp, Homo sapien
accgtcctgggcgtagtctcggcgt

SEQ ID NO: 5637914 - DNA, 25 bp, Homo sapien
acgccgagactacgcccaggacggt

SEQ ID NO: 5637915 - DNA, 25 bp, Homo sapien
tttacgagagtggagaacatatgtg

SEQ ID NO: 5637916 - DNA, 25 bp, Homo sapien
cacatatgttctccactctcgtaaa

SEQ ID NO: 5637917 - DNA, 25 bp, Homo sapien
ccagacttacagtcgttcccacggg

SEQ ID NO: 5637918 - DNA, 25 bp, Homo sapien
cccgtgggaacgactgtaagtctgg

SEQ ID NO: 5637919 - DNA, 25 bp, Homo sapien
gccgggacccacagggtgtcaggga

SEQ ID NO: 5637920 - DNA, 25 bp, Homo sapien
tccctgacaccctgtgggtcccggc

SEQ ID NO: 5637921 - DNA, 25 bp, Homo sapien
agagaaataaaccggattagactta

SEQ ID NO: 5637922 - DNA, 25 bp, Homo sapien
taagtctaatccggtttatttctct

SEQ ID NO: 5637923 - DNA, 25 bp, Homo sapien
gatacggtggtttctttcgtcaatc

SEQ ID NO: 5637924 - DNA, 25 bp, Homo sapien
gattgacgaaagaaaccaccgtatc

SEQ ID NO: 5637925 - DNA, 25 bp, Homo sapien
ccgtggtcccgtgccgcctgcgagt

SEQ ID NO: 5637926 - DNA, 25 bp, Homo sapien
actcgcaggcggcacgggaccacgg

SEQ ID NO: 5637927 - DNA, 25 bp, Homo sapien
tcgtcggtgcaccagtcagacgggt

SEQ ID NO: 5637928 - DNA, 25 bp, Homo sapien
acccgtctgactggtgcaccgacga

SEQ ID NO: 5637929 - DNA, 25 bp, Homo sapien
tagtaagcgatcaggcctcctcggg

SEQ ID NO: 5637930 - DNA, 25 bp, Homo sapien
cccgaggaggcctgatcgcttacta

SEQ ID NO: 5637931 - DNA, 25 bp, Homo sapien
gattgatttaagacacataaatatt

SEQ ID NO: 5637932 - DNA, 25 bp, Homo sapien
aatatttatgtgtcttaaatcaatc

SEQ ID NO: 5637933 - DNA, 25 bp, Homo sapien
gctagactgtggaccctgcgaaagt

SEQ ID NO: 5637934 - DNA, 25 bp, Homo sapien
actttcgcagggtccacagtctagc

SEQ ID NO: 5637935 - DNA, 25 bp, Homo sapien
agaacggaggcgtgacgccccggaa

SEQ ID NO: 5637936 - DNA, 25 bp, Homo sapien
ttccggggcgtcacgcctccgttct

SEQ ID NO: 5637937 - DNA, 25 bp, Homo sapien
acggtgctcgttcacgtactggtcg

SEQ ID NO: 5637938 - DNA, 25 bp, Homo sapien
cgaccagtacgtgaacgagcaccgt

SEQ ID NO: 5637939 - DNA, 25 bp, Homo sapien
gaccgtcttcggagccacgcgccgg

SEQ ID NO: 5637940 - DNA, 25 bp, Homo sapien
ccggcgcgtggctccgaagacggtc

SEQ ID NO: 5637941 - DNA, 25 bp, Homo sapien
caccctgtagagcatcggtcgaagt

SEQ ID NO: 5637942 - DNA, 25 bp, Homo sapien
acttcgaccgatgctctacagggtg

SEQ ID NO: 5637943 - DNA, 25 bp, Homo sapien
tcggacccccactcgcgagccggta

SEQ ID NO: 5637944 - DNA, 25 bp, Homo sapien
taccggctcgcgagtgggggtccga

SEQ ID NO: 5637945 - DNA, 25 bp, Homo sapien
cctgtcgccgcaccggtagccctcg

SEQ ID NO: 5637946 - DNA, 25 bp, Homo sapien
cgagggctaccggtgcggcgacagg

SEQ ID NO: 5637947 - DNA, 25 bp, Homo sapien
gacagccctccctgtcgccgcaccg

SEQ ID NO: 5637948 - DNA, 25 bp, Homo sapien
cggtgcggcgacagggagggctgtc

SEQ ID NO: 5637949 - DNA, 25 bp, Homo sapien
acatgaccctacttaattacgacga

SEQ ID NO: 5637950 - DNA, 25 bp, Homo sapien
tcgtcgtaattaagtagggtcatgt

SEQ ID NO: 5637951 - DNA, 25 bp, Homo sapien
ggacaccttacaacaactttacgta

SEQ ID NO: 5637952 - DNA, 25 bp, Homo sapien
tacgtaaagttgttgtaaggtgtcc

SEQ ID NO: 5637953 - DNA, 25 bp, Homo sapien
gagtagtttgaggtggaaagtcagt

SEQ ID NO: 5637954 - DNA, 25 bp, Homo sapien
actgactttccacctcaaactactc

SEQ ID NO: 5637955 - DNA, 25 bp, Homo sapien
ctccagggtataaagcgccgggttg

SEQ ID NO: 5637956 - DNA, 25 bp, Homo sapien
caacccggcgctttataccctggag

SEQ ID NO: 5637957 - DNA, 25 bp, Homo sapien
ataataagttacaattttaagatcg

SEQ ID NO: 5637958 - DNA, 25 bp, Homo sapien
cgatcttaaaattgtaacttattat

SEQ ID NO: 5637959 - DNA, 25 bp, Homo sapien
ccacagtagataaggtcgttgatct

SEQ ID NO: 5637960 - DNA, 25 bp, Homo sapien
agatcaacgaccttatctactgtgg

SEQ ID NO: 5637961 - DNA, 25 bp, Homo sapien
aggaaactgtagccagacgagggga

SEQ ID NO: 5637962 - DNA, 25 bp, Homo sapien
tcccctcgtctggctacagtttcct

SEQ ID NO: 5637963 - DNA, 25 bp, Homo sapien
cctctcgtacaactcttcctccacc

SEQ ID NO: 5637964 - DNA, 25 bp, Homo sapien
ggtggaggaagagttgtacgagagg

SEQ ID NO: 5637965 - DNA, 25 bp, Homo sapien
cctccttgtccttccacctagtcac

SEQ ID NO: 5637966 - DNA, 25 bp, Homo sapien
gtgactaggtggaaggacaaggagg

SEQ ID NO: 5637967 - DNA, 25 bp, Homo sapien
gacgcggtcaagaccctaaacacag

SEQ ID NO: 5637968 - DNA, 25 bp, Homo sapien
ctgtgtttagggtcttgaccgcgtc

SEQ ID NO: 5637969 - DNA, 25 bp, Homo sapien
gataccggtccgtgtaagaaacgac

SEQ ID NO: 5637970 - DNA, 25 bp, Homo sapien
gtcgtttcttacacggaccggtatc

SEQ ID NO: 5637971 - DNA, 25 bp, Homo sapien
gacgccaccacggtccaaggcggtg

SEQ ID NO: 5637972 - DNA, 25 bp, Homo sapien
caccgccttggaccgtggtggcgtc

SEQ ID NO: 5637973 - DNA, 25 bp, Homo sapien
tcccggacgcgcagggcaggggcct

SEQ ID NO: 5637974 - DNA, 25 bp, Homo sapien
aggcccctgccctgcgcgtccggga

SEQ ID NO: 5637975 - DNA, 25 bp, Homo sapien
gggcttcccggacgcgcagggcagg

SEQ ID NO: 5637976 - DNA, 25 bp, Homo sapien
cctgccctgcgcgtccgggaagccc

SEQ ID NO: 5637977 - DNA, 25 bp, Homo sapien
gaactatacagaaaacaattaacag

SEQ ID NO: 5637978 - DNA, 25 bp, Homo sapien
ctgttaattgttttctgtatagttc

SEQ ID NO: 5637979 - DNA, 25 bp, Homo sapien
ggactcgatatctgtcctgaagaac

SEQ ID NO: 5637980 - DNA, 25 bp, Homo sapien
gttcttcaggacagatatcgagtcc

SEQ ID NO: 5637981 - DNA, 25 bp, Homo sapien
ccccagtcctcaagggacgtgtcgg

SEQ ID NO: 5637982 - DNA, 25 bp, Homo sapien
ccgacacgtcccttgaggactgggg

SEQ ID NO: 5637983 - DNA, 25 bp, Homo sapien
agaagtactacgctatgtatgacat

SEQ ID NO: 5637984 - DNA, 25 bp, Homo sapien
atgtcatacatagcgtagtacttct

SEQ ID NO: 5637985 - DNA, 25 bp, Homo sapien
atctgacgagacaaccaacagaaag

SEQ ID NO: 5637986 - DNA, 25 bp, Homo sapien
ctttctgttggttgtctcgtcagat

SEQ ID NO: 5637987 - DNA, 25 bp, Homo sapien
ctctcaaccacctcacatcccgaca

SEQ ID NO: 5637988 - DNA, 25 bp, Homo sapien
tgtcgggatgtgaggtggttgagag

SEQ ID NO: 5637989 - DNA, 25 bp, Homo sapien
gtgacaccccgactgcgtgacacgt

SEQ ID NO: 5637990 - DNA, 25 bp, Homo sapien
acgtgtcacgcagtcggggtgtcac

SEQ ID NO: 5637991 - DNA, 25 bp, Homo sapien
ccccaattgagagtttataggtagt

SEQ ID NO: 5637992 - DNA, 25 bp, Homo sapien
actacctataaactctcaattgggg

SEQ ID NO: 5637993 - DNA, 25 bp, Homo sapien
tttatttatacgactctaattagta

SEQ ID NO: 5637994 - DNA, 25 bp, Homo sapien
tactaattagagtcgtataaataaa

SEQ ID NO: 5637995 - DNA, 25 bp, Homo sapien
ttttatttatacgactctaattagt

SEQ ID NO: 5637996 - DNA, 25 bp, Homo sapien
actaattagagtcgtataaataaaa

SEQ ID NO: 5637997 - DNA, 25 bp, Homo sapien
tttcggagagagactataaaacaac

SEQ ID NO: 5637998 - DNA, 25 bp, Homo sapien
gttgttttatagtctctctccgaaa

SEQ ID NO: 5637999 - DNA, 25 bp, Homo sapien
ttggactctcagagtaattgaccca

SEQ ID NO: 5638000 - DNA, 25 bp, Homo sapien
tgggtcaattactctgagagtccaa

SEQ ID NO: 5638001 - DNA, 25 bp, Homo sapien
aaccaactgctacaactactattag

SEQ ID NO: 5638002 - DNA, 25 bp, Homo sapien
ctaatagtagttgtagcagttggtt

SEQ ID NO: 5638003 - DNA, 25 bp, Homo sapien
accacgtctcaggagcggtccgagg

SEQ ID NO: 5638004 - DNA, 25 bp, Homo sapien
cctcggaccgctcctgagacgtggt

SEQ ID NO: 5638005 - DNA, 25 bp, Homo sapien
agatgactcattaacagtagtttac

SEQ ID NO: 5638006 - DNA, 25 bp, Homo sapien
gtaaactactgttaatgagtcatct

SEQ ID NO: 5638007 - DNA, 25 bp, Homo sapien
gtttctcacagggtacactcatttc

SEQ ID NO: 5638008 - DNA, 25 bp, Homo sapien
gaaatgagtgtaccctgtgagaaac

SEQ ID NO: 5638009 - DNA, 25 bp, Homo sapien
cccgggtcggtggtctacacagtct

SEQ ID NO: 5638010 - DNA, 25 bp, Homo sapien
agactgtgtagaccaccgacccggg

SEQ ID NO: 5638011 - DNA, 25 bp, Homo sapien
gagaaaaccatttatctgtaggaat

SEQ ID NO: 5638012 - DNA, 25 bp, Homo sapien
attcctacagataaatggttttctc

SEQ ID NO: 5638013 - DNA, 25 bp, Homo sapien
tccgtcatataatagtccgtcaagt

SEQ ID NO: 5638014 - DNA, 25 bp, Homo sapien
acttgacggactattatatgacgga

SEQ ID NO: 5638015 - DNA, 25 bp, Homo sapien
gtttacaagcccctaggagcagctg

SEQ ID NO: 5638016 - DNA, 25 bp, Homo sapien
cagctgctcctaggggcttgtaaac

SEQ ID NO: 5638017 - DNA, 25 bp, Homo sapien
cgaagggtgcaaggacggaagtcaa

SEQ ID NO: 5638018 - DNA, 25 bp, Homo sapien
ttgacttccgtccttgcacccttcg

SEQ ID NO: 5638019 - DNA, 25 bp, Homo sapien
gtcagcttctccagccccgatcact

SEQ ID NO: 5638020 - DNA, 25 bp, Homo sapien
agtgatcggggctggagaagctgac

SEQ ID NO: 5638021 - DNA, 25 bp, Homo sapien
cctccctccctcgctggcggccgac

SEQ ID NO: 5638022 - DNA, 25 bp, Homo sapien
gtcggccgccagcgagggagggagg

SEQ ID NO: 5638023 - DNA, 25 bp, Homo sapien
agcccgtgcacagggctgagggcgg

SEQ ID NO: 5638024 - DNA, 25 bp, Homo sapien
ccgccctcagccctgtgcacgggct

SEQ ID NO: 5638025 - DNA, 25 bp, Homo sapien
gtaaaggaagatgcccgaagtcccc

SEQ ID NO: 5638026 - DNA, 25 bp, Homo sapien
ggggacttcgggcatcttcctttac

SEQ ID NO: 5638027 - DNA, 25 bp, Homo sapien
cctcggtccttagtagtgacggaat

SEQ ID NO: 5638028 - DNA, 25 bp, Homo sapien
attccgtcactactaaggaccgagg

SEQ ID NO: 5638029 - DNA, 25 bp, Homo sapien
cggtgccggactcggggcggtggta

SEQ ID NO: 5638030 - DNA, 25 bp, Homo sapien
taccaccgccccgagtccggcaccg

SEQ ID NO: 5638031 - DNA, 25 bp, Homo sapien
taaaactggtcctaaaatattacac

SEQ ID NO: 5638032 - DNA, 25 bp, Homo sapien
gtgtaatattttaggaccagtttta

SEQ ID NO: 5638033 - DNA, 25 bp, Homo sapien
ggccctcgcgcgcatccctgcgcct

SEQ ID NO: 5638034 - DNA, 25 bp, Homo sapien
aggcgcagggatgcgcgcgagggcc

SEQ ID NO: 5638035 - DNA, 25 bp, Homo sapien
agacggaagactagtattgccaggg

SEQ ID NO: 5638036 - DNA, 25 bp, Homo sapien
ccctggcaatactagtcttccgtct

SEQ ID NO: 5638037 - DNA, 25 bp, Homo sapien
gcgtctcggatctccctgacacgag

SEQ ID NO: 5638038 - DNA, 25 bp, Homo sapien
ctcgtgtcagggagatccgagacgc

SEQ ID NO: 5638039 - DNA, 25 bp, Homo sapien
gaggtacactgctaagatactaggt

SEQ ID NO: 5638040 - DNA, 25 bp, Homo sapien
acctagtatcttagcagtgtacctc

SEQ ID NO: 5638041 - DNA, 25 bp, Homo sapien
tcctacacaagtcctgtccagagac

SEQ ID NO: 5638042 - DNA, 25 bp, Homo sapien
gtctctggacaggacttgtgtagga

SEQ ID NO: 5638043 - DNA, 25 bp, Homo sapien
tggtcgtcggaatccccaggaaggt

SEQ ID NO: 5638044 - DNA, 25 bp, Homo sapien
accttcctggggattccgacgacca

SEQ ID NO: 5638045 - DNA, 25 bp, Homo sapien
cggcgcccggtgcccgcgcgtcgag

SEQ ID NO: 5638046 - DNA, 25 bp, Homo sapien
ctcgacgcgcgggcaccgggcgccg

SEQ ID NO: 5638047 - DNA, 25 bp, Homo sapien
ccagtcgcggtggcggtccggggtg

SEQ ID NO: 5638048 - DNA, 25 bp, Homo sapien
caccccggaccgccaccgcgactgg

SEQ ID NO: 5638049 - DNA, 25 bp, Homo sapien
gtccagtcgcggtggcggtccgggg

SEQ ID NO: 5638050 - DNA, 25 bp, Homo sapien
ccccggaccgccaccgcgactggac

SEQ ID NO: 5638051 - DNA, 25 bp, Homo sapien
ggagagaggcccgtctctcaacgac

SEQ ID NO: 5638052 - DNA, 25 bp, Homo sapien
gtcgttgagagacgggcctctctcc

SEQ ID NO: 5638053 - DNA, 25 bp, Homo sapien
cccactggcgttcttattttctgac

SEQ ID NO: 5638054 - DNA, 25 bp, Homo sapien
gtcagaaaataagaacgccagtggg

SEQ ID NO: 5638055 - DNA, 25 bp, Homo sapien
taaacgtgtactcactataacaaat

SEQ ID NO: 5638056 - DNA, 25 bp, Homo sapien
atttgttatagtgagtacacgttta

SEQ ID NO: 5638057 - DNA, 25 bp, Homo sapien
acaccgggaggattcagtaaacgtg

SEQ ID NO: 5638058 - DNA, 25 bp, Homo sapien
cacgtttactgaatcctcccggtgt

SEQ ID NO: 5638059 - DNA, 25 bp, Homo sapien
gactgtgcaggagtgacggaacagg

SEQ ID NO: 5638060 - DNA, 25 bp, Homo sapien
cctgttccgtcactcctgcacagtc

SEQ ID NO: 5638061 - DNA, 25 bp, Homo sapien
aacgatgaaattgtttttcttatag

SEQ ID NO: 5638062 - DNA, 25 bp, Homo sapien
ctataagaaaaacaatttcatcgtt

SEQ ID NO: 5638063 - DNA, 25 bp, Homo sapien
aagataacgatgaaattgtttttct

SEQ ID NO: 5638064 - DNA, 25 bp, Homo sapien
agaaaaacaatttcatcgttatctt

SEQ ID NO: 5638065 - DNA, 25 bp, Homo sapien
cgggaccatcgaccttccttagtca

SEQ ID NO: 5638066 - DNA, 25 bp, Homo sapien
tgactaaggaaggtcgatggtcccg

SEQ ID NO: 5638067 - DNA, 25 bp, Homo sapien
gagcgcagggcccacctcgaccgcc

SEQ ID NO: 5638068 - DNA, 25 bp, Homo sapien
ggcggtcgaggtgggccctgcgctc

SEQ ID NO: 5638069 - DNA, 25 bp, Homo sapien
tgaggacggagccaaaaaagaagac

SEQ ID NO: 5638070 - DNA, 25 bp, Homo sapien
gtcttcttttttggctccgtcctca

SEQ ID NO: 5638071 - DNA, 25 bp, Homo sapien
agtaacgagttgactcttaggtttg

SEQ ID NO: 5638072 - DNA, 25 bp, Homo sapien
caaacctaagagtcaactcgttact

SEQ ID NO: 5638073 - DNA, 25 bp, Homo sapien
aaactcctcgtgtacttccaccagt

SEQ ID NO: 5638074 - DNA, 25 bp, Homo sapien
actggtggaagtacacgaggagttt

SEQ ID NO: 5638075 - DNA, 25 bp, Homo sapien
atatgacatattgataaagattttg

SEQ ID NO: 5638076 - DNA, 25 bp, Homo sapien
caaaatctttatcaatatgtcatat

SEQ ID NO: 5638077 - DNA, 25 bp, Homo sapien
aggttaggaaagtaatatgacatat

SEQ ID NO: 5638078 - DNA, 25 bp, Homo sapien
atatgtcatattactttcctaacct

SEQ ID NO: 5638079 - DNA, 25 bp, Homo sapien
gacccgctctcgtgagggaagcacc

SEQ ID NO: 5638080 - DNA, 25 bp, Homo sapien
ggtgcttccctcacgagagcgggtc

SEQ ID NO: 5638081 - DNA, 25 bp, Homo sapien
caccttcacccccagcccgtgagac

SEQ ID NO: 5638082 - DNA, 25 bp, Homo sapien
gtctcacgggctgggggtgaaggtg

SEQ ID NO: 5638083 - DNA, 25 bp, Homo sapien
gacccggggcggcgggcccacacac

SEQ ID NO: 5638084 - DNA, 25 bp, Homo sapien
gtgtgtgggcccgccgccccgggtc

SEQ ID NO: 5638085 - DNA, 25 bp, Homo sapien
ataccataggtgtcccagtgtaggt

SEQ ID NO: 5638086 - DNA, 25 bp, Homo sapien
acctacactgggacacctatggtat

SEQ ID NO: 5638087 - DNA, 25 bp, Homo sapien
ggaccgccctctgggctcagggcct

SEQ ID NO: 5638088 - DNA, 25 bp, Homo sapien
aggccctgagcccagagggcggtcc

SEQ ID NO: 5638089 - DNA, 25 bp, Homo sapien
cccgggtgatgctcgtcccctcccg

SEQ ID NO: 5638090 - DNA, 25 bp, Homo sapien
cgggaggggacgagcatcacccggg

SEQ ID NO: 5638091 - DNA, 25 bp, Homo sapien
ccggtgcgggtgttaggctgtcggg

SEQ ID NO: 5638092 - DNA, 25 bp, Homo sapien
cccgacagcctaacacccgcaccgg

SEQ ID NO: 5638093 - DNA, 25 bp, Homo sapien
cgccggtgcgggtgttaggctgtcg

SEQ ID NO: 5638094 - DNA, 25 bp, Homo sapien
cgacagcctaacacccgcaccggcg

SEQ ID NO: 5638095 - DNA, 25 bp, Homo sapien
cggaacgatgacaccgaaagagtcg

SEQ ID NO: 5638096 - DNA, 25 bp, Homo sapien
cgactctttcggtgtcatcgttccg

SEQ ID NO: 5638097 - DNA, 25 bp, Homo sapien
gactcggtgcggggtcccaggtctc

SEQ ID NO: 5638098 - DNA, 25 bp, Homo sapien
gagacctgggaccccgcaccgagtc

SEQ ID NO: 5638099 - DNA, 25 bp, Homo sapien
cgactcggtgcggggtcccaggtct

SEQ ID NO: 5638100 - DNA, 25 bp, Homo sapien
agacctgggaccccgcaccgagtcg

SEQ ID NO: 5638101 - DNA, 25 bp, Homo sapien
gcaagtggtcgcactagcttacgct

SEQ ID NO: 5638102 - DNA, 25 bp, Homo sapien
agcgtaagctagtgcgaccacttgc

SEQ ID NO: 5638103 - DNA, 25 bp, Homo sapien
tcggcccctcacacccgctacaggg

SEQ ID NO: 5638104 - DNA, 25 bp, Homo sapien
ccctgtagcgggtgtgaggggccga

SEQ ID NO: 5638105 - DNA, 25 bp, Homo sapien
tcagtccacgtaagcgaaaaagagt

SEQ ID NO: 5638106 - DNA, 25 bp, Homo sapien
actctttttcgcttacgtggactga

SEQ ID NO: 5638107 - DNA, 25 bp, Homo sapien
atagcgcccctaggggccgcggtcc

SEQ ID NO: 5638108 - DNA, 25 bp, Homo sapien
ggaccgcggcccctaggggcgctat

SEQ ID NO: 5638109 - DNA, 25 bp, Homo sapien
gtcactgactagtagtgtttcaggt

SEQ ID NO: 5638110 - DNA, 25 bp, Homo sapien
acctgaaacactactagtcagtgac

SEQ ID NO: 5638111 - DNA, 25 bp, Homo sapien
agtgtcccaactccgatcactcctt

SEQ ID NO: 5638112 - DNA, 25 bp, Homo sapien
aaggagtgatcggagttgggacact

SEQ ID NO: 5638113 - DNA, 25 bp, Homo sapien
atcaaaaatatcgacgaacaactac

SEQ ID NO: 5638114 - DNA, 25 bp, Homo sapien
gtagttgttcgtcgatatttttgat

SEQ ID NO: 5638115 - DNA, 25 bp, Homo sapien
cgtacactcctactcggggagttat

SEQ ID NO: 5638116 - DNA, 25 bp, Homo sapien
ataactccccgagtaggagtgtacg

SEQ ID NO: 5638117 - DNA, 25 bp, Homo sapien
gtagtcggtttgttccgggacagta

SEQ ID NO: 5638118 - DNA, 25 bp, Homo sapien
tactgtcccggaacaaaccgactac

SEQ ID NO: 5638119 - DNA, 25 bp, Homo sapien
tcgtagtcggtttgttccgggacag

SEQ ID NO: 5638120 - DNA, 25 bp, Homo sapien
ctgtcccggaacaaaccgactacga

SEQ ID NO: 5638121 - DNA, 25 bp, Homo sapien
taccgagaccactttgtgagtcata

SEQ ID NO: 5638122 - DNA, 25 bp, Homo sapien
tatgactcacaaagtggtctcggta

SEQ ID NO: 5638123 - DNA, 25 bp, Homo sapien
aacaaaatgtcgttcttattaagta

SEQ ID NO: 5638124 - DNA, 25 bp, Homo sapien
tacttaataagaacgacattttgtt

SEQ ID NO: 5638125 - DNA, 25 bp, Homo sapien
cctacggcagaaccactgtagcacc

SEQ ID NO: 5638126 - DNA, 25 bp, Homo sapien
ggtgctacagtggttctgccgtagg

SEQ ID NO: 5638127 - DNA, 25 bp, Homo sapien
gcctagaggggaggcctacctcgac

SEQ ID NO: 5638128 - DNA, 25 bp, Homo sapien
gtcgaggtaggcctcccctctaggc

SEQ ID NO: 5638129 - DNA, 25 bp, Homo sapien
acccttgtagcgattacatcgtacc

SEQ ID NO: 5638130 - DNA, 25 bp, Homo sapien
ggtacgatgtaatcgctacaagggt

SEQ ID NO: 5638131 - DNA, 25 bp, Homo sapien
ggccccggcggccccgcggtgaatg

SEQ ID NO: 5638132 - DNA, 25 bp, Homo sapien
cattcaccgcggggccgccggggcc

SEQ ID NO: 5638133 - DNA, 25 bp, Homo sapien
cccgaggagccgtcgtggtgcctcc

SEQ ID NO: 5638134 - DNA, 25 bp, Homo sapien
ggaggcaccacgacggctcctcggg

SEQ ID NO: 5638135 - DNA, 25 bp, Homo sapien
ggccccggcggaaagcgacgacggc

SEQ ID NO: 5638136 - DNA, 25 bp, Homo sapien
gccgtcgtcgctttccgccggggcc

SEQ ID NO: 5638137 - DNA, 25 bp, Homo sapien
accgacacggggtctgtgtgagaag

SEQ ID NO: 5638138 - DNA, 25 bp, Homo sapien
cttctcacacagaccccgtgtcggt

SEQ ID NO: 5638139 - DNA, 25 bp, Homo sapien
acgaggactgcgggggcccgttcgc

SEQ ID NO: 5638140 - DNA, 25 bp, Homo sapien
gcgaacgggcccccgcagtcctcgt

SEQ ID NO: 5638141 - DNA, 25 bp, Homo sapien
gagggtgccgtgtcccggccttcac

SEQ ID NO: 5638142 - DNA, 25 bp, Homo sapien
gtgaaggccgggacacggcaccctc

SEQ ID NO: 5638143 - DNA, 25 bp, Homo sapien
tgtgaccgggacacaccggccgccc

SEQ ID NO: 5638144 - DNA, 25 bp, Homo sapien
gggcggccggtgtgtcccggtcaca

SEQ ID NO: 5638145 - DNA, 25 bp, Homo sapien
gcctctgatcccgacagggaggtgc

SEQ ID NO: 5638146 - DNA, 25 bp, Homo sapien
gcacctccctgtcgggatcagaggc

SEQ ID NO: 5638147 - DNA, 25 bp, Homo sapien
gggcggagccgtggcggaaggcgcg

SEQ ID NO: 5638148 - DNA, 25 bp, Homo sapien
cgcgccttccgccacggctccgccc

SEQ ID NO: 5638149 - DNA, 25 bp, Homo sapien
ctgtaacagaagtttaggcgagagt

SEQ ID NO: 5638150 - DNA, 25 bp, Homo sapien
actctcgcctaaacttctgttacag

SEQ ID NO: 5638151 - DNA, 25 bp, Homo sapien
ggtcagagttatactcctgtcagag

SEQ ID NO: 5638152 - DNA, 25 bp, Homo sapien
ctctgacaggagtataactctgacc

SEQ ID NO: 5638153 - DNA, 25 bp, Homo sapien
gaagactttgtttataaagaagaga

SEQ ID NO: 5638154 - DNA, 25 bp, Homo sapien
tctcttctttataaacaaagtcttc

SEQ ID NO: 5638155 - DNA, 25 bp, Homo sapien
cgtttcccgtgtacctgccttggag

SEQ ID NO: 5638156 - DNA, 25 bp, Homo sapien
ctccaaggcaggtacacgggaaacg

SEQ ID NO: 5638157 - DNA, 25 bp, Homo sapien
caccacggggccgatagcggcgccc

SEQ ID NO: 5638158 - DNA, 25 bp, Homo sapien
gggcgccgctatcggccccgtggtg

SEQ ID NO: 5638159 - DNA, 25 bp, Homo sapien
cattatcaggtacccaacttaacta

SEQ ID NO: 5638160 - DNA, 25 bp, Homo sapien
tagttaagttgggtacctgataatg

SEQ ID NO: 5638161 - DNA, 25 bp, Homo sapien
gacccgagcggaggcgggtcctggg

SEQ ID NO: 5638162 - DNA, 25 bp, Homo sapien
cccaggacccgcctccgctcgggtc

SEQ ID NO: 5638163 - DNA, 25 bp, Homo sapien
cacatatcggtttacatttctttaa

SEQ ID NO: 5638164 - DNA, 25 bp, Homo sapien
ttaaagaaatgtaaaccgatatgtg

SEQ ID NO: 5638165 - DNA, 25 bp, Homo sapien
taataccacccatggtgtgattcgt

SEQ ID NO: 5638166 - DNA, 25 bp, Homo sapien
acgaatcacaccatgggtggtatta

SEQ ID NO: 5638167 - DNA, 25 bp, Homo sapien
gtctcgagtaatattttaggtgtcg

SEQ ID NO: 5638168 - DNA, 25 bp, Homo sapien
cgacacctaaaatattactcgagac

SEQ ID NO: 5638169 - DNA, 25 bp, Homo sapien
taggctccatcttcgtgggacgacg

SEQ ID NO: 5638170 - DNA, 25 bp, Homo sapien
cgtcgtcccacgaagatggagccta

SEQ ID NO: 5638171 - DNA, 25 bp, Homo sapien
cggtaggtccgacacatggggggac

SEQ ID NO: 5638172 - DNA, 25 bp, Homo sapien
gtccccccatgtgtcggacctaccg

SEQ ID NO: 5638173 - DNA, 25 bp, Homo sapien
gactgaagagcccacctcggaataa

SEQ ID NO: 5638174 - DNA, 25 bp, Homo sapien
ttattccgaggtgggctcttcagtc

SEQ ID NO: 5638175 - DNA, 25 bp, Homo sapien
gtcccggccgtcggcacagcggtcc

SEQ ID NO: 5638176 - DNA, 25 bp, Homo sapien
ggaccgctgtgccgacggccgggac

SEQ ID NO: 5638177 - DNA, 25 bp, Homo sapien
ggccgtcggcacagcggtccgaaga

SEQ ID NO: 5638178 - DNA, 25 bp, Homo sapien
tcttcggaccgctgtgccgacggcc

SEQ ID NO: 5638179 - DNA, 25 bp, Homo sapien
gcgggacctccgcacccctgctccc

SEQ ID NO: 5638180 - DNA, 25 bp, Homo sapien
gggagcaggggtgcggaggtcccgc

SEQ ID NO: 5638181 - DNA, 25 bp, Homo sapien
gacggacgacgactcgtccccgtaa

SEQ ID NO: 5638182 - DNA, 25 bp, Homo sapien
ttacggggacgagtcgtcgtccgtc

SEQ ID NO: 5638183 - DNA, 25 bp, Homo sapien
cctatatatcgactagtttttcgag

SEQ ID NO: 5638184 - DNA, 25 bp, Homo sapien
ctcgaaaaactagtcgatatatagg

SEQ ID NO: 5638185 - DNA, 25 bp, Homo sapien
ggcacttgagctttggtttccgcgg

SEQ ID NO: 5638186 - DNA, 25 bp, Homo sapien
ccgcggaaaccaaagctcaagtgcc

SEQ ID NO: 5638187 - DNA, 25 bp, Homo sapien
agggaaatgttactagtcaaagagg

SEQ ID NO: 5638188 - DNA, 25 bp, Homo sapien
cctctttgactagtaacatttccct

SEQ ID NO: 5638189 - DNA, 25 bp, Homo sapien
agtaataccagccacagtacaactt

SEQ ID NO: 5638190 - DNA, 25 bp, Homo sapien
aagttgtactgtggctggtattact

SEQ ID NO: 5638191 - DNA, 25 bp, Homo sapien
ccgtcgtttagactcgacttagaaa

SEQ ID NO: 5638192 - DNA, 25 bp, Homo sapien
tttctaagtcgagtctaaacgacgg

SEQ ID NO: 5638193 - DNA, 25 bp, Homo sapien
aacataaacacccattcacccatat

SEQ ID NO: 5638194 - DNA, 25 bp, Homo sapien
atatgggtgaatgggtgtttatgtt

SEQ ID NO: 5638195 - DNA, 25 bp, Homo sapien
ataaacagaagtacttttatgaagt

SEQ ID NO: 5638196 - DNA, 25 bp, Homo sapien
acttcataaaagtacttctgtttat

SEQ ID NO: 5638197 - DNA, 25 bp, Homo sapien
gtttctggtagaaaaccctagagtg

SEQ ID NO: 5638198 - DNA, 25 bp, Homo sapien
cactctagggttttctaccagaaac

SEQ ID NO: 5638199 - DNA, 25 bp, Homo sapien
tcggtcgtgtctctatccttttctg

SEQ ID NO: 5638200 - DNA, 25 bp, Homo sapien
cagaaaaggatagagacacgaccga

SEQ ID NO: 5638201 - DNA, 25 bp, Homo sapien
cggtggtcacatccgtctacccgag

SEQ ID NO: 5638202 - DNA, 25 bp, Homo sapien
ctcgggtagacggatgtgaccaccg

SEQ ID NO: 5638203 - DNA, 25 bp, Homo sapien
ggtgccgtcggcgaaagtctcctcg

SEQ ID NO: 5638204 - DNA, 25 bp, Homo sapien
cgaggagactttcgccgacggcacc

SEQ ID NO: 5638205 - DNA, 25 bp, Homo sapien
agtcgggagcgggagacctcggggc

SEQ ID NO: 5638206 - DNA, 25 bp, Homo sapien
gccccgaggtctcccgctcccgact

SEQ ID NO: 5638207 - DNA, 25 bp, Homo sapien
tctctggacctcagctatacttccg

SEQ ID NO: 5638208 - DNA, 25 bp, Homo sapien
cggaagtatagctgaggtccagaga

SEQ ID NO: 5638209 - DNA, 25 bp, Homo sapien
tcaaaaggagagtcaaacgaacagt

SEQ ID NO: 5638210 - DNA, 25 bp, Homo sapien
actgttcgtttgactctccttttga

SEQ ID NO: 5638211 - DNA, 25 bp, Homo sapien
tcgtcccagcgggtccacccgtctt

SEQ ID NO: 5638212 - DNA, 25 bp, Homo sapien
aagacgggtggacccgctgggacga

SEQ ID NO: 5638213 - DNA, 25 bp, Homo sapien
aaagaaaagtcaggtttataatcag

SEQ ID NO: 5638214 - DNA, 25 bp, Homo sapien
ctgattataaacctgacttttcttt

SEQ ID NO: 5638215 - DNA, 25 bp, Homo sapien
attcgtaaaaagaactgggctataa

SEQ ID NO: 5638216 - DNA, 25 bp, Homo sapien
ttatagcccagttctttttacgaat

SEQ ID NO: 5638217 - DNA, 25 bp, Homo sapien
agaaccgtgaacaggatgttgttgg

SEQ ID NO: 5638218 - DNA, 25 bp, Homo sapien
ccaacaacatcctgttcacggttct

SEQ ID NO: 5638219 - DNA, 25 bp, Homo sapien
tttattactatcgtagaagtataaa

SEQ ID NO: 5638220 - DNA, 25 bp, Homo sapien
tttatacttctacgatagtaataaa

SEQ ID NO: 5638221 - DNA, 25 bp, Homo sapien
ttccgaagaatcttcttaactatag

SEQ ID NO: 5638222 - DNA, 25 bp, Homo sapien
ctatagttaagaagattcttcggaa

SEQ ID NO: 5638223 - DNA, 25 bp, Homo sapien
gcgtccaggagaaccctagcgggcc

SEQ ID NO: 5638224 - DNA, 25 bp, Homo sapien
ggcccgctagggttctcctggacgc

SEQ ID NO: 5638225 - DNA, 25 bp, Homo sapien
agcgtccaggagaaccctagcgggc

SEQ ID NO: 5638226 - DNA, 25 bp, Homo sapien
gcccgctagggttctcctggacgct

SEQ ID NO: 5638227 - DNA, 25 bp, Homo sapien
agtagtgtttatctcggaaccaaat

SEQ ID NO: 5638228 - DNA, 25 bp, Homo sapien
atttggttccgagataaacactact

SEQ ID NO: 5638229 - DNA, 25 bp, Homo sapien
atcgcttggcgacactgatttgcct

SEQ ID NO: 5638230 - DNA, 25 bp, Homo sapien
aggcaaatcagtgtcgccaagcgat

SEQ ID NO: 5638231 - DNA, 25 bp, Homo sapien
gacccacgagtctttgcagtttaca

SEQ ID NO: 5638232 - DNA, 25 bp, Homo sapien
tgtaaactgcaaagactcgtgggtc

SEQ ID NO: 5638233 - DNA, 25 bp, Homo sapien
tttcttgcttccagtatttcaaact

SEQ ID NO: 5638234 - DNA, 25 bp, Homo sapien
agtttgaaatactggaagcaagaaa

SEQ ID NO: 5638235 - DNA, 25 bp, Homo sapien
ttcgcattcatgaagatttctgcat

SEQ ID NO: 5638236 - DNA, 25 bp, Homo sapien
atgcagaaatcttcatgaatgcgaa

SEQ ID NO: 5638237 - DNA, 25 bp, Homo sapien
aacccgaagtccctgatttcgcaac

SEQ ID NO: 5638238 - DNA, 25 bp, Homo sapien
gttgcgaaatcagggacttcgggtt

SEQ ID NO: 5638239 - DNA, 25 bp, Homo sapien
ggaccgtcccgatggtcacttccgt

SEQ ID NO: 5638240 - DNA, 25 bp, Homo sapien
acggaagtgaccatcgggacggtcc

SEQ ID NO: 5638241 - DNA, 25 bp, Homo sapien
tctacgcgtccgaatcgagggaccg

SEQ ID NO: 5638242 - DNA, 25 bp, Homo sapien
cggtccctcgattcggacgcgtaga

SEQ ID NO: 5638243 - DNA, 25 bp, Homo sapien
gtgactgtcgctttggcccgtgaag

SEQ ID NO: 5638244 - DNA, 25 bp, Homo sapien
cttcacgggccaaagcgacagtcac

SEQ ID NO: 5638245 - DNA, 25 bp, Homo sapien
tcctacgtaacatatttaagaagta

SEQ ID NO: 5638246 - DNA, 25 bp, Homo sapien
tacttcttaaatatgttacgtagga

SEQ ID NO: 5638247 - DNA, 25 bp, Homo sapien
ttcgtcctgaacaccttcattaagc

SEQ ID NO: 5638248 - DNA, 25 bp, Homo sapien
gcttaatgaaggtgttcaggacgaa

SEQ ID NO: 5638249 - DNA, 25 bp, Homo sapien
tatgatagacacatgtcttggttaa

SEQ ID NO: 5638250 - DNA, 25 bp, Homo sapien
ttaaccaagacatgtgtctatcata

SEQ ID NO: 5638251 - DNA, 25 bp, Homo sapien
ttaattaatgtcaaaatgagttggt

SEQ ID NO: 5638252 - DNA, 25 bp, Homo sapien
accaactcattttgacattaattaa

SEQ ID NO: 5638253 - DNA, 25 bp, Homo sapien
ttctccaccaagagatagaacatgt

SEQ ID NO: 5638254 - DNA, 25 bp, Homo sapien
acatgttctatctcttggtggagaa

SEQ ID NO: 5638255 - DNA, 25 bp, Homo sapien
ggcgttgctgctacgcgacgccgtc

SEQ ID NO: 5638256 - DNA, 25 bp, Homo sapien
gacggcgtcgcgtagcagcaacgcc

SEQ ID NO: 5638257 - DNA, 25 bp, Homo sapien
atcagagatattggtaaaagggcat

SEQ ID NO: 5638258 - DNA, 25 bp, Homo sapien
atgcccttttaccaatatctctgat

SEQ ID NO: 5638259 - DNA, 25 bp, Homo sapien
aaaagcacactaatataataaacgt

SEQ ID NO: 5638260 - DNA, 25 bp, Homo sapien
acgtttattatattagtgtgctttt

SEQ ID NO: 5638261 - DNA, 25 bp, Homo sapien
gacccccggggtgccgtggcgacga

SEQ ID NO: 5638262 - DNA, 25 bp, Homo sapien
tcgtcgccacggcaccccgggggtc

SEQ ID NO: 5638263 - DNA, 25 bp, Homo sapien
cgaattatacttgctaaaggactac

SEQ ID NO: 5638264 - DNA, 25 bp, Homo sapien
gtagtcctttagcaagtataattcg

SEQ ID NO: 5638265 - DNA, 25 bp, Homo sapien
ctcggcgggtcctcagtctagcagg

SEQ ID NO: 5638266 - DNA, 25 bp, Homo sapien
cctgctagactgaggacccgccgag

SEQ ID NO: 5638267 - DNA, 25 bp, Homo sapien
gtccggccatcgacaggacgtcagg

SEQ ID NO: 5638268 - DNA, 25 bp, Homo sapien
cctgacgtcctgtcgatggccggac

SEQ ID NO: 5638269 - DNA, 25 bp, Homo sapien
aatcgtgataattccttatcagaaa

SEQ ID NO: 5638270 - DNA, 25 bp, Homo sapien
tttctgataaggaattatcacgatt

SEQ ID NO: 5638271 - DNA, 25 bp, Homo sapien
tataacgtttcgtggaacttccagg

SEQ ID NO: 5638272 - DNA, 25 bp, Homo sapien
cctggaagttccacgaaacgttata

SEQ ID NO: 5638273 - DNA, 25 bp, Homo sapien
gagaggacgaccatccttcctacga

SEQ ID NO: 5638274 - DNA, 25 bp, Homo sapien
tcgtaggaaggatggtcgtcctctc

SEQ ID NO: 5638275 - DNA, 25 bp, Homo sapien
atgcaatgtgaataacacttatttg

SEQ ID NO: 5638276 - DNA, 25 bp, Homo sapien
caaataagtgttattcacattgcat

SEQ ID NO: 5638277 - DNA, 25 bp, Homo sapien
ggtgcgagggccgtagccggcggag

SEQ ID NO: 5638278 - DNA, 25 bp, Homo sapien
ctccgccggctacggccctcgcacc

SEQ ID NO: 5638279 - DNA, 25 bp, Homo sapien
gggacgatgtccttgccgaccctac

SEQ ID NO: 5638280 - DNA, 25 bp, Homo sapien
gtagggtcggcaaggacatcgtccc

SEQ ID NO: 5638281 - DNA, 25 bp, Homo sapien
ggccaggaactgagtaaaagggtcc

SEQ ID NO: 5638282 - DNA, 25 bp, Homo sapien
ggacccttttactcagttcctggcc

SEQ ID NO: 5638283 - DNA, 25 bp, Homo sapien
catcccgaaaccaccctcctcagtt

SEQ ID NO: 5638284 - DNA, 25 bp, Homo sapien
aactgaggagggtggtttcgggatg

SEQ ID NO: 5638285 - DNA, 25 bp, Homo sapien
atataaagactacagtggtgtacag

SEQ ID NO: 5638286 - DNA, 25 bp, Homo sapien
ctgtacaccactgtagtctttatat

SEQ ID NO: 5638287 - DNA, 25 bp, Homo sapien
ccggtcgtgtacctcgctctcgacg

SEQ ID NO: 5638288 - DNA, 25 bp, Homo sapien
cgtcgagagcgaggtacacgaccgg

SEQ ID NO: 5638289 - DNA, 25 bp, Homo sapien
cacgtcgcgccgtgtcgatcgtgtt

SEQ ID NO: 5638290 - DNA, 25 bp, Homo sapien
aacacgatcgacacggcgcgacgtg

SEQ ID NO: 5638291 - DNA, 25 bp, Homo sapien
tggcccgtggagagcgactacacta

SEQ ID NO: 5638292 - DNA, 25 bp, Homo sapien
tagtgtagtcgctctccacgggcca

SEQ ID NO: 5638293 - DNA, 25 bp, Homo sapien
ggttccggctcacactccgtcggaa

SEQ ID NO: 5638294 - DNA, 25 bp, Homo sapien
ttccgacggagtgtgagccggaacc

SEQ ID NO: 5638295 - DNA, 25 bp, Homo sapien
ggtatcacccaacctggtgaccagt

SEQ ID NO: 5638296 - DNA, 25 bp, Homo sapien
actggtcaccaggttgggtgatacc

SEQ ID NO: 5638297 - DNA, 25 bp, Homo sapien
gctctagaaacttaagagttcttat

SEQ ID NO: 5638298 - DNA, 25 bp, Homo sapien
ataagaactcttaagtttctagagc

SEQ ID NO: 5638299 - DNA, 25 bp, Homo sapien
ttctcacggtcggcgcccgtccttc

SEQ ID NO: 5638300 - DNA, 25 bp, Homo sapien
gaaggacgggcgccgaccgtgagaa

SEQ ID NO: 5638301 - DNA, 25 bp, Homo sapien
ccagagaacagacttgagaagcggg

SEQ ID NO: 5638302 - DNA, 25 bp, Homo sapien
cccgcttctcaagtctgttctctgg

SEQ ID NO: 5638303 - DNA, 25 bp, Homo sapien
gtctcgggtcgtttccgacggtgtg

SEQ ID NO: 5638304 - DNA, 25 bp, Homo sapien
cacaccgtcggaaacgacccgagac

SEQ ID NO: 5638305 - DNA, 25 bp, Homo sapien
tagccctctgctgaaacgacgtctg

SEQ ID NO: 5638306 - DNA, 25 bp, Homo sapien
cagacgtcgtttcagcagagggcta

SEQ ID NO: 5638307 - DNA, 25 bp, Homo sapien
aattcagtgaccaaaggtgcaggag

SEQ ID NO: 5638308 - DNA, 25 bp, Homo sapien
ctcctgcacctttggtcactgaatt

SEQ ID NO: 5638309 - DNA, 25 bp, Homo sapien
cgggaattccggctgtcgttgtggt

SEQ ID NO: 5638310 - DNA, 25 bp, Homo sapien
accacaacgacagccggaattcccg

SEQ ID NO: 5638311 - DNA, 25 bp, Homo sapien
aagactctcattaacgcctacggat

SEQ ID NO: 5638312 - DNA, 25 bp, Homo sapien
atccgtaggcgttaatgagagtctt

SEQ ID NO: 5638313 - DNA, 25 bp, Homo sapien
ccgtaccggtcagtacagtttgtgt

SEQ ID NO: 5638314 - DNA, 25 bp, Homo sapien
acacaaactgtactgaccggtacgg

SEQ ID NO: 5638315 - DNA, 25 bp, Homo sapien
aaaacctatgagctacatgcgcctt

SEQ ID NO: 5638316 - DNA, 25 bp, Homo sapien
aaggcgcatgtagctcataggtttt

SEQ ID NO: 5638317 - DNA, 25 bp, Homo sapien
ctatattaaacctactagccgtaag

SEQ ID NO: 5638318 - DNA, 25 bp, Homo sapien
cttacggctagtaggtttaatatag

SEQ ID NO: 5638319 - DNA, 25 bp, Homo sapien
gcagggcggggttgagcgtcagtcg

SEQ ID NO: 5638320 - DNA, 25 bp, Homo sapien
cgactgacgctcaaccccgccctgc

SEQ ID NO: 5638321 - DNA, 25 bp, Homo sapien
cccgctacgattagaggtccagtcc

SEQ ID NO: 5638322 - DNA, 25 bp, Homo sapien
ggactggacctctaatcgtagcggg

SEQ ID NO: 5638323 - DNA, 25 bp, Homo sapien
ataaaggtactaatagtctaatcat

SEQ ID NO: 5638324 - DNA, 25 bp, Homo sapien
atgattagactattagtacctttat

SEQ ID NO: 5638325 - DNA, 25 bp, Homo sapien
tagaaggcatggtaaaagtcacccc

SEQ ID NO: 5638326 - DNA, 25 bp, Homo sapien
ggggtgacttttaccatgccttcta

SEQ ID NO: 5638327 - DNA, 25 bp, Homo sapien
ccaagtcctgttatgagggagggac

SEQ ID NO: 5638328 - DNA, 25 bp, Homo sapien
gtccctccctcataacaggacttgg

SEQ ID NO: 5638329 - DNA, 25 bp, Homo sapien
acagtattctcttaaataatattac

SEQ ID NO: 5638330 - DNA, 25 bp, Homo sapien
gtaatattatttaagagaatactgt

SEQ ID NO: 5638331 - DNA, 25 bp, Homo sapien
ccgcggagcctcctgtcctggctct

SEQ ID NO: 5638332 - DNA, 25 bp, Homo sapien
agagccaggacaggaggctccgcgg

SEQ ID NO: 5638333 - DNA, 25 bp, Homo sapien
acgagcggaccaggtttcggcttgg

SEQ ID NO: 5638334 - DNA, 25 bp, Homo sapien
ccaagccgaaacctggtccgctcgt

SEQ ID NO: 5638335 - DNA, 25 bp, Homo sapien
ggtcgcggcgcgacgagcggaccag

SEQ ID NO: 5638336 - DNA, 25 bp, Homo sapien
ctggtccgctcgtcgcgccgcgacc

SEQ ID NO: 5638337 - DNA, 25 bp, Homo sapien
ggaactttacatcgtattcttgtat

SEQ ID NO: 5638338 - DNA, 25 bp, Homo sapien
atacaagaatacgatgtaaagttcc

SEQ ID NO: 5638339 - DNA, 25 bp, Homo sapien
tcgtctcggtctacccgttccgccc

SEQ ID NO: 5638340 - DNA, 25 bp, Homo sapien
gggcggaacgggtagaccgagacga

SEQ ID NO: 5638341 - DNA, 25 bp, Homo sapien
cgccggtgaggagcacgccggtggt

SEQ ID NO: 5638342 - DNA, 25 bp, Homo sapien
accaccggcgtgctcctcaccggcg

SEQ ID NO: 5638343 - DNA, 25 bp, Homo sapien
ggaaagtagtacacgagaacagaca

SEQ ID NO: 5638344 - DNA, 25 bp, Homo sapien
tgtctgttctcgtgtactactttcc

SEQ ID NO: 5638345 - DNA, 25 bp, Homo sapien
gagaaggtttaagactgagtcaaaa

SEQ ID NO: 5638346 - DNA, 25 bp, Homo sapien
ttttgactcagtcttaaaccttctc

SEQ ID NO: 5638347 - DNA, 25 bp, Homo sapien
ccgaggggtcacagtccgtctcccg

SEQ ID NO: 5638348 - DNA, 25 bp, Homo sapien
cgggagacggactgtgacccctcgg

SEQ ID NO: 5638349 - DNA, 25 bp, Homo sapien
ccctggaagtctaccgttcattaat

SEQ ID NO: 5638350 - DNA, 25 bp, Homo sapien
attaatgaacggtagacttccaggg

SEQ ID NO: 5638351 - DNA, 25 bp, Homo sapien
gacttgtccgaagaggttcaccact

SEQ ID NO: 5638352 - DNA, 25 bp, Homo sapien
agtggtgaacctcttcggacaagtc

SEQ ID NO: 5638353 - DNA, 25 bp, Homo sapien
tcgtctacagtacatctcgacctgt

SEQ ID NO: 5638354 - DNA, 25 bp, Homo sapien
acaggtcgagatgtactgtagacga

SEQ ID NO: 5638355 - DNA, 25 bp, Homo sapien
aaccggataggcgtgaccggcccga

SEQ ID NO: 5638356 - DNA, 25 bp, Homo sapien
tcgggccggtcacgcctatccggtt

SEQ ID NO: 5638357 - DNA, 25 bp, Homo sapien
cccagacgcggaccctgagccccga

SEQ ID NO: 5638358 - DNA, 25 bp, Homo sapien
tcggggctcagggtccgcgtctggg

SEQ ID NO: 5638359 - DNA, 25 bp, Homo sapien
atcaactgtcctccccttcactccg

SEQ ID NO: 5638360 - DNA, 25 bp, Homo sapien
cggagtgaaggggaggacagttgat

SEQ ID NO: 5638361 - DNA, 25 bp, Homo sapien
gggtcccgactgacagaaagagaac

SEQ ID NO: 5638362 - DNA, 25 bp, Homo sapien
gttctctttctgtcagtcgggaccc

SEQ ID NO: 5638363 - DNA, 25 bp, Homo sapien
caataggtggcccatcggcactccg

SEQ ID NO: 5638364 - DNA, 25 bp, Homo sapien
cggagtgccgatgggccacctattg

SEQ ID NO: 5638365 - DNA, 25 bp, Homo sapien
ctcttaagtggtaaagaccataaac

SEQ ID NO: 5638366 - DNA, 25 bp, Homo sapien
gtttatggtctttaccacttaagag

SEQ ID NO: 5638367 - DNA, 25 bp, Homo sapien
atgccgtttgttcactcctctctct

SEQ ID NO: 5638368 - DNA, 25 bp, Homo sapien
agagagaggagtgaacaaacggcat

SEQ ID NO: 5638369 - DNA, 25 bp, Homo sapien
agcgagacggtagccgtgtccacag

SEQ ID NO: 5638370 - DNA, 25 bp, Homo sapien
ctgtggacacggctaccgtctcgct

SEQ ID NO: 5638371 - DNA, 25 bp, Homo sapien
cgcgacgtgcacttccgccgcgcgc

SEQ ID NO: 5638372 - DNA, 25 bp, Homo sapien
gcgcgcggcggaagtgcacgtcgcg

SEQ ID NO: 5638373 - DNA, 25 bp, Homo sapien
agtaaagagttttgatgatcaaacg

SEQ ID NO: 5638374 - DNA, 25 bp, Homo sapien
cgtttgatcatcaaaactctttact

SEQ ID NO: 5638375 - DNA, 25 bp, Homo sapien
acagcgtagcacagtccagtgtcga

SEQ ID NO: 5638376 - DNA, 25 bp, Homo sapien
tcgacactggactgtgctacgctgt

SEQ ID NO: 5638377 - DNA, 25 bp, Homo sapien
taagaaactcacctgagagtttgac

SEQ ID NO: 5638378 - DNA, 25 bp, Homo sapien
gtcaaactctcaggtgagtttctta

SEQ ID NO: 5638379 - DNA, 25 bp, Homo sapien
caaaagtctttaccatctgataccc

SEQ ID NO: 5638380 - DNA, 25 bp, Homo sapien
gggtatcagatggtaaagacttttg

SEQ ID NO: 5638381 - DNA, 25 bp, Homo sapien
ttgttaggttttgaaacactgatcg

SEQ ID NO: 5638382 - DNA, 25 bp, Homo sapien
cgatcagtgtttcaaaacctaacaa

SEQ ID NO: 5638383 - DNA, 25 bp, Homo sapien
gacgacgcagttcgaacggacagtc

SEQ ID NO: 5638384 - DNA, 25 bp, Homo sapien
gactgtccgttcgaactgcgtcgtc

SEQ ID NO: 5638385 - DNA, 25 bp, Homo sapien
tcgtccacgtcgctgggcgggcggc

SEQ ID NO: 5638386 - DNA, 25 bp, Homo sapien
gccgcccgcccagcgacgtggacga

SEQ ID NO: 5638387 - DNA, 25 bp, Homo sapien
ctattatcttatgacttcatagtcg

SEQ ID NO: 5638388 - DNA, 25 bp, Homo sapien
cgactatgaagtcataagataatag

SEQ ID NO: 5638389 - DNA, 25 bp, Homo sapien
acctctgagggcgggtccccgcacc

SEQ ID NO: 5638390 - DNA, 25 bp, Homo sapien
ggtgcggggacccgccctcagaggt

SEQ ID NO: 5638391 - DNA, 25 bp, Homo sapien
gaccggatacactttggctgcaacg

SEQ ID NO: 5638392 - DNA, 25 bp, Homo sapien
cgttgcagccaaagtgtatccggtc

SEQ ID NO: 5638393 - DNA, 25 bp, Homo sapien
gacggtcgtcctggaagaatcctga

SEQ ID NO: 5638394 - DNA, 25 bp, Homo sapien
tcaggattcttccaggacgaccgtc

SEQ ID NO: 5638395 - DNA, 25 bp, Homo sapien
cgccacgccggccacggagacaaga

SEQ ID NO: 5638396 - DNA, 25 bp, Homo sapien
tcttgtctccgtggccggcgtggcg

SEQ ID NO: 5638397 - DNA, 25 bp, Homo sapien
gactcaggagttaactctaatttct

SEQ ID NO: 5638398 - DNA, 25 bp, Homo sapien
agaaattagagttaactcctgagtc

SEQ ID NO: 5638399 - DNA, 25 bp, Homo sapien
tcgggctgcggcgatgcacgccgag

SEQ ID NO: 5638400 - DNA, 25 bp, Homo sapien
ctcggcgtgcatcgccgcagcccga

SEQ ID NO: 5638401 - DNA, 25 bp, Homo sapien
cgcgtattctgtcctgtgtacacct

SEQ ID NO: 5638402 - DNA, 25 bp, Homo sapien
aggtgtacacaggacagaatacgcg

SEQ ID NO: 5638403 - DNA, 25 bp, Homo sapien
gtagtagtagtcataaacatctatt

SEQ ID NO: 5638404 - DNA, 25 bp, Homo sapien
aatagatgtttatgactactactac

SEQ ID NO: 5638405 - DNA, 25 bp, Homo sapien
cgtgtaaaaactgttcaatcaaaat

SEQ ID NO: 5638406 - DNA, 25 bp, Homo sapien
attttgattgaacagtttttacacg

SEQ ID NO: 5638407 - DNA, 25 bp, Homo sapien
gaccggtcgaggtacttctgcgagt

SEQ ID NO: 5638408 - DNA, 25 bp, Homo sapien
actcgcagaagtacctcgaccggtc

SEQ ID NO: 5638409 - DNA, 25 bp, Homo sapien
acactaaggtcattccgttctcaga

SEQ ID NO: 5638410 - DNA, 25 bp, Homo sapien
tctgagaacggaatgaccttagtgt

SEQ ID NO: 5638411 - DNA, 25 bp, Homo sapien
tcatttatagtccatcgtaaaaagg

SEQ ID NO: 5638412 - DNA, 25 bp, Homo sapien
cctttttacgatggactataaatga

SEQ ID NO: 5638413 - DNA, 25 bp, Homo sapien
cagtcttggtaaactacagcaactc

SEQ ID NO: 5638414 - DNA, 25 bp, Homo sapien
gagttgctgtagtttaccaagactg

SEQ ID NO: 5638415 - DNA, 25 bp, Homo sapien
cacgtaggcgtgagggaagccgctt

SEQ ID NO: 5638416 - DNA, 25 bp, Homo sapien
aagcggcttccctcacgcctacgtg

SEQ ID NO: 5638417 - DNA, 25 bp, Homo sapien
ttgttactgctattattaaaaatgg

SEQ ID NO: 5638418 - DNA, 25 bp, Homo sapien
ccatttttaataatagcagtaacaa

SEQ ID NO: 5638419 - DNA, 25 bp, Homo sapien
gaccccctccccctctggccgactc

SEQ ID NO: 5638420 - DNA, 25 bp, Homo sapien
gagtcggccagagggggagggggtc

SEQ ID NO: 5638421 - DNA, 25 bp, Homo sapien
gatttacggttaggtcccacatgtg

SEQ ID NO: 5638422 - DNA, 25 bp, Homo sapien
cacatgtgggacctaaccgtaaatc

SEQ ID NO: 5638423 - DNA, 25 bp, Homo sapien
agtctccactatggcattcatgttc

SEQ ID NO: 5638424 - DNA, 25 bp, Homo sapien
gaacatgaatgccatagtggagact

SEQ ID NO: 5638425 - DNA, 25 bp, Homo sapien
atatcataaaggataccgtttaaat

SEQ ID NO: 5638426 - DNA, 25 bp, Homo sapien
atttaaacggtatcctttatgatat

SEQ ID NO: 5638427 - DNA, 25 bp, Homo sapien
ggaatcggtgagaggcgcggaggac

SEQ ID NO: 5638428 - DNA, 25 bp, Homo sapien
gtcctccgcgcctctcaccgattcc

SEQ ID NO: 5638429 - DNA, 25 bp, Homo sapien
aaaacgcgtaccgtcgactgtcagg

SEQ ID NO: 5638430 - DNA, 25 bp, Homo sapien
cctgacagtcgacggtacgcgtttt

SEQ ID NO: 5638431 - DNA, 25 bp, Homo sapien
gaagaaagtttacactggcaaaaag

SEQ ID NO: 5638432 - DNA, 25 bp, Homo sapien
ctttttgccagtgtaaactttcttc

SEQ ID NO: 5638433 - DNA, 25 bp, Homo sapien
gtgttaccctactcttgctcctacg

SEQ ID NO: 5638434 - DNA, 25 bp, Homo sapien
cgtaggagcaagagtagggtaacac

SEQ ID NO: 5638435 - DNA, 25 bp, Homo sapien
agagaagtaaagactctttaaggtc

SEQ ID NO: 5638436 - DNA, 25 bp, Homo sapien
gaccttaaagagtctttacttctct

SEQ ID NO: 5638437 - DNA, 25 bp, Homo sapien
atgtattaaagcataaaaccttact

SEQ ID NO: 5638438 - DNA, 25 bp, Homo sapien
agtaaggttttatgctttaatacat

SEQ ID NO: 5638439 - DNA, 25 bp, Homo sapien
gacacgccgaccgaaagtccccagg

SEQ ID NO: 5638440 - DNA, 25 bp, Homo sapien
cctggggactttcggtcggcgtgtc

SEQ ID NO: 5638441 - DNA, 25 bp, Homo sapien
agtaggaagtataagaccaagtaag

SEQ ID NO: 5638442 - DNA, 25 bp, Homo sapien
cttacttggtcttatacttcctact

SEQ ID NO: 5638443 - DNA, 25 bp, Homo sapien
gaaggttttgagaatgtacgtcaaa

SEQ ID NO: 5638444 - DNA, 25 bp, Homo sapien
tttgacgtacattctcaaaaccttc

SEQ ID NO: 5638445 - DNA, 25 bp, Homo sapien
taaaggaattaattatgtatcttgt

SEQ ID NO: 5638446 - DNA, 25 bp, Homo sapien
acaagatacataattaattccttta

SEQ ID NO: 5638447 - DNA, 25 bp, Homo sapien
aaaggaattaattatgtatcttgta

SEQ ID NO: 5638448 - DNA, 25 bp, Homo sapien
tacaagatacataattaattccttt

SEQ ID NO: 5638449 - DNA, 25 bp, Homo sapien
gccggtgtgcggcccgggcccggat

SEQ ID NO: 5638450 - DNA, 25 bp, Homo sapien
atccgggcccgggccgcacaccggc

SEQ ID NO: 5638451 - DNA, 25 bp, Homo sapien
gcggcccgggcccggacagaagagg

SEQ ID NO: 5638452 - DNA, 25 bp, Homo sapien
cctcttctgtccgggcccgggccgc

SEQ ID NO: 5638453 - DNA, 25 bp, Homo sapien
agtctttctgattcacataaatagt

SEQ ID NO: 5638454 - DNA, 25 bp, Homo sapien
actatttatgtgaatcagaaagact

SEQ ID NO: 5638455 - DNA, 25 bp, Homo sapien
taaagtctttctgattcacataaat

SEQ ID NO: 5638456 - DNA, 25 bp, Homo sapien
atttatgtgaatcagaaagacttta

SEQ ID NO: 5638457 - DNA, 25 bp, Homo sapien
aataaagtctttctgattcacataa

SEQ ID NO: 5638458 - DNA, 25 bp, Homo sapien
ttatgtgaatcagaaagactttatt

SEQ ID NO: 5638459 - DNA, 25 bp, Homo sapien
gggtctcgtcatcctaccgctattg

SEQ ID NO: 5638460 - DNA, 25 bp, Homo sapien
caatagcggtaggatgacgagaccc

SEQ ID NO: 5638461 - DNA, 25 bp, Homo sapien
aggagtggaggttccccacgataga

SEQ ID NO: 5638462 - DNA, 25 bp, Homo sapien
tctatcgtggggaacctccactcct

SEQ ID NO: 5638463 - DNA, 25 bp, Homo sapien
cgctcgctggcgtctccgtctggga

SEQ ID NO: 5638464 - DNA, 25 bp, Homo sapien
tcccagacggagacgccagcgagcg

SEQ ID NO: 5638465 - DNA, 25 bp, Homo sapien
tagaccggaccggtatccttcgagg

SEQ ID NO: 5638466 - DNA, 25 bp, Homo sapien
cctcgaaggataccggtccggtcta

SEQ ID NO: 5638467 - DNA, 25 bp, Homo sapien
acacaaaaggatttcgagtatgtta

SEQ ID NO: 5638468 - DNA, 25 bp, Homo sapien
taacatactcgaaatccttttgtgt

SEQ ID NO: 5638469 - DNA, 25 bp, Homo sapien
gtccaaacattatacatcctcgtct

SEQ ID NO: 5638470 - DNA, 25 bp, Homo sapien
agacgaggatgtataatgtttggac

SEQ ID NO: 5638471 - DNA, 25 bp, Homo sapien
tacacgagaggagaatcgcgaaccg

SEQ ID NO: 5638472 - DNA, 25 bp, Homo sapien
cggttcgcgattctcctctcgtgta

SEQ ID NO: 5638473 - DNA, 25 bp, Homo sapien
tcacaaaccttcccgttaccttcac

SEQ ID NO: 5638474 - DNA, 25 bp, Homo sapien
gtgaaggtaacgggaaggtttgtga

SEQ ID NO: 5638475 - DNA, 25 bp, Homo sapien
tgcggcgccccgacggcagggctgg

SEQ ID NO: 5638476 - DNA, 25 bp, Homo sapien
ccagccctgccgtcggggcgccgca

SEQ ID NO: 5638477 - DNA, 25 bp, Homo sapien
aacctggtcgcatcttgtagtgtct

SEQ ID NO: 5638478 - DNA, 25 bp, Homo sapien
agacactacaagatgcgaccaggtt

SEQ ID NO: 5638479 - DNA, 25 bp, Homo sapien
ggtacataaattcttacaataaata

SEQ ID NO: 5638480 - DNA, 25 bp, Homo sapien
tatttattgtaagaatttatgtacc

SEQ ID NO: 5638481 - DNA, 25 bp, Homo sapien
attcttacaataaataatgtgggta

SEQ ID NO: 5638482 - DNA, 25 bp, Homo sapien
tacccacattatttattgtaagaat

SEQ ID NO: 5638483 - DNA, 25 bp, Homo sapien
gtacataaattcttacaataaataa

SEQ ID NO: 5638484 - DNA, 25 bp, Homo sapien
ttatttattgtaagaatttatgtac

SEQ ID NO: 5638485 - DNA, 25 bp, Homo sapien
gtcgggtcgtaagctctcggcaact

SEQ ID NO: 5638486 - DNA, 25 bp, Homo sapien
agttgccgagagcttacgacccgac

SEQ ID NO: 5638487 - DNA, 25 bp, Homo sapien
gacgctgccgcccccgtcccctttc

SEQ ID NO: 5638488 - DNA, 25 bp, Homo sapien
gaaaggggacgggggcggcagcgtc

SEQ ID NO: 5638489 - DNA, 25 bp, Homo sapien
tagaaaagcaggttaattgtcttgt

SEQ ID NO: 5638490 - DNA, 25 bp, Homo sapien
acaagacaattaacctgcttttcta

SEQ ID NO: 5638491 - DNA, 25 bp, Homo sapien
ctctatttgtgtaatttgcttagat

SEQ ID NO: 5638492 - DNA, 25 bp, Homo sapien
atctaagcaaattacacaaatagag

SEQ ID NO: 5638493 - DNA, 25 bp, Homo sapien
actccccagggagtgtgtttagaca

SEQ ID NO: 5638494 - DNA, 25 bp, Homo sapien
tgtctaaacacactccctggggagt

SEQ ID NO: 5638495 - DNA, 25 bp, Homo sapien
gaagtcggtgtcctagtcacagagt

SEQ ID NO: 5638496 - DNA, 25 bp, Homo sapien
actctgtgactaggacaccgacttc

SEQ ID NO: 5638497 - DNA, 25 bp, Homo sapien
ttaggtgtatagacgaccggtgtga

SEQ ID NO: 5638498 - DNA, 25 bp, Homo sapien
tcacaccggtcgtctatacacctaa

SEQ ID NO: 5638499 - DNA, 25 bp, Homo sapien
atctatcacgtttcattacatttaa

SEQ ID NO: 5638500 - DNA, 25 bp, Homo sapien
ttaaatgtaatgaaacgtgatagat

SEQ ID NO: 5638501 - DNA, 25 bp, Homo sapien
ggacaccggatcatagtgaaagact

SEQ ID NO: 5638502 - DNA, 25 bp, Homo sapien
agtctttcactatgatccggtgtcc

SEQ ID NO: 5638503 - DNA, 25 bp, Homo sapien
gggtcggtcgggtgtctgtcccttc

SEQ ID NO: 5638504 - DNA, 25 bp, Homo sapien
gaagggacagacacccgaccgaccc

SEQ ID NO: 5638505 - DNA, 25 bp, Homo sapien
ttcttagacacgcataaactacaag

SEQ ID NO: 5638506 - DNA, 25 bp, Homo sapien
cttgtagtttatgcgtgtctaagaa

SEQ ID NO: 5638507 - DNA, 25 bp, Homo sapien
aatataaatccattacgaattgacg

SEQ ID NO: 5638508 - DNA, 25 bp, Homo sapien
cgtcaattcgtaatggatttatatt

SEQ ID NO: 5638509 - DNA, 25 bp, Homo sapien
attcacaggtttcccctaagcttgt

SEQ ID NO: 5638510 - DNA, 25 bp, Homo sapien
acaagcttaggggaaacctgtgaat

SEQ ID NO: 5638511 - DNA, 25 bp, Homo sapien
aagaactagtataaatttgctcaca

SEQ ID NO: 5638512 - DNA, 25 bp, Homo sapien
tgtgagcaaatttatactagttctt

SEQ ID NO: 5638513 - DNA, 25 bp, Homo sapien
gaccgaggtgtccacgcgtacctgc

SEQ ID NO: 5638514 - DNA, 25 bp, Homo sapien
gcaggtacgcgtggacacctcggtc

SEQ ID NO: 5638515 - DNA, 25 bp, Homo sapien
gatattccaaagtgaccttaccctg

SEQ ID NO: 5638516 - DNA, 25 bp, Homo sapien
cagggtaaggtcactttggaatatc

SEQ ID NO: 5638517 - DNA, 25 bp, Homo sapien
gtggtaacggatcttaccacctacg

SEQ ID NO: 5638518 - DNA, 25 bp, Homo sapien
cgtaggtggtaagatccgttaccac

SEQ ID NO: 5638519 - DNA, 25 bp, Homo sapien
tgacaccttcactttattacggacg

SEQ ID NO: 5638520 - DNA, 25 bp, Homo sapien
cgtccgtaataaagtgaaggtgtca

SEQ ID NO: 5638521 - DNA, 25 bp, Homo sapien
gtttgtcttaggacaaatattttta

SEQ ID NO: 5638522 - DNA, 25 bp, Homo sapien
taaaaatatttgtcctaagacaaac

SEQ ID NO: 5638523 - DNA, 25 bp, Homo sapien
agttactagaccaaagaggtcattt

SEQ ID NO: 5638524 - DNA, 25 bp, Homo sapien
aaatgacctctttggtctagtaact

SEQ ID NO: 5638525 - DNA, 25 bp, Homo sapien
caggaacaaggggtgaccgatgact

SEQ ID NO: 5638526 - DNA, 25 bp, Homo sapien
agtcatcggtcaccccttgttcctg

SEQ ID NO: 5638527 - DNA, 25 bp, Homo sapien
cgtgcgcgggacgtagggcccccgc

SEQ ID NO: 5638528 - DNA, 25 bp, Homo sapien
gcgggggccctacgtcccgcgcacg

SEQ ID NO: 5638529 - DNA, 25 bp, Homo sapien
agttgtcatatgagtagtagataat

SEQ ID NO: 5638530 - DNA, 25 bp, Homo sapien
attatctactactcatatgacaact

SEQ ID NO: 5638531 - DNA, 25 bp, Homo sapien
gcctaaccatactaggtactgtaag

SEQ ID NO: 5638532 - DNA, 25 bp, Homo sapien
cttacagtacctagtatggttaggc

SEQ ID NO: 5638533 - DNA, 25 bp, Homo sapien
tccgaccgtaactctaagttcttgt

SEQ ID NO: 5638534 - DNA, 25 bp, Homo sapien
acaagaacttagagttacggtcgga

SEQ ID NO: 5638535 - DNA, 25 bp, Homo sapien
cttcttagaacaaccgtatagctaa

SEQ ID NO: 5638536 - DNA, 25 bp, Homo sapien
ttagctatacggttgttctaagaag

SEQ ID NO: 5638537 - DNA, 25 bp, Homo sapien
tacgtcgaagaccactatacattac

SEQ ID NO: 5638538 - DNA, 25 bp, Homo sapien
gtaatgtatagtggtcttcgacgta

SEQ ID NO: 5638539 - DNA, 25 bp, Homo sapien
gacttggaacattggagacttcaaa

SEQ ID NO: 5638540 - DNA, 25 bp, Homo sapien
tttgaagtctccaatgttccaagtc

SEQ ID NO: 5638541 - DNA, 25 bp, Homo sapien
atttttaggcacttacgaaaatcta

SEQ ID NO: 5638542 - DNA, 25 bp, Homo sapien
tagattttcgtaagtgcctaaaaat

SEQ ID NO: 5638543 - DNA, 25 bp, Homo sapien
gttgtatatagctgtttgaaaattt

SEQ ID NO: 5638544 - DNA, 25 bp, Homo sapien
aaattttcaaacagctatatacaac

SEQ ID NO: 5638545 - DNA, 25 bp, Homo sapien
aagttgtatatagctgtttgaaaat

SEQ ID NO: 5638546 - DNA, 25 bp, Homo sapien
attttcaaacagctatatacaactt

SEQ ID NO: 5638547 - DNA, 25 bp, Homo sapien
taagttgtatatagctgtttgaaaa

SEQ ID NO: 5638548 - DNA, 25 bp, Homo sapien
ttttcaaacagctatatacaactta

SEQ ID NO: 5638549 - DNA, 25 bp, Homo sapien
cgcgtctttcggctccggttggtct

SEQ ID NO: 5638550 - DNA, 25 bp, Homo sapien
agaccaaccggagccgaaagacgcg

SEQ ID NO: 5638551 - DNA, 25 bp, Homo sapien
agtcttggaccatttcgtcttggat

SEQ ID NO: 5638552 - DNA, 25 bp, Homo sapien
atccaagacgaaatggtccaagact

SEQ ID NO: 5638553 - DNA, 25 bp, Homo sapien
gactctcggtggtctttattgttac

SEQ ID NO: 5638554 - DNA, 25 bp, Homo sapien
gtaacaataaagaccaccgagagtc

SEQ ID NO: 5638555 - DNA, 25 bp, Homo sapien
aggaaagactattttagcgtctcac

SEQ ID NO: 5638556 - DNA, 25 bp, Homo sapien
gtgagacgctaaaatagtctttcct

SEQ ID NO: 5638557 - DNA, 25 bp, Homo sapien
ccggcgccccgcaccgtcggcggta

SEQ ID NO: 5638558 - DNA, 25 bp, Homo sapien
taccgccgacggtgcggggcgccgg

SEQ ID NO: 5638559 - DNA, 25 bp, Homo sapien
gccggcgccccgcaccgtcggcggt

SEQ ID NO: 5638560 - DNA, 25 bp, Homo sapien
accgccgacggtgcggggcgccggc

SEQ ID NO: 5638561 - DNA, 25 bp, Homo sapien
cgaggccggcgccccgcaccgtcgg

SEQ ID NO: 5638562 - DNA, 25 bp, Homo sapien
ccgacggtgcggggcgccggcctcg

SEQ ID NO: 5638563 - DNA, 25 bp, Homo sapien
gccgaggccggcgccccgcaccgtc

SEQ ID NO: 5638564 - DNA, 25 bp, Homo sapien
gacggtgcggggcgccggcctcggc

SEQ ID NO: 5638565 - DNA, 25 bp, Homo sapien
tatttgtcacgagggaggcccacag

SEQ ID NO: 5638566 - DNA, 25 bp, Homo sapien
ctgtgggcctccctcgtgacaaata

SEQ ID NO: 5638567 - DNA, 25 bp, Homo sapien
gttacttctagtcccaacgtctcgg

SEQ ID NO: 5638568 - DNA, 25 bp, Homo sapien
ccgagacgttgggactagaagtaac

SEQ ID NO: 5638569 - DNA, 25 bp, Homo sapien
accgttgtcgcgctcgccggcacac

SEQ ID NO: 5638570 - DNA, 25 bp, Homo sapien
gtgtgccggcgagcgcgacaacggt

SEQ ID NO: 5638571 - DNA, 25 bp, Homo sapien
gtgacgagtcggtgcctccggaagg

SEQ ID NO: 5638572 - DNA, 25 bp, Homo sapien
ccttccggaggcaccgactcgtcac

SEQ ID NO: 5638573 - DNA, 25 bp, Homo sapien
accctgcaggtagtctaaccgttat

SEQ ID NO: 5638574 - DNA, 25 bp, Homo sapien
ataacggttagactacctgcagggt

SEQ ID NO: 5638575 - DNA, 25 bp, Homo sapien
ccccggcggaataacgacttcaggc

SEQ ID NO: 5638576 - DNA, 25 bp, Homo sapien
gcctgaagtcgttattccgccgggg

SEQ ID NO: 5638577 - DNA, 25 bp, Homo sapien
gccctccggccacgccccactccag

SEQ ID NO: 5638578 - DNA, 25 bp, Homo sapien
ctggagtggggcgtggccggagggc

SEQ ID NO: 5638579 - DNA, 25 bp, Homo sapien
cggagctgtcagaccaccgacggtg

SEQ ID NO: 5638580 - DNA, 25 bp, Homo sapien
caccgtcggtggtctgacagctccg

SEQ ID NO: 5638581 - DNA, 25 bp, Homo sapien
acagtctcccttcgtattcaaggac

SEQ ID NO: 5638582 - DNA, 25 bp, Homo sapien
gtccttgaatacgaagggagactgt

SEQ ID NO: 5638583 - DNA, 25 bp, Homo sapien
aggaagaaacaactaacatctttta

SEQ ID NO: 5638584 - DNA, 25 bp, Homo sapien
taaaagatgttagttgtttcttcct

SEQ ID NO: 5638585 - DNA, 25 bp, Homo sapien
ggcgggagaccccaggcgcggaggc

SEQ ID NO: 5638586 - DNA, 25 bp, Homo sapien
gcctccgcgcctggggtctcccgcc

SEQ ID NO: 5638587 - DNA, 25 bp, Homo sapien
ctcggtctcgacctcggtgccgacc

SEQ ID NO: 5638588 - DNA, 25 bp, Homo sapien
ggtcggcaccgaggtcgagaccgag

SEQ ID NO: 5638589 - DNA, 25 bp, Homo sapien
ctatcggtcggtgttgaagttactc

SEQ ID NO: 5638590 - DNA, 25 bp, Homo sapien
gagtaacttcaacaccgaccgatag

SEQ ID NO: 5638591 - DNA, 25 bp, Homo sapien
acaaatgactaatattgtatcaaat

SEQ ID NO: 5638592 - DNA, 25 bp, Homo sapien
atttgatacaatattagtcatttgt

SEQ ID NO: 5638593 - DNA, 25 bp, Homo sapien
caaatgactaatattgtatcaaatg

SEQ ID NO: 5638594 - DNA, 25 bp, Homo sapien
catttgatacaatattagtcatttg

SEQ ID NO: 5638595 - DNA, 25 bp, Homo sapien
aaagaagagtaggaacgtttcagag

SEQ ID NO: 5638596 - DNA, 25 bp, Homo sapien
ctctgaaacgttcctactcttcttt

SEQ ID NO: 5638597 - DNA, 25 bp, Homo sapien
caccttcagtccccgcgccgacgcc

SEQ ID NO: 5638598 - DNA, 25 bp, Homo sapien
ggcgtcggcgcggggactgaaggtg

SEQ ID NO: 5638599 - DNA, 25 bp, Homo sapien
gagagaatcgtattttatggtggtc

SEQ ID NO: 5638600 - DNA, 25 bp, Homo sapien
gaccaccataaaatacgattctctc

SEQ ID NO: 5638601 - DNA, 25 bp, Homo sapien
tacaagacaggtactaaaagacaag

SEQ ID NO: 5638602 - DNA, 25 bp, Homo sapien
cttgtcttttagtacctgtcttgta

SEQ ID NO: 5638603 - DNA, 25 bp, Homo sapien
cgggcgcctacggtgcaggtaaacg

SEQ ID NO: 5638604 - DNA, 25 bp, Homo sapien
cgtttacctgcaccgtaggcgcccg

SEQ ID NO: 5638605 - DNA, 25 bp, Homo sapien
tagcgaccacctcgttgagtgctcg

SEQ ID NO: 5638606 - DNA, 25 bp, Homo sapien
cgagcactcaacgaggtggtcgcta

SEQ ID NO: 5638607 - DNA, 25 bp, Homo sapien
cattacaagggagacctgggtccgt

SEQ ID NO: 5638608 - DNA, 25 bp, Homo sapien
acggacccaggtctcccttgtaatg

SEQ ID NO: 5638609 - DNA, 25 bp, Homo sapien
cctaacgcagattcgggaactgaaa

SEQ ID NO: 5638610 - DNA, 25 bp, Homo sapien
tttcagttcccgaatctgcgttagg

SEQ ID NO: 5638611 - DNA, 25 bp, Homo sapien
actcccgaggcgtggcacccgtggg

SEQ ID NO: 5638612 - DNA, 25 bp, Homo sapien
cccacgggtgccacgcctcgggagt

SEQ ID NO: 5638613 - DNA, 25 bp, Homo sapien
ccagtacctgtaatcaaaatatcac

SEQ ID NO: 5638614 - DNA, 25 bp, Homo sapien
gtgatattttgattacaggtactgg

SEQ ID NO: 5638615 - DNA, 25 bp, Homo sapien
tattatgaaaaagaccagtacctgt

SEQ ID NO: 5638616 - DNA, 25 bp, Homo sapien
acaggtactggtctttttcataata

SEQ ID NO: 5638617 - DNA, 25 bp, Homo sapien
tttggctttagtataacataattgt

SEQ ID NO: 5638618 - DNA, 25 bp, Homo sapien
acaattatgttatactaaagccaaa

SEQ ID NO: 5638619 - DNA, 25 bp, Homo sapien
aatttggctttagtataacataatt

SEQ ID NO: 5638620 - DNA, 25 bp, Homo sapien
aattatgttatactaaagccaaatt

SEQ ID NO: 5638621 - DNA, 25 bp, Homo sapien
aaatttggctttagtataacataat

SEQ ID NO: 5638622 - DNA, 25 bp, Homo sapien
attatgttatactaaagccaaattt

SEQ ID NO: 5638623 - DNA, 25 bp, Homo sapien
tcatctttaagaaaaatttacagta

SEQ ID NO: 5638624 - DNA, 25 bp, Homo sapien
tactgtaaatttttcttaaagatga

SEQ ID NO: 5638625 - DNA, 25 bp, Homo sapien
gtctttaatacgataatggatacat

SEQ ID NO: 5638626 - DNA, 25 bp, Homo sapien
atgtatccattatcgtattaaagac

SEQ ID NO: 5638627 - DNA, 25 bp, Homo sapien
aacagtctttaatacgataatggat

SEQ ID NO: 5638628 - DNA, 25 bp, Homo sapien
atccattatcgtattaaagactgtt

SEQ ID NO: 5638629 - DNA, 25 bp, Homo sapien
actcgacacggcttacggactaggt

SEQ ID NO: 5638630 - DNA, 25 bp, Homo sapien
acctagtccgtaagccgtgtcgagt

SEQ ID NO: 5638631 - DNA, 25 bp, Homo sapien
acgcctggtgtctcgccgtcgtgta

SEQ ID NO: 5638632 - DNA, 25 bp, Homo sapien
tacacgacggcgagacaccaggcgt

SEQ ID NO: 5638633 - DNA, 25 bp, Homo sapien
aatcgtcccagtatcttctgcgtga

SEQ ID NO: 5638634 - DNA, 25 bp, Homo sapien
tcacgcagaagatactgggacgatt

SEQ ID NO: 5638635 - DNA, 25 bp, Homo sapien
accactcaatgatgaaaccaattcg

SEQ ID NO: 5638636 - DNA, 25 bp, Homo sapien
cgaattggtttcatcattgagtggt

SEQ ID NO: 5638637 - DNA, 25 bp, Homo sapien
gaaataaccgataattgaattaacc

SEQ ID NO: 5638638 - DNA, 25 bp, Homo sapien
ggttaattcaattatcggttatttc

SEQ ID NO: 5638639 - DNA, 25 bp, Homo sapien
tgtcttatagagataggaatattac

SEQ ID NO: 5638640 - DNA, 25 bp, Homo sapien
gtaatattcctatctctataagaca

SEQ ID NO: 5638641 - DNA, 25 bp, Homo sapien
acaaatacatggtcgtcggtcttaa

SEQ ID NO: 5638642 - DNA, 25 bp, Homo sapien
ttaagaccgacgaccatgtatttgt

SEQ ID NO: 5638643 - DNA, 25 bp, Homo sapien
ggaatcaggtacctcggtctggtac

SEQ ID NO: 5638644 - DNA, 25 bp, Homo sapien
gtaccagaccgaggtacctgattcc

SEQ ID NO: 5638645 - DNA, 25 bp, Homo sapien
gttaggcatccatatgaaagtattt

SEQ ID NO: 5638646 - DNA, 25 bp, Homo sapien
aaatactttcatatggatgcctaac

SEQ ID NO: 5638647 - DNA, 25 bp, Homo sapien
atataaattcctttgcatgagttac

SEQ ID NO: 5638648 - DNA, 25 bp, Homo sapien
gtaactcatgcaaaggaatttatat

SEQ ID NO: 5638649 - DNA, 25 bp, Homo sapien
gaccttacgtctgtggagaggtcgt

SEQ ID NO: 5638650 - DNA, 25 bp, Homo sapien
acgacctctccacagacgtaaggtc

SEQ ID NO: 5638651 - DNA, 25 bp, Homo sapien
tacgtagtatttttcttggtataaa

SEQ ID NO: 5638652 - DNA, 25 bp, Homo sapien
tttataccaagaaaaatactacgta

SEQ ID NO: 5638653 - DNA, 25 bp, Homo sapien
gtacgtagtatttttcttggtataa

SEQ ID NO: 5638654 - DNA, 25 bp, Homo sapien
ttataccaagaaaaatactacgtac

SEQ ID NO: 5638655 - DNA, 25 bp, Homo sapien
gcgtgtacacgacagagacattcag

SEQ ID NO: 5638656 - DNA, 25 bp, Homo sapien
ctgaatgtctctgtcgtgtacacgc

SEQ ID NO: 5638657 - DNA, 25 bp, Homo sapien
caagaaagatgtaaagtccgtaagt

SEQ ID NO: 5638658 - DNA, 25 bp, Homo sapien
acttacggactttacatctttcttg

SEQ ID NO: 5638659 - DNA, 25 bp, Homo sapien
acatataatagacaaaaccgtaaac

SEQ ID NO: 5638660 - DNA, 25 bp, Homo sapien
gtttacggttttgtctattatatgt

SEQ ID NO: 5638661 - DNA, 25 bp, Homo sapien
tgctgcggcggcacgccaagcctgt

SEQ ID NO: 5638662 - DNA, 25 bp, Homo sapien
acaggcttggcgtgccgccgcagca

SEQ ID NO: 5638663 - DNA, 25 bp, Homo sapien
gccggagaccgcagtccgacggggt

SEQ ID NO: 5638664 - DNA, 25 bp, Homo sapien
accccgtcggactgcggtctccggc

SEQ ID NO: 5638665 - DNA, 25 bp, Homo sapien
cagcgtcgctgttcgaaaactaaag

SEQ ID NO: 5638666 - DNA, 25 bp, Homo sapien
ctttagttttcgaacagcgacgctg

SEQ ID NO: 5638667 - DNA, 25 bp, Homo sapien
ctatattacattcttggtatcaaat

SEQ ID NO: 5638668 - DNA, 25 bp, Homo sapien
atttgataccaagaatgtaatatag

SEQ ID NO: 5638669 - DNA, 25 bp, Homo sapien
tcaactactttcatgatattcttgt

SEQ ID NO: 5638670 - DNA, 25 bp, Homo sapien
acaagaatatcatgaaagtagttga

SEQ ID NO: 5638671 - DNA, 25 bp, Homo sapien
cgcccataggttcctctccagatat

SEQ ID NO: 5638672 - DNA, 25 bp, Homo sapien
atatctggagaggaacctatgggcg

SEQ ID NO: 5638673 - DNA, 25 bp, Homo sapien
cgaacaacctagtcttgagttgaga

SEQ ID NO: 5638674 - DNA, 25 bp, Homo sapien
tctcaactcaagactaggttgttcg

SEQ ID NO: 5638675 - DNA, 25 bp, Homo sapien
tgacagaaggaaacatctgttaaat

SEQ ID NO: 5638676 - DNA, 25 bp, Homo sapien
atttaacagatgtttccttctgtca

SEQ ID NO: 5638677 - DNA, 25 bp, Homo sapien
tcaattttccacctttagtcatcat

SEQ ID NO: 5638678 - DNA, 25 bp, Homo sapien
atgatgactaaaggtggaaaattga

SEQ ID NO: 5638679 - DNA, 25 bp, Homo sapien
ctcgtgtgcgtgtccatcagtgtgt

SEQ ID NO: 5638680 - DNA, 25 bp, Homo sapien
acacactgatggacacgcacacgag

SEQ ID NO: 5638681 - DNA, 25 bp, Homo sapien
taaatagaagtcacaatttcacatt

SEQ ID NO: 5638682 - DNA, 25 bp, Homo sapien
aatgtgaaattgtgacttctattta

SEQ ID NO: 5638683 - DNA, 25 bp, Homo sapien
ctgttgcccgaaaggaaggtctgac

SEQ ID NO: 5638684 - DNA, 25 bp, Homo sapien
gtcagaccttcctttcgggcaacag

SEQ ID NO: 5638685 - DNA, 25 bp, Homo sapien
ggtatggttgcaagtcttcggagac

SEQ ID NO: 5638686 - DNA, 25 bp, Homo sapien
gtctccgaagacttgcaaccatacc

SEQ ID NO: 5638687 - DNA, 25 bp, Homo sapien
aaacaaacaagatattctctgtaaa

SEQ ID NO: 5638688 - DNA, 25 bp, Homo sapien
tttacagagaatatcttgtttgttt

SEQ ID NO: 5638689 - DNA, 25 bp, Homo sapien
gcccgctgccggaactgacgggtca

SEQ ID NO: 5638690 - DNA, 25 bp, Homo sapien
tgacccgtcagttccggcagcgggc

SEQ ID NO: 5638691 - DNA, 25 bp, Homo sapien
agtgtcgcccgctgccggaactgac

SEQ ID NO: 5638692 - DNA, 25 bp, Homo sapien
gtcagttccggcagcgggcgacact

SEQ ID NO: 5638693 - DNA, 25 bp, Homo sapien
tgtgatctgcactataaagatttag

SEQ ID NO: 5638694 - DNA, 25 bp, Homo sapien
ctaaatctttatagtgcagatcaca

SEQ ID NO: 5638695 - DNA, 25 bp, Homo sapien
tccttttccgtttgtatacttagaa

SEQ ID NO: 5638696 - DNA, 25 bp, Homo sapien
ttctaagtatacaaacggaaaagga

SEQ ID NO: 5638697 - DNA, 25 bp, Homo sapien
cgtctgtccccgtcacaggctctct

SEQ ID NO: 5638698 - DNA, 25 bp, Homo sapien
agagagcctgtgacggggacagacg

SEQ ID NO: 5638699 - DNA, 25 bp, Homo sapien
gccgccggtgcggtcggcgtggaag

SEQ ID NO: 5638700 - DNA, 25 bp, Homo sapien
cttccacgccgaccgcaccggcggc

SEQ ID NO: 5638701 - DNA, 25 bp, Homo sapien
cggcccgccgccggtgcggtcggcg

SEQ ID NO: 5638702 - DNA, 25 bp, Homo sapien
cgccgaccgcaccggcggcgggccg

SEQ ID NO: 5638703 - DNA, 25 bp, Homo sapien
gacgggcacctgccgaccgtgtccc

SEQ ID NO: 5638704 - DNA, 25 bp, Homo sapien
gggacacggtcggcaggtgcccgtc

SEQ ID NO: 5638705 - DNA, 25 bp, Homo sapien
actgtacacggagagtcgccaaggt

SEQ ID NO: 5638706 - DNA, 25 bp, Homo sapien
accttggcgactctccgtgtacagt

SEQ ID NO: 5638707 - DNA, 25 bp, Homo sapien
gtacacggagagtcgccaaggtcgt

SEQ ID NO: 5638708 - DNA, 25 bp, Homo sapien
acgaccttggcgactctccgtgtac

SEQ ID NO: 5638709 - DNA, 25 bp, Homo sapien
ctttaatagctccaaaggttgacac

SEQ ID NO: 5638710 - DNA, 25 bp, Homo sapien
gtgtcaacctttggagctattaaag

SEQ ID NO: 5638711 - DNA, 25 bp, Homo sapien
tgtggattactaaatgtcgccaatg

SEQ ID NO: 5638712 - DNA, 25 bp, Homo sapien
cattggcgacatttagtaatccaca

SEQ ID NO: 5638713 - DNA, 25 bp, Homo sapien
atctttctttaaaatgagtataatg

SEQ ID NO: 5638714 - DNA, 25 bp, Homo sapien
cattatactcattttaaagaaagat

SEQ ID NO: 5638715 - DNA, 25 bp, Homo sapien
aatctttctttaaaatgagtataat

SEQ ID NO: 5638716 - DNA, 25 bp, Homo sapien
attatactcattttaaagaaagatt

SEQ ID NO: 5638717 - DNA, 25 bp, Homo sapien
agagctccgaataacccctttctgg

SEQ ID NO: 5638718 - DNA, 25 bp, Homo sapien
ccagaaaggggttattcggagctct

SEQ ID NO: 5638719 - DNA, 25 bp, Homo sapien
tactacactctagtaagattctgtg

SEQ ID NO: 5638720 - DNA, 25 bp, Homo sapien
cacagaatcttactagagtgtagta

SEQ ID NO: 5638721 - DNA, 25 bp, Homo sapien
aagagtcagtcttcccgacagtcgt

SEQ ID NO: 5638722 - DNA, 25 bp, Homo sapien
acgactgtcgggaagactgactctt

SEQ ID NO: 5638723 - DNA, 25 bp, Homo sapien
agaccttccagcgacgagtagaagg

SEQ ID NO: 5638724 - DNA, 25 bp, Homo sapien
ccttctactcgtcgctggaaggtct

SEQ ID NO: 5638725 - DNA, 25 bp, Homo sapien
cgagagggtgacggtagccctgggt

SEQ ID NO: 5638726 - DNA, 25 bp, Homo sapien
acccagggctaccgtcaccctctcg

SEQ ID NO: 5638727 - DNA, 25 bp, Homo sapien
aaggcaaaatacacgagttcggaag

SEQ ID NO: 5638728 - DNA, 25 bp, Homo sapien
cttccgaactcgtgtattttgcctt

SEQ ID NO: 5638729 - DNA, 25 bp, Homo sapien
ggttaattctataaggagacaaaat

SEQ ID NO: 5638730 - DNA, 25 bp, Homo sapien
attttgtctccttatagaattaacc

SEQ ID NO: 5638731 - DNA, 25 bp, Homo sapien
ttaccggccaggttcaagaagagac

SEQ ID NO: 5638732 - DNA, 25 bp, Homo sapien
gtctcttcttgaacctggccggtaa

SEQ ID NO: 5638733 - DNA, 25 bp, Homo sapien
gaactcgttaaagatctaaactagg

SEQ ID NO: 5638734 - DNA, 25 bp, Homo sapien
cctagtttagatctttaacgagttc

SEQ ID NO: 5638735 - DNA, 25 bp, Homo sapien
gggtgaacgtatttgaattaaaatg

SEQ ID NO: 5638736 - DNA, 25 bp, Homo sapien
cattttaattcaaatacgttcaccc

SEQ ID NO: 5638737 - DNA, 25 bp, Homo sapien
ggaagggaggaacgccgactgcgga

SEQ ID NO: 5638738 - DNA, 25 bp, Homo sapien
tccgcagtcggcgttcctcccttcc

SEQ ID NO: 5638739 - DNA, 25 bp, Homo sapien
tctggagacatgagaagacgtagtg

SEQ ID NO: 5638740 - DNA, 25 bp, Homo sapien
cactacgtcttctcatgtctccaga

SEQ ID NO: 5638741 - DNA, 25 bp, Homo sapien
gagccgcggaggtacctactatccg

SEQ ID NO: 5638742 - DNA, 25 bp, Homo sapien
cggatagtaggtacctccgcggctc

SEQ ID NO: 5638743 - DNA, 25 bp, Homo sapien
cagggacacggaacttgacggaagg

SEQ ID NO: 5638744 - DNA, 25 bp, Homo sapien
ccttccgtcaagttccgtgtccctg

SEQ ID NO: 5638745 - DNA, 25 bp, Homo sapien
atgtcgaccacagtcatcgtataat

SEQ ID NO: 5638746 - DNA, 25 bp, Homo sapien
attatacgatgactgtggtcgacat

SEQ ID NO: 5638747 - DNA, 25 bp, Homo sapien
accacatcggggtatctgtctccat

SEQ ID NO: 5638748 - DNA, 25 bp, Homo sapien
atggagacagataccccgatgtggt

SEQ ID NO: 5638749 - DNA, 25 bp, Homo sapien
agagcaccgtgtttcgagtatggag

SEQ ID NO: 5638750 - DNA, 25 bp, Homo sapien
ctccatactcgaaacacggtgctct

SEQ ID NO: 5638751 - DNA, 25 bp, Homo sapien
aagaactaggaggaacgactgggta

SEQ ID NO: 5638752 - DNA, 25 bp, Homo sapien
tacccagtcgttcctcctagttctt

SEQ ID NO: 5638753 - DNA, 25 bp, Homo sapien
gaggtaaaattgaggcacagctgat

SEQ ID NO: 5638754 - DNA, 25 bp, Homo sapien
atcagctgtgcctcaattttacctc

SEQ ID NO: 5638755 - DNA, 25 bp, Homo sapien
cagtggtcccgcaccgtggtggact

SEQ ID NO: 5638756 - DNA, 25 bp, Homo sapien
agtccaccacggtgcgggaccactg

SEQ ID NO: 5638757 - DNA, 25 bp, Homo sapien
aagttagggtgtatccagcaagacg

SEQ ID NO: 5638758 - DNA, 25 bp, Homo sapien
cgtcttgctggatacaccctaactt

SEQ ID NO: 5638759 - DNA, 25 bp, Homo sapien
agactcaatacctcacaagaagatt

SEQ ID NO: 5638760 - DNA, 25 bp, Homo sapien
aatcttcttgtgaggtattgagtct

SEQ ID NO: 5638761 - DNA, 25 bp, Homo sapien
cgggctccgtcgccaggcgcgagag

SEQ ID NO: 5638762 - DNA, 25 bp, Homo sapien
ctctcgcgcctggcgacggagcccg

SEQ ID NO: 5638763 - DNA, 25 bp, Homo sapien
tgtaaggagagtatccttattctgt

SEQ ID NO: 5638764 - DNA, 25 bp, Homo sapien
acagaataaggatactctccttaca

SEQ ID NO: 5638765 - DNA, 25 bp, Homo sapien
cgaggtaccgggaatggtcaccgaa

SEQ ID NO: 5638766 - DNA, 25 bp, Homo sapien
ttcggtgaccattcccggtacctcg

SEQ ID NO: 5638767 - DNA, 25 bp, Homo sapien
gtctatacccgtaccagtgggacca

SEQ ID NO: 5638768 - DNA, 25 bp, Homo sapien
tggtcccactggtacgggtatagac

SEQ ID NO: 5638769 - DNA, 25 bp, Homo sapien
caggacagtcccagtccctgccggg

SEQ ID NO: 5638770 - DNA, 25 bp, Homo sapien
cccggcagggactgggactgtcctg

SEQ ID NO: 5638771 - DNA, 25 bp, Homo sapien
attacggaggttctgtaacttgcac

SEQ ID NO: 5638772 - DNA, 25 bp, Homo sapien
gtgcaagttacagaacctccgtaat

SEQ ID NO: 5638773 - DNA, 25 bp, Homo sapien
cctccattccggtgacctgggttat

SEQ ID NO: 5638774 - DNA, 25 bp, Homo sapien
ataacccaggtcaccggaatggagg

SEQ ID NO: 5638775 - DNA, 25 bp, Homo sapien
gggtgaccgaattacaactaggtcg

SEQ ID NO: 5638776 - DNA, 25 bp, Homo sapien
cgacctagttgtaattcggtcaccc

SEQ ID NO: 5638777 - DNA, 25 bp, Homo sapien
actccagagatagggcaagtcccgt

SEQ ID NO: 5638778 - DNA, 25 bp, Homo sapien
acgggacttgccctatctctggagt

SEQ ID NO: 5638779 - DNA, 25 bp, Homo sapien
ttatttagccacagggaagtaacgg

SEQ ID NO: 5638780 - DNA, 25 bp, Homo sapien
ccgttacttccctgtggctaaataa

SEQ ID NO: 5638781 - DNA, 25 bp, Homo sapien
gagagacggatcgtgccggaaacac

SEQ ID NO: 5638782 - DNA, 25 bp, Homo sapien
gtgtttccggcacgatccgtctctc

SEQ ID NO: 5638783 - DNA, 25 bp, Homo sapien
gacgtccttccgagatattgggtaa

SEQ ID NO: 5638784 - DNA, 25 bp, Homo sapien
ttacccaatatctcggaaggacgtc

SEQ ID NO: 5638785 - DNA, 25 bp, Homo sapien
aaacatcattcgtttggtgtaggaa

SEQ ID NO: 5638786 - DNA, 25 bp, Homo sapien
ttcctacaccaaacgaatgatgttt

SEQ ID NO: 5638787 - DNA, 25 bp, Homo sapien
aagtaatgacaagaaggctaatatc

SEQ ID NO: 5638788 - DNA, 25 bp, Homo sapien
gatattagccttcttgtcattactt

SEQ ID NO: 5638789 - DNA, 25 bp, Homo sapien
cgacccacccagacaacccccacat

SEQ ID NO: 5638790 - DNA, 25 bp, Homo sapien
atgtgggggttgtctgggtgggtcg

SEQ ID NO: 5638791 - DNA, 25 bp, Homo sapien
agaagtattttactatgtttctttc

SEQ ID NO: 5638792 - DNA, 25 bp, Homo sapien
gaaagaaacatagtaaaatacttct

SEQ ID NO: 5638793 - DNA, 25 bp, Homo sapien
tgtcggtctaactctcctatgttgt

SEQ ID NO: 5638794 - DNA, 25 bp, Homo sapien
acaacataggagagttagaccgaca

SEQ ID NO: 5638795 - DNA, 25 bp, Homo sapien
gggtctcgcccatccagatgcacct

SEQ ID NO: 5638796 - DNA, 25 bp, Homo sapien
aggtgcatctggatgggcgagaccc

SEQ ID NO: 5638797 - DNA, 25 bp, Homo sapien
aaacgaagggaaacagaactagtga

SEQ ID NO: 5638798 - DNA, 25 bp, Homo sapien
tcactagttctgtttcccttcgttt

SEQ ID NO: 5638799 - DNA, 25 bp, Homo sapien
ggaacaagaaacgatacatgatcgg

SEQ ID NO: 5638800 - DNA, 25 bp, Homo sapien
ccgatcatgtatcgtttcttgttcc

SEQ ID NO: 5638801 - DNA, 25 bp, Homo sapien
ccaggggccgtaacggcggacactc

SEQ ID NO: 5638802 - DNA, 25 bp, Homo sapien
gagtgtccgccgttacggcccctgg

SEQ ID NO: 5638803 - DNA, 25 bp, Homo sapien
accgtcagtcgtctatgtaccctag

SEQ ID NO: 5638804 - DNA, 25 bp, Homo sapien
ctagggtacatagacgactgacggt

SEQ ID NO: 5638805 - DNA, 25 bp, Homo sapien
ctctttactcgtgtaggaaaggacc

SEQ ID NO: 5638806 - DNA, 25 bp, Homo sapien
ggtcctttcctacacgagtaaagag

SEQ ID NO: 5638807 - DNA, 25 bp, Homo sapien
aggtcgtgtccatcgttcctgagaa

SEQ ID NO: 5638808 - DNA, 25 bp, Homo sapien
ttctcaggaacgatggacacgacct

SEQ ID NO: 5638809 - DNA, 25 bp, Homo sapien
atagaacttatattctcgagccagt

SEQ ID NO: 5638810 - DNA, 25 bp, Homo sapien
actggctcgagaatataagttctat

SEQ ID NO: 5638811 - DNA, 25 bp, Homo sapien
tagaatgtaattatgtctttaatcg

SEQ ID NO: 5638812 - DNA, 25 bp, Homo sapien
cgattaaagacataattacattcta

SEQ ID NO: 5638813 - DNA, 25 bp, Homo sapien
tggttacaaaatgtgaataatcaat

SEQ ID NO: 5638814 - DNA, 25 bp, Homo sapien
attgattattcacattttgtaacca

SEQ ID NO: 5638815 - DNA, 25 bp, Homo sapien
tggaaataagggttcgtggacaact

SEQ ID NO: 5638816 - DNA, 25 bp, Homo sapien
agttgtccacgaacccttatttcca

SEQ ID NO: 5638817 - DNA, 25 bp, Homo sapien
tccgcatctcctactcgacgatgat

SEQ ID NO: 5638818 - DNA, 25 bp, Homo sapien
atcatcgtcgagtaggagatgcgga

SEQ ID NO: 5638819 - DNA, 25 bp, Homo sapien
ggcgacggagaggagccgaggtggt

SEQ ID NO: 5638820 - DNA, 25 bp, Homo sapien
accacctcggctcctctccgtcgcc

SEQ ID NO: 5638821 - DNA, 25 bp, Homo sapien
tctcgtccggcgtccgtcccgtcgg

SEQ ID NO: 5638822 - DNA, 25 bp, Homo sapien
ccgacgggacggacgccggacgaga

SEQ ID NO: 5638823 - DNA, 25 bp, Homo sapien
gtgccccgagcctctccgctactgg

SEQ ID NO: 5638824 - DNA, 25 bp, Homo sapien
ccagtagcggagaggctcggggcac

SEQ ID NO: 5638825 - DNA, 25 bp, Homo sapien
aagaatattagtcagaattagtcac

SEQ ID NO: 5638826 - DNA, 25 bp, Homo sapien
gtgactaattctgactaatattctt

SEQ ID NO: 5638827 - DNA, 25 bp, Homo sapien
aaaagaatattagtcagaattagtc

SEQ ID NO: 5638828 - DNA, 25 bp, Homo sapien
gactaattctgactaatattctttt

SEQ ID NO: 5638829 - DNA, 25 bp, Homo sapien
cctgcgagccatggggcgcggcgag

SEQ ID NO: 5638830 - DNA, 25 bp, Homo sapien
ctcgccgcgccccatggctcgcagg

SEQ ID NO: 5638831 - DNA, 25 bp, Homo sapien
ggcctgcgagccatggggcgcggcg

SEQ ID NO: 5638832 - DNA, 25 bp, Homo sapien
cgccgcgccccatggctcgcaggcc

SEQ ID NO: 5638833 - DNA, 25 bp, Homo sapien
gccaccgacccccgtcgtctccacc

SEQ ID NO: 5638834 - DNA, 25 bp, Homo sapien
ggtggagacgacgggggtcggtggc

SEQ ID NO: 5638835 - DNA, 25 bp, Homo sapien
accattattgtgttgattgtagagg

SEQ ID NO: 5638836 - DNA, 25 bp, Homo sapien
cctctacaatcaacacaataatggt

SEQ ID NO: 5638837 - DNA, 25 bp, Homo sapien
gtgccagcccgtcgcggttcgggag

SEQ ID NO: 5638838 - DNA, 25 bp, Homo sapien
ctcccgaaccgcgacgggctggcac

SEQ ID NO: 5638839 - DNA, 25 bp, Homo sapien
gcgtgccagcccgtcgcggttcggg

SEQ ID NO: 5638840 - DNA, 25 bp, Homo sapien
cccgaaccgcgacgggctggcacgc

SEQ ID NO: 5638841 - DNA, 25 bp, Homo sapien
acctgggaggcaggaccgtaacagg

SEQ ID NO: 5638842 - DNA, 25 bp, Homo sapien
cctgttacggtcctgcctcccaggt

SEQ ID NO: 5638843 - DNA, 25 bp, Homo sapien
aactaacacagtaatctaagaaaaa

SEQ ID NO: 5638844 - DNA, 25 bp, Homo sapien
tttttcttagattactgtgttagtt

SEQ ID NO: 5638845 - DNA, 25 bp, Homo sapien
gaactttatgatacctacaatttct

SEQ ID NO: 5638846 - DNA, 25 bp, Homo sapien
agaaattgtaggtatcataaagttc

SEQ ID NO: 5638847 - DNA, 25 bp, Homo sapien
acttgcacgacgagtgcccatccgt

SEQ ID NO: 5638848 - DNA, 25 bp, Homo sapien
acggatgggcactcgtcgtgcaagt

SEQ ID NO: 5638849 - DNA, 25 bp, Homo sapien
agtgtccgaccccatctgtattgtc

SEQ ID NO: 5638850 - DNA, 25 bp, Homo sapien
gacaatacagatggggtcggacact

SEQ ID NO: 5638851 - DNA, 25 bp, Homo sapien
gaagattattgacattctatccgac

SEQ ID NO: 5638852 - DNA, 25 bp, Homo sapien
gtcggatagaatgtcaataatcttc

SEQ ID NO: 5638853 - DNA, 25 bp, Homo sapien
cggatcccgtcgcagaacgttttgt

SEQ ID NO: 5638854 - DNA, 25 bp, Homo sapien
acaaaacgttctgcgacgggatccg

SEQ ID NO: 5638855 - DNA, 25 bp, Homo sapien
gaggtaatgatccataaaattcaac

SEQ ID NO: 5638856 - DNA, 25 bp, Homo sapien
gttgaattttatggatcattacctc

SEQ ID NO: 5638857 - DNA, 25 bp, Homo sapien
acatctgctagggtcgaggggcccg

SEQ ID NO: 5638858 - DNA, 25 bp, Homo sapien
cgggcccctcgaccctagcagatgt

SEQ ID NO: 5638859 - DNA, 25 bp, Homo sapien
tctcggtggttccaaccccctgtcc

SEQ ID NO: 5638860 - DNA, 25 bp, Homo sapien
ggacagggggttggaaccaccgaga

SEQ ID NO: 5638861 - DNA, 25 bp, Homo sapien
gaagaccactaccccgatctcctaa

SEQ ID NO: 5638862 - DNA, 25 bp, Homo sapien
ttaggagatcggggtagtggtcttc

SEQ ID NO: 5638863 - DNA, 25 bp, Homo sapien
acgtgtcttttctctagatttaata

SEQ ID NO: 5638864 - DNA, 25 bp, Homo sapien
tattaaatctagagaaaagacacgt

SEQ ID NO: 5638865 - DNA, 25 bp, Homo sapien
agctcctttaggttccctcacacga

SEQ ID NO: 5638866 - DNA, 25 bp, Homo sapien
tcgtgtgagggaacctaaaggagct

SEQ ID NO: 5638867 - DNA, 25 bp, Homo sapien
tcctgtgtctcacggcggagcacag

SEQ ID NO: 5638868 - DNA, 25 bp, Homo sapien
ctgtgctccgccgtgagacacagga

SEQ ID NO: 5638869 - DNA, 25 bp, Homo sapien
ttctttccggagatgtttaagtttc

SEQ ID NO: 5638870 - DNA, 25 bp, Homo sapien
gaaacttaaacatctccggaaagaa

SEQ ID NO: 5638871 - DNA, 25 bp, Homo sapien
ggccgcttccgacgccgactggtcc

SEQ ID NO: 5638872 - DNA, 25 bp, Homo sapien
ggaccagtcggcgtcggaagcggcc

SEQ ID NO: 5638873 - DNA, 25 bp, Homo sapien
ccacgactagaccgaaagtcctcta

SEQ ID NO: 5638874 - DNA, 25 bp, Homo sapien
tagaggactttcggtctagtcgtgg

SEQ ID NO: 5638875 - DNA, 25 bp, Homo sapien
tgaaagtgattccaaacaggtcaga

SEQ ID NO: 5638876 - DNA, 25 bp, Homo sapien
tctgacctgtttggaatcactttca

SEQ ID NO: 5638877 - DNA, 25 bp, Homo sapien
actaaaaacagaggaactaataaca

SEQ ID NO: 5638878 - DNA, 25 bp, Homo sapien
tgttattagttcctctgtttttagt

SEQ ID NO: 5638879 - DNA, 25 bp, Homo sapien
cgaggtgcctggagcttacgtcgtc

SEQ ID NO: 5638880 - DNA, 25 bp, Homo sapien
gacgacgtaagctccaggcacctcg

SEQ ID NO: 5638881 - DNA, 25 bp, Homo sapien
ggactcgtcggccacgggtgacggg

SEQ ID NO: 5638882 - DNA, 25 bp, Homo sapien
cccgtcacccgtggccgacgagtcc

SEQ ID NO: 5638883 - DNA, 25 bp, Homo sapien
cgtcagtggtacagatcagatcgac

SEQ ID NO: 5638884 - DNA, 25 bp, Homo sapien
gtcgatctgatctgtaccactgacg

SEQ ID NO: 5638885 - DNA, 25 bp, Homo sapien
gtctccgacaagtctctcatagaat

SEQ ID NO: 5638886 - DNA, 25 bp, Homo sapien
attctatgagagacttgtcggagac

SEQ ID NO: 5638887 - DNA, 25 bp, Homo sapien
aagaagtaacaatcaaatcgctata

SEQ ID NO: 5638888 - DNA, 25 bp, Homo sapien
tatagcgatttgattgttacttctt

SEQ ID NO: 5638889 - DNA, 25 bp, Homo sapien
ctctactcggcccctccgactcgtg

SEQ ID NO: 5638890 - DNA, 25 bp, Homo sapien
cacgagtcggaggggccgagtagag

SEQ ID NO: 5638891 - DNA, 25 bp, Homo sapien
aatcattagataacggtattattat

SEQ ID NO: 5638892 - DNA, 25 bp, Homo sapien
ataataataccgttatctaatgatt

SEQ ID NO: 5638893 - DNA, 25 bp, Homo sapien
agtggaataaccgtcgtatcgaaac

SEQ ID NO: 5638894 - DNA, 25 bp, Homo sapien
gtttcgatacgacggttattccact

SEQ ID NO: 5638895 - DNA, 25 bp, Homo sapien
ccataactcacccagtcacgtgcac

SEQ ID NO: 5638896 - DNA, 25 bp, Homo sapien
gtgcacgtgactgggtgagttatgg

SEQ ID NO: 5638897 - DNA, 25 bp, Homo sapien
acatacttgtctatatagtgctact

SEQ ID NO: 5638898 - DNA, 25 bp, Homo sapien
agtagcactatatagacaagtatgt

SEQ ID NO: 5638899 - DNA, 25 bp, Homo sapien
tttctttaagttgtcaaacataaag

SEQ ID NO: 5638900 - DNA, 25 bp, Homo sapien
ctttatgtttgacaacttaaagaaa

SEQ ID NO: 5638901 - DNA, 25 bp, Homo sapien
tacaaatagtgaagattttactact

SEQ ID NO: 5638902 - DNA, 25 bp, Homo sapien
agtagtaaaatcttcactatttgta

SEQ ID NO: 5638903 - DNA, 25 bp, Homo sapien
acgaccgtgtaacttacccctgaga

SEQ ID NO: 5638904 - DNA, 25 bp, Homo sapien
tctcaggggtaagttacacggtcgt

SEQ ID NO: 5638905 - DNA, 25 bp, Homo sapien
tcgtggcgggcctcactgtgaccgt

SEQ ID NO: 5638906 - DNA, 25 bp, Homo sapien
acggtcacagtgaggcccgccacga

SEQ ID NO: 5638907 - DNA, 25 bp, Homo sapien
catgacacttcacgtgtacagtagt

SEQ ID NO: 5638908 - DNA, 25 bp, Homo sapien
actactgtacacgtgaagtgtcatg

SEQ ID NO: 5638909 - DNA, 25 bp, Homo sapien
ggaccgtgggctggcgggtgaccca

SEQ ID NO: 5638910 - DNA, 25 bp, Homo sapien
tgggtcacccgccagcccacggtcc

SEQ ID NO: 5638911 - DNA, 25 bp, Homo sapien
tcctccagaatgttcccggagatta

SEQ ID NO: 5638912 - DNA, 25 bp, Homo sapien
taatctccgggaacattctggagga

SEQ ID NO: 5638913 - DNA, 25 bp, Homo sapien
acctagtgacgactcaaacccaggg

SEQ ID NO: 5638914 - DNA, 25 bp, Homo sapien
ccctgggtttgagtcgtcactaggt

SEQ ID NO: 5638915 - DNA, 25 bp, Homo sapien
actgtccacttataccggtgagagt

SEQ ID NO: 5638916 - DNA, 25 bp, Homo sapien
actctcaccggtataagtggacagt

SEQ ID NO: 5638917 - DNA, 25 bp, Homo sapien
aattatatcgtctagaaattggaag

SEQ ID NO: 5638918 - DNA, 25 bp, Homo sapien
cttccaatttctagacgatataatt

SEQ ID NO: 5638919 - DNA, 25 bp, Homo sapien
tctttaagactttcgtgacgggtgt

SEQ ID NO: 5638920 - DNA, 25 bp, Homo sapien
acacccgtcacgaaagtcttaaaga

SEQ ID NO: 5638921 - DNA, 25 bp, Homo sapien
actgttctgtaataggacaacgcca

SEQ ID NO: 5638922 - DNA, 25 bp, Homo sapien
tggcgttgtcctattacagaacagt

SEQ ID NO: 5638923 - DNA, 25 bp, Homo sapien
tcaagtgttttatttggacacaagt

SEQ ID NO: 5638924 - DNA, 25 bp, Homo sapien
acttgtgtccaaataaaacacttga

SEQ ID NO: 5638925 - DNA, 25 bp, Homo sapien
ggggtagcgccagggcgtgccgccg

SEQ ID NO: 5638926 - DNA, 25 bp, Homo sapien
cggcggcacgccctggcgctacccc

SEQ ID NO: 5638927 - DNA, 25 bp, Homo sapien
agggggtagcgccagggcgtgccgc

SEQ ID NO: 5638928 - DNA, 25 bp, Homo sapien
gcggcacgccctggcgctaccccct

SEQ ID NO: 5638929 - DNA, 25 bp, Homo sapien
tagcgccagggcgtgccgccgcctc

SEQ ID NO: 5638930 - DNA, 25 bp, Homo sapien
gaggcggcggcacgccctggcgcta

SEQ ID NO: 5638931 - DNA, 25 bp, Homo sapien
cataaacctatatcaggaaaacgac

SEQ ID NO: 5638932 - DNA, 25 bp, Homo sapien
gtcgttttcctgatataggtttatg

SEQ ID NO: 5638933 - DNA, 25 bp, Homo sapien
taaaaagtactgtcaaaattctctg

SEQ ID NO: 5638934 - DNA, 25 bp, Homo sapien
cagagaattttgacagtacttttta

SEQ ID NO: 5638935 - DNA, 25 bp, Homo sapien
cagagacggtcgttggaggaggcgg

SEQ ID NO: 5638936 - DNA, 25 bp, Homo sapien
ccgcctcctccaacgaccgtctctg

SEQ ID NO: 5638937 - DNA, 25 bp, Homo sapien
gacggtcgttggaggaggcggacgt

SEQ ID NO: 5638938 - DNA, 25 bp, Homo sapien
acgtccgcctcctccaacgaccgtc

SEQ ID NO: 5638939 - DNA, 25 bp, Homo sapien
gttcacatccttcaaatctaagaac

SEQ ID NO: 5638940 - DNA, 25 bp, Homo sapien
gttcttagatttgaaggatgtgaac

SEQ ID NO: 5638941 - DNA, 25 bp, Homo sapien
aagggtgtcaattaatcgtctgtac

SEQ ID NO: 5638942 - DNA, 25 bp, Homo sapien
gtacagacgattaattgacaccctt

SEQ ID NO: 5638943 - DNA, 25 bp, Homo sapien
cgctacttccactatgacctgaact

SEQ ID NO: 5638944 - DNA, 25 bp, Homo sapien
agttcaggtcatagtggaagtagcg

SEQ ID NO: 5638945 - DNA, 25 bp, Homo sapien
ttaaatttgttcagaactgatatgt

SEQ ID NO: 5638946 - DNA, 25 bp, Homo sapien
acatatcagttctgaacaaatttaa

SEQ ID NO: 5638947 - DNA, 25 bp, Homo sapien
gctactgtttactcccactcttctt

SEQ ID NO: 5638948 - DNA, 25 bp, Homo sapien
aagaagagtgggagtaaacagtagc

SEQ ID NO: 5638949 - DNA, 25 bp, Homo sapien
tactcattcatcagagaccgtaggt

SEQ ID NO: 5638950 - DNA, 25 bp, Homo sapien
acctacggtctctgatgaatgagta

SEQ ID NO: 5638951 - DNA, 25 bp, Homo sapien
gaccgatcccgacgggtcggtgacg

SEQ ID NO: 5638952 - DNA, 25 bp, Homo sapien
cgtcaccgacccgtcgggatcggtc

SEQ ID NO: 5638953 - DNA, 25 bp, Homo sapien
ccctgtcccgtcctgccgggtcact

SEQ ID NO: 5638954 - DNA, 25 bp, Homo sapien
agtgacccggcaggacgggacaggg

SEQ ID NO: 5638955 - DNA, 25 bp, Homo sapien
tcccggagaggttcctagagggtac

SEQ ID NO: 5638956 - DNA, 25 bp, Homo sapien
gtaccctctaggaacctctccggga

SEQ ID NO: 5638957 - DNA, 25 bp, Homo sapien
ccggcggtccgaaatcacgggactg

SEQ ID NO: 5638958 - DNA, 25 bp, Homo sapien
cagtcccgtgatttcggaccgccgg

SEQ ID NO: 5638959 - DNA, 25 bp, Homo sapien
agtgaaacgactcatactcagtccg

SEQ ID NO: 5638960 - DNA, 25 bp, Homo sapien
cggactgagtatgagtcgtttcact

SEQ ID NO: 5638961 - DNA, 25 bp, Homo sapien
gccccgtcgcagagtcggaccctgt

SEQ ID NO: 5638962 - DNA, 25 bp, Homo sapien
acagggtccgactctgcgacggggc

SEQ ID NO: 5638963 - DNA, 25 bp, Homo sapien
atcagaagttgagaactaattttat

SEQ ID NO: 5638964 - DNA, 25 bp, Homo sapien
ataaaattagttctcaacttctgat

SEQ ID NO: 5638965 - DNA, 25 bp, Homo sapien
tttaactgctgacattcaaagtaac

SEQ ID NO: 5638966 - DNA, 25 bp, Homo sapien
gttactttgaatgtcagcagttaaa

SEQ ID NO: 5638967 - DNA, 25 bp, Homo sapien
gacctggtcctgctaccggggtggg

SEQ ID NO: 5638968 - DNA, 25 bp, Homo sapien
cccaccccggtagcaggaccaggtc

SEQ ID NO: 5638969 - DNA, 25 bp, Homo sapien
aagtaacgggtgatcctagggtgac

SEQ ID NO: 5638970 - DNA, 25 bp, Homo sapien
gtcaccctaggatcacccgttactt

SEQ ID NO: 5638971 - DNA, 25 bp, Homo sapien
aataactgacacaaactcgtaagga

SEQ ID NO: 5638972 - DNA, 25 bp, Homo sapien
tccttacgagtttgtgtcagttatt

SEQ ID NO: 5638973 - DNA, 25 bp, Homo sapien
gggacgcggtcactggtgctccggg

SEQ ID NO: 5638974 - DNA, 25 bp, Homo sapien
cccggagcaccagtgaccgcgtccc

SEQ ID NO: 5638975 - DNA, 25 bp, Homo sapien
ggtgccgacccagggtctacggtct

SEQ ID NO: 5638976 - DNA, 25 bp, Homo sapien
agaccgtagaccctgggtcggcacc

SEQ ID NO: 5638977 - DNA, 25 bp, Homo sapien
aagagattagtattccactaaaaaa

SEQ ID NO: 5638978 - DNA, 25 bp, Homo sapien
ttttttagtggaatactaatctctt

SEQ ID NO: 5638979 - DNA, 25 bp, Homo sapien
cgtccacccctcgtcgcagggggtg

SEQ ID NO: 5638980 - DNA, 25 bp, Homo sapien
caccccctgcgacgaggggtggacg

SEQ ID NO: 5638981 - DNA, 25 bp, Homo sapien
cacccataaacgtgccgactaccgg

SEQ ID NO: 5638982 - DNA, 25 bp, Homo sapien
ccggtagtcggcacgtttatgggtg

SEQ ID NO: 5638983 - DNA, 25 bp, Homo sapien
agtctcgtccaaatgtacacaccag

SEQ ID NO: 5638984 - DNA, 25 bp, Homo sapien
ctggtgtgtacatttggacgagact

SEQ ID NO: 5638985 - DNA, 25 bp, Homo sapien
caccccagggtcgtcactgcgccca

SEQ ID NO: 5638986 - DNA, 25 bp, Homo sapien
tgggcgcagtgacgaccctggggtg

SEQ ID NO: 5638987 - DNA, 25 bp, Homo sapien
atctgaaacgacacggacctgaaga

SEQ ID NO: 5638988 - DNA, 25 bp, Homo sapien
tcttcaggtccgtgtcgtttcagat

SEQ ID NO: 5638989 - DNA, 25 bp, Homo sapien
ccggtcagcacgcacacaagaggag

SEQ ID NO: 5638990 - DNA, 25 bp, Homo sapien
ctcctcttgtgtgcgtgctgaccgg

SEQ ID NO: 5638991 - DNA, 25 bp, Homo sapien
gcaccgtaacctcgtcccacgtcga

SEQ ID NO: 5638992 - DNA, 25 bp, Homo sapien
tcgacgtgggacgaggttacggtgc

SEQ ID NO: 5638993 - DNA, 25 bp, Homo sapien
tcacggacttcggtggaagagaaga

SEQ ID NO: 5638994 - DNA, 25 bp, Homo sapien
tcttctcttccaccgaagtccgtga

SEQ ID NO: 5638995 - DNA, 25 bp, Homo sapien
agaccgacgtggacgacagggaggg

SEQ ID NO: 5638996 - DNA, 25 bp, Homo sapien
ccctccctgtcgtccacgtcggtct

SEQ ID NO: 5638997 - DNA, 25 bp, Homo sapien
acggttgtggccctctggcgcaccg

SEQ ID NO: 5638998 - DNA, 25 bp, Homo sapien
cggtgcgccagagggccacaaccgt

SEQ ID NO: 5638999 - DNA, 25 bp, Homo sapien
ggaaacctctaaggtgccgaagcct

SEQ ID NO: 5639000 - DNA, 25 bp, Homo sapien
aggcttcggcaccttagaggtttcc

SEQ ID NO: 5639001 - DNA, 25 bp, Homo sapien
cctcttccggttcggccagcacgac

SEQ ID NO: 5639002 - DNA, 25 bp, Homo sapien
gtcgtgctggccgaaccggaagagg

SEQ ID NO: 5639003 - DNA, 25 bp, Homo sapien
gaccaaatgaagaacgtgttaggat

SEQ ID NO: 5639004 - DNA, 25 bp, Homo sapien
atcctaacacgttcttcatttggtc

SEQ ID NO: 5639005 - DNA, 25 bp, Homo sapien
aaagagaagatcatgtagatatact

SEQ ID NO: 5639006 - DNA, 25 bp, Homo sapien
agtatatctacatgatcttctcttt

SEQ ID NO: 5639007 - DNA, 25 bp, Homo sapien
ctttagctcgctattcctgttcgag

SEQ ID NO: 5639008 - DNA, 25 bp, Homo sapien
ctcgaacaggaatagcgagctaaag

SEQ ID NO: 5639009 - DNA, 25 bp, Homo sapien
ccatccaccagacgtatcggaaaat

SEQ ID NO: 5639010 - DNA, 25 bp, Homo sapien
attttccgatacgtctggtggatgg

SEQ ID NO: 5639011 - DNA, 25 bp, Homo sapien
gaccttcgaataggagttgtcggac

SEQ ID NO: 5639012 - DNA, 25 bp, Homo sapien
gtccgacaactcctattcgaaggtc

SEQ ID NO: 5639013 - DNA, 25 bp, Homo sapien
gtccgactccagaaagcctttaact

SEQ ID NO: 5639014 - DNA, 25 bp, Homo sapien
agttaaaggctttctggagtcggac

SEQ ID NO: 5639015 - DNA, 25 bp, Homo sapien
acttttattaagatcctacatacag

SEQ ID NO: 5639016 - DNA, 25 bp, Homo sapien
ctgtatgtaggatcttaataaaagt

SEQ ID NO: 5639017 - DNA, 25 bp, Homo sapien
aagtagacttggtaatggaagaaag

SEQ ID NO: 5639018 - DNA, 25 bp, Homo sapien
ctttcttccattaccaagtctactt

SEQ ID NO: 5639019 - DNA, 25 bp, Homo sapien
tgagccccgccggactctcctgaga

SEQ ID NO: 5639020 - DNA, 25 bp, Homo sapien
tctcaggagagtccggcggggctca

SEQ ID NO: 5639021 - DNA, 25 bp, Homo sapien
gtctcccggggtgagccccgccgga

SEQ ID NO: 5639022 - DNA, 25 bp, Homo sapien
tccggcggggctcaccccgggagac

SEQ ID NO: 5639023 - DNA, 25 bp, Homo sapien
cagtatgtgttaaaattttgtattt

SEQ ID NO: 5639024 - DNA, 25 bp, Homo sapien
aaatacaaaattttaacacatactg

SEQ ID NO: 5639025 - DNA, 25 bp, Homo sapien
acagtatgtgttaaaattttgtatt

SEQ ID NO: 5639026 - DNA, 25 bp, Homo sapien
aatacaaaattttaacacatactgt

SEQ ID NO: 5639027 - DNA, 25 bp, Homo sapien
attattctttctttcactttataag

SEQ ID NO: 5639028 - DNA, 25 bp, Homo sapien
cttataaagtgaaagaaagaataat

SEQ ID NO: 5639029 - DNA, 25 bp, Homo sapien
tctttttacgggtgggtgatctcaa

SEQ ID NO: 5639030 - DNA, 25 bp, Homo sapien
ttgagatcacccacccgtaaaaaga

SEQ ID NO: 5639031 - DNA, 25 bp, Homo sapien
cggttgtttatatgcttgttaatat

SEQ ID NO: 5639032 - DNA, 25 bp, Homo sapien
atattaacaagcatataaacaaccg

SEQ ID NO: 5639033 - DNA, 25 bp, Homo sapien
atattttagactcagacgaaacgaa

SEQ ID NO: 5639034 - DNA, 25 bp, Homo sapien
ttcgtttcgtctgagtctaaaatat

SEQ ID NO: 5639035 - DNA, 25 bp, Homo sapien
tcgacttaaggtagttctgttacac

SEQ ID NO: 5639036 - DNA, 25 bp, Homo sapien
gtgtaacagaactaccttaagtcga

SEQ ID NO: 5639037 - DNA, 25 bp, Homo sapien
cacaattcaatagacacaacaatag

SEQ ID NO: 5639038 - DNA, 25 bp, Homo sapien
ctattgttgtgtctattgaattgtg

SEQ ID NO: 5639039 - DNA, 25 bp, Homo sapien
ggatagtaccagtttacgtgcgtat

SEQ ID NO: 5639040 - DNA, 25 bp, Homo sapien
atacgcacgtaaactggtactatcc

SEQ ID NO: 5639041 - DNA, 25 bp, Homo sapien
tacttcagtgaaaagttcggtacat

SEQ ID NO: 5639042 - DNA, 25 bp, Homo sapien
atgtaccgaacttttcactgaagta

SEQ ID NO: 5639043 - DNA, 25 bp, Homo sapien
ggccctaaggtgcacatccacatgt

SEQ ID NO: 5639044 - DNA, 25 bp, Homo sapien
acatgtggatgtgcaccttagggcc

SEQ ID NO: 5639045 - DNA, 25 bp, Homo sapien
cagttatgctggagactccaagagg

SEQ ID NO: 5639046 - DNA, 25 bp, Homo sapien
cctcttggagtctccagcataactg

SEQ ID NO: 5639047 - DNA, 25 bp, Homo sapien
gatatttaggtataactcaaaaaaa

SEQ ID NO: 5639048 - DNA, 25 bp, Homo sapien
tttttttgagttatacctaaatatc

SEQ ID NO: 5639049 - DNA, 25 bp, Homo sapien
gaccggcgtctgagcaggcgacttc

SEQ ID NO: 5639050 - DNA, 25 bp, Homo sapien
gaagtcgcctgctcagacgccggtc

SEQ ID NO: 5639051 - DNA, 25 bp, Homo sapien
tctgagcaggcgacttccggacccg

SEQ ID NO: 5639052 - DNA, 25 bp, Homo sapien
cgggtccggaagtcgcctgctcaga

SEQ ID NO: 5639053 - DNA, 25 bp, Homo sapien
ttccctacaagtaaatcctatttta

SEQ ID NO: 5639054 - DNA, 25 bp, Homo sapien
taaaataggatttacttgtagggaa

SEQ ID NO: 5639055 - DNA, 25 bp, Homo sapien
ggctcagtcccgccgggccgacccg

SEQ ID NO: 5639056 - DNA, 25 bp, Homo sapien
cgggtcggcccggcgggactgagcc

SEQ ID NO: 5639057 - DNA, 25 bp, Homo sapien
acgaactagcaggtacttgtgacac

SEQ ID NO: 5639058 - DNA, 25 bp, Homo sapien
gtgtcacaagtacctgctagttcgt

SEQ ID NO: 5639059 - DNA, 25 bp, Homo sapien
gtggacccagtgtgtgtcgtccccg

SEQ ID NO: 5639060 - DNA, 25 bp, Homo sapien
cggggacgacacacactgggtccac

SEQ ID NO: 5639061 - DNA, 25 bp, Homo sapien
aggtcaaagagagaagcatacatag

SEQ ID NO: 5639062 - DNA, 25 bp, Homo sapien
ctatgtatgcttctctctttgacct

SEQ ID NO: 5639063 - DNA, 25 bp, Homo sapien
taggacatgtagtaatttaacaagg

SEQ ID NO: 5639064 - DNA, 25 bp, Homo sapien
ccttgttaaattactacatgtccta

SEQ ID NO: 5639065 - DNA, 25 bp, Homo sapien
tcgagatccgtcaggacgggttaaa

SEQ ID NO: 5639066 - DNA, 25 bp, Homo sapien
tttaacccgtcctgacggatctcga

SEQ ID NO: 5639067 - DNA, 25 bp, Homo sapien
tactctcggcggagaacctgcacgt

SEQ ID NO: 5639068 - DNA, 25 bp, Homo sapien
acgtgcaggttctccgccgagagta

SEQ ID NO: 5639069 - DNA, 25 bp, Homo sapien
accggtccatgaactgttccgttca

SEQ ID NO: 5639070 - DNA, 25 bp, Homo sapien
tgaacggaacagttcatggaccggt

SEQ ID NO: 5639071 - DNA, 25 bp, Homo sapien
tttagagtgaaaagggacgtactcg

SEQ ID NO: 5639072 - DNA, 25 bp, Homo sapien
cgagtacgtcccttttcactctaaa

SEQ ID NO: 5639073 - DNA, 25 bp, Homo sapien
accagtcaagagtcttccgcggtgt

SEQ ID NO: 5639074 - DNA, 25 bp, Homo sapien
acaccgcggaagactcttgactggt

SEQ ID NO: 5639075 - DNA, 25 bp, Homo sapien
gagggcggacgggaggacgagggtg

SEQ ID NO: 5639076 - DNA, 25 bp, Homo sapien
caccctcgtcctcccgtccgccctc

SEQ ID NO: 5639077 - DNA, 25 bp, Homo sapien
tcaagactactatgatgaatcccgt

SEQ ID NO: 5639078 - DNA, 25 bp, Homo sapien
acgggattcatcatagtagtcttga

SEQ ID NO: 5639079 - DNA, 25 bp, Homo sapien
ctcctcatttaatagtcgtttagtc

SEQ ID NO: 5639080 - DNA, 25 bp, Homo sapien
gactaaacgactattaaatgaggag

SEQ ID NO: 5639081 - DNA, 25 bp, Homo sapien
aagaagggtcgtcagaaacttaaga

SEQ ID NO: 5639082 - DNA, 25 bp, Homo sapien
tcttaagtttctgacgacccttctt

SEQ ID NO: 5639083 - DNA, 25 bp, Homo sapien
cggttcagtcattgccattataagg

SEQ ID NO: 5639084 - DNA, 25 bp, Homo sapien
ccttataatggcaatgactgaaccg

SEQ ID NO: 5639085 - DNA, 25 bp, Homo sapien
gaggtcgtcgccggagagtaggggt

SEQ ID NO: 5639086 - DNA, 25 bp, Homo sapien
acccctactctccggcgacgacctc

SEQ ID NO: 5639087 - DNA, 25 bp, Homo sapien
tttctacggttacacgttggaattg

SEQ ID NO: 5639088 - DNA, 25 bp, Homo sapien
caattccaacgtgtaaccgtagaaa

SEQ ID NO: 5639089 - DNA, 25 bp, Homo sapien
atatggctaaggaattgtattttcg

SEQ ID NO: 5639090 - DNA, 25 bp, Homo sapien
cgaaaatacaattccttagccatat

SEQ ID NO: 5639091 - DNA, 25 bp, Homo sapien
aagacgtcgtgatctcctcacgtac

SEQ ID NO: 5639092 - DNA, 25 bp, Homo sapien
gtacgtgaggagatcacgacgtctt

SEQ ID NO: 5639093 - DNA, 25 bp, Homo sapien
taaagtccaaatagttagtatgagt

SEQ ID NO: 5639094 - DNA, 25 bp, Homo sapien
actcatactaactatttggacttta

SEQ ID NO: 5639095 - DNA, 25 bp, Homo sapien
aaaaagacagagactgcggtactgg

SEQ ID NO: 5639096 - DNA, 25 bp, Homo sapien
ccagtaccgcagtctctgtcttttt

SEQ ID NO: 5639097 - DNA, 25 bp, Homo sapien
aaaccagtgttaaattaccttatga

SEQ ID NO: 5639098 - DNA, 25 bp, Homo sapien
tcataaggtaatttaacactggttt

SEQ ID NO: 5639099 - DNA, 25 bp, Homo sapien
taggaagtattgttgattcagaagg

SEQ ID NO: 5639100 - DNA, 25 bp, Homo sapien
ccttctgaatcaacaatacttccta

SEQ ID NO: 5639101 - DNA, 25 bp, Homo sapien
gtgggcctccgcacatgtctccggt

SEQ ID NO: 5639102 - DNA, 25 bp, Homo sapien
accggagacatgtgcggaggcccac

SEQ ID NO: 5639103 - DNA, 25 bp, Homo sapien
ggatgccgtcgactacttgtccggg

SEQ ID NO: 5639104 - DNA, 25 bp, Homo sapien
cccggacaagtagtcgacggcatcc

SEQ ID NO: 5639105 - DNA, 25 bp, Homo sapien
gttaggttattacattaatgtagtt

SEQ ID NO: 5639106 - DNA, 25 bp, Homo sapien
aactacattaatgtaataacctaac

SEQ ID NO: 5639107 - DNA, 25 bp, Homo sapien
cgagaatacttgtgttcaggaggat

SEQ ID NO: 5639108 - DNA, 25 bp, Homo sapien
atcctcctgaacacaagtattctcg

SEQ ID NO: 5639109 - DNA, 25 bp, Homo sapien
tccgaacgaccctgggtgcgtcggg

SEQ ID NO: 5639110 - DNA, 25 bp, Homo sapien
cccgacgcacccagggtcgttcgga

SEQ ID NO: 5639111 - DNA, 25 bp, Homo sapien
ggccgccggcgcatctgcgcgtcca

SEQ ID NO: 5639112 - DNA, 25 bp, Homo sapien
tggacgcgcagatgcgccggcggcc

SEQ ID NO: 5639113 - DNA, 25 bp, Homo sapien
gactttggtccattttcgctcgttg

SEQ ID NO: 5639114 - DNA, 25 bp, Homo sapien
caacgagcgaaaatggaccaaagtc

SEQ ID NO: 5639115 - DNA, 25 bp, Homo sapien
aacccgtgaggcgacaccggacgtc

SEQ ID NO: 5639116 - DNA, 25 bp, Homo sapien
gacgtccggtgtcgcctcacgggtt

SEQ ID NO: 5639117 - DNA, 25 bp, Homo sapien
gtggccttctggactttcttacgac

SEQ ID NO: 5639118 - DNA, 25 bp, Homo sapien
gtcgtaagaaagtccagaaggccac

SEQ ID NO: 5639119 - DNA, 25 bp, Homo sapien
agaggtgggtcgcactccgcgtagt

SEQ ID NO: 5639120 - DNA, 25 bp, Homo sapien
actacgcggagtgcgacccacctct

SEQ ID NO: 5639121 - DNA, 25 bp, Homo sapien
gaccttactgaagtcttctttctcg

SEQ ID NO: 5639122 - DNA, 25 bp, Homo sapien
cgagaaagaagacttcagtaaggtc

SEQ ID NO: 5639123 - DNA, 25 bp, Homo sapien
taggtgtccggttcttaggtcagga

SEQ ID NO: 5639124 - DNA, 25 bp, Homo sapien
tcctgacctaagaaccggacaccta

SEQ ID NO: 5639125 - DNA, 25 bp, Homo sapien
cggccctgtgggtacctgagcccga

SEQ ID NO: 5639126 - DNA, 25 bp, Homo sapien
tcgggctcaggtacccacagggccg

SEQ ID NO: 5639127 - DNA, 25 bp, Homo sapien
ggacggtccggccgagtagactggg

SEQ ID NO: 5639128 - DNA, 25 bp, Homo sapien
cccagtctactcggccggaccgtcc

SEQ ID NO: 5639129 - DNA, 25 bp, Homo sapien
cttgttctctgctcctcaccgtcgg

SEQ ID NO: 5639130 - DNA, 25 bp, Homo sapien
ccgacggtgaggagcagagaacaag

SEQ ID NO: 5639131 - DNA, 25 bp, Homo sapien
tttgactgtcgaggtaaaactataa

SEQ ID NO: 5639132 - DNA, 25 bp, Homo sapien
ttatagttttacctcgacagtcaaa

SEQ ID NO: 5639133 - DNA, 25 bp, Homo sapien
accacatagtccctactacaacggg

SEQ ID NO: 5639134 - DNA, 25 bp, Homo sapien
cccgttgtagtagggactatgtggt

SEQ ID NO: 5639135 - DNA, 25 bp, Homo sapien
tatttacattgtaggtgattgaaac

SEQ ID NO: 5639136 - DNA, 25 bp, Homo sapien
gtttcaatcacctacaatgtaaata

SEQ ID NO: 5639137 - DNA, 25 bp, Homo sapien
acgtataaagcttctcggacccaaa

SEQ ID NO: 5639138 - DNA, 25 bp, Homo sapien
tttgggtccgagaagctttatacgt

SEQ ID NO: 5639139 - DNA, 25 bp, Homo sapien
catttctctcaaagtacgggagaga

SEQ ID NO: 5639140 - DNA, 25 bp, Homo sapien
tctctcccgtactttgagagaaatg

SEQ ID NO: 5639141 - DNA, 25 bp, Homo sapien
tcacgggtcactgcctggaccccag

SEQ ID NO: 5639142 - DNA, 25 bp, Homo sapien
ctggggtccaggcagtgacccgtga

SEQ ID NO: 5639143 - DNA, 25 bp, Homo sapien
agggcgcggcgcactcccgccgacc

SEQ ID NO: 5639144 - DNA, 25 bp, Homo sapien
ggtcggcgggagtgcgccgcgccct

SEQ ID NO: 5639145 - DNA, 25 bp, Homo sapien
agtacaacgcctaacgagaaaaaca

SEQ ID NO: 5639146 - DNA, 25 bp, Homo sapien
tgtttttctcgttaggcgttgtact

SEQ ID NO: 5639147 - DNA, 25 bp, Homo sapien
gccgacgactgcagtgtctcctcgg

SEQ ID NO: 5639148 - DNA, 25 bp, Homo sapien
ccgaggagacactgcagtcgtcggc

SEQ ID NO: 5639149 - DNA, 25 bp, Homo sapien
gagggaaagcgtcgcagggaggtcg

SEQ ID NO: 5639150 - DNA, 25 bp, Homo sapien
cgacctccctgcgacgctttccctc

SEQ ID NO: 5639151 - DNA, 25 bp, Homo sapien
gagagactccgctcccggccgcgta

SEQ ID NO: 5639152 - DNA, 25 bp, Homo sapien
tacgcggccgggagcggagtctctc

SEQ ID NO: 5639153 - DNA, 25 bp, Homo sapien
gttcgagagactccgctcccggccg

SEQ ID NO: 5639154 - DNA, 25 bp, Homo sapien
cggccgggagcggagtctctcgaac

SEQ ID NO: 5639155 - DNA, 25 bp, Homo sapien
tctgcctcccgcgaccccttccgtc

SEQ ID NO: 5639156 - DNA, 25 bp, Homo sapien
gacggaaggggtcgcgggaggcaga

SEQ ID NO: 5639157 - DNA, 25 bp, Homo sapien
tgaagttgactagggttaaaagtct

SEQ ID NO: 5639158 - DNA, 25 bp, Homo sapien
agacttttaaccctagtcaacttca

SEQ ID NO: 5639159 - DNA, 25 bp, Homo sapien
gtgtccgttagagtatctcccgtgt

SEQ ID NO: 5639160 - DNA, 25 bp, Homo sapien
acacgggagatactctaacggacac

SEQ ID NO: 5639161 - DNA, 25 bp, Homo sapien
acagtccgggtcaagcccccggtga

SEQ ID NO: 5639162 - DNA, 25 bp, Homo sapien
tcaccgggggcttgacccggactgt

SEQ ID NO: 5639163 - DNA, 25 bp, Homo sapien
gacactcgggctgagtcggtccacc

SEQ ID NO: 5639164 - DNA, 25 bp, Homo sapien
ggtggaccgactcagcccgagtgtc

SEQ ID NO: 5639165 - DNA, 25 bp, Homo sapien
tttccaagaaaacactcggtcctag

SEQ ID NO: 5639166 - DNA, 25 bp, Homo sapien
ctaggaccgagtgttttcttggaaa

SEQ ID NO: 5639167 - DNA, 25 bp, Homo sapien
tacgcttgccgacgaaactataact

SEQ ID NO: 5639168 - DNA, 25 bp, Homo sapien
agttatagtttcgtcggcaagcgta

SEQ ID NO: 5639169 - DNA, 25 bp, Homo sapien
ctgttctgtggttggtgtgctctag

SEQ ID NO: 5639170 - DNA, 25 bp, Homo sapien
ctagagcacaccaaccacagaacag

SEQ ID NO: 5639171 - DNA, 25 bp, Homo sapien
tcgggtaaacagtcatagtaaacgt

SEQ ID NO: 5639172 - DNA, 25 bp, Homo sapien
acgtttactatgactgtttacccga

SEQ ID NO: 5639173 - DNA, 25 bp, Homo sapien
cctaaggacctaaagaacttgtgac

SEQ ID NO: 5639174 - DNA, 25 bp, Homo sapien
gtcacaagttctttaggtccttagg

SEQ ID NO: 5639175 - DNA, 25 bp, Homo sapien
cgatacgtaggaaatcagtgccaac

SEQ ID NO: 5639176 - DNA, 25 bp, Homo sapien
gttggcactgatttcctacgtatcg

SEQ ID NO: 5639177 - DNA, 25 bp, Homo sapien
cacatctgtgaactgcgacttgcag

SEQ ID NO: 5639178 - DNA, 25 bp, Homo sapien
ctgcaagtcgcagttcacagatgtg

SEQ ID NO: 5639179 - DNA, 25 bp, Homo sapien
ccaaggtgaatagtgttagtgttta

SEQ ID NO: 5639180 - DNA, 25 bp, Homo sapien
taaacactaacactattcaccttgg

SEQ ID NO: 5639181 - DNA, 25 bp, Homo sapien
tccatcctgactcagaatctgatac

SEQ ID NO: 5639182 - DNA, 25 bp, Homo sapien
gtatcagattctgagtcaggatgga

SEQ ID NO: 5639183 - DNA, 25 bp, Homo sapien
agtaatcagttgaagtgttgataat

SEQ ID NO: 5639184 - DNA, 25 bp, Homo sapien
attatcaacacttcaactgattact

SEQ ID NO: 5639185 - DNA, 25 bp, Homo sapien
gagaatgtgaagtcctcatcggaga

SEQ ID NO: 5639186 - DNA, 25 bp, Homo sapien
tctccgatgaggacttcacattctc

SEQ ID NO: 5639187 - DNA, 25 bp, Homo sapien
tagttcggtcaaatttattctgtat

SEQ ID NO: 5639188 - DNA, 25 bp, Homo sapien
atacagaataaatttgaccgaacta

SEQ ID NO: 5639189 - DNA, 25 bp, Homo sapien
tctgtaaaaatgttaacgatatttg

SEQ ID NO: 5639190 - DNA, 25 bp, Homo sapien
caaatatcgttaacatttttacaga

SEQ ID NO: 5639191 - DNA, 25 bp, Homo sapien
gtatgtgcccaaaacctaaaggtgt

SEQ ID NO: 5639192 - DNA, 25 bp, Homo sapien
acacctttaggttttgggcacatac

SEQ ID NO: 5639193 - DNA, 25 bp, Homo sapien
gtagtccctgggtacaacgtgtaag

SEQ ID NO: 5639194 - DNA, 25 bp, Homo sapien
cttacacgttgtacccagggactac

SEQ ID NO: 5639195 - DNA, 25 bp, Homo sapien
gaacccgtagatcatgggtccatgt

SEQ ID NO: 5639196 - DNA, 25 bp, Homo sapien
acatggacccatgatctacgggttc

SEQ ID NO: 5639197 - DNA, 25 bp, Homo sapien
gtaccgtcaccaccgaggcccggtg

SEQ ID NO: 5639198 - DNA, 25 bp, Homo sapien
caccgggcctcggtggtgacggtac

SEQ ID NO: 5639199 - DNA, 25 bp, Homo sapien
ccaaggagcacgcaccttaggtcgt

SEQ ID NO: 5639200 - DNA, 25 bp, Homo sapien
acgacctaaggtgcgtgctccttgg

SEQ ID NO: 5639201 - DNA, 25 bp, Homo sapien
tccatgagcgtacccgtacagtgac

SEQ ID NO: 5639202 - DNA, 25 bp, Homo sapien
gtcactgtacgggtacgctcatgga

SEQ ID NO: 5639203 - DNA, 25 bp, Homo sapien
cctcgacagaaccattaaatcactg

SEQ ID NO: 5639204 - DNA, 25 bp, Homo sapien
cagtgatttaatggttctgtcgagg

SEQ ID NO: 5639205 - DNA, 25 bp, Homo sapien
gcggggaccatgggcgtaccggaga

SEQ ID NO: 5639206 - DNA, 25 bp, Homo sapien
tctccggtacgcccatggtccccgc

SEQ ID NO: 5639207 - DNA, 25 bp, Homo sapien
tccaacccgcagacgtacagttcgg

SEQ ID NO: 5639208 - DNA, 25 bp, Homo sapien
ccgaactgtacgtctgcgggttgga

SEQ ID NO: 5639209 - DNA, 25 bp, Homo sapien
ccagaaaggaccagtggtaacgtag

SEQ ID NO: 5639210 - DNA, 25 bp, Homo sapien
ctacgttaccactggtcctttctgg

SEQ ID NO: 5639211 - DNA, 25 bp, Homo sapien
gggcactacccgtgctgtcctcgga

SEQ ID NO: 5639212 - DNA, 25 bp, Homo sapien
tccgaggacagcacgggtagtgccc

SEQ ID NO: 5639213 - DNA, 25 bp, Homo sapien
ttacaggaggtattactattagttc

SEQ ID NO: 5639214 - DNA, 25 bp, Homo sapien
gaactaatagtaatacctcctgtaa

SEQ ID NO: 5639215 - DNA, 25 bp, Homo sapien
caagtgatcgtatttaggtagtcaa

SEQ ID NO: 5639216 - DNA, 25 bp, Homo sapien
ttgactacctaaatacgatcacttg

SEQ ID NO: 5639217 - DNA, 25 bp, Homo sapien
tggatataaaacttgacatcggtgg

SEQ ID NO: 5639218 - DNA, 25 bp, Homo sapien
ccaccgatgtcaagttttatatcca

SEQ ID NO: 5639219 - DNA, 25 bp, Homo sapien
tgtgtcgccgtaaccacgcccagtg

SEQ ID NO: 5639220 - DNA, 25 bp, Homo sapien
cactgggcgtggttacggcgacaca

SEQ ID NO: 5639221 - DNA, 25 bp, Homo sapien
ttgaagtacagaactataggttaat

SEQ ID NO: 5639222 - DNA, 25 bp, Homo sapien
attaacctatagttctgtacttcaa

SEQ ID NO: 5639223 - DNA, 25 bp, Homo sapien
gtcgaaggtttgactatctcagtat

SEQ ID NO: 5639224 - DNA, 25 bp, Homo sapien
atactgagatagtcaaaccttcgac

SEQ ID NO: 5639225 - DNA, 25 bp, Homo sapien
ttcgaaggtagcggtacctctgtcg

SEQ ID NO: 5639226 - DNA, 25 bp, Homo sapien
cgacagaggtaccgctaccttcgaa

SEQ ID NO: 5639227 - DNA, 25 bp, Homo sapien
agggcaccgacgacacttaccggta

SEQ ID NO: 5639228 - DNA, 25 bp, Homo sapien
taccggtaagtgtcgtcggtgccct

SEQ ID NO: 5639229 - DNA, 25 bp, Homo sapien
cgtaaaagtcaaagatactacaaat

SEQ ID NO: 5639230 - DNA, 25 bp, Homo sapien
atttgtagtatctttgacttttacg

SEQ ID NO: 5639231 - DNA, 25 bp, Homo sapien
taactcataaattccgtgtcgacac

SEQ ID NO: 5639232 - DNA, 25 bp, Homo sapien
gtgtcgacacggaatttatgagtta

SEQ ID NO: 5639233 - DNA, 25 bp, Homo sapien
tcagggacctaccacgttatcgtcg

SEQ ID NO: 5639234 - DNA, 25 bp, Homo sapien
cgacgataacgtggtaggtccctga

SEQ ID NO: 5639235 - DNA, 25 bp, Homo sapien
cccctgtggttcacgaggggcctcg

SEQ ID NO: 5639236 - DNA, 25 bp, Homo sapien
cgaggcccctcgtgaaccacagggg

SEQ ID NO: 5639237 - DNA, 25 bp, Homo sapien
acttactgaggacactaccatctcc

SEQ ID NO: 5639238 - DNA, 25 bp, Homo sapien
ggagatggtagtgtcctcagtaagt

SEQ ID NO: 5639239 - DNA, 25 bp, Homo sapien
tcccaccgcccttccgcccgacacg

SEQ ID NO: 5639240 - DNA, 25 bp, Homo sapien
cgtgtcgggcggaagggcggtggga

SEQ ID NO: 5639241 - DNA, 25 bp, Homo sapien
ccgtgtgtgcagtcggaggcaggtg

SEQ ID NO: 5639242 - DNA, 25 bp, Homo sapien
cacctgcctccgactgcacacacgg

SEQ ID NO: 5639243 - DNA, 25 bp, Homo sapien
gccgcccgtggttacagacacgtca

SEQ ID NO: 5639244 - DNA, 25 bp, Homo sapien
tgacgtgtctgtaaccacgggcggc

SEQ ID NO: 5639245 - DNA, 25 bp, Homo sapien
tgaagtgttcgaaggccccctgcac

SEQ ID NO: 5639246 - DNA, 25 bp, Homo sapien
gtgcagggggccttcgaacacttca

SEQ ID NO: 5639247 - DNA, 25 bp, Homo sapien
ttgaaaggttgagaaaatactcatg

SEQ ID NO: 5639248 - DNA, 25 bp, Homo sapien
catgagtattttctcaacctttcaa

SEQ ID NO: 5639249 - DNA, 25 bp, Homo sapien
cggacaagaacctggagaccgacgt

SEQ ID NO: 5639250 - DNA, 25 bp, Homo sapien
acgtcggtctccaggttcttgtccg

SEQ ID NO: 5639251 - DNA, 25 bp, Homo sapien
acgttcagctcactattgactctat

SEQ ID NO: 5639252 - DNA, 25 bp, Homo sapien
atagagtcaatagtgagctgaacgt

SEQ ID NO: 5639253 - DNA, 25 bp, Homo sapien
cgctccggctgaagcgaagaggtca

SEQ ID NO: 5639254 - DNA, 25 bp, Homo sapien
tgacctcttcgcttcagccggagcg

SEQ ID NO: 5639255 - DNA, 25 bp, Homo sapien
tacgcacaactcctacccaggtcca

SEQ ID NO: 5639256 - DNA, 25 bp, Homo sapien
tggacctgggtaggagttgtgcgta

SEQ ID NO: 5639257 - DNA, 25 bp, Homo sapien
gaccgaggacattccctaaggagtt

SEQ ID NO: 5639258 - DNA, 25 bp, Homo sapien
aactccttagggaatgtcctcggtc

SEQ ID NO: 5639259 - DNA, 25 bp, Homo sapien
gtaccgtaaagcctggaggtctctt

SEQ ID NO: 5639260 - DNA, 25 bp, Homo sapien
aagagacctccaggctttacggtac

SEQ ID NO: 5639261 - DNA, 25 bp, Homo sapien
ctacgtgtgggagttttagacgagt

SEQ ID NO: 5639262 - DNA, 25 bp, Homo sapien
actcgtctaaaactcccacacgtag

SEQ ID NO: 5639263 - DNA, 25 bp, Homo sapien
cggtgagctacctagagtcggtcct

SEQ ID NO: 5639264 - DNA, 25 bp, Homo sapien
aggaccgactctaggtagctcaccg

SEQ ID NO: 5639265 - DNA, 25 bp, Homo sapien
tcggttaattgacatgaaacaaagg

SEQ ID NO: 5639266 - DNA, 25 bp, Homo sapien
cctttgtttcatgtcaattaaccga

SEQ ID NO: 5639267 - DNA, 25 bp, Homo sapien
cgtctacacatacgaacggtcttaa

SEQ ID NO: 5639268 - DNA, 25 bp, Homo sapien
ttaagaccgttcgtatgtgtagacg

SEQ ID NO: 5639269 - DNA, 25 bp, Homo sapien
ctactgaacttaccagatcttggtt

SEQ ID NO: 5639270 - DNA, 25 bp, Homo sapien
aaccaagatctggtaagttcagtag

SEQ ID NO: 5639271 - DNA, 25 bp, Homo sapien
gggtcctcggggctaggagcggaga

SEQ ID NO: 5639272 - DNA, 25 bp, Homo sapien
tctccgctcctagccccgaggaccc

SEQ ID NO: 5639273 - DNA, 25 bp, Homo sapien
gcggcctgccttacggtccgtgtcg

SEQ ID NO: 5639274 - DNA, 25 bp, Homo sapien
cgacacggaccgtaaggcaggccgc

SEQ ID NO: 5639275 - DNA, 25 bp, Homo sapien
tctgttttgatgtgttcaaggaaga

SEQ ID NO: 5639276 - DNA, 25 bp, Homo sapien
tcttccttgaacacatcaaaacaga

SEQ ID NO: 5639277 - DNA, 25 bp, Homo sapien
aacacggttcgctcagacttgagag

SEQ ID NO: 5639278 - DNA, 25 bp, Homo sapien
ctctcaagtctgagcgaaccgtgtt

SEQ ID NO: 5639279 - DNA, 25 bp, Homo sapien
cgtcgtttctggtgggttgctagac

SEQ ID NO: 5639280 - DNA, 25 bp, Homo sapien
gtctagcaacccaccagaaacgacg

SEQ ID NO: 5639281 - DNA, 25 bp, Homo sapien
aataacgttatctacaaataaagaa

SEQ ID NO: 5639282 - DNA, 25 bp, Homo sapien
ttctttatttgtagataacgttatt

SEQ ID NO: 5639283 - DNA, 25 bp, Homo sapien
tgagatggagaaataagggataaac

SEQ ID NO: 5639284 - DNA, 25 bp, Homo sapien
gtttatcccttatttctccatctca

SEQ ID NO: 5639285 - DNA, 25 bp, Homo sapien
cctgtggtgagagtcagtgaaatct

SEQ ID NO: 5639286 - DNA, 25 bp, Homo sapien
agatttcactgactctcaccacagg

SEQ ID NO: 5639287 - DNA, 25 bp, Homo sapien
tcggtctggacaggaacccggaacg

SEQ ID NO: 5639288 - DNA, 25 bp, Homo sapien
cgttccgggttcctgtccagaccga

SEQ ID NO: 5639289 - DNA, 25 bp, Homo sapien
cgaagccggtgcactggtcccgtgt

SEQ ID NO: 5639290 - DNA, 25 bp, Homo sapien
acacgggaccagtgcaccggcttcg

SEQ ID NO: 5639291 - DNA, 25 bp, Homo sapien
gggctcggagctccgggagtcgacg

SEQ ID NO: 5639292 - DNA, 25 bp, Homo sapien
cgtcgactcccggagctccgagccc

SEQ ID NO: 5639293 - DNA, 25 bp, Homo sapien
tcgagggcactgaaaggaaggtgta

SEQ ID NO: 5639294 - DNA, 25 bp, Homo sapien
tacaccttcctttcagtgccctcga

SEQ ID NO: 5639295 - DNA, 25 bp, Homo sapien
tagtaacttaagactactgtattaa

SEQ ID NO: 5639296 - DNA, 25 bp, Homo sapien
ttaatacagtagtcttaagttacta

SEQ ID NO: 5639297 - DNA, 25 bp, Homo sapien
aataaattacttagttgagacaaca

SEQ ID NO: 5639298 - DNA, 25 bp, Homo sapien
tgttgtctcaactaagtaatttatt

SEQ ID NO: 5639299 - DNA, 25 bp, Homo sapien
cggcgggtaggcgtctcgacgtcct

SEQ ID NO: 5639300 - DNA, 25 bp, Homo sapien
aggacgtcgagacgcctacccgccg

SEQ ID NO: 5639301 - DNA, 25 bp, Homo sapien
gccattacccggaggagctctggtg

SEQ ID NO: 5639302 - DNA, 25 bp, Homo sapien
caccagagctcctccgggtaatggc

SEQ ID NO: 5639303 - DNA, 25 bp, Homo sapien
gagacgaccgaagactctgagacac

SEQ ID NO: 5639304 - DNA, 25 bp, Homo sapien
gtgtctcagagtcttcggtcgtctc

SEQ ID NO: 5639305 - DNA, 25 bp, Homo sapien
aaggtgaccgcgtccggcgacgggc

SEQ ID NO: 5639306 - DNA, 25 bp, Homo sapien
gcccgtcgccggacgcggtcacctt

SEQ ID NO: 5639307 - DNA, 25 bp, Homo sapien
actgctcaagggaccgtccttcgtg

SEQ ID NO: 5639308 - DNA, 25 bp, Homo sapien
cacgaaggacggtcccttgagcagt

SEQ ID NO: 5639309 - DNA, 25 bp, Homo sapien
atattaaacgaaatcgattgtcgag

SEQ ID NO: 5639310 - DNA, 25 bp, Homo sapien
ctcgacaatcgatttcgtttaatat

SEQ ID NO: 5639311 - DNA, 25 bp, Homo sapien
gagagtgagagtatattaaacgaaa

SEQ ID NO: 5639312 - DNA, 25 bp, Homo sapien
tttcgtttaatatactctcactctc

SEQ ID NO: 5639313 - DNA, 25 bp, Homo sapien
tatctgaaagtgtttttagaagtgc

SEQ ID NO: 5639314 - DNA, 25 bp, Homo sapien
gcacttctaaaaacactttcagata

SEQ ID NO: 5639315 - DNA, 25 bp, Homo sapien
taataggatttacatatgaaggttg

SEQ ID NO: 5639316 - DNA, 25 bp, Homo sapien
caaccttcatatgtaaatcctatta

SEQ ID NO: 5639317 - DNA, 25 bp, Homo sapien
aataggatttacatatgaaggttgg

SEQ ID NO: 5639318 - DNA, 25 bp, Homo sapien
ccaaccttcatatgtaaatcctatt

SEQ ID NO: 5639319 - DNA, 25 bp, Homo sapien
actgtaaccttcttatctttcatgg

SEQ ID NO: 5639320 - DNA, 25 bp, Homo sapien
ccatgaaagataagaaggttacagt

SEQ ID NO: 5639321 - DNA, 25 bp, Homo sapien
ggctcacatcctatcgttttcgacg

SEQ ID NO: 5639322 - DNA, 25 bp, Homo sapien
cgtcgaaaacgataggatgtgagcc

SEQ ID NO: 5639323 - DNA, 25 bp, Homo sapien
gtcgtgccgtacaccttccctgttt

SEQ ID NO: 5639324 - DNA, 25 bp, Homo sapien
aaacagggaaggtgtacggcacgac

SEQ ID NO: 5639325 - DNA, 25 bp, Homo sapien
aaagaagatctattccaagtaatac

SEQ ID NO: 5639326 - DNA, 25 bp, Homo sapien
gtattacttggaatagatcttcttt

SEQ ID NO: 5639327 - DNA, 25 bp, Homo sapien
agaagatctattccaagtaatactg

SEQ ID NO: 5639328 - DNA, 25 bp, Homo sapien
cagtattacttggaatagatcttct

SEQ ID NO: 5639329 - DNA, 25 bp, Homo sapien
tcacggacgggacggcttacgcctc

SEQ ID NO: 5639330 - DNA, 25 bp, Homo sapien
gaggcgtaagccgtcccgtccgtga

SEQ ID NO: 5639331 - DNA, 25 bp, Homo sapien
gtcgtttcatatgatcccctctgag

SEQ ID NO: 5639332 - DNA, 25 bp, Homo sapien
ctcagaggggatcatatgaaacgac

SEQ ID NO: 5639333 - DNA, 25 bp, Homo sapien
cgctgtcctacagtaggcggagagt

SEQ ID NO: 5639334 - DNA, 25 bp, Homo sapien
actctccgcctactgtaggacagcg

SEQ ID NO: 5639335 - DNA, 25 bp, Homo sapien
gacccgtggaaatccattattgtag

SEQ ID NO: 5639336 - DNA, 25 bp, Homo sapien
ctacaataatggatttccacgggtc

SEQ ID NO: 5639337 - DNA, 25 bp, Homo sapien
ggaacagccagggtagacgaacgga

SEQ ID NO: 5639338 - DNA, 25 bp, Homo sapien
tccgttcgtctaccctggctgttcc

SEQ ID NO: 5639339 - DNA, 25 bp, Homo sapien
ttttgtacaaacttctcagtggaaa

SEQ ID NO: 5639340 - DNA, 25 bp, Homo sapien
tttccactgagaagtttgtacaaaa

SEQ ID NO: 5639341 - DNA, 25 bp, Homo sapien
gttttcggtccttgaattttgtaca

SEQ ID NO: 5639342 - DNA, 25 bp, Homo sapien
tgtacaaaattcaaggaccgaaaac

SEQ ID NO: 5639343 - DNA, 25 bp, Homo sapien
cgatgactttaagtgcaaataaaag

SEQ ID NO: 5639344 - DNA, 25 bp, Homo sapien
cttttatttgcacttaaagtcatcg

SEQ ID NO: 5639345 - DNA, 25 bp, Homo sapien
acatggtttcaaagagatagtaaga

SEQ ID NO: 5639346 - DNA, 25 bp, Homo sapien
tcttactatctctttgaaaccatgt

SEQ ID NO: 5639347 - DNA, 25 bp, Homo sapien
tcagttgtgattaggtagaggccgt

SEQ ID NO: 5639348 - DNA, 25 bp, Homo sapien
acggcctctacctaatcacaactga

SEQ ID NO: 5639349 - DNA, 25 bp, Homo sapien
gtcaaggggctggcttggttctcct

SEQ ID NO: 5639350 - DNA, 25 bp, Homo sapien
aggagaaccaagccagccccttgac

SEQ ID NO: 5639351 - DNA, 25 bp, Homo sapien
taacgtgtcgtcttagactttcgaa

SEQ ID NO: 5639352 - DNA, 25 bp, Homo sapien
ttcgaaagtctaagacgacacgtta

SEQ ID NO: 5639353 - DNA, 25 bp, Homo sapien
cgctgcggtgcgctcggcctgcgtg

SEQ ID NO: 5639354 - DNA, 25 bp, Homo sapien
cacgcaggccgagcgcaccgcagcg

SEQ ID NO: 5639355 - DNA, 25 bp, Homo sapien
aaatgattctctaggtgtctgagac

SEQ ID NO: 5639356 - DNA, 25 bp, Homo sapien
gtctcagacacctagagaatcattt

SEQ ID NO: 5639357 - DNA, 25 bp, Homo sapien
tcgtcgagggtgttgccgactccgt

SEQ ID NO: 5639358 - DNA, 25 bp, Homo sapien
acggagtcggcaacaccctcgacga

SEQ ID NO: 5639359 - DNA, 25 bp, Homo sapien
gaaacttcttgtatagctaaaaaat

SEQ ID NO: 5639360 - DNA, 25 bp, Homo sapien
attttttagctatacaagaagtttc

SEQ ID NO: 5639361 - DNA, 25 bp, Homo sapien
gtatattctcaacgtactgacttaa

SEQ ID NO: 5639362 - DNA, 25 bp, Homo sapien
ttaagtcagtacgttgagaatatac

SEQ ID NO: 5639363 - DNA, 25 bp, Homo sapien
gacactccgccttccgcagagcgtc

SEQ ID NO: 5639364 - DNA, 25 bp, Homo sapien
gacgctctgcggaaggcggagtgtc

SEQ ID NO: 5639365 - DNA, 25 bp, Homo sapien
gggtcggcggagactgtgcagagga

SEQ ID NO: 5639366 - DNA, 25 bp, Homo sapien
tcctctgcacagtctccgccgaccc

SEQ ID NO: 5639367 - DNA, 25 bp, Homo sapien
tgtatttaggctatacccctagtct

SEQ ID NO: 5639368 - DNA, 25 bp, Homo sapien
agactaggggtatagcctaaataca

SEQ ID NO: 5639369 - DNA, 25 bp, Homo sapien
gatgtccattaaagaaaaacagtga

SEQ ID NO: 5639370 - DNA, 25 bp, Homo sapien
tcactgtttttctttaatggacatc

SEQ ID NO: 5639371 - DNA, 25 bp, Homo sapien
gactttacaatttaagattttgcat

SEQ ID NO: 5639372 - DNA, 25 bp, Homo sapien
atgcaaaatcttaaattgtaaagtc

SEQ ID NO: 5639373 - DNA, 25 bp, Homo sapien
aaattttgtctcaggtactcttaca

SEQ ID NO: 5639374 - DNA, 25 bp, Homo sapien
tgtaagagtacctgagacaaaattt

SEQ ID NO: 5639375 - DNA, 25 bp, Homo sapien
cgacagtcttaagcgacgacctggg

SEQ ID NO: 5639376 - DNA, 25 bp, Homo sapien
cccaggtcgtcgcttaagactgtcg

SEQ ID NO: 5639377 - DNA, 25 bp, Homo sapien
gcagtacttcggcagtcccactctg

SEQ ID NO: 5639378 - DNA, 25 bp, Homo sapien
cagagtgggactgccgaagtactgc

SEQ ID NO: 5639379 - DNA, 25 bp, Homo sapien
ccaggtgcacgtcctatctaacctt

SEQ ID NO: 5639380 - DNA, 25 bp, Homo sapien
aaggttagataggacgtgcacctgg

SEQ ID NO: 5639381 - DNA, 25 bp, Homo sapien
gactggtcgttcccctcgccgtcct

SEQ ID NO: 5639382 - DNA, 25 bp, Homo sapien
aggacggcgaggggaacgaccagtc

SEQ ID NO: 5639383 - DNA, 25 bp, Homo sapien
tcacgcgtcccgcaccggacagggc

SEQ ID NO: 5639384 - DNA, 25 bp, Homo sapien
gccctgtccggtgcgggacgcgtga

SEQ ID NO: 5639385 - DNA, 25 bp, Homo sapien
cactacaaatgacctgtgtcaccat

SEQ ID NO: 5639386 - DNA, 25 bp, Homo sapien
atggtgacacaggtcatttgtagtg

SEQ ID NO: 5639387 - DNA, 25 bp, Homo sapien
ctgtcggctttaagggacgccaaag

SEQ ID NO: 5639388 - DNA, 25 bp, Homo sapien
ctttggcgtcccttaaagccgacag

SEQ ID NO: 5639389 - DNA, 25 bp, Homo sapien
ccggagaaaagaggcgggtcgcgga

SEQ ID NO: 5639390 - DNA, 25 bp, Homo sapien
tccgcgacccgcctcttttctccgg

SEQ ID NO: 5639391 - DNA, 25 bp, Homo sapien
agtgttcggcccaagggcgctgtcg

SEQ ID NO: 5639392 - DNA, 25 bp, Homo sapien
cgacagcgcccttgggccgaacact

SEQ ID NO: 5639393 - DNA, 25 bp, Homo sapien
gccaccccgcgcggaggcactcctg

SEQ ID NO: 5639394 - DNA, 25 bp, Homo sapien
caggagtgcctccgcgcggggtggc

SEQ ID NO: 5639395 - DNA, 25 bp, Homo sapien
cgccaccccgcgcggaggcactcct

SEQ ID NO: 5639396 - DNA, 25 bp, Homo sapien
aggagtgcctccgcgcggggtggcg

SEQ ID NO: 5639397 - DNA, 25 bp, Homo sapien
agtcggtggaacgaactgcattaag

SEQ ID NO: 5639398 - DNA, 25 bp, Homo sapien
cttaatgcagttcgttccaccgact

SEQ ID NO: 5639399 - DNA, 25 bp, Homo sapien
ttaaacagcccatcacgtcgaagac

SEQ ID NO: 5639400 - DNA, 25 bp, Homo sapien
gtcttcgacgtgatgggctgtttaa

SEQ ID NO: 5639401 - DNA, 25 bp, Homo sapien
gtcctcgagaaaatttggttcgtct

SEQ ID NO: 5639402 - DNA, 25 bp, Homo sapien
agacgaaccaaattttctcgaggac

SEQ ID NO: 5639403 - DNA, 25 bp, Homo sapien
gacccacaccactcccgaagggtcc

SEQ ID NO: 5639404 - DNA, 25 bp, Homo sapien
ggacccttcgggagtggtgtgggtc

SEQ ID NO: 5639405 - DNA, 25 bp, Homo sapien
aaaccatctctttaaatcatctcag

SEQ ID NO: 5639406 - DNA, 25 bp, Homo sapien
ctgagatgatttaaagagatggttt

SEQ ID NO: 5639407 - DNA, 25 bp, Homo sapien
gggcgggggacatcgggcagcgcgt

SEQ ID NO: 5639408 - DNA, 25 bp, Homo sapien
acgcgctgcccgatgtcccccgccc

SEQ ID NO: 5639409 - DNA, 25 bp, Homo sapien
ttcgtaaattgagagaatagcgtgt

SEQ ID NO: 5639410 - DNA, 25 bp, Homo sapien
acacgctattctctcaatttacgaa

SEQ ID NO: 5639411 - DNA, 25 bp, Homo sapien
taacagttctgtcttggctttctcg

SEQ ID NO: 5639412 - DNA, 25 bp, Homo sapien
cgagaaagccaagacagaactgtta

SEQ ID NO: 5639413 - DNA, 25 bp, Homo sapien
acagagggaacagccacaagggaga

SEQ ID NO: 5639414 - DNA, 25 bp, Homo sapien
tctcccttgtggctgttccctctgt

SEQ ID NO: 5639415 - DNA, 25 bp, Homo sapien
cgcgcgcttagtcccgggcagaggg

SEQ ID NO: 5639416 - DNA, 25 bp, Homo sapien
ccctctgcccgggactaagcgcgcg

SEQ ID NO: 5639417 - DNA, 25 bp, Homo sapien
cagggcgcgcgcttagtcccgggca

SEQ ID NO: 5639418 - DNA, 25 bp, Homo sapien
tgcccgggactaagcgcgcgccctg

SEQ ID NO: 5639419 - DNA, 25 bp, Homo sapien
ctacctttcgctcccacgccggacc

SEQ ID NO: 5639420 - DNA, 25 bp, Homo sapien
ggtccggcgtgggagcgaaaggtag

SEQ ID NO: 5639421 - DNA, 25 bp, Homo sapien
aacctttggtgactaaattccagat

SEQ ID NO: 5639422 - DNA, 25 bp, Homo sapien
atctggaatttagtcaccaaaggtt

SEQ ID NO: 5639423 - DNA, 25 bp, Homo sapien
gcgttacagaatagtggaaaagacg

SEQ ID NO: 5639424 - DNA, 25 bp, Homo sapien
cgtcttttccactattctgtaacgc

SEQ ID NO: 5639425 - DNA, 25 bp, Homo sapien
ttaatgtaaaactatgggtaagtgt

SEQ ID NO: 5639426 - DNA, 25 bp, Homo sapien
acacttacccatagttttacattaa

SEQ ID NO: 5639427 - DNA, 25 bp, Homo sapien
tttaatgtaaaactatgggtaagtg

SEQ ID NO: 5639428 - DNA, 25 bp, Homo sapien
cacttacccatagttttacattaaa

SEQ ID NO: 5639429 - DNA, 25 bp, Homo sapien
cctctaaatcttattagtcgtcacg

SEQ ID NO: 5639430 - DNA, 25 bp, Homo sapien
cgtgacgactaataagatttagagg

SEQ ID NO: 5639431 - DNA, 25 bp, Homo sapien
ttcatattgtactaatggtaacgaa

SEQ ID NO: 5639432 - DNA, 25 bp, Homo sapien
ttcgttaccattagtacaatatgaa

SEQ ID NO: 5639433 - DNA, 25 bp, Homo sapien
gaagagtctgacgtgtttacatcct

SEQ ID NO: 5639434 - DNA, 25 bp, Homo sapien
aggatgtaaacacgtcagactcttc

SEQ ID NO: 5639435 - DNA, 25 bp, Homo sapien
gagcccgggcgcagtcagggccgga

SEQ ID NO: 5639436 - DNA, 25 bp, Homo sapien
tccggccctgactgcgcccgggctc

SEQ ID NO: 5639437 - DNA, 25 bp, Homo sapien
ccgactccggacaggctagcagggc

SEQ ID NO: 5639438 - DNA, 25 bp, Homo sapien
gccctgctagcctgtccggagtcgg

SEQ ID NO: 5639439 - DNA, 25 bp, Homo sapien
cgccgactccggacaggctagcagg

SEQ ID NO: 5639440 - DNA, 25 bp, Homo sapien
cctgctagcctgtccggagtcggcg

SEQ ID NO: 5639441 - DNA, 25 bp, Homo sapien
gccgcggccggtcacgtcctcgagg

SEQ ID NO: 5639442 - DNA, 25 bp, Homo sapien
cctcgaggacgtgaccggccgcggc

SEQ ID NO: 5639443 - DNA, 25 bp, Homo sapien
cgccgcggccggtcacgtcctcgag

SEQ ID NO: 5639444 - DNA, 25 bp, Homo sapien
ctcgaggacgtgaccggccgcggcg

SEQ ID NO: 5639445 - DNA, 25 bp, Homo sapien
ccaattaaaccgatctcagtattat

SEQ ID NO: 5639446 - DNA, 25 bp, Homo sapien
ataatactgagatcggtttaattgg

SEQ ID NO: 5639447 - DNA, 25 bp, Homo sapien
gtcagacttagggtgggaaaataag

SEQ ID NO: 5639448 - DNA, 25 bp, Homo sapien
cttattttcccaccctaagtctgac

SEQ ID NO: 5639449 - DNA, 25 bp, Homo sapien
aacagcaagtaatttaggtaacaac

SEQ ID NO: 5639450 - DNA, 25 bp, Homo sapien
gttgttacctaaattacttgctgtt

SEQ ID NO: 5639451 - DNA, 25 bp, Homo sapien
tgcgcacattgctccccagtagagg

SEQ ID NO: 5639452 - DNA, 25 bp, Homo sapien
cctctactggggagcaatgtgcgca

SEQ ID NO: 5639453 - DNA, 25 bp, Homo sapien
ccccgtaggacacgaccctctacag

SEQ ID NO: 5639454 - DNA, 25 bp, Homo sapien
ctgtagagggtcgtgtcctacgggg

SEQ ID NO: 5639455 - DNA, 25 bp, Homo sapien
aagactatcccgtcgcgaagaccaa

SEQ ID NO: 5639456 - DNA, 25 bp, Homo sapien
ttggtcttcgcgacgggatagtctt

SEQ ID NO: 5639457 - DNA, 25 bp, Homo sapien
attgagtatttattcgctcatgaat

SEQ ID NO: 5639458 - DNA, 25 bp, Homo sapien
attcatgagcgaataaatactcaat

SEQ ID NO: 5639459 - DNA, 25 bp, Homo sapien
cgtagggacccgctgggactcaggg

SEQ ID NO: 5639460 - DNA, 25 bp, Homo sapien
ccctgagtcccagcgggtccctacg

SEQ ID NO: 5639461 - DNA, 25 bp, Homo sapien
tacattgagaaggaattactaggtc

SEQ ID NO: 5639462 - DNA, 25 bp, Homo sapien
gacctagtaattccttctcaatgta

SEQ ID NO: 5639463 - DNA, 25 bp, Homo sapien
cgagcagatggttaatacagatttt

SEQ ID NO: 5639464 - DNA, 25 bp, Homo sapien
aaaatctgtattaaccatctgctcg

SEQ ID NO: 5639465 - DNA, 25 bp, Homo sapien
agtaaatctaaactctctatgagtg

SEQ ID NO: 5639466 - DNA, 25 bp, Homo sapien
cactcatagagagtttagatttact

SEQ ID NO: 5639467 - DNA, 25 bp, Homo sapien
cagtaaatctaaactctctatgagt

SEQ ID NO: 5639468 - DNA, 25 bp, Homo sapien
actcatagagagtttagatttactg

SEQ ID NO: 5639469 - DNA, 25 bp, Homo sapien
ccagtaaatctaaactctctatgag

SEQ ID NO: 5639470 - DNA, 25 bp, Homo sapien
ctcatagagagtttagatttactgg

SEQ ID NO: 5639471 - DNA, 25 bp, Homo sapien
aaatgattttcgtgaactttcgacg

SEQ ID NO: 5639472 - DNA, 25 bp, Homo sapien
cgtcgaaagttcacgaaaatcattt

SEQ ID NO: 5639473 - DNA, 25 bp, Homo sapien
tcttctagataaagtaacagatcat

SEQ ID NO: 5639474 - DNA, 25 bp, Homo sapien
atgatctgttactttatctagaaga

SEQ ID NO: 5639475 - DNA, 25 bp, Homo sapien
tgccgtcgaaggtccagagcgagac

SEQ ID NO: 5639476 - DNA, 25 bp, Homo sapien
gtctcgctctggaccttcgacggca

SEQ ID NO: 5639477 - DNA, 25 bp, Homo sapien
tgggttggtagggtgtgtggtcaga

SEQ ID NO: 5639478 - DNA, 25 bp, Homo sapien
tctgaccacacaccctaccaaccca

SEQ ID NO: 5639479 - DNA, 25 bp, Homo sapien
gaagtaatttaagatatcctaaaag

SEQ ID NO: 5639480 - DNA, 25 bp, Homo sapien
cttttaggatatcttaaattacttc

SEQ ID NO: 5639481 - DNA, 25 bp, Homo sapien
aaaagttgcggcggggcacgaggag

SEQ ID NO: 5639482 - DNA, 25 bp, Homo sapien
ctcctcgtgccccgccgcaactttt

SEQ ID NO: 5639483 - DNA, 25 bp, Homo sapien
agtaagactatgaagtttaagtaaa

SEQ ID NO: 5639484 - DNA, 25 bp, Homo sapien
tttacttaaacttcatagtcttact

SEQ ID NO: 5639485 - DNA, 25 bp, Homo sapien
cgccgggtcaaatcgccgaggtcgg

SEQ ID NO: 5639486 - DNA, 25 bp, Homo sapien
ccgacctcggcgatttgacccggcg

SEQ ID NO: 5639487 - DNA, 25 bp, Homo sapien
tcaaatcgccgaggtcgggcgccgg

SEQ ID NO: 5639488 - DNA, 25 bp, Homo sapien
ccggcgcccgacctcggcgatttga

SEQ ID NO: 5639489 - DNA, 25 bp, Homo sapien
gaagccggaggccccagctcccgcg

SEQ ID NO: 5639490 - DNA, 25 bp, Homo sapien
cgcgggagctggggcctccggcttc

SEQ ID NO: 5639491 - DNA, 25 bp, Homo sapien
caagtccgggcgaaaggtcctcagg

SEQ ID NO: 5639492 - DNA, 25 bp, Homo sapien
cctgaggacctttcgcccggacttg

SEQ ID NO: 5639493 - DNA, 25 bp, Homo sapien
acgctaccagcgtgacctgagagaa

SEQ ID NO: 5639494 - DNA, 25 bp, Homo sapien
ttctctcaggtcacgctggtagcgt

SEQ ID NO: 5639495 - DNA, 25 bp, Homo sapien
acactaccaccacttgctcctcctt

SEQ ID NO: 5639496 - DNA, 25 bp, Homo sapien
aaggaggagcaagtggtggtagtgt

SEQ ID NO: 5639497 - DNA, 25 bp, Homo sapien
gtcatcgggtccctgacccaggtcc

SEQ ID NO: 5639498 - DNA, 25 bp, Homo sapien
ggacctgggtcagggacccgatgac

SEQ ID NO: 5639499 - DNA, 25 bp, Homo sapien
gacccgacaccgtcgtgacgggaca

SEQ ID NO: 5639500 - DNA, 25 bp, Homo sapien
tgtcccgtcacgacggtgtcgggtc

SEQ ID NO: 5639501 - DNA, 25 bp, Homo sapien
cctaccgaccagctaccgacacggg

SEQ ID NO: 5639502 - DNA, 25 bp, Homo sapien
cccgtgtcggtagctggtcggtagg

SEQ ID NO: 5639503 - DNA, 25 bp, Homo sapien
gcggtgcgtcttcggtgcgccgacg

SEQ ID NO: 5639504 - DNA, 25 bp, Homo sapien
cgtcggcgcaccgaagacgcaccgc

SEQ ID NO: 5639505 - DNA, 25 bp, Homo sapien
gagtcagacaagagcgaagaaccgt

SEQ ID NO: 5639506 - DNA, 25 bp, Homo sapien
acggttcttcgctcttgtctgactc

SEQ ID NO: 5639507 - DNA, 25 bp, Homo sapien
cggtcgggtgtagcctcactggtcc

SEQ ID NO: 5639508 - DNA, 25 bp, Homo sapien
ggaccagtgaggctacacccgaccg

SEQ ID NO: 5639509 - DNA, 25 bp, Homo sapien
cccgtctcgcggtcgggtgtagcct

SEQ ID NO: 5639510 - DNA, 25 bp, Homo sapien
aggctacacccgaccgcgagacggg

SEQ ID NO: 5639511 - DNA, 25 bp, Homo sapien
aggactgattaaagacttttctgta

SEQ ID NO: 5639512 - DNA, 25 bp, Homo sapien
tacagaaaagtctttaatcagtcct

SEQ ID NO: 5639513 - DNA, 25 bp, Homo sapien
tttttcatcttaaacatcaagaact

SEQ ID NO: 5639514 - DNA, 25 bp, Homo sapien
agttcttgatgtttaagatgaaaaa

SEQ ID NO: 5639515 - DNA, 25 bp, Homo sapien
gaggagcggtcgacaggcccttcaa

SEQ ID NO: 5639516 - DNA, 25 bp, Homo sapien
ttgaagggcctgtcgaccgctcctc

SEQ ID NO: 5639517 - DNA, 25 bp, Homo sapien
ccgttaaaaattatccgaagagtca

SEQ ID NO: 5639518 - DNA, 25 bp, Homo sapien
tgactcttcggataatttttaacgg

SEQ ID NO: 5639519 - DNA, 25 bp, Homo sapien
agtcgtctacatctgaaaactttca

SEQ ID NO: 5639520 - DNA, 25 bp, Homo sapien
tgaaagttttcagatgtagacgact

SEQ ID NO: 5639521 - DNA, 25 bp, Homo sapien
taaagattaagtagtaagtcacaaa

SEQ ID NO: 5639522 - DNA, 25 bp, Homo sapien
tttgtgacttactacttaatcttta

SEQ ID NO: 5639523 - DNA, 25 bp, Homo sapien
cctaggtgaaacacttgtttctccc

SEQ ID NO: 5639524 - DNA, 25 bp, Homo sapien
gggagaaacaagtgtttcacctagg

SEQ ID NO: 5639525 - DNA, 25 bp, Homo sapien
aggggagacggtttcagattggcgt

SEQ ID NO: 5639526 - DNA, 25 bp, Homo sapien
acgccaatctgaaaccgtctcccct

SEQ ID NO: 5639527 - DNA, 25 bp, Homo sapien
gacctccgtcgttccagaatcacta

SEQ ID NO: 5639528 - DNA, 25 bp, Homo sapien
tagtgattctggaacgacggaggtc

SEQ ID NO: 5639529 - DNA, 25 bp, Homo sapien
gtggacgtcatacacacagacttag

SEQ ID NO: 5639530 - DNA, 25 bp, Homo sapien
ctaagtctgtgtgtatgacgtccac

SEQ ID NO: 5639531 - DNA, 25 bp, Homo sapien
gaacaggaaggggtgggctcgggtc

SEQ ID NO: 5639532 - DNA, 25 bp, Homo sapien
gacccgagcccaccccttcctgttc

SEQ ID NO: 5639533 - DNA, 25 bp, Homo sapien
acaggaaggggtgggctcgggtctc

SEQ ID NO: 5639534 - DNA, 25 bp, Homo sapien
gagacccgagcccaccccttcctgt

SEQ ID NO: 5639535 - DNA, 25 bp, Homo sapien
gtcggtcaccagagggcccttgtga

SEQ ID NO: 5639536 - DNA, 25 bp, Homo sapien
tcacaagggccctctggtgaccgac

SEQ ID NO: 5639537 - DNA, 25 bp, Homo sapien
tcgcgccccgttcgaggaccggcct

SEQ ID NO: 5639538 - DNA, 25 bp, Homo sapien
aggccggtcctcgaacggggcgcga

SEQ ID NO: 5639539 - DNA, 25 bp, Homo sapien
tctattttctcttagaatagtaaag

SEQ ID NO: 5639540 - DNA, 25 bp, Homo sapien
ctttactattctaagagaaaataga

SEQ ID NO: 5639541 - DNA, 25 bp, Homo sapien
cccacggtagccacgagacggacgg

SEQ ID NO: 5639542 - DNA, 25 bp, Homo sapien
ccgtccgtctcgtggctaccgtggg

SEQ ID NO: 5639543 - DNA, 25 bp, Homo sapien
tagtcgtagtgggtgtcgtaatgta

SEQ ID NO: 5639544 - DNA, 25 bp, Homo sapien
tacattacgacacccactacgacta

SEQ ID NO: 5639545 - DNA, 25 bp, Homo sapien
gtcttgacgcaagtctagcccggat

SEQ ID NO: 5639546 - DNA, 25 bp, Homo sapien
atccgggctagacttgcgtcaagac

SEQ ID NO: 5639547 - DNA, 25 bp, Homo sapien
accggagcgacccagcgctcctccg

SEQ ID NO: 5639548 - DNA, 25 bp, Homo sapien
cggaggagcgctgggtcgctccggt

SEQ ID NO: 5639549 - DNA, 25 bp, Homo sapien
tgttatatctccattcgttttattg

SEQ ID NO: 5639550 - DNA, 25 bp, Homo sapien
caataaaacgaatggagatataaca

SEQ ID NO: 5639551 - DNA, 25 bp, Homo sapien
agtcatcaaattaacttcttctaaa

SEQ ID NO: 5639552 - DNA, 25 bp, Homo sapien
tttagaagaagttaatttgatgact

SEQ ID NO: 5639553 - DNA, 25 bp, Homo sapien
cgtcactccgtccccggcgccaggt

SEQ ID NO: 5639554 - DNA, 25 bp, Homo sapien
acctggcgccggggacggagtgacg

SEQ ID NO: 5639555 - DNA, 25 bp, Homo sapien
gccgcgaccgatccgtcagacccgg

SEQ ID NO: 5639556 - DNA, 25 bp, Homo sapien
ccgggtctgacggatcggtcgcggc

SEQ ID NO: 5639557 - DNA, 25 bp, Homo sapien
ccggggcgccgcgaccgatccgtca

SEQ ID NO: 5639558 - DNA, 25 bp, Homo sapien
tgacggatcggtcgcggcgccccgg

SEQ ID NO: 5639559 - DNA, 25 bp, Homo sapien
tccccgtatccgcccaccgtggtcc

SEQ ID NO: 5639560 - DNA, 25 bp, Homo sapien
ggaccacggtgggcggatacgggga

SEQ ID NO: 5639561 - DNA, 25 bp, Homo sapien
ctccgtaaaacagataagagatgtt

SEQ ID NO: 5639562 - DNA, 25 bp, Homo sapien
aacatctcttatctgttttacggag

SEQ ID NO: 5639563 - DNA, 25 bp, Homo sapien
tgggacctccggacaactccctggg

SEQ ID NO: 5639564 - DNA, 25 bp, Homo sapien
cccagggagttgtccggaggtccca

SEQ ID NO: 5639565 - DNA, 25 bp, Homo sapien
cagattacataaggtctgaaaaacc

SEQ ID NO: 5639566 - DNA, 25 bp, Homo sapien
ggtttttcagaccttatgtaatctg

SEQ ID NO: 5639567 - DNA, 25 bp, Homo sapien
gattgcatctaaatacttcttaaag

SEQ ID NO: 5639568 - DNA, 25 bp, Homo sapien
ctttaagaagtatttagatgcaatc

SEQ ID NO: 5639569 - DNA, 25 bp, Homo sapien
cggcgctgggtcgaacgcgtcggcc

SEQ ID NO: 5639570 - DNA, 25 bp, Homo sapien
ggccgacgcgttcgacccagcgccg

SEQ ID NO: 5639571 - DNA, 25 bp, Homo sapien
gcggcgctgggtcgaacgcgtcggc

SEQ ID NO: 5639572 - DNA, 25 bp, Homo sapien
gccgacgcgttcgacccagcgccgc

SEQ ID NO: 5639573 - DNA, 25 bp, Homo sapien
tagtgacatggggtggagacgtccg

SEQ ID NO: 5639574 - DNA, 25 bp, Homo sapien
cggacgtctccaccccatgtcacta

SEQ ID NO: 5639575 - DNA, 25 bp, Homo sapien
ttagtgtacaccagttttattaact

SEQ ID NO: 5639576 - DNA, 25 bp, Homo sapien
agttaataaaactggtgtacactaa

SEQ ID NO: 5639577 - DNA, 25 bp, Homo sapien
gggacaagaagaacaccttctcagt

SEQ ID NO: 5639578 - DNA, 25 bp, Homo sapien
actgagaaggtgttcttcttgtccc

SEQ ID NO: 5639579 - DNA, 25 bp, Homo sapien
gcttctcttcgggtgtggggtccgg

SEQ ID NO: 5639580 - DNA, 25 bp, Homo sapien
ccggaccccacacccgaagagaagc

SEQ ID NO: 5639581 - DNA, 25 bp, Homo sapien
caacaggatggctcaatctgtaaag

SEQ ID NO: 5639582 - DNA, 25 bp, Homo sapien
ctttacagattgagccatcctgttg

SEQ ID NO: 5639583 - DNA, 25 bp, Homo sapien
gtattccttattagttgaaatttta

SEQ ID NO: 5639584 - DNA, 25 bp, Homo sapien
taaaatttcaactaataaggaatac

SEQ ID NO: 5639585 - DNA, 25 bp, Homo sapien
actcgtaacagttcactgaagaagg

SEQ ID NO: 5639586 - DNA, 25 bp, Homo sapien
ccttcttcagtgaactgttacgagt

SEQ ID NO: 5639587 - DNA, 25 bp, Homo sapien
acacagcaaagataattagaggcgc

SEQ ID NO: 5639588 - DNA, 25 bp, Homo sapien
gcgcctctaattatctttgctgtgt

SEQ ID NO: 5639589 - DNA, 25 bp, Homo sapien
gacccacgcccctggggtcgagacc

SEQ ID NO: 5639590 - DNA, 25 bp, Homo sapien
ggtctcgaccccaggggcgtgggtc

SEQ ID NO: 5639591 - DNA, 25 bp, Homo sapien
tgtctactgttgttacacagtatcg

SEQ ID NO: 5639592 - DNA, 25 bp, Homo sapien
cgatactgtgtaacaacagtagaca

SEQ ID NO: 5639593 - DNA, 25 bp, Homo sapien
gtccgaagacagatttcacgaaaaa

SEQ ID NO: 5639594 - DNA, 25 bp, Homo sapien
tttttcgtgaaatctgtcttcggac

SEQ ID NO: 5639595 - DNA, 25 bp, Homo sapien
aaaacaattatcaacctataaagag

SEQ ID NO: 5639596 - DNA, 25 bp, Homo sapien
ctctttataggttgataattgtttt

SEQ ID NO: 5639597 - DNA, 25 bp, Homo sapien
gctggagcggccgagggaccctggg

SEQ ID NO: 5639598 - DNA, 25 bp, Homo sapien
cccagggtccctcggccgctccagc

SEQ ID NO: 5639599 - DNA, 25 bp, Homo sapien
caccacagcggtctcgtccggtaaa

SEQ ID NO: 5639600 - DNA, 25 bp, Homo sapien
tttaccggacgagaccgctgtggtg

SEQ ID NO: 5639601 - DNA, 25 bp, Homo sapien
tgtcacaggtcaagttccacggtcg

SEQ ID NO: 5639602 - DNA, 25 bp, Homo sapien
cgaccgtggaacttgacctgtgaca

SEQ ID NO: 5639603 - DNA, 25 bp, Homo sapien
gaccctgtgtcgtccggcccagggt

SEQ ID NO: 5639604 - DNA, 25 bp, Homo sapien
accctgggccggacgacacagggtc

SEQ ID NO: 5639605 - DNA, 25 bp, Homo sapien
acacctactctcagacacgtcgtgg

SEQ ID NO: 5639606 - DNA, 25 bp, Homo sapien
ccacgacgtgtctgagagtaggtgt

SEQ ID NO: 5639607 - DNA, 25 bp, Homo sapien
cgaaccattactccgactacgggac

SEQ ID NO: 5639608 - DNA, 25 bp, Homo sapien
gtcccgtagtcggagtaatggttcg

SEQ ID NO: 5639609 - DNA, 25 bp, Homo sapien
cgccggcgtcgccgtctcggaggcg

SEQ ID NO: 5639610 - DNA, 25 bp, Homo sapien
cgcctccgagacggcgacgccggcg

SEQ ID NO: 5639611 - DNA, 25 bp, Homo sapien
gtaaatcgaatataagattccaatt

SEQ ID NO: 5639612 - DNA, 25 bp, Homo sapien
aattggaatcttatattcgatttac

SEQ ID NO: 5639613 - DNA, 25 bp, Homo sapien
gcccgctccgacacgggggcccctg

SEQ ID NO: 5639614 - DNA, 25 bp, Homo sapien
caggggcccccgtgtcggagcgggc

SEQ ID NO: 5639615 - DNA, 25 bp, Homo sapien
ttcgaaggaatttagaccacgtcga

SEQ ID NO: 5639616 - DNA, 25 bp, Homo sapien
tcgacgtggtctaaattccttcgaa

SEQ ID NO: 5639617 - DNA, 25 bp, Homo sapien
cggaaggtcggccttctggggagcg

SEQ ID NO: 5639618 - DNA, 25 bp, Homo sapien
cgctccccagaaggccgaccttccg

SEQ ID NO: 5639619 - DNA, 25 bp, Homo sapien
cctcatcccccttctaccaccctac

SEQ ID NO: 5639620 - DNA, 25 bp, Homo sapien
gtagggtggtagaagggggatgagg

SEQ ID NO: 5639621 - DNA, 25 bp, Homo sapien
aacctattcgattatattttctaca

SEQ ID NO: 5639622 - DNA, 25 bp, Homo sapien
tgtagaaaatataatcgaataggtt

SEQ ID NO: 5639623 - DNA, 25 bp, Homo sapien
aaagagataccctatgaacaaaaag

SEQ ID NO: 5639624 - DNA, 25 bp, Homo sapien
ctttttgttcatagggtatctcttt

SEQ ID NO: 5639625 - DNA, 25 bp, Homo sapien
aacatatctatgaaaacactggaac

SEQ ID NO: 5639626 - DNA, 25 bp, Homo sapien
gttccagtgttttcatagatatgtt

SEQ ID NO: 5639627 - DNA, 25 bp, Homo sapien
ccctcccgccaacggtcactccctg

SEQ ID NO: 5639628 - DNA, 25 bp, Homo sapien
cagggagtgaccgttggcgggaggg

SEQ ID NO: 5639629 - DNA, 25 bp, Homo sapien
cgaggccggtcttaagccctcccgc

SEQ ID NO: 5639630 - DNA, 25 bp, Homo sapien
gcgggagggcttaagaccggcctcg

SEQ ID NO: 5639631 - DNA, 25 bp, Homo sapien
ggaccggaggcctcacgactcgagt

SEQ ID NO: 5639632 - DNA, 25 bp, Homo sapien
actcgagtcgtgaggcctccggtcc

SEQ ID NO: 5639633 - DNA, 25 bp, Homo sapien
catatacatatattcacacttagta

SEQ ID NO: 5639634 - DNA, 25 bp, Homo sapien
tactaagtgtgaatatatgtatatg

SEQ ID NO: 5639635 - DNA, 25 bp, Homo sapien
acctaaagagttggagaacatcgtg

SEQ ID NO: 5639636 - DNA, 25 bp, Homo sapien
cacgatgttctccaactctttaggt

SEQ ID NO: 5639637 - DNA, 25 bp, Homo sapien
ttagatacttgttctaatagaggat

SEQ ID NO: 5639638 - DNA, 25 bp, Homo sapien
atcctctattagaacaagtatctaa

SEQ ID NO: 5639639 - DNA, 25 bp, Homo sapien
acgggtcttgacgtctcagaaaggc

SEQ ID NO: 5639640 - DNA, 25 bp, Homo sapien
gcctttctgagacgtcaagacccgt

SEQ ID NO: 5639641 - DNA, 25 bp, Homo sapien
gaatctcaatgtaattcgttacatt

SEQ ID NO: 5639642 - DNA, 25 bp, Homo sapien
aatgtaacgaattacattgagattc

SEQ ID NO: 5639643 - DNA, 25 bp, Homo sapien
atctcaatgtaattcgttacattaa

SEQ ID NO: 5639644 - DNA, 25 bp, Homo sapien
ttaatgtaacgaattacattgagat

SEQ ID NO: 5639645 - DNA, 25 bp, Homo sapien
ctcgatcgaagaggcaagtgaagaa

SEQ ID NO: 5639646 - DNA, 25 bp, Homo sapien
ttcttcacttgcctcttcgatcgag

SEQ ID NO: 5639647 - DNA, 25 bp, Homo sapien
aggagcagtccatccaggacaggtg

SEQ ID NO: 5639648 - DNA, 25 bp, Homo sapien
cacctgtcctggatggactgctcct

SEQ ID NO: 5639649 - DNA, 25 bp, Homo sapien
gggcgtgggcgtcctggtcggacct

SEQ ID NO: 5639650 - DNA, 25 bp, Homo sapien
aggtccgaccaggacgcccacgccc

SEQ ID NO: 5639651 - DNA, 25 bp, Homo sapien
cgggaccggtgatccgcgaggacgg

SEQ ID NO: 5639652 - DNA, 25 bp, Homo sapien
ccgtcctcgcggatcaccggtcccg

SEQ ID NO: 5639653 - DNA, 25 bp, Homo sapien
cggcgcaggtctgccaaaggtaaag

SEQ ID NO: 5639654 - DNA, 25 bp, Homo sapien
ctttacctttggcagacctgcgccg

SEQ ID NO: 5639655 - DNA, 25 bp, Homo sapien
cgggtgagcaggacgacgaacaaaa

SEQ ID NO: 5639656 - DNA, 25 bp, Homo sapien
ttttgttcgtcgtcctgctcacccg

SEQ ID NO: 5639657 - DNA, 25 bp, Homo sapien
cgacctgcgacctctatttcaactg

SEQ ID NO: 5639658 - DNA, 25 bp, Homo sapien
cagttgaaatagaggtcgcaggtcg

SEQ ID NO: 5639659 - DNA, 25 bp, Homo sapien
tcacggtagctaaccccgacggtgg

SEQ ID NO: 5639660 - DNA, 25 bp, Homo sapien
ccaccgtcggggttagctaccgtga

SEQ ID NO: 5639661 - DNA, 25 bp, Homo sapien
tcagggaccggtggtagtctcacgt

SEQ ID NO: 5639662 - DNA, 25 bp, Homo sapien
acgtgagactaccaccggtccctga

SEQ ID NO: 5639663 - DNA, 25 bp, Homo sapien
ctccgtcacggaggtgcacacgagt

SEQ ID NO: 5639664 - DNA, 25 bp, Homo sapien
actcgtgtgcacctccgtgacggag

SEQ ID NO: 5639665 - DNA, 25 bp, Homo sapien
ctatcgccccaacccaagactacgt

SEQ ID NO: 5639666 - DNA, 25 bp, Homo sapien
acgtagtcttgggttggggcgatag

SEQ ID NO: 5639667 - DNA, 25 bp, Homo sapien
ttctcattgacggtacccacatact

SEQ ID NO: 5639668 - DNA, 25 bp, Homo sapien
agtatgtgggtaccgtcaatgagaa

SEQ ID NO: 5639669 - DNA, 25 bp, Homo sapien
tcgaccgacgtacggcgcacgagcc

SEQ ID NO: 5639670 - DNA, 25 bp, Homo sapien
ggctcgtgcgccgtacgtcggtcga

SEQ ID NO: 5639671 - DNA, 25 bp, Homo sapien
cccagacgacgggcgtgaacgtgag

SEQ ID NO: 5639672 - DNA, 25 bp, Homo sapien
ctcacgttcacgcccgtcgtctggg

SEQ ID NO: 5639673 - DNA, 25 bp, Homo sapien
ggtgcagttgacgaggatttggtcg

SEQ ID NO: 5639674 - DNA, 25 bp, Homo sapien
cgaccaaatcctcgtcaactgcacc

SEQ ID NO: 5639675 - DNA, 25 bp, Homo sapien
acatactcaaccacttatactttag

SEQ ID NO: 5639676 - DNA, 25 bp, Homo sapien
ctaaagtataagtggttgagtatgt

SEQ ID NO: 5639677 - DNA, 25 bp, Homo sapien
cccagactcaccgaggccccgtcca

SEQ ID NO: 5639678 - DNA, 25 bp, Homo sapien
tggacggggcctcggtgagtctggg

SEQ ID NO: 5639679 - DNA, 25 bp, Homo sapien
tgtgcgacaggtcacccggtacggg

SEQ ID NO: 5639680 - DNA, 25 bp, Homo sapien
cccgtaccgggtgacctgtcgcaca

SEQ ID NO: 5639681 - DNA, 25 bp, Homo sapien
tatacgtatactaaattcatcgtcc

SEQ ID NO: 5639682 - DNA, 25 bp, Homo sapien
ggacgatgaatttagtatacgtata

SEQ ID NO: 5639683 - DNA, 25 bp, Homo sapien
cgggactccatgtcctagacagacg

SEQ ID NO: 5639684 - DNA, 25 bp, Homo sapien
cgtctgtctaggacatggagtcccg

SEQ ID NO: 5639685 - DNA, 25 bp, Homo sapien
gggtcgtccacagaatactacacgt

SEQ ID NO: 5639686 - DNA, 25 bp, Homo sapien
acgtgtagtattctgtggacgaccc

SEQ ID NO: 5639687 - DNA, 25 bp, Homo sapien
gactaacacctaaacactatatttc

SEQ ID NO: 5639688 - DNA, 25 bp, Homo sapien
gaaatatagtgtttaggtgttagtc

SEQ ID NO: 5639689 - DNA, 25 bp, Homo sapien
tgggcacccaggtcaacgtacgttg

SEQ ID NO: 5639690 - DNA, 25 bp, Homo sapien
caacgtacgttgacctgggtgccca

SEQ ID NO: 5639691 - DNA, 25 bp, Homo sapien
cctcgccccactcgcgccgccagga

SEQ ID NO: 5639692 - DNA, 25 bp, Homo sapien
tcctggcggcgcgagtggggcgagg

SEQ ID NO: 5639693 - DNA, 25 bp, Homo sapien
ctgcctcgccccactcgcgccgcca

SEQ ID NO: 5639694 - DNA, 25 bp, Homo sapien
tggcggcgcgagtggggcgaggcag

SEQ ID NO: 5639695 - DNA, 25 bp, Homo sapien
acgcctgcctcgccccactcgcgcc

SEQ ID NO: 5639696 - DNA, 25 bp, Homo sapien
ggcgcgagtggggcgaggcaggcgt

SEQ ID NO: 5639697 - DNA, 25 bp, Homo sapien
aaacggctctcgttgtatactgacg

SEQ ID NO: 5639698 - DNA, 25 bp, Homo sapien
cgtcagtatacaacgagagccgttt

SEQ ID NO: 5639699 - DNA, 25 bp, Homo sapien
acaacacaaaaacgaactcctgtca

SEQ ID NO: 5639700 - DNA, 25 bp, Homo sapien
tgacaggagttcgtttttgtgttgt

SEQ ID NO: 5639701 - DNA, 25 bp, Homo sapien
ccttcagaaaccaaggaggtctaag

SEQ ID NO: 5639702 - DNA, 25 bp, Homo sapien
cttagacctccttggtttctgaagg

SEQ ID NO: 5639703 - DNA, 25 bp, Homo sapien
agttaataagactttatcattcaag

SEQ ID NO: 5639704 - DNA, 25 bp, Homo sapien
cttgaatgataaagtcttattaact

SEQ ID NO: 5639705 - DNA, 25 bp, Homo sapien
gacgaacgtcgaaggaacaccggac

SEQ ID NO: 5639706 - DNA, 25 bp, Homo sapien
gtccggtgttccttcgacgttcgtc

SEQ ID NO: 5639707 - DNA, 25 bp, Homo sapien
aagagacagaagagatgcaatggat

SEQ ID NO: 5639708 - DNA, 25 bp, Homo sapien
atccattgcatctcttctgtctctt

SEQ ID NO: 5639709 - DNA, 25 bp, Homo sapien
agtgaatcaatgactggttaatagt

SEQ ID NO: 5639710 - DNA, 25 bp, Homo sapien
actattaaccagtcattgattcact

SEQ ID NO: 5639711 - DNA, 25 bp, Homo sapien
gttaccgtagtatagaattgtctgt

SEQ ID NO: 5639712 - DNA, 25 bp, Homo sapien
acagacaattctatactacggtaac

SEQ ID NO: 5639713 - DNA, 25 bp, Homo sapien
agataaaggttatatacttacgtat

SEQ ID NO: 5639714 - DNA, 25 bp, Homo sapien
atacgtaagtatataacctttatct

SEQ ID NO: 5639715 - DNA, 25 bp, Homo sapien
taaatgttatctgtaaaggtcaaag

SEQ ID NO: 5639716 - DNA, 25 bp, Homo sapien
ctttgacctttacagataacattta

SEQ ID NO: 5639717 - DNA, 25 bp, Homo sapien
aaatttccattactaataatgttgt

SEQ ID NO: 5639718 - DNA, 25 bp, Homo sapien
acaacattattagtaatggaaattt

SEQ ID NO: 5639719 - DNA, 25 bp, Homo sapien
gaagttcaaaggtgacagttcgaac

SEQ ID NO: 5639720 - DNA, 25 bp, Homo sapien
gttcgaactgtcacctttgaacttc

SEQ ID NO: 5639721 - DNA, 25 bp, Homo sapien
aggtcagagacattaaggaagaaga

SEQ ID NO: 5639722 - DNA, 25 bp, Homo sapien
tcttcttccttaatgtctctgacct

SEQ ID NO: 5639723 - DNA, 25 bp, Homo sapien
aaacatgatttagcataaatacgaa

SEQ ID NO: 5639724 - DNA, 25 bp, Homo sapien
ttcgtatttatgctaaatcatgttt

SEQ ID NO: 5639725 - DNA, 25 bp, Homo sapien
tcagatttaaacgttagacttataa

SEQ ID NO: 5639726 - DNA, 25 bp, Homo sapien
ttataagtctaacgtttaaatctga

SEQ ID NO: 5639727 - DNA, 25 bp, Homo sapien
aattcagatttaaacgttagactta

SEQ ID NO: 5639728 - DNA, 25 bp, Homo sapien
taagtctaacgtttaaatctgaatt

SEQ ID NO: 5639729 - DNA, 25 bp, Homo sapien
gtacacagtcttacatcaagtcatt

SEQ ID NO: 5639730 - DNA, 25 bp, Homo sapien
aatgacttgatgtaagactgtgtac

SEQ ID NO: 5639731 - DNA, 25 bp, Homo sapien
gcacaccggaggctccagctgggtc

SEQ ID NO: 5639732 - DNA, 25 bp, Homo sapien
gacccagctggagcctccggtgtgc

SEQ ID NO: 5639733 - DNA, 25 bp, Homo sapien
gtttttattatcaaacgaattctac

SEQ ID NO: 5639734 - DNA, 25 bp, Homo sapien
gtagaattcgtttgataataaaaac

SEQ ID NO: 5639735 - DNA, 25 bp, Homo sapien
ggcccgctgcgctggtgcgcgggtc

SEQ ID NO: 5639736 - DNA, 25 bp, Homo sapien
gacccgcgcaccagcgcagcgggcc

SEQ ID NO: 5639737 - DNA, 25 bp, Homo sapien
gacaatataaggaacttgaacttag

SEQ ID NO: 5639738 - DNA, 25 bp, Homo sapien
ctaagttcaagttccttatattgtc

SEQ ID NO: 5639739 - DNA, 25 bp, Homo sapien
aacttcaaccgtgtcagtcgtcaac

SEQ ID NO: 5639740 - DNA, 25 bp, Homo sapien
gttgacgactgacacggttgaagtt

SEQ ID NO: 5639741 - DNA, 25 bp, Homo sapien
cgtccggtgcagaaacggtcccgag

SEQ ID NO: 5639742 - DNA, 25 bp, Homo sapien
ctcgggaccgtttctgcaccggacg

SEQ ID NO: 5639743 - DNA, 25 bp, Homo sapien
cacagcagcagggacaaacaagaag

SEQ ID NO: 5639744 - DNA, 25 bp, Homo sapien
cttcttgtttgtccctgctgctgtg

SEQ ID NO: 5639745 - DNA, 25 bp, Homo sapien
ttcagagagcttaacggctaaacag

SEQ ID NO: 5639746 - DNA, 25 bp, Homo sapien
ctgtttagccgttaagctctctgaa

SEQ ID NO: 5639747 - DNA, 25 bp, Homo sapien
tcgtcgtcaccgatagaccttttcc

SEQ ID NO: 5639748 - DNA, 25 bp, Homo sapien
ggaaaaggtctatcggtgacgacga

SEQ ID NO: 5639749 - DNA, 25 bp, Homo sapien
tctgtgataggattagaggtattac

SEQ ID NO: 5639750 - DNA, 25 bp, Homo sapien
gtaatacctctaatcctatcacaga

SEQ ID NO: 5639751 - DNA, 25 bp, Homo sapien
atccgggtaggaagcgaacacactc

SEQ ID NO: 5639752 - DNA, 25 bp, Homo sapien
gagtgtgttcgcttcctacccggat

SEQ ID NO: 5639753 - DNA, 25 bp, Homo sapien
tttaaaatcttcaacctagaaatat

SEQ ID NO: 5639754 - DNA, 25 bp, Homo sapien
atatttctaggttgaagattttaaa

SEQ ID NO: 5639755 - DNA, 25 bp, Homo sapien
ggctgatctcgctggtattagtgct

SEQ ID NO: 5639756 - DNA, 25 bp, Homo sapien
agcactaataccagcgagatcagcc

SEQ ID NO: 5639757 - DNA, 25 bp, Homo sapien
taattgcatgagatttttagagtat

SEQ ID NO: 5639758 - DNA, 25 bp, Homo sapien
atactctaaaaatctcatgcaatta

SEQ ID NO: 5639759 - DNA, 25 bp, Homo sapien
gtggtgcgactgtaatggacaaact

SEQ ID NO: 5639760 - DNA, 25 bp, Homo sapien
agtttgtccattacagtcgcaccac

SEQ ID NO: 5639761 - DNA, 25 bp, Homo sapien
gagggcgtgcgaccggggccgcgcg

SEQ ID NO: 5639762 - DNA, 25 bp, Homo sapien
cgcgcggccccggtcgcacgccctc

SEQ ID NO: 5639763 - DNA, 25 bp, Homo sapien
acttgaagtgtcataccagtggacg

SEQ ID NO: 5639764 - DNA, 25 bp, Homo sapien
cgtccactggtatgacacttcaagt

SEQ ID NO: 5639765 - DNA, 25 bp, Homo sapien
gacctggagccgtgggcgacccgga

SEQ ID NO: 5639766 - DNA, 25 bp, Homo sapien
tccgggtcgcccacggctccaggtc

SEQ ID NO: 5639767 - DNA, 25 bp, Homo sapien
ggacctggagccgtgggcgacccgg

SEQ ID NO: 5639768 - DNA, 25 bp, Homo sapien
ccgggtcgcccacggctccaggtcc

SEQ ID NO: 5639769 - DNA, 25 bp, Homo sapien
aatatttattgtgagcggaaagttt

SEQ ID NO: 5639770 - DNA, 25 bp, Homo sapien
aaactttccgctcacaataaatatt

SEQ ID NO: 5639771 - DNA, 25 bp, Homo sapien
gaaacaagaatttaagtgcaccttt

SEQ ID NO: 5639772 - DNA, 25 bp, Homo sapien
aaaggtgcacttaaattcttgtttc

SEQ ID NO: 5639773 - DNA, 25 bp, Homo sapien
gggccacgtccacaggttgtcccag

SEQ ID NO: 5639774 - DNA, 25 bp, Homo sapien
ctgggacaacctgtggacgtggccc

SEQ ID NO: 5639775 - DNA, 25 bp, Homo sapien
gtattgtacctaataaaatctaaaa

SEQ ID NO: 5639776 - DNA, 25 bp, Homo sapien
ttttagattttattaggtacaatac

SEQ ID NO: 5639777 - DNA, 25 bp, Homo sapien
cgtagcgtcccgcaggccaacaccc

SEQ ID NO: 5639778 - DNA, 25 bp, Homo sapien
gggtgttggcctgcgggacgctacg

SEQ ID NO: 5639779 - DNA, 25 bp, Homo sapien
cagaatttggattacaagtcttaca

SEQ ID NO: 5639780 - DNA, 25 bp, Homo sapien
tgtaagacttgtaatccaaattctg

SEQ ID NO: 5639781 - DNA, 25 bp, Homo sapien
taaacttataccctcataaactgta

SEQ ID NO: 5639782 - DNA, 25 bp, Homo sapien
tacagtttatgagggtataagttta

SEQ ID NO: 5639783 - DNA, 25 bp, Homo sapien
gttacgataacgagagacctccgac

SEQ ID NO: 5639784 - DNA, 25 bp, Homo sapien
gtcggaggtctctcgttatcgtaac

SEQ ID NO: 5639785 - DNA, 25 bp, Homo sapien
caaccctcgcgcacaggcgtcccac

SEQ ID NO: 5639786 - DNA, 25 bp, Homo sapien
gtgggacgcctgtgcgcgagggttg

SEQ ID NO: 5639787 - DNA, 25 bp, Homo sapien
gcctacaaccctcgcgcacaggcgt

SEQ ID NO: 5639788 - DNA, 25 bp, Homo sapien
acgcctgtgcgcgagggttgtaggc

SEQ ID NO: 5639789 - DNA, 25 bp, Homo sapien
acccaccgacagtcgtatgtcccac

SEQ ID NO: 5639790 - DNA, 25 bp, Homo sapien
gtgggacatacgactgtcggtgggt

SEQ ID NO: 5639791 - DNA, 25 bp, Homo sapien
tcttcggtgtctctcacttccgtgt

SEQ ID NO: 5639792 - DNA, 25 bp, Homo sapien
acacggaagtgagagacaccgaaga

SEQ ID NO: 5639793 - DNA, 25 bp, Homo sapien
ctgcccctcccgcacgcgctcggag

SEQ ID NO: 5639794 - DNA, 25 bp, Homo sapien
ctccgagcgcgtgcgggaggggcag

SEQ ID NO: 5639795 - DNA, 25 bp, Homo sapien
gtctgggagccttgcgcccacctgc

SEQ ID NO: 5639796 - DNA, 25 bp, Homo sapien
gcaggtgggcgcaaggctcccagac

SEQ ID NO: 5639797 - DNA, 25 bp, Homo sapien
gttaagaacacaagggacaggaact

SEQ ID NO: 5639798 - DNA, 25 bp, Homo sapien
agttcctgtcccttgtgttcttaac

SEQ ID NO: 5639799 - DNA, 25 bp, Homo sapien
agaggctaggatcattatcaaatac

SEQ ID NO: 5639800 - DNA, 25 bp, Homo sapien
gtatttgataatgatcctagcctct

SEQ ID NO: 5639801 - DNA, 25 bp, Homo sapien
gggtttatattttctgaacaccaag

SEQ ID NO: 5639802 - DNA, 25 bp, Homo sapien
cttggtgttcagaaaatataaaccc

SEQ ID NO: 5639803 - DNA, 25 bp, Homo sapien
tatttccatttgttaaggtaatggt

SEQ ID NO: 5639804 - DNA, 25 bp, Homo sapien
accattaccttaacaaatggaaata

SEQ ID NO: 5639805 - DNA, 25 bp, Homo sapien
agactctcatcggtggtcttagacg

SEQ ID NO: 5639806 - DNA, 25 bp, Homo sapien
cgtctaagaccaccgatgagagtct

SEQ ID NO: 5639807 - DNA, 25 bp, Homo sapien
aagagccgaacatcttggccctcgc

SEQ ID NO: 5639808 - DNA, 25 bp, Homo sapien
gcgagggccaagatgttcggctctt

SEQ ID NO: 5639809 - DNA, 25 bp, Homo sapien
gaggcgggggtgctggtcgcagctg

SEQ ID NO: 5639810 - DNA, 25 bp, Homo sapien
cagctgcgaccagcacccccgcctc

SEQ ID NO: 5639811 - DNA, 25 bp, Homo sapien
gcatctgtggaatcgtacacccgag

SEQ ID NO: 5639812 - DNA, 25 bp, Homo sapien
ctcgggtgtacgattccacagatgc

SEQ ID NO: 5639813 - DNA, 25 bp, Homo sapien
agatactcacgatgtagcatcaacc

SEQ ID NO: 5639814 - DNA, 25 bp, Homo sapien
ggttgatgctacatcgtgagtatct

SEQ ID NO: 5639815 - DNA, 25 bp, Homo sapien
cgtgtgacggtggagcgacggtgtt

SEQ ID NO: 5639816 - DNA, 25 bp, Homo sapien
aacaccgtcgctccaccgtcacacg

SEQ ID NO: 5639817 - DNA, 25 bp, Homo sapien
gacctttaacaacattatccgtcgt

SEQ ID NO: 5639818 - DNA, 25 bp, Homo sapien
acgacggataatgttgttaaaggtc

SEQ ID NO: 5639819 - DNA, 25 bp, Homo sapien
acctttcacttcaagtctataaaat

SEQ ID NO: 5639820 - DNA, 25 bp, Homo sapien
attttatagacttgaagtgaaaggt

SEQ ID NO: 5639821 - DNA, 25 bp, Homo sapien
tttattcggttcactcaccccctga

SEQ ID NO: 5639822 - DNA, 25 bp, Homo sapien
tcagggggtgagtgaaccgaataaa

SEQ ID NO: 5639823 - DNA, 25 bp, Homo sapien
aaacaacaagtaaacgctcaaagag

SEQ ID NO: 5639824 - DNA, 25 bp, Homo sapien
ctctttgagcgtttacttgttgttt

SEQ ID NO: 5639825 - DNA, 25 bp, Homo sapien
gcggaaactcgctgtcgtcgtcggc

SEQ ID NO: 5639826 - DNA, 25 bp, Homo sapien
gccgacgacgacagcgagtttccgc

SEQ ID NO: 5639827 - DNA, 25 bp, Homo sapien
acgtcctattagaacgttctactac

SEQ ID NO: 5639828 - DNA, 25 bp, Homo sapien
gtagtagaacgttctaataggacgt

SEQ ID NO: 5639829 - DNA, 25 bp, Homo sapien
cagaggtactcaggcactgtcgacg

SEQ ID NO: 5639830 - DNA, 25 bp, Homo sapien
cgtcgacagtgcctgagtacctctg

SEQ ID NO: 5639831 - DNA, 25 bp, Homo sapien
tcgtataaattataaccccattatt

SEQ ID NO: 5639832 - DNA, 25 bp, Homo sapien
aataatggggttataatttatacga

SEQ ID NO: 5639833 - DNA, 25 bp, Homo sapien
aatctttattaaccatgtgtcttcg

SEQ ID NO: 5639834 - DNA, 25 bp, Homo sapien
cgaagacacatggttaataaagatt

SEQ ID NO: 5639835 - DNA, 25 bp, Homo sapien
gatgtcgacctttcgctttttatat

SEQ ID NO: 5639836 - DNA, 25 bp, Homo sapien
atataaaaagcgaaaggtcgacatc

SEQ ID NO: 5639837 - DNA, 25 bp, Homo sapien
aaaggtttgaagtcctgactagaag

SEQ ID NO: 5639838 - DNA, 25 bp, Homo sapien
cttctagtcaggacttcaaaccttt

SEQ ID NO: 5639839 - DNA, 25 bp, Homo sapien
gatctccccgggtcggcgccgtggg

SEQ ID NO: 5639840 - DNA, 25 bp, Homo sapien
cccacggcgccgacccggggagatc

SEQ ID NO: 5639841 - DNA, 25 bp, Homo sapien
ctttttgagcttccgatcctacacg

SEQ ID NO: 5639842 - DNA, 25 bp, Homo sapien
cgtgtaggatcggaagctcaaaaag

SEQ ID NO: 5639843 - DNA, 25 bp, Homo sapien
cataaaacattcggtataaaactgt

SEQ ID NO: 5639844 - DNA, 25 bp, Homo sapien
acagttttataccgaatgttttatg

SEQ ID NO: 5639845 - DNA, 25 bp, Homo sapien
ctcctatggtagcttagagtctttg

SEQ ID NO: 5639846 - DNA, 25 bp, Homo sapien
caaagactctaagctaccataggag

SEQ ID NO: 5639847 - DNA, 25 bp, Homo sapien
tcccctccggcacaatctgtaccgg

SEQ ID NO: 5639848 - DNA, 25 bp, Homo sapien
ccggtacagattgtgccggagggga

SEQ ID NO: 5639849 - DNA, 25 bp, Homo sapien
cgggctgcgggcgtctagggcagcg

SEQ ID NO: 5639850 - DNA, 25 bp, Homo sapien
cgctgccctagacgcccgcagcccg

SEQ ID NO: 5639851 - DNA, 25 bp, Homo sapien
cagcatcgttctaccagtggagaca

SEQ ID NO: 5639852 - DNA, 25 bp, Homo sapien
tgtctccactggtagaacgatgctg

SEQ ID NO: 5639853 - DNA, 25 bp, Homo sapien
gaaagagaacgtcccatcgtacacg

SEQ ID NO: 5639854 - DNA, 25 bp, Homo sapien
cgtgtacgatgggacgttctctttc

SEQ ID NO: 5639855 - DNA, 25 bp, Homo sapien
cacttacattggataggaataacag

SEQ ID NO: 5639856 - DNA, 25 bp, Homo sapien
ctgttattcctatccaatgtaagtg

SEQ ID NO: 5639857 - DNA, 25 bp, Homo sapien
gtaagtaagtagctaagtctttaaa

SEQ ID NO: 5639858 - DNA, 25 bp, Homo sapien
tttaaagacttagctacttacttac

SEQ ID NO: 5639859 - DNA, 25 bp, Homo sapien
gaaacgtttaaacattcagacaacg

SEQ ID NO: 5639860 - DNA, 25 bp, Homo sapien
cgttgtctgaatgtttaaacgtttc

SEQ ID NO: 5639861 - DNA, 25 bp, Homo sapien
cagaggaggaaatgtcgtcccgagt

SEQ ID NO: 5639862 - DNA, 25 bp, Homo sapien
actcgggacgacatttcctcctctg

SEQ ID NO: 5639863 - DNA, 25 bp, Homo sapien
gtctaccgatgaagtaatcacctaa

SEQ ID NO: 5639864 - DNA, 25 bp, Homo sapien
ttaggtgattacttcatcggtagac

SEQ ID NO: 5639865 - DNA, 25 bp, Homo sapien
cttgtagcacaagtgtaaacataat

SEQ ID NO: 5639866 - DNA, 25 bp, Homo sapien
attatgtttacacttgtgctacaag

SEQ ID NO: 5639867 - DNA, 25 bp, Homo sapien
gttttctatagactctataatatag

SEQ ID NO: 5639868 - DNA, 25 bp, Homo sapien
ctatattatagagtctatagaaaac

SEQ ID NO: 5639869 - DNA, 25 bp, Homo sapien
cgaggttccccggaggtccatggac

SEQ ID NO: 5639870 - DNA, 25 bp, Homo sapien
gtccatggacctccggggaacctcg

SEQ ID NO: 5639871 - DNA, 25 bp, Homo sapien
gtcaccagcgtgtacaaggagaagg

SEQ ID NO: 5639872 - DNA, 25 bp, Homo sapien
ccttctccttgtacacgctggtgac

SEQ ID NO: 5639873 - DNA, 25 bp, Homo sapien
cgacggaacatatgcacagtgacct

SEQ ID NO: 5639874 - DNA, 25 bp, Homo sapien
aggtcactgtgcatatgttccgtcg

SEQ ID NO: 5639875 - DNA, 25 bp, Homo sapien
ccagattatatcaaagtctgtcaac

SEQ ID NO: 5639876 - DNA, 25 bp, Homo sapien
gttgacagactttgatataatctgg

SEQ ID NO: 5639877 - DNA, 25 bp, Homo sapien
gtcgacctgtaggtgagccgcgtcc

SEQ ID NO: 5639878 - DNA, 25 bp, Homo sapien
ggacgcggctcacctacaggtcgac

SEQ ID NO: 5639879 - DNA, 25 bp, Homo sapien
ccgtcgtccacccgtcagcaccatg

SEQ ID NO: 5639880 - DNA, 25 bp, Homo sapien
catggtgctgacgggtggacgacgg

SEQ ID NO: 5639881 - DNA, 25 bp, Homo sapien
cacacactcttctcggagggtacgt

SEQ ID NO: 5639882 - DNA, 25 bp, Homo sapien
acgtaccctccgagaagagtgtgtg

SEQ ID NO: 5639883 - DNA, 25 bp, Homo sapien
cacaaagatgtcgtggaacgtgtag

SEQ ID NO: 5639884 - DNA, 25 bp, Homo sapien
ctacacgttccacgacatctttgtg

SEQ ID NO: 5639885 - DNA, 25 bp, Homo sapien
cgtaccggtagagcagggcgaagcc

SEQ ID NO: 5639886 - DNA, 25 bp, Homo sapien
ggcttcgccctgctctaccggtacg

SEQ ID NO: 5639887 - DNA, 25 bp, Homo sapien
ttgtatggctgatcataatacgaat

SEQ ID NO: 5639888 - DNA, 25 bp, Homo sapien
attcgtattatgatcagccatacaa

SEQ ID NO: 5639889 - DNA, 25 bp, Homo sapien
ttcttcgacgtacacgagtctttct

SEQ ID NO: 5639890 - DNA, 25 bp, Homo sapien
agaaagactcgtgtacgtcgaagaa

SEQ ID NO: 5639891 - DNA, 25 bp, Homo sapien
gaaaccccgatgaagacaaaggagt

SEQ ID NO: 5639892 - DNA, 25 bp, Homo sapien
actcctttgtcttcatcggggtttc

SEQ ID NO: 5639893 - DNA, 25 bp, Homo sapien
gccggcacggtcgacgggagggtga

SEQ ID NO: 5639894 - DNA, 25 bp, Homo sapien
tcaccctcccgtcgaccgtgccggc

SEQ ID NO: 5639895 - DNA, 25 bp, Homo sapien
gtcggggccggcacggtcgacggga

SEQ ID NO: 5639896 - DNA, 25 bp, Homo sapien
tcccgtcgaccgtgccggccccgac

SEQ ID NO: 5639897 - DNA, 25 bp, Homo sapien
ccggcacggtcgacgggagggtgac

SEQ ID NO: 5639898 - DNA, 25 bp, Homo sapien
gtcaccctcccgtcgaccgtgccgg

SEQ ID NO: 5639899 - DNA, 25 bp, Homo sapien
gacgacctcgggagtgacagtcgtg

SEQ ID NO: 5639900 - DNA, 25 bp, Homo sapien
cacgactgtcactcccgaggtcgtc

SEQ ID NO: 5639901 - DNA, 25 bp, Homo sapien
gggagtgacagtcgtggaggcgtcc

SEQ ID NO: 5639902 - DNA, 25 bp, Homo sapien
ggacgcctccacgactgtcactccc

SEQ ID NO: 5639903 - DNA, 25 bp, Homo sapien
cttctcggtcccacaggccggtggt

SEQ ID NO: 5639904 - DNA, 25 bp, Homo sapien
accaccggcctgtgggaccgagaag

SEQ ID NO: 5639905 - DNA, 25 bp, Homo sapien
gacatccgattgtcgtattgattag

SEQ ID NO: 5639906 - DNA, 25 bp, Homo sapien
ctaatcaatacgacaatcggatgtc

SEQ ID NO: 5639907 - DNA, 25 bp, Homo sapien
tcaccaatgtgtaaggacccgacgg

SEQ ID NO: 5639908 - DNA, 25 bp, Homo sapien
ccgtcgggtccttacacattggtga

SEQ ID NO: 5639909 - DNA, 25 bp, Homo sapien
acgcacctgggccggtgggccgatc

SEQ ID NO: 5639910 - DNA, 25 bp, Homo sapien
gatcggcccaccggcccaggtgcgt

SEQ ID NO: 5639911 - DNA, 25 bp, Homo sapien
cgcgtgtgtcacctccttctgacgt

SEQ ID NO: 5639912 - DNA, 25 bp, Homo sapien
acgtcagaaggaggtgacacacgcg

SEQ ID NO: 5639913 - DNA, 25 bp, Homo sapien
ttcagtaagagttacacccctcccc

SEQ ID NO: 5639914 - DNA, 25 bp, Homo sapien
ggggaggggtgtaactcttactgaa

SEQ ID NO: 5639915 - DNA, 25 bp, Homo sapien
aacgataggtgtcatttccacgaag

SEQ ID NO: 5639916 - DNA, 25 bp, Homo sapien
cttcgtggaaatgacacctatcgtt

SEQ ID NO: 5639917 - DNA, 25 bp, Homo sapien
agtacacatcgagtgttgacaagga

SEQ ID NO: 5639918 - DNA, 25 bp, Homo sapien
tccttgtcaacactcgatgtgtact

SEQ ID NO: 5639919 - DNA, 25 bp, Homo sapien
atcccgacgtcccccatggcctcgg

SEQ ID NO: 5639920 - DNA, 25 bp, Homo sapien
ccgaggccatgggggacgtcgggat

SEQ ID NO: 5639921 - DNA, 25 bp, Homo sapien
tttgaactaagagaaatccgtttaa

SEQ ID NO: 5639922 - DNA, 25 bp, Homo sapien
ttaaacggatttctcttagttcaaa

SEQ ID NO: 5639923 - DNA, 25 bp, Homo sapien
gttcaacggagtttaggacaaatct

SEQ ID NO: 5639924 - DNA, 25 bp, Homo sapien
agatttgtcctaaactccgttgaac

SEQ ID NO: 5639925 - DNA, 25 bp, Homo sapien
ccacggtcttcgattcctagagacg

SEQ ID NO: 5639926 - DNA, 25 bp, Homo sapien
cgtctctaggaatcgaagaccgtgg

SEQ ID NO: 5639927 - DNA, 25 bp, Homo sapien
cgaccgagccaaaagatttctggat

SEQ ID NO: 5639928 - DNA, 25 bp, Homo sapien
atccagaaatcttttggctcggtcg

SEQ ID NO: 5639929 - DNA, 25 bp, Homo sapien
tctctcaacctaaacatgtgctacg

SEQ ID NO: 5639930 - DNA, 25 bp, Homo sapien
cgtagcacatgtttaggttgagaga

SEQ ID NO: 5639931 - DNA, 25 bp, Homo sapien
gaaccgactcagaggggattcctcg

SEQ ID NO: 5639932 - DNA, 25 bp, Homo sapien
cgaggaatcccctctgagtcggttc

SEQ ID NO: 5639933 - DNA, 25 bp, Homo sapien
aggtcaggagaatcctagcacggag

SEQ ID NO: 5639934 - DNA, 25 bp, Homo sapien
ctccgtgctaggattctcctgacct

SEQ ID NO: 5639935 - DNA, 25 bp, Homo sapien
taagaagggcatcttaaagatgggt

SEQ ID NO: 5639936 - DNA, 25 bp, Homo sapien
acccatctttaagatgcccttctta

SEQ ID NO: 5639937 - DNA, 25 bp, Homo sapien
gagccggcgcccctcagaaccgacg

SEQ ID NO: 5639938 - DNA, 25 bp, Homo sapien
cgtcggttctgaggggcgccggctc

SEQ ID NO: 5639939 - DNA, 25 bp, Homo sapien
tctatcatctacatcagaaccccgg

SEQ ID NO: 5639940 - DNA, 25 bp, Homo sapien
ccggggttctgatgtagatgataga

SEQ ID NO: 5639941 - DNA, 25 bp, Homo sapien
tcccagggtgcactcgaggtggcgc

SEQ ID NO: 5639942 - DNA, 25 bp, Homo sapien
gcgccacctcgagtgcaccctggga

SEQ ID NO: 5639943 - DNA, 25 bp, Homo sapien
gggtgcactcgaggtggcgcccgtc

SEQ ID NO: 5639944 - DNA, 25 bp, Homo sapien
gacgggcgccacctcgagtgcaccc

SEQ ID NO: 5639945 - DNA, 25 bp, Homo sapien
ttgagttaacattccagtcctgggt

SEQ ID NO: 5639946 - DNA, 25 bp, Homo sapien
acccaggactggaatgttaactcaa

SEQ ID NO: 5639947 - DNA, 25 bp, Homo sapien
cttccggcgattgtctcgaagtccc

SEQ ID NO: 5639948 - DNA, 25 bp, Homo sapien
gggacttcgagacaatcgccggaag

SEQ ID NO: 5639949 - DNA, 25 bp, Homo sapien
acaacacttcgaaaaaccgattcag

SEQ ID NO: 5639950 - DNA, 25 bp, Homo sapien
ctgaatcggtttttcgaagtgttgt

SEQ ID NO: 5639951 - DNA, 25 bp, Homo sapien
agtgtgtaggtgtccacgggaggaa

SEQ ID NO: 5639952 - DNA, 25 bp, Homo sapien
ttcctcccgtggacacctacacact

SEQ ID NO: 5639953 - DNA, 25 bp, Homo sapien
aggtccctgaaatacggttgtctaa

SEQ ID NO: 5639954 - DNA, 25 bp, Homo sapien
ttagacaaccgtatttcagggacct

SEQ ID NO: 5639955 - DNA, 25 bp, Homo sapien
tctgaatctttgaacaataaataat

SEQ ID NO: 5639956 - DNA, 25 bp, Homo sapien
attatttattgttcaaagattcaga

SEQ ID NO: 5639957 - DNA, 25 bp, Homo sapien
actatctgaatcaaggttttctaag

SEQ ID NO: 5639958 - DNA, 25 bp, Homo sapien
cttagaaaaccttgattcagatagt

SEQ ID NO: 5639959 - DNA, 25 bp, Homo sapien
cggagatacagtaatgtgaactaga

SEQ ID NO: 5639960 - DNA, 25 bp, Homo sapien
tctagttcacattactgtatctccg

SEQ ID NO: 5639961 - DNA, 25 bp, Homo sapien
caggtatccgggacctgctcccgag

SEQ ID NO: 5639962 - DNA, 25 bp, Homo sapien
ctcgggagcaggtcccggatacctg

SEQ ID NO: 5639963 - DNA, 25 bp, Homo sapien
gtgccccgcgtcctacaggacgccc

SEQ ID NO: 5639964 - DNA, 25 bp, Homo sapien
gggcgtcctgtaggacgcggggcac

SEQ ID NO: 5639965 - DNA, 25 bp, Homo sapien
gcagaggagtcgctgcggacacagc

SEQ ID NO: 5639966 - DNA, 25 bp, Homo sapien
gctgtgtccgcagcgactcctctgc

SEQ ID NO: 5639967 - DNA, 25 bp, Homo sapien
gacgttcgaagagcggtcgtccccg

SEQ ID NO: 5639968 - DNA, 25 bp, Homo sapien
cggggacgaccgctcttcgaacgtc

SEQ ID NO: 5639969 - DNA, 25 bp, Homo sapien
cgctttacaaaaatgtctgaggcag

SEQ ID NO: 5639970 - DNA, 25 bp, Homo sapien
ctgcctcagacatttttgtaaagcg

SEQ ID NO: 5639971 - DNA, 25 bp, Homo sapien
ggactcccgccgtagtgcccctgga

SEQ ID NO: 5639972 - DNA, 25 bp, Homo sapien
tccaggggcactacggcgggagtcc

SEQ ID NO: 5639973 - DNA, 25 bp, Homo sapien
attattatacagagaagtcatttaa

SEQ ID NO: 5639974 - DNA, 25 bp, Homo sapien
ttaaatgacttctctgtataataat

SEQ ID NO: 5639975 - DNA, 25 bp, Homo sapien
ccggggagtgccgacccgtgtggac

SEQ ID NO: 5639976 - DNA, 25 bp, Homo sapien
gtccacacgggtcggcactccccgg

SEQ ID NO: 5639977 - DNA, 25 bp, Homo sapien
cgtcccggcgtctccggtgcccgag

SEQ ID NO: 5639978 - DNA, 25 bp, Homo sapien
ctcgggcaccggagacgccgggacg

SEQ ID NO: 5639979 - DNA, 25 bp, Homo sapien
tgcgtcccggcgtctccggtgcccg

SEQ ID NO: 5639980 - DNA, 25 bp, Homo sapien
cgggcaccggagacgccgggacgca

SEQ ID NO: 5639981 - DNA, 25 bp, Homo sapien
ggcggggtgaccgaacacagtcgtg

SEQ ID NO: 5639982 - DNA, 25 bp, Homo sapien
cacgactgtgttcggtcaccccgcc

SEQ ID NO: 5639983 - DNA, 25 bp, Homo sapien
gaggacgtccgaaggccccgtcact

SEQ ID NO: 5639984 - DNA, 25 bp, Homo sapien
agtgacggggccttcggacgtcctc

SEQ ID NO: 5639985 - DNA, 25 bp, Homo sapien
atagtatttataattctccttacat

SEQ ID NO: 5639986 - DNA, 25 bp, Homo sapien
atgtaaggagaattataaatactat

SEQ ID NO: 5639987 - DNA, 25 bp, Homo sapien
aatagtatttataattctccttaca

SEQ ID NO: 5639988 - DNA, 25 bp, Homo sapien
tgtaaggagaattataaatactatt

SEQ ID NO: 5639989 - DNA, 25 bp, Homo sapien
gaccatgggactattgaagaagagt

SEQ ID NO: 5639990 - DNA, 25 bp, Homo sapien
actcttcttcaatagtcccatggtc

SEQ ID NO: 5639991 - DNA, 25 bp, Homo sapien
gtaccgggaagtctgaggcttaagg

SEQ ID NO: 5639992 - DNA, 25 bp, Homo sapien
ccttaagcctcagacttcccggtac

SEQ ID NO: 5639993 - DNA, 25 bp, Homo sapien
ggctccgtccattcttcggaggagg

SEQ ID NO: 5639994 - DNA, 25 bp, Homo sapien
cctcctccgaagaatggacggagcc

SEQ ID NO: 5639995 - DNA, 25 bp, Homo sapien
ttcttcaccgaagtggtcattatag

SEQ ID NO: 5639996 - DNA, 25 bp, Homo sapien
ctataatgaccacttcggtgaagaa

SEQ ID NO: 5639997 - DNA, 25 bp, Homo sapien
tcgaggtgcaactccagcggacgtc

SEQ ID NO: 5639998 - DNA, 25 bp, Homo sapien
gacgtccgctggagttgcacctcga

SEQ ID NO: 5639999 - DNA, 25 bp, Homo sapien
cgccgcgcgtcggccctgtcagagc

SEQ ID NO: 5640000 - DNA, 25 bp, Homo sapien
gctctgacagggccgacgcgcggcg

SEQ ID NO: 5640001 - DNA, 25 bp, Homo sapien
cgcgcgtcggccctgtcagagcgta

SEQ ID NO: 5640002 - DNA, 25 bp, Homo sapien
tacgctctgacagggccgacgcgcg

SEQ ID NO: 5640003 - DNA, 25 bp, Homo sapien
aatgttaaagcctcctaaagtgttg

SEQ ID NO: 5640004 - DNA, 25 bp, Homo sapien
caacactttaggaggctttaacatt

SEQ ID NO: 5640005 - DNA, 25 bp, Homo sapien
tctgtcttcaaagctttatcttgag

SEQ ID NO: 5640006 - DNA, 25 bp, Homo sapien
ctcaagataaagctttgaagacaga

SEQ ID NO: 5640007 - DNA, 25 bp, Homo sapien
agaacggagacaagggaacgtgtag

SEQ ID NO: 5640008 - DNA, 25 bp, Homo sapien
ctacacgttcccttgtctccgttct

SEQ ID NO: 5640009 - DNA, 25 bp, Homo sapien
gccactgccgccgaaacacacacca

SEQ ID NO: 5640010 - DNA, 25 bp, Homo sapien
tggtgtgtgtttcggcggcagtggc

SEQ ID NO: 5640011 - DNA, 25 bp, Homo sapien
gggtccctggcccacgtcgggacag

SEQ ID NO: 5640012 - DNA, 25 bp, Homo sapien
ctgtcccgacgtgggccagggaccc

SEQ ID NO: 5640013 - DNA, 25 bp, Homo sapien
gataagtatcataaacaataacata

SEQ ID NO: 5640014 - DNA, 25 bp, Homo sapien
tatgttattgtttatgatacttatc

SEQ ID NO: 5640015 - DNA, 25 bp, Homo sapien
atacaagtcagtctaagttagctcg

SEQ ID NO: 5640016 - DNA, 25 bp, Homo sapien
cgagctaacttagactgacttgtat

SEQ ID NO: 5640017 - DNA, 25 bp, Homo sapien
ggagaccacccctcaggttaggact

SEQ ID NO: 5640018 - DNA, 25 bp, Homo sapien
agtcctaacctgaggggtggtctcc

SEQ ID NO: 5640019 - DNA, 25 bp, Homo sapien
gtgggcccagttcgcgcgaggcggc

SEQ ID NO: 5640020 - DNA, 25 bp, Homo sapien
gccgcctcgcgcgaactgggcccac

SEQ ID NO: 5640021 - DNA, 25 bp, Homo sapien
cggtgggcccagttcgcgcgaggcg

SEQ ID NO: 5640022 - DNA, 25 bp, Homo sapien
cgcctcgcgcgaactgggcccaccg

SEQ ID NO: 5640023 - DNA, 25 bp, Homo sapien
gcccggtgggcccagttcgcgcgag

SEQ ID NO: 5640024 - DNA, 25 bp, Homo sapien
ctcgcgcgaactgggcccaccgggc

SEQ ID NO: 5640025 - DNA, 25 bp, Homo sapien
gtagttttgactgataaaatattaa

SEQ ID NO: 5640026 - DNA, 25 bp, Homo sapien
ttaatattttatcagtcaaaactac

SEQ ID NO: 5640027 - DNA, 25 bp, Homo sapien
taactatatgaatacctaaaatctt

SEQ ID NO: 5640028 - DNA, 25 bp, Homo sapien
aagattttaggtattcatatagtta

SEQ ID NO: 5640029 - DNA, 25 bp, Homo sapien
aaaagtctcattcaataatttcgac

SEQ ID NO: 5640030 - DNA, 25 bp, Homo sapien
gtcgaaattattgaatgagactttt

SEQ ID NO: 5640031 - DNA, 25 bp, Homo sapien
gagtaatcaaaaaagtctcattcaa

SEQ ID NO: 5640032 - DNA, 25 bp, Homo sapien
ttgaatgagacttttttgattactc

SEQ ID NO: 5640033 - DNA, 25 bp, Homo sapien
gaccactcgacagtctctctcgtgt

SEQ ID NO: 5640034 - DNA, 25 bp, Homo sapien
acacgagagagactgtcgagtggtc

SEQ ID NO: 5640035 - DNA, 25 bp, Homo sapien
acgtgcacaccctcgaggcgacacc

SEQ ID NO: 5640036 - DNA, 25 bp, Homo sapien
ggtgtcgcctcgagggtgtgcacgt

SEQ ID NO: 5640037 - DNA, 25 bp, Homo sapien
cctggtgccgggagtcaccggccgt

SEQ ID NO: 5640038 - DNA, 25 bp, Homo sapien
acggccggtgactcccggcaccagg

SEQ ID NO: 5640039 - DNA, 25 bp, Homo sapien
ctcgtcgcacccgtcgggaccgcga

SEQ ID NO: 5640040 - DNA, 25 bp, Homo sapien
tcgcggtcccgacgggtgcgacgag

SEQ ID NO: 5640041 - DNA, 25 bp, Homo sapien
gaacatatattgatctcctaagaaa

SEQ ID NO: 5640042 - DNA, 25 bp, Homo sapien
tttcttaggagatcaatatatgttc

SEQ ID NO: 5640043 - DNA, 25 bp, Homo sapien
ggctgggcccgtgttcagttaagac

SEQ ID NO: 5640044 - DNA, 25 bp, Homo sapien
gtcttaactgaacacgggcccagcc

SEQ ID NO: 5640045 - DNA, 25 bp, Homo sapien
accggacgggccgcaggcgtgtccc

SEQ ID NO: 5640046 - DNA, 25 bp, Homo sapien
gggacacgcctgcggcccgtccggt

SEQ ID NO: 5640047 - DNA, 25 bp, Homo sapien
cgcggccggcgccgatcgcgcttcg

SEQ ID NO: 5640048 - DNA, 25 bp, Homo sapien
cgaagcgcgatcggcgccggccgcg

SEQ ID NO: 5640049 - DNA, 25 bp, Homo sapien
ggaagtcctggtgagtcttcgtccc

SEQ ID NO: 5640050 - DNA, 25 bp, Homo sapien
gggacgaagactcaccaggacttcc

SEQ ID NO: 5640051 - DNA, 25 bp, Homo sapien
ctttctcactcaggatgccatcagt

SEQ ID NO: 5640052 - DNA, 25 bp, Homo sapien
actgatggcatcctgagtgagaaag

SEQ ID NO: 5640053 - DNA, 25 bp, Homo sapien
ccaggggcccccgtcaccagtctac

SEQ ID NO: 5640054 - DNA, 25 bp, Homo sapien
gtagactggtgacgggggcccctgg

SEQ ID NO: 5640055 - DNA, 25 bp, Homo sapien
ggaccatttacacatggacgtcggg

SEQ ID NO: 5640056 - DNA, 25 bp, Homo sapien
cccgacgtccatgtgtaaatggtcc

SEQ ID NO: 5640057 - DNA, 25 bp, Homo sapien
agaagaggagaggttatcagaactt

SEQ ID NO: 5640058 - DNA, 25 bp, Homo sapien
aagttctgataacctctcctcttct

SEQ ID NO: 5640059 - DNA, 25 bp, Homo sapien
tggtttccccatcaatcttcgacta

SEQ ID NO: 5640060 - DNA, 25 bp, Homo sapien
tagtcgaagattgatggggaaacca

SEQ ID NO: 5640061 - DNA, 25 bp, Homo sapien
tataaacaaacgtcaattaatagga

SEQ ID NO: 5640062 - DNA, 25 bp, Homo sapien
tcctattaattgacgtttgtttata

SEQ ID NO: 5640063 - DNA, 25 bp, Homo sapien
ggaagtgtgaagtacggtatgaaga

SEQ ID NO: 5640064 - DNA, 25 bp, Homo sapien
tcttcataccgtacttcacacttcc

SEQ ID NO: 5640065 - DNA, 25 bp, Homo sapien
tcggaccgtcaagacacattacaat

SEQ ID NO: 5640066 - DNA, 25 bp, Homo sapien
attgtaatgtgtcttgacggtccga

SEQ ID NO: 5640067 - DNA, 25 bp, Homo sapien
cgacgataatggttcccatgaccac

SEQ ID NO: 5640068 - DNA, 25 bp, Homo sapien
gtggtcatgggaaccattatcgtcg

SEQ ID NO: 5640069 - DNA, 25 bp, Homo sapien
gtctcgaaccgttgtccattgaaag

SEQ ID NO: 5640070 - DNA, 25 bp, Homo sapien
ctttcaatggacaacggttcgagac

SEQ ID NO: 5640071 - DNA, 25 bp, Homo sapien
ttgtttcgatctgcgggacacagct

SEQ ID NO: 5640072 - DNA, 25 bp, Homo sapien
agctgtgtcccgcagatcgaaacaa

SEQ ID NO: 5640073 - DNA, 25 bp, Homo sapien
ctacggagaccgagggcaacggtgt

SEQ ID NO: 5640074 - DNA, 25 bp, Homo sapien
acaccgttgccctcggtctccgtag

SEQ ID NO: 5640075 - DNA, 25 bp, Homo sapien
ctctccggtccgattcgacggggtc

SEQ ID NO: 5640076 - DNA, 25 bp, Homo sapien
gaccccgtcgaatcggaccggagag

SEQ ID NO: 5640077 - DNA, 25 bp, Homo sapien
tccgaagcaagagtttcagttgtct

SEQ ID NO: 5640078 - DNA, 25 bp, Homo sapien
agacaactgaaactcttgcttcgga

SEQ ID NO: 5640079 - DNA, 25 bp, Homo sapien
gggtgcgtccgagtcgtcgcgggcc

SEQ ID NO: 5640080 - DNA, 25 bp, Homo sapien
ggcccgcgacgactcggacgcaccc

SEQ ID NO: 5640081 - DNA, 25 bp, Homo sapien
gcgtccggtcccacgagctgcggga

SEQ ID NO: 5640082 - DNA, 25 bp, Homo sapien
tcccgcagctcgtgggaccggacgc

SEQ ID NO: 5640083 - DNA, 25 bp, Homo sapien
agtgtggtaaatgaacattctttgt

SEQ ID NO: 5640084 - DNA, 25 bp, Homo sapien
acaaagaatgttcatttaccacact

SEQ ID NO: 5640085 - DNA, 25 bp, Homo sapien
aggctgaaagagaccgtgggtttgg

SEQ ID NO: 5640086 - DNA, 25 bp, Homo sapien
ccaaacccacggtctctttcagcct

SEQ ID NO: 5640087 - DNA, 25 bp, Homo sapien
attaacattcaaattatattcgtcg

SEQ ID NO: 5640088 - DNA, 25 bp, Homo sapien
cgacgaatataatttgaatgttaat

SEQ ID NO: 5640089 - DNA, 25 bp, Homo sapien
tcctccctggtactcgtctcggact

SEQ ID NO: 5640090 - DNA, 25 bp, Homo sapien
agtccgagacgagtaccagggagga

SEQ ID NO: 5640091 - DNA, 25 bp, Homo sapien
tactaaacaagattagagaattctt

SEQ ID NO: 5640092 - DNA, 25 bp, Homo sapien
aagaattctctaatcttgtttagta

SEQ ID NO: 5640093 - DNA, 25 bp, Homo sapien
gtgtgcaccggtatagtagactaag

SEQ ID NO: 5640094 - DNA, 25 bp, Homo sapien
cttagtctactataccggtgcacac

SEQ ID NO: 5640095 - DNA, 25 bp, Homo sapien
ctcggtccgccctagccgcgctggg

SEQ ID NO: 5640096 - DNA, 25 bp, Homo sapien
cccagcgcggctagggcggaccgag

SEQ ID NO: 5640097 - DNA, 25 bp, Homo sapien
ggaccagttttagttatataaggag

SEQ ID NO: 5640098 - DNA, 25 bp, Homo sapien
ctccttatataactaaaactggtcc

SEQ ID NO: 5640099 - DNA, 25 bp, Homo sapien
acaagagtcgccaccggcccttgga

SEQ ID NO: 5640100 - DNA, 25 bp, Homo sapien
tccaagggccggtggcgactcttgt

SEQ ID NO: 5640101 - DNA, 25 bp, Homo sapien
ttgaactcattttaagacaatgcat

SEQ ID NO: 5640102 - DNA, 25 bp, Homo sapien
atgcattgtcttaaaatgagttcaa

SEQ ID NO: 5640103 - DNA, 25 bp, Homo sapien
gaagtcccagtatcacctctaaagt

SEQ ID NO: 5640104 - DNA, 25 bp, Homo sapien
actttagaggtgatactgggacttc

SEQ ID NO: 5640105 - DNA, 25 bp, Homo sapien
acccgccttgcctgcgtctcgggga

SEQ ID NO: 5640106 - DNA, 25 bp, Homo sapien
tccccgagacgcaggcaaggcgggt

SEQ ID NO: 5640107 - DNA, 25 bp, Homo sapien
gacccgccttgcctgcgtctcgggg

SEQ ID NO: 5640108 - DNA, 25 bp, Homo sapien
ccccgagacgcaggcaaggcgggtc

SEQ ID NO: 5640109 - DNA, 25 bp, Homo sapien
cttgtgcaactaagttaaggataat

SEQ ID NO: 5640110 - DNA, 25 bp, Homo sapien
attatccttaacttagttgcacaag

SEQ ID NO: 5640111 - DNA, 25 bp, Homo sapien
agaaagaatctagaagtctatattg

SEQ ID NO: 5640112 - DNA, 25 bp, Homo sapien
caatatagacttctagattctttct

SEQ ID NO: 5640113 - DNA, 25 bp, Homo sapien
taaaaattaagttaacatacgtgaa

SEQ ID NO: 5640114 - DNA, 25 bp, Homo sapien
ttcacgtatgttaacttaattttta

SEQ ID NO: 5640115 - DNA, 25 bp, Homo sapien
agtgagagtgcggagccgaactggt

SEQ ID NO: 5640116 - DNA, 25 bp, Homo sapien
accagttcggctccgcactctcact

SEQ ID NO: 5640117 - DNA, 25 bp, Homo sapien
cgagggcctgcaccgtttagaacag

SEQ ID NO: 5640118 - DNA, 25 bp, Homo sapien
ctgttctaaacggtgcaggccctcg

SEQ ID NO: 5640119 - DNA, 25 bp, Homo sapien
tacgaagggtagtttaaagtcacaa

SEQ ID NO: 5640120 - DNA, 25 bp, Homo sapien
ttgtgactttaaactacccttcgta

SEQ ID NO: 5640121 - DNA, 25 bp, Homo sapien
tgacgattcagttaagattagagac

SEQ ID NO: 5640122 - DNA, 25 bp, Homo sapien
gtctctaatcttaactgaatcgtca

SEQ ID NO: 5640123 - DNA, 25 bp, Homo sapien
cgctacaacctccttgggactaatg

SEQ ID NO: 5640124 - DNA, 25 bp, Homo sapien
cattagtcccaaggaggttgtagcg

SEQ ID NO: 5640125 - DNA, 25 bp, Homo sapien
cagccgccgcggcttcggggcgagg

SEQ ID NO: 5640126 - DNA, 25 bp, Homo sapien
cctcgccccgaagccgcggcggctg

SEQ ID NO: 5640127 - DNA, 25 bp, Homo sapien
cgtgggcgcgcagccgccgcggctt

SEQ ID NO: 5640128 - DNA, 25 bp, Homo sapien
aagccgcggcggctgcgcgcccacg

SEQ ID NO: 5640129 - DNA, 25 bp, Homo sapien
gatccttcggcggtcccgctcccgg

SEQ ID NO: 5640130 - DNA, 25 bp, Homo sapien
ccgggagcgggaccgccgaaggatc

SEQ ID NO: 5640131 - DNA, 25 bp, Homo sapien
attaggtaatttagttcaggatata

SEQ ID NO: 5640132 - DNA, 25 bp, Homo sapien
tatatcctgaactaaattacctaat

SEQ ID NO: 5640133 - DNA, 25 bp, Homo sapien
gacttgtccctcgttatgtactttt

SEQ ID NO: 5640134 - DNA, 25 bp, Homo sapien
aaaagtacataacgagggacaagtc

SEQ ID NO: 5640135 - DNA, 25 bp, Homo sapien
ttatactacttttaacagtcaatcg

SEQ ID NO: 5640136 - DNA, 25 bp, Homo sapien
cgattgactgttaaaagtagtataa

SEQ ID NO: 5640137 - DNA, 25 bp, Homo sapien
atactacttttaacagtcaatcgta

SEQ ID NO: 5640138 - DNA, 25 bp, Homo sapien
tacgattgactgttaaaagtagtat

SEQ ID NO: 5640139 - DNA, 25 bp, Homo sapien
actgagggtacaaggttttgtactg

SEQ ID NO: 5640140 - DNA, 25 bp, Homo sapien
cagtacaaaaccttgtaccctcagt

SEQ ID NO: 5640141 - DNA, 25 bp, Homo sapien
gggacctcccgcgtaggcagggcgg

SEQ ID NO: 5640142 - DNA, 25 bp, Homo sapien
ccgccctgcctacgcgggaggtccc

SEQ ID NO: 5640143 - DNA, 25 bp, Homo sapien
gccgccaagacgtggcgcgccggag

SEQ ID NO: 5640144 - DNA, 25 bp, Homo sapien
ctccggcgcgccacgtcttggcggc

SEQ ID NO: 5640145 - DNA, 25 bp, Homo sapien
gaaatcttttgtttcagttacggtg

SEQ ID NO: 5640146 - DNA, 25 bp, Homo sapien
caccgtaactgaaacaaaagatttc

SEQ ID NO: 5640147 - DNA, 25 bp, Homo sapien
agaccggccgcgtgtcttccgggtc

SEQ ID NO: 5640148 - DNA, 25 bp, Homo sapien
gacccggaagacacgcggccggtct

SEQ ID NO: 5640149 - DNA, 25 bp, Homo sapien
aactcgttcgagactcgtacgtgcc

SEQ ID NO: 5640150 - DNA, 25 bp, Homo sapien
ggcacgtacgagtctcgaacgagtt

SEQ ID NO: 5640151 - DNA, 25 bp, Homo sapien
agttaatcctattcggacctagact

SEQ ID NO: 5640152 - DNA, 25 bp, Homo sapien
agtctaggtccgaataggattaact

SEQ ID NO: 5640153 - DNA, 25 bp, Homo sapien
tacatgtatacagagactactttct

SEQ ID NO: 5640154 - DNA, 25 bp, Homo sapien
agaaagtagtctctgtatacatgta

SEQ ID NO: 5640155 - DNA, 25 bp, Homo sapien
ctagtacataggaacctctgcaaaa

SEQ ID NO: 5640156 - DNA, 25 bp, Homo sapien
ttttgcagaggttcctatgtactag

SEQ ID NO: 5640157 - DNA, 25 bp, Homo sapien
tgagggtgcctctagatcggtacac

SEQ ID NO: 5640158 - DNA, 25 bp, Homo sapien
gtgtaccgatctagaggcaccctca

SEQ ID NO: 5640159 - DNA, 25 bp, Homo sapien
gtagtttcattcttaagaacatata

SEQ ID NO: 5640160 - DNA, 25 bp, Homo sapien
tatatgttcttaagaatgaaactac

SEQ ID NO: 5640161 - DNA, 25 bp, Homo sapien
gacacgactcttggctgaactgggt

SEQ ID NO: 5640162 - DNA, 25 bp, Homo sapien
acccagttcagccaagagtcgtgtc

SEQ ID NO: 5640163 - DNA, 25 bp, Homo sapien
acctaattaaagttctgcaaagtat

SEQ ID NO: 5640164 - DNA, 25 bp, Homo sapien
atactttgcagaactttaattaggt

SEQ ID NO: 5640165 - DNA, 25 bp, Homo sapien
aatattaaactaactcggaactgac

SEQ ID NO: 5640166 - DNA, 25 bp, Homo sapien
gtcagttccgagttagtttaatatt

SEQ ID NO: 5640167 - DNA, 25 bp, Homo sapien
cctacatgttgtaccggcacaagtt

SEQ ID NO: 5640168 - DNA, 25 bp, Homo sapien
aacttgtgccggtacaacatgtagg

SEQ ID NO: 5640169 - DNA, 25 bp, Homo sapien
tccgggaggctctgcttggagatgc

SEQ ID NO: 5640170 - DNA, 25 bp, Homo sapien
gcatctccaagcagagcctcccgga

SEQ ID NO: 5640171 - DNA, 25 bp, Homo sapien
gacaacatagacaataggttcttat

SEQ ID NO: 5640172 - DNA, 25 bp, Homo sapien
ataagaacctattgtctatgttgtc

SEQ ID NO: 5640173 - DNA, 25 bp, Homo sapien
gtacacgacactggtgactcccccg

SEQ ID NO: 5640174 - DNA, 25 bp, Homo sapien
cgggggagtcaccagtgtcgtgtac

SEQ ID NO: 5640175 - DNA, 25 bp, Homo sapien
tccgacccatcgagttgtccatcgt

SEQ ID NO: 5640176 - DNA, 25 bp, Homo sapien
acgatggacaactcgatgggtcgga

SEQ ID NO: 5640177 - DNA, 25 bp, Homo sapien
ttgcccgcacctacttacactggtg

SEQ ID NO: 5640178 - DNA, 25 bp, Homo sapien
caccagtgtaagtaggtgcgggcaa

SEQ ID NO: 5640179 - DNA, 25 bp, Homo sapien
ggtaaggggcctgagagtacccgta

SEQ ID NO: 5640180 - DNA, 25 bp, Homo sapien
tacgggtactctcaggccccttacc

SEQ ID NO: 5640181 - DNA, 25 bp, Homo sapien
gcggggcgcccgtcggtaacgcgtg

SEQ ID NO: 5640182 - DNA, 25 bp, Homo sapien
cacgcgttaccgacgggcgccccgc

SEQ ID NO: 5640183 - DNA, 25 bp, Homo sapien
agacttgattcatcatcttaataat

SEQ ID NO: 5640184 - DNA, 25 bp, Homo sapien
attattaagatgatgaatcaagtct

SEQ ID NO: 5640185 - DNA, 25 bp, Homo sapien
tcgggtcgagattactagggtcact

SEQ ID NO: 5640186 - DNA, 25 bp, Homo sapien
agtgaccctagtaatctcgacccga

SEQ ID NO: 5640187 - DNA, 25 bp, Homo sapien
aaaatagtagaaaacatatcctgtg

SEQ ID NO: 5640188 - DNA, 25 bp, Homo sapien
cacaggatatgttttctactatttt

SEQ ID NO: 5640189 - DNA, 25 bp, Homo sapien
tccagacaaggacggcatctttaaa

SEQ ID NO: 5640190 - DNA, 25 bp, Homo sapien
tttaaagatgccgtccttgtctgga

SEQ ID NO: 5640191 - DNA, 25 bp, Homo sapien
gcgtcgggcgacctccacggccccc

SEQ ID NO: 5640192 - DNA, 25 bp, Homo sapien
gggggccgtggaggtcgcccgacgc

SEQ ID NO: 5640193 - DNA, 25 bp, Homo sapien
tcgggcgacctccacggcccccgct

SEQ ID NO: 5640194 - DNA, 25 bp, Homo sapien
agcgggggccgtggaggtcgcccga

SEQ ID NO: 5640195 - DNA, 25 bp, Homo sapien
tcacagaactcctgggtttgtattt

SEQ ID NO: 5640196 - DNA, 25 bp, Homo sapien
aaatacaaacccaggagttctgtga

SEQ ID NO: 5640197 - DNA, 25 bp, Homo sapien
gacgaacggcccttcgtgatttgaa

SEQ ID NO: 5640198 - DNA, 25 bp, Homo sapien
ttcaaatcacgaagggccgttcgtc

SEQ ID NO: 5640199 - DNA, 25 bp, Homo sapien
taacgacgacataccactccttctt

SEQ ID NO: 5640200 - DNA, 25 bp, Homo sapien
aagaaggagtggtatgtcgtcgtta

SEQ ID NO: 5640201 - DNA, 25 bp, Homo sapien
gaccgggaccgaggtggccaactcg

SEQ ID NO: 5640202 - DNA, 25 bp, Homo sapien
cgagttggccacctcggtcccggtc

SEQ ID NO: 5640203 - DNA, 25 bp, Homo sapien
gatatataatgattcggtcattagt

SEQ ID NO: 5640204 - DNA, 25 bp, Homo sapien
actaatgaccgaatcattatatatc

SEQ ID NO: 5640205 - DNA, 25 bp, Homo sapien
aacaataacaactgacgagatatct

SEQ ID NO: 5640206 - DNA, 25 bp, Homo sapien
agatatctcgtcagttgttattgtt

SEQ ID NO: 5640207 - DNA, 25 bp, Homo sapien
agggggactccttgctcgcgtcgta

SEQ ID NO: 5640208 - DNA, 25 bp, Homo sapien
tacgacgcgagcaaggagtccccct

SEQ ID NO: 5640209 - DNA, 25 bp, Homo sapien
cccgaggaaacgtgcgccgacgagc

SEQ ID NO: 5640210 - DNA, 25 bp, Homo sapien
gctcgtcggcgcacgtttcctcggg

SEQ ID NO: 5640211 - DNA, 25 bp, Homo sapien
acctttcctcggcgatcatcctgtt

SEQ ID NO: 5640212 - DNA, 25 bp, Homo sapien
aacaggatgatcgccgaggaaaggt

SEQ ID NO: 5640213 - DNA, 25 bp, Homo sapien
cgaaaatttaccagtgtatattatt

SEQ ID NO: 5640214 - DNA, 25 bp, Homo sapien
aataatatacactggtaaattttcg

SEQ ID NO: 5640215 - DNA, 25 bp, Homo sapien
ccagtgtatattatttacgtgattt

SEQ ID NO: 5640216 - DNA, 25 bp, Homo sapien
aaatcacgtaaataatatacactgg

SEQ ID NO: 5640217 - DNA, 25 bp, Homo sapien
tcctccacccttccccgtcatcctt

SEQ ID NO: 5640218 - DNA, 25 bp, Homo sapien
aaggatgacggggaagggtggagga

SEQ ID NO: 5640219 - DNA, 25 bp, Homo sapien
taaagtagtcaccacaacacaaaag

SEQ ID NO: 5640220 - DNA, 25 bp, Homo sapien
cttttgtgttgtggtgactacttta

SEQ ID NO: 5640221 - DNA, 25 bp, Homo sapien
accttcttctaacaagcaagaacat

SEQ ID NO: 5640222 - DNA, 25 bp, Homo sapien
atgttcttgcttgttagaagaaggt

SEQ ID NO: 5640223 - DNA, 25 bp, Homo sapien
cacagagtaggcacacggtttgggt

SEQ ID NO: 5640224 - DNA, 25 bp, Homo sapien
acccaaaccgtgtgcctactctgtg

SEQ ID NO: 5640225 - DNA, 25 bp, Homo sapien
atgcgactgattacgaatgtcgacc

SEQ ID NO: 5640226 - DNA, 25 bp, Homo sapien
ggtcgacattcgtaatcagtcgcat

SEQ ID NO: 5640227 - DNA, 25 bp, Homo sapien
agacgacatcaagagtatccgacaa

SEQ ID NO: 5640228 - DNA, 25 bp, Homo sapien
ttgtcggatactcttgatgtcgtct

SEQ ID NO: 5640229 - DNA, 25 bp, Homo sapien
cagtccgcacagtgcactggcgcgg

SEQ ID NO: 5640230 - DNA, 25 bp, Homo sapien
ccgcgccagtgcactgtgcggactg

SEQ ID NO: 5640231 - DNA, 25 bp, Homo sapien
attaaagggacagatatataagcct

SEQ ID NO: 5640232 - DNA, 25 bp, Homo sapien
aggcttatatatctgtccctttaat

SEQ ID NO: 5640233 - DNA, 25 bp, Homo sapien
ttcgactaacgatcactgtaaaagt

SEQ ID NO: 5640234 - DNA, 25 bp, Homo sapien
acttttacagtgatcgttagtcgaa

SEQ ID NO: 5640235 - DNA, 25 bp, Homo sapien
gacacaggtcaacctcgtggacggg

SEQ ID NO: 5640236 - DNA, 25 bp, Homo sapien
cccgtccacgaggttgacctgtgtc

SEQ ID NO: 5640237 - DNA, 25 bp, Homo sapien
cgaaaagcccctcgcctcgcgtctt

SEQ ID NO: 5640238 - DNA, 25 bp, Homo sapien
aagacgcgaggcgaggggcttttcg

SEQ ID NO: 5640239 - DNA, 25 bp, Homo sapien
tgcagaggtatgaagttgggtaagg

SEQ ID NO: 5640240 - DNA, 25 bp, Homo sapien
ccttacccaacttcatacctctgca

SEQ ID NO: 5640241 - DNA, 25 bp, Homo sapien
tggacacatttacattcgtccagtc

SEQ ID NO: 5640242 - DNA, 25 bp, Homo sapien
gactggacgaatgtaaatgtgtcca

SEQ ID NO: 5640243 - DNA, 25 bp, Homo sapien
gctccccgccctcccgtcccgccag

SEQ ID NO: 5640244 - DNA, 25 bp, Homo sapien
ctggcgggacgggagggcggggagc

SEQ ID NO: 5640245 - DNA, 25 bp, Homo sapien
caccgcccatgtcgtctttaccggg

SEQ ID NO: 5640246 - DNA, 25 bp, Homo sapien
cccggtaaagacgacatgggcggtg

SEQ ID NO: 5640247 - DNA, 25 bp, Homo sapien
cggtggagtccaccaccggcagggt

SEQ ID NO: 5640248 - DNA, 25 bp, Homo sapien
accctgccggtggtggactccaccg

SEQ ID NO: 5640249 - DNA, 25 bp, Homo sapien
caaatgggaagtcgacggctgcgag

SEQ ID NO: 5640250 - DNA, 25 bp, Homo sapien
ctcgcagccgtcgacttcccatttg

SEQ ID NO: 5640251 - DNA, 25 bp, Homo sapien
ccggtacccggctcgggagagcgag

SEQ ID NO: 5640252 - DNA, 25 bp, Homo sapien
ctcgctctcccgagccgggtaccgg

SEQ ID NO: 5640253 - DNA, 25 bp, Homo sapien
gactgatatgggtgtgtttgttact

SEQ ID NO: 5640254 - DNA, 25 bp, Homo sapien
agtaacaaacacacccatatcagtc

SEQ ID NO: 5640255 - DNA, 25 bp, Homo sapien
ttatatttacacttacagcaaaagc

SEQ ID NO: 5640256 - DNA, 25 bp, Homo sapien
gcttttgctgtaagtgtaaatataa

SEQ ID NO: 5640257 - DNA, 25 bp, Homo sapien
attatacaagctgatgtaaatttgt

SEQ ID NO: 5640258 - DNA, 25 bp, Homo sapien
acaaatttacatcagcttgtataat

SEQ ID NO: 5640259 - DNA, 25 bp, Homo sapien
ttattatacaagctgatgtaaattt

SEQ ID NO: 5640260 - DNA, 25 bp, Homo sapien
aaatttacatcagcttgtataataa

SEQ ID NO: 5640261 - DNA, 25 bp, Homo sapien
tcaatcgacgtaactgtaatagaag

SEQ ID NO: 5640262 - DNA, 25 bp, Homo sapien
cttctattacagttacgtcgattga

SEQ ID NO: 5640263 - DNA, 25 bp, Homo sapien
cccgacatacccaattgatgtaaat

SEQ ID NO: 5640264 - DNA, 25 bp, Homo sapien
atttacatcaattgggtatgtcggg

SEQ ID NO: 5640265 - DNA, 25 bp, Homo sapien
aatagacttaacttggaaatcctct

SEQ ID NO: 5640266 - DNA, 25 bp, Homo sapien
agaggatttccaagttaagtctatt

SEQ ID NO: 5640267 - DNA, 25 bp, Homo sapien
gaacgacaaaacttgctttgtagat

SEQ ID NO: 5640268 - DNA, 25 bp, Homo sapien
atctacaaagcaagttttgtcgttc

SEQ ID NO: 5640269 - DNA, 25 bp, Homo sapien
cgcccaccccctaggaggaagactg

SEQ ID NO: 5640270 - DNA, 25 bp, Homo sapien
cagtcttcctcctagggggtgggcg

SEQ ID NO: 5640271 - DNA, 25 bp, Homo sapien
gaccaagcaccttctcagttaggaa

SEQ ID NO: 5640272 - DNA, 25 bp, Homo sapien
ttcctaactgagaaggtgcttggtc

SEQ ID NO: 5640273 - DNA, 25 bp, Homo sapien
cgtcgtaccttctacgcagggaaaa

SEQ ID NO: 5640274 - DNA, 25 bp, Homo sapien
ttttccctgcgtagaaggtacgacg

SEQ ID NO: 5640275 - DNA, 25 bp, Homo sapien
ctaatctaaaacagaaatgtgaact

SEQ ID NO: 5640276 - DNA, 25 bp, Homo sapien
agttcacatttctgttttagattag

SEQ ID NO: 5640277 - DNA, 25 bp, Homo sapien
ctccttctatcaggcaggcagtcgg

SEQ ID NO: 5640278 - DNA, 25 bp, Homo sapien
ccgactgcctgcctgatagaaggag

SEQ ID NO: 5640279 - DNA, 25 bp, Homo sapien
ataatcttagggagaagtggttccc

SEQ ID NO: 5640280 - DNA, 25 bp, Homo sapien
gggaaccacttctccctaagattat

SEQ ID NO: 5640281 - DNA, 25 bp, Homo sapien
ggcgtgcccgcctgccggtcgaccc

SEQ ID NO: 5640282 - DNA, 25 bp, Homo sapien
gggtcgaccggcaggcgggcacgcc

SEQ ID NO: 5640283 - DNA, 25 bp, Homo sapien
gcccacaggcgtgcccgcctgccgg

SEQ ID NO: 5640284 - DNA, 25 bp, Homo sapien
ccggcaggcgggcacgcctgtgggc

SEQ ID NO: 5640285 - DNA, 25 bp, Homo sapien
tcggtgttcccactgttaaaggagt

SEQ ID NO: 5640286 - DNA, 25 bp, Homo sapien
actcctttaacagtgggaacaccga

SEQ ID NO: 5640287 - DNA, 25 bp, Homo sapien
tgtttgtaatcacacagtaatgtta

SEQ ID NO: 5640288 - DNA, 25 bp, Homo sapien
taacattactgtgtgattacaaaca

SEQ ID NO: 5640289 - DNA, 25 bp, Homo sapien
aggtggaccttagggaggcagaagg

SEQ ID NO: 5640290 - DNA, 25 bp, Homo sapien
ccttctgcctccctaaggtccacct

SEQ ID NO: 5640291 - DNA, 25 bp, Homo sapien
atcttgatgaaccttataaaactct

SEQ ID NO: 5640292 - DNA, 25 bp, Homo sapien
agagttttataaggttcatcaagat

SEQ ID NO: 5640293 - DNA, 25 bp, Homo sapien
acccgcggcggcaggcgacggacgg

SEQ ID NO: 5640294 - DNA, 25 bp, Homo sapien
ccgtccgtcgcctgccgccgcgggt

SEQ ID NO: 5640295 - DNA, 25 bp, Homo sapien
aatatctgatgctagtctttaacaa

SEQ ID NO: 5640296 - DNA, 25 bp, Homo sapien
ttgttaaagactagcatcagatatt

SEQ ID NO: 5640297 - DNA, 25 bp, Homo sapien
agtgactaaacccgtcatccctgac

SEQ ID NO: 5640298 - DNA, 25 bp, Homo sapien
gtcagggatgacgggtttagtcact

SEQ ID NO: 5640299 - DNA, 25 bp, Homo sapien
acggcctagggttttgcagttctcc

SEQ ID NO: 5640300 - DNA, 25 bp, Homo sapien
ggagaactgcaaaaccctaggccgt

SEQ ID NO: 5640301 - DNA, 25 bp, Homo sapien
cggtgaaaacggtctgtaggataaa

SEQ ID NO: 5640302 - DNA, 25 bp, Homo sapien
tttatcctacagaccgttttcaccg

SEQ ID NO: 5640303 - DNA, 25 bp, Homo sapien
ggtctagaaatcgaaaggacaaaaa

SEQ ID NO: 5640304 - DNA, 25 bp, Homo sapien
tttttgtcctttcgatttctagacc

SEQ ID NO: 5640305 - DNA, 25 bp, Homo sapien
tcccaccgtctgctctttccttcct

SEQ ID NO: 5640306 - DNA, 25 bp, Homo sapien
aggaaggaaagagcagacggtggga

SEQ ID NO: 5640307 - DNA, 25 bp, Homo sapien
aatcgtgccgatttcaggtcagaac

SEQ ID NO: 5640308 - DNA, 25 bp, Homo sapien
gttctgacctgaaatcggcacgatt

SEQ ID NO: 5640309 - DNA, 25 bp, Homo sapien
gatccatcgctgttctgttctgtcc

SEQ ID NO: 5640310 - DNA, 25 bp, Homo sapien
ggacagaacagaacagcgatggatc

SEQ ID NO: 5640311 - DNA, 25 bp, Homo sapien
catatttcaacatgttcacgtataa

SEQ ID NO: 5640312 - DNA, 25 bp, Homo sapien
ttatacgtgaacatgttgaaatatg

SEQ ID NO: 5640313 - DNA, 25 bp, Homo sapien
ccgtcgaggaggaccagggtttatg

SEQ ID NO: 5640314 - DNA, 25 bp, Homo sapien
cataaaccctggtcctcctcgacgg

SEQ ID NO: 5640315 - DNA, 25 bp, Homo sapien
atactcaatgtaaaacccacataag

SEQ ID NO: 5640316 - DNA, 25 bp, Homo sapien
cttatgtgggttttacattgagtat

SEQ ID NO: 5640317 - DNA, 25 bp, Homo sapien
ctcagtctaagaattattaattgaa

SEQ ID NO: 5640318 - DNA, 25 bp, Homo sapien
ttcaattaataattcttagactgag

SEQ ID NO: 5640319 - DNA, 25 bp, Homo sapien
ttgcgacgcaacggccccgggtgaa

SEQ ID NO: 5640320 - DNA, 25 bp, Homo sapien
ttcacccggggccgttgcgtcgcaa

SEQ ID NO: 5640321 - DNA, 25 bp, Homo sapien
gggtcctacggtacaatctaaacta

SEQ ID NO: 5640322 - DNA, 25 bp, Homo sapien
tagtttagattgtaccgtaggaccc

SEQ ID NO: 5640323 - DNA, 25 bp, Homo sapien
tctttctatttaacaacattatctg

SEQ ID NO: 5640324 - DNA, 25 bp, Homo sapien
cagataatgttgttaaatagaaaga

SEQ ID NO: 5640325 - DNA, 25 bp, Homo sapien
tgtacgaccgacggctgtggtgttg

SEQ ID NO: 5640326 - DNA, 25 bp, Homo sapien
caacaccacagccgtcggtcgtaca

SEQ ID NO: 5640327 - DNA, 25 bp, Homo sapien
tgttatgattataattgcaactaca

SEQ ID NO: 5640328 - DNA, 25 bp, Homo sapien
tgtagttgcaattataatcataaca

SEQ ID NO: 5640329 - DNA, 25 bp, Homo sapien
taattgcaactacatttatttctac

SEQ ID NO: 5640330 - DNA, 25 bp, Homo sapien
gtagaaataaatgtagttgcaatta

SEQ ID NO: 5640331 - DNA, 25 bp, Homo sapien
ccgtggaggcaccccgtctgaggac

SEQ ID NO: 5640332 - DNA, 25 bp, Homo sapien
gtcctcagacggggtgcctccacgg

SEQ ID NO: 5640333 - DNA, 25 bp, Homo sapien
gctcccgtcgttatacacgcgtctg

SEQ ID NO: 5640334 - DNA, 25 bp, Homo sapien
cagacgcgtgtataacgacgggagc

SEQ ID NO: 5640335 - DNA, 25 bp, Homo sapien
tagttagttatagttcagaccgtat

SEQ ID NO: 5640336 - DNA, 25 bp, Homo sapien
atacggtctgaactataactaacta

SEQ ID NO: 5640337 - DNA, 25 bp, Homo sapien
caacgtgtttctaaaggtcctctgg

SEQ ID NO: 5640338 - DNA, 25 bp, Homo sapien
ccagaggacctttagaaacacgttg

SEQ ID NO: 5640339 - DNA, 25 bp, Homo sapien
cagggtgtctgccaggacagacgac

SEQ ID NO: 5640340 - DNA, 25 bp, Homo sapien
gtcgtctgtcctggcagacaccctg

SEQ ID NO: 5640341 - DNA, 25 bp, Homo sapien
ctgtttcggagcctacagtcgggga

SEQ ID NO: 5640342 - DNA, 25 bp, Homo sapien
tccccgactgtaggctccgaaacag

SEQ ID NO: 5640343 - DNA, 25 bp, Homo sapien
acaagaatttgaacattcacggaat

SEQ ID NO: 5640344 - DNA, 25 bp, Homo sapien
attccgtgaatgttcaaattcttgt

SEQ ID NO: 5640345 - DNA, 25 bp, Homo sapien
agttacagtctagatatttattaac

SEQ ID NO: 5640346 - DNA, 25 bp, Homo sapien
gttaataaatatctagactgtaact

SEQ ID NO: 5640347 - DNA, 25 bp, Homo sapien
atacttttccttcgacccatctcga

SEQ ID NO: 5640348 - DNA, 25 bp, Homo sapien
tcgagatgggtcgaaggaaaagtat

SEQ ID NO: 5640349 - DNA, 25 bp, Homo sapien
agttacttaactgaaaatcacacat

SEQ ID NO: 5640350 - DNA, 25 bp, Homo sapien
atgtgtgattttcagttaagtaact

SEQ ID NO: 5640351 - DNA, 25 bp, Homo sapien
acccgtctcacctgctctttgaagg

SEQ ID NO: 5640352 - DNA, 25 bp, Homo sapien
ccttcaaagagcaggtgagacgggt

SEQ ID NO: 5640353 - DNA, 25 bp, Homo sapien
gatgagacaacagcagaacaagaca

SEQ ID NO: 5640354 - DNA, 25 bp, Homo sapien
tgtcttgttctgctgttgtctcatc

SEQ ID NO: 5640355 - DNA, 25 bp, Homo sapien
cggggttgtagcacatagaattttt

SEQ ID NO: 5640356 - DNA, 25 bp, Homo sapien
aaaaattctatgtgctacaaccccg

SEQ ID NO: 5640357 - DNA, 25 bp, Homo sapien
aaacgcgtccccagccgcggctggt

SEQ ID NO: 5640358 - DNA, 25 bp, Homo sapien
accagccgcggctggggacgcgttt

SEQ ID NO: 5640359 - DNA, 25 bp, Homo sapien
tccgacgacgcttaggcgtactggt

SEQ ID NO: 5640360 - DNA, 25 bp, Homo sapien
accagtacgcctaagcgtcgtcgga

SEQ ID NO: 5640361 - DNA, 25 bp, Homo sapien
accaagactaaatcatcgctattaa

SEQ ID NO: 5640362 - DNA, 25 bp, Homo sapien
ttaatagcgatgatttagtcttggt

SEQ ID NO: 5640363 - DNA, 25 bp, Homo sapien
aaagtagatatctttgagaaaagta

SEQ ID NO: 5640364 - DNA, 25 bp, Homo sapien
tacttttctcaaagatatctacttt

SEQ ID NO: 5640365 - DNA, 25 bp, Homo sapien
gaccgaggatcgggcgaggacccgg

SEQ ID NO: 5640366 - DNA, 25 bp, Homo sapien
ccgggtcctcgcccgatcctcggtc

SEQ ID NO: 5640367 - DNA, 25 bp, Homo sapien
ggctcgtccagcacgttggttctgt

SEQ ID NO: 5640368 - DNA, 25 bp, Homo sapien
acagaaccaacgtgctggacgagcc

SEQ ID NO: 5640369 - DNA, 25 bp, Homo sapien
cgaggtatttattccgagggaacac

SEQ ID NO: 5640370 - DNA, 25 bp, Homo sapien
gtgttccctcggaataaatacctcg

SEQ ID NO: 5640371 - DNA, 25 bp, Homo sapien
tcccgtgggtgcgtagggggccgac

SEQ ID NO: 5640372 - DNA, 25 bp, Homo sapien
gtcggccccctacgcacccacggga

SEQ ID NO: 5640373 - DNA, 25 bp, Homo sapien
cagttatatttgtattgtgtatatg

SEQ ID NO: 5640374 - DNA, 25 bp, Homo sapien
catatacacaatacaaatataactg

SEQ ID NO: 5640375 - DNA, 25 bp, Homo sapien
acagttatatttgtattgtgtatat

SEQ ID NO: 5640376 - DNA, 25 bp, Homo sapien
atatacacaatacaaatataactgt

SEQ ID NO: 5640377 - DNA, 25 bp, Homo sapien
tttgttttgttatgtggtcctattt

SEQ ID NO: 5640378 - DNA, 25 bp, Homo sapien
aaataggaccacataacaaaacaaa

SEQ ID NO: 5640379 - DNA, 25 bp, Homo sapien
gtgtattaaccacgagtttcgtaat

SEQ ID NO: 5640380 - DNA, 25 bp, Homo sapien
attacgaaactcgtggttaatacac

SEQ ID NO: 5640381 - DNA, 25 bp, Homo sapien
aaatctaactgctacttatttttat

SEQ ID NO: 5640382 - DNA, 25 bp, Homo sapien
ataaaaataagtagcagttagattt

SEQ ID NO: 5640383 - DNA, 25 bp, Homo sapien
taatataaatctaactgctacttat

SEQ ID NO: 5640384 - DNA, 25 bp, Homo sapien
ataagtagcagttagatttatatta

SEQ ID NO: 5640385 - DNA, 25 bp, Homo sapien
ctttaatataaatctaactgctact

SEQ ID NO: 5640386 - DNA, 25 bp, Homo sapien
agtagcagttagatttatattaaag

SEQ ID NO: 5640387 - DNA, 25 bp, Homo sapien
tgtcgggaccccttcgcagacggga

SEQ ID NO: 5640388 - DNA, 25 bp, Homo sapien
tcccgtctgcgaaggggtcccgaca

SEQ ID NO: 5640389 - DNA, 25 bp, Homo sapien
ctctgttaaacttgacctacctcct

SEQ ID NO: 5640390 - DNA, 25 bp, Homo sapien
aggaggtaggtcaagtttaacagag

SEQ ID NO: 5640391 - DNA, 25 bp, Homo sapien
cgtcttcacatctgtcactgtaggt

SEQ ID NO: 5640392 - DNA, 25 bp, Homo sapien
acctacagtgacagatgtgaagacg

SEQ ID NO: 5640393 - DNA, 25 bp, Homo sapien
tatttagatactaaggtactcatat

SEQ ID NO: 5640394 - DNA, 25 bp, Homo sapien
atatgagtaccttagtatctaaata

SEQ ID NO: 5640395 - DNA, 25 bp, Homo sapien
gggtcgccatggtcccttcgtgaaa

SEQ ID NO: 5640396 - DNA, 25 bp, Homo sapien
tttcacgaagggaccatggcgaccc

SEQ ID NO: 5640397 - DNA, 25 bp, Homo sapien
agaactgtcacggaagatacgaagt

SEQ ID NO: 5640398 - DNA, 25 bp, Homo sapien
acttcgtatcttccgtgacagttct

SEQ ID NO: 5640399 - DNA, 25 bp, Homo sapien
aataacacaaaaggtctgtattatt

SEQ ID NO: 5640400 - DNA, 25 bp, Homo sapien
aataatacagaccttttgtgttatt

SEQ ID NO: 5640401 - DNA, 25 bp, Homo sapien
cgggactctgtctccgttgccccgg

SEQ ID NO: 5640402 - DNA, 25 bp, Homo sapien
ccggggcaacggagacagagtcccg

SEQ ID NO: 5640403 - DNA, 25 bp, Homo sapien
cctgtgacgaccacatatcttactg

SEQ ID NO: 5640404 - DNA, 25 bp, Homo sapien
cagtaagatatgtggtcgtcacagg

SEQ ID NO: 5640405 - DNA, 25 bp, Homo sapien
tcctgaagagacacactggtctacc

SEQ ID NO: 5640406 - DNA, 25 bp, Homo sapien
ggtagaccagtgtgtctcttcagga

SEQ ID NO: 5640407 - DNA, 25 bp, Homo sapien
gagcggcgggcctcggccccctgcg

SEQ ID NO: 5640408 - DNA, 25 bp, Homo sapien
cgcagggggccgaggcccgccgctc

SEQ ID NO: 5640409 - DNA, 25 bp, Homo sapien
agggaggcgtgaggtccgggagccc

SEQ ID NO: 5640410 - DNA, 25 bp, Homo sapien
gggctcccggacctcacgcctccct

SEQ ID NO: 5640411 - DNA, 25 bp, Homo sapien
accaataatatggtcgggctttata

SEQ ID NO: 5640412 - DNA, 25 bp, Homo sapien
tataaagcccgaccatattattggt

SEQ ID NO: 5640413 - DNA, 25 bp, Homo sapien
aactggtcacctgcgagttaggtgt

SEQ ID NO: 5640414 - DNA, 25 bp, Homo sapien
acacctaactcgcaggtgaccagtt

SEQ ID NO: 5640415 - DNA, 25 bp, Homo sapien
tatattaccttaaaaaactcgtatc

SEQ ID NO: 5640416 - DNA, 25 bp, Homo sapien
gatacgagttttttaaggtaatata

SEQ ID NO: 5640417 - DNA, 25 bp, Homo sapien
tcggtcctgtccctacgccttccct

SEQ ID NO: 5640418 - DNA, 25 bp, Homo sapien
agggaaggcgtagggacaggaccga

SEQ ID NO: 5640419 - DNA, 25 bp, Homo sapien
gacagagacgtacccgctcacaggt

SEQ ID NO: 5640420 - DNA, 25 bp, Homo sapien
acctgtgagcgggtacgtctctgtc

SEQ ID NO: 5640421 - DNA, 25 bp, Homo sapien
gaatttgaattagagcagtataaca

SEQ ID NO: 5640422 - DNA, 25 bp, Homo sapien
tgttatactgctctaattcaaattc

SEQ ID NO: 5640423 - DNA, 25 bp, Homo sapien
ggcgcgggccctagacgcgcctgtg

SEQ ID NO: 5640424 - DNA, 25 bp, Homo sapien
cacaggcgcgtctagggcccgcgcc

SEQ ID NO: 5640425 - DNA, 25 bp, Homo sapien
cggagtcaccgtccctagagacagg

SEQ ID NO: 5640426 - DNA, 25 bp, Homo sapien
cctgtctctagggacggtgactccg

SEQ ID NO: 5640427 - DNA, 25 bp, Homo sapien
gtagacgacagatacaattcatcct

SEQ ID NO: 5640428 - DNA, 25 bp, Homo sapien
aggatgaattgtatctgtcgtctac

SEQ ID NO: 5640429 - DNA, 25 bp, Homo sapien
atcccaatcttaagtggaagcgtac

SEQ ID NO: 5640430 - DNA, 25 bp, Homo sapien
gtacgcttccacttaagattgggat

SEQ ID NO: 5640431 - DNA, 25 bp, Homo sapien
catgttggtaacattcacgttaagt

SEQ ID NO: 5640432 - DNA, 25 bp, Homo sapien
acttaacgtgaatgttaccaacatg

SEQ ID NO: 5640433 - DNA, 25 bp, Homo sapien
gttgagagattgtatagagaaaagt

SEQ ID NO: 5640434 - DNA, 25 bp, Homo sapien
acttttctctatacaatctctcaac

SEQ ID NO: 5640435 - DNA, 25 bp, Homo sapien
tttctcgggaacactcacaaaaagt

SEQ ID NO: 5640436 - DNA, 25 bp, Homo sapien
actttttgtgagtgttcccgagaaa

SEQ ID NO: 5640437 - DNA, 25 bp, Homo sapien
cgacctccggcggtgtcgagggtcc

SEQ ID NO: 5640438 - DNA, 25 bp, Homo sapien
ggaccctcgacaccgccggaggtcg

SEQ ID NO: 5640439 - DNA, 25 bp, Homo sapien
cctactctcgtctgttgcgactacg

SEQ ID NO: 5640440 - DNA, 25 bp, Homo sapien
cgtagtcgcaacagacgagagtagg

SEQ ID NO: 5640441 - DNA, 25 bp, Homo sapien
tactcggacgagacaaatgaggcat

SEQ ID NO: 5640442 - DNA, 25 bp, Homo sapien
atgcctcatttgtctcgtccgagta

SEQ ID NO: 5640443 - DNA, 25 bp, Homo sapien
gatgtcaaagacttatcagttttaa

SEQ ID NO: 5640444 - DNA, 25 bp, Homo sapien
ttaaaactgataagtctttgacatc

SEQ ID NO: 5640445 - DNA, 25 bp, Homo sapien
tcgagagaactcttcgtagtgcacg

SEQ ID NO: 5640446 - DNA, 25 bp, Homo sapien
cgtgcactacgaagagttctctcga

SEQ ID NO: 5640447 - DNA, 25 bp, Homo sapien
ttttagaataaagcttgtacgaggt

SEQ ID NO: 5640448 - DNA, 25 bp, Homo sapien
acctcgtacaagctttattctaaaa

SEQ ID NO: 5640449 - DNA, 25 bp, Homo sapien
tgaaggtaacgtagatcctccgtac

SEQ ID NO: 5640450 - DNA, 25 bp, Homo sapien
gtacggaggatctacgttaccttca

SEQ ID NO: 5640451 - DNA, 25 bp, Homo sapien
caactgggaccaggtgattaaacac

SEQ ID NO: 5640452 - DNA, 25 bp, Homo sapien
gtgtttaatcacctggtcccagttg

SEQ ID NO: 5640453 - DNA, 25 bp, Homo sapien
ggcgggctgccctcctctgccggcg

SEQ ID NO: 5640454 - DNA, 25 bp, Homo sapien
cgccggcagaggagggcagcccgcc

SEQ ID NO: 5640455 - DNA, 25 bp, Homo sapien
taaattacattatgacgagaagtcg

SEQ ID NO: 5640456 - DNA, 25 bp, Homo sapien
cgacttctcgtcataatgtaattta

SEQ ID NO: 5640457 - DNA, 25 bp, Homo sapien
cgtcagtcgttgactgtcttcaagg

SEQ ID NO: 5640458 - DNA, 25 bp, Homo sapien
ccttgaagacagtcaacgactgacg

SEQ ID NO: 5640459 - DNA, 25 bp, Homo sapien
catgagagacgaaggagcctagtgt

SEQ ID NO: 5640460 - DNA, 25 bp, Homo sapien
acactaggctccttcgtctctcatg

SEQ ID NO: 5640461 - DNA, 25 bp, Homo sapien
cagatgtagaactaatgtaacacag

SEQ ID NO: 5640462 - DNA, 25 bp, Homo sapien
ctgtgttacattagttctacatctg

SEQ ID NO: 5640463 - DNA, 25 bp, Homo sapien
ggaccgccgtcccagcggtcgggag

SEQ ID NO: 5640464 - DNA, 25 bp, Homo sapien
ctcccgaccgctgggacggcggtcc

SEQ ID NO: 5640465 - DNA, 25 bp, Homo sapien
ggtaggattgtgtctcagacgagtc

SEQ ID NO: 5640466 - DNA, 25 bp, Homo sapien
gactcgtctgagacacaatcctacc

SEQ ID NO: 5640467 - DNA, 25 bp, Homo sapien
gcccgacttaggggaaatgaacaag

SEQ ID NO: 5640468 - DNA, 25 bp, Homo sapien
cttgttcatttcccctaagtcgggc

SEQ ID NO: 5640469 - DNA, 25 bp, Homo sapien
aaaagatatagatgttgtgtaaagt

SEQ ID NO: 5640470 - DNA, 25 bp, Homo sapien
actttacacaacatctatatctttt

SEQ ID NO: 5640471 - DNA, 25 bp, Homo sapien
gtccccgacccggaccgtctgcgtg

SEQ ID NO: 5640472 - DNA, 25 bp, Homo sapien
cacgcagacggtccgggtcggggac

SEQ ID NO: 5640473 - DNA, 25 bp, Homo sapien
ttcgaagaaagaccagagatcagac

SEQ ID NO: 5640474 - DNA, 25 bp, Homo sapien
gtctgatctctggtctttcttcgaa

SEQ ID NO: 5640475 - DNA, 25 bp, Homo sapien
atacgtcctggtccttccagggtcc

SEQ ID NO: 5640476 - DNA, 25 bp, Homo sapien
ggaccctggaaggaccaggacgtat

SEQ ID NO: 5640477 - DNA, 25 bp, Homo sapien
gtccagtcgggtaagtcaggaccac

SEQ ID NO: 5640478 - DNA, 25 bp, Homo sapien
gtggtcctgacttacccgactggac

SEQ ID NO: 5640479 - DNA, 25 bp, Homo sapien
cccgaccagagcaccggacggaccg

SEQ ID NO: 5640480 - DNA, 25 bp, Homo sapien
cggtccgtccggtgctctggtcggg

SEQ ID NO: 5640481 - DNA, 25 bp, Homo sapien
tccccgaccagagcaccggacggac

SEQ ID NO: 5640482 - DNA, 25 bp, Homo sapien
gtccgtccggtgctctggtcgggga

SEQ ID NO: 5640483 - DNA, 25 bp, Homo sapien
aaaaagtacatattacacatactgt

SEQ ID NO: 5640484 - DNA, 25 bp, Homo sapien
acagtatgtgtaatatgtacttttt

SEQ ID NO: 5640485 - DNA, 25 bp, Homo sapien
gggtctgagacggaggtgcattaag

SEQ ID NO: 5640486 - DNA, 25 bp, Homo sapien
cttaatgcacctccgtctcagaccc

SEQ ID NO: 5640487 - DNA, 25 bp, Homo sapien
gctccgagcgacgtttggggcgcgg

SEQ ID NO: 5640488 - DNA, 25 bp, Homo sapien
ccgcgccccaaacgtcgctcggagc

SEQ ID NO: 5640489 - DNA, 25 bp, Homo sapien
agtggcaacattgactcgtcgtaac

SEQ ID NO: 5640490 - DNA, 25 bp, Homo sapien
gttacgacgagtcaatgttgccact

SEQ ID NO: 5640491 - DNA, 25 bp, Homo sapien
aggtttagctcacacgccacaagac

SEQ ID NO: 5640492 - DNA, 25 bp, Homo sapien
gtcttgtggcgtgtgagctaaacct

SEQ ID NO: 5640493 - DNA, 25 bp, Homo sapien
ctgtaaccgagattgggaccaacat

SEQ ID NO: 5640494 - DNA, 25 bp, Homo sapien
atgttggtcccaatctcggttacag

SEQ ID NO: 5640495 - DNA, 25 bp, Homo sapien
cacaaggtcccctcctacactcctg

SEQ ID NO: 5640496 - DNA, 25 bp, Homo sapien
caggagtgtaggaggggaccttgtg

SEQ ID NO: 5640497 - DNA, 25 bp, Homo sapien
agtaaagtgtaacattcttaacaaa

SEQ ID NO: 5640498 - DNA, 25 bp, Homo sapien
tttgttaagaatgttacactttact

SEQ ID NO: 5640499 - DNA, 25 bp, Homo sapien
gtcagacactgcacgtccgacgggt

SEQ ID NO: 5640500 - DNA, 25 bp, Homo sapien
acccgtcggacgtgcagtgtctgac

SEQ ID NO: 5640501 - DNA, 25 bp, Homo sapien
ggaggtaggcgaccagtcacacccc

SEQ ID NO: 5640502 - DNA, 25 bp, Homo sapien
ggggtgtgactggtcgcctacctcc

SEQ ID NO: 5640503 - DNA, 25 bp, Homo sapien
gaccgaagggattgtaatctcgaag

SEQ ID NO: 5640504 - DNA, 25 bp, Homo sapien
cttcgagattacaatcccttcggtc

SEQ ID NO: 5640505 - DNA, 25 bp, Homo sapien
atgaaagtcgtgtatattaaagtgt

SEQ ID NO: 5640506 - DNA, 25 bp, Homo sapien
acactttaatatacacgactttcat

SEQ ID NO: 5640507 - DNA, 25 bp, Homo sapien
taacacagatactttctatatagga

SEQ ID NO: 5640508 - DNA, 25 bp, Homo sapien
tcctatatagaaagtatctgtgtta

SEQ ID NO: 5640509 - DNA, 25 bp, Homo sapien
aaccgggcgttctgccctccgctca

SEQ ID NO: 5640510 - DNA, 25 bp, Homo sapien
tgagcggagggcagaacgcccggtt

SEQ ID NO: 5640511 - DNA, 25 bp, Homo sapien
gggcgttctgccctccgctcagact

SEQ ID NO: 5640512 - DNA, 25 bp, Homo sapien
agtctgagcggagggcagaacgccc

SEQ ID NO: 5640513 - DNA, 25 bp, Homo sapien
tcgacggtcacggttgtactcccgt

SEQ ID NO: 5640514 - DNA, 25 bp, Homo sapien
acgggagtacaaccgtgaccgtcga

SEQ ID NO: 5640515 - DNA, 25 bp, Homo sapien
ccgtcgagacgcaagggagagagcc

SEQ ID NO: 5640516 - DNA, 25 bp, Homo sapien
ggctctctcccttgcgtctcgacgg

SEQ ID NO: 5640517 - DNA, 25 bp, Homo sapien
atatgatgaagtcgttaccttttaa

SEQ ID NO: 5640518 - DNA, 25 bp, Homo sapien
ttaaaaggtaacgacttcatcatat

SEQ ID NO: 5640519 - DNA, 25 bp, Homo sapien
agcgccagcgcgctcccgagtgtgg

SEQ ID NO: 5640520 - DNA, 25 bp, Homo sapien
ccacactcgggagcgcgctggcgct

SEQ ID NO: 5640521 - DNA, 25 bp, Homo sapien
cggctcgcgaagcccggcgggtggg

SEQ ID NO: 5640522 - DNA, 25 bp, Homo sapien
cccacccgccgggcttcgcgagccg

SEQ ID NO: 5640523 - DNA, 25 bp, Homo sapien
gcctcccccggctcgcgaagcccgg

SEQ ID NO: 5640524 - DNA, 25 bp, Homo sapien
ccgggcttcgcgagccgggggaggc

SEQ ID NO: 5640525 - DNA, 25 bp, Homo sapien
ggcccggcgctcacgtctcgcctcc

SEQ ID NO: 5640526 - DNA, 25 bp, Homo sapien
ggaggcgagacgtgagcgccgggcc

SEQ ID NO: 5640527 - DNA, 25 bp, Homo sapien
gccggcccggcgctcacgtctcgcc

SEQ ID NO: 5640528 - DNA, 25 bp, Homo sapien
ggcgagacgtgagcgccgggccggc

SEQ ID NO: 5640529 - DNA, 25 bp, Homo sapien
tcgggtgtatagaggactcggtgct

SEQ ID NO: 5640530 - DNA, 25 bp, Homo sapien
agcaccgagtcctctatacacccga

SEQ ID NO: 5640531 - DNA, 25 bp, Homo sapien
taaaatacaggtatcttaaattacg

SEQ ID NO: 5640532 - DNA, 25 bp, Homo sapien
cgtaatttaagatacctgtatttta

SEQ ID NO: 5640533 - DNA, 25 bp, Homo sapien
gtaaaatacaggtatcttaaattac

SEQ ID NO: 5640534 - DNA, 25 bp, Homo sapien
gtaatttaagatacctgtattttac

SEQ ID NO: 5640535 - DNA, 25 bp, Homo sapien
gacctccgtcccgtgcctgcacgta

SEQ ID NO: 5640536 - DNA, 25 bp, Homo sapien
tacgtgcaggcacgggacggaggtc

SEQ ID NO: 5640537 - DNA, 25 bp, Homo sapien
ggggtgaggccctcgctctcctacg

SEQ ID NO: 5640538 - DNA, 25 bp, Homo sapien
cgtaggagagcgagggcctcacccc

SEQ ID NO: 5640539 - DNA, 25 bp, Homo sapien
tgaccatcacggttcagatggagaa

SEQ ID NO: 5640540 - DNA, 25 bp, Homo sapien
ttctccatctgaaccgtgatggtca

SEQ ID NO: 5640541 - DNA, 25 bp, Homo sapien
tttctctctcgtccgtacttccacg

SEQ ID NO: 5640542 - DNA, 25 bp, Homo sapien
cgtggaagtacggacgagagagaaa

SEQ ID NO: 5640543 - DNA, 25 bp, Homo sapien
ccctcgagggtcagttagctgcggc

SEQ ID NO: 5640544 - DNA, 25 bp, Homo sapien
gccgcagctaactgaccctcgaggg

SEQ ID NO: 5640545 - DNA, 25 bp, Homo sapien
gaccctttcagtcctgggccctcgg

SEQ ID NO: 5640546 - DNA, 25 bp, Homo sapien
ccgagggcccaggactgaaagggtc

SEQ ID NO: 5640547 - DNA, 25 bp, Homo sapien
tcgccgggcgcccgaccctttcagt

SEQ ID NO: 5640548 - DNA, 25 bp, Homo sapien
actgaaagggtcgggcgcccggcga

SEQ ID NO: 5640549 - DNA, 25 bp, Homo sapien
cagtcctgggccctcggcggccgcg

SEQ ID NO: 5640550 - DNA, 25 bp, Homo sapien
cgcggccgccgagggcccaggactg

SEQ ID NO: 5640551 - DNA, 25 bp, Homo sapien
cggaacagtccctcggcggactact

SEQ ID NO: 5640552 - DNA, 25 bp, Homo sapien
agtagtccgccgagggactgttccg

SEQ ID NO: 5640553 - DNA, 25 bp, Homo sapien
gatgatttaaataggccaggtattc

SEQ ID NO: 5640554 - DNA, 25 bp, Homo sapien
gaatacctggcctatttaaatcatc

SEQ ID NO: 5640555 - DNA, 25 bp, Homo sapien
ttaaaacgagaggtagataaagtat

SEQ ID NO: 5640556 - DNA, 25 bp, Homo sapien
atactttatctacctctcgttttaa

SEQ ID NO: 5640557 - DNA, 25 bp, Homo sapien
gttttactgaatcctttcaatggtt

SEQ ID NO: 5640558 - DNA, 25 bp, Homo sapien
aaccattgaaaggattcagtaaaac

SEQ ID NO: 5640559 - DNA, 25 bp, Homo sapien
gacggttttactgaatcctttcaat

SEQ ID NO: 5640560 - DNA, 25 bp, Homo sapien
attgaaaggattcagtaaaaccgtc

SEQ ID NO: 5640561 - DNA, 25 bp, Homo sapien
cgtagtggtctatagtcctaaactt

SEQ ID NO: 5640562 - DNA, 25 bp, Homo sapien
aagtttaggactatagaccactacg

SEQ ID NO: 5640563 - DNA, 25 bp, Homo sapien
atattcgtacttatagtagagactt

SEQ ID NO: 5640564 - DNA, 25 bp, Homo sapien
aagtctctactataagtacgaatat

SEQ ID NO: 5640565 - DNA, 25 bp, Homo sapien
gtcccaacaatcttcaagtcacagt

SEQ ID NO: 5640566 - DNA, 25 bp, Homo sapien
actgtgacttgaagattgttgggac

SEQ ID NO: 5640567 - DNA, 25 bp, Homo sapien
atgtatagtattaaccggagcacgg

SEQ ID NO: 5640568 - DNA, 25 bp, Homo sapien
ccgtgctccggttaatactatacat

SEQ ID NO: 5640569 - DNA, 25 bp, Homo sapien
gagggcccgcgcaacggcgggtcag

SEQ ID NO: 5640570 - DNA, 25 bp, Homo sapien
ctgacccgccgttgcgcgggccctc

SEQ ID NO: 5640571 - DNA, 25 bp, Homo sapien
gtaggacaaggaagataattgaatg

SEQ ID NO: 5640572 - DNA, 25 bp, Homo sapien
cattcaattatcttccttgtcctac

SEQ ID NO: 5640573 - DNA, 25 bp, Homo sapien
gcccgcgtgtttggcgttgacgacc

SEQ ID NO: 5640574 - DNA, 25 bp, Homo sapien
ggtcgtcaacgccaaacacgcgggc

SEQ ID NO: 5640575 - DNA, 25 bp, Homo sapien
ttattccacgacatgaaagtgtcgg

SEQ ID NO: 5640576 - DNA, 25 bp, Homo sapien
ccgacactttcatgtcgtggaataa

SEQ ID NO: 5640577 - DNA, 25 bp, Homo sapien
cggtccgtctgaacatccaggagag

SEQ ID NO: 5640578 - DNA, 25 bp, Homo sapien
ctctcctggatgttcagacggaccg

SEQ ID NO: 5640579 - DNA, 25 bp, Homo sapien
gttcttaagtgacaactattgacgg

SEQ ID NO: 5640580 - DNA, 25 bp, Homo sapien
ccgtcaatagttgtcacttaagaac

SEQ ID NO: 5640581 - DNA, 25 bp, Homo sapien
acaaaatatacattccaaaagttct

SEQ ID NO: 5640582 - DNA, 25 bp, Homo sapien
agaacttttggaatgtatattttgt

SEQ ID NO: 5640583 - DNA, 25 bp, Homo sapien
gtctagacaaacctgaacaaaatat

SEQ ID NO: 5640584 - DNA, 25 bp, Homo sapien
atattttgttcaggtttgtctagac

SEQ ID NO: 5640585 - DNA, 25 bp, Homo sapien
ggtcctgtccaacgaaacgaagacg

SEQ ID NO: 5640586 - DNA, 25 bp, Homo sapien
cgtcttcgtttcgttggacaggacc

SEQ ID NO: 5640587 - DNA, 25 bp, Homo sapien
cgaagagagcaagcgaggagagact

SEQ ID NO: 5640588 - DNA, 25 bp, Homo sapien
agtctctcctcgcttgctctcttcg

SEQ ID NO: 5640589 - DNA, 25 bp, Homo sapien
gccgccgggcttcccttgcgaagag

SEQ ID NO: 5640590 - DNA, 25 bp, Homo sapien
ctcttcgcaagggaagcccggcggc

SEQ ID NO: 5640591 - DNA, 25 bp, Homo sapien
ggtgtacgagtctatcgtcttccct

SEQ ID NO: 5640592 - DNA, 25 bp, Homo sapien
agggaagacgatagactcgtacacc

SEQ ID NO: 5640593 - DNA, 25 bp, Homo sapien
ataattttgagacaacacttccgaa

SEQ ID NO: 5640594 - DNA, 25 bp, Homo sapien
ttcggaagtgttgtctcaaaattat

SEQ ID NO: 5640595 - DNA, 25 bp, Homo sapien
tgtcaaacttcatggttcagatttc

SEQ ID NO: 5640596 - DNA, 25 bp, Homo sapien
gaaatctgaaccatgaagtttgaca

SEQ ID NO: 5640597 - DNA, 25 bp, Homo sapien
tccacccgcggtacgtcacgcccca

SEQ ID NO: 5640598 - DNA, 25 bp, Homo sapien
tggggcgtgacgtaccgcgggtgga

SEQ ID NO: 5640599 - DNA, 25 bp, Homo sapien
gggtggcactcgtagaactaaaccg

SEQ ID NO: 5640600 - DNA, 25 bp, Homo sapien
cggtttagttctacgagtgccaccc

SEQ ID NO: 5640601 - DNA, 25 bp, Homo sapien
tcctccgtctgacggtctacctctt

SEQ ID NO: 5640602 - DNA, 25 bp, Homo sapien
aagaggtagaccgtcagacggagga

SEQ ID NO: 5640603 - DNA, 25 bp, Homo sapien
gtcacgggaatcgtagacaccgggt

SEQ ID NO: 5640604 - DNA, 25 bp, Homo sapien
acccggtgtctacgattcccgtgac

SEQ ID NO: 5640605 - DNA, 25 bp, Homo sapien
ttgacgggaataggggtctcataga

SEQ ID NO: 5640606 - DNA, 25 bp, Homo sapien
tctatgagacccctattcccgtcaa

SEQ ID NO: 5640607 - DNA, 25 bp, Homo sapien
gggccgggccgaccgtctgtaggcc

SEQ ID NO: 5640608 - DNA, 25 bp, Homo sapien
ggcctacagacggtcggcccggccc

SEQ ID NO: 5640609 - DNA, 25 bp, Homo sapien
agggccgggccgaccgtctgtaggc

SEQ ID NO: 5640610 - DNA, 25 bp, Homo sapien
gcctacagacggtcggcccggccct

SEQ ID NO: 5640611 - DNA, 25 bp, Homo sapien
cccgggaggctatcgccgtcaggca

SEQ ID NO: 5640612 - DNA, 25 bp, Homo sapien
tgcctgacggcgatagcctcccggg

SEQ ID NO: 5640613 - DNA, 25 bp, Homo sapien
aatcaaggctatactgtctttctga

SEQ ID NO: 5640614 - DNA, 25 bp, Homo sapien
tcagaaagacagtatagccttgatt

SEQ ID NO: 5640615 - DNA, 25 bp, Homo sapien
accaacaagtcaaatttgaataagt

SEQ ID NO: 5640616 - DNA, 25 bp, Homo sapien
acttattcaaatttgacttgttggt

SEQ ID NO: 5640617 - DNA, 25 bp, Homo sapien
agccgcgaccgggagccggccggta

SEQ ID NO: 5640618 - DNA, 25 bp, Homo sapien
taccggccggctcccggtcgcggct

SEQ ID NO: 5640619 - DNA, 25 bp, Homo sapien
ccctcgccgtcccagccgcgaccgg

SEQ ID NO: 5640620 - DNA, 25 bp, Homo sapien
ccggtcgcggctgggacggcgaggg

SEQ ID NO: 5640621 - DNA, 25 bp, Homo sapien
gggacccctcgccgtcccagccgcg

SEQ ID NO: 5640622 - DNA, 25 bp, Homo sapien
cgcggctgggacggcgaggggtccc

SEQ ID NO: 5640623 - DNA, 25 bp, Homo sapien
ggtcgacgacactatcgaacgacag

SEQ ID NO: 5640624 - DNA, 25 bp, Homo sapien
ctgtcgttcgatagtgtcgtcgacc

SEQ ID NO: 5640625 - DNA, 25 bp, Homo sapien
gtttgtcatgaacgtctccgggact

SEQ ID NO: 5640626 - DNA, 25 bp, Homo sapien
agtcccggagacgttcatgacaaac

SEQ ID NO: 5640627 - DNA, 25 bp, Homo sapien
gggcacgggacctcacagacgagtg

SEQ ID NO: 5640628 - DNA, 25 bp, Homo sapien
cactcgtctgtgaggtcccgtgccc

SEQ ID NO: 5640629 - DNA, 25 bp, Homo sapien
tgtaccggcatcgccgggaccgaag

SEQ ID NO: 5640630 - DNA, 25 bp, Homo sapien
cttcggtcccggcgatgccggtaca

SEQ ID NO: 5640631 - DNA, 25 bp, Homo sapien
tacggggtatattatgtcgtcgacg

SEQ ID NO: 5640632 - DNA, 25 bp, Homo sapien
cgtcgacgacataatataccccgta

SEQ ID NO: 5640633 - DNA, 25 bp, Homo sapien
tgtgattatattggacttcataacg

SEQ ID NO: 5640634 - DNA, 25 bp, Homo sapien
cgttatgaagtccaatataatcaca

SEQ ID NO: 5640635 - DNA, 25 bp, Homo sapien
agtgtgtgattatattggacttcat

SEQ ID NO: 5640636 - DNA, 25 bp, Homo sapien
atgaagtccaatataatcacacact

SEQ ID NO: 5640637 - DNA, 25 bp, Homo sapien
ataaaaatacgttcgatatattcag

SEQ ID NO: 5640638 - DNA, 25 bp, Homo sapien
ctgaatatatcgaacgtatttttat

SEQ ID NO: 5640639 - DNA, 25 bp, Homo sapien
tataaaaatacgttcgatatattca

SEQ ID NO: 5640640 - DNA, 25 bp, Homo sapien
tgaatatatcgaacgtatttttata

SEQ ID NO: 5640641 - DNA, 25 bp, Homo sapien
aatgactgcttgatacgggtgacca

SEQ ID NO: 5640642 - DNA, 25 bp, Homo sapien
tggtcacccgtatcaagcagtcatt

SEQ ID NO: 5640643 - DNA, 25 bp, Homo sapien
caccggacggaagccttctggaagg

SEQ ID NO: 5640644 - DNA, 25 bp, Homo sapien
ccttccagaaggcttccgtccggtg

SEQ ID NO: 5640645 - DNA, 25 bp, Homo sapien
tcttcctacttgaccgaagggcccc

SEQ ID NO: 5640646 - DNA, 25 bp, Homo sapien
ggggcccttcggtcaagtaggaaga

SEQ ID NO: 5640647 - DNA, 25 bp, Homo sapien
agtaataggtctacaaagagtcaaa

SEQ ID NO: 5640648 - DNA, 25 bp, Homo sapien
tttgactctttgtagacctattact

SEQ ID NO: 5640649 - DNA, 25 bp, Homo sapien
ccctcgcccgtcactcccagtaccg

SEQ ID NO: 5640650 - DNA, 25 bp, Homo sapien
cggtactgggagtgacgggcgaggg

SEQ ID NO: 5640651 - DNA, 25 bp, Homo sapien
tcgtggcgcctgtccccgtcgcccg

SEQ ID NO: 5640652 - DNA, 25 bp, Homo sapien
cgggcgacggggacaggcgccacga

SEQ ID NO: 5640653 - DNA, 25 bp, Homo sapien
ccggcggctccggccctcgacgaag

SEQ ID NO: 5640654 - DNA, 25 bp, Homo sapien
cttcgtcgagggccggagccgccgg

SEQ ID NO: 5640655 - DNA, 25 bp, Homo sapien
ccgacactgagcaccgacgtcttta

SEQ ID NO: 5640656 - DNA, 25 bp, Homo sapien
taaagacgtcggtgctcagtgtcgg

SEQ ID NO: 5640657 - DNA, 25 bp, Homo sapien
tgaagagaagacagttacagacaaa

SEQ ID NO: 5640658 - DNA, 25 bp, Homo sapien
tttgtctgtaactgtcttctcttca

SEQ ID NO: 5640659 - DNA, 25 bp, Homo sapien
cacttataaagttgttcagtcgacg

SEQ ID NO: 5640660 - DNA, 25 bp, Homo sapien
cgtcgactgaacaactttataagtg

SEQ ID NO: 5640661 - DNA, 25 bp, Homo sapien
tcattataaactcaaagacacttgt

SEQ ID NO: 5640662 - DNA, 25 bp, Homo sapien
acaagtgtctttgagtttataatga

SEQ ID NO: 5640663 - DNA, 25 bp, Homo sapien
tcgacgtttcctggtaagtaccgag

SEQ ID NO: 5640664 - DNA, 25 bp, Homo sapien
ctcggtacttaccaggaaacgtcga

SEQ ID NO: 5640665 - DNA, 25 bp, Homo sapien
gtctccaccggtgcgaatccagcga

SEQ ID NO: 5640666 - DNA, 25 bp, Homo sapien
tcgctggattcgcaccggtggagac

SEQ ID NO: 5640667 - DNA, 25 bp, Homo sapien
ttggtttgtggcttatcacagtccc

SEQ ID NO: 5640668 - DNA, 25 bp, Homo sapien
gggactgtgataagccacaaaccaa

SEQ ID NO: 5640669 - DNA, 25 bp, Homo sapien
cactggtagcggcagtccgggtcgc

SEQ ID NO: 5640670 - DNA, 25 bp, Homo sapien
gcgacccggactgccgctaccagtg

SEQ ID NO: 5640671 - DNA, 25 bp, Homo sapien
taaggacaaccattactcttggaat

SEQ ID NO: 5640672 - DNA, 25 bp, Homo sapien
attccaagagtaatggttgtcctta

SEQ ID NO: 5640673 - DNA, 25 bp, Homo sapien
ggtactttaacatctgtaaccttgc

SEQ ID NO: 5640674 - DNA, 25 bp, Homo sapien
gcaaggttacagatgttaaagtacc

SEQ ID NO: 5640675 - DNA, 25 bp, Homo sapien
gcctcccacggaccggcgcgccccg

SEQ ID NO: 5640676 - DNA, 25 bp, Homo sapien
cggggcgcgccggtccgtgggaggc

SEQ ID NO: 5640677 - DNA, 25 bp, Homo sapien
gggcctcccacggaccggcgcgccc

SEQ ID NO: 5640678 - DNA, 25 bp, Homo sapien
gggcgcgccggtccgtgggaggccc

SEQ ID NO: 5640679 - DNA, 25 bp, Homo sapien
agggcctcccacggaccggcgcgcc

SEQ ID NO: 5640680 - DNA, 25 bp, Homo sapien
ggcgcgccggtccgtgggaggccct

SEQ ID NO: 5640681 - DNA, 25 bp, Homo sapien
cagggcctcccacggaccggcgcgc

SEQ ID NO: 5640682 - DNA, 25 bp, Homo sapien
gcgcgccggtccgtgggaggccctg

SEQ ID NO: 5640683 - DNA, 25 bp, Homo sapien
aatggcagactgtaagaaggctaaa

SEQ ID NO: 5640684 - DNA, 25 bp, Homo sapien
tttagccttcttacagtctgccatt

SEQ ID NO: 5640685 - DNA, 25 bp, Homo sapien
gcgcgacgccggaggatcggcgggc

SEQ ID NO: 5640686 - DNA, 25 bp, Homo sapien
gcccgccgatcctccggcgtcgcgc

SEQ ID NO: 5640687 - DNA, 25 bp, Homo sapien
cggtagctcagatctccaaagaact

SEQ ID NO: 5640688 - DNA, 25 bp, Homo sapien
agttctttggagatctgagctaccg

SEQ ID NO: 5640689 - DNA, 25 bp, Homo sapien
agtgcggtacgtgaccccgttcaag

SEQ ID NO: 5640690 - DNA, 25 bp, Homo sapien
cttgaacggggtcacgtaccgcact

SEQ ID NO: 5640691 - DNA, 25 bp, Homo sapien
acatgtgttaataactctgaaagac

SEQ ID NO: 5640692 - DNA, 25 bp, Homo sapien
gtctttcagagttattaacacatgt

SEQ ID NO: 5640693 - DNA, 25 bp, Homo sapien
gcggatccaagtcacgatcttaaag

SEQ ID NO: 5640694 - DNA, 25 bp, Homo sapien
ctttaagatcgtgacttggatccgc

SEQ ID NO: 5640695 - DNA, 25 bp, Homo sapien
attagagaattatatctaaaccttt

SEQ ID NO: 5640696 - DNA, 25 bp, Homo sapien
aaaggtttagatataattctctaat

SEQ ID NO: 5640697 - DNA, 25 bp, Homo sapien
aagaacttggtatctccttctttaa

SEQ ID NO: 5640698 - DNA, 25 bp, Homo sapien
ttaaagaaggagataccaagttctt

SEQ ID NO: 5640699 - DNA, 25 bp, Homo sapien
ggaggttttcgagaagattaagtaa

SEQ ID NO: 5640700 - DNA, 25 bp, Homo sapien
ttacttaatcttctcgaaaacctcc

SEQ ID NO: 5640701 - DNA, 25 bp, Homo sapien
aggtaagatcaaggagtgaaggaca

SEQ ID NO: 5640702 - DNA, 25 bp, Homo sapien
tgtccttcactccttgatcttacct

SEQ ID NO: 5640703 - DNA, 25 bp, Homo sapien
ggtgcaccacgacctgccggttcga

SEQ ID NO: 5640704 - DNA, 25 bp, Homo sapien
tcgaaccggcaggtcgtggtgcacc

SEQ ID NO: 5640705 - DNA, 25 bp, Homo sapien
ccacaactcggccagcgcgtgactg

SEQ ID NO: 5640706 - DNA, 25 bp, Homo sapien
cagtcacgcgctggccgagttgtgg

SEQ ID NO: 5640707 - DNA, 25 bp, Homo sapien
cttagaggagagtttgaaacggtac

SEQ ID NO: 5640708 - DNA, 25 bp, Homo sapien
gtaccgtttcaaactctcctctaag

SEQ ID NO: 5640709 - DNA, 25 bp, Homo sapien
acaatgtctcagtagtaattgaaat

SEQ ID NO: 5640710 - DNA, 25 bp, Homo sapien
atttcaattactactgagacattgt

SEQ ID NO: 5640711 - DNA, 25 bp, Homo sapien
agaaattagaactagaggtgttacc

SEQ ID NO: 5640712 - DNA, 25 bp, Homo sapien
ggtaacacctctagttctaatttct

SEQ ID NO: 5640713 - DNA, 25 bp, Homo sapien
tttcctaaaaggtgtaagtaatgta

SEQ ID NO: 5640714 - DNA, 25 bp, Homo sapien
tacattacttacaccttttaggaaa

SEQ ID NO: 5640715 - DNA, 25 bp, Homo sapien
tagttgaccgaaacgttcgtgggcc

SEQ ID NO: 5640716 - DNA, 25 bp, Homo sapien
ggcccacgaacgtttcggtcaacta

SEQ ID NO: 5640717 - DNA, 25 bp, Homo sapien
cttaacttcaaacactacgagaaga

SEQ ID NO: 5640718 - DNA, 25 bp, Homo sapien
tcttctcgtagtgtttgaagttaag

SEQ ID NO: 5640719 - DNA, 25 bp, Homo sapien
cgtcgctccggtgccagacggctgc

SEQ ID NO: 5640720 - DNA, 25 bp, Homo sapien
gcagccgtctggcaccggagcgacg

SEQ ID NO: 5640721 - DNA, 25 bp, Homo sapien
accggtgagacaacctggaccggta

SEQ ID NO: 5640722 - DNA, 25 bp, Homo sapien
taccggtccaggttgtctcaccggt

SEQ ID NO: 5640723 - DNA, 25 bp, Homo sapien
gaccggtgagacaacctggaccggt

SEQ ID NO: 5640724 - DNA, 25 bp, Homo sapien
accggtccaggttgtctcaccggtc

SEQ ID NO: 5640725 - DNA, 25 bp, Homo sapien
gaagacttttgaggaagagacgact

SEQ ID NO: 5640726 - DNA, 25 bp, Homo sapien
agtcgtctcttcctcaaaagtcttc

SEQ ID NO: 5640727 - DNA, 25 bp, Homo sapien
tctgggagggggctgccgagctccg

SEQ ID NO: 5640728 - DNA, 25 bp, Homo sapien
cggagctcggcagccccctcccaga

SEQ ID NO: 5640729 - DNA, 25 bp, Homo sapien
ggaggtgatcgacggtcgaagggtg

SEQ ID NO: 5640730 - DNA, 25 bp, Homo sapien
cacccttcgaccgtcgatcacctcc

SEQ ID NO: 5640731 - DNA, 25 bp, Homo sapien
aggaggtgatcgacggtcgaagggt

SEQ ID NO: 5640732 - DNA, 25 bp, Homo sapien
acccttcgaccgtcgatcacctcct

SEQ ID NO: 5640733 - DNA, 25 bp, Homo sapien
ttcggagtgtcccggaacacggtgg

SEQ ID NO: 5640734 - DNA, 25 bp, Homo sapien
ccaccgtgttccgggacactccgaa

SEQ ID NO: 5640735 - DNA, 25 bp, Homo sapien
tgtccccgggtcgggttatggagta

SEQ ID NO: 5640736 - DNA, 25 bp, Homo sapien
tactccataacccgacccggggaca

SEQ ID NO: 5640737 - DNA, 25 bp, Homo sapien
gaccaccaaggttctagcccagact

SEQ ID NO: 5640738 - DNA, 25 bp, Homo sapien
agtctgggctagaaccttggtggtc

SEQ ID NO: 5640739 - DNA, 25 bp, Homo sapien
gacccctgacgcccagacgcgcgga

SEQ ID NO: 5640740 - DNA, 25 bp, Homo sapien
tccgcgcgtctgggcgtcaggggtc

SEQ ID NO: 5640741 - DNA, 25 bp, Homo sapien
aaagttctaaatccagtctacagta

SEQ ID NO: 5640742 - DNA, 25 bp, Homo sapien
tactgtagactggatttagaacttt

SEQ ID NO: 5640743 - DNA, 25 bp, Homo sapien
taacaaattacttgtatagaattct

SEQ ID NO: 5640744 - DNA, 25 bp, Homo sapien
agaattctatacaagtaatttgtta

SEQ ID NO: 5640745 - DNA, 25 bp, Homo sapien
gtggcgagctcagaccacgacaaca

SEQ ID NO: 5640746 - DNA, 25 bp, Homo sapien
tgttgtcgtggtctgagctcgccac

SEQ ID NO: 5640747 - DNA, 25 bp, Homo sapien
tcggagaccacattcttaaggaagg

SEQ ID NO: 5640748 - DNA, 25 bp, Homo sapien
ccttccttaagaatgtggtctccga

SEQ ID NO: 5640749 - DNA, 25 bp, Homo sapien
gtcgaggacggagaatcgtatatct

SEQ ID NO: 5640750 - DNA, 25 bp, Homo sapien
agatatacgattctccgtcctcgac

SEQ ID NO: 5640751 - DNA, 25 bp, Homo sapien
gggccccggcggaaataccgactca

SEQ ID NO: 5640752 - DNA, 25 bp, Homo sapien
tgagtcggtatttccgccggggccc

SEQ ID NO: 5640753 - DNA, 25 bp, Homo sapien
gtggtccggctccagggtcccaacg

SEQ ID NO: 5640754 - DNA, 25 bp, Homo sapien
cgttgggaccctggagccggaccac

SEQ ID NO: 5640755 - DNA, 25 bp, Homo sapien
gggcgcgggccaatctgtccgcttc

SEQ ID NO: 5640756 - DNA, 25 bp, Homo sapien
gaagcggacagattggcccgcgccc

SEQ ID NO: 5640757 - DNA, 25 bp, Homo sapien
cgggcgcgggccaatctgtccgctt

SEQ ID NO: 5640758 - DNA, 25 bp, Homo sapien
aagcggacagattggcccgcgcccg

SEQ ID NO: 5640759 - DNA, 25 bp, Homo sapien
ggtcgtacacgcatgagagacgata

SEQ ID NO: 5640760 - DNA, 25 bp, Homo sapien
tatcgtctctcatgcgtgtacgacc

SEQ ID NO: 5640761 - DNA, 25 bp, Homo sapien
aaataaagtcaacatctatgaagaa

SEQ ID NO: 5640762 - DNA, 25 bp, Homo sapien
ttcttcatagatgttgactttattt

SEQ ID NO: 5640763 - DNA, 25 bp, Homo sapien
ctccccgtctttggagaaagagtac

SEQ ID NO: 5640764 - DNA, 25 bp, Homo sapien
gtactctttctccaaagacggggag

SEQ ID NO: 5640765 - DNA, 25 bp, Homo sapien
gactatccattcttcatacaacttg

SEQ ID NO: 5640766 - DNA, 25 bp, Homo sapien
caagttgtatgaagaatggatagtc

SEQ ID NO: 5640767 - DNA, 25 bp, Homo sapien
tgaacatcgttatgatttgtaaagt

SEQ ID NO: 5640768 - DNA, 25 bp, Homo sapien
actttacaaatcataacgatgttca

SEQ ID NO: 5640769 - DNA, 25 bp, Homo sapien
tcatgaacatcgttatgatttgtaa

SEQ ID NO: 5640770 - DNA, 25 bp, Homo sapien
ttacaaatcataacgatgttcatga

SEQ ID NO: 5640771 - DNA, 25 bp, Homo sapien
gaaaaaagagattcttaacagtgta

SEQ ID NO: 5640772 - DNA, 25 bp, Homo sapien
tacactgttaagaatctcttttttc

SEQ ID NO: 5640773 - DNA, 25 bp, Homo sapien
agtggccccgccagtgaccggacgg

SEQ ID NO: 5640774 - DNA, 25 bp, Homo sapien
ccgtccggtcactggcggggccact

SEQ ID NO: 5640775 - DNA, 25 bp, Homo sapien
aagtggccccgccagtgaccggacg

SEQ ID NO: 5640776 - DNA, 25 bp, Homo sapien
cgtccggtcactggcggggccactt

SEQ ID NO: 5640777 - DNA, 25 bp, Homo sapien
tgggagattgggttcatagaatgta

SEQ ID NO: 5640778 - DNA, 25 bp, Homo sapien
tacattctatgaacccaatctccca

SEQ ID NO: 5640779 - DNA, 25 bp, Homo sapien
gggagtcacccctcctcaggccgtc

SEQ ID NO: 5640780 - DNA, 25 bp, Homo sapien
gacggcctgaggaggggtgactccc

SEQ ID NO: 5640781 - DNA, 25 bp, Homo sapien
gcggctcctgcgtaggagcagaacc

SEQ ID NO: 5640782 - DNA, 25 bp, Homo sapien
ggttctgctcctacgcaggagccgc

SEQ ID NO: 5640783 - DNA, 25 bp, Homo sapien
actagcggcggtcgcccagcggcgt

SEQ ID NO: 5640784 - DNA, 25 bp, Homo sapien
acgccgctgggcgaccgccgctagt

SEQ ID NO: 5640785 - DNA, 25 bp, Homo sapien
gaggcgcccggggaccacactgccc

SEQ ID NO: 5640786 - DNA, 25 bp, Homo sapien
gggcagtgtggtccccgggcgcctc

SEQ ID NO: 5640787 - DNA, 25 bp, Homo sapien
tgcccccctctacgcgccgcagcgt

SEQ ID NO: 5640788 - DNA, 25 bp, Homo sapien
acgctgcggcgcgtagaggggggca

SEQ ID NO: 5640789 - DNA, 25 bp, Homo sapien
ctgtgtgcggatatgacctgggtca

SEQ ID NO: 5640790 - DNA, 25 bp, Homo sapien
tgacccaggtcatatccgcacacag

SEQ ID NO: 5640791 - DNA, 25 bp, Homo sapien
agactcggtgtaccgcaggggatct

SEQ ID NO: 5640792 - DNA, 25 bp, Homo sapien
agatcccctgcggtacaccgagtct

SEQ ID NO: 5640793 - DNA, 25 bp, Homo sapien
ccaccggaacgagaggtctgtcagg

SEQ ID NO: 5640794 - DNA, 25 bp, Homo sapien
cctgacagacctctcgttccggtgg

SEQ ID NO: 5640795 - DNA, 25 bp, Homo sapien
acctctcagtctggcccggagtgga

SEQ ID NO: 5640796 - DNA, 25 bp, Homo sapien
tccactccgggccagactgagaggt

SEQ ID NO: 5640797 - DNA, 25 bp, Homo sapien
aacttaacaagagggtgcaacacac

SEQ ID NO: 5640798 - DNA, 25 bp, Homo sapien
gtgtgttgcaccctcttgttaagtt

SEQ ID NO: 5640799 - DNA, 25 bp, Homo sapien
ggacctagagtcacgtcaaagcgac

SEQ ID NO: 5640800 - DNA, 25 bp, Homo sapien
gtcgctttgacgtgactctaggtcc

SEQ ID NO: 5640801 - DNA, 25 bp, Homo sapien
aagtagtacatcttcaaattcataa

SEQ ID NO: 5640802 - DNA, 25 bp, Homo sapien
ttatgaatttgaagatgtactactt

SEQ ID NO: 5640803 - DNA, 25 bp, Homo sapien
aaagtagtacatcttcaaattcata

SEQ ID NO: 5640804 - DNA, 25 bp, Homo sapien
tatgaatttgaagatgtactacttt

SEQ ID NO: 5640805 - DNA, 25 bp, Homo sapien
agtctagattcaagacaggctatat

SEQ ID NO: 5640806 - DNA, 25 bp, Homo sapien
atatagcctgtcttgaatctagact

SEQ ID NO: 5640807 - DNA, 25 bp, Homo sapien
aagagaagaactgatacaaaaacaa

SEQ ID NO: 5640808 - DNA, 25 bp, Homo sapien
ttgtttttgtatcagttcttctctt

SEQ ID NO: 5640809 - DNA, 25 bp, Homo sapien
gccgtccccgctcgaatcgacaggt

SEQ ID NO: 5640810 - DNA, 25 bp, Homo sapien
acctgtcgattcgagcggggacggc

SEQ ID NO: 5640811 - DNA, 25 bp, Homo sapien
ggacttagactatgtttcgccaaac

SEQ ID NO: 5640812 - DNA, 25 bp, Homo sapien
gtttggcgaaacatagtctaagtcc

SEQ ID NO: 5640813 - DNA, 25 bp, Homo sapien
gacttgttccggattggtcatttaa

SEQ ID NO: 5640814 - DNA, 25 bp, Homo sapien
ttaaatgaccaatccggaacaagtc

SEQ ID NO: 5640815 - DNA, 25 bp, Homo sapien
taccgatacaagtgggaaagacttc

SEQ ID NO: 5640816 - DNA, 25 bp, Homo sapien
gaagtctttcccacttgtatcggta

SEQ ID NO: 5640817 - DNA, 25 bp, Homo sapien
cggcggctcctcaccctgcctggta

SEQ ID NO: 5640818 - DNA, 25 bp, Homo sapien
taccaggcagggtgaggagccgccg

SEQ ID NO: 5640819 - DNA, 25 bp, Homo sapien
gcggcgccaagagggcgggtgccct

SEQ ID NO: 5640820 - DNA, 25 bp, Homo sapien
agggcacccgccctcttggcgccgc

SEQ ID NO: 5640821 - DNA, 25 bp, Homo sapien
cgaacagtaggtgcttggacagtaa

SEQ ID NO: 5640822 - DNA, 25 bp, Homo sapien
ttactgtccaagcacctactgttcg

SEQ ID NO: 5640823 - DNA, 25 bp, Homo sapien
ccgtcgcgactctagagaggtacag

SEQ ID NO: 5640824 - DNA, 25 bp, Homo sapien
ctgtacctctctagagtcgcgacgg

SEQ ID NO: 5640825 - DNA, 25 bp, Homo sapien
tgtgtacgtcggactatatactcac

SEQ ID NO: 5640826 - DNA, 25 bp, Homo sapien
gtgagtatatagtccgacgtacaca

SEQ ID NO: 5640827 - DNA, 25 bp, Homo sapien
ggcccaccctcgccctcgccccgta

SEQ ID NO: 5640828 - DNA, 25 bp, Homo sapien
tacggggcgagggcgagggtgggcc

SEQ ID NO: 5640829 - DNA, 25 bp, Homo sapien
gcagccggcccaccctcgccctcgc

SEQ ID NO: 5640830 - DNA, 25 bp, Homo sapien
gcgagggcgagggtgggccggctgc

SEQ ID NO: 5640831 - DNA, 25 bp, Homo sapien
gcggcagccggcccaccctcgccct

SEQ ID NO: 5640832 - DNA, 25 bp, Homo sapien
agggcgagggtgggccggctgccgc

SEQ ID NO: 5640833 - DNA, 25 bp, Homo sapien
tccccgcgggagctgcgggagccgg

SEQ ID NO: 5640834 - DNA, 25 bp, Homo sapien
ccggctcccgcagctcccgcgggga

SEQ ID NO: 5640835 - DNA, 25 bp, Homo sapien
gacgggagccgccagacgtgagacc

SEQ ID NO: 5640836 - DNA, 25 bp, Homo sapien
ggtctcacgtctggcggctcccgtc

SEQ ID NO: 5640837 - DNA, 25 bp, Homo sapien
agtcgggttgcgtcgactcaactac

SEQ ID NO: 5640838 - DNA, 25 bp, Homo sapien
gtagttgagtcgacgcaacccgact

SEQ ID NO: 5640839 - DNA, 25 bp, Homo sapien
acataattcattctacagactaaag

SEQ ID NO: 5640840 - DNA, 25 bp, Homo sapien
ctttagtctgtagaatgaattatgt

SEQ ID NO: 5640841 - DNA, 25 bp, Homo sapien
acgacgtcggagctccggacgtccc

SEQ ID NO: 5640842 - DNA, 25 bp, Homo sapien
gggacgtccggagctccgacgtcgt

SEQ ID NO: 5640843 - DNA, 25 bp, Homo sapien
cttagttaataaaggcgtcttcgaa

SEQ ID NO: 5640844 - DNA, 25 bp, Homo sapien
ttcgaagacgcctttattaactaag

SEQ ID NO: 5640845 - DNA, 25 bp, Homo sapien
ggcgcctggtgctggggccccgacg

SEQ ID NO: 5640846 - DNA, 25 bp, Homo sapien
cgtcggggccccagcaccaggcgcc

SEQ ID NO: 5640847 - DNA, 25 bp, Homo sapien
cgaaccggtctcacccgtgcgtcgg

SEQ ID NO: 5640848 - DNA, 25 bp, Homo sapien
ccgacgcacgggtgagaccggttcg

SEQ ID NO: 5640849 - DNA, 25 bp, Homo sapien
aatttatattaagtcgcgataacga

SEQ ID NO: 5640850 - DNA, 25 bp, Homo sapien
tcgttatcgcgacttaatataaatt

SEQ ID NO: 5640851 - DNA, 25 bp, Homo sapien
agaaagtttttatatccagtggtat

SEQ ID NO: 5640852 - DNA, 25 bp, Homo sapien
ataccactggatataaaaactttct

SEQ ID NO: 5640853 - DNA, 25 bp, Homo sapien
acccgtgcgggtcaagtatctttgc

SEQ ID NO: 5640854 - DNA, 25 bp, Homo sapien
gcaaagatacttgacccgcacgggt

SEQ ID NO: 5640855 - DNA, 25 bp, Homo sapien
acattacaatcaccttttagtagaa

SEQ ID NO: 5640856 - DNA, 25 bp, Homo sapien
ttctactaaaaggtgattgtaatgt

SEQ ID NO: 5640857 - DNA, 25 bp, Homo sapien
atgatttaagtatttaacacaaaag

SEQ ID NO: 5640858 - DNA, 25 bp, Homo sapien
cttttgtgttaaatacttaaatcat

SEQ ID NO: 5640859 - DNA, 25 bp, Homo sapien
gaacttagcttcgagattacagtac

SEQ ID NO: 5640860 - DNA, 25 bp, Homo sapien
gtactgtaatctcgaagctaagttc

SEQ ID NO: 5640861 - DNA, 25 bp, Homo sapien
accaccccgtcggagtggagtcgtg

SEQ ID NO: 5640862 - DNA, 25 bp, Homo sapien
cacgactccactccgacggggtggt

SEQ ID NO: 5640863 - DNA, 25 bp, Homo sapien
gatcaactttagaaataacaaattg

SEQ ID NO: 5640864 - DNA, 25 bp, Homo sapien
caatttgttatttctaaagttgatc

SEQ ID NO: 5640865 - DNA, 25 bp, Homo sapien
aagttgaaatattctcggactttat

SEQ ID NO: 5640866 - DNA, 25 bp, Homo sapien
ataaagtccgagaatatttcaactt

SEQ ID NO: 5640867 - DNA, 25 bp, Homo sapien
caacactcccacgtgaggtgatagt

SEQ ID NO: 5640868 - DNA, 25 bp, Homo sapien
actatcacctcacgtgggagtgttg

SEQ ID NO: 5640869 - DNA, 25 bp, Homo sapien
agagattactagtcggtgtccagta

SEQ ID NO: 5640870 - DNA, 25 bp, Homo sapien
tactggacaccgactagtaatctct

SEQ ID NO: 5640871 - DNA, 25 bp, Homo sapien
gagcccctggggctgccgcgggtcg

SEQ ID NO: 5640872 - DNA, 25 bp, Homo sapien
cgacccgcggcagccccaggggctc

SEQ ID NO: 5640873 - DNA, 25 bp, Homo sapien
agaaggacaggtcagtaacgaatag

SEQ ID NO: 5640874 - DNA, 25 bp, Homo sapien
ctattcgttactgacctgtccttct

SEQ ID NO: 5640875 - DNA, 25 bp, Homo sapien
aataagattactaggacgaggaccg

SEQ ID NO: 5640876 - DNA, 25 bp, Homo sapien
cggtcctcgtcctagtaatcttatt

SEQ ID NO: 5640877 - DNA, 25 bp, Homo sapien
tactcccctactggtctgtagggtc

SEQ ID NO: 5640878 - DNA, 25 bp, Homo sapien
gaccctacagaccagtaggggagta

SEQ ID NO: 5640879 - DNA, 25 bp, Homo sapien
gtcttcgaagaaaattgtatttacc

SEQ ID NO: 5640880 - DNA, 25 bp, Homo sapien
ggtaaatacaattttcttcgaagac

SEQ ID NO: 5640881 - DNA, 25 bp, Homo sapien
cttatattcgtaatcattttcagaa

SEQ ID NO: 5640882 - DNA, 25 bp, Homo sapien
ttctgaaaatgattacgaatataag

SEQ ID NO: 5640883 - DNA, 25 bp, Homo sapien
gcacaggacacgatagaggtaatgt

SEQ ID NO: 5640884 - DNA, 25 bp, Homo sapien
acattacctctatcgtgtcctgtgc

SEQ ID NO: 5640885 - DNA, 25 bp, Homo sapien
tacccttgggttcacattgtacgag

SEQ ID NO: 5640886 - DNA, 25 bp, Homo sapien
ctcgtacaatgtgaacccaagggta

SEQ ID NO: 5640887 - DNA, 25 bp, Homo sapien
caaacgaccacggtggcgagtcctt

SEQ ID NO: 5640888 - DNA, 25 bp, Homo sapien
aaggactcgccaccgtggtcgtttg

SEQ ID NO: 5640889 - DNA, 25 bp, Homo sapien
cgacgtctgcggtgtggacttcccg

SEQ ID NO: 5640890 - DNA, 25 bp, Homo sapien
cgggaagtccacaccgcagacgtcg

SEQ ID NO: 5640891 - DNA, 25 bp, Homo sapien
agtgactactaacccaactacttct

SEQ ID NO: 5640892 - DNA, 25 bp, Homo sapien
agaagtagttgggttagtagtcact

SEQ ID NO: 5640893 - DNA, 25 bp, Homo sapien
gaagtaaaactcacgtgattcttat

SEQ ID NO: 5640894 - DNA, 25 bp, Homo sapien
ataagaatcacgtgagttttacttc

SEQ ID NO: 5640895 - DNA, 25 bp, Homo sapien
tctttagcgaatttatatctagagt

SEQ ID NO: 5640896 - DNA, 25 bp, Homo sapien
actctagatataaattcgctaaaga

SEQ ID NO: 5640897 - DNA, 25 bp, Homo sapien
tcaaccggaccaaatgtagaaacaa

SEQ ID NO: 5640898 - DNA, 25 bp, Homo sapien
ttgtttctacatttggtccggttga

SEQ ID NO: 5640899 - DNA, 25 bp, Homo sapien
gaactaaagtttatctcatcttaat

SEQ ID NO: 5640900 - DNA, 25 bp, Homo sapien
attaagatgagataaactttagttc

SEQ ID NO: 5640901 - DNA, 25 bp, Homo sapien
gaccttctttatatataagtaatta

SEQ ID NO: 5640902 - DNA, 25 bp, Homo sapien
taattacttatatataaagaaggtc

SEQ ID NO: 5640903 - DNA, 25 bp, Homo sapien
ggaacacttacccatgtacctttat

SEQ ID NO: 5640904 - DNA, 25 bp, Homo sapien
ataaaggtacatgggtaagtgttcc

SEQ ID NO: 5640905 - DNA, 25 bp, Homo sapien
cgtctcagatcggaggaacaccagc

SEQ ID NO: 5640906 - DNA, 25 bp, Homo sapien
gctggtgttcctccgatctgagacg

SEQ ID NO: 5640907 - DNA, 25 bp, Homo sapien
gtattacgacatataggtatttgta

SEQ ID NO: 5640908 - DNA, 25 bp, Homo sapien
tacaaatacctatatgtcgtaatac

SEQ ID NO: 5640909 - DNA, 25 bp, Homo sapien
gtccattcaagtattaatattttac

SEQ ID NO: 5640910 - DNA, 25 bp, Homo sapien
gtaaaatattaatacttgaatggac

SEQ ID NO: 5640911 - DNA, 25 bp, Homo sapien
cgtcccgcacccgaacccttcgcgc

SEQ ID NO: 5640912 - DNA, 25 bp, Homo sapien
gcgcgaagggttcgggtgcgggacg

SEQ ID NO: 5640913 - DNA, 25 bp, Homo sapien
aatctcctttattactctttcccac

SEQ ID NO: 5640914 - DNA, 25 bp, Homo sapien
gtgggaaagagtaataaaggagatt

SEQ ID NO: 5640915 - DNA, 25 bp, Homo sapien
gacaggataacagaatactcccgag

SEQ ID NO: 5640916 - DNA, 25 bp, Homo sapien
ctcgggagtattctgttatcctgtc

SEQ ID NO: 5640917 - DNA, 25 bp, Homo sapien
tcggtcactaaccatgtcttctact

SEQ ID NO: 5640918 - DNA, 25 bp, Homo sapien
agtagaagacatggttagtgaccga

SEQ ID NO: 5640919 - DNA, 25 bp, Homo sapien
gaaaataacagagaggtgaatttag

SEQ ID NO: 5640920 - DNA, 25 bp, Homo sapien
ctaaattcacctctctgttattttc

SEQ ID NO: 5640921 - DNA, 25 bp, Homo sapien
gccgacgtccacgcgggggccccaa

SEQ ID NO: 5640922 - DNA, 25 bp, Homo sapien
ttggggcccccgcgtggacgtcggc

SEQ ID NO: 5640923 - DNA, 25 bp, Homo sapien
gtgtccacatgcacgccccaggggt

SEQ ID NO: 5640924 - DNA, 25 bp, Homo sapien
acccctggggcgtgcatgtggacac

SEQ ID NO: 5640925 - DNA, 25 bp, Homo sapien
agtcggaagaaatacggttgacgat

SEQ ID NO: 5640926 - DNA, 25 bp, Homo sapien
atcgtcaaccgtatttcttccgact

SEQ ID NO: 5640927 - DNA, 25 bp, Homo sapien
ggggagtagcggggtcactcaacta

SEQ ID NO: 5640928 - DNA, 25 bp, Homo sapien
tagttgagtgaccccgctactcccc

SEQ ID NO: 5640929 - DNA, 25 bp, Homo sapien
cggcacggacctcgcggtcagacct

SEQ ID NO: 5640930 - DNA, 25 bp, Homo sapien
aggtctgaccgcgaggtccgtgccg

SEQ ID NO: 5640931 - DNA, 25 bp, Homo sapien
cctctgcgcctagggactcccgatg

SEQ ID NO: 5640932 - DNA, 25 bp, Homo sapien
catcgggagtccctaggcgcagagg

SEQ ID NO: 5640933 - DNA, 25 bp, Homo sapien
tctccgccgactagcctctcaccct

SEQ ID NO: 5640934 - DNA, 25 bp, Homo sapien
agggtgagaggctagtcggcggaga

SEQ ID NO: 5640935 - DNA, 25 bp, Homo sapien
agatttattatggttcactcagact

SEQ ID NO: 5640936 - DNA, 25 bp, Homo sapien
agtctgagtgaaccataataaatct

SEQ ID NO: 5640937 - DNA, 25 bp, Homo sapien
atatatgttgaataggttattctca

SEQ ID NO: 5640938 - DNA, 25 bp, Homo sapien
tgagaataacctattcaacatatat

SEQ ID NO: 5640939 - DNA, 25 bp, Homo sapien
aaggtttacactatcaacgaaaatc

SEQ ID NO: 5640940 - DNA, 25 bp, Homo sapien
gattttcgttgatagtgtaaacctt

SEQ ID NO: 5640941 - DNA, 25 bp, Homo sapien
gggtgacacgtagggttcgtcccta

SEQ ID NO: 5640942 - DNA, 25 bp, Homo sapien
tagggacgaaccctacgtgtcaccc

SEQ ID NO: 5640943 - DNA, 25 bp, Homo sapien
gggtctggggctcggcgtgccggag

SEQ ID NO: 5640944 - DNA, 25 bp, Homo sapien
ctccggcacgccgagccccagaccc

SEQ ID NO: 5640945 - DNA, 25 bp, Homo sapien
aaattagtctctacgtacctagtac

SEQ ID NO: 5640946 - DNA, 25 bp, Homo sapien
gtactaggtacgtagagactaattt

SEQ ID NO: 5640947 - DNA, 25 bp, Homo sapien
tagaaaagggtcaggtgtggtaact

SEQ ID NO: 5640948 - DNA, 25 bp, Homo sapien
agttaccacacctgacccttttcta

SEQ ID NO: 5640949 - DNA, 25 bp, Homo sapien
actatcatatctattgtgacaacag

SEQ ID NO: 5640950 - DNA, 25 bp, Homo sapien
ctgttgtcacaatagatatgatagt

SEQ ID NO: 5640951 - DNA, 25 bp, Homo sapien
tccgggttttgatgtcggtcgacag

SEQ ID NO: 5640952 - DNA, 25 bp, Homo sapien
ctgtcgaccgacatcaaaacccgga

SEQ ID NO: 5640953 - DNA, 25 bp, Homo sapien
ggaaacacgaccataaagtataagt

SEQ ID NO: 5640954 - DNA, 25 bp, Homo sapien
acttatactttatggtcgtgtttcc

SEQ ID NO: 5640955 - DNA, 25 bp, Homo sapien
tccccggcatcccccgggcgagacg

SEQ ID NO: 5640956 - DNA, 25 bp, Homo sapien
cgtctcgcccgggggatgccgggga

SEQ ID NO: 5640957 - DNA, 25 bp, Homo sapien
gtcggaccctgtcagaagccgatgt

SEQ ID NO: 5640958 - DNA, 25 bp, Homo sapien
acatcggcttctgacagggtccgac

SEQ ID NO: 5640959 - DNA, 25 bp, Homo sapien
agttctcactatacctaaaaattca

SEQ ID NO: 5640960 - DNA, 25 bp, Homo sapien
tgaatttttaggtatagtgagaact

SEQ ID NO: 5640961 - DNA, 25 bp, Homo sapien
aacaagaaactaaataccagtatcc

SEQ ID NO: 5640962 - DNA, 25 bp, Homo sapien
ggatactggtatttagtttcttgtt

SEQ ID NO: 5640963 - DNA, 25 bp, Homo sapien
ccttcctggcacctgggtcgcaggt

SEQ ID NO: 5640964 - DNA, 25 bp, Homo sapien
acctgcgacccaggtgccaggaagg

SEQ ID NO: 5640965 - DNA, 25 bp, Homo sapien
atttgaacatccaccatcttatgtt

SEQ ID NO: 5640966 - DNA, 25 bp, Homo sapien
aacataagatggtggatgttcaaat

SEQ ID NO: 5640967 - DNA, 25 bp, Homo sapien
taaaatctagtttcttactacgtaa

SEQ ID NO: 5640968 - DNA, 25 bp, Homo sapien
ttacgtagtaagaaactagatttta

SEQ ID NO: 5640969 - DNA, 25 bp, Homo sapien
aagaggacatcgtaactgtattaat

SEQ ID NO: 5640970 - DNA, 25 bp, Homo sapien
attaatacagttacgatgtcctctt

SEQ ID NO: 5640971 - DNA, 25 bp, Homo sapien
tattcaccatctcatcctgtccggg

SEQ ID NO: 5640972 - DNA, 25 bp, Homo sapien
cccggacaggatgagatggtgaata

SEQ ID NO: 5640973 - DNA, 25 bp, Homo sapien
acgaccgcaagtctacttaggtcac

SEQ ID NO: 5640974 - DNA, 25 bp, Homo sapien
gtgacctaagtagacttgcggtcgt

SEQ ID NO: 5640975 - DNA, 25 bp, Homo sapien
ggacctgcgcccaggcgtcaagggc

SEQ ID NO: 5640976 - DNA, 25 bp, Homo sapien
gcccttgacgcctgggcgcaggtcc

SEQ ID NO: 5640977 - DNA, 25 bp, Homo sapien
cccgcccgcgcgaccggtacgagga

SEQ ID NO: 5640978 - DNA, 25 bp, Homo sapien
tcctcgtaccggtcgcgcgggcggg

SEQ ID NO: 5640979 - DNA, 25 bp, Homo sapien
ctacgcatcagttccttacgacagg

SEQ ID NO: 5640980 - DNA, 25 bp, Homo sapien
cctgtcgtaaggaactgatgcgtag

SEQ ID NO: 5640981 - DNA, 25 bp, Homo sapien
gaggcacgtacctccaactcgaggt

SEQ ID NO: 5640982 - DNA, 25 bp, Homo sapien
acctcgagttggaggtacgtgcctc

SEQ ID NO: 5640983 - DNA, 25 bp, Homo sapien
cgaggcagagcgacgggacctcagg

SEQ ID NO: 5640984 - DNA, 25 bp, Homo sapien
cctgaggtcccgtcgctctgcctcg

SEQ ID NO: 5640985 - DNA, 25 bp, Homo sapien
tcgagggacggtagagagtcgacat

SEQ ID NO: 5640986 - DNA, 25 bp, Homo sapien
atgtcgactctctaccgtccctcga

SEQ ID NO: 5640987 - DNA, 25 bp, Homo sapien
aagatcggtacgatttaacaacctc

SEQ ID NO: 5640988 - DNA, 25 bp, Homo sapien
gaggttgttaaatcgtaccgatctt

SEQ ID NO: 5640989 - DNA, 25 bp, Homo sapien
agtagtctgtgaacccgccgacgtc

SEQ ID NO: 5640990 - DNA, 25 bp, Homo sapien
gacgtcggcgggttcacagactact

SEQ ID NO: 5640991 - DNA, 25 bp, Homo sapien
cgggtcagtcgctcactcagtggtg

SEQ ID NO: 5640992 - DNA, 25 bp, Homo sapien
caccactgagtgagcgactgacccg

SEQ ID NO: 5640993 - DNA, 25 bp, Homo sapien
aaggtcgaagtaatggctcgaaccc

SEQ ID NO: 5640994 - DNA, 25 bp, Homo sapien
gggttcgagccattacttcgacctt

SEQ ID NO: 5640995 - DNA, 25 bp, Homo sapien
cgtcgaggacggacgcccgtcacct

SEQ ID NO: 5640996 - DNA, 25 bp, Homo sapien
aggtgacgggcgtccgtcctcgacg

SEQ ID NO: 5640997 - DNA, 25 bp, Homo sapien
gtgacgtcgggcgtccaaggtgcgg

SEQ ID NO: 5640998 - DNA, 25 bp, Homo sapien
ccgcaccttggacgcccgacgtcac

SEQ ID NO: 5640999 - DNA, 25 bp, Homo sapien
agctatagacatagatccgagtcat

SEQ ID NO: 5641000 - DNA, 25 bp, Homo sapien
atgactcggatctatgtctatagct

SEQ ID NO: 5641001 - DNA, 25 bp, Homo sapien
ttgcgcgctccgtgcccgaggacga

SEQ ID NO: 5641002 - DNA, 25 bp, Homo sapien
tcgtcctcgggcacggagcgcgcaa

SEQ ID NO: 5641003 - DNA, 25 bp, Homo sapien
gggttgaaacaggacattcatggct

SEQ ID NO: 5641004 - DNA, 25 bp, Homo sapien
agccatgaatgtcctgtttcaaccc

SEQ ID NO: 5641005 - DNA, 25 bp, Homo sapien
tcacaggaggcctctaccaggtcga

SEQ ID NO: 5641006 - DNA, 25 bp, Homo sapien
tcgacctggtagaggcctcctgtga

SEQ ID NO: 5641007 - DNA, 25 bp, Homo sapien
tttatgagttgttacaggtggtacc

SEQ ID NO: 5641008 - DNA, 25 bp, Homo sapien
ggtaccacctgtaacaactcataaa

SEQ ID NO: 5641009 - DNA, 25 bp, Homo sapien
gcgggtccggccgcaggccctcctt

SEQ ID NO: 5641010 - DNA, 25 bp, Homo sapien
aaggagggcctgcggccggacccgc

SEQ ID NO: 5641011 - DNA, 25 bp, Homo sapien
ccacccgtcgcgggtccggccgcag

SEQ ID NO: 5641012 - DNA, 25 bp, Homo sapien
ctgcggccggacccgcgacgggtgg

SEQ ID NO: 5641013 - DNA, 25 bp, Homo sapien
tccacccgtcgcgggtccggccgca

SEQ ID NO: 5641014 - DNA, 25 bp, Homo sapien
tgcggccggacccgcgacgggtgga

SEQ ID NO: 5641015 - DNA, 25 bp, Homo sapien
acaaacttcaagtatgagatttatt

SEQ ID NO: 5641016 - DNA, 25 bp, Homo sapien
aataaatctcatacttgaagtttgt

SEQ ID NO: 5641017 - DNA, 25 bp, Homo sapien
ataaagaatctaagtaaggttatgt

SEQ ID NO: 5641018 - DNA, 25 bp, Homo sapien
acataaccttacttagattctttat

SEQ ID NO: 5641019 - DNA, 25 bp, Homo sapien
aatacatctttcatccttatttaag

SEQ ID NO: 5641020 - DNA, 25 bp, Homo sapien
cttaaataaggatgaaagatgtatt

SEQ ID NO: 5641021 - DNA, 25 bp, Homo sapien
atttaagtaatacatctttcatcct

SEQ ID NO: 5641022 - DNA, 25 bp, Homo sapien
aggatgaaagatgtattacttaaat

SEQ ID NO: 5641023 - DNA, 25 bp, Homo sapien
aatcggcagcgactcctgtgccgtc

SEQ ID NO: 5641024 - DNA, 25 bp, Homo sapien
gacggcacaggagtcgctgccgatt

SEQ ID NO: 5641025 - DNA, 25 bp, Homo sapien
agaagtcgaggagaatgtcctggtc

SEQ ID NO: 5641026 - DNA, 25 bp, Homo sapien
gaccaggacattctcctcgacttct

SEQ ID NO: 5641027 - DNA, 25 bp, Homo sapien
taaaaacttggtatttatgccgtac

SEQ ID NO: 5641028 - DNA, 25 bp, Homo sapien
gtacggcataaataccaagttttta

SEQ ID NO: 5641029 - DNA, 25 bp, Homo sapien
tccacgtccaccagcaccccgaagg

SEQ ID NO: 5641030 - DNA, 25 bp, Homo sapien
ccttcggggtgctggtggacgtgga

SEQ ID NO: 5641031 - DNA, 25 bp, Homo sapien
gattcttcatcagattctttaatat

SEQ ID NO: 5641032 - DNA, 25 bp, Homo sapien
atattaaagaatctgatgaagaatc

SEQ ID NO: 5641033 - DNA, 25 bp, Homo sapien
aaacgataagcagacgtcagacggt

SEQ ID NO: 5641034 - DNA, 25 bp, Homo sapien
accgtctgacgtctgcttatcgttt

SEQ ID NO: 5641035 - DNA, 25 bp, Homo sapien
cgctagcgctcccaggcggcaaggc

SEQ ID NO: 5641036 - DNA, 25 bp, Homo sapien
gccttgccgcctgggagcgctagcg

SEQ ID NO: 5641037 - DNA, 25 bp, Homo sapien
gacgctagcgctcccaggcggcaag

SEQ ID NO: 5641038 - DNA, 25 bp, Homo sapien
cttgccgcctgggagcgctagcgtc

SEQ ID NO: 5641039 - DNA, 25 bp, Homo sapien
gggactagtagtatgaccatagact

SEQ ID NO: 5641040 - DNA, 25 bp, Homo sapien
agtctatggtcatactactagtccc

SEQ ID NO: 5641041 - DNA, 25 bp, Homo sapien
taacgtacatgaacaccgggtttcg

SEQ ID NO: 5641042 - DNA, 25 bp, Homo sapien
cgaaacccggtgttcatgtacgtta

SEQ ID NO: 5641043 - DNA, 25 bp, Homo sapien
agaggaccagaaggtgtgaacttac

SEQ ID NO: 5641044 - DNA, 25 bp, Homo sapien
gtaagttcacaccttctggtcctct

SEQ ID NO: 5641045 - DNA, 25 bp, Homo sapien
acaccggagggtgaacacatcgcag

SEQ ID NO: 5641046 - DNA, 25 bp, Homo sapien
ctgcgatgtgttcaccctccggtgt

SEQ ID NO: 5641047 - DNA, 25 bp, Homo sapien
ttgtacatatactccgacttcccac

SEQ ID NO: 5641048 - DNA, 25 bp, Homo sapien
gtgggaagtcggagtatatgtacaa

SEQ ID NO: 5641049 - DNA, 25 bp, Homo sapien
ctgcgtcctggagccgtccctgcgg

SEQ ID NO: 5641050 - DNA, 25 bp, Homo sapien
ccgcagggacggctccaggacgcag

SEQ ID NO: 5641051 - DNA, 25 bp, Homo sapien
accatgaacgattagccccgaagac

SEQ ID NO: 5641052 - DNA, 25 bp, Homo sapien
gtcttcggggctaatcgttcatggt

SEQ ID NO: 5641053 - DNA, 25 bp, Homo sapien
gccccgacacgctcactcgggaggt

SEQ ID NO: 5641054 - DNA, 25 bp, Homo sapien
acctcccgagtgagcgtgtcggggc

SEQ ID NO: 5641055 - DNA, 25 bp, Homo sapien
gtccttcacagaaacagcctctacc

SEQ ID NO: 5641056 - DNA, 25 bp, Homo sapien
ggtagaggctgtttctgtgaaggac

SEQ ID NO: 5641057 - DNA, 25 bp, Homo sapien
ggagataccatcagacgtctttgac

SEQ ID NO: 5641058 - DNA, 25 bp, Homo sapien
gtcaaagacgtctgatggtatctcc

SEQ ID NO: 5641059 - DNA, 25 bp, Homo sapien
aaagatacaatattccgaactatat

SEQ ID NO: 5641060 - DNA, 25 bp, Homo sapien
atatagttcggaatattgtatcttt

SEQ ID NO: 5641061 - DNA, 25 bp, Homo sapien
gaagatctagtaccttcctcagcac

SEQ ID NO: 5641062 - DNA, 25 bp, Homo sapien
gtgctgaggaaggtactagatcttc

SEQ ID NO: 5641063 - DNA, 25 bp, Homo sapien
agtctcatttcagttccttaaattt

SEQ ID NO: 5641064 - DNA, 25 bp, Homo sapien
aaatttaaggaactgaaatgagact

SEQ ID NO: 5641065 - DNA, 25 bp, Homo sapien
cacatgagtgtatgagtatttacga

SEQ ID NO: 5641066 - DNA, 25 bp, Homo sapien
tcgtaaatactcatacactcatgtg

SEQ ID NO: 5641067 - DNA, 25 bp, Homo sapien
ctctcgactcgtcaaaccccactgt

SEQ ID NO: 5641068 - DNA, 25 bp, Homo sapien
acagtggggtttgacgagtcgagag

SEQ ID NO: 5641069 - DNA, 25 bp, Homo sapien
cgaccggggagagtgctgtcccagt

SEQ ID NO: 5641070 - DNA, 25 bp, Homo sapien
actgggacagcactctccccggtcg

SEQ ID NO: 5641071 - DNA, 25 bp, Homo sapien
atagattcgaaggtagagaactttc

SEQ ID NO: 5641072 - DNA, 25 bp, Homo sapien
gaaagttctctaccttcgaatctat

SEQ ID NO: 5641073 - DNA, 25 bp, Homo sapien
gactacttaaagagcataaactttc

SEQ ID NO: 5641074 - DNA, 25 bp, Homo sapien
gaaagtttatgctctttaagtagtc

SEQ ID NO: 5641075 - DNA, 25 bp, Homo sapien
gtgagacacttaaacggtatttcat

SEQ ID NO: 5641076 - DNA, 25 bp, Homo sapien
atgaaataccgtttaagtgtctcac

SEQ ID NO: 5641077 - DNA, 25 bp, Homo sapien
ggtgccttctcctacctgacagtcg

SEQ ID NO: 5641078 - DNA, 25 bp, Homo sapien
cgactgtcaggtaggagaaggcacc

SEQ ID NO: 5641079 - DNA, 25 bp, Homo sapien
agtttcagaagtttcttcgataata

SEQ ID NO: 5641080 - DNA, 25 bp, Homo sapien
tattatcgaagaaacttctgaaact

SEQ ID NO: 5641081 - DNA, 25 bp, Homo sapien
agatatcacaaattagggggaccct

SEQ ID NO: 5641082 - DNA, 25 bp, Homo sapien
agggtccccctaatttgtgatatct

SEQ ID NO: 5641083 - DNA, 25 bp, Homo sapien
gggctacggagacgtcctgactccc

SEQ ID NO: 5641084 - DNA, 25 bp, Homo sapien
gggagtcaggacgtctccgtagccc

SEQ ID NO: 5641085 - DNA, 25 bp, Homo sapien
tccgtaaatagtaacactcttataa

SEQ ID NO: 5641086 - DNA, 25 bp, Homo sapien
ttataagagtgttactatttacgga

SEQ ID NO: 5641087 - DNA, 25 bp, Homo sapien
gacactgcctgggataggtaccggt

SEQ ID NO: 5641088 - DNA, 25 bp, Homo sapien
accggtacctatcccaggcagtgtc

SEQ ID NO: 5641089 - DNA, 25 bp, Homo sapien
tcgggccccggtgcacgtgccggtc

SEQ ID NO: 5641090 - DNA, 25 bp, Homo sapien
gaccggcacgtgcaccggggcccga

SEQ ID NO: 5641091 - DNA, 25 bp, Homo sapien
gggccccggtgcacgtgccggtcgg

SEQ ID NO: 5641092 - DNA, 25 bp, Homo sapien
ccgaccggcacgtgcaccggggccc

SEQ ID NO: 5641093 - DNA, 25 bp, Homo sapien
cttgttccacgacagaactacccga

SEQ ID NO: 5641094 - DNA, 25 bp, Homo sapien
tcgggtagttctgtcgtggaacaag

SEQ ID NO: 5641095 - DNA, 25 bp, Homo sapien
gaagtccgaagcagacggtcagtaa

SEQ ID NO: 5641096 - DNA, 25 bp, Homo sapien
ttactgaccgtctgcttcggacttc

SEQ ID NO: 5641097 - DNA, 25 bp, Homo sapien
gggtctcttcgtatgtgtcgactac

SEQ ID NO: 5641098 - DNA, 25 bp, Homo sapien
gtagtcgacacatacgaagagaccc

SEQ ID NO: 5641099 - DNA, 25 bp, Homo sapien
tcccactattacgtttcaggtctaa

SEQ ID NO: 5641100 - DNA, 25 bp, Homo sapien
ttagacctgaaacgtaatagtggga

SEQ ID NO: 5641101 - DNA, 25 bp, Homo sapien
tagaggctgagggtggtctcacccc

SEQ ID NO: 5641102 - DNA, 25 bp, Homo sapien
ggggtgagaccaccctcagcctcta

SEQ ID NO: 5641103 - DNA, 25 bp, Homo sapien
ggaccttatagcacttgatgattct

SEQ ID NO: 5641104 - DNA, 25 bp, Homo sapien
agaatcatcaagtgctataaggtcc

SEQ ID NO: 5641105 - DNA, 25 bp, Homo sapien
catattgaaatattgacattactac

SEQ ID NO: 5641106 - DNA, 25 bp, Homo sapien
gtagtaatgtcaatatttcaatatg

SEQ ID NO: 5641107 - DNA, 25 bp, Homo sapien
cccggcctctacccggctcgcgacg

SEQ ID NO: 5641108 - DNA, 25 bp, Homo sapien
cgtcgcgagccgggtagaggccggg

SEQ ID NO: 5641109 - DNA, 25 bp, Homo sapien
agtgaccccactcctggtaactcaa

SEQ ID NO: 5641110 - DNA, 25 bp, Homo sapien
ttgagttaccaggagtggggtcact

SEQ ID NO: 5641111 - DNA, 25 bp, Homo sapien
gaactaccacacatgccgatgcatc

SEQ ID NO: 5641112 - DNA, 25 bp, Homo sapien
gatgcatcggcatgtgtggtagttc

SEQ ID NO: 5641113 - DNA, 25 bp, Homo sapien
cgtgggaaccactggcggacgccta

SEQ ID NO: 5641114 - DNA, 25 bp, Homo sapien
taggcgtccgccagtggttcccacg

SEQ ID NO: 5641115 - DNA, 25 bp, Homo sapien
gggctggtggcccacgtcgggtcgg

SEQ ID NO: 5641116 - DNA, 25 bp, Homo sapien
ccgacccgacgtgggccaccagccc

SEQ ID NO: 5641117 - DNA, 25 bp, Homo sapien
atcactgactctagaatttgcataa

SEQ ID NO: 5641118 - DNA, 25 bp, Homo sapien
ttatgcaaattctagagtcagtgat

SEQ ID NO: 5641119 - DNA, 25 bp, Homo sapien
tcggaattaatcacagttacgtaac

SEQ ID NO: 5641120 - DNA, 25 bp, Homo sapien
gttacgtaactgtgattaattccga

SEQ ID NO: 5641121 - DNA, 25 bp, Homo sapien
ggtgacgtgccgtgcccacgacctg

SEQ ID NO: 5641122 - DNA, 25 bp, Homo sapien
caggtcgtgggcacggcacgtcacc

SEQ ID NO: 5641123 - DNA, 25 bp, Homo sapien
cctcggcgtccagcccggacttgac

SEQ ID NO: 5641124 - DNA, 25 bp, Homo sapien
gtcaagtccgggctggacgccgagg

SEQ ID NO: 5641125 - DNA, 25 bp, Homo sapien
tttagaggagtcacgacctcagacg

SEQ ID NO: 5641126 - DNA, 25 bp, Homo sapien
cgtctgaggtcgtgactcctctaaa

SEQ ID NO: 5641127 - DNA, 25 bp, Homo sapien
tccaccaggttgagcagaacaggag

SEQ ID NO: 5641128 - DNA, 25 bp, Homo sapien
ctcctgttctgctcaacctggtgga

SEQ ID NO: 5641129 - DNA, 25 bp, Homo sapien
ctataagacgtttcacaggatttgt

SEQ ID NO: 5641130 - DNA, 25 bp, Homo sapien
acaaatcctgtgaaacgtcttatag

SEQ ID NO: 5641131 - DNA, 25 bp, Homo sapien
ccgtccgctacgggagtcacccgtc

SEQ ID NO: 5641132 - DNA, 25 bp, Homo sapien
gacgggtgactcccgtagcggacgg

SEQ ID NO: 5641133 - DNA, 25 bp, Homo sapien
gaagagaggtagtcaggactaatcc

SEQ ID NO: 5641134 - DNA, 25 bp, Homo sapien
ggattagtcctgactacctctcttc

SEQ ID NO: 5641135 - DNA, 25 bp, Homo sapien
ggcaccgggacgaggaggacgcgtc

SEQ ID NO: 5641136 - DNA, 25 bp, Homo sapien
gacgcgtcctcctcgtcccggtgcc

SEQ ID NO: 5641137 - DNA, 25 bp, Homo sapien
gacgtccaccggcatcccgacggcg

SEQ ID NO: 5641138 - DNA, 25 bp, Homo sapien
cgccgtcgggatgccggtggacgtc

SEQ ID NO: 5641139 - DNA, 25 bp, Homo sapien
tcaattacgtcataaggaggagaac

SEQ ID NO: 5641140 - DNA, 25 bp, Homo sapien
gttctcctccttatgacgtaattga

SEQ ID NO: 5641141 - DNA, 25 bp, Homo sapien
caacccctaatatccaaaatactat

SEQ ID NO: 5641142 - DNA, 25 bp, Homo sapien
atagtattttggatattaggggttg

SEQ ID NO: 5641143 - DNA, 25 bp, Homo sapien
actatacacagaggttcacataaac

SEQ ID NO: 5641144 - DNA, 25 bp, Homo sapien
gtttatgtgaacctctgtgtatagt

SEQ ID NO: 5641145 - DNA, 25 bp, Homo sapien
acctgccccatgcagcctgacgcga

SEQ ID NO: 5641146 - DNA, 25 bp, Homo sapien
tcgcgtcaggctgcatggggcaggt

SEQ ID NO: 5641147 - DNA, 25 bp, Homo sapien
acctgttggtgggaccatagacacc

SEQ ID NO: 5641148 - DNA, 25 bp, Homo sapien
ggtgtctatggtcccaccaacaggt

SEQ ID NO: 5641149 - DNA, 25 bp, Homo sapien
cgtcccgctagggtgtccagtcgta

SEQ ID NO: 5641150 - DNA, 25 bp, Homo sapien
tacgactggacaccctagcgggacg

SEQ ID NO: 5641151 - DNA, 25 bp, Homo sapien
ggacggaacgtgaggtcaccggcgg

SEQ ID NO: 5641152 - DNA, 25 bp, Homo sapien
ccgccggtgacctcacgttccgtcc

SEQ ID NO: 5641153 - DNA, 25 bp, Homo sapien
gccgtggcacaggtttggagcttcg

SEQ ID NO: 5641154 - DNA, 25 bp, Homo sapien
cgaagctccaaacctgtgccacggc

SEQ ID NO: 5641155 - DNA, 25 bp, Homo sapien
ccccccgccactagttgtcggagga

SEQ ID NO: 5641156 - DNA, 25 bp, Homo sapien
tcctccgacaactagtggcgggggg

SEQ ID NO: 5641157 - DNA, 25 bp, Homo sapien
tcgccggcgaggcagacggagaagg

SEQ ID NO: 5641158 - DNA, 25 bp, Homo sapien
ccttctccgtctgcctcgccggcga

SEQ ID NO: 5641159 - DNA, 25 bp, Homo sapien
ggcttcttgtcgtataaaataggat

SEQ ID NO: 5641160 - DNA, 25 bp, Homo sapien
atcctattttatacgacaagaagcc

SEQ ID NO: 5641161 - DNA, 25 bp, Homo sapien
gggctaggaggaacccgctgccgcc

SEQ ID NO: 5641162 - DNA, 25 bp, Homo sapien
ggcggcagcgggttcctcctagccc

SEQ ID NO: 5641163 - DNA, 25 bp, Homo sapien
ggaaggctgggcctagtagggccgg

SEQ ID NO: 5641164 - DNA, 25 bp, Homo sapien
ccggccctactaggcccagccttcc

SEQ ID NO: 5641165 - DNA, 25 bp, Homo sapien
accggtcattccaggtccgtagcgg

SEQ ID NO: 5641166 - DNA, 25 bp, Homo sapien
ccgctacggacctggaatgaccggt

SEQ ID NO: 5641167 - DNA, 25 bp, Homo sapien
gggtcagtgactgatggagaccgag

SEQ ID NO: 5641168 - DNA, 25 bp, Homo sapien
ctcggtctccatcagtcactgaccc

SEQ ID NO: 5641169 - DNA, 25 bp, Homo sapien
cctatcgaaattattaccgttctac

SEQ ID NO: 5641170 - DNA, 25 bp, Homo sapien
gtagaacggtaataatttcgatagg

SEQ ID NO: 5641171 - DNA, 25 bp, Homo sapien
gtcgggactcgcagggcccccaccg

SEQ ID NO: 5641172 - DNA, 25 bp, Homo sapien
cggtgggggccctgcgagtcccgac

SEQ ID NO: 5641173 - DNA, 25 bp, Homo sapien
ctcggcgtcgggactcgcagggccc

SEQ ID NO: 5641174 - DNA, 25 bp, Homo sapien
gggccctgcgagtcccgacgccgag

SEQ ID NO: 5641175 - DNA, 25 bp, Homo sapien
cgacatgaacaatgtgacggttttc

SEQ ID NO: 5641176 - DNA, 25 bp, Homo sapien
gaaaaccgtcacattgttcatgtcg

SEQ ID NO: 5641177 - DNA, 25 bp, Homo sapien
gtagtctacactaatctcacctggg

SEQ ID NO: 5641178 - DNA, 25 bp, Homo sapien
cccaggtgagattagtgtagactac

SEQ ID NO: 5641179 - DNA, 25 bp, Homo sapien
tatggtcactggtcaggtgtcacgt

SEQ ID NO: 5641180 - DNA, 25 bp, Homo sapien
acgtgacacctgaccagtgaccata

SEQ ID NO: 5641181 - DNA, 25 bp, Homo sapien
gaaccaattagtatttaaatatcta

SEQ ID NO: 5641182 - DNA, 25 bp, Homo sapien
tagatatttaaatactaattggttc

SEQ ID NO: 5641183 - DNA, 25 bp, Homo sapien
gcaaaggcccagtgggtccgtcgaa

SEQ ID NO: 5641184 - DNA, 25 bp, Homo sapien
ttcgacggacccactgggcctttgc

SEQ ID NO: 5641185 - DNA, 25 bp, Homo sapien
gggcgccctgggacgctcactccgt

SEQ ID NO: 5641186 - DNA, 25 bp, Homo sapien
acggagtgagcgtcccagggcgccc

SEQ ID NO: 5641187 - DNA, 25 bp, Homo sapien
tcccatcaaaattactccaacgtgt

SEQ ID NO: 5641188 - DNA, 25 bp, Homo sapien
acacgttggagtaattttgatggga

SEQ ID NO: 5641189 - DNA, 25 bp, Homo sapien
gtttcggaggcagacgggttaccac

SEQ ID NO: 5641190 - DNA, 25 bp, Homo sapien
gtggtaacccgtctgcctccgaaac

SEQ ID NO: 5641191 - DNA, 25 bp, Homo sapien
cgcgtagtcccggccccctgcccat

SEQ ID NO: 5641192 - DNA, 25 bp, Homo sapien
atgggcagggggccgggactacgcg

SEQ ID NO: 5641193 - DNA, 25 bp, Homo sapien
aaatatcgtttgtaataccttttca

SEQ ID NO: 5641194 - DNA, 25 bp, Homo sapien
tgaaaaggtattacaaacgatattt

SEQ ID NO: 5641195 - DNA, 25 bp, Homo sapien
taactatacctttatcgataagact

SEQ ID NO: 5641196 - DNA, 25 bp, Homo sapien
agtcttatcgataaaggtatagtta

SEQ ID NO: 5641197 - DNA, 25 bp, Homo sapien
tattaactatacctttatcgataag

SEQ ID NO: 5641198 - DNA, 25 bp, Homo sapien
cttatcgataaaggtatagttaata

SEQ ID NO: 5641199 - DNA, 25 bp, Homo sapien
gtgtaaactagatcaaaattataag

SEQ ID NO: 5641200 - DNA, 25 bp, Homo sapien
cttataattttgatctagtttacac

SEQ ID NO: 5641201 - DNA, 25 bp, Homo sapien
aaaatagagtgtgaatttactaaag

SEQ ID NO: 5641202 - DNA, 25 bp, Homo sapien
ctttagtaaattcacactctatttt

SEQ ID NO: 5641203 - DNA, 25 bp, Homo sapien
ccttacagataagacgaacgaaaag

SEQ ID NO: 5641204 - DNA, 25 bp, Homo sapien
cttttcgttcgtcttatctgtaagg

SEQ ID NO: 5641205 - DNA, 25 bp, Homo sapien
cacgtcgtgcgcaggggtccgtctc

SEQ ID NO: 5641206 - DNA, 25 bp, Homo sapien
gagacggacccctgcgcacgacgtg

SEQ ID NO: 5641207 - DNA, 25 bp, Homo sapien
cgacaggtcgatctcatgaccgtcg

SEQ ID NO: 5641208 - DNA, 25 bp, Homo sapien
cgacggtcatgagatcgacctgtcg

SEQ ID NO: 5641209 - DNA, 25 bp, Homo sapien
atctctcatttcttatttattcatt

SEQ ID NO: 5641210 - DNA, 25 bp, Homo sapien
aatgaataaataagaaatgagagat

SEQ ID NO: 5641211 - DNA, 25 bp, Homo sapien
tatctctcatttcttatttattcat

SEQ ID NO: 5641212 - DNA, 25 bp, Homo sapien
atgaataaataagaaatgagagata

SEQ ID NO: 5641213 - DNA, 25 bp, Homo sapien
gtatctctcatttcttatttattca

SEQ ID NO: 5641214 - DNA, 25 bp, Homo sapien
tgaataaataagaaatgagagatac

SEQ ID NO: 5641215 - DNA, 25 bp, Homo sapien
gaagtatctctcatttcttatttat

SEQ ID NO: 5641216 - DNA, 25 bp, Homo sapien
ataaataagaaatgagagatacttc

SEQ ID NO: 5641217 - DNA, 25 bp, Homo sapien
cagggcctcgcagagggacaggagt

SEQ ID NO: 5641218 - DNA, 25 bp, Homo sapien
actcctgtccctctgcgaggccctg

SEQ ID NO: 5641219 - DNA, 25 bp, Homo sapien
ccgggtcgtgagagttctatgtaat

SEQ ID NO: 5641220 - DNA, 25 bp, Homo sapien
attacatagaactctcacgacccgg

SEQ ID NO: 5641221 - DNA, 25 bp, Homo sapien
cgcctacggtcgtcaccggctccgc

SEQ ID NO: 5641222 - DNA, 25 bp, Homo sapien
gcggagccggtgacgaccgtaggcg

SEQ ID NO: 5641223 - DNA, 25 bp, Homo sapien
tcacccccgggcgccaggaccacgg

SEQ ID NO: 5641224 - DNA, 25 bp, Homo sapien
ccgtggtcctggcgcccgggggtga

SEQ ID NO: 5641225 - DNA, 25 bp, Homo sapien
ctcacccccgggcgccaggaccacg

SEQ ID NO: 5641226 - DNA, 25 bp, Homo sapien
cgtggtcctggcgcccgggggtgag

SEQ ID NO: 5641227 - DNA, 25 bp, Homo sapien
aatgactttgtaaaataaatcctgt

SEQ ID NO: 5641228 - DNA, 25 bp, Homo sapien
acaggatttattttacaaagtcatt

SEQ ID NO: 5641229 - DNA, 25 bp, Homo sapien
ccttcacgtaagagtttcgacacac

SEQ ID NO: 5641230 - DNA, 25 bp, Homo sapien
gtgtgtcgaaactcttacgtgaagg

SEQ ID NO: 5641231 - DNA, 25 bp, Homo sapien
ggtgaagatggttgatgacatgatg

SEQ ID NO: 5641232 - DNA, 25 bp, Homo sapien
catcatgtcatcaaccatcttcacc

SEQ ID NO: 5641233 - DNA, 25 bp, Homo sapien
cgagtagggtccggacgcctgacct

SEQ ID NO: 5641234 - DNA, 25 bp, Homo sapien
aggtcaggcgtccggaccctactcg

SEQ ID NO: 5641235 - DNA, 25 bp, Homo sapien
acggtcagattcacgaacccgaagg

SEQ ID NO: 5641236 - DNA, 25 bp, Homo sapien
ccttcgggttcgtgaatctgaccgt

SEQ ID NO: 5641237 - DNA, 25 bp, Homo sapien
cttacttacttgcttctggtctgga

SEQ ID NO: 5641238 - DNA, 25 bp, Homo sapien
tccagaccagaagcaagtaagtaag

SEQ ID NO: 5641239 - DNA, 25 bp, Homo sapien
ataaatacccgaattagttctctct

SEQ ID NO: 5641240 - DNA, 25 bp, Homo sapien
agagagaactaattcgggtatttat

SEQ ID NO: 5641241 - DNA, 25 bp, Homo sapien
cgaccgtcgggattgtgtccgtccc

SEQ ID NO: 5641242 - DNA, 25 bp, Homo sapien
gggacggacacaatcccgacggtcg

SEQ ID NO: 5641243 - DNA, 25 bp, Homo sapien
gccccgcggtgccccttgtctctgg

SEQ ID NO: 5641244 - DNA, 25 bp, Homo sapien
ccagagacaaggggcaccgcggggc

SEQ ID NO: 5641245 - DNA, 25 bp, Homo sapien
taaatgtgaattagaacgataagag

SEQ ID NO: 5641246 - DNA, 25 bp, Homo sapien
ctcttatcgttctaattcacattta

SEQ ID NO: 5641247 - DNA, 25 bp, Homo sapien
accgtcgtcgggtgtgcgaacccgc

SEQ ID NO: 5641248 - DNA, 25 bp, Homo sapien
gcgggttcgcacacccgacgacggt

SEQ ID NO: 5641249 - DNA, 25 bp, Homo sapien
ttatagaagaacatacagtaattaa

SEQ ID NO: 5641250 - DNA, 25 bp, Homo sapien
ttaattactgtatgttcttctataa

SEQ ID NO: 5641251 - DNA, 25 bp, Homo sapien
cgccgaggcccgaggcacggacgtg

SEQ ID NO: 5641252 - DNA, 25 bp, Homo sapien
cacgtccgtgcctcgggcctcggcg

SEQ ID NO: 5641253 - DNA, 25 bp, Homo sapien
acaactacgaattataggtccttct

SEQ ID NO: 5641254 - DNA, 25 bp, Homo sapien
agaaggacctataattcgtagttgt

SEQ ID NO: 5641255 - DNA, 25 bp, Homo sapien
tctcgagagaccgtagcctggggcc

SEQ ID NO: 5641256 - DNA, 25 bp, Homo sapien
ggccccaggctacggtctctcgaga

SEQ ID NO: 5641257 - DNA, 25 bp, Homo sapien
acgggcgcgcaagacagggaccgta

SEQ ID NO: 5641258 - DNA, 25 bp, Homo sapien
tacggtccctgtcttgcgcgcccgt

SEQ ID NO: 5641259 - DNA, 25 bp, Homo sapien
tgtgcaactacatgttccttgaagc

SEQ ID NO: 5641260 - DNA, 25 bp, Homo sapien
gcttcaaggaacatgtagttgcaca

SEQ ID NO: 5641261 - DNA, 25 bp, Homo sapien
tatggcgcaccgagacaagcaagtc

SEQ ID NO: 5641262 - DNA, 25 bp, Homo sapien
gacttgcttgtctcggtgcgccata

SEQ ID NO: 5641263 - DNA, 25 bp, Homo sapien
gcgcctcccccaccgccccggcgtc

SEQ ID NO: 5641264 - DNA, 25 bp, Homo sapien
gacgccggggcggtgggggaggcgc

SEQ ID NO: 5641265 - DNA, 25 bp, Homo sapien
tggttcctacgtccctgagggtaac

SEQ ID NO: 5641266 - DNA, 25 bp, Homo sapien
gttaccctcagggacgtaggaacca

SEQ ID NO: 5641267 - DNA, 25 bp, Homo sapien
ttctagttatatctatttgactatg

SEQ ID NO: 5641268 - DNA, 25 bp, Homo sapien
catagtcaaatagatataactagaa

SEQ ID NO: 5641269 - DNA, 25 bp, Homo sapien
tttctagttatatctatttgactat

SEQ ID NO: 5641270 - DNA, 25 bp, Homo sapien
atagtcaaatagatataactagaaa

SEQ ID NO: 5641271 - DNA, 25 bp, Homo sapien
gacacagcgtcccactgtctcctcc

SEQ ID NO: 5641272 - DNA, 25 bp, Homo sapien
ggaggagacagtgggacgctgtgtc

SEQ ID NO: 5641273 - DNA, 25 bp, Homo sapien
ttgtgaacccagactggtctttagg

SEQ ID NO: 5641274 - DNA, 25 bp, Homo sapien
cctaaagaccagtctgggttcacaa

SEQ ID NO: 5641275 - DNA, 25 bp, Homo sapien
gtttagagggcaaaatacgactgtt

SEQ ID NO: 5641276 - DNA, 25 bp, Homo sapien
aacagtcgtattttgccctctaaac

SEQ ID NO: 5641277 - DNA, 25 bp, Homo sapien
aattacacccacatactccaagacg

SEQ ID NO: 5641278 - DNA, 25 bp, Homo sapien
cgtcttggagtatgtgggtgtaatt

SEQ ID NO: 5641279 - DNA, 25 bp, Homo sapien
acatcagagacccaagcgctggatc

SEQ ID NO: 5641280 - DNA, 25 bp, Homo sapien
gatccagcgcttgggtctctgatgt

SEQ ID NO: 5641281 - DNA, 25 bp, Homo sapien
aacgtgacgttgatagttaggaccc

SEQ ID NO: 5641282 - DNA, 25 bp, Homo sapien
gggtcctaactatcaacgtcacgtt

SEQ ID NO: 5641283 - DNA, 25 bp, Homo sapien
gcaagcaccgcctctgatcgcgagg

SEQ ID NO: 5641284 - DNA, 25 bp, Homo sapien
cctcgcgatcagaggcggtgcttgc

SEQ ID NO: 5641285 - DNA, 25 bp, Homo sapien
gctacaccgagaggcactgttgtgc

SEQ ID NO: 5641286 - DNA, 25 bp, Homo sapien
gcacaacagtgcctctcggtgtagc

SEQ ID NO: 5641287 - DNA, 25 bp, Homo sapien
gttctatttaggtatttagtctgaa

SEQ ID NO: 5641288 - DNA, 25 bp, Homo sapien
ttcagactaaatacctaaatagaac

SEQ ID NO: 5641289 - DNA, 25 bp, Homo sapien
gacgtccccttacgacatcggaagt

SEQ ID NO: 5641290 - DNA, 25 bp, Homo sapien
acttccgatgtcgtaaggggacgtc

SEQ ID NO: 5641291 - DNA, 25 bp, Homo sapien
ctggaggtcccgtgggacgctccag

SEQ ID NO: 5641292 - DNA, 25 bp, Homo sapien
ctggagcgtcccacgggacctccag

SEQ ID NO: 5641293 - DNA, 25 bp, Homo sapien
tccacgttgacaagaaaccgttagt

SEQ ID NO: 5641294 - DNA, 25 bp, Homo sapien
actaacggtttcttgtcaacgtgga

SEQ ID NO: 5641295 - DNA, 25 bp, Homo sapien
aatcattagaaacgttggtaaagtc

SEQ ID NO: 5641296 - DNA, 25 bp, Homo sapien
gactttaccaacgtttctaatgatt

SEQ ID NO: 5641297 - DNA, 25 bp, Homo sapien
ccccaaagagagctaccgatgttac

SEQ ID NO: 5641298 - DNA, 25 bp, Homo sapien
gtaacatcggtagctctctttgggg

SEQ ID NO: 5641299 - DNA, 25 bp, Homo sapien
gattcggaaccccacccagaccctc

SEQ ID NO: 5641300 - DNA, 25 bp, Homo sapien
gagggtctgggtggggttccgaatc

SEQ ID NO: 5641301 - DNA, 25 bp, Homo sapien
atagaagtatagaacaacgtaaaac

SEQ ID NO: 5641302 - DNA, 25 bp, Homo sapien
gttttacgttgttctatacttctat

SEQ ID NO: 5641303 - DNA, 25 bp, Homo sapien
ggaacgtttcgtctatcttggtgag

SEQ ID NO: 5641304 - DNA, 25 bp, Homo sapien
ctcaccaagatagacgaaacgttcc

SEQ ID NO: 5641305 - DNA, 25 bp, Homo sapien
cgagttcaggtaggtgaaccaatgt

SEQ ID NO: 5641306 - DNA, 25 bp, Homo sapien
acattggttcacctacctgaactcg

SEQ ID NO: 5641307 - DNA, 25 bp, Homo sapien
ggtcgcggccttgcccgaaaaagta

SEQ ID NO: 5641308 - DNA, 25 bp, Homo sapien
tactttttcgggcaaggccgcgacc

SEQ ID NO: 5641309 - DNA, 25 bp, Homo sapien
tgcaccggtgcaagaaacgtagtag

SEQ ID NO: 5641310 - DNA, 25 bp, Homo sapien
ctactacgtttcttgcaccggtgca

SEQ ID NO: 5641311 - DNA, 25 bp, Homo sapien
gacaaaaatagtcccgaagagattt

SEQ ID NO: 5641312 - DNA, 25 bp, Homo sapien
aaatctcttcgggactatttttgtc

SEQ ID NO: 5641313 - DNA, 25 bp, Homo sapien
gggtttagacaaagatgtctgtcct

SEQ ID NO: 5641314 - DNA, 25 bp, Homo sapien
aggacagacatctttgtctaaaccc

SEQ ID NO: 5641315 - DNA, 25 bp, Homo sapien
tcttaactacagtttaagaaggaaa

SEQ ID NO: 5641316 - DNA, 25 bp, Homo sapien
tttccttcttaaactgtagttaaga

SEQ ID NO: 5641317 - DNA, 25 bp, Homo sapien
tatattgtctcgtaaaaagtaagta

SEQ ID NO: 5641318 - DNA, 25 bp, Homo sapien
tacttactttttacgagacaatata

SEQ ID NO: 5641319 - DNA, 25 bp, Homo sapien
gaggccggcgcggtggccgtgagtg

SEQ ID NO: 5641320 - DNA, 25 bp, Homo sapien
cactcacggccaccgcgccggcctc

SEQ ID NO: 5641321 - DNA, 25 bp, Homo sapien
aaccgcattcagatactaataggct

SEQ ID NO: 5641322 - DNA, 25 bp, Homo sapien
agcctattagtatctgaatgcggtt

SEQ ID NO: 5641323 - DNA, 25 bp, Homo sapien
ccccacacgggtagaggttgcaagg

SEQ ID NO: 5641324 - DNA, 25 bp, Homo sapien
ccttgcaacctctacccgtgtgggg

SEQ ID NO: 5641325 - DNA, 25 bp, Homo sapien
gccccctccggcgtatctgcgcggg

SEQ ID NO: 5641326 - DNA, 25 bp, Homo sapien
cccgcgcagatacgccggagggggc

SEQ ID NO: 5641327 - DNA, 25 bp, Homo sapien
gtctcgtgggccccagccgggcgcc

SEQ ID NO: 5641328 - DNA, 25 bp, Homo sapien
ggcgcccggctggggcccacgagac

SEQ ID NO: 5641329 - DNA, 25 bp, Homo sapien
aattcaaatttcttgtagtatatct

SEQ ID NO: 5641330 - DNA, 25 bp, Homo sapien
agatatactacaagaaatttgaatt

SEQ ID NO: 5641331 - DNA, 25 bp, Homo sapien
taattcaaatttcttgtagtatatc

SEQ ID NO: 5641332 - DNA, 25 bp, Homo sapien
gatatactacaagaaatttgaatta

SEQ ID NO: 5641333 - DNA, 25 bp, Homo sapien
agagggatgaatatggtagagaacc

SEQ ID NO: 5641334 - DNA, 25 bp, Homo sapien
ggttctctaccatattcatccctct

SEQ ID NO: 5641335 - DNA, 25 bp, Homo sapien
tccatcgtgcccggtgcaccgacgc

SEQ ID NO: 5641336 - DNA, 25 bp, Homo sapien
gcgtcggtgcaccgggcacgatgga

SEQ ID NO: 5641337 - DNA, 25 bp, Homo sapien
gtccatcgtgcccggtgcaccgacg

SEQ ID NO: 5641338 - DNA, 25 bp, Homo sapien
cgtcggtgcaccgggcacgatggac

SEQ ID NO: 5641339 - DNA, 25 bp, Homo sapien
ttatcttatcgtaactcacaaacat

SEQ ID NO: 5641340 - DNA, 25 bp, Homo sapien
atgtttgtgagttacgataagataa

SEQ ID NO: 5641341 - DNA, 25 bp, Homo sapien
ttaccgttagtaattaaagatttgc

SEQ ID NO: 5641342 - DNA, 25 bp, Homo sapien
gcaaatctttaattactaacggtaa

SEQ ID NO: 5641343 - DNA, 25 bp, Homo sapien
ggcgggtacgactacgctggagccg

SEQ ID NO: 5641344 - DNA, 25 bp, Homo sapien
cggctccagcgtagtcgtacccgcc

SEQ ID NO: 5641345 - DNA, 25 bp, Homo sapien
gggcggtggcgcgccgtctgtcgag

SEQ ID NO: 5641346 - DNA, 25 bp, Homo sapien
ctcgacagacggcgcgccaccgccc

SEQ ID NO: 5641347 - DNA, 25 bp, Homo sapien
gatcgaggtcgcctgaactctttac

SEQ ID NO: 5641348 - DNA, 25 bp, Homo sapien
gtaaagagttcaggcgacctcgatc

SEQ ID NO: 5641349 - DNA, 25 bp, Homo sapien
acgggtcccaggccctcacggctgc

SEQ ID NO: 5641350 - DNA, 25 bp, Homo sapien
gcagccgtgagggcctgggacccgt

SEQ ID NO: 5641351 - DNA, 25 bp, Homo sapien
accctatcggaaacacctatgttag

SEQ ID NO: 5641352 - DNA, 25 bp, Homo sapien
ctaacataggtgtttccgatagggt

SEQ ID NO: 5641353 - DNA, 25 bp, Homo sapien
gttcaggtcccctctggagggagtg

SEQ ID NO: 5641354 - DNA, 25 bp, Homo sapien
cactccctccagaggggacctgaac

SEQ ID NO: 5641355 - DNA, 25 bp, Homo sapien
ttcgaaccgttcagcgaaaggtggt

SEQ ID NO: 5641356 - DNA, 25 bp, Homo sapien
accacctttcgctgaacggttcgaa

SEQ ID NO: 5641357 - DNA, 25 bp, Homo sapien
cgaccttaaaagagtggatctctgg

SEQ ID NO: 5641358 - DNA, 25 bp, Homo sapien
ccagagatccactcttttaaggtcg

SEQ ID NO: 5641359 - DNA, 25 bp, Homo sapien
aaaaataatcggtgaatttatagta

SEQ ID NO: 5641360 - DNA, 25 bp, Homo sapien
tactataaattcaccgattattttt

SEQ ID NO: 5641361 - DNA, 25 bp, Homo sapien
acagtaattattaggtgaaacactt

SEQ ID NO: 5641362 - DNA, 25 bp, Homo sapien
aagtgtttcacctaataattactgt

SEQ ID NO: 5641363 - DNA, 25 bp, Homo sapien
ttattaggtgaaacacttattccgt

SEQ ID NO: 5641364 - DNA, 25 bp, Homo sapien
acggaataagtgtttcacctaataa

SEQ ID NO: 5641365 - DNA, 25 bp, Homo sapien
gcacttgagcctcttccggtcttag

SEQ ID NO: 5641366 - DNA, 25 bp, Homo sapien
ctaagaccggaagaggctcaagtgc

SEQ ID NO: 5641367 - DNA, 25 bp, Homo sapien
ggaaccttttatcacgaatctcact

SEQ ID NO: 5641368 - DNA, 25 bp, Homo sapien
agtgagattcgtgataaaaggttcc

SEQ ID NO: 5641369 - DNA, 25 bp, Homo sapien
caaataacctgaagtggtatcccgt

SEQ ID NO: 5641370 - DNA, 25 bp, Homo sapien
acgggataccacttcaggttatttg

SEQ ID NO: 5641371 - DNA, 25 bp, Homo sapien
tcacacggtgaggaaaaccggaccg

SEQ ID NO: 5641372 - DNA, 25 bp, Homo sapien
cggtccggttttcctcaccgtgtga

SEQ ID NO: 5641373 - DNA, 25 bp, Homo sapien
ttacgtcggtcaggactatcgaaag

SEQ ID NO: 5641374 - DNA, 25 bp, Homo sapien
ctttcgatagtcctgaccgacgtaa

SEQ ID NO: 5641375 - DNA, 25 bp, Homo sapien
gggcgccctcgtctgtcgtctcgcc

SEQ ID NO: 5641376 - DNA, 25 bp, Homo sapien
ggcgagacgacagacgagggcgccc

SEQ ID NO: 5641377 - DNA, 25 bp, Homo sapien
agtcatgaacaccatacggtccaaa

SEQ ID NO: 5641378 - DNA, 25 bp, Homo sapien
tttggaccgtatggtgttcatgact

SEQ ID NO: 5641379 - DNA, 25 bp, Homo sapien
aagaaatatgaaggtaaactgttgt

SEQ ID NO: 5641380 - DNA, 25 bp, Homo sapien
acaacagtttaccttcatatttctt

SEQ ID NO: 5641381 - DNA, 25 bp, Homo sapien
gaaatatgaaggtaaactgttgtac

SEQ ID NO: 5641382 - DNA, 25 bp, Homo sapien
gtacaacagtttaccttcatatttc

SEQ ID NO: 5641383 - DNA, 25 bp, Homo sapien
cattcttaactaccccaaacagcat

SEQ ID NO: 5641384 - DNA, 25 bp, Homo sapien
atgctgtttggggtagttaagaatg

SEQ ID NO: 5641385 - DNA, 25 bp, Homo sapien
tacaaagaccagtccggtagagaat

SEQ ID NO: 5641386 - DNA, 25 bp, Homo sapien
attctctaccggactggtctttgta

SEQ ID NO: 5641387 - DNA, 25 bp, Homo sapien
acaaaactttcatgaaggaactcat

SEQ ID NO: 5641388 - DNA, 25 bp, Homo sapien
atgagttccttcatgaaagttttgt

SEQ ID NO: 5641389 - DNA, 25 bp, Homo sapien
cgacgagggaccaagcggtctctgt

SEQ ID NO: 5641390 - DNA, 25 bp, Homo sapien
acagagaccgcttggtccctcgtcg

SEQ ID NO: 5641391 - DNA, 25 bp, Homo sapien
gatagcgtcgaggaactatggctgt

SEQ ID NO: 5641392 - DNA, 25 bp, Homo sapien
acagccatagttcctcgacgctatc

SEQ ID NO: 5641393 - DNA, 25 bp, Homo sapien
gaccttaccctcctctgtaacccag

SEQ ID NO: 5641394 - DNA, 25 bp, Homo sapien
ctgggttacagaggagggtaaggtc

SEQ ID NO: 5641395 - DNA, 25 bp, Homo sapien
cagtgcaattttgaataacgataac

SEQ ID NO: 5641396 - DNA, 25 bp, Homo sapien
gttatcgttattcaaaattgcactg

SEQ ID NO: 5641397 - DNA, 25 bp, Homo sapien
gacataaacgtaagaataacactgg

SEQ ID NO: 5641398 - DNA, 25 bp, Homo sapien
ccagtgttattcttacgtttatgtc

SEQ ID NO: 5641399 - DNA, 25 bp, Homo sapien
ggagaagttaattgcattaatgggt

SEQ ID NO: 5641400 - DNA, 25 bp, Homo sapien
acccattaatgcaattaacttctcc

SEQ ID NO: 5641401 - DNA, 25 bp, Homo sapien
atcttagctttaaacttagtcagag

SEQ ID NO: 5641402 - DNA, 25 bp, Homo sapien
ctctgactaagtttaaagctaagat

SEQ ID NO: 5641403 - DNA, 25 bp, Homo sapien
gagaccatcagaaaatcttagcttt

SEQ ID NO: 5641404 - DNA, 25 bp, Homo sapien
aaagctaagattttctgatggtctc

SEQ ID NO: 5641405 - DNA, 25 bp, Homo sapien
cacgaacctccgtggtgccggtgtg

SEQ ID NO: 5641406 - DNA, 25 bp, Homo sapien
cacaccggcaccacggaggttcgtg

SEQ ID NO: 5641407 - DNA, 25 bp, Homo sapien
aggaatagtcccagtctcttaaaat

SEQ ID NO: 5641408 - DNA, 25 bp, Homo sapien
attttaagagactgggactattcct

SEQ ID NO: 5641409 - DNA, 25 bp, Homo sapien
cacggagacttcccgcctgccgcaa

SEQ ID NO: 5641410 - DNA, 25 bp, Homo sapien
ttgcggcaggcgggaagtctccgtg

SEQ ID NO: 5641411 - DNA, 25 bp, Homo sapien
taaacatctcacgtggtaggtagac

SEQ ID NO: 5641412 - DNA, 25 bp, Homo sapien
gtctacctaccacgtgagatgttta

SEQ ID NO: 5641413 - DNA, 25 bp, Homo sapien
atatcacctaagaaagagtccggac

SEQ ID NO: 5641414 - DNA, 25 bp, Homo sapien
gtccggactctttcttaggtgatat

SEQ ID NO: 5641415 - DNA, 25 bp, Homo sapien
ggaacggagagaaccgggtattcac

SEQ ID NO: 5641416 - DNA, 25 bp, Homo sapien
gtgaatacccggttctctccgttcc

SEQ ID NO: 5641417 - DNA, 25 bp, Homo sapien
tggagtaccacggggctcccggact

SEQ ID NO: 5641418 - DNA, 25 bp, Homo sapien
agtccgggagccccgtggtactcca

SEQ ID NO: 5641419 - DNA, 25 bp, Homo sapien
actttgcagacatagtcagaatact

SEQ ID NO: 5641420 - DNA, 25 bp, Homo sapien
agtattctgactatgtctgcaaagt

SEQ ID NO: 5641421 - DNA, 25 bp, Homo sapien
aacgacattgattacctagggaagg

SEQ ID NO: 5641422 - DNA, 25 bp, Homo sapien
ccttccctaggtaatcaatgtcgtt

SEQ ID NO: 5641423 - DNA, 25 bp, Homo sapien
ttcgtttctgttcgacggggttctc

SEQ ID NO: 5641424 - DNA, 25 bp, Homo sapien
gagaaccccgtcgaacagaaacgaa

SEQ ID NO: 5641425 - DNA, 25 bp, Homo sapien
gaggccggcgcgacctcgcagggtg

SEQ ID NO: 5641426 - DNA, 25 bp, Homo sapien
caccctgcgaggtcgcgccggcctc

SEQ ID NO: 5641427 - DNA, 25 bp, Homo sapien
aacgactgttcctgtctggttcctt

SEQ ID NO: 5641428 - DNA, 25 bp, Homo sapien
aaggaaccagacaggaacagtcgtt

SEQ ID NO: 5641429 - DNA, 25 bp, Homo sapien
gttaatcttaatgagaaacttaatc

SEQ ID NO: 5641430 - DNA, 25 bp, Homo sapien
gattaagtttctcattaagattaac

SEQ ID NO: 5641431 - DNA, 25 bp, Homo sapien
gactacacccatacctgttgtagta

SEQ ID NO: 5641432 - DNA, 25 bp, Homo sapien
tactacaacaggtatgggtgtagtc

SEQ ID NO: 5641433 - DNA, 25 bp, Homo sapien
attctatttaatagtagtggttatt

SEQ ID NO: 5641434 - DNA, 25 bp, Homo sapien
aataaccactactattaaatagaat

SEQ ID NO: 5641435 - DNA, 25 bp, Homo sapien
ccgcgctccctagcgcgccggctcg

SEQ ID NO: 5641436 - DNA, 25 bp, Homo sapien
cgagccggcgcgctagggagcgcgg

SEQ ID NO: 5641437 - DNA, 25 bp, Homo sapien
tcccgcgctccctagcgcgccggct

SEQ ID NO: 5641438 - DNA, 25 bp, Homo sapien
agccggcgcgctagggagcgcggga

SEQ ID NO: 5641439 - DNA, 25 bp, Homo sapien
gcgtcccgcgctccctagcgcgccg

SEQ ID NO: 5641440 - DNA, 25 bp, Homo sapien
cggcgcgctagggagcgcgggacgc

SEQ ID NO: 5641441 - DNA, 25 bp, Homo sapien
ccggctcgggcccagcgcggcgagg

SEQ ID NO: 5641442 - DNA, 25 bp, Homo sapien
cctcgccgcgctgggcccgagccgg

SEQ ID NO: 5641443 - DNA, 25 bp, Homo sapien
aactttggatactctgatttaaaat

SEQ ID NO: 5641444 - DNA, 25 bp, Homo sapien
attttaaatcagagtatccaaagtt

SEQ ID NO: 5641445 - DNA, 25 bp, Homo sapien
cgtctcgttcgcgagagccgcggag

SEQ ID NO: 5641446 - DNA, 25 bp, Homo sapien
ctccgcggctctcgcgaacgagacg

SEQ ID NO: 5641447 - DNA, 25 bp, Homo sapien
accggtcctgcgaacactctggatg

SEQ ID NO: 5641448 - DNA, 25 bp, Homo sapien
catccagagtgttcgcaggaccggt

SEQ ID NO: 5641449 - DNA, 25 bp, Homo sapien
gagaggaaatccggaaaactcattt

SEQ ID NO: 5641450 - DNA, 25 bp, Homo sapien
aaatgagttttccggatttcctctc

SEQ ID NO: 5641451 - DNA, 25 bp, Homo sapien
gcccttaggcccggtgccgctttac

SEQ ID NO: 5641452 - DNA, 25 bp, Homo sapien
gtaaagcggcaccgggcctaagggc

SEQ ID NO: 5641453 - DNA, 25 bp, Homo sapien
gtcgaggcgcccttaggcccggtgc

SEQ ID NO: 5641454 - DNA, 25 bp, Homo sapien
gcaccgggcctaagggcgcctcgac

SEQ ID NO: 5641455 - DNA, 25 bp, Homo sapien
aacggtcatattagttatataaaat

SEQ ID NO: 5641456 - DNA, 25 bp, Homo sapien
attttatataactaatatgaccgtt

SEQ ID NO: 5641457 - DNA, 25 bp, Homo sapien
aaacggtcatattagttatataaaa

SEQ ID NO: 5641458 - DNA, 25 bp, Homo sapien
ttttatataactaatatgaccgttt

SEQ ID NO: 5641459 - DNA, 25 bp, Homo sapien
gggccggaaacgcctctgaggaggt

SEQ ID NO: 5641460 - DNA, 25 bp, Homo sapien
acctcctcagaggcgtttccggccc

SEQ ID NO: 5641461 - DNA, 25 bp, Homo sapien
taaagggaatagatatcgttacact

SEQ ID NO: 5641462 - DNA, 25 bp, Homo sapien
agtgtaacgatatctattcccttta

SEQ ID NO: 5641463 - DNA, 25 bp, Homo sapien
gggactcaaatttcccgccagctat

SEQ ID NO: 5641464 - DNA, 25 bp, Homo sapien
atagctggcgggaaatttgagtccc

SEQ ID NO: 5641465 - DNA, 25 bp, Homo sapien
ccgttgaggccagtgaggtgtaaac

SEQ ID NO: 5641466 - DNA, 25 bp, Homo sapien
gtttacacctcactggcctcaacgg

SEQ ID NO: 5641467 - DNA, 25 bp, Homo sapien
atgtcaacaatgtgtactaccacgt

SEQ ID NO: 5641468 - DNA, 25 bp, Homo sapien
acgtggtagtacacattgttgacat

SEQ ID NO: 5641469 - DNA, 25 bp, Homo sapien
taccgctccctgcagctcacgtatg

SEQ ID NO: 5641470 - DNA, 25 bp, Homo sapien
catacgtgagctgcagggagcggta

SEQ ID NO: 5641471 - DNA, 25 bp, Homo sapien
ccaagggaccctggagactcaggac

SEQ ID NO: 5641472 - DNA, 25 bp, Homo sapien
gtcctgagtctccagggtcccttgg

SEQ ID NO: 5641473 - DNA, 25 bp, Homo sapien
gggaccgcggtcgcgtgcgcgaggg

SEQ ID NO: 5641474 - DNA, 25 bp, Homo sapien
ccctcgcgcacgcgaccgcggtccc

SEQ ID NO: 5641475 - DNA, 25 bp, Homo sapien
atcgtaaggcattcacgtcatacgt

SEQ ID NO: 5641476 - DNA, 25 bp, Homo sapien
acgtatgacgtgaatgccttacgat

SEQ ID NO: 5641477 - DNA, 25 bp, Homo sapien
gcaccttcggtatctacgtttctag

SEQ ID NO: 5641478 - DNA, 25 bp, Homo sapien
ctagaaacgtagataccgaaggtgc

SEQ ID NO: 5641479 - DNA, 25 bp, Homo sapien
ccgtaggttccttcacccacactcc

SEQ ID NO: 5641480 - DNA, 25 bp, Homo sapien
ggagtgtgggtgaaggaacctacgg

SEQ ID NO: 5641481 - DNA, 25 bp, Homo sapien
ggctcccaatcgaagtgggcctctt

SEQ ID NO: 5641482 - DNA, 25 bp, Homo sapien
aagaggcccacttcgattgggagcc

SEQ ID NO: 5641483 - DNA, 25 bp, Homo sapien
atacacttcggtcgcgggacctccg

SEQ ID NO: 5641484 - DNA, 25 bp, Homo sapien
cggaggtcccgcgaccgaagtgtat

SEQ ID NO: 5641485 - DNA, 25 bp, Homo sapien
gagtgaaattcaccattgaagttgt

SEQ ID NO: 5641486 - DNA, 25 bp, Homo sapien
acaacttcaatggtgaatttcactc

SEQ ID NO: 5641487 - DNA, 25 bp, Homo sapien
taatgtacagttacgacagtcaaag

SEQ ID NO: 5641488 - DNA, 25 bp, Homo sapien
ctttgactgtcgtaactgtacatta

SEQ ID NO: 5641489 - DNA, 25 bp, Homo sapien
taatagacataatgttacttcatga

SEQ ID NO: 5641490 - DNA, 25 bp, Homo sapien
tcatgaagtaacattatgtctatta

SEQ ID NO: 5641491 - DNA, 25 bp, Homo sapien
cagtcccagtcgtctacgaagagtc

SEQ ID NO: 5641492 - DNA, 25 bp, Homo sapien
gactcttcgtagacgactgggactg

SEQ ID NO: 5641493 - DNA, 25 bp, Homo sapien
ggtgcgtcaggctcgccctcggctc

SEQ ID NO: 5641494 - DNA, 25 bp, Homo sapien
gagccgagggcgagcctgacgcacc

SEQ ID NO: 5641495 - DNA, 25 bp, Homo sapien
gccggtgcgtcaggctcgccctcgg

SEQ ID NO: 5641496 - DNA, 25 bp, Homo sapien
ccgagggcgagcctgacgcaccggc

SEQ ID NO: 5641497 - DNA, 25 bp, Homo sapien
ctgggtctgtgggttggtgtttctc

SEQ ID NO: 5641498 - DNA, 25 bp, Homo sapien
gagaaacaccaacccacagacccag

SEQ ID NO: 5641499 - DNA, 25 bp, Homo sapien
ataagttgtggttgtagtttaaaga

SEQ ID NO: 5641500 - DNA, 25 bp, Homo sapien
tctttaaactacaaccacaacttat

SEQ ID NO: 5641501 - DNA, 25 bp, Homo sapien
ttcgacgaaaataattacccatagt

SEQ ID NO: 5641502 - DNA, 25 bp, Homo sapien
actatgggtaattattttcgtcgaa

SEQ ID NO: 5641503 - DNA, 25 bp, Homo sapien
agacaaagttaggtgagtgagaaag

SEQ ID NO: 5641504 - DNA, 25 bp, Homo sapien
ctttctcactcacctaactttgtct

SEQ ID NO: 5641505 - DNA, 25 bp, Homo sapien
gtgtccgttgtccaggccccgggtc

SEQ ID NO: 5641506 - DNA, 25 bp, Homo sapien
gacccggggcctggacaacggacac

SEQ ID NO: 5641507 - DNA, 25 bp, Homo sapien
ctaccgggatccctactgcccgacg

SEQ ID NO: 5641508 - DNA, 25 bp, Homo sapien
cgtcgggcagtagggatcccggtag

SEQ ID NO: 5641509 - DNA, 25 bp, Homo sapien
gtgggatgtcatactagtcggcccc

SEQ ID NO: 5641510 - DNA, 25 bp, Homo sapien
ggggccgactagtatgacatcccac

SEQ ID NO: 5641511 - DNA, 25 bp, Homo sapien
agaataattgaactactaaaaacag

SEQ ID NO: 5641512 - DNA, 25 bp, Homo sapien
ctgtttttagtagttcaattattct

SEQ ID NO: 5641513 - DNA, 25 bp, Homo sapien
cagtccggagcctgtgttaccttgg

SEQ ID NO: 5641514 - DNA, 25 bp, Homo sapien
ccaaggtaacacaggctccggactg

SEQ ID NO: 5641515 - DNA, 25 bp, Homo sapien
ttatgaacaattcattaaggtacat

SEQ ID NO: 5641516 - DNA, 25 bp, Homo sapien
atgtaccttaatgaattgttcataa

SEQ ID NO: 5641517 - DNA, 25 bp, Homo sapien
gaactctaaggtatccagtattacc

SEQ ID NO: 5641518 - DNA, 25 bp, Homo sapien
ggtaatactggataccttagagttc

SEQ ID NO: 5641519 - DNA, 25 bp, Homo sapien
gagtaccggacacggtctcgcccga

SEQ ID NO: 5641520 - DNA, 25 bp, Homo sapien
tcgggcgagaccgtgtccggtactc

SEQ ID NO: 5641521 - DNA, 25 bp, Homo sapien
ctctgtccgccgacgaggcaggtag

SEQ ID NO: 5641522 - DNA, 25 bp, Homo sapien
ctacctgcctcgtcggcggacagag

SEQ ID NO: 5641523 - DNA, 25 bp, Homo sapien
acacgagtcgtcgagccgaaccggg

SEQ ID NO: 5641524 - DNA, 25 bp, Homo sapien
cccggttcggctcgacgactcgtgt

SEQ ID NO: 5641525 - DNA, 25 bp, Homo sapien
cgagaaccattattagccgaggtaa

SEQ ID NO: 5641526 - DNA, 25 bp, Homo sapien
ttacctcggctaataatggttctcg

SEQ ID NO: 5641527 - DNA, 25 bp, Homo sapien
ctttgaaccggtgcacgggagcacc

SEQ ID NO: 5641528 - DNA, 25 bp, Homo sapien
ggtgctcccgtgcaccggttcaaag

SEQ ID NO: 5641529 - DNA, 25 bp, Homo sapien
gcgtcactgacgaggtctgcccggc

SEQ ID NO: 5641530 - DNA, 25 bp, Homo sapien
gccgggcagacctcgtcagtgacgc

SEQ ID NO: 5641531 - DNA, 25 bp, Homo sapien
ttttacaccgatacacagcagaacg

SEQ ID NO: 5641532 - DNA, 25 bp, Homo sapien
cgttctgctgtgtatcggtgtaaaa

SEQ ID NO: 5641533 - DNA, 25 bp, Homo sapien
ccacggggctgctgctcaaacgcgt

SEQ ID NO: 5641534 - DNA, 25 bp, Homo sapien
acgcgtttgagcagcagccccgtgg

SEQ ID NO: 5641535 - DNA, 25 bp, Homo sapien
cggcccaggcgtcgactgccacccc

SEQ ID NO: 5641536 - DNA, 25 bp, Homo sapien
ggggtggcagtcgacgcctgggccg

SEQ ID NO: 5641537 - DNA, 25 bp, Homo sapien
cggcccggcccaggcgtcgactgcc

SEQ ID NO: 5641538 - DNA, 25 bp, Homo sapien
ggcagtcgacgcctgggccgggccg

SEQ ID NO: 5641539 - DNA, 25 bp, Homo sapien
gaccagggcaggtcccccgagcccg

SEQ ID NO: 5641540 - DNA, 25 bp, Homo sapien
cgggctcgggggacctgccctggtc

SEQ ID NO: 5641541 - DNA, 25 bp, Homo sapien
gccgcccttgccccgtccctagatg

SEQ ID NO: 5641542 - DNA, 25 bp, Homo sapien
catctagggacggggcaagggcggc

SEQ ID NO: 5641543 - DNA, 25 bp, Homo sapien
gtcctgccgcccttgccccgtccct

SEQ ID NO: 5641544 - DNA, 25 bp, Homo sapien
agggacggggcaagggcggcaggac

SEQ ID NO: 5641545 - DNA, 25 bp, Homo sapien
agtccactcctcctacagtcggagt

SEQ ID NO: 5641546 - DNA, 25 bp, Homo sapien
actccgactgtaggaggagtggact

SEQ ID NO: 5641547 - DNA, 25 bp, Homo sapien
gcacccgggccatagggagtccggg

SEQ ID NO: 5641548 - DNA, 25 bp, Homo sapien
cccggactccctatggcccgggtgc

SEQ ID NO: 5641549 - DNA, 25 bp, Homo sapien
acgaggagggaaccgccgcagaggg

SEQ ID NO: 5641550 - DNA, 25 bp, Homo sapien
ccctctgcggcggttccctcctcgt

SEQ ID NO: 5641551 - DNA, 25 bp, Homo sapien
aatactactactcatccttatcgac

SEQ ID NO: 5641552 - DNA, 25 bp, Homo sapien
gtcgataaggatgagtagtagtatt

SEQ ID NO: 5641553 - DNA, 25 bp, Homo sapien
accacccaccaccagcgtgtcgaac

SEQ ID NO: 5641554 - DNA, 25 bp, Homo sapien
gttcgacacgctggtggtgggtggt

SEQ ID NO: 5641555 - DNA, 25 bp, Homo sapien
ttgtggacctcaccctatagcttag

SEQ ID NO: 5641556 - DNA, 25 bp, Homo sapien
ctaagctatagggtgaggtccacaa

SEQ ID NO: 5641557 - DNA, 25 bp, Homo sapien
gactttctcagtacgtatcgatcaa

SEQ ID NO: 5641558 - DNA, 25 bp, Homo sapien
ttgatcgatacgtactgagaaagtc

SEQ ID NO: 5641559 - DNA, 25 bp, Homo sapien
atcaggtaggaaatgtgaggaatct

SEQ ID NO: 5641560 - DNA, 25 bp, Homo sapien
agattcctcacatttcctacctgat

SEQ ID NO: 5641561 - DNA, 25 bp, Homo sapien
aaaaagtcatctcctaaactttgct

SEQ ID NO: 5641562 - DNA, 25 bp, Homo sapien
agcaaagtttaggagatgacttttt

SEQ ID NO: 5641563 - DNA, 25 bp, Homo sapien
gggctagtcccacgggacccaggtc

SEQ ID NO: 5641564 - DNA, 25 bp, Homo sapien
gacctgggtcccgtgggactagccc

SEQ ID NO: 5641565 - DNA, 25 bp, Homo sapien
aatctctttactgtttctacaaagt

SEQ ID NO: 5641566 - DNA, 25 bp, Homo sapien
actttgtagaaacagtaaagagatt

SEQ ID NO: 5641567 - DNA, 25 bp, Homo sapien
ccgccagacccccgcggcgccctcg

SEQ ID NO: 5641568 - DNA, 25 bp, Homo sapien
cgagggcgccgcgggggtctggcgg

SEQ ID NO: 5641569 - DNA, 25 bp, Homo sapien
acctgtcgcgggtacgtgactccgg

SEQ ID NO: 5641570 - DNA, 25 bp, Homo sapien
ccggagtcacgtacccgcgacaggt

SEQ ID NO: 5641571 - DNA, 25 bp, Homo sapien
cgaggcactttgtcggccacgccgg

SEQ ID NO: 5641572 - DNA, 25 bp, Homo sapien
ccggcgtggccgacaaagtgcctcg

SEQ ID NO: 5641573 - DNA, 25 bp, Homo sapien
tctccttaaaggacacgacaacaca

SEQ ID NO: 5641574 - DNA, 25 bp, Homo sapien
tgtgttgtcgtgtcctttaaggaga

SEQ ID NO: 5641575 - DNA, 25 bp, Homo sapien
gacactcgttcccggtacacgtccc

SEQ ID NO: 5641576 - DNA, 25 bp, Homo sapien
gggacgtgtaccgggaacgagtgtc

SEQ ID NO: 5641577 - DNA, 25 bp, Homo sapien
gctcgggggccggactccgcgtcgt

SEQ ID NO: 5641578 - DNA, 25 bp, Homo sapien
acgacgcggagtccggcccccgagc

SEQ ID NO: 5641579 - DNA, 25 bp, Homo sapien
ctcgttgcaactgtcctttttgttg

SEQ ID NO: 5641580 - DNA, 25 bp, Homo sapien
caacaaaaaggacagttgcaacgag

SEQ ID NO: 5641581 - DNA, 25 bp, Homo sapien
tttctatcgtcattagaagacctag

SEQ ID NO: 5641582 - DNA, 25 bp, Homo sapien
ctaggtcttctaatgacgatagaaa

SEQ ID NO: 5641583 - DNA, 25 bp, Homo sapien
gacacaacgactcgaggctggtgcc

SEQ ID NO: 5641584 - DNA, 25 bp, Homo sapien
ggcaccagcctcgagtcgttgtgtc

SEQ ID NO: 5641585 - DNA, 25 bp, Homo sapien
ctctacgggtctacgtcgggacctg

SEQ ID NO: 5641586 - DNA, 25 bp, Homo sapien
caggtcccgacgtagacccgtagag

SEQ ID NO: 5641587 - DNA, 25 bp, Homo sapien
aataacataggtaattctcctatac

SEQ ID NO: 5641588 - DNA, 25 bp, Homo sapien
gtataggagaattacctatgttatt

SEQ ID NO: 5641589 - DNA, 25 bp, Homo sapien
taaataccgatatatgaacaactat

SEQ ID NO: 5641590 - DNA, 25 bp, Homo sapien
atagttgttcatatatcggtattta

SEQ ID NO: 5641591 - DNA, 25 bp, Homo sapien
gtaaatttctagtgcattcaaaagg

SEQ ID NO: 5641592 - DNA, 25 bp, Homo sapien
ccttttgaatgcactagaaatttac

SEQ ID NO: 5641593 - DNA, 25 bp, Homo sapien
aatatgactacattgactctgaaac

SEQ ID NO: 5641594 - DNA, 25 bp, Homo sapien
gtttcagagtcaatgtagtcatatt

SEQ ID NO: 5641595 - DNA, 25 bp, Homo sapien
catagaccgaattgaaaaactaata

SEQ ID NO: 5641596 - DNA, 25 bp, Homo sapien
tattagtttttcaattcggtctatg

SEQ ID NO: 5641597 - DNA, 25 bp, Homo sapien
tctaactttcgtctaggtcggacaa

SEQ ID NO: 5641598 - DNA, 25 bp, Homo sapien
ttgtccgacctagacgaaagttaga

SEQ ID NO: 5641599 - DNA, 25 bp, Homo sapien
tctgtacggccttcgcctcgacggg

SEQ ID NO: 5641600 - DNA, 25 bp, Homo sapien
cccgtcgaggcgaaggccgtacaga

SEQ ID NO: 5641601 - DNA, 25 bp, Homo sapien
ggcactggtgtggtggacttctcac

SEQ ID NO: 5641602 - DNA, 25 bp, Homo sapien
gtgagaagtccaccacaccagtgcc

SEQ ID NO: 5641603 - DNA, 25 bp, Homo sapien
ttacttctttattcccacagtccac

SEQ ID NO: 5641604 - DNA, 25 bp, Homo sapien
gtggactgtgggaataaagaagtaa

SEQ ID NO: 5641605 - DNA, 25 bp, Homo sapien
cacgagtcgcgagcaagtacccaga

SEQ ID NO: 5641606 - DNA, 25 bp, Homo sapien
tctgggtacttgctcgcgactcgtg

SEQ ID NO: 5641607 - DNA, 25 bp, Homo sapien
cgtcctactccacacagcagtaacg

SEQ ID NO: 5641608 - DNA, 25 bp, Homo sapien
cgttactgctgtgtggagtaggacg

SEQ ID NO: 5641609 - DNA, 25 bp, Homo sapien
cctgcctgtcccagacccactcttc

SEQ ID NO: 5641610 - DNA, 25 bp, Homo sapien
gaagagtgggtctgggacaggcagg

SEQ ID NO: 5641611 - DNA, 25 bp, Homo sapien
acccttctaagaacggccattgtgc

SEQ ID NO: 5641612 - DNA, 25 bp, Homo sapien
gcacaatggccgttcttagaagggt

SEQ ID NO: 5641613 - DNA, 25 bp, Homo sapien
tcctcccccgggatgcccgacacgt

SEQ ID NO: 5641614 - DNA, 25 bp, Homo sapien
acgtgtcgggcatcccgggggagga

SEQ ID NO: 5641615 - DNA, 25 bp, Homo sapien
ggctatcgttcctaccgacctccga

SEQ ID NO: 5641616 - DNA, 25 bp, Homo sapien
tcggaggtcggtaggaacgatagcc

SEQ ID NO: 5641617 - DNA, 25 bp, Homo sapien
gatatcgaggttctggacgaacctc

SEQ ID NO: 5641618 - DNA, 25 bp, Homo sapien
gaggttcgtccagaacctcgatatc

SEQ ID NO: 5641619 - DNA, 25 bp, Homo sapien
actttctactatcacaatggttgtc

SEQ ID NO: 5641620 - DNA, 25 bp, Homo sapien
gacaaccattgtgatagtagaaagt

SEQ ID NO: 5641621 - DNA, 25 bp, Homo sapien
tcgtggttttatccagtgaccaaag

SEQ ID NO: 5641622 - DNA, 25 bp, Homo sapien
ctttggtcactggataaaaccacga

SEQ ID NO: 5641623 - DNA, 25 bp, Homo sapien
atatcaacacgaccagttatcgtct

SEQ ID NO: 5641624 - DNA, 25 bp, Homo sapien
agacgataactggtcgtgttgatat

SEQ ID NO: 5641625 - DNA, 25 bp, Homo sapien
cagacatggtggaagatacgagaac

SEQ ID NO: 5641626 - DNA, 25 bp, Homo sapien
gttctcgtatcttccaccatgtctg

SEQ ID NO: 5641627 - DNA, 25 bp, Homo sapien
gatgtaaaactctaaatttatcata

SEQ ID NO: 5641628 - DNA, 25 bp, Homo sapien
tatgataaatttagagttttacatc

SEQ ID NO: 5641629 - DNA, 25 bp, Homo sapien
aaaactctaaatttatcatatcggt

SEQ ID NO: 5641630 - DNA, 25 bp, Homo sapien
accgatatgataaatttagagtttt

SEQ ID NO: 5641631 - DNA, 25 bp, Homo sapien
tgtaaaactctaaatttatcatatc

SEQ ID NO: 5641632 - DNA, 25 bp, Homo sapien
gatatgataaatttagagttttaca

SEQ ID NO: 5641633 - DNA, 25 bp, Homo sapien
agtgaccgctgaccgaccgacccag

SEQ ID NO: 5641634 - DNA, 25 bp, Homo sapien
ctgggtcggtcggtcagcggtcact

SEQ ID NO: 5641635 - DNA, 25 bp, Homo sapien
aataataattcttaacgtacgaata

SEQ ID NO: 5641636 - DNA, 25 bp, Homo sapien
tattcgtacgttaagaattattatt

SEQ ID NO: 5641637 - DNA, 25 bp, Homo sapien
taataataattcttaacgtacgaat

SEQ ID NO: 5641638 - DNA, 25 bp, Homo sapien
attcgtacgttaagaattattatta

SEQ ID NO: 5641639 - DNA, 25 bp, Homo sapien
tttccccgacttacagcccttagga

SEQ ID NO: 5641640 - DNA, 25 bp, Homo sapien
tcctaagggctgtaagtcggggaaa

SEQ ID NO: 5641641 - DNA, 25 bp, Homo sapien
gtctcgacaaccaacgttcgtttcg

SEQ ID NO: 5641642 - DNA, 25 bp, Homo sapien
cgaaacgaacgttggttgtcgagac

SEQ ID NO: 5641643 - DNA, 25 bp, Homo sapien
ggtgcgatcggggtccttccctcga

SEQ ID NO: 5641644 - DNA, 25 bp, Homo sapien
tcgagggaaggaccccgatcgcacc

SEQ ID NO: 5641645 - DNA, 25 bp, Homo sapien
aagtatcttctttatttcgaacttc

SEQ ID NO: 5641646 - DNA, 25 bp, Homo sapien
gaagttcgaaataaagaagatactt

SEQ ID NO: 5641647 - DNA, 25 bp, Homo sapien
tggctctcggggctcttgagggtgt

SEQ ID NO: 5641648 - DNA, 25 bp, Homo sapien
acaccctcaagagccccgagagcca

SEQ ID NO: 5641649 - DNA, 25 bp, Homo sapien
gctctcggggctcttgagggtgtcg

SEQ ID NO: 5641650 - DNA, 25 bp, Homo sapien
cgacaccctcaagagccccgagagc

SEQ ID NO: 5641651 - DNA, 25 bp, Homo sapien
acttatattattaggcaaaggagac

SEQ ID NO: 5641652 - DNA, 25 bp, Homo sapien
gtctcctttgcctaataatataagt

SEQ ID NO: 5641653 - DNA, 25 bp, Homo sapien
aaaatttagacgtctacatctcgag

SEQ ID NO: 5641654 - DNA, 25 bp, Homo sapien
ctcgagatgtagacgtctaaatttt

SEQ ID NO: 5641655 - DNA, 25 bp, Homo sapien
taccttctaaatagtccaaaaaata

SEQ ID NO: 5641656 - DNA, 25 bp, Homo sapien
tattttttggactatttagaaggta

SEQ ID NO: 5641657 - DNA, 25 bp, Homo sapien
cgggaccgacattctgagcccctgg

SEQ ID NO: 5641658 - DNA, 25 bp, Homo sapien
ccaggggctcagaatgtcggtcccg

SEQ ID NO: 5641659 - DNA, 25 bp, Homo sapien
aagtggactcggtgaatagagacac

SEQ ID NO: 5641660 - DNA, 25 bp, Homo sapien
gtgtctctattcaccgagtccactt

SEQ ID NO: 5641661 - DNA, 25 bp, Homo sapien
agaaggcttcggcaatccttcacat

SEQ ID NO: 5641662 - DNA, 25 bp, Homo sapien
atgtgaaggattgccgaagccttct

SEQ ID NO: 5641663 - DNA, 25 bp, Homo sapien
ctaagggattgtcgtaactacaaat

SEQ ID NO: 5641664 - DNA, 25 bp, Homo sapien
atttgtagttacgacaatcccttag

SEQ ID NO: 5641665 - DNA, 25 bp, Homo sapien
gggcagtcgggctccgccgcgacca

SEQ ID NO: 5641666 - DNA, 25 bp, Homo sapien
tggtcgcggcggagcccgactgccc

SEQ ID NO: 5641667 - DNA, 25 bp, Homo sapien
cccgaggcaccgcatcagcggcgac

SEQ ID NO: 5641668 - DNA, 25 bp, Homo sapien
gtcgccgctgatgcggtgcctcggg

SEQ ID NO: 5641669 - DNA, 25 bp, Homo sapien
gaggcctggggtccgggcaacgacg

SEQ ID NO: 5641670 - DNA, 25 bp, Homo sapien
cgtcgttgcccggaccccaggcctc

SEQ ID NO: 5641671 - DNA, 25 bp, Homo sapien
ttaaggaagctacaatcgaaacggt

SEQ ID NO: 5641672 - DNA, 25 bp, Homo sapien
accgtttcgattgtagcttccttaa

SEQ ID NO: 5641673 - DNA, 25 bp, Homo sapien
aacattctctcctacatctttcaag

SEQ ID NO: 5641674 - DNA, 25 bp, Homo sapien
cttgaaagatgtaggagagaatgtt

SEQ ID NO: 5641675 - DNA, 25 bp, Homo sapien
cgcagccggacccaggcacgggagg

SEQ ID NO: 5641676 - DNA, 25 bp, Homo sapien
cctcccgtgcctgggtccggctgcg

SEQ ID NO: 5641677 - DNA, 25 bp, Homo sapien
cggtacacgactcggtacagggacc

SEQ ID NO: 5641678 - DNA, 25 bp, Homo sapien
ggtccctgtaccgagtcgtgtaccg

SEQ ID NO: 5641679 - DNA, 25 bp, Homo sapien
gccgccctgggtgcggtacacgact

SEQ ID NO: 5641680 - DNA, 25 bp, Homo sapien
agtcgtgtaccgcacccagggcggc

SEQ ID NO: 5641681 - DNA, 25 bp, Homo sapien
gagacgcgagtgacgggccgccctg

SEQ ID NO: 5641682 - DNA, 25 bp, Homo sapien
cagggcggcccgtcactcgcgtctc

SEQ ID NO: 5641683 - DNA, 25 bp, Homo sapien
gatgtaggtccttaaaaagtattat

SEQ ID NO: 5641684 - DNA, 25 bp, Homo sapien
ataatactttttaaggacctacatc

SEQ ID NO: 5641685 - DNA, 25 bp, Homo sapien
aaaataactaccaatttcatacgta

SEQ ID NO: 5641686 - DNA, 25 bp, Homo sapien
tacgtatgaaattggtagttatttt

SEQ ID NO: 5641687 - DNA, 25 bp, Homo sapien
acgccggcgaaactgatataggtgt

SEQ ID NO: 5641688 - DNA, 25 bp, Homo sapien
acacctatatcagtttcgccggcgt

SEQ ID NO: 5641689 - DNA, 25 bp, Homo sapien
ctcttcccggtcgaatcggtcttgg

SEQ ID NO: 5641690 - DNA, 25 bp, Homo sapien
ccaagaccgattcgaccgggaagag

SEQ ID NO: 5641691 - DNA, 25 bp, Homo sapien
tcgccgtgacgtacccgtcggcccg

SEQ ID NO: 5641692 - DNA, 25 bp, Homo sapien
cgggccgacgggtacgtcacggcga

SEQ ID NO: 5641693 - DNA, 25 bp, Homo sapien
agaggacctacatatatcataacat

SEQ ID NO: 5641694 - DNA, 25 bp, Homo sapien
atgttatgatatatgtaggtcctct

SEQ ID NO: 5641695 - DNA, 25 bp, Homo sapien
cctcggcaggctcctgtccccggta

SEQ ID NO: 5641696 - DNA, 25 bp, Homo sapien
taccggggacaggagcctgccgagg

SEQ ID NO: 5641697 - DNA, 25 bp, Homo sapien
tgtcggcaccgcctcgcgtcgcccg

SEQ ID NO: 5641698 - DNA, 25 bp, Homo sapien
cgggcgacgcgaggcggtgccgaca

SEQ ID NO: 5641699 - DNA, 25 bp, Homo sapien
aagtacgagtctgggccggtgctcc

SEQ ID NO: 5641700 - DNA, 25 bp, Homo sapien
ggagcaccggcccagactcgtactt

SEQ ID NO: 5641701 - DNA, 25 bp, Homo sapien
ataggtctactcgtcgccgtcgggg

SEQ ID NO: 5641702 - DNA, 25 bp, Homo sapien
ccccgacggcgacgagtagacctat

SEQ ID NO: 5641703 - DNA, 25 bp, Homo sapien
acaggaggagtgaaaggcaaccgaa

SEQ ID NO: 5641704 - DNA, 25 bp, Homo sapien
ttcggttgcctttcactcctcctgt

SEQ ID NO: 5641705 - DNA, 25 bp, Homo sapien
ccgacgtctcagctccacgtattgg

SEQ ID NO: 5641706 - DNA, 25 bp, Homo sapien
ccaatacgtggagctgagacgtcgg

SEQ ID NO: 5641707 - DNA, 25 bp, Homo sapien
ttgtatataacatgattgtagtgta

SEQ ID NO: 5641708 - DNA, 25 bp, Homo sapien
tacactacaatcatgttatatacaa

SEQ ID NO: 5641709 - DNA, 25 bp, Homo sapien
attgtatataacatgattgtagtgt

SEQ ID NO: 5641710 - DNA, 25 bp, Homo sapien
acactacaatcatgttatatacaat

SEQ ID NO: 5641711 - DNA, 25 bp, Homo sapien
gtccgtgcgagtcggcctcccagtt

SEQ ID NO: 5641712 - DNA, 25 bp, Homo sapien
aactgggaggccgactcgcacggac

SEQ ID NO: 5641713 - DNA, 25 bp, Homo sapien
atcaacggagaaaggcgtgacaacg

SEQ ID NO: 5641714 - DNA, 25 bp, Homo sapien
cgttgtcacgcctttctccgttgat

SEQ ID NO: 5641715 - DNA, 25 bp, Homo sapien
accgcaccagcgacgacggcccgta

SEQ ID NO: 5641716 - DNA, 25 bp, Homo sapien
tacgggccgtcgtcgctggtgcggt

SEQ ID NO: 5641717 - DNA, 25 bp, Homo sapien
gaccgcaccagcgacgacggcccgt

SEQ ID NO: 5641718 - DNA, 25 bp, Homo sapien
acgggccgtcgtcgctggtgcggtc

SEQ ID NO: 5641719 - DNA, 25 bp, Homo sapien
agcctgcccgtaccgggttcgtgcg

SEQ ID NO: 5641720 - DNA, 25 bp, Homo sapien
cgcacgaacccggtacgggcaggct

SEQ ID NO: 5641721 - DNA, 25 bp, Homo sapien
ttcgtagggcggcaccgagaccagg

SEQ ID NO: 5641722 - DNA, 25 bp, Homo sapien
cctggtctcggtgccgccctacgaa

SEQ ID NO: 5641723 - DNA, 25 bp, Homo sapien
aaccctctggttaggttgcctaaga

SEQ ID NO: 5641724 - DNA, 25 bp, Homo sapien
tcttaggcaacctaaccagagggtt

SEQ ID NO: 5641725 - DNA, 25 bp, Homo sapien
gagggtctcgtcggccgtaagacag

SEQ ID NO: 5641726 - DNA, 25 bp, Homo sapien
ctgtcttacggccgacgagaccctc

SEQ ID NO: 5641727 - DNA, 25 bp, Homo sapien
gttaactattcagctctctactcag

SEQ ID NO: 5641728 - DNA, 25 bp, Homo sapien
ctgagtagagagctgaatagttaac

SEQ ID NO: 5641729 - DNA, 25 bp, Homo sapien
acagtggtagcagaacgtctagtcg

SEQ ID NO: 5641730 - DNA, 25 bp, Homo sapien
cgactagacgttctgctaccactgt

SEQ ID NO: 5641731 - DNA, 25 bp, Homo sapien
gcgccgaagcccggccgccctggcg

SEQ ID NO: 5641732 - DNA, 25 bp, Homo sapien
cgccagggcggccgggcttcggcgc

SEQ ID NO: 5641733 - DNA, 25 bp, Homo sapien
acagattattgtaaaatgactataa

SEQ ID NO: 5641734 - DNA, 25 bp, Homo sapien
ttatagtcattttacaataatctgt

SEQ ID NO: 5641735 - DNA, 25 bp, Homo sapien
agtctcgggttgaaagagtaacgtc

SEQ ID NO: 5641736 - DNA, 25 bp, Homo sapien
gacgttactctttcaacccgagact

SEQ ID NO: 5641737 - DNA, 25 bp, Homo sapien
acattaaaaggtgaagcttaacaag

SEQ ID NO: 5641738 - DNA, 25 bp, Homo sapien
cttgttaagcttcaccttttaatgt

SEQ ID NO: 5641739 - DNA, 25 bp, Homo sapien
tcgtataatgatagatgtatttggt

SEQ ID NO: 5641740 - DNA, 25 bp, Homo sapien
accaaatacatctatcattatacga

SEQ ID NO: 5641741 - DNA, 25 bp, Homo sapien
acctgcgtccccacgggaggtcgga

SEQ ID NO: 5641742 - DNA, 25 bp, Homo sapien
tccgacctcccgtggggacgcaggt

SEQ ID NO: 5641743 - DNA, 25 bp, Homo sapien
gtgtagaccagtatgctacaggtgt

SEQ ID NO: 5641744 - DNA, 25 bp, Homo sapien
acacctgtagcatactggtctacac

SEQ ID NO: 5641745 - DNA, 25 bp, Homo sapien
gtaaaaatactactggtatctactt

SEQ ID NO: 5641746 - DNA, 25 bp, Homo sapien
aagtagataccagtagtatttttac

SEQ ID NO: 5641747 - DNA, 25 bp, Homo sapien
aattcagcaagttgtaaacgaagaa

SEQ ID NO: 5641748 - DNA, 25 bp, Homo sapien
ttcttcgtttacaacttgctgaatt

SEQ ID NO: 5641749 - DNA, 25 bp, Homo sapien
gactgtagaccttgtccgaattccg

SEQ ID NO: 5641750 - DNA, 25 bp, Homo sapien
cggaattcggacaaggtctacagtc

SEQ ID NO: 5641751 - DNA, 25 bp, Homo sapien
acaccgggagactctctctccagag

SEQ ID NO: 5641752 - DNA, 25 bp, Homo sapien
ctctggagagagagtctcccggtgt

SEQ ID NO: 5641753 - DNA, 25 bp, Homo sapien
agaggaagcataccttagtaaagaa

SEQ ID NO: 5641754 - DNA, 25 bp, Homo sapien
ttctttactaaggtatgcttcctct

SEQ ID NO: 5641755 - DNA, 25 bp, Homo sapien
ctccctaataatccccgtgacggta

SEQ ID NO: 5641756 - DNA, 25 bp, Homo sapien
taccgtcacggggattattagggag

SEQ ID NO: 5641757 - DNA, 25 bp, Homo sapien
gtccttcctctaggcctgtgataag

SEQ ID NO: 5641758 - DNA, 25 bp, Homo sapien
cttatcacaggcctagaggaaggac

SEQ ID NO: 5641759 - DNA, 25 bp, Homo sapien
tcaaaacgtcttcgtagataaagtg

SEQ ID NO: 5641760 - DNA, 25 bp, Homo sapien
cactttatctacgaagacgttttga

SEQ ID NO: 5641761 - DNA, 25 bp, Homo sapien
tacagtataaatcctatttcaaaaa

SEQ ID NO: 5641762 - DNA, 25 bp, Homo sapien
tttttgaaataggatttatactgta

SEQ ID NO: 5641763 - DNA, 25 bp, Homo sapien
gtttttcgcggaaagtgtcctagag

SEQ ID NO: 5641764 - DNA, 25 bp, Homo sapien
ctctaggacactttccgcgaaaaac

SEQ ID NO: 5641765 - DNA, 25 bp, Homo sapien
aattagtcggaaggtcaccgtgctc

SEQ ID NO: 5641766 - DNA, 25 bp, Homo sapien
gagcacggtgaccttccgactaatt

SEQ ID NO: 5641767 - DNA, 25 bp, Homo sapien
aagggtccacctgccgccgagagga

SEQ ID NO: 5641768 - DNA, 25 bp, Homo sapien
tcctctcggcggcaggtggaccctt

SEQ ID NO: 5641769 - DNA, 25 bp, Homo sapien
tcgggcacggcctccctgtcgtgcg

SEQ ID NO: 5641770 - DNA, 25 bp, Homo sapien
cgcacgacagggaggccgtgcccga

SEQ ID NO: 5641771 - DNA, 25 bp, Homo sapien
tctctagtaacagggggaacaacgg

SEQ ID NO: 5641772 - DNA, 25 bp, Homo sapien
ccgttgttccccctgttactagaga

SEQ ID NO: 5641773 - DNA, 25 bp, Homo sapien
acagactgaggtttacgtggtcaaa

SEQ ID NO: 5641774 - DNA, 25 bp, Homo sapien
tttgaccacgtaaacctcagtctgt

SEQ ID NO: 5641775 - DNA, 25 bp, Homo sapien
acgacgaacttgagtgaggattcac

SEQ ID NO: 5641776 - DNA, 25 bp, Homo sapien
gtgaatcctcactcaagttcgtcgt

SEQ ID NO: 5641777 - DNA, 25 bp, Homo sapien
gacggggcggctccgcccaggaagg

SEQ ID NO: 5641778 - DNA, 25 bp, Homo sapien
ccttcctgggcggagccgccccgtc

SEQ ID NO: 5641779 - DNA, 25 bp, Homo sapien
ggtgtgaatacgttgaccctggtag

SEQ ID NO: 5641780 - DNA, 25 bp, Homo sapien
ctaccagggtcaacgtattcacacc

SEQ ID NO: 5641781 - DNA, 25 bp, Homo sapien
tagtttcgaagatttagttaactgt

SEQ ID NO: 5641782 - DNA, 25 bp, Homo sapien
acagttaactaaatcttcgaaacta

SEQ ID NO: 5641783 - DNA, 25 bp, Homo sapien
tgatagtttcgaagatttagttaac

SEQ ID NO: 5641784 - DNA, 25 bp, Homo sapien
gttaactaaatcttcgaaactatca

SEQ ID NO: 5641785 - DNA, 25 bp, Homo sapien
ttttcagtaacagattggagaatag

SEQ ID NO: 5641786 - DNA, 25 bp, Homo sapien
ctattctccaatctgttactgaaaa

SEQ ID NO: 5641787 - DNA, 25 bp, Homo sapien
ttccgcgacccttcggcctggccgg

SEQ ID NO: 5641788 - DNA, 25 bp, Homo sapien
ccggccaggccgaagggtcgcggaa

SEQ ID NO: 5641789 - DNA, 25 bp, Homo sapien
atatttctataaacagcttatagtt

SEQ ID NO: 5641790 - DNA, 25 bp, Homo sapien
aactataagctgtttatagaaatat

SEQ ID NO: 5641791 - DNA, 25 bp, Homo sapien
aatatttctataaacagcttatagt

SEQ ID NO: 5641792 - DNA, 25 bp, Homo sapien
actataagctgtttatagaaatatt

SEQ ID NO: 5641793 - DNA, 25 bp, Homo sapien
aaatatttctataaacagcttatag

SEQ ID NO: 5641794 - DNA, 25 bp, Homo sapien
ctataagctgtttatagaaatattt

SEQ ID NO: 5641795 - DNA, 25 bp, Homo sapien
gaaatatttctataaacagcttata

SEQ ID NO: 5641796 - DNA, 25 bp, Homo sapien
tataagctgtttatagaaatatttc

SEQ ID NO: 5641797 - DNA, 25 bp, Homo sapien
ctgaagttagggtaccatgacaaaa

SEQ ID NO: 5641798 - DNA, 25 bp, Homo sapien
ttttgtcatggtaccctaacttcag

SEQ ID NO: 5641799 - DNA, 25 bp, Homo sapien
acgaggtgtgtatagttagtaggaa

SEQ ID NO: 5641800 - DNA, 25 bp, Homo sapien
ttcctactaactatacacacctcgt

SEQ ID NO: 5641801 - DNA, 25 bp, Homo sapien
cgtcctcctcctcctactctgtcat

SEQ ID NO: 5641802 - DNA, 25 bp, Homo sapien
atgacagagtaggaggaggaggacg

SEQ ID NO: 5641803 - DNA, 25 bp, Homo sapien
actcaggcctctcaagactgtcgcg

SEQ ID NO: 5641804 - DNA, 25 bp, Homo sapien
cgcgacagtcttgagaggcctgagt

SEQ ID NO: 5641805 - DNA, 25 bp, Homo sapien
gtcacggggcagacggcgacgacgt

SEQ ID NO: 5641806 - DNA, 25 bp, Homo sapien
acgtcgtcgccgtctgccccgtgac

SEQ ID NO: 5641807 - DNA, 25 bp, Homo sapien
aggtaaaaggccaagaactactgcc

SEQ ID NO: 5641808 - DNA, 25 bp, Homo sapien
ggcagtagttcttggccttttacct

SEQ ID NO: 5641809 - DNA, 25 bp, Homo sapien
acacgacacgggtgccggaacaccc

SEQ ID NO: 5641810 - DNA, 25 bp, Homo sapien
gggtgttccggcacccgtgtcgtgt

SEQ ID NO: 5641811 - DNA, 25 bp, Homo sapien
ctaaatttacactcttcatggtgtt

SEQ ID NO: 5641812 - DNA, 25 bp, Homo sapien
aacaccatgaagagtgtaaatttag

SEQ ID NO: 5641813 - DNA, 25 bp, Homo sapien
gttttcggcacgtggaacagcgtac

SEQ ID NO: 5641814 - DNA, 25 bp, Homo sapien
gtacgctgttccacgtgccgaaaac

SEQ ID NO: 5641815 - DNA, 25 bp, Homo sapien
cggttaccaaatttgagaccagagg

SEQ ID NO: 5641816 - DNA, 25 bp, Homo sapien
cctctggtctcaaatttggtaaccg

SEQ ID NO: 5641817 - DNA, 25 bp, Homo sapien
cgtgtcttttctaaactacgtgata

SEQ ID NO: 5641818 - DNA, 25 bp, Homo sapien
tatcacgtagtttagaaaagacacg

SEQ ID NO: 5641819 - DNA, 25 bp, Homo sapien
ggtcgaaacgtctctggttccaaga

SEQ ID NO: 5641820 - DNA, 25 bp, Homo sapien
tcttggaaccagagacgtttcgacc

SEQ ID NO: 5641821 - DNA, 25 bp, Homo sapien
acatacattatttatttccataccg

SEQ ID NO: 5641822 - DNA, 25 bp, Homo sapien
cggtatggaaataaataatgtatgt

SEQ ID NO: 5641823 - DNA, 25 bp, Homo sapien
gaacacgttgccattgccctctacg

SEQ ID NO: 5641824 - DNA, 25 bp, Homo sapien
cgtagagggcaatggcaacgtgttc

SEQ ID NO: 5641825 - DNA, 25 bp, Homo sapien
gacttacggtagtcgtgtccctctc

SEQ ID NO: 5641826 - DNA, 25 bp, Homo sapien
gagagggacacgactaccgtaagtc

SEQ ID NO: 5641827 - DNA, 25 bp, Homo sapien
gggcgcttccgaatagaggtccctc

SEQ ID NO: 5641828 - DNA, 25 bp, Homo sapien
gagggacctctattcggaagcgccc

SEQ ID NO: 5641829 - DNA, 25 bp, Homo sapien
agtaaacctacatttattccgagga

SEQ ID NO: 5641830 - DNA, 25 bp, Homo sapien
tcctcggaataaatgtaggtttact

SEQ ID NO: 5641831 - DNA, 25 bp, Homo sapien
tcaccctcatcgtcgcccgggttca

SEQ ID NO: 5641832 - DNA, 25 bp, Homo sapien
tgaacccgggcgacgatgagggtga

SEQ ID NO: 5641833 - DNA, 25 bp, Homo sapien
ctcgggactggcctggcgagtcctc

SEQ ID NO: 5641834 - DNA, 25 bp, Homo sapien
gaggactcgccaggccagtcccgag

SEQ ID NO: 5641835 - DNA, 25 bp, Homo sapien
accgtctacctattcggcaggggtg

SEQ ID NO: 5641836 - DNA, 25 bp, Homo sapien
cacccctgccgaataggtagacggt

SEQ ID NO: 5641837 - DNA, 25 bp, Homo sapien
gatagatgagccacgagtcgctcgc

SEQ ID NO: 5641838 - DNA, 25 bp, Homo sapien
gcgagcgactcgtggctcatctatc

SEQ ID NO: 5641839 - DNA, 25 bp, Homo sapien
gccgtgacgagcggcgcaccgaatg

SEQ ID NO: 5641840 - DNA, 25 bp, Homo sapien
cattcggtgcgccgctcgtcacggc

SEQ ID NO: 5641841 - DNA, 25 bp, Homo sapien
ggcgtcggagcgagacgcgcggcgt

SEQ ID NO: 5641842 - DNA, 25 bp, Homo sapien
acgccgcgcgtctcgctccgacgcc

SEQ ID NO: 5641843 - DNA, 25 bp, Homo sapien
aggacggcccggactgcgtgacagg

SEQ ID NO: 5641844 - DNA, 25 bp, Homo sapien
cctgtcacgcagtccgggccgtcct

SEQ ID NO: 5641845 - DNA, 25 bp, Homo sapien
acggcggcggtgtccgcgttctgcg

SEQ ID NO: 5641846 - DNA, 25 bp, Homo sapien
cgcagaacgcggacaccgccgccgt

SEQ ID NO: 5641847 - DNA, 25 bp, Homo sapien
ccggagtcgacagcgggacactctt

SEQ ID NO: 5641848 - DNA, 25 bp, Homo sapien
aagagtgtcccgctgtcgactccgg

SEQ ID NO: 5641849 - DNA, 25 bp, Homo sapien
acccactctactttattagacgatt

SEQ ID NO: 5641850 - DNA, 25 bp, Homo sapien
aatcgtctaataaagtagagtgggt

SEQ ID NO: 5641851 - DNA, 25 bp, Homo sapien
ggccccctagcgtcggagccacgtc

SEQ ID NO: 5641852 - DNA, 25 bp, Homo sapien
gacgtggctccgacgctagggggcc

SEQ ID NO: 5641853 - DNA, 25 bp, Homo sapien
atatttccctgtctaaaacatcatc

SEQ ID NO: 5641854 - DNA, 25 bp, Homo sapien
gatgatgttttagacagggaaatat

SEQ ID NO: 5641855 - DNA, 25 bp, Homo sapien
gtattctcaggccaatgtagctcgt

SEQ ID NO: 5641856 - DNA, 25 bp, Homo sapien
acgagctacattggcctgagaatac

SEQ ID NO: 5641857 - DNA, 25 bp, Homo sapien
aagactctacgagacctcgtcgcag

SEQ ID NO: 5641858 - DNA, 25 bp, Homo sapien
ctgcgacgaggtctcgtagagtctt

SEQ ID NO: 5641859 - DNA, 25 bp, Homo sapien
gagaaacacatgaggtagttccttt

SEQ ID NO: 5641860 - DNA, 25 bp, Homo sapien
aaaggaactacctcatgtgtttctc

SEQ ID NO: 5641861 - DNA, 25 bp, Homo sapien
aaaatttgtcaatacttacgttgta

SEQ ID NO: 5641862 - DNA, 25 bp, Homo sapien
tacaacgtaagtattgacaaatttt

SEQ ID NO: 5641863 - DNA, 25 bp, Homo sapien
ccggatagaggcagacaaggtaact

SEQ ID NO: 5641864 - DNA, 25 bp, Homo sapien
agttaccttgtctgcctctatccgg

SEQ ID NO: 5641865 - DNA, 25 bp, Homo sapien
cccagtcttcgcggcggtggccgcc

SEQ ID NO: 5641866 - DNA, 25 bp, Homo sapien
ggcggccaccgccgcgaagactggg

SEQ ID NO: 5641867 - DNA, 25 bp, Homo sapien
ggccccagtcttcgcggcggtggcc

SEQ ID NO: 5641868 - DNA, 25 bp, Homo sapien
ggccaccgccgcgaagactggggcc

SEQ ID NO: 5641869 - DNA, 25 bp, Homo sapien
cggccccagtcttcgcggcggtggc

SEQ ID NO: 5641870 - DNA, 25 bp, Homo sapien
gccaccgccgcgaagactggggccg

SEQ ID NO: 5641871 - DNA, 25 bp, Homo sapien
ttgactcaaaaatgaccctgaggag

SEQ ID NO: 5641872 - DNA, 25 bp, Homo sapien
ctcctcagggtcatttttgagtcaa

SEQ ID NO: 5641873 - DNA, 25 bp, Homo sapien
tcacaggggtacagagggctccggc

SEQ ID NO: 5641874 - DNA, 25 bp, Homo sapien
gccggagccctctgtacccctgtga

SEQ ID NO: 5641875 - DNA, 25 bp, Homo sapien
tcgggacatctaccacgggctgcga

SEQ ID NO: 5641876 - DNA, 25 bp, Homo sapien
tcgcagcccgtggtagatgtcccga

SEQ ID NO: 5641877 - DNA, 25 bp, Homo sapien
taaaaatacaaggagggtgttgaag

SEQ ID NO: 5641878 - DNA, 25 bp, Homo sapien
cttcaacaccctccttgtattttta

SEQ ID NO: 5641879 - DNA, 25 bp, Homo sapien
acttcccctggattgaagtctaaac

SEQ ID NO: 5641880 - DNA, 25 bp, Homo sapien
gtttagacttcaatccaggggaagt

SEQ ID NO: 5641881 - DNA, 25 bp, Homo sapien
ggtcgtcaccttcgaacttctgtcc

SEQ ID NO: 5641882 - DNA, 25 bp, Homo sapien
ggacagaagttcgaaggtgacgacc

SEQ ID NO: 5641883 - DNA, 25 bp, Homo sapien
ccctcgacccgcgaccgcgcccgag

SEQ ID NO: 5641884 - DNA, 25 bp, Homo sapien
ctcgggcgcggtcgcgggtcgaggg

SEQ ID NO: 5641885 - DNA, 25 bp, Homo sapien
acagggccctcgacccgcgaccgcg

SEQ ID NO: 5641886 - DNA, 25 bp, Homo sapien
cgcggtcgcgggtcgagggccctgt

SEQ ID NO: 5641887 - DNA, 25 bp, Homo sapien
gacagggccctcgacccgcgaccgc

SEQ ID NO: 5641888 - DNA, 25 bp, Homo sapien
gcggtcgcgggtcgagggccctgtc

SEQ ID NO: 5641889 - DNA, 25 bp, Homo sapien
ctcgacccgcgaccgcgcccgagcg

SEQ ID NO: 5641890 - DNA, 25 bp, Homo sapien
cgctcgggcgcggtcgcgggtcgag

SEQ ID NO: 5641891 - DNA, 25 bp, Homo sapien
ctgatctccatctcgtttcctcctt

SEQ ID NO: 5641892 - DNA, 25 bp, Homo sapien
aaggaggaaacgagatggagatcag

SEQ ID NO: 5641893 - DNA, 25 bp, Homo sapien
gtattatatgtgaaaaaactttgat

SEQ ID NO: 5641894 - DNA, 25 bp, Homo sapien
atcaaagttttttcacatataatac

SEQ ID NO: 5641895 - DNA, 25 bp, Homo sapien
aatacgaataataacaggtacttga

SEQ ID NO: 5641896 - DNA, 25 bp, Homo sapien
tcaagtacctgttattattcgtatt

SEQ ID NO: 5641897 - DNA, 25 bp, Homo sapien
cccgcgcgtgcagcggaggtcccgg

SEQ ID NO: 5641898 - DNA, 25 bp, Homo sapien
ccgggacctccgctgcacgcgcggg

SEQ ID NO: 5641899 - DNA, 25 bp, Homo sapien
ccccgcgcgtgcagcggaggtcccg

SEQ ID NO: 5641900 - DNA, 25 bp, Homo sapien
cgggacctccgctgcacgcgcgggg

SEQ ID NO: 5641901 - DNA, 25 bp, Homo sapien
cgccccgcgcgtgcagcggaggtcc

SEQ ID NO: 5641902 - DNA, 25 bp, Homo sapien
ggacctccgctgcacgcgcggggcg

SEQ ID NO: 5641903 - DNA, 25 bp, Homo sapien
ttacagggcacgtcacactaatcct

SEQ ID NO: 5641904 - DNA, 25 bp, Homo sapien
aggattagtgtgacgtgccctgtaa

SEQ ID NO: 5641905 - DNA, 25 bp, Homo sapien
ggcccttcgaccgacagtagtttga

SEQ ID NO: 5641906 - DNA, 25 bp, Homo sapien
tcaaactactgtcggtcgaagggcc

SEQ ID NO: 5641907 - DNA, 25 bp, Homo sapien
cattttacacatacttgacggtcag

SEQ ID NO: 5641908 - DNA, 25 bp, Homo sapien
ctgaccgtcaagtatgtgtaaaatg

SEQ ID NO: 5641909 - DNA, 25 bp, Homo sapien
aaggaagaagtggaatcggtcttca

SEQ ID NO: 5641910 - DNA, 25 bp, Homo sapien
tgaagaccgattccacttcttcctt

SEQ ID NO: 5641911 - DNA, 25 bp, Homo sapien
agactcgagacacacggtgcagtag

SEQ ID NO: 5641912 - DNA, 25 bp, Homo sapien
ctactgcaccgtgtgtctcgagtct

SEQ ID NO: 5641913 - DNA, 25 bp, Homo sapien
aaaagatgtagtaaattggtataat

SEQ ID NO: 5641914 - DNA, 25 bp, Homo sapien
attataccaatttactacatctttt

SEQ ID NO: 5641915 - DNA, 25 bp, Homo sapien
accacacctgcggtgcactgtgtga

SEQ ID NO: 5641916 - DNA, 25 bp, Homo sapien
tcacacagtgcaccgcaggtgtggt

SEQ ID NO: 5641917 - DNA, 25 bp, Homo sapien
tttattatttagtacctacgaagac

SEQ ID NO: 5641918 - DNA, 25 bp, Homo sapien
gtcttcgtaggtactaaataataaa

SEQ ID NO: 5641919 - DNA, 25 bp, Homo sapien
ttacaaatctaaaggacactgacag

SEQ ID NO: 5641920 - DNA, 25 bp, Homo sapien
ctgtcagtgtcctttagatttgtaa

SEQ ID NO: 5641921 - DNA, 25 bp, Homo sapien
ctctctcgctctttacttacggtgt

SEQ ID NO: 5641922 - DNA, 25 bp, Homo sapien
acaccgtaagtaaagagcgagagag

SEQ ID NO: 5641923 - DNA, 25 bp, Homo sapien
aagtttcatgacttaacctttcatg

SEQ ID NO: 5641924 - DNA, 25 bp, Homo sapien
catgaaaggttaagtcatgaaactt

SEQ ID NO: 5641925 - DNA, 25 bp, Homo sapien
tgcgtcggtccatgtcgtaacggaa

SEQ ID NO: 5641926 - DNA, 25 bp, Homo sapien
ttccgttacgacatggaccgacgca

SEQ ID NO: 5641927 - DNA, 25 bp, Homo sapien
attgcagtaacaataatgatcttac

SEQ ID NO: 5641928 - DNA, 25 bp, Homo sapien
gtaagatcattattgttactgcaat

SEQ ID NO: 5641929 - DNA, 25 bp, Homo sapien
gatataaggacgtaggtcgcctcgt

SEQ ID NO: 5641930 - DNA, 25 bp, Homo sapien
acgaggcgacctacgtccttatatc

SEQ ID NO: 5641931 - DNA, 25 bp, Homo sapien
cgtctttgttaattgttaacatgga

SEQ ID NO: 5641932 - DNA, 25 bp, Homo sapien
tccatgttaacaattaacaaagacg

SEQ ID NO: 5641933 - DNA, 25 bp, Homo sapien
tgttgaataaacagattaacgacac

SEQ ID NO: 5641934 - DNA, 25 bp, Homo sapien
gtgtcgttaatctgtttattcaaca

SEQ ID NO: 5641935 - DNA, 25 bp, Homo sapien
aggacggttcagcagaacatcctaa

SEQ ID NO: 5641936 - DNA, 25 bp, Homo sapien
ttaggatgttctgctgaaccgtcct

SEQ ID NO: 5641937 - DNA, 25 bp, Homo sapien
aatttaataactgtgtttcagtcaa

SEQ ID NO: 5641938 - DNA, 25 bp, Homo sapien
ttgactgaaacacagttattaaatt

SEQ ID NO: 5641939 - DNA, 25 bp, Homo sapien
ataaactttacgattatcggaatta

SEQ ID NO: 5641940 - DNA, 25 bp, Homo sapien
taattccgataatcgtaaagtttat

SEQ ID NO: 5641941 - DNA, 25 bp, Homo sapien
gtcctgaagtcgagatcgaaagctt

SEQ ID NO: 5641942 - DNA, 25 bp, Homo sapien
aagctttcgatctcgacttcaggac

SEQ ID NO: 5641943 - DNA, 25 bp, Homo sapien
gagacgggcggaccctctggggccc

SEQ ID NO: 5641944 - DNA, 25 bp, Homo sapien
gggccccagagggtccgcccgtctc

SEQ ID NO: 5641945 - DNA, 25 bp, Homo sapien
gatggactgggacggttcgtctctt

SEQ ID NO: 5641946 - DNA, 25 bp, Homo sapien
aagagacgaaccgtcccagtccatc

SEQ ID NO: 5641947 - DNA, 25 bp, Homo sapien
gaaaacctacaattacgactgccgt

SEQ ID NO: 5641948 - DNA, 25 bp, Homo sapien
acggcagtcgtaattgtaggttttc

SEQ ID NO: 5641949 - DNA, 25 bp, Homo sapien
ggtagagaacccatcagagaactgg

SEQ ID NO: 5641950 - DNA, 25 bp, Homo sapien
ccagttctctgatgggttctctacc

SEQ ID NO: 5641951 - DNA, 25 bp, Homo sapien
gaacaaagacaaaattaaacggaca

SEQ ID NO: 5641952 - DNA, 25 bp, Homo sapien
tgtccgtttaattttgtctttgttc

SEQ ID NO: 5641953 - DNA, 25 bp, Homo sapien
gggatgacggtcgtgcccagccggg

SEQ ID NO: 5641954 - DNA, 25 bp, Homo sapien
cccggctgggcacgaccgtcatccc

SEQ ID NO: 5641955 - DNA, 25 bp, Homo sapien
ccaccccgtccgaccagtcccactc

SEQ ID NO: 5641956 - DNA, 25 bp, Homo sapien
gagtgggactggtcggacggggtgg

SEQ ID NO: 5641957 - DNA, 25 bp, Homo sapien
gccaaagggagagcgagtgtggagt

SEQ ID NO: 5641958 - DNA, 25 bp, Homo sapien
actccacactcgctctccctttggc

SEQ ID NO: 5641959 - DNA, 25 bp, Homo sapien
aatgtttgaagaactctctacttag

SEQ ID NO: 5641960 - DNA, 25 bp, Homo sapien
ctaagtagagagttcttcaaacatt

SEQ ID NO: 5641961 - DNA, 25 bp, Homo sapien
aagaggaccacttgtgtgagtaaag

SEQ ID NO: 5641962 - DNA, 25 bp, Homo sapien
ctttactcacacaagtggtcctctt

SEQ ID NO: 5641963 - DNA, 25 bp, Homo sapien
cccgtatagtgttataagcggaact

SEQ ID NO: 5641964 - DNA, 25 bp, Homo sapien
agttccgcttataacactatacggg

SEQ ID NO: 5641965 - DNA, 25 bp, Homo sapien
cagtcggtccgtcgtcctaccgcgg

SEQ ID NO: 5641966 - DNA, 25 bp, Homo sapien
ccgcggtaggacgacggaccgactg

SEQ ID NO: 5641967 - DNA, 25 bp, Homo sapien
aaattctgttaccttctgttatcgt

SEQ ID NO: 5641968 - DNA, 25 bp, Homo sapien
acgataacagaaggtaacagaattt

SEQ ID NO: 5641969 - DNA, 25 bp, Homo sapien
gacaactagcgtccacagtgaccgg

SEQ ID NO: 5641970 - DNA, 25 bp, Homo sapien
ccggtcactgtggacgctagttgtc

SEQ ID NO: 5641971 - DNA, 25 bp, Homo sapien
acgtccctcacccaacaaataaaga

SEQ ID NO: 5641972 - DNA, 25 bp, Homo sapien
tctttatttgttgggtgagggacgt

SEQ ID NO: 5641973 - DNA, 25 bp, Homo sapien
cggcggtccacctgcgaccgcccgg

SEQ ID NO: 5641974 - DNA, 25 bp, Homo sapien
ccgggcggtcgcaggtggaccgccg

SEQ ID NO: 5641975 - DNA, 25 bp, Homo sapien
cggcggcggtccacctgcgaccgcc

SEQ ID NO: 5641976 - DNA, 25 bp, Homo sapien
ggcggtcgcaggtggaccgccgccg

SEQ ID NO: 5641977 - DNA, 25 bp, Homo sapien
aataatagtaggaattatggactgt

SEQ ID NO: 5641978 - DNA, 25 bp, Homo sapien
acagtccataattcctactattatt

SEQ ID NO: 5641979 - DNA, 25 bp, Homo sapien
cactcgtagtccgtgggcgaccgga

SEQ ID NO: 5641980 - DNA, 25 bp, Homo sapien
tccggtcgcccacggactacgagtg

SEQ ID NO: 5641981 - DNA, 25 bp, Homo sapien
taacagtctgcgcaggtaagccgcc

SEQ ID NO: 5641982 - DNA, 25 bp, Homo sapien
ggcggcttacctgcgcagactgtta

SEQ ID NO: 5641983 - DNA, 25 bp, Homo sapien
cgctcacgcggcccgtcgtgccccc

SEQ ID NO: 5641984 - DNA, 25 bp, Homo sapien
gggggcacgacgggccgcgtgagcg

SEQ ID NO: 5641985 - DNA, 25 bp, Homo sapien
ccgctcacgcggcccgtcgtgcccc

SEQ ID NO: 5641986 - DNA, 25 bp, Homo sapien
ggggcacgacgggccgcgtgagcgg

SEQ ID NO: 5641987 - DNA, 25 bp, Homo sapien
caccccccgcgtcccctccgagtca

SEQ ID NO: 5641988 - DNA, 25 bp, Homo sapien
tgactcggaggggacgcggggggtg

SEQ ID NO: 5641989 - DNA, 25 bp, Homo sapien
agagataacttcagtcagtgactgt

SEQ ID NO: 5641990 - DNA, 25 bp, Homo sapien
acagtcactgactgaagttatctct

SEQ ID NO: 5641991 - DNA, 25 bp, Homo sapien
cgggcgagtcggtgggcgggaggtc

SEQ ID NO: 5641992 - DNA, 25 bp, Homo sapien
gacctcccgcccaccgactcgcccg

SEQ ID NO: 5641993 - DNA, 25 bp, Homo sapien
cagcgactaatcgtaagtcaagtcg

SEQ ID NO: 5641994 - DNA, 25 bp, Homo sapien
cgacttgacttacgattagtcgctg

SEQ ID NO: 5641995 - DNA, 25 bp, Homo sapien
gaaaccggcaggagagtcagaatcc

SEQ ID NO: 5641996 - DNA, 25 bp, Homo sapien
ggattctgactctcctgccggtttc

SEQ ID NO: 5641997 - DNA, 25 bp, Homo sapien
gactagaagtaaagtgaacttaaat

SEQ ID NO: 5641998 - DNA, 25 bp, Homo sapien
atttaagttcactttacttctagtc

SEQ ID NO: 5641999 - DNA, 25 bp, Homo sapien
tgactagaagtaaagtgaacttaaa

SEQ ID NO: 5642000 - DNA, 25 bp, Homo sapien
tttaagttcactttacttctagtca

SEQ ID NO: 5642001 - DNA, 25 bp, Homo sapien
taccaaccggccaatcggtttctca

SEQ ID NO: 5642002 - DNA, 25 bp, Homo sapien
tgagaaaccgattggccggttggta

SEQ ID NO: 5642003 - DNA, 25 bp, Homo sapien
cggggggcgtccctctattgactcg

SEQ ID NO: 5642004 - DNA, 25 bp, Homo sapien
cgagtcaatagagggacgccccccg

SEQ ID NO: 5642005 - DNA, 25 bp, Homo sapien
gacggtcccccggatcgtctgtaga

SEQ ID NO: 5642006 - DNA, 25 bp, Homo sapien
tctacagacgatccgggggaccgtc

SEQ ID NO: 5642007 - DNA, 25 bp, Homo sapien
gtgtaaaaaggacatagtgaatagt

SEQ ID NO: 5642008 - DNA, 25 bp, Homo sapien
actattcactatgtcctttttacac

SEQ ID NO: 5642009 - DNA, 25 bp, Homo sapien
ctcgtgggcggcgaaagaggtccag

SEQ ID NO: 5642010 - DNA, 25 bp, Homo sapien
ctggacctctttcgccgcccacgag

SEQ ID NO: 5642011 - DNA, 25 bp, Homo sapien
ttaatcggaggacacctactaatct

SEQ ID NO: 5642012 - DNA, 25 bp, Homo sapien
agattagtaggtgtcctccgattaa

SEQ ID NO: 5642013 - DNA, 25 bp, Homo sapien
gcgtggcctgccgtttcccggcctc

SEQ ID NO: 5642014 - DNA, 25 bp, Homo sapien
gaggccgggaaacggcaggccacgc

SEQ ID NO: 5642015 - DNA, 25 bp, Homo sapien
ggtcccggaacacccgatccacggc

SEQ ID NO: 5642016 - DNA, 25 bp, Homo sapien
gccgtggatcgggtgttccgggacc

SEQ ID NO: 5642017 - DNA, 25 bp, Homo sapien
acttcaccgacatcgtgatttctca

SEQ ID NO: 5642018 - DNA, 25 bp, Homo sapien
tgagaaatcacgatgtcggtgaagt

SEQ ID NO: 5642019 - DNA, 25 bp, Homo sapien
agagagtctgatagacgtccgtcag

SEQ ID NO: 5642020 - DNA, 25 bp, Homo sapien
ctgacggacgtctatcagactctct

SEQ ID NO: 5642021 - DNA, 25 bp, Homo sapien
atttgttaattaaatcaatggtact

SEQ ID NO: 5642022 - DNA, 25 bp, Homo sapien
agtaccattgatttaattaacaaat

SEQ ID NO: 5642023 - DNA, 25 bp, Homo sapien
ccagaggtacccctgacagtgggac

SEQ ID NO: 5642024 - DNA, 25 bp, Homo sapien
gtcccactgtcaggggtacctctgg

SEQ ID NO: 5642025 - DNA, 25 bp, Homo sapien
ataaaagatacacggtaacaagaat

SEQ ID NO: 5642026 - DNA, 25 bp, Homo sapien
attcttgttaccgtgtatcttttat

SEQ ID NO: 5642027 - DNA, 25 bp, Homo sapien
tataaaagatacacggtaacaagaa

SEQ ID NO: 5642028 - DNA, 25 bp, Homo sapien
ttcttgttaccgtgtatcttttata

SEQ ID NO: 5642029 - DNA, 25 bp, Homo sapien
gacattttggaatagaacttatgga

SEQ ID NO: 5642030 - DNA, 25 bp, Homo sapien
tccataagttctattccaaaatgtc

SEQ ID NO: 5642031 - DNA, 25 bp, Homo sapien
gaataggttgtacacagaaggtgga

SEQ ID NO: 5642032 - DNA, 25 bp, Homo sapien
tccaccttctgtgtacaacctattc

SEQ ID NO: 5642033 - DNA, 25 bp, Homo sapien
aatagacttctaatgactttcgaaa

SEQ ID NO: 5642034 - DNA, 25 bp, Homo sapien
tttcgaaagtcattagaagtctatt

SEQ ID NO: 5642035 - DNA, 25 bp, Homo sapien
cttcaagacgaccataaacatttat

SEQ ID NO: 5642036 - DNA, 25 bp, Homo sapien
ataaatgtttatggtcgtcttgaag

SEQ ID NO: 5642037 - DNA, 25 bp, Homo sapien
acgctcgtctgaaggtgtccaacag

SEQ ID NO: 5642038 - DNA, 25 bp, Homo sapien
ctgttggacaccttcagacgagcgt

SEQ ID NO: 5642039 - DNA, 25 bp, Homo sapien
atcacacaacaagaaataggagaag

SEQ ID NO: 5642040 - DNA, 25 bp, Homo sapien
cttctcctatttcttgttgtgtgat

SEQ ID NO: 5642041 - DNA, 25 bp, Homo sapien
ctcccgtcagccctgggcccggtcg

SEQ ID NO: 5642042 - DNA, 25 bp, Homo sapien
cgaccgggcccagggctgacgggag

SEQ ID NO: 5642043 - DNA, 25 bp, Homo sapien
taaaccactgacgtttgtaccaaac

SEQ ID NO: 5642044 - DNA, 25 bp, Homo sapien
gtttggtacaaacgtcagtggttta

SEQ ID NO: 5642045 - DNA, 25 bp, Homo sapien
aggcatagaggtgctggtctccgga

SEQ ID NO: 5642046 - DNA, 25 bp, Homo sapien
tccggagaccagcacctctatgcct

SEQ ID NO: 5642047 - DNA, 25 bp, Homo sapien
ctctgtagaggaagatggtccccgg

SEQ ID NO: 5642048 - DNA, 25 bp, Homo sapien
ccggggaccatcttcctctacagag

SEQ ID NO: 5642049 - DNA, 25 bp, Homo sapien
tgttttacagtactccaaatatcgt

SEQ ID NO: 5642050 - DNA, 25 bp, Homo sapien
acgatatttggagtactgtaaaaca

SEQ ID NO: 5642051 - DNA, 25 bp, Homo sapien
gtagaccctcgtacaccacggcggg

SEQ ID NO: 5642052 - DNA, 25 bp, Homo sapien
cccgccgtggtgtacgagggtctac

SEQ ID NO: 5642053 - DNA, 25 bp, Homo sapien
tcccctgtgggagcgtctgagcgtc

SEQ ID NO: 5642054 - DNA, 25 bp, Homo sapien
gacgctcagacgctcccacagggga

SEQ ID NO: 5642055 - DNA, 25 bp, Homo sapien
gacaagggtcctactctgcggcccc

SEQ ID NO: 5642056 - DNA, 25 bp, Homo sapien
ggggccgcagagtaggacccttgtc

SEQ ID NO: 5642057 - DNA, 25 bp, Homo sapien
acttttatgggtttgtccttcgtca

SEQ ID NO: 5642058 - DNA, 25 bp, Homo sapien
tgacgaaggacaaacccataaaagt

SEQ ID NO: 5642059 - DNA, 25 bp, Homo sapien
ggcgacggtggagaggaatcggagg

SEQ ID NO: 5642060 - DNA, 25 bp, Homo sapien
cctccgattcctctccaccgtcgcc

SEQ ID NO: 5642061 - DNA, 25 bp, Homo sapien
aaacctcttactctagtcaaaaata

SEQ ID NO: 5642062 - DNA, 25 bp, Homo sapien
tatttttgactagagtaagaggttt

SEQ ID NO: 5642063 - DNA, 25 bp, Homo sapien
gtacgactaaccttcgtctaggtac

SEQ ID NO: 5642064 - DNA, 25 bp, Homo sapien
gtacctagacgaaggttagtcgtac

SEQ ID NO: 5642065 - DNA, 25 bp, Homo sapien
aactaccaggtatcaaacataaatt

SEQ ID NO: 5642066 - DNA, 25 bp, Homo sapien
aatttatgtttgatacctggtagtt

SEQ ID NO: 5642067 - DNA, 25 bp, Homo sapien
gcgtctcccgagtcggacggccgaa

SEQ ID NO: 5642068 - DNA, 25 bp, Homo sapien
ttcggccgtccgactcgggagacgc

SEQ ID NO: 5642069 - DNA, 25 bp, Homo sapien
aattacaaatatagaccttacttac

SEQ ID NO: 5642070 - DNA, 25 bp, Homo sapien
gtaagtaaggtctatatttgtaatt

SEQ ID NO: 5642071 - DNA, 25 bp, Homo sapien
gcccggacgcgtcggatcgggtcgg

SEQ ID NO: 5642072 - DNA, 25 bp, Homo sapien
ccgacccgatccgacgcgtccgggc

SEQ ID NO: 5642073 - DNA, 25 bp, Homo sapien
gggcccggacgcgtcggatcgggtc

SEQ ID NO: 5642074 - DNA, 25 bp, Homo sapien
gacccgatccgacgcgtccgggccc

SEQ ID NO: 5642075 - DNA, 25 bp, Homo sapien
gacgatcctctgactcggtccaaag

SEQ ID NO: 5642076 - DNA, 25 bp, Homo sapien
ctttggaccgagtcagaggatcgtc

SEQ ID NO: 5642077 - DNA, 25 bp, Homo sapien
gactcctgtcgtgggggtgacgcag

SEQ ID NO: 5642078 - DNA, 25 bp, Homo sapien
ctgcgtcacccccacgacaggagtc

SEQ ID NO: 5642079 - DNA, 25 bp, Homo sapien
aagtggttctattttagtataagta

SEQ ID NO: 5642080 - DNA, 25 bp, Homo sapien
tacttatactaaaatagaaccactt

SEQ ID NO: 5642081 - DNA, 25 bp, Homo sapien
gaactttttggtgacgcagtggttt

SEQ ID NO: 5642082 - DNA, 25 bp, Homo sapien
aaaccactgcgtcaccaaaaagttc

SEQ ID NO: 5642083 - DNA, 25 bp, Homo sapien
cgtacaacattttaggtatttatca

SEQ ID NO: 5642084 - DNA, 25 bp, Homo sapien
tgataaatacctaaaatgttgtacg

SEQ ID NO: 5642085 - DNA, 25 bp, Homo sapien
cccgactcttcctgatgtggagaag

SEQ ID NO: 5642086 - DNA, 25 bp, Homo sapien
cttctccacatcaggaagagtcggg

SEQ ID NO: 5642087 - DNA, 25 bp, Homo sapien
ccgctggaccggctggccgccgagg

SEQ ID NO: 5642088 - DNA, 25 bp, Homo sapien
cctcggcggccagccggtccagcgg

SEQ ID NO: 5642089 - DNA, 25 bp, Homo sapien
gcccgctggaccggctggccgccga

SEQ ID NO: 5642090 - DNA, 25 bp, Homo sapien
tcggcggccagccggtccagcgggc

SEQ ID NO: 5642091 - DNA, 25 bp, Homo sapien
ggcccgctggaccggctggccgccg

SEQ ID NO: 5642092 - DNA, 25 bp, Homo sapien
cggcggccagccggtccagcgggcc

SEQ ID NO: 5642093 - DNA, 25 bp, Homo sapien
ttccctataccttaatcgagaaaga

SEQ ID NO: 5642094 - DNA, 25 bp, Homo sapien
tctttctcgattaaggtatagggaa

SEQ ID NO: 5642095 - DNA, 25 bp, Homo sapien
taaatttacaattatggaaccgtga

SEQ ID NO: 5642096 - DNA, 25 bp, Homo sapien
tcacggttccataattgtaaattta

SEQ ID NO: 5642097 - DNA, 25 bp, Homo sapien
gccgtagccgggtcgtaggctccgg

SEQ ID NO: 5642098 - DNA, 25 bp, Homo sapien
ccggagcctacgacccggctacggc

SEQ ID NO: 5642099 - DNA, 25 bp, Homo sapien
acagaaccggagatgtgtttttcac

SEQ ID NO: 5642100 - DNA, 25 bp, Homo sapien
gtgaaaaacacatctccggttctgt

SEQ ID NO: 5642101 - DNA, 25 bp, Homo sapien
acctcgaccaaggtataatccactt

SEQ ID NO: 5642102 - DNA, 25 bp, Homo sapien
aagtggattataccttggtcgaggt

SEQ ID NO: 5642103 - DNA, 25 bp, Homo sapien
ggcgggtccctgtggccgtcgcgcg

SEQ ID NO: 5642104 - DNA, 25 bp, Homo sapien
cgcgcgacggccacagggacccgcc

SEQ ID NO: 5642105 - DNA, 25 bp, Homo sapien
atctttcagtctcgaaattccctcg

SEQ ID NO: 5642106 - DNA, 25 bp, Homo sapien
cgagggaatttcgagactgaaagat

SEQ ID NO: 5642107 - DNA, 25 bp, Homo sapien
gagagaccctgctatcgccaacagt

SEQ ID NO: 5642108 - DNA, 25 bp, Homo sapien
actgttggcgatagcagggtctctc

SEQ ID NO: 5642109 - DNA, 25 bp, Homo sapien
cgaccgccttactccccctgcacgg

SEQ ID NO: 5642110 - DNA, 25 bp, Homo sapien
ccgtgcagggggagtaaggcggtcg

SEQ ID NO: 5642111 - DNA, 25 bp, Homo sapien
tactgaaagaaagagcatgaaatat

SEQ ID NO: 5642112 - DNA, 25 bp, Homo sapien
atatttcatgctctttctttcagta

SEQ ID NO: 5642113 - DNA, 25 bp, Homo sapien
tcactgatctagaggataaaaaagg

SEQ ID NO: 5642114 - DNA, 25 bp, Homo sapien
ccttttttatcctctagatcagtga

SEQ ID NO: 5642115 - DNA, 25 bp, Homo sapien
ctgggtacgtttaaagcaggtgtgt

SEQ ID NO: 5642116 - DNA, 25 bp, Homo sapien
acacacctgctttaaacgtacccag

SEQ ID NO: 5642117 - DNA, 25 bp, Homo sapien
agttcaataaactttgaagagtaga

SEQ ID NO: 5642118 - DNA, 25 bp, Homo sapien
tctactcttcaaagtttattgaact

SEQ ID NO: 5642119 - DNA, 25 bp, Homo sapien
gagttcaaaaaggtaatgttataaa

SEQ ID NO: 5642120 - DNA, 25 bp, Homo sapien
tttataacattacctttttgaactc

SEQ ID NO: 5642121 - DNA, 25 bp, Homo sapien
taggttacgtttgggtgtttgagac

SEQ ID NO: 5642122 - DNA, 25 bp, Homo sapien
gtctcaaacacccaaacgtaaccta

SEQ ID NO: 5642123 - DNA, 25 bp, Homo sapien
atacaaagagttttcttaggttcac

SEQ ID NO: 5642124 - DNA, 25 bp, Homo sapien
gtgaacctaagaaaactctttgtat

SEQ ID NO: 5642125 - DNA, 25 bp, Homo sapien
gacatgagagtagttcttggaataa

SEQ ID NO: 5642126 - DNA, 25 bp, Homo sapien
ttattccaagaactactctcatgtc

SEQ ID NO: 5642127 - DNA, 25 bp, Homo sapien
attttgtaatgtgctactgagttct

SEQ ID NO: 5642128 - DNA, 25 bp, Homo sapien
agaactcagtagcacattacaaaat

SEQ ID NO: 5642129 - DNA, 25 bp, Homo sapien
caccctaccctcgtccccttctgta

SEQ ID NO: 5642130 - DNA, 25 bp, Homo sapien
tacagaaggggacgagggtagggtg

SEQ ID NO: 5642131 - DNA, 25 bp, Homo sapien
gagagccgagacgaccacgagcatg

SEQ ID NO: 5642132 - DNA, 25 bp, Homo sapien
catgctcgtggtcgtctcggctctc

SEQ ID NO: 5642133 - DNA, 25 bp, Homo sapien
aacttgatcgggagaccttcagtgg

SEQ ID NO: 5642134 - DNA, 25 bp, Homo sapien
ccactgaaggtctcccgatcaagtt

SEQ ID NO: 5642135 - DNA, 25 bp, Homo sapien
gactgggcacgtcctagagtgaaat

SEQ ID NO: 5642136 - DNA, 25 bp, Homo sapien
atttcactctaggacgtgcccagtc

SEQ ID NO: 5642137 - DNA, 25 bp, Homo sapien
ctgcccgatccccccaccacgaccg

SEQ ID NO: 5642138 - DNA, 25 bp, Homo sapien
cggtcgtggtggggggatcgggcag

SEQ ID NO: 5642139 - DNA, 25 bp, Homo sapien
tcggtctcgcgcacgccggccgttg

SEQ ID NO: 5642140 - DNA, 25 bp, Homo sapien
caacggccggcgtgcgcgagaccga

SEQ ID NO: 5642141 - DNA, 25 bp, Homo sapien
cggactgggtcggtgccctgtgacc

SEQ ID NO: 5642142 - DNA, 25 bp, Homo sapien
ggtcacagggcaccgacccagtccg

SEQ ID NO: 5642143 - DNA, 25 bp, Homo sapien
ctgttggtgtcttcgtacatctagt

SEQ ID NO: 5642144 - DNA, 25 bp, Homo sapien
actagatgtacgaagacaccaacag

SEQ ID NO: 5642145 - DNA, 25 bp, Homo sapien
agattagccggaagtagattgtcag

SEQ ID NO: 5642146 - DNA, 25 bp, Homo sapien
ctgacaatctacttccggctaatct

SEQ ID NO: 5642147 - DNA, 25 bp, Homo sapien
acctgaagattagccggaagtagat

SEQ ID NO: 5642148 - DNA, 25 bp, Homo sapien
atctacttccggctaatcttcaggt

SEQ ID NO: 5642149 - DNA, 25 bp, Homo sapien
cttaacgtgaataatcttcgtgtac

SEQ ID NO: 5642150 - DNA, 25 bp, Homo sapien
gtacacgaagattattcacgttaag

SEQ ID NO: 5642151 - DNA, 25 bp, Homo sapien
tcacaagactcaaactagagaggaa

SEQ ID NO: 5642152 - DNA, 25 bp, Homo sapien
ttcctctctagtttgagtcttgtga

SEQ ID NO: 5642153 - DNA, 25 bp, Homo sapien
cgtaaggtcgcggtgtgtcttcccg

SEQ ID NO: 5642154 - DNA, 25 bp, Homo sapien
cgggaagacacaccgcgaccttacg

SEQ ID NO: 5642155 - DNA, 25 bp, Homo sapien
acttcttatatctaaaaccatagac

SEQ ID NO: 5642156 - DNA, 25 bp, Homo sapien
gtctatggttttagatataagaagt

SEQ ID NO: 5642157 - DNA, 25 bp, Homo sapien
gcccgaccttgcccggccagacccg

SEQ ID NO: 5642158 - DNA, 25 bp, Homo sapien
cgggtctggccgggcaaggtcgggc

SEQ ID NO: 5642159 - DNA, 25 bp, Homo sapien
ggcgggtgtgctccctcgggccgcg

SEQ ID NO: 5642160 - DNA, 25 bp, Homo sapien
cgcggcccgagggagcacacccgcc

SEQ ID NO: 5642161 - DNA, 25 bp, Homo sapien
gggcgggtgtgctccctcgggccgc

SEQ ID NO: 5642162 - DNA, 25 bp, Homo sapien
gcggcccgagggagcacacccgccc

SEQ ID NO: 5642163 - DNA, 25 bp, Homo sapien
ggggcgggtgtgctccctcgggccg

SEQ ID NO: 5642164 - DNA, 25 bp, Homo sapien
cggcccgagggagcacacccgcccc

SEQ ID NO: 5642165 - DNA, 25 bp, Homo sapien
gtacttttattcgtggacacctttg

SEQ ID NO: 5642166 - DNA, 25 bp, Homo sapien
caaaggtgtccacgaataaaagtac

SEQ ID NO: 5642167 - DNA, 25 bp, Homo sapien
gagacaatcaaaattactaaggttt

SEQ ID NO: 5642168 - DNA, 25 bp, Homo sapien
aaaccttagtaattttgattgtctc

SEQ ID NO: 5642169 - DNA, 25 bp, Homo sapien
gtttgaagtcgtcttaatagacatt

SEQ ID NO: 5642170 - DNA, 25 bp, Homo sapien
aatgtctattaagacgacttcaaac

SEQ ID NO: 5642171 - DNA, 25 bp, Homo sapien
acctcctccttcgaaggacagtggt

SEQ ID NO: 5642172 - DNA, 25 bp, Homo sapien
accactgtccttcgaaggaggaggt

SEQ ID NO: 5642173 - DNA, 25 bp, Homo sapien
gtcgtgaggaaattcacaccgtcct

SEQ ID NO: 5642174 - DNA, 25 bp, Homo sapien
aggacggtgtgaatttcctcacgac

SEQ ID NO: 5642175 - DNA, 25 bp, Homo sapien
gaccttttcttcaatactctagaga

SEQ ID NO: 5642176 - DNA, 25 bp, Homo sapien
tctctagagtattgaagaaaaggtc

SEQ ID NO: 5642177 - DNA, 25 bp, Homo sapien
cgtattggagacctaccgtacacaa

SEQ ID NO: 5642178 - DNA, 25 bp, Homo sapien
ttgtgtacggtaggtctccaatacg

SEQ ID NO: 5642179 - DNA, 25 bp, Homo sapien
tgaaatacttgatcgtaccaaagct

SEQ ID NO: 5642180 - DNA, 25 bp, Homo sapien
agctttggtacgatcaagtatttca

SEQ ID NO: 5642181 - DNA, 25 bp, Homo sapien
ctctgggttccggaccgcgcgggtg

SEQ ID NO: 5642182 - DNA, 25 bp, Homo sapien
cacccgcgcggtccggaacccagag

SEQ ID NO: 5642183 - DNA, 25 bp, Homo sapien
tgggggttaatcttgtatccggttg

SEQ ID NO: 5642184 - DNA, 25 bp, Homo sapien
caaccggatacaagattaaccccca

SEQ ID NO: 5642185 - DNA, 25 bp, Homo sapien
gaagtttgagtatcaattcaaaatt

SEQ ID NO: 5642186 - DNA, 25 bp, Homo sapien
aattttgaattgatactcaaacttc

SEQ ID NO: 5642187 - DNA, 25 bp, Homo sapien
aaatacagataggacacccgacgac

SEQ ID NO: 5642188 - DNA, 25 bp, Homo sapien
gtcgtcgggtgtcctatctgtattt

SEQ ID NO: 5642189 - DNA, 25 bp, Homo sapien
agtctacaagattttggtagtcaca

SEQ ID NO: 5642190 - DNA, 25 bp, Homo sapien
tgtgactaccaaaatcttgtagact

SEQ ID NO: 5642191 - DNA, 25 bp, Homo sapien
aaatggtaacgtacattatagacat

SEQ ID NO: 5642192 - DNA, 25 bp, Homo sapien
atgtctataatgtacgttaccattt

SEQ ID NO: 5642193 - DNA, 25 bp, Homo sapien
ttaaagaaagactcacaaattaaag

SEQ ID NO: 5642194 - DNA, 25 bp, Homo sapien
ctttaatttgtgagtctttctttaa

SEQ ID NO: 5642195 - DNA, 25 bp, Homo sapien
ggcgacggtatcatgtctgtgctat

SEQ ID NO: 5642196 - DNA, 25 bp, Homo sapien
atagcacagacatgataccgtcgcc

SEQ ID NO: 5642197 - DNA, 25 bp, Homo sapien
cgaccacttggcgacggtatcatgt

SEQ ID NO: 5642198 - DNA, 25 bp, Homo sapien
acatgataccgtcgccaagtggtcg

SEQ ID NO: 5642199 - DNA, 25 bp, Homo sapien
ataagtactaaaagcacaaatgaaa

SEQ ID NO: 5642200 - DNA, 25 bp, Homo sapien
tttcatttgtgcttttagtacttat

SEQ ID NO: 5642201 - DNA, 25 bp, Homo sapien
caatttatcgaacaccttacacaat

SEQ ID NO: 5642202 - DNA, 25 bp, Homo sapien
attgtgtaaggtgttcgataaattg

SEQ ID NO: 5642203 - DNA, 25 bp, Homo sapien
taaaatagattcaactgtggtttga

SEQ ID NO: 5642204 - DNA, 25 bp, Homo sapien
tcaaaccacagttgaatctatttta

SEQ ID NO: 5642205 - DNA, 25 bp, Homo sapien
tggtgtacgactttaggttgggatt

SEQ ID NO: 5642206 - DNA, 25 bp, Homo sapien
aatcccaacctaaagtcgtacacca

SEQ ID NO: 5642207 - DNA, 25 bp, Homo sapien
caccgggtagaactactgtgacaag

SEQ ID NO: 5642208 - DNA, 25 bp, Homo sapien
cttgtcacagtagttctacccggtg

SEQ ID NO: 5642209 - DNA, 25 bp, Homo sapien
tccctgtctaattcaacgttcaagg

SEQ ID NO: 5642210 - DNA, 25 bp, Homo sapien
ccttgaacgttgaattagacaggga

SEQ ID NO: 5642211 - DNA, 25 bp, Homo sapien
gtcgcaggtccccaggaggtgcccg

SEQ ID NO: 5642212 - DNA, 25 bp, Homo sapien
cgggcacctcctggggacctgcgac

SEQ ID NO: 5642213 - DNA, 25 bp, Homo sapien
aaagaggttgaagtatcaagagaga

SEQ ID NO: 5642214 - DNA, 25 bp, Homo sapien
tctctcttgatacttcaacctcttt

SEQ ID NO: 5642215 - DNA, 25 bp, Homo sapien
tctcggggacagagcacgtcggctg

SEQ ID NO: 5642216 - DNA, 25 bp, Homo sapien
cagccgacgtgctctgtccccgaga

SEQ ID NO: 5642217 - DNA, 25 bp, Homo sapien
gtgcccccccgcgccagggacggta

SEQ ID NO: 5642218 - DNA, 25 bp, Homo sapien
taccgtccctggcgcgggggggcac

SEQ ID NO: 5642219 - DNA, 25 bp, Homo sapien
tgtgcccccccgcgccagggacggt

SEQ ID NO: 5642220 - DNA, 25 bp, Homo sapien
accgtccctggcgcgggggggcaca

SEQ ID NO: 5642221 - DNA, 25 bp, Homo sapien
aatttacgactgtatcaatggtggt

SEQ ID NO: 5642222 - DNA, 25 bp, Homo sapien
accaccattgatacagtcgtaaatt

SEQ ID NO: 5642223 - DNA, 25 bp, Homo sapien
tgcggtagcgccacgggctgtcccc

SEQ ID NO: 5642224 - DNA, 25 bp, Homo sapien
ggggacagcccgtggcgctaccgca

SEQ ID NO: 5642225 - DNA, 25 bp, Homo sapien
gtgcggtagcgccacgggctgtccc

SEQ ID NO: 5642226 - DNA, 25 bp, Homo sapien
gggacagcccgtggcgctaccgcac

SEQ ID NO: 5642227 - DNA, 25 bp, Homo sapien
cgtgctgccgccacctccgctcgga

SEQ ID NO: 5642228 - DNA, 25 bp, Homo sapien
tccgagcggaggtggcggcagcacg

SEQ ID NO: 5642229 - DNA, 25 bp, Homo sapien
tcgcctgtccctcccagggtagtga

SEQ ID NO: 5642230 - DNA, 25 bp, Homo sapien
tcactaccctgggagggacaggcga

SEQ ID NO: 5642231 - DNA, 25 bp, Homo sapien
tagccgtcgtctgtactgttagtcg

SEQ ID NO: 5642232 - DNA, 25 bp, Homo sapien
cgactaacagtacagacgacggcta

SEQ ID NO: 5642233 - DNA, 25 bp, Homo sapien
taagtctatgtggtcgtttaccgag

SEQ ID NO: 5642234 - DNA, 25 bp, Homo sapien
ctcggtaaacgaccacatagactta

SEQ ID NO: 5642235 - DNA, 25 bp, Homo sapien
aaaaaagtgattcagcaagtatagg

SEQ ID NO: 5642236 - DNA, 25 bp, Homo sapien
cctatacttgctgaatcactttttt

SEQ ID NO: 5642237 - DNA, 25 bp, Homo sapien
tcgatcgggaccgtgggcggcgagc

SEQ ID NO: 5642238 - DNA, 25 bp, Homo sapien
gctcgccgcccacggtcccgatcga

SEQ ID NO: 5642239 - DNA, 25 bp, Homo sapien
aaaaagtagatggaatccacgaaac

SEQ ID NO: 5642240 - DNA, 25 bp, Homo sapien
gtttcgtggattccatctacttttt

SEQ ID NO: 5642241 - DNA, 25 bp, Homo sapien
gtctccgaccgggagccccgccgta

SEQ ID NO: 5642242 - DNA, 25 bp, Homo sapien
tacggcggggctcccggtcggagac

SEQ ID NO: 5642243 - DNA, 25 bp, Homo sapien
ggtttagttataactttgtatatag

SEQ ID NO: 5642244 - DNA, 25 bp, Homo sapien
ctatatacaaagttataactaaacc

SEQ ID NO: 5642245 - DNA, 25 bp, Homo sapien
ttagagttctataacactaaaacaa

SEQ ID NO: 5642246 - DNA, 25 bp, Homo sapien
ttgttttagtgttatagaactctaa

SEQ ID NO: 5642247 - DNA, 25 bp, Homo sapien
aatcctagaagtcaggtctcaccgt

SEQ ID NO: 5642248 - DNA, 25 bp, Homo sapien
acggtgagacctgacttctaggatt

SEQ ID NO: 5642249 - DNA, 25 bp, Homo sapien
ggaccggctgggtgtccttggcccg

SEQ ID NO: 5642250 - DNA, 25 bp, Homo sapien
cgggccaaggacacccagccggtcc

SEQ ID NO: 5642251 - DNA, 25 bp, Homo sapien
tcttataataattattccctgagat

SEQ ID NO: 5642252 - DNA, 25 bp, Homo sapien
atctcagggaataattattataaga

SEQ ID NO: 5642253 - DNA, 25 bp, Homo sapien
tcttctctcaatcttataataatta

SEQ ID NO: 5642254 - DNA, 25 bp, Homo sapien
taattattataagattgagagaaga

SEQ ID NO: 5642255 - DNA, 25 bp, Homo sapien
gctccccggtaagtcctagttctgg

SEQ ID NO: 5642256 - DNA, 25 bp, Homo sapien
ccagaactaggacttaccggggagc

SEQ ID NO: 5642257 - DNA, 25 bp, Homo sapien
gtagaactaaatgaaatacttcgta

SEQ ID NO: 5642258 - DNA, 25 bp, Homo sapien
tacgaagtatttcatttagttctac

SEQ ID NO: 5642259 - DNA, 25 bp, Homo sapien
ccgtcgtacctgcgtccggacccac

SEQ ID NO: 5642260 - DNA, 25 bp, Homo sapien
gtgggtccggacgcaggtacgacgg

SEQ ID NO: 5642261 - DNA, 25 bp, Homo sapien
ttctagaaagtattctccttgaaat

SEQ ID NO: 5642262 - DNA, 25 bp, Homo sapien
atttcaaggagaatactttctagaa

SEQ ID NO: 5642263 - DNA, 25 bp, Homo sapien
agtcagggcggtgactcgtgacgag

SEQ ID NO: 5642264 - DNA, 25 bp, Homo sapien
ctcgtcacgagtcaccgccctgact

SEQ ID NO: 5642265 - DNA, 25 bp, Homo sapien
atctaacgagaaaattacattattt

SEQ ID NO: 5642266 - DNA, 25 bp, Homo sapien
aaataatgtaattttctcgttagat

SEQ ID NO: 5642267 - DNA, 25 bp, Homo sapien
cttaaatctaacgagaaaattacat

SEQ ID NO: 5642268 - DNA, 25 bp, Homo sapien
atgtaattttctcgttagatttaag

SEQ ID NO: 5642269 - DNA, 25 bp, Homo sapien
catatcttaaatctaacgagaaaat

SEQ ID NO: 5642270 - DNA, 25 bp, Homo sapien
attttctcgttagatttaagatatg

SEQ ID NO: 5642271 - DNA, 25 bp, Homo sapien
tacatatcttaaatctaacgagaaa

SEQ ID NO: 5642272 - DNA, 25 bp, Homo sapien
tttctcgttagatttaagatatgta

SEQ ID NO: 5642273 - DNA, 25 bp, Homo sapien
acacgagttattcctccaattatat

SEQ ID NO: 5642274 - DNA, 25 bp, Homo sapien
atataattggaggaataactcgtgt

SEQ ID NO: 5642275 - DNA, 25 bp, Homo sapien
gaaacgcgaccgacagtcttctacg

SEQ ID NO: 5642276 - DNA, 25 bp, Homo sapien
cgtagaagactgtcggtcgcgtttc

SEQ ID NO: 5642277 - DNA, 25 bp, Homo sapien
gtccttaagatatccacaaccgtat

SEQ ID NO: 5642278 - DNA, 25 bp, Homo sapien
atacggttgtggatatcttaaggac

SEQ ID NO: 5642279 - DNA, 25 bp, Homo sapien
tcccgtacaagggactcgtgtacct

SEQ ID NO: 5642280 - DNA, 25 bp, Homo sapien
aggtacacgagtcccttgtacggga

SEQ ID NO: 5642281 - DNA, 25 bp, Homo sapien
ggtcgcgacgacgttccgccgggcc

SEQ ID NO: 5642282 - DNA, 25 bp, Homo sapien
ggcccggcggaacgtcgtcgcgacc

SEQ ID NO: 5642283 - DNA, 25 bp, Homo sapien
cggtcgcgacgacgttccgccgggc

SEQ ID NO: 5642284 - DNA, 25 bp, Homo sapien
gcccggcggaacgtcgtcgcgaccg

SEQ ID NO: 5642285 - DNA, 25 bp, Homo sapien
tgggcaaattgacagaagtctcaat

SEQ ID NO: 5642286 - DNA, 25 bp, Homo sapien
attgagacttctgtcaatttgccca

SEQ ID NO: 5642287 - DNA, 25 bp, Homo sapien
acactttgagtgtattttgactgtt

SEQ ID NO: 5642288 - DNA, 25 bp, Homo sapien
aacagtcaaaatacactcaaagtgt

SEQ ID NO: 5642289 - DNA, 25 bp, Homo sapien
gacggtacctgtaaccacatttcat

SEQ ID NO: 5642290 - DNA, 25 bp, Homo sapien
atgaaatgtggttacaggtaccgtc

SEQ ID NO: 5642291 - DNA, 25 bp, Homo sapien
aaccttcgtaacagaggatgagagt

SEQ ID NO: 5642292 - DNA, 25 bp, Homo sapien
actctcatcctctgttacgaaggtt

SEQ ID NO: 5642293 - DNA, 25 bp, Homo sapien
agagacggtttcactgtggggcacc

SEQ ID NO: 5642294 - DNA, 25 bp, Homo sapien
ggtgccccacagtgaaaccgtctct

SEQ ID NO: 5642295 - DNA, 25 bp, Homo sapien
cgatcagacacctcggaatcggtgg

SEQ ID NO: 5642296 - DNA, 25 bp, Homo sapien
ccaccgattccgaggtgtctgatcg

SEQ ID NO: 5642297 - DNA, 25 bp, Homo sapien
ttttccaacacggcgggactcgtcg

SEQ ID NO: 5642298 - DNA, 25 bp, Homo sapien
cgacgagtcccgccgtgttggaaaa

SEQ ID NO: 5642299 - DNA, 25 bp, Homo sapien
gcaggccttcgcctcgcaatgaacg

SEQ ID NO: 5642300 - DNA, 25 bp, Homo sapien
cgttcattgcgaggcgaaggcctgc

SEQ ID NO: 5642301 - DNA, 25 bp, Homo sapien
gtccctatcgcagaggagagtgacc

SEQ ID NO: 5642302 - DNA, 25 bp, Homo sapien
ggtcactctcctctgcgatagggac

SEQ ID NO: 5642303 - DNA, 25 bp, Homo sapien
accgatggtggttagtacccttcat

SEQ ID NO: 5642304 - DNA, 25 bp, Homo sapien
atgaagggtactaaccaccatcggt

SEQ ID NO: 5642305 - DNA, 25 bp, Homo sapien
atgtcagtggtagtcgccctcggag

SEQ ID NO: 5642306 - DNA, 25 bp, Homo sapien
ctccgagggcgactaccactgacat

SEQ ID NO: 5642307 - DNA, 25 bp, Homo sapien
ccgacggtgcgagaggaggaccggg

SEQ ID NO: 5642308 - DNA, 25 bp, Homo sapien
cccggtcctcctctcgcaccgtcgg

SEQ ID NO: 5642309 - DNA, 25 bp, Homo sapien
ggcggaaaggcggcgagccgcgccg

SEQ ID NO: 5642310 - DNA, 25 bp, Homo sapien
cggcgcggctcgccgcctttccgcc

SEQ ID NO: 5642311 - DNA, 25 bp, Homo sapien
caaacagtcgggaacatatagggag

SEQ ID NO: 5642312 - DNA, 25 bp, Homo sapien
ctccctatatgttcccgactgtttg

SEQ ID NO: 5642313 - DNA, 25 bp, Homo sapien
tgggaatttccgaagtacattattt

SEQ ID NO: 5642314 - DNA, 25 bp, Homo sapien
aaataatgtacttcggaaattccca

SEQ ID NO: 5642315 - DNA, 25 bp, Homo sapien
cggtcccttaagtggacgactgtgt

SEQ ID NO: 5642316 - DNA, 25 bp, Homo sapien
acacagtcgtccacttaagggaccg

SEQ ID NO: 5642317 - DNA, 25 bp, Homo sapien
gtttctcgcgggtgacaaagaacgg

SEQ ID NO: 5642318 - DNA, 25 bp, Homo sapien
ccgttctttgtcacccgcgagaaac

SEQ ID NO: 5642319 - DNA, 25 bp, Homo sapien
acacggttaagaacttgttactcaa

SEQ ID NO: 5642320 - DNA, 25 bp, Homo sapien
ttgagtaacaagttcttaaccgtgt

SEQ ID NO: 5642321 - DNA, 25 bp, Homo sapien
accgcgactgtctcggagcgcgggc

SEQ ID NO: 5642322 - DNA, 25 bp, Homo sapien
gcccgcgctccgagacagtcgcggt

SEQ ID NO: 5642323 - DNA, 25 bp, Homo sapien
ggcgccgggttaatcgcgcgccgcg

SEQ ID NO: 5642324 - DNA, 25 bp, Homo sapien
cgcggcgcgcgattaacccggcgcc

SEQ ID NO: 5642325 - DNA, 25 bp, Homo sapien
cttgtcattatcatagactctaaac

SEQ ID NO: 5642326 - DNA, 25 bp, Homo sapien
gtttagagtctatgataatgacaag

SEQ ID NO: 5642327 - DNA, 25 bp, Homo sapien
gacaactatttactcctattacatt

SEQ ID NO: 5642328 - DNA, 25 bp, Homo sapien
aatgtaataggagtaaatagttgtc

SEQ ID NO: 5642329 - DNA, 25 bp, Homo sapien
tcgcgaccgcgtctgggcggtggtg

SEQ ID NO: 5642330 - DNA, 25 bp, Homo sapien
caccaccgcccagacgcggtcgcga

SEQ ID NO: 5642331 - DNA, 25 bp, Homo sapien
gggaggaccatgaccgcaccgcaac

SEQ ID NO: 5642332 - DNA, 25 bp, Homo sapien
gttgcggtgcggtcatggtcctccc

SEQ ID NO: 5642333 - DNA, 25 bp, Homo sapien
acctagaccggtcgcaagtgttcga

SEQ ID NO: 5642334 - DNA, 25 bp, Homo sapien
tcgaacacttgcgaccggtctaggt

SEQ ID NO: 5642335 - DNA, 25 bp, Homo sapien
ggagcgagggtaccgcactgaagtc

SEQ ID NO: 5642336 - DNA, 25 bp, Homo sapien
gacttcagtgcggtaccctcgctcc

SEQ ID NO: 5642337 - DNA, 25 bp, Homo sapien
taaattgtaatagtacacatgtcgg

SEQ ID NO: 5642338 - DNA, 25 bp, Homo sapien
ccgacatgtgtactattacaattta

SEQ ID NO: 5642339 - DNA, 25 bp, Homo sapien
cacgcctcacgatcgacctatagaa

SEQ ID NO: 5642340 - DNA, 25 bp, Homo sapien
ttctataggtcgatcgtgaggcgtg

SEQ ID NO: 5642341 - DNA, 25 bp, Homo sapien
cctatgtctccccagtcgagtctga

SEQ ID NO: 5642342 - DNA, 25 bp, Homo sapien
tcagactcgactggggagacatagg

SEQ ID NO: 5642343 - DNA, 25 bp, Homo sapien
tagttcttaaaggaaatctcttaat

SEQ ID NO: 5642344 - DNA, 25 bp, Homo sapien
attaagagatttcctttaagaacta

SEQ ID NO: 5642345 - DNA, 25 bp, Homo sapien
tccccgggactgtctacgacgtgtg

SEQ ID NO: 5642346 - DNA, 25 bp, Homo sapien
cacacgtcgtagacagtcccgggga

SEQ ID NO: 5642347 - DNA, 25 bp, Homo sapien
ggggtccgggagtcaggttcgtcga

SEQ ID NO: 5642348 - DNA, 25 bp, Homo sapien
tcgacgaacctgactcccggacccc

SEQ ID NO: 5642349 - DNA, 25 bp, Homo sapien
gacgcgtcccctccccgtcgtggtc

SEQ ID NO: 5642350 - DNA, 25 bp, Homo sapien
gaccacgacggggaggggacgcgtc

SEQ ID NO: 5642351 - DNA, 25 bp, Homo sapien
ggcacggggccacccacgaggggcg

SEQ ID NO: 5642352 - DNA, 25 bp, Homo sapien
cgcccctcgtgggtggccccgtgcc

SEQ ID NO: 5642353 - DNA, 25 bp, Homo sapien
tggtgacaacacgaatataattatt

SEQ ID NO: 5642354 - DNA, 25 bp, Homo sapien
aataattatattcgtgttgtcacca

SEQ ID NO: 5642355 - DNA, 25 bp, Homo sapien
taggaactgatgactcttatgatat

SEQ ID NO: 5642356 - DNA, 25 bp, Homo sapien
atatcataagagtcatcagttccta

SEQ ID NO: 5642357 - DNA, 25 bp, Homo sapien
cctgggacccttcagcggttctcgg

SEQ ID NO: 5642358 - DNA, 25 bp, Homo sapien
ccgagaaccgctgaagggtcccagg

SEQ ID NO: 5642359 - DNA, 25 bp, Homo sapien
tcaccaccgcagtatcctcctccac

SEQ ID NO: 5642360 - DNA, 25 bp, Homo sapien
gtggaggaggatactgcggtggtga

SEQ ID NO: 5642361 - DNA, 25 bp, Homo sapien
gacctggcgtctgcgcgccatcacg

SEQ ID NO: 5642362 - DNA, 25 bp, Homo sapien
cgtgatggcgcgcagacgccaggtc

SEQ ID NO: 5642363 - DNA, 25 bp, Homo sapien
ctggtgtcacttaacccgacccaag

SEQ ID NO: 5642364 - DNA, 25 bp, Homo sapien
cttgggtcgggttaagtgacaccag

SEQ ID NO: 5642365 - DNA, 25 bp, Homo sapien
tatagttacagtcgtgtgacaaacg

SEQ ID NO: 5642366 - DNA, 25 bp, Homo sapien
cgtttgtcacacgactgtaactata

SEQ ID NO: 5642367 - DNA, 25 bp, Homo sapien
gtgattgtcgtttacccagtatcaa

SEQ ID NO: 5642368 - DNA, 25 bp, Homo sapien
ttgatactgggtaaacgacaatcac

SEQ ID NO: 5642369 - DNA, 25 bp, Homo sapien
ggttgtttataattatggaagtact

SEQ ID NO: 5642370 - DNA, 25 bp, Homo sapien
agtacttccataattataaacaacc

SEQ ID NO: 5642371 - DNA, 25 bp, Homo sapien
gctgacaggactctcgagaaaccgt

SEQ ID NO: 5642372 - DNA, 25 bp, Homo sapien
acggtttctcgagagtcctgtcagc

SEQ ID NO: 5642373 - DNA, 25 bp, Homo sapien
gaggctcgtgaggtcgaccttcgca

SEQ ID NO: 5642374 - DNA, 25 bp, Homo sapien
tgcgaaggtcgacctcacgagcctc

SEQ ID NO: 5642375 - DNA, 25 bp, Homo sapien
tccaccacacagagccctcccccgg

SEQ ID NO: 5642376 - DNA, 25 bp, Homo sapien
ccgggggagggctctgtgtggtgga

SEQ ID NO: 5642377 - DNA, 25 bp, Homo sapien
tgtgcgttgtgtgtcaatcctaaat

SEQ ID NO: 5642378 - DNA, 25 bp, Homo sapien
atttaggattgacacacaacgcaca

SEQ ID NO: 5642379 - DNA, 25 bp, Homo sapien
atgttccatattcgatgtatagaga

SEQ ID NO: 5642380 - DNA, 25 bp, Homo sapien
tctctatacatcgaatatggaacat

SEQ ID NO: 5642381 - DNA, 25 bp, Homo sapien
gctagcgctcccaggcggcaaggct

SEQ ID NO: 5642382 - DNA, 25 bp, Homo sapien
agccttgccgcctgggagcgctagc

SEQ ID NO: 5642383 - DNA, 25 bp, Homo sapien
aagagaacctttatgatatcttagg

SEQ ID NO: 5642384 - DNA, 25 bp, Homo sapien
cctaagatatcataaaggttctctt

SEQ ID NO: 5642385 - DNA, 25 bp, Homo sapien
gcttcaaaatatggagacgtgaacg

SEQ ID NO: 5642386 - DNA, 25 bp, Homo sapien
cgttcacgtctccatattttgaagc

SEQ ID NO: 5642387 - DNA, 25 bp, Homo sapien
cctatgacgtagtccttcatcatgt

SEQ ID NO: 5642388 - DNA, 25 bp, Homo sapien
acatgatgaaggactacgtcatagg

SEQ ID NO: 5642389 - DNA, 25 bp, Homo sapien
gaaaggacacaactaaacatctagg

SEQ ID NO: 5642390 - DNA, 25 bp, Homo sapien
cctagatgtttagttgtgtcctttc

SEQ ID NO: 5642391 - DNA, 25 bp, Homo sapien
aattactgtgtcgtagaggccgtgg

SEQ ID NO: 5642392 - DNA, 25 bp, Homo sapien
ccacggcctctacgacacagtaatt

SEQ ID NO: 5642393 - DNA, 25 bp, Homo sapien
gagtagaccattctgggaccaaagg

SEQ ID NO: 5642394 - DNA, 25 bp, Homo sapien
cctttggtcccagaatggtctactc

SEQ ID NO: 5642395 - DNA, 25 bp, Homo sapien
accaagaaaacgcaaagaataatat

SEQ ID NO: 5642396 - DNA, 25 bp, Homo sapien
atattattctttgcgttttcttggt

SEQ ID NO: 5642397 - DNA, 25 bp, Homo sapien
cagtcttcagcccggagaagacggg

SEQ ID NO: 5642398 - DNA, 25 bp, Homo sapien
cccgtcttctccgggctgaagactg

SEQ ID NO: 5642399 - DNA, 25 bp, Homo sapien
gacagggacaggtgcgaactcctcg

SEQ ID NO: 5642400 - DNA, 25 bp, Homo sapien
cgaggagttcgcacctgtccctgtc

SEQ ID NO: 5642401 - DNA, 25 bp, Homo sapien
gtcaaactgttcaactccaggtcct

SEQ ID NO: 5642402 - DNA, 25 bp, Homo sapien
aggacctggagttgaacagtttgac

SEQ ID NO: 5642403 - DNA, 25 bp, Homo sapien
agtcacatagaaaggtcgaagtccg

SEQ ID NO: 5642404 - DNA, 25 bp, Homo sapien
cggacttcgacctttctatgtgact

SEQ ID NO: 5642405 - DNA, 25 bp, Homo sapien
tattttccaccaatataatgaatat

SEQ ID NO: 5642406 - DNA, 25 bp, Homo sapien
atattcattatattggtggaaaata

SEQ ID NO: 5642407 - DNA, 25 bp, Homo sapien
gagacccgtggtatcataagaacag

SEQ ID NO: 5642408 - DNA, 25 bp, Homo sapien
ctgttcttatgataccacgggtctc

SEQ ID NO: 5642409 - DNA, 25 bp, Homo sapien
gaaaattgacaagtaactttagtaa

SEQ ID NO: 5642410 - DNA, 25 bp, Homo sapien
ttactaaagttacttgtcaattttc

SEQ ID NO: 5642411 - DNA, 25 bp, Homo sapien
gacgcgtccgggtcacccctcccgc

SEQ ID NO: 5642412 - DNA, 25 bp, Homo sapien
gcgggaggggtgacccggacgcgtc

SEQ ID NO: 5642413 - DNA, 25 bp, Homo sapien
gggtcgacttccacgccgcccggcc

SEQ ID NO: 5642414 - DNA, 25 bp, Homo sapien
ggccgggcggcgtggaagtcgaccc

SEQ ID NO: 5642415 - DNA, 25 bp, Homo sapien
ttatgatttctaccaccgtaaaagg

SEQ ID NO: 5642416 - DNA, 25 bp, Homo sapien
ccttttacggtggtagaaatcataa

SEQ ID NO: 5642417 - DNA, 25 bp, Homo sapien
gtaggacgcttctcccgccggagag

SEQ ID NO: 5642418 - DNA, 25 bp, Homo sapien
ctctccggcgggagaagcgtcctac

SEQ ID NO: 5642419 - DNA, 25 bp, Homo sapien
attctgtcttgtccactgctctctc

SEQ ID NO: 5642420 - DNA, 25 bp, Homo sapien
gagagagcagtggacaagacagaat

SEQ ID NO: 5642421 - DNA, 25 bp, Homo sapien
taacaggtgagttttctatttagaa

SEQ ID NO: 5642422 - DNA, 25 bp, Homo sapien
ttctaaatagaaaactcacctgtta

SEQ ID NO: 5642423 - DNA, 25 bp, Homo sapien
cctaaatggaagagaggtatattcc

SEQ ID NO: 5642424 - DNA, 25 bp, Homo sapien
ggaatatacctctcttccatttagg

SEQ ID NO: 5642425 - DNA, 25 bp, Homo sapien
agaggaacgactggcaacctcgaaa

SEQ ID NO: 5642426 - DNA, 25 bp, Homo sapien
tttcgaggttgccagtcgttcctct

SEQ ID NO: 5642427 - DNA, 25 bp, Homo sapien
ttgtcgttttgggtcggggcgcgtc

SEQ ID NO: 5642428 - DNA, 25 bp, Homo sapien
gacgcgccccgacccaaaacgacaa

SEQ ID NO: 5642429 - DNA, 25 bp, Homo sapien
agtacacgagtttcatataaagtaa

SEQ ID NO: 5642430 - DNA, 25 bp, Homo sapien
ttactttatatgaaactcgtgtact

SEQ ID NO: 5642431 - DNA, 25 bp, Homo sapien
gggtctagaccagtcgggccggtgg

SEQ ID NO: 5642432 - DNA, 25 bp, Homo sapien
ccaccggcccgactggtctagaccc

SEQ ID NO: 5642433 - DNA, 25 bp, Homo sapien
tgctactacaatgggaacgggttcg

SEQ ID NO: 5642434 - DNA, 25 bp, Homo sapien
cgaacccgttcccattgtagtagca

SEQ ID NO: 5642435 - DNA, 25 bp, Homo sapien
ggaccggacgcgtcagagggccttg

SEQ ID NO: 5642436 - DNA, 25 bp, Homo sapien
caaggccctctgacgcgtccggtcc

SEQ ID NO: 5642437 - DNA, 25 bp, Homo sapien
ccagggtgcctctcggaggagggtt

SEQ ID NO: 5642438 - DNA, 25 bp, Homo sapien
aaccctcctccgagaggcaccctgg

SEQ ID NO: 5642439 - DNA, 25 bp, Homo sapien
tccgctgcgcccgtcccggcctggg

SEQ ID NO: 5642440 - DNA, 25 bp, Homo sapien
cccaggccgggacgggcgcagcgga

SEQ ID NO: 5642441 - DNA, 25 bp, Homo sapien
gaatagttctatttggtggtgttgg

SEQ ID NO: 5642442 - DNA, 25 bp, Homo sapien
ccaacaccaccaaatagaactattc

SEQ ID NO: 5642443 - DNA, 25 bp, Homo sapien
atcgtcaagaattctggaaggttgg

SEQ ID NO: 5642444 - DNA, 25 bp, Homo sapien
ccaaccttccagaattcttgacgat

SEQ ID NO: 5642445 - DNA, 25 bp, Homo sapien
tcatattgagatgaattacatcaaa

SEQ ID NO: 5642446 - DNA, 25 bp, Homo sapien
tttgatgtaattcatctcaatatga

SEQ ID NO: 5642447 - DNA, 25 bp, Homo sapien
caggagtaatgggtctatgagtcgt

SEQ ID NO: 5642448 - DNA, 25 bp, Homo sapien
acgactcatagacccattactcctg

SEQ ID NO: 5642449 - DNA, 25 bp, Homo sapien
ctccgtcaacagatgtagctgtcac

SEQ ID NO: 5642450 - DNA, 25 bp, Homo sapien
gtgacagctacatctgttgacggag

SEQ ID NO: 5642451 - DNA, 25 bp, Homo sapien
gactctgcgggacacccagcccctc

SEQ ID NO: 5642452 - DNA, 25 bp, Homo sapien
gaggggctgggtgtcccgcagagtc

SEQ ID NO: 5642453 - DNA, 25 bp, Homo sapien
gcctctagtcactgggccgtccctc

SEQ ID NO: 5642454 - DNA, 25 bp, Homo sapien
gagggacggcccagtgactagaggc

SEQ ID NO: 5642455 - DNA, 25 bp, Homo sapien
aatttacacaagagtcaccaagtta

SEQ ID NO: 5642456 - DNA, 25 bp, Homo sapien
taacttggtgactcttgtgtaaatt

SEQ ID NO: 5642457 - DNA, 25 bp, Homo sapien
tctcttggaaacaccccgacgcaag

SEQ ID NO: 5642458 - DNA, 25 bp, Homo sapien
cttgcgtcggggtgtttccaagaga

SEQ ID NO: 5642459 - DNA, 25 bp, Homo sapien
cgggacgactagtgaggccatgagt

SEQ ID NO: 5642460 - DNA, 25 bp, Homo sapien
actcatggcctcactagtcgtcccg

SEQ ID NO: 5642461 - DNA, 25 bp, Homo sapien
cccgacgccgaccctcgccgtggtg

SEQ ID NO: 5642462 - DNA, 25 bp, Homo sapien
caccacggcgagggtcggcgtcggg

SEQ ID NO: 5642463 - DNA, 25 bp, Homo sapien
agtaccttatgtagcccaagaaatt

SEQ ID NO: 5642464 - DNA, 25 bp, Homo sapien
ctcatcgcattctccaggccttacg

SEQ ID NO: 5642465 - DNA, 25 bp, Homo sapien
tccagtgcttccacagagattagcc

SEQ ID NO: 5642466 - DNA, 25 bp, Homo sapien
tggctatgagaaccccacctacaaa

SEQ ID NO: 5642467 - DNA, 25 bp, Homo sapien
gtatttttattttcctgtgactgtt

SEQ ID NO: 5642468 - DNA, 25 bp, Homo sapien
gtgtatttcgagacctctgcagatg

SEQ ID NO: 5642469 - DNA, 25 bp, Homo sapien
ctatataaagtactactgtagaact

SEQ ID NO: 5642470 - DNA, 25 bp, Homo sapien
gatggctctggagaactacctggct

SEQ ID NO: 5642471 - DNA, 25 bp, Homo sapien
agcctcaaatcgcaatgttttgtgg

SEQ ID NO: 5642472 - DNA, 25 bp, Homo sapien
taagaacctccccaaagcagagagg

SEQ ID NO: 5642473 - DNA, 25 bp, Homo sapien
gtatccagagctacagatcacaaat

SEQ ID NO: 5642474 - DNA, 25 bp, Homo sapien
ctgtgtcaaaagaagaggaagagga

SEQ ID NO: 5642475 - DNA, 25 bp, Homo sapien
agcacttccaagccatggttaaagc

SEQ ID NO: 5642476 - DNA, 25 bp, Homo sapien
ggagatcccaccgttccaccccttc

SEQ ID NO: 5642477 - DNA, 25 bp, Homo sapien
agctacagatcacaaatgtgatgga

SEQ ID NO: 5642478 - DNA, 25 bp, Homo sapien
aggaaattactcatgatgtcaaagc

SEQ ID NO: 5642479 - DNA, 25 bp, Homo sapien
agcgacggcaccatgtcagacaagg

SEQ ID NO: 5642480 - DNA, 25 bp, Homo sapien
ctgtggacgtccgggtgagctctga

SEQ ID NO: 5642481 - DNA, 25 bp, Homo sapien
atgctcgcttccagaaggctaagga

SEQ ID NO: 5642482 - DNA, 25 bp, Homo sapien
tgacacatctccacgtgattgaaga

SEQ ID NO: 5642483 - DNA, 25 bp, Homo sapien
tctgaggagagtgaggagatcccac

SEQ ID NO: 5642484 - DNA, 25 bp, Homo sapien
actccttaatatgatctgtggagaa

SEQ ID NO: 5642485 - DNA, 25 bp, Homo sapien
tcagggaatgaccttatatagctac

SEQ ID NO: 5642486 - DNA, 25 bp, Homo sapien
gttcacttccccttccaactatgtc

SEQ ID NO: 5642487 - DNA, 25 bp, Homo sapien
tatttgacattcttcactgtctgtt

SEQ ID NO: 5642488 - DNA, 25 bp, Homo sapien
cggccttgtgacattcactcagaga

SEQ ID NO: 5642489 - DNA, 25 bp, Homo sapien
ctttgttacacctttcaagtgtctc

SEQ ID NO: 5642490 - DNA, 25 bp, Homo sapien
tgccttggcgctggccggctacatc

SEQ ID NO: 5642491 - DNA, 25 bp, Homo sapien
aatagggaactgtaatggccactga

SEQ ID NO: 5642492 - DNA, 25 bp, Homo sapien
aaaaagcaatgcaagagtcgctttg

SEQ ID NO: 5642493 - DNA, 25 bp, Homo sapien
accggccttgtgacattcactcaga

SEQ ID NO: 5642494 - DNA, 25 bp, Homo sapien
tggggtagaccagttccatggcact

SEQ ID NO: 5642495 - DNA, 25 bp, Homo sapien
aatgatctattgcagatatttgatg

SEQ ID NO: 5642496 - DNA, 25 bp, Homo sapien
ctttctccaaaggcactgaccctcg

SEQ ID NO: 5642497 - DNA, 25 bp, Homo sapien
cggcctcatcgcattctccaggcct

SEQ ID NO: 5642498 - DNA, 25 bp, Homo sapien
gaaatcccaggtgatgacacatctc

SEQ ID NO: 5642499 - DNA, 25 bp, Homo sapien
aacaggaacaattttgagtctgagg

SEQ ID NO: 5642500 - DNA, 25 bp, Homo sapien
aatggacagggtaaagaaggaatgg

SEQ ID NO: 5642501 - DNA, 25 bp, Homo sapien
actgaagcagatctggaagacttca

SEQ ID NO: 5642502 - DNA, 25 bp, Homo sapien
atctattgcagatatttgatgtagt

SEQ ID NO: 5642503 - DNA, 25 bp, Homo sapien
agaggcagagcttcaagctaagaac

SEQ ID NO: 5642504 - DNA, 25 bp, Homo sapien
tgaagaggaagactatgatgtttat

SEQ ID NO: 5642505 - DNA, 25 bp, Homo sapien
agctccttcaggagcagcgtgcaga

SEQ ID NO: 5642506 - DNA, 25 bp, Homo sapien
actcagggaatgaccttatatagct

SEQ ID NO: 5642507 - DNA, 25 bp, Homo sapien
tgacattcactcagagaagaccaca

SEQ ID NO: 5642508 - DNA, 25 bp, Homo sapien
aaaggcactgaccctcggcctctac

SEQ ID NO: 5642509 - DNA, 25 bp, Homo sapien
tgccggagggacaaaaagcaatgca

SEQ ID NO: 5642510 - DNA, 25 bp, Homo sapien
gcccaggagagaacacggggaggtt

SEQ ID NO: 5642511 - DNA, 25 bp, Homo sapien
gcccagatgaaatcccaggtgatga

SEQ ID NO: 5642512 - DNA, 25 bp, Homo sapien
cccactgcgggaggacttcagtctg

SEQ ID NO: 5642513 - DNA, 25 bp, Homo sapien
agaacaaagatcgcttacataccat

SEQ ID NO: 5642514 - DNA, 25 bp, Homo sapien
ccacaccaaggaggcggccgctggc

SEQ ID NO: 5642515 - DNA, 25 bp, Homo sapien
ggcggcccagatgaaatcccaggtg

SEQ ID NO: 5642516 - DNA, 25 bp, Homo sapien
ccattgtattgtctgacacatgctc

SEQ ID NO: 5642517 - DNA, 25 bp, Homo sapien
ccttggcgctggccggctacatcga

SEQ ID NO: 5642518 - DNA, 25 bp, Homo sapien
acaaagattattggatctgtgtcaa

SEQ ID NO: 5642519 - DNA, 25 bp, Homo sapien
ctgacacatgctctcaatatataat

SEQ ID NO: 5642520 - DNA, 25 bp, Homo sapien
ggaagaggcagtatggcaccatcag

SEQ ID NO: 5642521 - DNA, 25 bp, Homo sapien
atggttaaagctttagagaaggaag

SEQ ID NO: 5642522 - DNA, 25 bp, Homo sapien
acagagattagcctgtagcttatat

SEQ ID NO: 5642523 - DNA, 25 bp, Homo sapien
gtgcgctttatatatggtggctgcg

SEQ ID NO: 5642524 - DNA, 25 bp, Homo sapien
cacggtcatcgtcatcagcctggtg

SEQ ID NO: 5642525 - DNA, 25 bp, Homo sapien
tgtggaaagctttgaacaattgtgt

SEQ ID NO: 5642526 - DNA, 25 bp, Homo sapien
aagagctgctttgaaacaaaagaag

SEQ ID NO: 5642527 - DNA, 25 bp, Homo sapien
gctgtgtgtaaagcgatgattcctc

SEQ ID NO: 5642528 - DNA, 25 bp, Homo sapien
cattcactgtcctggcttttattta

SEQ ID NO: 5642529 - DNA, 25 bp, Homo sapien
aggggctgcgtctgacatcctgacc

SEQ ID NO: 5642530 - DNA, 25 bp, Homo sapien
ttccgatcgactgccaagcagcagc

SEQ ID NO: 5642531 - DNA, 25 bp, Homo sapien
atgaaatcccaggtgatgacacatc

SEQ ID NO: 5642532 - DNA, 25 bp, Homo sapien
tcccacgattccgatcgactgccaa

SEQ ID NO: 5642533 - DNA, 25 bp, Homo sapien
accgcggccgccgcagccacgggca

SEQ ID NO: 5642534 - DNA, 25 bp, Homo sapien
acagatcacaaatgtgatggaggca

SEQ ID NO: 5642535 - DNA, 25 bp, Homo sapien
ctctactttgtcccctcacctccac

SEQ ID NO: 5642536 - DNA, 25 bp, Homo sapien
cacctttcaagtgtctcgtgggtga

SEQ ID NO: 5642537 - DNA, 25 bp, Homo sapien
aaccaaagcctctctctgctctaca

SEQ ID NO: 5642538 - DNA, 25 bp, Homo sapien
agcctctctctgctctacaaagtac

SEQ ID NO: 5642539 - DNA, 25 bp, Homo sapien
tgagagccgcgcgctagagcgaccc

SEQ ID NO: 5642540 - DNA, 25 bp, Homo sapien
tgaacattcagactgggaaatggga

SEQ ID NO: 5642541 - DNA, 25 bp, Homo sapien
ctccataaaagtcctgtcaccaagg

SEQ ID NO: 5642542 - DNA, 25 bp, Homo sapien
caaagcagagaggcagactctgatt

SEQ ID NO: 5642543 - DNA, 25 bp, Homo sapien
cgcctgccttggcgctggccggcta

SEQ ID NO: 5642544 - DNA, 25 bp, Homo sapien
aaggttctggtaacctgtggtgtat

SEQ ID NO: 5642545 - DNA, 25 bp, Homo sapien
gaactgtaatggccactgaagcacg

SEQ ID NO: 5642546 - DNA, 25 bp, Homo sapien
cactgcgggaggacttcagtctgag

SEQ ID NO: 5642547 - DNA, 25 bp, Homo sapien
tcacctacaaactccttaatatgat

SEQ ID NO: 5642548 - DNA, 25 bp, Homo sapien
gtgctgagaacaaagatcgcttaca

SEQ ID NO: 5642549 - DNA, 25 bp, Homo sapien
gaccacaccaaggaggcggccgctg

SEQ ID NO: 5642550 - DNA, 25 bp, Homo sapien
gacgttaaaggcattttattccagc

SEQ ID NO: 5642551 - DNA, 25 bp, Homo sapien
agttggaggcctcgaggaagagcgg

SEQ ID NO: 5642552 - DNA, 25 bp, Homo sapien
ttctagagagcttagtgtatacaga

SEQ ID NO: 5642553 - DNA, 25 bp, Homo sapien
gcagccacgggcaggctcctgcttc

SEQ ID NO: 5642554 - DNA, 25 bp, Homo sapien
tgacggggccctgccgggccgtgat

SEQ ID NO: 5642555 - DNA, 25 bp, Homo sapien
ttgcagccaatgccggaacaggatt

SEQ ID NO: 5642556 - DNA, 25 bp, Homo sapien
actacctggctgccttgcagtctga

SEQ ID NO: 5642557 - DNA, 25 bp, Homo sapien
gattaacagtaagaataaagtggat

SEQ ID NO: 5642558 - DNA, 25 bp, Homo sapien
ggtgaatttgtaagtgatgtcctgc

SEQ ID NO: 5642559 - DNA, 25 bp, Homo sapien
ggagtccgagtgtgtgagcttgaga

SEQ ID NO: 5642560 - DNA, 25 bp, Homo sapien
agagcgtcacctgaacaagatgcag

SEQ ID NO: 5642561 - DNA, 25 bp, Homo sapien
gctcacggcgcctgccttggcgctg

SEQ ID NO: 5642562 - DNA, 25 bp, Homo sapien
tgccaggggctgcgtctgacatcct

SEQ ID NO: 5642563 - DNA, 25 bp, Homo sapien
gttagtattgacaactggtgccgga

SEQ ID NO: 5642564 - DNA, 25 bp, Homo sapien
gctgccaggggctgcgtctgacatc

SEQ ID NO: 5642565 - DNA, 25 bp, Homo sapien
gatgcagatttaggtggcagggagc

SEQ ID NO: 5642566 - DNA, 25 bp, Homo sapien
cctccaccccctcctgtcaccggcc

SEQ ID NO: 5642567 - DNA, 25 bp, Homo sapien
aggaatgggaagaggcagagcttca

SEQ ID NO: 5642568 - DNA, 25 bp, Homo sapien
gaacaagatgcagaaccatggctat

SEQ ID NO: 5642569 - DNA, 25 bp, Homo sapien
tgaccctcggcctctactttgtccc

SEQ ID NO: 5642570 - DNA, 25 bp, Homo sapien
ctgctcccaggaggcgatgacgggg

SEQ ID NO: 5642571 - DNA, 25 bp, Homo sapien
gaaattactcatgatgtcaaagctg

SEQ ID NO: 5642572 - DNA, 25 bp, Homo sapien
ccccacttccattgtattgtctgac

SEQ ID NO: 5642573 - DNA, 25 bp, Homo sapien
gagcatgctcgcttccagaaggcta

SEQ ID NO: 5642574 - DNA, 25 bp, Homo sapien
gatctgtggagaatgtacacagttt

SEQ ID NO: 5642575 - DNA, 25 bp, Homo sapien
agaggaaattgatgagctccttcag

SEQ ID NO: 5642576 - DNA, 25 bp, Homo sapien
tgtaagtgatgtcctgctagttcca

SEQ ID NO: 5642577 - DNA, 25 bp, Homo sapien
aacaaaagaagaagttcttcagtac

SEQ ID NO: 5642578 - DNA, 25 bp, Homo sapien
ctcccaggaggcgatgacggggccc

SEQ ID NO: 5642579 - DNA, 25 bp, Homo sapien
gtaatgcttgtacagttgatgtcga

SEQ ID NO: 5642580 - DNA, 25 bp, Homo sapien
ggaagatgaagaggaagactatgat

SEQ ID NO: 5642581 - DNA, 25 bp, Homo sapien
caaatgtgatggaggcaaaccagcg

SEQ ID NO: 5642582 - DNA, 25 bp, Homo sapien
aatcccaggtgatgacacatctcca

SEQ ID NO: 5642583 - DNA, 25 bp, Homo sapien
ttgttacacctttcaagtgtctcgt

SEQ ID NO: 5642584 - DNA, 25 bp, Homo sapien
ctgaggaagaggcagtatggcacca

SEQ ID NO: 5642585 - DNA, 25 bp, Homo sapien
cgtcattaccagcatgtgttggctg

SEQ ID NO: 5642586 - DNA, 25 bp, Homo sapien
agattagcctgtagcttatatttga

SEQ ID NO: 5642587 - DNA, 25 bp, Homo sapien
cgcggcagccctggcggagggatgc

SEQ ID NO: 5642588 - DNA, 25 bp, Homo sapien
cagtttttccacaaagagcggatgg

SEQ ID NO: 5642589 - DNA, 25 bp, Homo sapien
tgacaccttcaaaggagatgactac

SEQ ID NO: 5642590 - DNA, 25 bp, Homo sapien
gcagccgctgccaggggctgcgtct

SEQ ID NO: 5642591 - DNA, 25 bp, Homo sapien
ccccttccaactatgtccagatgtg

SEQ ID NO: 5642592 - DNA, 25 bp, Homo sapien
ggtggggctcacggcgcctgccttg

SEQ ID NO: 5642593 - DNA, 25 bp, Homo sapien
gaggaagaggcagtatggcaccatc

SEQ ID NO: 5642594 - DNA, 25 bp, Homo sapien
cggcagccctggcggagggatgcag

SEQ ID NO: 5642595 - DNA, 25 bp, Homo sapien
tcagcctggtgatgctgaggaagag

SEQ ID NO: 5642596 - DNA, 25 bp, Homo sapien
tggccattgccacggtcatcgtcat

SEQ ID NO: 5642597 - DNA, 25 bp, Homo sapien
tccaccccttccaccccttcccagc

SEQ ID NO: 5642598 - DNA, 25 bp, Homo sapien
acaaagtaccttatgtagcccaaga

SEQ ID NO: 5642599 - DNA, 25 bp, Homo sapien
gtgattgaagaaaggaggaaccaaa

SEQ ID NO: 5642600 - DNA, 25 bp, Homo sapien
tgtgacattcactcagagaagacca

SEQ ID NO: 5642601 - DNA, 25 bp, Homo sapien
gcgatgattcctccaactcctctgc

SEQ ID NO: 5642602 - DNA, 25 bp, Homo sapien
gtgtccgctgctgctttccttcgga

SEQ ID NO: 5642603 - DNA, 25 bp, Homo sapien
tcaatctcagagacccctgtggacg

SEQ ID NO: 5642604 - DNA, 25 bp, Homo sapien
acacatctccacgtgattgaagaaa

SEQ ID NO: 5642605 - DNA, 25 bp, Homo sapien
cttgtacagttgatgtcgatgctca

SEQ ID NO: 5642606 - DNA, 25 bp, Homo sapien
gtcagacaaggaaattactcatgat

SEQ ID NO: 5642607 - DNA, 25 bp, Homo sapien
gattcggcaccgcaaccgaatggac

SEQ ID NO: 5642608 - DNA, 25 bp, Homo sapien
gaactacctggctgccttgcagtct

SEQ ID NO: 5642609 - DNA, 25 bp, Homo sapien
tcaccagcactggcacacggtagtc

SEQ ID NO: 5642610 - DNA, 25 bp, Homo sapien
ggctgtccctgaaactgagtctgtg

SEQ ID NO: 5642611 - DNA, 25 bp, Homo sapien
accccttcccagccctacctgagaa

SEQ ID NO: 5642612 - DNA, 25 bp, Homo sapien
taacctgtggtgtatttttattttc

SEQ ID NO: 5642613 - DNA, 25 bp, Homo sapien
aaccccacctacaaatacctggagc

SEQ ID NO: 5642614 - DNA, 25 bp, Homo sapien
tgagctttcaggaagttgctgagaa

SEQ ID NO: 5642615 - DNA, 25 bp, Homo sapien
tcacggcgcctgccttggcgctggc

SEQ ID NO: 5642616 - DNA, 25 bp, Homo sapien
actgtagaactgcaatttccattct

SEQ ID NO: 5642617 - DNA, 25 bp, Homo sapien
gcagactctgattcagcacttccaa

SEQ ID NO: 5642618 - DNA, 25 bp, Homo sapien
agcgggaatccgtgggcccactgcg

SEQ ID NO: 5642619 - DNA, 25 bp, Homo sapien
aagaaggaatgggaagaggcagagc

SEQ ID NO: 5642620 - DNA, 25 bp, Homo sapien
atggccactgaagcacgtgagagac

SEQ ID NO: 5642621 - DNA, 25 bp, Homo sapien
cctgtggtgtatttttattttcctg

SEQ ID NO: 5642622 - DNA, 25 bp, Homo sapien
gtctccataaaagtcctgtcaccaa

SEQ ID NO: 5642623 - DNA, 25 bp, Homo sapien
caccatgtcagacaaggaaattact

SEQ ID NO: 5642624 - DNA, 25 bp, Homo sapien
ctattgcagatatttgatgtagttt

SEQ ID NO: 5642625 - DNA, 25 bp, Homo sapien
atgtcgattttcaataatagactta

SEQ ID NO: 5642626 - DNA, 25 bp, Homo sapien
ccagcgtcttctagagagcttagtg

SEQ ID NO: 5642627 - DNA, 25 bp, Homo sapien
ggccttacggcgttatgtccgtgct

SEQ ID NO: 5642628 - DNA, 25 bp, Homo sapien
tccaccccctcctgtcaccggcctt

SEQ ID NO: 5642629 - DNA, 25 bp, Homo sapien
ggcaccaagagctgctttgaaacaa

SEQ ID NO: 5642630 - DNA, 25 bp, Homo sapien
acctgaacaagatgcagaaccatgg

SEQ ID NO: 5642631 - DNA, 25 bp, Homo sapien
ctgtggacactgtggaaagctttga

SEQ ID NO: 5642632 - DNA, 25 bp, Homo sapien
agatgagggtgtccgctgctgcttt

SEQ ID NO: 5642633 - DNA, 25 bp, Homo sapien
accagttccatggcactgaatatgt

SEQ ID NO: 5642634 - DNA, 25 bp, Homo sapien
aggctgtcgttccggttatgttgtg

SEQ ID NO: 5642635 - DNA, 25 bp, Homo sapien
taccttatgtagcccaagaaattca

SEQ ID NO: 5642636 - DNA, 25 bp, Homo sapien
ccttcaggagcagcgtgcagatatg

SEQ ID NO: 5642637 - DNA, 25 bp, Homo sapien
gcgggaggacttcagtctgagtagc

SEQ ID NO: 5642638 - DNA, 25 bp, Homo sapien
gcaaaccagcgggttagtattgaca

SEQ ID NO: 5642639 - DNA, 25 bp, Homo sapien
gcgctagagcgacccggcgagggat

SEQ ID NO: 5642640 - DNA, 25 bp, Homo sapien
actgtggaaagctttgaacaattgt

SEQ ID NO: 5642641 - DNA, 25 bp, Homo sapien
gagaactacctggctgccttgcagt

SEQ ID NO: 5642642 - DNA, 25 bp, Homo sapien
aacacatcaataaatactttaactt

SEQ ID NO: 5642643 - DNA, 25 bp, Homo sapien
tcttctagagagcttagtgtataca

SEQ ID NO: 5642644 - DNA, 25 bp, Homo sapien
agaaaggaggaaccaaagcctctct

SEQ ID NO: 5642645 - DNA, 25 bp, Homo sapien
aatgagctttcaggaagttgctgag

SEQ ID NO: 5642646 - DNA, 25 bp, Homo sapien
atatgcaggctgtcgttccggttat

SEQ ID NO: 5642647 - DNA, 25 bp, Homo sapien
cctctctggactttctccaaaggca

SEQ ID NO: 5642648 - DNA, 25 bp, Homo sapien
catcgcagtggccattgccacggtc

SEQ ID NO: 5642649 - DNA, 25 bp, Homo sapien
tccccaaagcagagaggcagactct

SEQ ID NO: 5642650 - DNA, 25 bp, Homo sapien
aatgggaacctgatccaacaggcac

SEQ ID NO: 5642651 - DNA, 25 bp, Homo sapien
attgcagatatttgatgtagttttc

SEQ ID NO: 5642652 - DNA, 25 bp, Homo sapien
agtctgaggattattgtatggctgt

SEQ ID NO: 5642653 - DNA, 25 bp, Homo sapien
gtgtgtctccataaaagtcctgtca

SEQ ID NO: 5642654 - DNA, 25 bp, Homo sapien
ctcctggactgtaggactatataaa

SEQ ID NO: 5642655 - DNA, 25 bp, Homo sapien
gatgacacatctccacgtgattgaa

SEQ ID NO: 5642656 - DNA, 25 bp, Homo sapien
ggcgctggccggctacatcgaggct

SEQ ID NO: 5642657 - DNA, 25 bp, Homo sapien
ctggtaacctgtggtgtatttttat

SEQ ID NO: 5642658 - DNA, 25 bp, Homo sapien
gagtagcagtgctctcattggcctg

SEQ ID NO: 5642659 - DNA, 25 bp, Homo sapien
actcagagaagaccacaccaaggag

SEQ ID NO: 5642660 - DNA, 25 bp, Homo sapien
tcaaagctgtctgctcccaggaggc

SEQ ID NO: 5642661 - DNA, 25 bp, Homo sapien
acggcgttatgtccgtgctgagaac

SEQ ID NO: 5642662 - DNA, 25 bp, Homo sapien
ttggctgttgacccagaaaaggcgg

SEQ ID NO: 5642663 - DNA, 25 bp, Homo sapien
aaaaggcggcccagatgaaatccca

SEQ ID NO: 5642664 - DNA, 25 bp, Homo sapien
gtctgtggacactgtggaaagcttt

SEQ ID NO: 5642665 - DNA, 25 bp, Homo sapien
aagatgcagaaccatggctatgaga

SEQ ID NO: 5642666 - DNA, 25 bp, Homo sapien
agacccctgtggacgtccgggtgag

SEQ ID NO: 5642667 - DNA, 25 bp, Homo sapien
cagttgatgtcgatgctcactgctt

SEQ ID NO: 5642668 - DNA, 25 bp, Homo sapien
actcatgatgtcaaagctgtctgct

SEQ ID NO: 5642669 - DNA, 25 bp, Homo sapien
gtacacagtttaaacacatcaataa

SEQ ID NO: 5642670 - DNA, 25 bp, Homo sapien
tttgtgtgaaaggaaagtagtccag

SEQ ID NO: 5642671 - DNA, 25 bp, Homo sapien
ttattttaaatctgaaggttctggt

SEQ ID NO: 5642672 - DNA, 25 bp, Homo sapien
agctttcaggaagttgctgagaaat

SEQ ID NO: 5642673 - DNA, 25 bp, Homo sapien
ttctggtaacctgtggtgtattttt

SEQ ID NO: 5642674 - DNA, 25 bp, Homo sapien
tcgttccggttatgttgtgtaagtc

SEQ ID NO: 5642675 - DNA, 25 bp, Homo sapien
acctgagaacgaaggatctggagtg

SEQ ID NO: 5642676 - DNA, 25 bp, Homo sapien
ccataaaagtcctgtcaccaaggac

SEQ ID NO: 5642677 - DNA, 25 bp, Homo sapien
tgtgctgccctcagacaaagattat

SEQ ID NO: 5642678 - DNA, 25 bp, Homo sapien
gctagagcgacccggcgagggatgg

SEQ ID NO: 5642679 - DNA, 25 bp, Homo sapien
gaacgaaggatctggagtgggagag

SEQ ID NO: 5642680 - DNA, 25 bp, Homo sapien
agagttggaggcctcgaggaagagc

SEQ ID NO: 5642681 - DNA, 25 bp, Homo sapien
caatgcaagagtcgctttgttacac

SEQ ID NO: 5642682 - DNA, 25 bp, Homo sapien
cgtctgacatcctgacctcctggac

SEQ ID NO: 5642683 - DNA, 25 bp, Homo sapien
ccgccacggcctcatcgcattctcc

SEQ ID NO: 5642684 - DNA, 25 bp, Homo sapien
cgaggctcttgcagccaatgccgga

SEQ ID NO: 5642685 - DNA, 25 bp, Homo sapien
aactatgtccagatgtgcaggctcc

SEQ ID NO: 5642686 - DNA, 25 bp, Homo sapien
ccagatgaaatcccaggtgatgaca

SEQ ID NO: 5642687 - DNA, 25 bp, Homo sapien
aaaccagcgggttagtattgacaac

SEQ ID NO: 5642688 - DNA, 25 bp, Homo sapien
tctcattggcctgctggtcatcgca

SEQ ID NO: 5642689 - DNA, 25 bp, Homo sapien
cattcagactgggaaatgggaacct

SEQ ID NO: 5642690 - DNA, 25 bp, Homo sapien
tgtgaaaggaaagtagtccaggctg

SEQ ID NO: 5642691 - DNA, 25 bp, Homo sapien
ctccaactcctctgccaaccaatga

SEQ ID NO: 5642692 - DNA, 25 bp, Homo sapien
tgaaaacatggtcattgacgagact

SEQ ID NO: 5642693 - DNA, 25 bp, Homo sapien
accgagattactactatgacacctt

SEQ ID NO: 5642694 - DNA, 25 bp, Homo sapien
tgacattcttcactgtctgttgttt

SEQ ID NO: 5642695 - DNA, 25 bp, Homo sapien
caggaacaattttgagtctgaggat

SEQ ID NO: 5642696 - DNA, 25 bp, Homo sapien
gtgcgtgcgctttatatatggtggc

SEQ ID NO: 5642697 - DNA, 25 bp, Homo sapien
attcttcactgtctgttgtttacct

SEQ ID NO: 5642698 - DNA, 25 bp, Homo sapien
gccgagagagttggaggcctcgagg

SEQ ID NO: 5642699 - DNA, 25 bp, Homo sapien
ctgcggcggcaacaggaacaatttt

SEQ ID NO: 5642700 - DNA, 25 bp, Homo sapien
tttataaaagtgaatttcctactga

SEQ ID NO: 5642701 - DNA, 25 bp, Homo sapien
gtagcttatatttgacattcttcac

SEQ ID NO: 5642702 - DNA, 25 bp, Homo sapien
gttgatgtcgatgctcactgcttct

SEQ ID NO: 5642703 - DNA, 25 bp, Homo sapien
aatccagtgcttccacagagattag

SEQ ID NO: 5642704 - DNA, 25 bp, Homo sapien
caaaatgatgtgaaaggaccagttt

SEQ ID NO: 5642705 - DNA, 25 bp, Homo sapien
ccagcatgtgttggctgttgaccca

SEQ ID NO: 5642706 - DNA, 25 bp, Homo sapien
ctttgtaatgcttgtacagttgatg

SEQ ID NO: 5642707 - DNA, 25 bp, Homo sapien
tgatctattgcagatatttgatgta

SEQ ID NO: 5642708 - DNA, 25 bp, Homo sapien
actgaacccggcagcgacggcacca

SEQ ID NO: 5642709 - DNA, 25 bp, Homo sapien
aggattattgtatggctgtgtgtaa

SEQ ID NO: 5642710 - DNA, 25 bp, Homo sapien
tgattcagcacttccaagccatggt

SEQ ID NO: 5642711 - DNA, 25 bp, Homo sapien
agtgatgtcctgctagttccagaaa

SEQ ID NO: 5642712 - DNA, 25 bp, Homo sapien
aggctcttgcagccaatgccggaac

SEQ ID NO: 5642713 - DNA, 25 bp, Homo sapien
cctcaatctcagagacccctgtgga

SEQ ID NO: 5642714 - DNA, 25 bp, Homo sapien
cgacctctccaagggaaagtgcgtg

SEQ ID NO: 5642715 - DNA, 25 bp, Homo sapien
ctctacccactatgcacagattaaa

SEQ ID NO: 5642716 - DNA, 25 bp, Homo sapien
ggagcagatgcagatttaggtggca

SEQ ID NO: 5642717 - DNA, 25 bp, Homo sapien
cattgacgagactctggatgttaag

SEQ ID NO: 5642718 - DNA, 25 bp, Homo sapien
cagaagagcgtcacctgaacaagat

SEQ ID NO: 5642719 - DNA, 25 bp, Homo sapien
gcagccagtgagaagcagcagctgg

SEQ ID NO: 5642720 - DNA, 25 bp, Homo sapien
gaggagatcccaccgttccacccct

SEQ ID NO: 5642721 - DNA, 25 bp, Homo sapien
tgatccaacaggcaccaagagctgc

SEQ ID NO: 5642722 - DNA, 25 bp, Homo sapien
caattgtgttttcgtcacaggagtc

SEQ ID NO: 5642723 - DNA, 25 bp, Homo sapien
gacaaggaaattactcatgatgtca

SEQ ID NO: 5642724 - DNA, 25 bp, Homo sapien
tgatgttgatgtgtatttcgagacc

SEQ ID NO: 5642725 - DNA, 25 bp, Homo sapien
taaagaaggaatgggaagaggcaga

SEQ ID NO: 5642726 - DNA, 25 bp, Homo sapien
agacttatatgcaggctgtcgttcc

SEQ ID NO: 5642727 - DNA, 25 bp, Homo sapien
atcagaaaccccacttccattgtat

SEQ ID NO: 5642728 - DNA, 25 bp, Homo sapien
aggcattttattccagcgtcttcta

SEQ ID NO: 5642729 - DNA, 25 bp, Homo sapien
gatctggagtgggagagcaggatgg

SEQ ID NO: 5642730 - DNA, 25 bp, Homo sapien
aacaggatttgctgttgctgagcct

SEQ ID NO: 5642731 - DNA, 25 bp, Homo sapien
tggcggccaccgggaccgcggccgc

SEQ ID NO: 5642732 - DNA, 25 bp, Homo sapien
tgtcaccaaggacgttaaaggcatt

SEQ ID NO: 5642733 - DNA, 25 bp, Homo sapien
catggcactgaatatgtgtgctgcc

SEQ ID NO: 5642734 - DNA, 25 bp, Homo sapien
agcccaagaaattcaagaggaaatt

SEQ ID NO: 5642735 - DNA, 25 bp, Homo sapien
agccagtgagaagcagcagctggtg

SEQ ID NO: 5642736 - DNA, 25 bp, Homo sapien
gcgatgacggggccctgccgggccg

SEQ ID NO: 5642737 - DNA, 25 bp, Homo sapien
gctgcgtctgacatcctgacctcct

SEQ ID NO: 5642738 - DNA, 25 bp, Homo sapien
gagagtgaggagatcccaccgttcc

SEQ ID NO: 5642739 - DNA, 25 bp, Homo sapien
gaggaaccaaagcctctctctgctc

SEQ ID NO: 5642740 - DNA, 25 bp, Homo sapien
gaccctattcatgtctctacccact

SEQ ID NO: 5642741 - DNA, 25 bp, Homo sapien
cgaagagaaagtgattaacagtaag

SEQ ID NO: 5642742 - DNA, 25 bp, Homo sapien
ctcacctccaccccctcctgtcacc

SEQ ID NO: 5642743 - DNA, 25 bp, Homo sapien
ggttaaagctttagagaaggaagca

SEQ ID NO: 5642744 - DNA, 25 bp, Homo sapien
ctactatgacaccttcaaaggagat

SEQ ID NO: 5642745 - DNA, 25 bp, Homo sapien
catgctctcaatatataataaatgg

SEQ ID NO: 5642746 - DNA, 25 bp, Homo sapien
gcagatatggaccagttcactgcct

SEQ ID NO: 5642747 - DNA, 25 bp, Homo sapien
ctactgtagaactgcaatttccatt

SEQ ID NO: 5642748 - DNA, 25 bp, Homo sapien
tcagagacccctgtggacgtccggg

SEQ ID NO: 5642749 - DNA, 25 bp, Homo sapien
gtgtctccataaaagtcctgtcacc

SEQ ID NO: 5642750 - DNA, 25 bp, Homo sapien
ttgctgttgctgagcctcaaatcgc

SEQ ID NO: 5642751 - DNA, 25 bp, Homo sapien
cggcagcgacggcaccatgtcagac

SEQ ID NO: 5642752 - DNA, 25 bp, Homo sapien
gggtgtccgctgctgctttccttcg

SEQ ID NO: 5642753 - DNA, 25 bp, Homo sapien
ataataaatgggaaatgtcgatttt

SEQ ID NO: 5642754 - DNA, 25 bp, Homo sapien
cccaagaaattcaagaggaaattga

SEQ ID NO: 5642755 - DNA, 25 bp, Homo sapien
aatgatgttgatgtgtatttcgaga

SEQ ID NO: 5642756 - DNA, 25 bp, Homo sapien
tgagctccttcaggagcagcgtgca

SEQ ID NO: 5642757 - DNA, 25 bp, Homo sapien
agaagaccacaccaaggaggcggcc

SEQ ID NO: 5642758 - DNA, 25 bp, Homo sapien
catccgtcattaccagcatgtgttg

SEQ ID NO: 5642759 - DNA, 25 bp, Homo sapien
tcatgatgtcaaagctgtctgctcc

SEQ ID NO: 5642760 - DNA, 25 bp, Homo sapien
attccctttttaaatgagctttcag

SEQ ID NO: 5642761 - DNA, 25 bp, Homo sapien
gttgacccagaaaaggcggcccaga

SEQ ID NO: 5642762 - DNA, 25 bp, Homo sapien
cacctccaccccctcctgtcaccgg

SEQ ID NO: 5642763 - DNA, 25 bp, Homo sapien
cgacggcaccatgtcagacaaggaa

SEQ ID NO: 5642764 - DNA, 25 bp, Homo sapien
gttaaatatgcatgtgaacattcag

SEQ ID NO: 5642765 - DNA, 25 bp, Homo sapien
atctgtgtcaaaagaagaggaagag

SEQ ID NO: 5642766 - DNA, 25 bp, Homo sapien
atgccgagagagttggaggcctcga

SEQ ID NO: 5642767 - DNA, 25 bp, Homo sapien
tatggctgtgtgtaaagcgatgatt

SEQ ID NO: 5642768 - DNA, 25 bp, Homo sapien
tagcctgtagcttatatttgacatt

SEQ ID NO: 5642769 - DNA, 25 bp, Homo sapien
catggtcattgacgagactctggat

SEQ ID NO: 5642770 - DNA, 25 bp, Homo sapien
tcagagaagaccacaccaaggaggc

SEQ ID NO: 5642771 - DNA, 25 bp, Homo sapien
ctgtcctggcttttatttaaagaaa

SEQ ID NO: 5642772 - DNA, 25 bp, Homo sapien
tccgtcattaccagcatgtgttggc

SEQ ID NO: 5642773 - DNA, 25 bp, Homo sapien
ccgtgatgcctcgttggtacttcga

SEQ ID NO: 5642774 - DNA, 25 bp, Homo sapien
gcgggttagtattgacaactggtgc

SEQ ID NO: 5642775 - DNA, 25 bp, Homo sapien
gacttcacagaagcagctgtggatg

SEQ ID NO: 5642776 - DNA, 25 bp, Homo sapien
aggaagagcgggaatccgtgggccc

SEQ ID NO: 5642777 - DNA, 25 bp, Homo sapien
ttattttcctgtgactgtttttgtt

SEQ ID NO: 5642778 - DNA, 25 bp, Homo sapien
gaggagtccgagtgtgtgagcttga

SEQ ID NO: 5642779 - DNA, 25 bp, Homo sapien
cgaatggacagggtaaagaaggaat

SEQ ID NO: 5642780 - DNA, 25 bp, Homo sapien
agccatggttaaagctttagagaag

SEQ ID NO: 5642781 - DNA, 25 bp, Homo sapien
gtcggatggctctggagaactacct

SEQ ID NO: 5642782 - DNA, 25 bp, Homo sapien
gtgccgaagagaaagtgattaacag

SEQ ID NO: 5642783 - DNA, 25 bp, Homo sapien
tttaaatgagctttcaggaagttgc

SEQ ID NO: 5642784 - DNA, 25 bp, Homo sapien
aaagtaccttatgtagcccaagaaa

SEQ ID NO: 5642785 - DNA, 25 bp, Homo sapien
cggtgccgaagagaaagtgattaac

SEQ ID NO: 5642786 - DNA, 25 bp, Homo sapien
gatggaggtgtgtgagaatcaccag

SEQ ID NO: 5642787 - DNA, 25 bp, Homo sapien
attttcaataatagacttatatgca

SEQ ID NO: 5642788 - DNA, 25 bp, Homo sapien
ccccacctacaaatacctggagcag

SEQ ID NO: 5642789 - DNA, 25 bp, Homo sapien
tctgattcagcacttccaagccatg

SEQ ID NO: 5642790 - DNA, 25 bp, Homo sapien
gctctgaggagagtgaggagatccc

SEQ ID NO: 5642791 - DNA, 25 bp, Homo sapien
acaagatgcagaaccatggctatga

SEQ ID NO: 5642792 - DNA, 25 bp, Homo sapien
ggacttcagtctgagtagcagtgct

SEQ ID NO: 5642793 - DNA, 25 bp, Homo sapien
agcttatatttgacattcttcactg

SEQ ID NO: 5642794 - DNA, 25 bp, Homo sapien
attgtattgtctgacacatgctctc

SEQ ID NO: 5642795 - DNA, 25 bp, Homo sapien
aggaaattgatgagctccttcagga

SEQ ID NO: 5642796 - DNA, 25 bp, Homo sapien
gtatacagatgagggtgtccgctgc

SEQ ID NO: 5642797 - DNA, 25 bp, Homo sapien
tgagaatcaccagcactggcacacg

SEQ ID NO: 5642798 - DNA, 25 bp, Homo sapien
ttgccacggtcatcgtcatcagcct

SEQ ID NO: 5642799 - DNA, 25 bp, Homo sapien
tgacccagaaaaggcggcccagatg

SEQ ID NO: 5642800 - DNA, 25 bp, Homo sapien
aaaggagatgactacaatgaggaga

SEQ ID NO: 5642801 - DNA, 25 bp, Homo sapien
attgtatggctgtgtgtaaagcgat

SEQ ID NO: 5642802 - DNA, 25 bp, Homo sapien
ctgcttctgctgctggtggggctca

SEQ ID NO: 5642803 - DNA, 25 bp, Homo sapien
accagttcactgcctcaatctcaga

SEQ ID NO: 5642804 - DNA, 25 bp, Homo sapien
tgaagcacgtgagagaccctcgcaa

SEQ ID NO: 5642805 - DNA, 25 bp, Homo sapien
atcctgacctcctggactgtaggac

SEQ ID NO: 5642806 - DNA, 25 bp, Homo sapien
tctggactttctccaaaggcactga

SEQ ID NO: 5642807 - DNA, 25 bp, Homo sapien
cctctctctgctctacaaagtacct

SEQ ID NO: 5642808 - DNA, 25 bp, Homo sapien
ctccaagggaaagtgcgtgcgcttt

SEQ ID NO: 5642809 - DNA, 25 bp, Homo sapien
gcggccaccgggaccgcggccgccg

SEQ ID NO: 5642810 - DNA, 25 bp, Homo sapien
caaaagaagaagttcttcagtactg

SEQ ID NO: 5642811 - DNA, 25 bp, Homo sapien
tgagaaccccacctacaaatacctg

SEQ ID NO: 5642812 - DNA, 25 bp, Homo sapien
gtccagatgtgcaggctcctcctct

SEQ ID NO: 5642813 - DNA, 25 bp, Homo sapien
atacctgtgtgtctccataaaagtc

SEQ ID NO: 5642814 - DNA, 25 bp, Homo sapien
tgagcttgagagccgcgcgctagag

SEQ ID NO: 5642815 - DNA, 25 bp, Homo sapien
ctggaagacttcacagaagcagctg

SEQ ID NO: 5642816 - DNA, 25 bp, Homo sapien
tttaggtggcagggagcgcggcagc

SEQ ID NO: 5642817 - DNA, 25 bp, Homo sapien
agtgagaagcagcagctggtggaga

SEQ ID NO: 5642818 - DNA, 25 bp, Homo sapien
acccctgtggacgtccgggtgagct

SEQ ID NO: 5642819 - DNA, 25 bp, Homo sapien
acaactggtgccggagggacaaaaa

SEQ ID NO: 5642820 - DNA, 25 bp, Homo sapien
ctgtctgttgtttacctaccgtagc

SEQ ID NO: 5642821 - DNA, 25 bp, Homo sapien
actctgattcagcacttccaagcca

SEQ ID NO: 5642822 - DNA, 25 bp, Homo sapien
actggcacacggtagtcaaagaggc

SEQ ID NO: 5642823 - DNA, 25 bp, Homo sapien
atataataaatgggaaatgtcgatt

SEQ ID NO: 5642824 - DNA, 25 bp, Homo sapien
taatagacttatatgcaggctgtcg

SEQ ID NO: 5642825 - DNA, 25 bp, Homo sapien
tggactttctccaaaggcactgacc

SEQ ID NO: 5642826 - DNA, 25 bp, Homo sapien
gaagagcgtcacctgaacaagatgc

SEQ ID NO: 5642827 - DNA, 25 bp, Homo sapien
tcactgcttctgctttttctttctt

SEQ ID NO: 5642828 - DNA, 25 bp, Homo sapien
atgctcaccccagaagagcgtcacc

SEQ ID NO: 5642829 - DNA, 25 bp, Homo sapien
atgattttcaatgccgagagagttg

SEQ ID NO: 5642830 - DNA, 25 bp, Homo sapien
ggagggacaaaaagcaatgcaagag

SEQ ID NO: 5642831 - DNA, 25 bp, Homo sapien
gcttccagaaggctaaggagcagct

SEQ ID NO: 5642832 - DNA, 25 bp, Homo sapien
gctggtcatcgcagtggccattgcc

SEQ ID NO: 5642833 - DNA, 25 bp, Homo sapien
ttgcagtctgacccgccacggcctc

SEQ ID NO: 5642834 - DNA, 25 bp, Homo sapien
cagtattccctttttaaatgagctt

SEQ ID NO: 5642835 - DNA, 25 bp, Homo sapien
ttgaccctattcatgtctctaccca

SEQ ID NO: 5642836 - DNA, 25 bp, Homo sapien
ctctacaaagtaccttatgtagccc

SEQ ID NO: 5642837 - DNA, 25 bp, Homo sapien
gctttgaacaattgtgttttcgtca

SEQ ID NO: 5642838 - DNA, 25 bp, Homo sapien
gctcactgcttctgctttttctttc

SEQ ID NO: 5642839 - DNA, 25 bp, Homo sapien
cggccgctggcccaggagagaacac

SEQ ID NO: 5642840 - DNA, 25 bp, Homo sapien
ctccttcaggagcagcgtgcagata

SEQ ID NO: 5642841 - DNA, 25 bp, Homo sapien
cagctggagattcggcaccgcaacc

SEQ ID NO: 5642842 - DNA, 25 bp, Homo sapien
cggagggatgcaggtgggccggaag

SEQ ID NO: 5642843 - DNA, 25 bp, Homo sapien
acgggcaggctcctgcttctgctgc

SEQ ID NO: 5642844 - DNA, 25 bp, Homo sapien
tgcctcaatctcagagacccctgtg

SEQ ID NO: 5642845 - DNA, 25 bp, Homo sapien
aaggagcagctggagattcggcacc

SEQ ID NO: 5642846 - DNA, 25 bp, Homo sapien
cctgtcaccaaggacgttaaaggca

SEQ ID NO: 5642847 - DNA, 25 bp, Homo sapien
atacctggagcagatgcagatttag

SEQ ID NO: 5642848 - DNA, 25 bp, Homo sapien
ctactgaagcagatctggaagactt

SEQ ID NO: 5642849 - DNA, 25 bp, Homo sapien
gaacacggggaggtttgtttgtgtg

SEQ ID NO: 5642850 - DNA, 25 bp, Homo sapien
agccctacctgagaacgaaggatct

SEQ ID NO: 5642851 - DNA, 25 bp, Homo sapien
tcgttggtacttcgacctctccaag

SEQ ID NO: 5642852 - DNA, 25 bp, Homo sapien
tgttaaggaaatgattttcaatgcc

SEQ ID NO: 5642853 - DNA, 25 bp, Homo sapien
tggctgtgtgtaaagcgatgattcc

SEQ ID NO: 5642854 - DNA, 25 bp, Homo sapien
atgtcagacaaggaaattactcatg

SEQ ID NO: 5642855 - DNA, 25 bp, Homo sapien
agcgtcttctagagagcttagtgta

SEQ ID NO: 5642856 - DNA, 25 bp, Homo sapien
ctggcggagggatgcaggtgggccg

SEQ ID NO: 5642857 - DNA, 25 bp, Homo sapien
agccgctgccaggggctgcgtctga

SEQ ID NO: 5642858 - DNA, 25 bp, Homo sapien
atcggtgccgaagagaaagtgatta

SEQ ID NO: 5642859 - DNA, 25 bp, Homo sapien
gctgaatgaccgccgtcggatggct

SEQ ID NO: 5642860 - DNA, 25 bp, Homo sapien
gcaggctcctcctctctggactttc

SEQ ID NO: 5642861 - DNA, 25 bp, Homo sapien
tttgtttgtgtgaaaggaaagtagt

SEQ ID NO: 5642862 - DNA, 25 bp, Homo sapien
aaattaatcagaaaccccacttcca

SEQ ID NO: 5642863 - DNA, 25 bp, Homo sapien
agtgtgtgagcttgagagccgcgcg

SEQ ID NO: 5642864 - DNA, 25 bp, Homo sapien
gtgagagaccctcgcaaaatgatgt

SEQ ID NO: 5642865 - DNA, 25 bp, Homo sapien
atgaaaaaaatgatctattgcagat

SEQ ID NO: 5642866 - DNA, 25 bp, Homo sapien
ttccagaaaagtgccagtttttcca

SEQ ID NO: 5642867 - DNA, 25 bp, Homo sapien
agcttcaagctaagaacctccccaa

SEQ ID NO: 5642868 - DNA, 25 bp, Homo sapien
gttcactgcctcaatctcagagacc

SEQ ID NO: 5642869 - DNA, 25 bp, Homo sapien
ggaggcgatgacggggccctgccgg

SEQ ID NO: 5642870 - DNA, 25 bp, Homo sapien
cagccacgggatcgtggaggttgat

SEQ ID NO: 5642871 - DNA, 25 bp, Homo sapien
gctcctcctctctggactttctcca

SEQ ID NO: 5642872 - DNA, 25 bp, Homo sapien
aagaggcagtatggcaccatcagcc

SEQ ID NO: 5642873 - DNA, 25 bp, Homo sapien
tggtgatgctgaggaagaggcagta

SEQ ID NO: 5642874 - DNA, 25 bp, Homo sapien
taaatctgaaggttctggtaacctg

SEQ ID NO: 5642875 - DNA, 25 bp, Homo sapien
ttatgtccgtgctgagaacaaagat

SEQ ID NO: 5642876 - DNA, 25 bp, Homo sapien
tcctgcttctgctgctggtggggct

SEQ ID NO: 5642877 - DNA, 25 bp, Homo sapien
acataccatccgtcattaccagcat

SEQ ID NO: 5642878 - DNA, 25 bp, Homo sapien
tagtattgacaactggtgccggagg

SEQ ID NO: 5642879 - DNA, 25 bp, Homo sapien
aggatgggggactgatcggtgccga

SEQ ID NO: 5642880 - DNA, 25 bp, Homo sapien
tgtcaaagctgtctgctcccaggag

SEQ ID NO: 5642881 - DNA, 25 bp, Homo sapien
ttcactgtcctggcttttatttaaa

SEQ ID NO: 5642882 - DNA, 25 bp, Homo sapien
ggaatccagtgcttccacagagatt

SEQ ID NO: 5642883 - DNA, 25 bp, Homo sapien
gattaaacttcacctacaaactcct

SEQ ID NO: 5642884 - DNA, 25 bp, Homo sapien
ggaaatgattttcaatgccgagaga

SEQ ID NO: 5642885 - DNA, 25 bp, Homo sapien
ccatcagccacgggatcgtggaggt

SEQ ID NO: 5642886 - DNA, 25 bp, Homo sapien
agtttaaacacatcaataaatactt

SEQ ID NO: 5642887 - DNA, 25 bp, Homo sapien
gggaagaggcagagcttcaagctaa

SEQ ID NO: 5642888 - DNA, 25 bp, Homo sapien
atcgcaatgttttgtgggaagttaa

SEQ ID NO: 5642889 - DNA, 25 bp, Homo sapien
aacaggcaccaagagctgctttgaa

SEQ ID NO: 5642890 - DNA, 25 bp, Homo sapien
agtccaggctgtccctgaaactgag

SEQ ID NO: 5642891 - DNA, 25 bp, Homo sapien
ggaagcagccagtgagaagcagcag

SEQ ID NO: 5642892 - DNA, 25 bp, Homo sapien
cattgccacggtcatcgtcatcagc

SEQ ID NO: 5642893 - DNA, 25 bp, Homo sapien
tatatagctacggcatgctgctccc

SEQ ID NO: 5642894 - DNA, 25 bp, Homo sapien
tgtttataaaagtgaatttcctact

SEQ ID NO: 5642895 - DNA, 25 bp, Homo sapien
ccaatgatgttgatgtgtatttcga

SEQ ID NO: 5642896 - DNA, 25 bp, Homo sapien
atgtctctacccactatgcacagat

SEQ ID NO: 5642897 - DNA, 25 bp, Homo sapien
tcacttccccttccaactatgtcca

SEQ ID NO: 5642898 - DNA, 25 bp, Homo sapien
aatgccggaacaggatttgctgttg

SEQ ID NO: 5642899 - DNA, 25 bp, Homo sapien
aaagtgaatttcctactgaagcaga

SEQ ID NO: 5642900 - DNA, 25 bp, Homo sapien
cagttcactgcctcaatctcagaga

SEQ ID NO: 5642901 - DNA, 25 bp, Homo sapien
gcctgtagcttatatttgacattct

SEQ ID NO: 5642902 - DNA, 25 bp, Homo sapien
gtgagctctgaggagagtgaggaga

SEQ ID NO: 5642903 - DNA, 25 bp, Homo sapien
ctgtcaggagatgtatccagagcta

SEQ ID NO: 5642904 - DNA, 25 bp, Homo sapien
tccaggctgtccctgaaactgagtc

SEQ ID NO: 5642905 - DNA, 25 bp, Homo sapien
agtggatgaaaacatggtcattgac

SEQ ID NO: 5642906 - DNA, 25 bp, Homo sapien
agaggcagactctgattcagcactt

SEQ ID NO: 5642907 - DNA, 25 bp, Homo sapien
cttatatagctacggcatgctgctc

SEQ ID NO: 5642908 - DNA, 25 bp, Homo sapien
tttccttcggaatccagtgcttcca

SEQ ID NO: 5642909 - DNA, 25 bp, Homo sapien
taatgagcatgctcgcttccagaag

SEQ ID NO: 5642910 - DNA, 25 bp, Homo sapien
cagtctgagtagcagtgctctcatt

SEQ ID NO: 5642911 - DNA, 25 bp, Homo sapien
aagatcgcttacataccatccgtca

SEQ ID NO: 5642912 - DNA, 25 bp, Homo sapien
gctgctcccatgtggggtagaccag

SEQ ID NO: 5642913 - DNA, 25 bp, Homo sapien
attaccagcatgtgttggctgttga

SEQ ID NO: 5642914 - DNA, 25 bp, Homo sapien
gaagagcgggaatccgtgggcccac

SEQ ID NO: 5642915 - DNA, 25 bp, Homo sapien
caatgctcaccccagaagagcgtca

SEQ ID NO: 5642916 - DNA, 25 bp, Homo sapien
gcagccctggcggagggatgcaggt

SEQ ID NO: 5642917 - DNA, 25 bp, Homo sapien
ggaaatgtcgattttcaataataga

SEQ ID NO: 5642918 - DNA, 25 bp, Homo sapien
aaagtggatgaaaacatggtcattg

SEQ ID NO: 5642919 - DNA, 25 bp, Homo sapien
aagtcctgtcaccaaggacgttaaa

SEQ ID NO: 5642920 - DNA, 25 bp, Homo sapien
gctaagaacctccccaaagcagaga

SEQ ID NO: 5642921 - DNA, 25 bp, Homo sapien
ttttattttaaatctgaaggttctg

SEQ ID NO: 5642922 - DNA, 25 bp, Homo sapien
agatcacaaatgtgatggaggcaaa

SEQ ID NO: 5642923 - DNA, 25 bp, Homo sapien
ggccactgaagcacgtgagagaccc

SEQ ID NO: 5642924 - DNA, 25 bp, Homo sapien
tgaatttcctactgaagcagatctg

SEQ ID NO: 5642925 - DNA, 25 bp, Homo sapien
tcgtcatcagcctggtgatgctgag

SEQ ID NO: 5642926 - DNA, 25 bp, Homo sapien
accccagaagagcgtcacctgaaca

SEQ ID NO: 5642927 - DNA, 25 bp, Homo sapien
aagactatgatgtttataaaagtga

SEQ ID NO: 5642928 - DNA, 25 bp, Homo sapien
aaactccttaatatgatctgtggag

SEQ ID NO: 5642929 - DNA, 25 bp, Homo sapien
tgattcctccaactcctctgccaac

SEQ ID NO: 5642930 - DNA, 25 bp, Homo sapien
aacctgatccaacaggcaccaagag

SEQ ID NO: 5642931 - DNA, 25 bp, Homo sapien
tgggggactgatcggtgccgaagag

SEQ ID NO: 5642932 - DNA, 25 bp, Homo sapien
acttcgacctctccaagggaaagtg

SEQ ID NO: 5642933 - DNA, 25 bp, Homo sapien
acaaagagcggatggaggtgtgtga

SEQ ID NO: 5642934 - DNA, 25 bp, Homo sapien
tgttttcgtcacaggagtctttgta

SEQ ID NO: 5642935 - DNA, 25 bp, Homo sapien
tatatatggtggctgcggcggcaac

SEQ ID NO: 5642936 - DNA, 25 bp, Homo sapien
aaatgtcgattttcaataatagact

SEQ ID NO: 5642937 - DNA, 25 bp, Homo sapien
acaaatacctggagcagatgcagat

SEQ ID NO: 5642938 - DNA, 25 bp, Homo sapien
ggatttgctgttgctgagcctcaaa

SEQ ID NO: 5642939 - DNA, 25 bp, Homo sapien
tctctggactttctccaaaggcact

SEQ ID NO: 5642940 - DNA, 25 bp, Homo sapien
aaggcagtattccctttttaaatga

SEQ ID NO: 5642941 - DNA, 25 bp, Homo sapien
ttcagtctgagtagcagtgctctca

SEQ ID NO: 5642942 - DNA, 25 bp, Homo sapien
attattggatctgtgtcaaaagaag

SEQ ID NO: 5642943 - DNA, 25 bp, Homo sapien
ggaagatcccacgattccgatcgac

SEQ ID NO: 5642944 - DNA, 25 bp, Homo sapien
cgagattactactatgacaccttca

SEQ ID NO: 5642945 - DNA, 25 bp, Homo sapien
aggatctggagtgggagagcaggat

SEQ ID NO: 5642946 - DNA, 25 bp, Homo sapien
tctgacatcctgacctcctggactg

SEQ ID NO: 5642947 - DNA, 25 bp, Homo sapien
tcctactgaacccggcagcgacggc

SEQ ID NO: 5642948 - DNA, 25 bp, Homo sapien
cttcaaaggagatgactacaatgag

SEQ ID NO: 5642949 - DNA, 25 bp, Homo sapien
gtggtggaggaccgagattactact

SEQ ID NO: 5642950 - DNA, 25 bp, Homo sapien
ggacactgtggaaagctttgaacaa

SEQ ID NO: 5642951 - DNA, 25 bp, Homo sapien
cagaaaccccacttccattgtattg

SEQ ID NO: 5642952 - DNA, 25 bp, Homo sapien
ccttgcagtctgacccgccacggcc

SEQ ID NO: 5642953 - DNA, 25 bp, Homo sapien
cggttatgttgtgtaagtcaactct

SEQ ID NO: 5642954 - DNA, 25 bp, Homo sapien
agcagatgcagatttaggtggcagg

SEQ ID NO: 5642955 - DNA, 25 bp, Homo sapien
cccggcgagggatggcggccaccgg

SEQ ID NO: 5642956 - DNA, 25 bp, Homo sapien
gtaggactatataaagtactactgt

SEQ ID NO: 5642957 - DNA, 25 bp, Homo sapien
tattgtctgacacatgctctcaata

SEQ ID NO: 5642958 - DNA, 25 bp, Homo sapien
cttcacctacaaactccttaatatg

SEQ ID NO: 5642959 - DNA, 25 bp, Homo sapien
ccacgtgattgaagaaaggaggaac

SEQ ID NO: 5642960 - DNA, 25 bp, Homo sapien
atgtccagatgtgcaggctcctcct

SEQ ID NO: 5642961 - DNA, 25 bp, Homo sapien
gcaagagtcgctttgttacaccttt

SEQ ID NO: 5642962 - DNA, 25 bp, Homo sapien
tggaggtgtgtgagaatcaccagca

SEQ ID NO: 5642963 - DNA, 25 bp, Homo sapien
cttgtgacattcactcagagaagac

SEQ ID NO: 5642964 - DNA, 25 bp, Homo sapien
ctacctgagaacgaaggatctggag

SEQ ID NO: 5642965 - DNA, 25 bp, Homo sapien
agtctgacccgccacggcctcatcg

SEQ ID NO: 5642966 - DNA, 25 bp, Homo sapien
gccttgtgacattcactcagagaag

SEQ ID NO: 5642967 - DNA, 25 bp, Homo sapien
tggaagctatgctgaatgaccgccg

SEQ ID NO: 5642968 - DNA, 25 bp, Homo sapien
ccacaaagagcggatggaggtgtgt

SEQ ID NO: 5642969 - DNA, 25 bp, Homo sapien
aactcctctgccaaccaatgatgtt

SEQ ID NO: 5642970 - DNA, 25 bp, Homo sapien
gggtgaaagatggtaatataacaat

SEQ ID NO: 5642971 - DNA, 25 bp, Homo sapien
ggagcagcgtgcagatatggaccag

SEQ ID NO: 5642972 - DNA, 25 bp, Homo sapien
caccccctcctgtcaccggccttgt

SEQ ID NO: 5642973 - DNA, 25 bp, Homo sapien
tggtacttcgacctctccaagggaa

SEQ ID NO: 5642974 - DNA, 25 bp, Homo sapien
gtctgagtagcagtgctctcattgg

SEQ ID NO: 5642975 - DNA, 25 bp, Homo sapien
atggcaccatcagccacgggatcgt

SEQ ID NO: 5642976 - DNA, 25 bp, Homo sapien
tttgagtctgaggattattgtatgg

SEQ ID NO: 5642977 - DNA, 25 bp, Homo sapien
ggcccactgcgggaggacttcagtc

SEQ ID NO: 5642978 - DNA, 25 bp, Homo sapien
gatgctgaggaagaggcagtatggc

SEQ ID NO: 5642979 - DNA, 25 bp, Homo sapien
ggtagtcaaagaggcatgtctgact

SEQ ID NO: 5642980 - DNA, 25 bp, Homo sapien
aagttaaatatgcatgtgaacattc

SEQ ID NO: 5642981 - DNA, 25 bp, Homo sapien
cacatgctctcaatatataataaat

SEQ ID NO: 5642982 - DNA, 25 bp, Homo sapien
gaatgtacacagtttaaacacatca

SEQ ID NO: 5642983 - DNA, 25 bp, Homo sapien
ctctgcagatgataatgagcatgct

SEQ ID NO: 5642984 - DNA, 25 bp, Homo sapien
caccatcagccacgggatcgtggag

SEQ ID NO: 5642985 - DNA, 25 bp, Homo sapien
gcgctttatatatggtggctgcggc

SEQ ID NO: 5642986 - DNA, 25 bp, Homo sapien
cacggcctcatcgcattctccaggc

SEQ ID NO: 5642987 - DNA, 25 bp, Homo sapien
tggactgtaggactatataaagtac

SEQ ID NO: 5642988 - DNA, 25 bp, Homo sapien
atgctcactgcttctgctttttctt

SEQ ID NO: 5642989 - DNA, 25 bp, Homo sapien
tggtcattgacgagactctggatgt

SEQ ID NO: 5642990 - DNA, 25 bp, Homo sapien
agccaatgccggaacaggatttgct

SEQ ID NO: 5642991 - DNA, 25 bp, Homo sapien
aaggaagcagccagtgagaagcagc

SEQ ID NO: 5642992 - DNA, 25 bp, Homo sapien
taaatgagctttcaggaagttgctg

SEQ ID NO: 5642993 - DNA, 25 bp, Homo sapien
ggtgtgtgagaatcaccagcactgg

SEQ ID NO: 5642994 - DNA, 25 bp, Homo sapien
ggcaccatcagccacgggatcgtgg

SEQ ID NO: 5642995 - DNA, 25 bp, Homo sapien
ccgatcgactgccaagcagcagccg

SEQ ID NO: 5642996 - DNA, 25 bp, Homo sapien
ctgttgacccagaaaaggcggccca

SEQ ID NO: 5642997 - DNA, 25 bp, Homo sapien
aaggaaatgattttcaatgccgaga

SEQ ID NO: 5642998 - DNA, 25 bp, Homo sapien
cgaggaagagcgggaatccgtgggc

SEQ ID NO: 5642999 - DNA, 25 bp, Homo sapien
gagaatgtacacagtttaaacacat

SEQ ID NO: 5643000 - DNA, 25 bp, Homo sapien
gccacgggatcgtggaggttgatcc

SEQ ID NO: 5643001 - DNA, 25 bp, Homo sapien
tgaatttgtaagtgatgtcctgcta

SEQ ID NO: 5643002 - DNA, 25 bp, Homo sapien
ttacataccatccgtcattaccagc

SEQ ID NO: 5643003 - DNA, 25 bp, Homo sapien
catcgtcatcagcctggtgatgctg

SEQ ID NO: 5643004 - DNA, 25 bp, Homo sapien
gcagctgtggatgaggatgatgagg

SEQ ID NO: 5643005 - DNA, 25 bp, Homo sapien
atgtccgtgctgagaacaaagatcg

SEQ ID NO: 5643006 - DNA, 25 bp, Homo sapien
gtgatgcctcgttggtacttcgacc

SEQ ID NO: 5643007 - DNA, 25 bp, Homo sapien
tacacctttcaagtgtctcgtgggt

SEQ ID NO: 5643008 - DNA, 25 bp, Homo sapien
aaaacatggtcattgacgagactct

SEQ ID NO: 5643009 - DNA, 25 bp, Homo sapien
cggcaacaggaacaattttgagtct

SEQ ID NO: 5643010 - DNA, 25 bp, Homo sapien
ccgctgctgctttccttcggaatcc

SEQ ID NO: 5643011 - DNA, 25 bp, Homo sapien
gggaaatgggaacctgatccaacag

SEQ ID NO: 5643012 - DNA, 25 bp, Homo sapien
ctgagaacgaaggatctggagtggg

SEQ ID NO: 5643013 - DNA, 25 bp, Homo sapien
aaaagtcctgtcaccaaggacgtta

SEQ ID NO: 5643014 - DNA, 25 bp, Homo sapien
ttatgtagcccaagaaattcaagag

SEQ ID NO: 5643015 - DNA, 25 bp, Homo sapien
gagaacacggggaggtttgtttgtg

SEQ ID NO: 5643016 - DNA, 25 bp, Homo sapien
gcgaggagtccgagtgtgtgagctt

SEQ ID NO: 5643017 - DNA, 25 bp, Homo sapien
ccctgtggacgtccgggtgagctct

SEQ ID NO: 5643018 - DNA, 25 bp, Homo sapien
tcactgcctcaatctcagagacccc

SEQ ID NO: 5643019 - DNA, 25 bp, Homo sapien
ttccccttccaactatgtccagatg

SEQ ID NO: 5643020 - DNA, 25 bp, Homo sapien
ggaccagttcactgcctcaatctca

SEQ ID NO: 5643021 - DNA, 25 bp, Homo sapien
actgaatatgtgtgctgccctcaga

SEQ ID NO: 5643022 - DNA, 25 bp, Homo sapien
ctttagagaaggaagcagccagtga

SEQ ID NO: 5643023 - DNA, 25 bp, Homo sapien
agatcccaccgttccaccccttcca

SEQ ID NO: 5643024 - DNA, 25 bp, Homo sapien
tactactatgacaccttcaaaggag

SEQ ID NO: 5643025 - DNA, 25 bp, Homo sapien
gacccggcgagggatggcggccacc

SEQ ID NO: 5643026 - DNA, 25 bp, Homo sapien
tgtgttttcgtcacaggagtctttg

SEQ ID NO: 5643027 - DNA, 25 bp, Homo sapien
tggcagggagcgcggcagccctggc

SEQ ID NO: 5643028 - DNA, 25 bp, Homo sapien
aggagagtgaggagatcccaccgtt

SEQ ID NO: 5643029 - DNA, 25 bp, Homo sapien
acactgtggaaagctttgaacaatt

SEQ ID NO: 5643030 - DNA, 25 bp, Homo sapien
cggcccagatgaaatcccaggtgat

SEQ ID NO: 5643031 - DNA, 25 bp, Homo sapien
ttcgtcacaggagtctttgtaatgc

SEQ ID NO: 5643032 - DNA, 25 bp, Homo sapien
aagctaagaacctccccaaagcaga

SEQ ID NO: 5643033 - DNA, 25 bp, Homo sapien
gaaagctttgaacaattgtgttttc

SEQ ID NO: 5643034 - DNA, 25 bp, Homo sapien
ctgagtctgtggacactgtggaaag

SEQ ID NO: 5643035 - DNA, 25 bp, Homo sapien
tacggcatgctgctcccatgtgggg

SEQ ID NO: 5643036 - DNA, 25 bp, Homo sapien
agcggatggaggtgtgtgagaatca

SEQ ID NO: 5643037 - DNA, 25 bp, Homo sapien
gatgtcaaagctgtctgctcccagg

SEQ ID NO: 5643038 - DNA, 25 bp, Homo sapien
tagagcgacccggcgagggatggcg

SEQ ID NO: 5643039 - DNA, 25 bp, Homo sapien
aattactcatgatgtcaaagctgtc

SEQ ID NO: 5643040 - DNA, 25 bp, Homo sapien
ccagtttcttgaagtccagtgtttc

SEQ ID NO: 5643041 - DNA, 25 bp, Homo sapien
tctgctctacaaagtaccttatgta

SEQ ID NO: 5643042 - DNA, 25 bp, Homo sapien
ggaagacttcacagaagcagctgtg

SEQ ID NO: 5643043 - DNA, 25 bp, Homo sapien
atgctgctcccatgtggggtagacc

SEQ ID NO: 5643044 - DNA, 25 bp, Homo sapien
cttaatatgatctgtggagaatgta

SEQ ID NO: 5643045 - DNA, 25 bp, Homo sapien
gctcctgcttctgctgctggtgggg

SEQ ID NO: 5643046 - DNA, 25 bp, Homo sapien
cagctggtggagacccacctggccc

SEQ ID NO: 5643047 - DNA, 25 bp, Homo sapien
accatggctatgagaaccccaccta

SEQ ID NO: 5643048 - DNA, 25 bp, Homo sapien
gcagtggccattgccacggtcatcg

SEQ ID NO: 5643049 - DNA, 25 bp, Homo sapien
tgtgggaagttaaatatgcatgtga

SEQ ID NO: 5643050 - DNA, 25 bp, Homo sapien
aggaaagtagtccaggctgtccctg

SEQ ID NO: 5643051 - DNA, 25 bp, Homo sapien
gctttgaaacaaaagaagaagttct

SEQ ID NO: 5643052 - DNA, 25 bp, Homo sapien
tccaagccatggttaaagctttaga

SEQ ID NO: 5643053 - DNA, 25 bp, Homo sapien
tcaataatagacttatatgcaggct

SEQ ID NO: 5643054 - DNA, 25 bp, Homo sapien
tatatttgacattcttcactgtctg

SEQ ID NO: 5643055 - DNA, 25 bp, Homo sapien
agaacctccccaaagcagagaggca

SEQ ID NO: 5643056 - DNA, 25 bp, Homo sapien
gctgttgctgagcctcaaatcgcaa

SEQ ID NO: 5643057 - DNA, 25 bp, Homo sapien
ctgtagcttatatttgacattcttc

SEQ ID NO: 5643058 - DNA, 25 bp, Homo sapien
caaggaggcggccgctggcccagga

SEQ ID NO: 5643059 - DNA, 25 bp, Homo sapien
tcggaatccagtgcttccacagaga

SEQ ID NO: 5643060 - DNA, 25 bp, Homo sapien
ggagcagctggagattcggcaccgc

SEQ ID NO: 5643061 - DNA, 25 bp, Homo sapien
gtcgattttcaataatagacttata

SEQ ID NO: 5643062 - DNA, 25 bp, Homo sapien
tgtgtgaaaggaaagtagtccaggc

SEQ ID NO: 5643063 - DNA, 25 bp, Homo sapien
atgagggtgtccgctgctgctttcc

SEQ ID NO: 5643064 - DNA, 25 bp, Homo sapien
ccagaaaaggcggcccagatgaaat

SEQ ID NO: 5643065 - DNA, 25 bp, Homo sapien
tgacatcctgacctcctggactgta

SEQ ID NO: 5643066 - DNA, 25 bp, Homo sapien
ggaccgcggccgccgcagccacggg

SEQ ID NO: 5643067 - DNA, 25 bp, Homo sapien
atgtcctgctagttccagaaaagtg

SEQ ID NO: 5643068 - DNA, 25 bp, Homo sapien
gccacggcctcatcgcattctccag

SEQ ID NO: 5643069 - DNA, 25 bp, Homo sapien
tagtcaaagaggcatgtctgactca

SEQ ID NO: 5643070 - DNA, 25 bp, Homo sapien
aagtgtctcgtgggtgaatttgtaa

SEQ ID NO: 5643071 - DNA, 25 bp, Homo sapien
gcaggatgggggactgatcggtgcc

SEQ ID NO: 5643072 - DNA, 25 bp, Homo sapien
ccaggtgatgacacatctccacgtg

SEQ ID NO: 5643073 - DNA, 25 bp, Homo sapien
tccaggccttacggcgttatgtccg

SEQ ID NO: 5643074 - DNA, 25 bp, Homo sapien
gaggaagtggtggaggaccgagatt

SEQ ID NO: 5643075 - DNA, 25 bp, Homo sapien
cctgacctcctggactgtaggacta

SEQ ID NO: 5643076 - DNA, 25 bp, Homo sapien
gttttgtgggaagttaaatatgcat

SEQ ID NO: 5643077 - DNA, 25 bp, Homo sapien
cccttcccagccctacctgagaacg

SEQ ID NO: 5643078 - DNA, 25 bp, Homo sapien
tcacaggagtctttgtaatgcttgt

SEQ ID NO: 5643079 - DNA, 25 bp, Homo sapien
cagattaaacttcacctacaaactc

SEQ ID NO: 5643080 - DNA, 25 bp, Homo sapien
tctgccaaccaatgatgttgatgtg

SEQ ID NO: 5643081 - DNA, 25 bp, Homo sapien
atccaacaggcaccaagagctgctt

SEQ ID NO: 5643082 - DNA, 25 bp, Homo sapien
gcacacggtagtcaaagaggcatgt

SEQ ID NO: 5643083 - DNA, 25 bp, Homo sapien
aagacttcacagaagcagctgtgga

SEQ ID NO: 5643084 - DNA, 25 bp, Homo sapien
ggggccctgccgggccgtgatgcct

SEQ ID NO: 5643085 - DNA, 25 bp, Homo sapien
caggtgggccggaagatcccacgat

SEQ ID NO: 5643086 - DNA, 25 bp, Homo sapien
actgtaatggccactgaagcacgtg

SEQ ID NO: 5643087 - DNA, 25 bp, Homo sapien
cctggctgccttgcagtctgacccg

SEQ ID NO: 5643088 - DNA, 25 bp, Homo sapien
ttcgacctctccaagggaaagtgcg

SEQ ID NO: 5643089 - DNA, 25 bp, Homo sapien
tgtgtaaagcgatgattcctccaac

SEQ ID NO: 5643090 - DNA, 25 bp, Homo sapien
aatatgtgtgctgccctcagacaaa

SEQ ID NO: 5643091 - DNA, 25 bp, Homo sapien
gtggacactgtggaaagctttgaac

SEQ ID NO: 5643092 - DNA, 25 bp, Homo sapien
cgcaaccgaatggacagggtaaaga

SEQ ID NO: 5643093 - DNA, 25 bp, Homo sapien
gatggcggccaccgggaccgcggcc

SEQ ID NO: 5643094 - DNA, 25 bp, Homo sapien
ggcaccatgtcagacaaggaaatta

SEQ ID NO: 5643095 - DNA, 25 bp, Homo sapien
cacgggatcgtggaggttgatccaa

SEQ ID NO: 5643096 - DNA, 25 bp, Homo sapien
tgatgtcctgctagttccagaaaag

SEQ ID NO: 5643097 - DNA, 25 bp, Homo sapien
tgtgagaatcaccagcactggcaca

SEQ ID NO: 5643098 - DNA, 25 bp, Homo sapien
ccctttgaccctattcatgtctcta

SEQ ID NO: 5643099 - DNA, 25 bp, Homo sapien
aataaatgggaaatgtcgattttca

SEQ ID NO: 5643100 - DNA, 25 bp, Homo sapien
agccgcgcgctagagcgacccggcg

SEQ ID NO: 5643101 - DNA, 25 bp, Homo sapien
tccttaatatgatctgtggagaatg

SEQ ID NO: 5643102 - DNA, 25 bp, Homo sapien
gagcaggatgggggactgatcggtg

SEQ ID NO: 5643103 - DNA, 25 bp, Homo sapien
gagggatggcggccaccgggaccgc

SEQ ID NO: 5643104 - DNA, 25 bp, Homo sapien
ctgaacaagatgcagaaccatggct

SEQ ID NO: 5643105 - DNA, 25 bp, Homo sapien
taccagcatgtgttggctgttgacc

SEQ ID NO: 5643106 - DNA, 25 bp, Homo sapien
aggcgatgacggggccctgccgggc

SEQ ID NO: 5643107 - DNA, 25 bp, Homo sapien
cgttatgtccgtgctgagaacaaag

SEQ ID NO: 5643108 - DNA, 25 bp, Homo sapien
ccatgtcagacaaggaaattactca

SEQ ID NO: 5643109 - DNA, 25 bp, Homo sapien
agagattagcctgtagcttatattt

SEQ ID NO: 5643110 - DNA, 25 bp, Homo sapien
gccattgccacggtcatcgtcatca

SEQ ID NO: 5643111 - DNA, 25 bp, Homo sapien
gcgagggatggcggccaccgggacc

SEQ ID NO: 5643112 - DNA, 25 bp, Homo sapien
gtagcccaagaaattcaagaggaaa

SEQ ID NO: 5643113 - DNA, 25 bp, Homo sapien
aagggaaagtgcgtgcgctttatat

SEQ ID NO: 5643114 - DNA, 25 bp, Homo sapien
gactttctccaaaggcactgaccct

SEQ ID NO: 5643115 - DNA, 25 bp, Homo sapien
taaagcgatgattcctccaactcct

SEQ ID NO: 5643116 - DNA, 25 bp, Homo sapien
acctcctggactgtaggactatata

SEQ ID NO: 5643117 - DNA, 25 bp, Homo sapien
ctcggcctctactttgtcccctcac

SEQ ID NO: 5643118 - DNA, 25 bp, Homo sapien
agccctggcggagggatgcaggtgg

SEQ ID NO: 5643119 - DNA, 25 bp, Homo sapien
attcactcagagaagaccacaccaa

SEQ ID NO: 5643120 - DNA, 25 bp, Homo sapien
aaagcctctctctgctctacaaagt

SEQ ID NO: 5643121 - DNA, 25 bp, Homo sapien
ctacccactatgcacagattaaact

SEQ ID NO: 5643122 - DNA, 25 bp, Homo sapien
cagatttaggtggcagggagcgcgg

SEQ ID NO: 5643123 - DNA, 25 bp, Homo sapien
aaagcaatgcaagagtcgctttgtt

SEQ ID NO: 5643124 - DNA, 25 bp, Homo sapien
agctttagagaaggaagcagccagt

SEQ ID NO: 5643125 - DNA, 25 bp, Homo sapien
aatccgtgggcccactgcgggagga

SEQ ID NO: 5643126 - DNA, 25 bp, Homo sapien
agaaggaagcagccagtgagaagca

SEQ ID NO: 5643127 - DNA, 25 bp, Homo sapien
ggagaatcctactgaacccggcagc

SEQ ID NO: 5643128 - DNA, 25 bp, Homo sapien
ccagtgagaagcagcagctggtgga

SEQ ID NO: 5643129 - DNA, 25 bp, Homo sapien
tacaatgaggagaatcctactgaac

SEQ ID NO: 5643130 - DNA, 25 bp, Homo sapien
ttaaggaaatgattttcaatgccga

SEQ ID NO: 5643131 - DNA, 25 bp, Homo sapien
gtcctgctagttccagaaaagtgcc

SEQ ID NO: 5643132 - DNA, 25 bp, Homo sapien
ccactatgcacagattaaacttcac

SEQ ID NO: 5643133 - DNA, 25 bp, Homo sapien
attgacaactggtgccggagggaca

SEQ ID NO: 5643134 - DNA, 25 bp, Homo sapien
cgctggccggctacatcgaggctct

SEQ ID NO: 5643135 - DNA, 25 bp, Homo sapien
ggcatgtctgactcagggaatgacc

SEQ ID NO: 5643136 - DNA, 25 bp, Homo sapien
tcatgtctctacccactatgcacag

SEQ ID NO: 5643137 - DNA, 25 bp, Homo sapien
tgctgccctcagacaaagattattg

SEQ ID NO: 5643138 - DNA, 25 bp, Homo sapien
ccaatgccggaacaggatttgctgt

SEQ ID NO: 5643139 - DNA, 25 bp, Homo sapien
gcacgtgagagaccctcgcaaaatg

SEQ ID NO: 5643140 - DNA, 25 bp, Homo sapien
tgtacagttgatgtcgatgctcact

SEQ ID NO: 5643141 - DNA, 25 bp, Homo sapien
tcctcctctctggactttctccaaa

SEQ ID NO: 5643142 - DNA, 25 bp, Homo sapien
agagccgcgcgctagagcgacccgg

SEQ ID NO: 5643143 - DNA, 25 bp, Homo sapien
gcagcgacggcaccatgtcagacaa

SEQ ID NO: 5643144 - DNA, 25 bp, Homo sapien
cactgtctgttgtttacctaccgta

SEQ ID NO: 5643145 - DNA, 25 bp, Homo sapien
gcctgctggtcatcgcagtggccat

SEQ ID NO: 5643146 - DNA, 25 bp, Homo sapien
ctactgaacccggcagcgacggcac

SEQ ID NO: 5643147 - DNA, 25 bp, Homo sapien
tgaaaggaccagtttcttgaagtcc

SEQ ID NO: 5643148 - DNA, 25 bp, Homo sapien
agattattggatctgtgtcaaaaga

SEQ ID NO: 5643149 - DNA, 25 bp, Homo sapien
gcattttattccagcgtcttctaga

SEQ ID NO: 5643150 - DNA, 25 bp, Homo sapien
attctccaggccttacggcgttatg

SEQ ID NO: 5643151 - DNA, 25 bp, Homo sapien
atgaggatgatgaggatgaggaaga

SEQ ID NO: 5643152 - DNA, 25 bp, Homo sapien
gcttctgctgctggtggggctcacg

SEQ ID NO: 5643153 - DNA, 25 bp, Homo sapien
caagccatggttaaagctttagaga

SEQ ID NO: 5643154 - DNA, 25 bp, Homo sapien
ttcactgtctgttgtttacctaccg

SEQ ID NO: 5643155 - DNA, 25 bp, Homo sapien
gccgccgcagccacgggcaggctcc

SEQ ID NO: 5643156 - DNA, 25 bp, Homo sapien
gctacggcatgctgctcccatgtgg

SEQ ID NO: 5643157 - DNA, 25 bp, Homo sapien
agtccgagtgtgtgagcttgagagc

SEQ ID NO: 5643158 - DNA, 25 bp, Homo sapien
tgaaaggaaagtagtccaggctgtc

SEQ ID NO: 5643159 - DNA, 25 bp, Homo sapien
gatgaagaggaagactatgatgttt

SEQ ID NO: 5643160 - DNA, 25 bp, Homo sapien
ttaaacttcacctacaaactcctta

SEQ ID NO: 5643161 - DNA, 25 bp, Homo sapien
ctgccgggccgtgatgcctcgttgg

SEQ ID NO: 5643162 - DNA, 25 bp, Homo sapien
aggctcctcctctctggactttctc

SEQ ID NO: 5643163 - DNA, 25 bp, Homo sapien
gaggcatgtctgactcagggaatga

SEQ ID NO: 5643164 - DNA, 25 bp, Homo sapien
aaaatgatctattgcagatatttga

SEQ ID NO: 5643165 - DNA, 25 bp, Homo sapien
ttagagaaggaagcagccagtgaga

SEQ ID NO: 5643166 - DNA, 25 bp, Homo sapien
acacagtttaaacacatcaataaat

SEQ ID NO: 5643167 - DNA, 25 bp, Homo sapien
agagacccctgtggacgtccgggtg

SEQ ID NO: 5643168 - DNA, 25 bp, Homo sapien
aacaaagatcgcttacataccatcc

SEQ ID NO: 5643169 - DNA, 25 bp, Homo sapien
gtctgttgtttacctaccgtagctt

SEQ ID NO: 5643170 - DNA, 25 bp, Homo sapien
ctcgtgggtgaatttgtaagtgatg

SEQ ID NO: 5643171 - DNA, 25 bp, Homo sapien
agacaaagattattggatctgtgtc

SEQ ID NO: 5643172 - DNA, 25 bp, Homo sapien
aaaaaatgatctattgcagatattt

SEQ ID NO: 5643173 - DNA, 25 bp, Homo sapien
gatgacggggccctgccgggccgtg

SEQ ID NO: 5643174 - DNA, 25 bp, Homo sapien
agggaatgaccttatatagctacgg

SEQ ID NO: 5643175 - DNA, 25 bp, Homo sapien
actatgacaccttcaaaggagatga

SEQ ID NO: 5643176 - DNA, 25 bp, Homo sapien
aattgatgagctccttcaggagcag

SEQ ID NO: 5643177 - DNA, 25 bp, Homo sapien
ttggcgctggccggctacatcgagg

SEQ ID NO: 5643178 - DNA, 25 bp, Homo sapien
tatgagaaccccacctacaaatacc

SEQ ID NO: 5643179 - DNA, 25 bp, Homo sapien
acccactatgcacagattaaacttc

SEQ ID NO: 5643180 - DNA, 25 bp, Homo sapien
cctgtcaccggccttgtgacattca

SEQ ID NO: 5643181 - DNA, 25 bp, Homo sapien
tgtggagaatgtacacagtttaaac

SEQ ID NO: 5643182 - DNA, 25 bp, Homo sapien
gtggagacccacctggcccgagtgg

SEQ ID NO: 5643183 - DNA, 25 bp, Homo sapien
agaccagttccatggcactgaatat

SEQ ID NO: 5643184 - DNA, 25 bp, Homo sapien
ccacttccattgtattgtctgacac

SEQ ID NO: 5643185 - DNA, 25 bp, Homo sapien
ttgtaatgcttgtacagttgatgtc

SEQ ID NO: 5643186 - DNA, 25 bp, Homo sapien
tttgtaagtgatgtcctgctagttc

SEQ ID NO: 5643187 - DNA, 25 bp, Homo sapien
cacagattaaacttcacctacaaac

SEQ ID NO: 5643188 - DNA, 25 bp, Homo sapien
tgaacaattgtgttttcgtcacagg

SEQ ID NO: 5643189 - DNA, 25 bp, Homo sapien
ggatacctgtgtgtctccataaaag

SEQ ID NO: 5643190 - DNA, 25 bp, Homo sapien
gaggacttcagtctgagtagcagtg

SEQ ID NO: 5643191 - DNA, 25 bp, Homo sapien
ccagaaaagtgccagtttttccaca

SEQ ID NO: 5643192 - DNA, 25 bp, Homo sapien
ttctgctgctggtggggctcacggc

SEQ ID NO: 5643193 - DNA, 25 bp, Homo sapien
cagtgtttccacggctggatacctg

SEQ ID NO: 5643194 - DNA, 25 bp, Homo sapien
ttctccaaaggcactgaccctcggc

SEQ ID NO: 5643195 - DNA, 25 bp, Homo sapien
ttcctcccctttgaccctattcatg

SEQ ID NO: 5643196 - DNA, 25 bp, Homo sapien
gtattgacaactggtgccggaggga

SEQ ID NO: 5643197 - DNA, 25 bp, Homo sapien
agagagttggaggcctcgaggaaga

SEQ ID NO: 5643198 - DNA, 25 bp, Homo sapien
catggctatgagaaccccacctaca

SEQ ID NO: 5643199 - DNA, 25 bp, Homo sapien
ctgccaagcagcagccgctgccagg

SEQ ID NO: 5643200 - DNA, 25 bp, Homo sapien
tgaatatgtgtgctgccctcagaca

SEQ ID NO: 5643201 - DNA, 25 bp, Homo sapien
cttagtgtatacagatgagggtgtc

SEQ ID NO: 5643202 - DNA, 25 bp, Homo sapien
aagatcccacgattccgatcgactg

SEQ ID NO: 5643203 - DNA, 25 bp, Homo sapien
gccacggtcatcgtcatcagcctgg

SEQ ID NO: 5643204 - DNA, 25 bp, Homo sapien
cctcccctttgaccctattcatgtc

SEQ ID NO: 5643205 - DNA, 25 bp, Homo sapien
ttttccacaaagagcggatggaggt

SEQ ID NO: 5643206 - DNA, 25 bp, Homo sapien
atgataatgagcatgctcgcttcca

SEQ ID NO: 5643207 - DNA, 25 bp, Homo sapien
cgggccgtgatgcctcgttggtact

SEQ ID NO: 5643208 - DNA, 25 bp, Homo sapien
tcactcagagaagaccacaccaagg

SEQ ID NO: 5643209 - DNA, 25 bp, Homo sapien
agggagcgcggcagccctggcggag

SEQ ID NO: 5643210 - DNA, 25 bp, Homo sapien
ctgctgctggtggggctcacggcgc

SEQ ID NO: 5643211 - DNA, 25 bp, Homo sapien
ctcgcaaaatgatgtgaaaggacca

SEQ ID NO: 5643212 - DNA, 25 bp, Homo sapien
ctatgtccagatgtgcaggctcctc

SEQ ID NO: 5643213 - DNA, 25 bp, Homo sapien
gtcaactcttcagcctcattcactg

SEQ ID NO: 5643214 - DNA, 25 bp, Homo sapien
ggactgatcggtgccgaagagaaag

SEQ ID NO: 5643215 - DNA, 25 bp, Homo sapien
tgtttgtgtgaaaggaaagtagtcc

SEQ ID NO: 5643216 - DNA, 25 bp, Homo sapien
acaaactccttaatatgatctgtgg

SEQ ID NO: 5643217 - DNA, 25 bp, Homo sapien
gtccctgaaactgagtctgtggaca

SEQ ID NO: 5643218 - DNA, 25 bp, Homo sapien
aggaggcggccgctggcccaggaga

SEQ ID NO: 5643219 - DNA, 25 bp, Homo sapien
gtagcagtgctctcattggcctgct

SEQ ID NO: 5643220 - DNA, 25 bp, Homo sapien
aaatgaaaaaaatgatctattgcag

SEQ ID NO: 5643221 - DNA, 25 bp, Homo sapien
ccctcggcctctactttgtcccctc

SEQ ID NO: 5643222 - DNA, 25 bp, Homo sapien
cgggatcgtggaggttgatccaatg

SEQ ID NO: 5643223 - DNA, 25 bp, Homo sapien
tcaaatcgcaatgttttgtgggaag

SEQ ID NO: 5643224 - DNA, 25 bp, Homo sapien
cggccgccgcagccacgggcaggct

SEQ ID NO: 5643225 - DNA, 25 bp, Homo sapien
tcttcactgtctgttgtttacctac

SEQ ID NO: 5643226 - DNA, 25 bp, Homo sapien
attactactatgacaccttcaaagg

SEQ ID NO: 5643227 - DNA, 25 bp, Homo sapien
atctggaagacttcacagaagcagc

SEQ ID NO: 5643228 - DNA, 25 bp, Homo sapien
ggagcgcggcagccctggcggaggg

SEQ ID NO: 5643229 - DNA, 25 bp, Homo sapien
gcagccaatgccggaacaggatttg

SEQ ID NO: 5643230 - DNA, 25 bp, Homo sapien
atgatgtgaaaggaccagtttcttg

SEQ ID NO: 5643231 - DNA, 25 bp, Homo sapien
gtcatcagcctggtgatgctgagga

SEQ ID NO: 5643232 - DNA, 25 bp, Homo sapien
gataatgagcatgctcgcttccaga

SEQ ID NO: 5643233 - DNA, 25 bp, Homo sapien
ttttcgtcacaggagtctttgtaat

SEQ ID NO: 5643234 - DNA, 25 bp, Homo sapien
gcaggctgtcgttccggttatgttg

SEQ ID NO: 5643235 - DNA, 25 bp, Homo sapien
accgcaaccgaatggacagggtaaa

SEQ ID NO: 5643236 - DNA, 25 bp, Homo sapien
ggaatgaccttatatagctacggca

SEQ ID NO: 5643237 - DNA, 25 bp, Homo sapien
atctccacgtgattgaagaaaggag

SEQ ID NO: 5643238 - DNA, 25 bp, Homo sapien
acaccaaggaggcggccgctggccc

SEQ ID NO: 5643239 - DNA, 25 bp, Homo sapien
cagtgcttccacagagattagcctg

SEQ ID NO: 5643240 - DNA, 25 bp, Homo sapien
aggcctcgaggaagagcgggaatcc

SEQ ID NO: 5643241 - DNA, 25 bp, Homo sapien
agtactactgtagaactgcaatttc

SEQ ID NO: 5643242 - DNA, 25 bp, Homo sapien
aaatacctggagcagatgcagattt

SEQ ID NO: 5643243 - DNA, 25 bp, Homo sapien
gctcttgcagccaatgccggaacag

SEQ ID NO: 5643244 - DNA, 25 bp, Homo sapien
taatatgatctgtggagaatgtaca

SEQ ID NO: 5643245 - DNA, 25 bp, Homo sapien
agaaaagtgccagtttttccacaaa

SEQ ID NO: 5643246 - DNA, 25 bp, Homo sapien
ccaactatgtccagatgtgcaggct

SEQ ID NO: 5643247 - DNA, 25 bp, Homo sapien
caccaagagctgctttgaaacaaaa

SEQ ID NO: 5643248 - DNA, 25 bp, Homo sapien
aagcagagaggcagactctgattca

SEQ ID NO: 5643249 - DNA, 25 bp, Homo sapien
ggcggagggatgcaggtgggccgga

SEQ ID NO: 5643250 - DNA, 25 bp, Homo sapien
accgggaccgcggccgccgcagcca

SEQ ID NO: 5643251 - DNA, 25 bp, Homo sapien
aagaggaagatgaagaggaagacta

SEQ ID NO: 5643252 - DNA, 25 bp, Homo sapien
gactatataaagtactactgtagaa

SEQ ID NO: 5643253 - DNA, 25 bp, Homo sapien
ggggaggtttgtttgtgtgaaagga

SEQ ID NO: 5643254 - DNA, 25 bp, Homo sapien
gcctcattcactgtcctggctttta

SEQ ID NO: 5643255 - DNA, 25 bp, Homo sapien
tctgtggagaatgtacacagtttaa

SEQ ID NO: 5643256 - DNA, 25 bp, Homo sapien
ctatgctgaatgaccgccgtcggat

SEQ ID NO: 5643257 - DNA, 25 bp, Homo sapien
catcgcattctccaggccttacggc

SEQ ID NO: 5643258 - DNA, 25 bp, Homo sapien
agagcgggaatccgtgggcccactg

SEQ ID NO: 5643259 - DNA, 25 bp, Homo sapien
ggaaccaaagcctctctctgctcta

SEQ ID NO: 5643260 - DNA, 25 bp, Homo sapien
acttcagtctgagtagcagtgctct

SEQ ID NO: 5643261 - DNA, 25 bp, Homo sapien
actgaccctcggcctctactttgtc

SEQ ID NO: 5643262 - DNA, 25 bp, Homo sapien
cgcggccgccgcagccacgggcagg

SEQ ID NO: 5643263 - DNA, 25 bp, Homo sapien
tgcagaaccatggctatgagaaccc

SEQ ID NO: 5643264 - DNA, 25 bp, Homo sapien
agatctggaagacttcacagaagca

SEQ ID NO: 5643265 - DNA, 25 bp, Homo sapien
cttccaagccatggttaaagcttta

SEQ ID NO: 5643266 - DNA, 25 bp, Homo sapien
catgtggggtagaccagttccatgg

SEQ ID NO: 5643267 - DNA, 25 bp, Homo sapien
gtgtttccacggctggatacctgtg

SEQ ID NO: 5643268 - DNA, 25 bp, Homo sapien
catcaataaatactttaacttccta

SEQ ID NO: 5643269 - DNA, 25 bp, Homo sapien
ccaaagcctctctctgctctacaaa

SEQ ID NO: 5643270 - DNA, 25 bp, Homo sapien
tgggaagttaaatatgcatgtgaac

SEQ ID NO: 5643271 - DNA, 25 bp, Homo sapien
tccggttatgttgtgtaagtcaact

SEQ ID NO: 5643272 - DNA, 25 bp, Homo sapien
ctgaaactgagtctgtggacactgt

SEQ ID NO: 5643273 - DNA, 25 bp, Homo sapien
atgtagcccaagaaattcaagagga

SEQ ID NO: 5643274 - DNA, 25 bp, Homo sapien
tccctttttaaatgagctttcagga

SEQ ID NO: 5643275 - DNA, 25 bp, Homo sapien
ctctccaagggaaagtgcgtgcgct

SEQ ID NO: 5643276 - DNA, 25 bp, Homo sapien
tgacccgccacggcctcatcgcatt

SEQ ID NO: 5643277 - DNA, 25 bp, Homo sapien
gccctcagacaaagattattggatc

SEQ ID NO: 5643278 - DNA, 25 bp, Homo sapien
gctggtggagacccacctggcccga

SEQ ID NO: 5643279 - DNA, 25 bp, Homo sapien
ccggctacatcgaggctcttgcagc

SEQ ID NO: 5643280 - DNA, 25 bp, Homo sapien
gtatggcaccatcagccacgggatc

SEQ ID NO: 5643281 - DNA, 25 bp, Homo sapien
tggtggagacccacctggcccgagt

SEQ ID NO: 5643282 - DNA, 25 bp, Homo sapien
gctcgcttccagaaggctaaggagc

SEQ ID NO: 5643283 - DNA, 25 bp, Homo sapien
acaaaaagcaatgcaagagtcgctt

SEQ ID NO: 5643284 - DNA, 25 bp, Homo sapien
ggtgccggagggacaaaaagcaatg

SEQ ID NO: 5643285 - DNA, 25 bp, Homo sapien
ctcccatgtggggtagaccagttcc

SEQ ID NO: 5643286 - DNA, 25 bp, Homo sapien
ttaaattaatcagaaaccccacttc

SEQ ID NO: 5643287 - DNA, 25 bp, Homo sapien
acctacaaactccttaatatgatct

SEQ ID NO: 5643288 - DNA, 25 bp, Homo sapien
cggatggaggtgtgtgagaatcacc

SEQ ID NO: 5643289 - DNA, 25 bp, Homo sapien
ccagagctacagatcacaaatgtga

SEQ ID NO: 5643290 - DNA, 25 bp, Homo sapien
atagacttatatgcaggctgtcgtt

SEQ ID NO: 5643291 - DNA, 25 bp, Homo sapien
ccctgccgggccgtgatgcctcgtt

SEQ ID NO: 5643292 - DNA, 25 bp, Homo sapien
tgcgtctgacatcctgacctcctgg

SEQ ID NO: 5643293 - DNA, 25 bp, Homo sapien
acatcgaggctcttgcagccaatgc

SEQ ID NO: 5643294 - DNA, 25 bp, Homo sapien
gcctcgaggaagagcgggaatccgt

SEQ ID NO: 5643295 - DNA, 25 bp, Homo sapien
tagtgtatacagatgagggtgtccg

SEQ ID NO: 5643296 - DNA, 25 bp, Homo sapien
cccatgtggggtagaccagttccat

SEQ ID NO: 5643297 - DNA, 25 bp, Homo sapien
aagtagtccaggctgtccctgaaac

SEQ ID NO: 5643298 - DNA, 25 bp, Homo sapien
cttatatttgacattcttcactgtc

SEQ ID NO: 5643299 - DNA, 25 bp, Homo sapien
aactggtgccggagggacaaaaagc

SEQ ID NO: 5643300 - DNA, 25 bp, Homo sapien
acccgccacggcctcatcgcattct

SEQ ID NO: 5643301 - DNA, 25 bp, Homo sapien
gcaacaggaacaattttgagtctga

SEQ ID NO: 5643302 - DNA, 25 bp, Homo sapien
cgagtggaagctatgctgaatgacc

SEQ ID NO: 5643303 - DNA, 25 bp, Homo sapien
gcagtctgacccgccacggcctcat

SEQ ID NO: 5643304 - DNA, 25 bp, Homo sapien
ctttgaccctattcatgtctctacc

SEQ ID NO: 5643305 - DNA, 25 bp, Homo sapien
tctgaaggttctggtaacctgtggt

SEQ ID NO: 5643306 - DNA, 25 bp, Homo sapien
cttcccagccctacctgagaacgaa

SEQ ID NO: 5643307 - DNA, 25 bp, Homo sapien
ccactgaagcacgtgagagaccctc

SEQ ID NO: 5643308 - DNA, 25 bp, Homo sapien
ggcggcaacaggaacaattttgagt

SEQ ID NO: 5643309 - DNA, 25 bp, Homo sapien
caggagatgtatccagagctacaga

SEQ ID NO: 5643310 - DNA, 25 bp, Homo sapien
tctctgctctacaaagtaccttatg

SEQ ID NO: 5643311 - DNA, 25 bp, Homo sapien
gtctctacccactatgcacagatta

SEQ ID NO: 5643312 - DNA, 25 bp, Homo sapien
ggaagttaaatatgcatgtgaacat

SEQ ID NO: 5643313 - DNA, 25 bp, Homo sapien
tgctagttccagaaaagtgccagtt

SEQ ID NO: 5643314 - DNA, 25 bp, Homo sapien
aagaccacaccaaggaggcggccgc

SEQ ID NO: 5643315 - DNA, 25 bp, Homo sapien
gtctgctcccaggaggcgatgacgg

SEQ ID NO: 5643316 - DNA, 25 bp, Homo sapien
agttccagaaaagtgccagtttttc

SEQ ID NO: 5643317 - DNA, 25 bp, Homo sapien
caaggaaattactcatgatgtcaaa

SEQ ID NO: 5643318 - DNA, 25 bp, Homo sapien
tccaatgctcaccccagaagagcgt

SEQ ID NO: 5643319 - DNA, 25 bp, Homo sapien
cgggaccgcggccgccgcagccacg

SEQ ID NO: 5643320 - DNA, 25 bp, Homo sapien
attagcctgtagcttatatttgaca

SEQ ID NO: 5643321 - DNA, 25 bp, Homo sapien
ttcttcagtactgtcaggagatgta

SEQ ID NO: 5643322 - DNA, 25 bp, Homo sapien
ttccacaaagagcggatggaggtgt

SEQ ID NO: 5643323 - DNA, 25 bp, Homo sapien
agaaggctaaggagcagctggagat

SEQ ID NO: 5643324 - DNA, 25 bp, Homo sapien
gtcattgacgagactctggatgtta

SEQ ID NO: 5643325 - DNA, 25 bp, Homo sapien
gactgccaagcagcagccgctgcca

SEQ ID NO: 5643326 - DNA, 25 bp, Homo sapien
caactcttcagcctcattcactgtc

SEQ ID NO: 5643327 - DNA, 25 bp, Homo sapien
cgatgctcactgcttctgctttttc

SEQ ID NO: 5643328 - DNA, 25 bp, Homo sapien
ctacaaagtaccttatgtagcccaa

SEQ ID NO: 5643329 - DNA, 25 bp, Homo sapien
ctacaaactccttaatatgatctgt

SEQ ID NO: 5643330 - DNA, 25 bp, Homo sapien
ctgtggatgaggatgatgaggatga

SEQ ID NO: 5643331 - DNA, 25 bp, Homo sapien
gggttagtattgacaactggtgccg

SEQ ID NO: 5643332 - DNA, 25 bp, Homo sapien
tgacctcctggactgtaggactata

SEQ ID NO: 5643333 - DNA, 25 bp, Homo sapien
ccggaacaggatttgctgttgctga

SEQ ID NO: 5643334 - DNA, 25 bp, Homo sapien
ctcctctgccaaccaatgatgttga

SEQ ID NO: 5643335 - DNA, 25 bp, Homo sapien
atgctgaatgaccgccgtcggatgg

SEQ ID NO: 5643336 - DNA, 25 bp, Homo sapien
ggcagtattccctttttaaatgagc

SEQ ID NO: 5643337 - DNA, 25 bp, Homo sapien
atgatctgtggagaatgtacacagt

SEQ ID NO: 5643338 - DNA, 25 bp, Homo sapien
aaagattattggatctgtgtcaaaa

SEQ ID NO: 5643339 - DNA, 25 bp, Homo sapien
gaagaaaggaggaaccaaagcctct

SEQ ID NO: 5643340 - DNA, 25 bp, Homo sapien
gatgcctcgttggtacttcgacctc

SEQ ID NO: 5643341 - DNA, 25 bp, Homo sapien
tgtgtgctgccctcagacaaagatt

SEQ ID NO: 5643342 - DNA, 25 bp, Homo sapien
caggatttgctgttgctgagcctca

SEQ ID NO: 5643343 - DNA, 25 bp, Homo sapien
tgaggagagtgaggagatcccaccg

SEQ ID NO: 5643344 - DNA, 25 bp, Homo sapien
gctttatatatggtggctgcggcgg

SEQ ID NO: 5643345 - DNA, 25 bp, Homo sapien
gaaagtagtccaggctgtccctgaa

SEQ ID NO: 5643346 - DNA, 25 bp, Homo sapien
tactactgtagaactgcaatttcca

SEQ ID NO: 5643347 - DNA, 25 bp, Homo sapien
gatcccacgattccgatcgactgcc

SEQ ID NO: 5643348 - DNA, 25 bp, Homo sapien
gtttccacggctggatacctgtgtg

SEQ ID NO: 5643349 - DNA, 25 bp, Homo sapien
ccccctcctgtcaccggccttgtga

SEQ ID NO: 5643350 - DNA, 25 bp, Homo sapien
tgaacccggcagcgacggcaccatg

SEQ ID NO: 5643351 - DNA, 25 bp, Homo sapien
gagctctgaggagagtgaggagatc

SEQ ID NO: 5643352 - DNA, 25 bp, Homo sapien
cagttccatggcactgaatatgtgt

SEQ ID NO: 5643353 - DNA, 25 bp, Homo sapien
tatgcacagattaaacttcacctac

SEQ ID NO: 5643354 - DNA, 25 bp, Homo sapien
tgactacaatgaggagaatcctact

SEQ ID NO: 5643355 - DNA, 25 bp, Homo sapien
ggaatccgtgggcccactgcgggag

SEQ ID NO: 5643356 - DNA, 25 bp, Homo sapien
tgcatgtgaacattcagactgggaa

SEQ ID NO: 5643357 - DNA, 25 bp, Homo sapien
atgatgtttataaaagtgaatttcc

SEQ ID NO: 5643358 - DNA, 25 bp, Homo sapien
ccaacaggcaccaagagctgctttg

SEQ ID NO: 5643359 - DNA, 25 bp, Homo sapien
gcctcatcgcattctccaggcctta

SEQ ID NO: 5643360 - DNA, 25 bp, Homo sapien
aatatgcatgtgaacattcagactg

SEQ ID NO: 5643361 - DNA, 25 bp, Homo sapien
agaagcagcagctggtggagaccca

SEQ ID NO: 5643362 - DNA, 25 bp, Homo sapien
gattgaagaaaggaggaaccaaagc

SEQ ID NO: 5643363 - DNA, 25 bp, Homo sapien
accttcaaaggagatgactacaatg

SEQ ID NO: 5643364 - DNA, 25 bp, Homo sapien
cccaaagcagagaggcagactctga

SEQ ID NO: 5643365 - DNA, 25 bp, Homo sapien
gggatgcaggtgggccggaagatcc

SEQ ID NO: 5643366 - DNA, 25 bp, Homo sapien
agctatgctgaatgaccgccgtcgg

SEQ ID NO: 5643367 - DNA, 25 bp, Homo sapien
tttgtcccctcacctccaccccctc

SEQ ID NO: 5643368 - DNA, 25 bp, Homo sapien
gcaggctcctgcttctgctgctggt

SEQ ID NO: 5643369 - DNA, 25 bp, Homo sapien
ttcgagacctctgcagatgataatg

SEQ ID NO: 5643370 - DNA, 25 bp, Homo sapien
catcagcctggtgatgctgaggaag

SEQ ID NO: 5643371 - DNA, 25 bp, Homo sapien
accatccgtcattaccagcatgtgt

SEQ ID NO: 5643372 - DNA, 25 bp, Homo sapien
agattactactatgacaccttcaaa

SEQ ID NO: 5643373 - DNA, 25 bp, Homo sapien
ggcccgagtggaagctatgctgaat

SEQ ID NO: 5643374 - DNA, 25 bp, Homo sapien
agatatggaccagttcactgcctca

SEQ ID NO: 5643375 - DNA, 25 bp, Homo sapien
caatgttttgtgggaagttaaatat

SEQ ID NO: 5643376 - DNA, 25 bp, Homo sapien
tgggaaatgtcgattttcaataata

SEQ ID NO: 5643377 - DNA, 25 bp, Homo sapien
acacggtagtcaaagaggcatgtct

SEQ ID NO: 5643378 - DNA, 25 bp, Homo sapien
tcttgaagtccagtgtttccacggc

SEQ ID NO: 5643379 - DNA, 25 bp, Homo sapien
tacctggctgccttgcagtctgacc

SEQ ID NO: 5643380 - DNA, 25 bp, Homo sapien
caagcagcagccgctgccaggggct

SEQ ID NO: 5643381 - DNA, 25 bp, Homo sapien
tctcagagacccctgtggacgtccg

SEQ ID NO: 5643382 - DNA, 25 bp, Homo sapien
ttaaatgggtgaaagatggtaatat

SEQ ID NO: 5643383 - DNA, 25 bp, Homo sapien
gcaccgcaaccgaatggacagggta

SEQ ID NO: 5643384 - DNA, 25 bp, Homo sapien
gaaactgagtctgtggacactgtgg

SEQ ID NO: 5643385 - DNA, 25 bp, Homo sapien
aagatgaagaggaagactatgatgt

SEQ ID NO: 5643386 - DNA, 25 bp, Homo sapien
gaggaagactatgatgtttataaaa

SEQ ID NO: 5643387 - DNA, 25 bp, Homo sapien
gcttccacagagattagcctgtagc

SEQ ID NO: 5643388 - DNA, 25 bp, Homo sapien
tgctgaggaagaggcagtatggcac

SEQ ID NO: 5643389 - DNA, 25 bp, Homo sapien
gtacttcgacctctccaagggaaag

SEQ ID NO: 5643390 - DNA, 25 bp, Homo sapien
gtgctctcattggcctgctggtcat

SEQ ID NO: 5643391 - DNA, 25 bp, Homo sapien
ggaacaggatttgctgttgctgagc

SEQ ID NO: 5643392 - DNA, 25 bp, Homo sapien
ttccacggctggatacctgtgtgtc

SEQ ID NO: 5643393 - DNA, 25 bp, Homo sapien
gaataaagtggatgaaaacatggtc

SEQ ID NO: 5643394 - DNA, 25 bp, Homo sapien
aacccggcagcgacggcaccatgtc

SEQ ID NO: 5643395 - DNA, 25 bp, Homo sapien
gtatttcgagacctctgcagatgat

SEQ ID NO: 5643396 - DNA, 25 bp, Homo sapien
tgagaagcagcagctggtggagacc

SEQ ID NO: 5643397 - DNA, 25 bp, Homo sapien
gaccagtttcttgaagtccagtgtt

SEQ ID NO: 5643398 - DNA, 25 bp, Homo sapien
acgaaggatctggagtgggagagca

SEQ ID NO: 5643399 - DNA, 25 bp, Homo sapien
atgttttgtgggaagttaaatatgc

SEQ ID NO: 5643400 - DNA, 25 bp, Homo sapien
acggggccctgccgggccgtgatgc

SEQ ID NO: 5643401 - DNA, 25 bp, Homo sapien
agcgcggcagccctggcggagggat

SEQ ID NO: 5643402 - DNA, 25 bp, Homo sapien
tgggccggaagatcccacgattccg

SEQ ID NO: 5643403 - DNA, 25 bp, Homo sapien
ccctcctgtcaccggccttgtgaca

SEQ ID NO: 5643404 - DNA, 25 bp, Homo sapien
aggaccagtttcttgaagtccagtg

SEQ ID NO: 5643405 - DNA, 25 bp, Homo sapien
ttcggcaccgcaaccgaatggacag

SEQ ID NO: 5643406 - DNA, 25 bp, Homo sapien
ccctattcatgtctctacccactat

SEQ ID NO: 5643407 - DNA, 25 bp, Homo sapien
ttttattttcctgtgactgtttttg

SEQ ID NO: 5643408 - DNA, 25 bp, Homo sapien
gaaaaaaatgatctattgcagatat

SEQ ID NO: 5643409 - DNA, 25 bp, Homo sapien
tgaggattattgtatggctgtgtgt

SEQ ID NO: 5643410 - DNA, 25 bp, Homo sapien
ccaaaggcactgaccctcggcctct

SEQ ID NO: 5643411 - DNA, 25 bp, Homo sapien
tttcttgaagtccagtgtttccacg

SEQ ID NO: 5643412 - DNA, 25 bp, Homo sapien
gggaggacttcagtctgagtagcag

SEQ ID NO: 5643413 - DNA, 25 bp, Homo sapien
gaggagaatcctactgaacccggca

SEQ ID NO: 5643414 - DNA, 25 bp, Homo sapien
gatgggggactgatcggtgccgaag

SEQ ID NO: 5643415 - DNA, 25 bp, Homo sapien
ggccctgccgggccgtgatgcctcg

SEQ ID NO: 5643416 - DNA, 25 bp, Homo sapien
gcgcgctagagcgacccggcgaggg

SEQ ID NO: 5643417 - DNA, 25 bp, Homo sapien
ctacaaatacctggagcagatgcag

SEQ ID NO: 5643418 - DNA, 25 bp, Homo sapien
agacctctgcagatgataatgagca

SEQ ID NO: 5643419 - DNA, 25 bp, Homo sapien
tcttcagcctcattcactgtcctgg

SEQ ID NO: 5643420 - DNA, 25 bp, Homo sapien
tttgtgggaagttaaatatgcatgt

SEQ ID NO: 5643421 - DNA, 25 bp, Homo sapien
tgcttgtacagttgatgtcgatgct

SEQ ID NO: 5643422 - DNA, 25 bp, Homo sapien
tcccaggtgatgacacatctccacg

SEQ ID NO: 5643423 - DNA, 25 bp, Homo sapien
gctgctttgaaacaaaagaagaagt

SEQ ID NO: 5643424 - DNA, 25 bp, Homo sapien
gaggcggccgctggcccaggagaga

SEQ ID NO: 5643425 - DNA, 25 bp, Homo sapien
caaagatcgcttacataccatccgt

SEQ ID NO: 5643426 - DNA, 25 bp, Homo sapien
aggaggaaccaaagcctctctctgc

SEQ ID NO: 5643427 - DNA, 25 bp, Homo sapien
tgttggctgttgacccagaaaaggc

SEQ ID NO: 5643428 - DNA, 25 bp, Homo sapien
gctgtcgttccggttatgttgtgta

SEQ ID NO: 5643429 - DNA, 25 bp, Homo sapien
ctggcccaggagagaacacggggag

SEQ ID NO: 5643430 - DNA, 25 bp, Homo sapien
actgcaatttccattcttttaaatg

SEQ ID NO: 5643431 - DNA, 25 bp, Homo sapien
gtccgtgctgagaacaaagatcgct

SEQ ID NO: 5643432 - DNA, 25 bp, Homo sapien
ccttccaactatgtccagatgtgca

SEQ ID NO: 5643433 - DNA, 25 bp, Homo sapien
ccgcagccacgggcaggctcctgct

SEQ ID NO: 5643434 - DNA, 25 bp, Homo sapien
aaaggaccagtttcttgaagtccag

SEQ ID NO: 5643435 - DNA, 25 bp, Homo sapien
cagcctcattcactgtcctggcttt

SEQ ID NO: 5643436 - DNA, 25 bp, Homo sapien
tgggcccactgcgggaggacttcag

SEQ ID NO: 5643437 - DNA, 25 bp, Homo sapien
acaccttcaaaggagatgactacaa

SEQ ID NO: 5643438 - DNA, 25 bp, Homo sapien
acctctccaagggaaagtgcgtgcg

SEQ ID NO: 5643439 - DNA, 25 bp, Homo sapien
acgtgagagaccctcgcaaaatgat

SEQ ID NO: 5643440 - DNA, 25 bp, Homo sapien
tgtggggtagaccagttccatggca

SEQ ID NO: 5643441 - DNA, 25 bp, Homo sapien
tccatggcactgaatatgtgtgctg

SEQ ID NO: 5643442 - DNA, 25 bp, Homo sapien
acacggggaggtttgtttgtgtgaa

SEQ ID NO: 5643443 - DNA, 25 bp, Homo sapien
taagtgatgtcctgctagttccaga

SEQ ID NO: 5643444 - DNA, 25 bp, Homo sapien
aatgggaaatgtcgattttcaataa

SEQ ID NO: 5643445 - DNA, 25 bp, Homo sapien
gattccgatcgactgccaagcagca

SEQ ID NO: 5643446 - DNA, 25 bp, Homo sapien
gcttacataccatccgtcattacca

SEQ ID NO: 5643447 - DNA, 25 bp, Homo sapien
cggtcatcgtcatcagcctggtgat

SEQ ID NO: 5643448 - DNA, 25 bp, Homo sapien
ctccacgtgattgaagaaaggagga

SEQ ID NO: 5643449 - DNA, 25 bp, Homo sapien
agtactgtcaggagatgtatccaga

SEQ ID NO: 5643450 - DNA, 25 bp, Homo sapien
acttatatgcaggctgtcgttccgg

SEQ ID NO: 5643451 - DNA, 25 bp, Homo sapien
ctgtgtgtctccataaaagtcctgt

SEQ ID NO: 5643452 - DNA, 25 bp, Homo sapien
aatgcttgtacagttgatgtcgatg

SEQ ID NO: 5643453 - DNA, 25 bp, Homo sapien
ctggtgccggagggacaaaaagcaa

SEQ ID NO: 5643454 - DNA, 25 bp, Homo sapien
gtgccagtttttccacaaagagcgg

SEQ ID NO: 5643455 - DNA, 25 bp, Homo sapien
acgtccgggtgagctctgaggagag

SEQ ID NO: 5643456 - DNA, 25 bp, Homo sapien
catgtctgactcagggaatgacctt

SEQ ID NO: 5643457 - DNA, 25 bp, Homo sapien
ccttacggcgttatgtccgtgctga

SEQ ID NO: 5643458 - DNA, 25 bp, Homo sapien
aactgagtctgtggacactgtggaa

SEQ ID NO: 5643459 - DNA, 25 bp, Homo sapien
cgctttgttacacctttcaagtgtc

SEQ ID NO: 5643460 - DNA, 25 bp, Homo sapien
tgtatggctgtgtgtaaagcgatga

SEQ ID NO: 5643461 - DNA, 25 bp, Homo sapien
accgccgtcggatggctctggagaa

SEQ ID NO: 5643462 - DNA, 25 bp, Homo sapien
gctgagaacaaagatcgcttacata

SEQ ID NO: 5643463 - DNA, 25 bp, Homo sapien
ttgtctgacacatgctctcaatata

SEQ ID NO: 5643464 - DNA, 25 bp, Homo sapien
ctggccggctacatcgaggctcttg

SEQ ID NO: 5643465 - DNA, 25 bp, Homo sapien
tgccggaacaggatttgctgttgct

SEQ ID NO: 5643466 - DNA, 25 bp, Homo sapien
tcaagctaagaacctccccaaagca

SEQ ID NO: 5643467 - DNA, 25 bp, Homo sapien
ccctcacctccaccccctcctgtca

SEQ ID NO: 5643468 - DNA, 25 bp, Homo sapien
ccctcgcaaaatgatgtgaaaggac

SEQ ID NO: 5643469 - DNA, 25 bp, Homo sapien
tcccctcacctccaccccctcctgt

SEQ ID NO: 5643470 - DNA, 25 bp, Homo sapien
gagaccctcgcaaaatgatgtgaaa

SEQ ID NO: 5643471 - DNA, 25 bp, Homo sapien
taaacacatcaataaatactttaac

SEQ ID NO: 5643472 - DNA, 25 bp, Homo sapien
tgaagcagatctggaagacttcaca

SEQ ID NO: 5643473 - DNA, 25 bp, Homo sapien
gggaaagtgcgtgcgctttatatat

SEQ ID NO: 5643474 - DNA, 25 bp, Homo sapien
tttgaacaattgtgttttcgtcaca

SEQ ID NO: 5643475 - DNA, 25 bp, Homo sapien
ccttatgtagcccaagaaattcaag

SEQ ID NO: 5643476 - DNA, 25 bp, Homo sapien
cttcacagaagcagctgtggatgag

SEQ ID NO: 5643477 - DNA, 25 bp, Homo sapien
cttcggaatccagtgcttccacaga

SEQ ID NO: 5643478 - DNA, 25 bp, Homo sapien
acctacaaatacctggagcagatgc

SEQ ID NO: 5643479 - DNA, 25 bp, Homo sapien
ttcagcctcattcactgtcctggct

SEQ ID NO: 5643480 - DNA, 25 bp, Homo sapien
aagcagcagctggtggagacccacc

SEQ ID NO: 5643481 - DNA, 25 bp, Homo sapien
agatgtatccagagctacagatcac

SEQ ID NO: 5643482 - DNA, 25 bp, Homo sapien
ccaccccttcccagccctacctgag

SEQ ID NO: 5643483 - DNA, 25 bp, Homo sapien
tttaaatctgaaggttctggtaacc

SEQ ID NO: 5643484 - DNA, 25 bp, Homo sapien
agaaaaggcggcccagatgaaatcc

SEQ ID NO: 5643485 - DNA, 25 bp, Homo sapien
tcaccaaggacgttaaaggcatttt

SEQ ID NO: 5643486 - DNA, 25 bp, Homo sapien
taaatatgcatgtgaacattcagac

SEQ ID NO: 5643487 - DNA, 25 bp, Homo sapien
ccagaaggctaaggagcagctggag

SEQ ID NO: 5643488 - DNA, 25 bp, Homo sapien
atggaggcaaaccagcgggttagta

SEQ ID NO: 5643489 - DNA, 25 bp, Homo sapien
aagttgctgagaaatggggtggaat

SEQ ID NO: 5643490 - DNA, 25 bp, Homo sapien
gaggaccgagattactactatgaca

SEQ ID NO: 5643491 - DNA, 25 bp, Homo sapien
tgggtgaatttgtaagtgatgtcct

SEQ ID NO: 5643492 - DNA, 25 bp, Homo sapien
tgggaacctgatccaacaggcacca

SEQ ID NO: 5643493 - DNA, 25 bp, Homo sapien
aacaattttgagtctgaggattatt

SEQ ID NO: 5643494 - DNA, 25 bp, Homo sapien
ttttaaatgggtgaaagatggtaat

SEQ ID NO: 5643495 - DNA, 25 bp, Homo sapien
tgcagatttaggtggcagggagcgc

SEQ ID NO: 5643496 - DNA, 25 bp, Homo sapien
ggctacatcgaggctcttgcagcca

SEQ ID NO: 5643497 - DNA, 25 bp, Homo sapien
taaaagtgaatttcctactgaagca

SEQ ID NO: 5643498 - DNA, 25 bp, Homo sapien
gtggaatagggaactgtaatggcca

SEQ ID NO: 5643499 - DNA, 25 bp, Homo sapien
attttgagtctgaggattattgtat

SEQ ID NO: 5643500 - DNA, 25 bp, Homo sapien
atcgaggctcttgcagccaatgccg

SEQ ID NO: 5643501 - DNA, 25 bp, Homo sapien
gcatgctgctcccatgtggggtaga

SEQ ID NO: 5643502 - DNA, 25 bp, Homo sapien
agggacaaaaagcaatgcaagagtc

SEQ ID NO: 5643503 - DNA, 25 bp, Homo sapien
tccttcggaatccagtgcttccaca

SEQ ID NO: 5643504 - DNA, 25 bp, Homo sapien
taggtggcagggagcgcggcagccc

SEQ ID NO: 5643505 - DNA, 25 bp, Homo sapien
cgagacctctgcagatgataatgag

SEQ ID NO: 5643506 - DNA, 25 bp, Homo sapien
tatgcatgtgaacattcagactggg

SEQ ID NO: 5643507 - DNA, 25 bp, Homo sapien
tcgactgccaagcagcagccgctgc

SEQ ID NO: 5643508 - DNA, 25 bp, Homo sapien
tgacaactggtgccggagggacaaa

SEQ ID NO: 5643509 - DNA, 25 bp, Homo sapien
tgcaatttccattcttttaaatggg

SEQ ID NO: 5643510 - DNA, 25 bp, Homo sapien
acggtagtcaaagaggcatgtctga

SEQ ID NO: 5643511 - DNA, 25 bp, Homo sapien
gtcaggagatgtatccagagctaca

SEQ ID NO: 5643512 - DNA, 25 bp, Homo sapien
gcctctactttgtcccctcacctcc

SEQ ID NO: 5643513 - DNA, 25 bp, Homo sapien
ctgctggtcatcgcagtggccattg

SEQ ID NO: 5643514 - DNA, 25 bp, Homo sapien
tgtctgactcagggaatgaccttat

SEQ ID NO: 5643515 - DNA, 25 bp, Homo sapien
ttttcctgtgactgtttttgttttg

SEQ ID NO: 5643516 - DNA, 25 bp, Homo sapien
atgatgtcaaagctgtctgctccca

SEQ ID NO: 5643517 - DNA, 25 bp, Homo sapien
tcgcttacataccatccgtcattac

SEQ ID NO: 5643518 - DNA, 25 bp, Homo sapien
ttgctgagcctcaaatcgcaatgtt

SEQ ID NO: 5643519 - DNA, 25 bp, Homo sapien
aagcagatctggaagacttcacaga

SEQ ID NO: 5643520 - DNA, 25 bp, Homo sapien
tataaaagtgaatttcctactgaag

SEQ ID NO: 5643521 - DNA, 25 bp, Homo sapien
ccgtcggatggctctggagaactac

SEQ ID NO: 5643522 - DNA, 25 bp, Homo sapien
cctcaaatcgcaatgttttgtggga

SEQ ID NO: 5643523 - DNA, 25 bp, Homo sapien
cgtcacctgaacaagatgcagaacc

SEQ ID NO: 5643524 - DNA, 25 bp, Homo sapien
tggtggctgcggcggcaacaggaac

SEQ ID NO: 5643525 - DNA, 25 bp, Homo sapien
taaatgggaaatgtcgattttcaat

SEQ ID NO: 5643526 - DNA, 25 bp, Homo sapien
cccagaagagcgtcacctgaacaag

SEQ ID NO: 5643527 - DNA, 25 bp, Homo sapien
aaagaagaagttcttcagtactgtc

SEQ ID NO: 5643528 - DNA, 25 bp, Homo sapien
tatggtggctgcggcggcaacagga

SEQ ID NO: 5643529 - DNA, 25 bp, Homo sapien
tgctggtggggctcacggcgcctgc

SEQ ID NO: 5643530 - DNA, 25 bp, Homo sapien
aaagctgtctgctcccaggaggcga

SEQ ID NO: 5643531 - DNA, 25 bp, Homo sapien
attggcctgctggtcatcgcagtgg

SEQ ID NO: 5643532 - DNA, 25 bp, Homo sapien
tgtgttggctgttgacccagaaaag

SEQ ID NO: 5643533 - DNA, 25 bp, Homo sapien
aaaggcattttattccagcgtcttc

SEQ ID NO: 5643534 - DNA, 25 bp, Homo sapien
acattcttcactgtctgttgtttac

SEQ ID NO: 5643535 - DNA, 25 bp, Homo sapien
tgatgtcgatgctcactgcttctgc

SEQ ID NO: 5643536 - DNA, 25 bp, Homo sapien
atgggtgaaagatggtaatataaca

SEQ ID NO: 5643537 - DNA, 25 bp, Homo sapien
agaagaagttcttcagtactgtcag

SEQ ID NO: 5643538 - DNA, 25 bp, Homo sapien
agagcttagtgtatacagatgaggg

SEQ ID NO: 5643539 - DNA, 25 bp, Homo sapien
aagtgcgtgcgctttatatatggtg

SEQ ID NO: 5643540 - DNA, 25 bp, Homo sapien
ggaacaattttgagtctgaggatta

SEQ ID NO: 5643541 - DNA, 25 bp, Homo sapien
gttatgttgtgtaagtcaactcttc

SEQ ID NO: 5643542 - DNA, 25 bp, Homo sapien
tgaatgaccgccgtcggatggctct

SEQ ID NO: 5643543 - DNA, 25 bp, Homo sapien
cgtcacaggagtctttgtaatgctt

SEQ ID NO: 5643544 - DNA, 25 bp, Homo sapien
tcccagccctacctgagaacgaagg

SEQ ID NO: 5643545 - DNA, 25 bp, Homo sapien
ggcgttatgtccgtgctgagaacaa

SEQ ID NO: 5643546 - DNA, 25 bp, Homo sapien
atgagcatgctcgcttccagaaggc

SEQ ID NO: 5643547 - DNA, 25 bp, Homo sapien
acatctccacgtgattgaagaaagg

SEQ ID NO: 5643548 - DNA, 25 bp, Homo sapien
agctgtggatgaggatgatgaggat

SEQ ID NO: 5643549 - DNA, 25 bp, Homo sapien
gagggatgcaggtgggccggaagat

SEQ ID NO: 5643550 - DNA, 25 bp, Homo sapien
gccagtttttccacaaagagcggat

SEQ ID NO: 5643551 - DNA, 25 bp, Homo sapien
ctcgaggaagagcgggaatccgtgg

SEQ ID NO: 5643552 - DNA, 25 bp, Homo sapien
actcttcagcctcattcactgtcct

SEQ ID NO: 5643553 - DNA, 25 bp, Homo sapien
atgtgcaggctcctcctctctggac

SEQ ID NO: 5643554 - DNA, 25 bp, Homo sapien
atgggaagaggcagagcttcaagct

SEQ ID NO: 5643555 - DNA, 25 bp, Homo sapien
ggttctggtaacctgtggtgtattt

SEQ ID NO: 5643556 - DNA, 25 bp, Homo sapien
gaggcagtatggcaccatcagccac

SEQ ID NO: 5643557 - DNA, 25 bp, Homo sapien
ggtgggccggaagatcccacgattc

SEQ ID NO: 5643558 - DNA, 25 bp, Homo sapien
agagagcttagtgtatacagatgag

SEQ ID NO: 5643559 - DNA, 25 bp, Homo sapien
aatgtgatggaggcaaaccagcggg

SEQ ID NO: 5643560 - DNA, 25 bp, Homo sapien
gatgagctccttcaggagcagcgtg

SEQ ID NO: 5643561 - DNA, 25 bp, Homo sapien
tgtattgtctgacacatgctctcaa

SEQ ID NO: 5643562 - DNA, 25 bp, Homo sapien
gtgtatacagatgagggtgtccgct

SEQ ID NO: 5643563 - DNA, 25 bp, Homo sapien
ctgcagatgataatgagcatgctcg

SEQ ID NO: 5643564 - DNA, 25 bp, Homo sapien
tgaccgccgtcggatggctctggag

SEQ ID NO: 5643565 - DNA, 25 bp, Homo sapien
tttcctactgaagcagatctggaag

SEQ ID NO: 5643566 - DNA, 25 bp, Homo sapien
tcagtactgtcaggagatgtatcca

SEQ ID NO: 5643567 - DNA, 25 bp, Homo sapien
tgttgctgagcctcaaatcgcaatg

SEQ ID NO: 5643568 - DNA, 25 bp, Homo sapien
ctggagcagatgcagatttaggtgg

SEQ ID NO: 5643569 - DNA, 25 bp, Homo sapien
agctgtctgctcccaggaggcgatg

SEQ ID NO: 5643570 - DNA, 25 bp, Homo sapien
ctacatcgaggctcttgcagccaat

SEQ ID NO: 5643571 - DNA, 25 bp, Homo sapien
cctttttaaatgagctttcaggaag

SEQ ID NO: 5643572 - DNA, 25 bp, Homo sapien
tggagaactacctggctgccttgca

SEQ ID NO: 5643573 - DNA, 25 bp, Homo sapien
ttactcatgatgtcaaagctgtctg

SEQ ID NO: 5643574 - DNA, 25 bp, Homo sapien
gatgaaaacatggtcattgacgaga

SEQ ID NO: 5643575 - DNA, 25 bp, Homo sapien
ctagagagcttagtgtatacagatg

SEQ ID NO: 5643576 - DNA, 25 bp, Homo sapien
gctgagcctcaaatcgcaatgtttt

SEQ ID NO: 5643577 - DNA, 25 bp, Homo sapien
gaggttgatccaatgctcaccccag

SEQ ID NO: 5643578 - DNA, 25 bp, Homo sapien
agcagcgtgcagatatggaccagtt

SEQ ID NO: 5643579 - DNA, 25 bp, Homo sapien
gtgtaagtcaactcttcagcctcat

SEQ ID NO: 5643580 - DNA, 25 bp, Homo sapien
tggaggttgatccaatgctcacccc

SEQ ID NO: 5643581 - DNA, 25 bp, Homo sapien
cggcctctactttgtcccctcacct

SEQ ID NO: 5643582 - DNA, 25 bp, Homo sapien
gatcgcttacataccatccgtcatt

SEQ ID NO: 5643583 - DNA, 25 bp, Homo sapien
gcgtgcagatatggaccagttcact

SEQ ID NO: 5643584 - DNA, 25 bp, Homo sapien
gaagctatgctgaatgaccgccgtc

SEQ ID NO: 5643585 - DNA, 25 bp, Homo sapien
tgaaggttctggtaacctgtggtgt

SEQ ID NO: 5643586 - DNA, 25 bp, Homo sapien
agccacgggcaggctcctgcttctg

SEQ ID NO: 5643587 - DNA, 25 bp, Homo sapien
gtaagtcaactcttcagcctcattc

SEQ ID NO: 5643588 - DNA, 25 bp, Homo sapien
aatcaccagcactggcacacggtag

SEQ ID NO: 5643589 - DNA, 25 bp, Homo sapien
attaatcagaaaccccacttccatt

SEQ ID NO: 5643590 - DNA, 25 bp, Homo sapien
gtccgctgctgctttccttcggaat

SEQ ID NO: 5643591 - DNA, 25 bp, Homo sapien
ggtttgtttgtgtgaaaggaaagta

SEQ ID NO: 5643592 - DNA, 25 bp, Homo sapien
cccgagtggaagctatgctgaatga

SEQ ID NO: 5643593 - DNA, 25 bp, Homo sapien
ggatgaggatgatgaggatgaggaa

SEQ ID NO: 5643594 - DNA, 25 bp, Homo sapien
gaccctcgcaaaatgatgtgaaagg

SEQ ID NO: 5643595 - DNA, 25 bp, Homo sapien
acctgtgtgtctccataaaagtcct

SEQ ID NO: 5643596 - DNA, 25 bp, Homo sapien
ccggagggacaaaaagcaatgcaag

SEQ ID NO: 5643597 - DNA, 25 bp, Homo sapien
ctttcaggaagttgctgagaaatgg

SEQ ID NO: 5643598 - DNA, 25 bp, Homo sapien
agaaccccacctacaaatacctgga

SEQ ID NO: 5643599 - DNA, 25 bp, Homo sapien
cctccccaaagcagagaggcagact

SEQ ID NO: 5643600 - DNA, 25 bp, Homo sapien
cacttccaagccatggttaaagctt

SEQ ID NO: 5643601 - DNA, 25 bp, Homo sapien
gtggctgcggcggcaacaggaacaa

SEQ ID NO: 5643602 - DNA, 25 bp, Homo sapien
aatgaccttatatagctacggcatg

SEQ ID NO: 5643603 - DNA, 25 bp, Homo sapien
ttccaccccttcccagccctacctg

SEQ ID NO: 5643604 - DNA, 25 bp, Homo sapien
gagtcgctttgttacacctttcaag

SEQ ID NO: 5643605 - DNA, 25 bp, Homo sapien
ttaaagctttagagaaggaagcagc

SEQ ID NO: 5643606 - DNA, 25 bp, Homo sapien
aaagagcggatggaggtgtgtgaga

SEQ ID NO: 5643607 - DNA, 25 bp, Homo sapien
ttctttctttttattttaaatctga

SEQ ID NO: 5643608 - DNA, 25 bp, Homo sapien
gactgtaggactatataaagtacta

SEQ ID NO: 5643609 - DNA, 25 bp, Homo sapien
cagtgctctcattggcctgctggtc

SEQ ID NO: 5643610 - DNA, 25 bp, Homo sapien
gctggagattcggcaccgcaaccga

SEQ ID NO: 5643611 - DNA, 25 bp, Homo sapien
gaactgcaatttccattcttttaaa

SEQ ID NO: 5643612 - DNA, 25 bp, Homo sapien
gtgcaggctcctcctctctggactt

SEQ ID NO: 5643613 - DNA, 25 bp, Homo sapien
gactgggaaatgggaacctgatcca

SEQ ID NO: 5643614 - DNA, 25 bp, Homo sapien
tgatggaggcaaaccagcgggttag

SEQ ID NO: 5643615 - DNA, 25 bp, Homo sapien
caatttccattcttttaaatgggtg

SEQ ID NO: 5643616 - DNA, 25 bp, Homo sapien
agagctacagatcacaaatgtgatg

SEQ ID NO: 5643617 - DNA, 25 bp, Homo sapien
gaaagtgcgtgcgctttatatatgg

SEQ ID NO: 5643618 - DNA, 25 bp, Homo sapien
agatgaaatcccaggtgatgacaca

SEQ ID NO: 5643619 - DNA, 25 bp, Homo sapien
aagaggaagactatgatgtttataa

SEQ ID NO: 5643620 - DNA, 25 bp, Homo sapien
ggaggcaaaccagcgggttagtatt

SEQ ID NO: 5643621 - DNA, 25 bp, Homo sapien
tctctctgctctacaaagtacctta

SEQ ID NO: 5643622 - DNA, 25 bp, Homo sapien
ggttgatccaatgctcaccccagaa

SEQ ID NO: 5643623 - DNA, 25 bp, Homo sapien
attttaaatctgaaggttctggtaa

SEQ ID NO: 5643624 - DNA, 25 bp, Homo sapien
aggagatgactacaatgaggagaat

SEQ ID NO: 5643625 - DNA, 25 bp, Homo sapien
gatatttgatgtagttttctttttt

SEQ ID NO: 5643626 - DNA, 25 bp, Homo sapien
ccacagagattagcctgtagcttat

SEQ ID NO: 5643627 - DNA, 25 bp, Homo sapien
ggacgtccgggtgagctctgaggag

SEQ ID NO: 5643628 - DNA, 25 bp, Homo sapien
tgtgatggaggcaaaccagcgggtt

SEQ ID NO: 5643629 - DNA, 25 bp, Homo sapien
aatttgtaagtgatgtcctgctagt

SEQ ID NO: 5643630 - DNA, 25 bp, Homo sapien
tattccagcgtcttctagagagctt

SEQ ID NO: 5643631 - DNA, 25 bp, Homo sapien
ggaagtggtggaggaccgagattac

SEQ ID NO: 5643632 - DNA, 25 bp, Homo sapien
tgttgtgtaagtcaactcttcagcc

SEQ ID NO: 5643633 - DNA, 25 bp, Homo sapien
caatgaggagaatcctactgaaccc

SEQ ID NO: 5643634 - DNA, 25 bp, Homo sapien
ttgatgagctccttcaggagcagcg

SEQ ID NO: 5643635 - DNA, 25 bp, Homo sapien
ggacaaaaagcaatgcaagagtcgc

SEQ ID NO: 5643636 - DNA, 25 bp, Homo sapien
gggctcacggcgcctgccttggcgc

SEQ ID NO: 5643637 - DNA, 25 bp, Homo sapien
ctgggaaatgggaacctgatccaac

SEQ ID NO: 5643638 - DNA, 25 bp, Homo sapien
gtctttgtaatgcttgtacagttga

SEQ ID NO: 5643639 - DNA, 25 bp, Homo sapien
ccattcttttaaatgggtgaaagat

SEQ ID NO: 5643640 - DNA, 25 bp, Homo sapien
gttccatggcactgaatatgtgtgc

SEQ ID NO: 5643641 - DNA, 25 bp, Homo sapien
taatcagaaaccccacttccattgt

SEQ ID NO: 5643642 - DNA, 25 bp, Homo sapien
acctggagcagatgcagatttaggt

SEQ ID NO: 5643643 - DNA, 25 bp, Homo sapien
tgcaggtgggccggaagatcccacg

SEQ ID NO: 5643644 - DNA, 25 bp, Homo sapien
acagatgagggtgtccgctgctgct

SEQ ID NO: 5643645 - DNA, 25 bp, Homo sapien
tagggaactgtaatggccactgaag

SEQ ID NO: 5643646 - DNA, 25 bp, Homo sapien
caaagaggcatgtctgactcaggga

SEQ ID NO: 5643647 - DNA, 25 bp, Homo sapien
agacccacctggcccgagtggaagc

SEQ ID NO: 5643648 - DNA, 25 bp, Homo sapien
tgctcccatgtggggtagaccagtt

SEQ ID NO: 5643649 - DNA, 25 bp, Homo sapien
aggacgttaaaggcattttattcca

SEQ ID NO: 5643650 - DNA, 25 bp, Homo sapien
acccagaaaaggcggcccagatgaa

SEQ ID NO: 5643651 - DNA, 25 bp, Homo sapien
ctagttccagaaaagtgccagtttt

SEQ ID NO: 5643652 - DNA, 25 bp, Homo sapien
gaaattgatgagctccttcaggagc

SEQ ID NO: 5643653 - DNA, 25 bp, Homo sapien
tgtcgttccggttatgttgtgtaag

SEQ ID NO: 5643654 - DNA, 25 bp, Homo sapien
tgccaaccaatgatgttgatgtgta

SEQ ID NO: 5643655 - DNA, 25 bp, Homo sapien
ccaccgggaccgcggccgccgcagc

SEQ ID NO: 5643656 - DNA, 25 bp, Homo sapien
cttgagagccgcgcgctagagcgac

SEQ ID NO: 5643657 - DNA, 25 bp, Homo sapien
ttccagcgtcttctagagagcttag

SEQ ID NO: 5643658 - DNA, 25 bp, Homo sapien
ggatcgtggaggttgatccaatgct

SEQ ID NO: 5643659 - DNA, 25 bp, Homo sapien
tatgacaccttcaaaggagatgact

SEQ ID NO: 5643660 - DNA, 25 bp, Homo sapien
ctcctgtcaccggccttgtgacatt

SEQ ID NO: 5643661 - DNA, 25 bp, Homo sapien
cgtgggcccactgcgggaggacttc

SEQ ID NO: 5643662 - DNA, 25 bp, Homo sapien
gatgtgaaaggaccagtttcttgaa

SEQ ID NO: 5643663 - DNA, 25 bp, Homo sapien
gcagcagctggtggagacccacctg

SEQ ID NO: 5643664 - DNA, 25 bp, Homo sapien
actctggatgttaaggaaatgattt

SEQ ID NO: 5643665 - DNA, 25 bp, Homo sapien
gtgcagatatggaccagttcactgc

SEQ ID NO: 5643666 - DNA, 25 bp, Homo sapien
ggagacccacctggcccgagtggaa

SEQ ID NO: 5643667 - DNA, 25 bp, Homo sapien
cgccgcagccacgggcaggctcctg

SEQ ID NO: 5643668 - DNA, 25 bp, Homo sapien
ttccattgtattgtctgacacatgc

SEQ ID NO: 5643669 - DNA, 25 bp, Homo sapien
agcttgagagccgcgcgctagagcg

SEQ ID NO: 5643670 - DNA, 25 bp, Homo sapien
tgcagatatttgatgtagttttctt

SEQ ID NO: 5643671 - DNA, 25 bp, Homo sapien
tctgacccgccacggcctcatcgca

SEQ ID NO: 5643672 - DNA, 25 bp, Homo sapien
cggcaccgcaaccgaatggacaggg

SEQ ID NO: 5643673 - DNA, 25 bp, Homo sapien
tcagacaaagattattggatctgtg

SEQ ID NO: 5643674 - DNA, 25 bp, Homo sapien
atgtacacagtttaaacacatcaat

SEQ ID NO: 5643675 - DNA, 25 bp, Homo sapien
ggccggctacatcgaggctcttgca

SEQ ID NO: 5643676 - DNA, 25 bp, Homo sapien
tgccttgcagtctgacccgccacgg

SEQ ID NO: 5643677 - DNA, 25 bp, Homo sapien
ggctaaggagcagctggagattcgg

SEQ ID NO: 5643678 - DNA, 25 bp, Homo sapien
tgatgtagttttcttttttaaatta

SEQ ID NO: 5643679 - DNA, 25 bp, Homo sapien
tttcaataatagacttatatgcagg

SEQ ID NO: 5643680 - DNA, 25 bp, Homo sapien
gtcctgtcaccaaggacgttaaagg

SEQ ID NO: 5643681 - DNA, 25 bp, Homo sapien
agagaggcagactctgattcagcac

SEQ ID NO: 5643682 - DNA, 25 bp, Homo sapien
aataatagacttatatgcaggctgt

SEQ ID NO: 5643683 - DNA, 25 bp, Homo sapien
gtagaccagttccatggcactgaat

SEQ ID NO: 5643684 - DNA, 25 bp, Homo sapien
ccaggggctgcgtctgacatcctga

SEQ ID NO: 5643685 - DNA, 25 bp, Homo sapien
ttcctgtgactgtttttgttttgtt

SEQ ID NO: 5643686 - DNA, 25 bp, Homo sapien
agatgtgcaggctcctcctctctgg

SEQ ID NO: 5643687 - DNA, 25 bp, Homo sapien
tagaactgcaatttccattctttta

SEQ ID NO: 5643688 - DNA, 25 bp, Homo sapien
gtgatgacacatctccacgtgattg

SEQ ID NO: 5643689 - DNA, 25 bp, Homo sapien
tactgtcaggagatgtatccagagc

SEQ ID NO: 5643690 - DNA, 25 bp, Homo sapien
cctgccttggcgctggccggctaca

SEQ ID NO: 5643691 - DNA, 25 bp, Homo sapien
cactgtcctggcttttatttaaaga

SEQ ID NO: 5643692 - DNA, 25 bp, Homo sapien
ctgtctgctcccaggaggcgatgac

SEQ ID NO: 5643693 - DNA, 25 bp, Homo sapien
gattttcaatgccgagagagttgga

SEQ ID NO: 5643694 - DNA, 25 bp, Homo sapien
tgtcaccggccttgtgacattcact

SEQ ID NO: 5643695 - DNA, 25 bp, Homo sapien
ccgggtgagctctgaggagagtgag

SEQ ID NO: 5643696 - DNA, 25 bp, Homo sapien
ccgcgcgctagagcgacccggcgag

SEQ ID NO: 5643697 - DNA, 25 bp, Homo sapien
ttcagactgggaaatgggaacctga

SEQ ID NO: 5643698 - DNA, 25 bp, Homo sapien
acgtgattgaagaaaggaggaacca

SEQ ID NO: 5643699 - DNA, 25 bp, Homo sapien
gctttccttcggaatccagtgcttc

SEQ ID NO: 5643700 - DNA, 25 bp, Homo sapien
aaccaatgatgttgatgtgtatttc

SEQ ID NO: 5643701 - DNA, 25 bp, Homo sapien
atgtcgatgctcactgcttctgctt

SEQ ID NO: 5643702 - DNA, 25 bp, Homo sapien
aggcaaaccagcgggttagtattga

SEQ ID NO: 5643703 - DNA, 25 bp, Homo sapien
cgagactctggatgttaaggaaatg

SEQ ID NO: 5643704 - DNA, 25 bp, Homo sapien
gcagagcttcaagctaagaacctcc

SEQ ID NO: 5643705 - DNA, 25 bp, Homo sapien
ggtggcagggagcgcggcagccctg

SEQ ID NO: 5643706 - DNA, 25 bp, Homo sapien
ctgctttccttcggaatccagtgct

SEQ ID NO: 5643707 - DNA, 25 bp, Homo sapien
atttcgagacctctgcagatgataa

SEQ ID NO: 5643708 - DNA, 25 bp, Homo sapien
ctccaaaggcactgaccctcggcct

SEQ ID NO: 5643709 - DNA, 25 bp, Homo sapien
ttgtgtaagtcaactcttcagcctc

SEQ ID NO: 5643710 - DNA, 25 bp, Homo sapien
tgagcctcaaatcgcaatgttttgt

SEQ ID NO: 5643711 - DNA, 25 bp, Homo sapien
aaatgattttcaatgccgagagagt

SEQ ID NO: 5643712 - DNA, 25 bp, Homo sapien
tcgcttccagaaggctaaggagcag

SEQ ID NO: 5643713 - DNA, 25 bp, Homo sapien
ctcctctctggactttctccaaagg

SEQ ID NO: 5643714 - DNA, 25 bp, Homo sapien
tgtggtgtatttttattttcctgtg

SEQ ID NO: 5643715 - DNA, 25 bp, Homo sapien
ctattcatgtctctacccactatgc

SEQ ID NO: 5643716 - DNA, 25 bp, Homo sapien
agagaagaccacaccaaggaggcgg

SEQ ID NO: 5643717 - DNA, 25 bp, Homo sapien
ggcagtatggcaccatcagccacgg

SEQ ID NO: 5643718 - DNA, 25 bp, Homo sapien
agttcttcagtactgtcaggagatg

SEQ ID NO: 5643719 - DNA, 25 bp, Homo sapien
tggcacacggtagtcaaagaggcat

SEQ ID NO: 5643720 - DNA, 25 bp, Homo sapien
cgcaatgttttgtgggaagttaaat

SEQ ID NO: 5643721 - DNA, 25 bp, Homo sapien
aagagaaagtgattaacagtaagaa

SEQ ID NO: 5643722 - DNA, 25 bp, Homo sapien
agtggccattgccacggtcatcgtc

SEQ ID NO: 5643723 - DNA, 25 bp, Homo sapien
aagcacgtgagagaccctcgcaaaa

SEQ ID NO: 5643724 - DNA, 25 bp, Homo sapien
tggtgtatttttattttcctgtgac

SEQ ID NO: 5643725 - DNA, 25 bp, Homo sapien
gctcaccccagaagagcgtcacctg

SEQ ID NO: 5643726 - DNA, 25 bp, Homo sapien
cctttcaagtgtctcgtgggtgaat

SEQ ID NO: 5643727 - DNA, 25 bp, Homo sapien
cagcactggcacacggtagtcaaag

SEQ ID NO: 5643728 - DNA, 25 bp, Homo sapien
atatggaccagttcactgcctcaat

SEQ ID NO: 5643729 - DNA, 25 bp, Homo sapien
ataaagtggatgaaaacatggtcat

SEQ ID NO: 5643730 - DNA, 25 bp, Homo sapien
aaaggaggaaccaaagcctctctct

SEQ ID NO: 5643731 - DNA, 25 bp, Homo sapien
aaagctttagagaaggaagcagcca

SEQ ID NO: 5643732 - DNA, 25 bp, Homo sapien
gagaaagtgattaacagtaagaata

SEQ ID NO: 5643733 - DNA, 25 bp, Homo sapien
tctgactcagggaatgaccttatat

SEQ ID NO: 5643734 - DNA, 25 bp, Homo sapien
tggctgccttgcagtctgacccgcc

SEQ ID NO: 5643735 - DNA, 25 bp, Homo sapien
gagattcggcaccgcaaccgaatgg

SEQ ID NO: 5643736 - DNA, 25 bp, Homo sapien
aagagtcgctttgttacacctttca

SEQ ID NO: 5643737 - DNA, 25 bp, Homo sapien
gcactgaccctcggcctctactttg

SEQ ID NO: 5643738 - DNA, 25 bp, Homo sapien
actgcctcaatctcagagacccctg

SEQ ID NO: 5643739 - DNA, 25 bp, Homo sapien
tatttgatgtagttttcttttttaa

SEQ ID NO: 5643740 - DNA, 25 bp, Homo sapien
ggctgcggcggcaacaggaacaatt

SEQ ID NO: 5643741 - DNA, 25 bp, Homo sapien
ccacctacaaatacctggagcagat

SEQ ID NO: 5643742 - DNA, 25 bp, Homo sapien
ggggactgatcggtgccgaagagaa

SEQ ID NO: 5643743 - DNA, 25 bp, Homo sapien
caaggacgttaaaggcattttattc

SEQ ID NO: 5643744 - DNA, 25 bp, Homo sapien
gtgtctcgtgggtgaatttgtaagt

SEQ ID NO: 5643745 - DNA, 25 bp, Homo sapien
gagatgactacaatgaggagaatcc

SEQ ID NO: 5643746 - DNA, 25 bp, Homo sapien
ccagatgtgcaggctcctcctctct

SEQ ID NO: 5643747 - DNA, 25 bp, Homo sapien
ccacggctggatacctgtgtgtctc

SEQ ID NO: 5643748 - DNA, 25 bp, Homo sapien
tttatatatggtggctgcggcggca

SEQ ID NO: 5643749 - DNA, 25 bp, Homo sapien
ttttcctcccctttgaccctattca

SEQ ID NO: 5643750 - DNA, 25 bp, Homo sapien
aacaattgtgttttcgtcacaggag

SEQ ID NO: 5643751 - DNA, 25 bp, Homo sapien
ttcaagaggaaattgatgagctcct

SEQ ID NO: 5643752 - DNA, 25 bp, Homo sapien
tctgaggattattgtatggctgtgt

SEQ ID NO: 5643753 - DNA, 25 bp, Homo sapien
aagcagccagtgagaagcagcagct

SEQ ID NO: 5643754 - DNA, 25 bp, Homo sapien
gctgctggtggggctcacggcgcct

SEQ ID NO: 5643755 - DNA, 25 bp, Homo sapien
ggaggtttgtttgtgtgaaaggaaa

SEQ ID NO: 5643756 - DNA, 25 bp, Homo sapien
ggaagactatgatgtttataaaagt

SEQ ID NO: 5643757 - DNA, 25 bp, Homo sapien
tgatgtgtatttcgagacctctgca

SEQ ID NO: 5643758 - DNA, 25 bp, Homo sapien
tggctctggagaactacctggctgc

SEQ ID NO: 5643759 - DNA, 25 bp, Homo sapien
gatgattcctccaactcctctgcca

SEQ ID NO: 5643760 - DNA, 25 bp, Homo sapien
cctggactgtaggactatataaagt

SEQ ID NO: 5643761 - DNA, 25 bp, Homo sapien
tttttaaatgagctttcaggaagtt

SEQ ID NO: 5643762 - DNA, 25 bp, Homo sapien
tggcactgaatatgtgtgctgccct

SEQ ID NO: 5643763 - DNA, 25 bp, Homo sapien
tgagtctgaggattattgtatggct

SEQ ID NO: 5643764 - DNA, 25 bp, Homo sapien
cagaaccatggctatgagaacccca

SEQ ID NO: 5643765 - DNA, 25 bp, Homo sapien
tcaataaatactttaacttcctaaa

SEQ ID NO: 5643766 - DNA, 25 bp, Homo sapien
caggaggcgatgacggggccctgcc

SEQ ID NO: 5643767 - DNA, 25 bp, Homo sapien
gttgatgtgtatttcgagacctctg

SEQ ID NO: 5643768 - DNA, 25 bp, Homo sapien
gtctcgtgggtgaatttgtaagtga

SEQ ID NO: 5643769 - DNA, 25 bp, Homo sapien
ttatatgcaggctgtcgttccggtt

SEQ ID NO: 5643770 - DNA, 25 bp, Homo sapien
atcgtggaggttgatccaatgctca

SEQ ID NO: 5643771 - DNA, 25 bp, Homo sapien
gcatgctcgcttccagaaggctaag

SEQ ID NO: 5643772 - DNA, 25 bp, Homo sapien
tatatggtggctgcggcggcaacag

SEQ ID NO: 5643773 - DNA, 25 bp, Homo sapien
cctggtgatgctgaggaagaggcag

SEQ ID NO: 5643774 - DNA, 25 bp, Homo sapien
gattattgtatggctgtgtgtaaag

SEQ ID NO: 5643775 - DNA, 25 bp, Homo sapien
cgttaaaggcattttattccagcgt

SEQ ID NO: 5643776 - DNA, 25 bp, Homo sapien
tgtgaaaggaccagtttcttgaagt

SEQ ID NO: 5643777 - DNA, 25 bp, Homo sapien
ccacgattccgatcgactgccaagc

SEQ ID NO: 5643778 - DNA, 25 bp, Homo sapien
ataccatccgtcattaccagcatgt

SEQ ID NO: 5643779 - DNA, 25 bp, Homo sapien
aggcagagcttcaagctaagaacct

SEQ ID NO: 5643780 - DNA, 25 bp, Homo sapien
gagtgaggagatcccaccgttccac

SEQ ID NO: 5643781 - DNA, 25 bp, Homo sapien
attgtgttttcgtcacaggagtctt

SEQ ID NO: 5643782 - DNA, 25 bp, Homo sapien
tgaccttatatagctacggcatgct

SEQ ID NO: 5643783 - DNA, 25 bp, Homo sapien
ttggatctgtgtcaaaagaagagga

SEQ ID NO: 5643784 - DNA, 25 bp, Homo sapien
gaaggaatgggaagaggcagagctt

SEQ ID NO: 5643785 - DNA, 25 bp, Homo sapien
cctgctagttccagaaaagtgccag

SEQ ID NO: 5643786 - DNA, 25 bp, Homo sapien
atgaggagaatcctactgaacccgg

SEQ ID NO: 5643787 - DNA, 25 bp, Homo sapien
gcactgaatatgtgtgctgccctca

SEQ ID NO: 5643788 - DNA, 25 bp, Homo sapien
attcctccaactcctctgccaacca

SEQ ID NO: 5643789 - DNA, 25 bp, Homo sapien
accgaatggacagggtaaagaagga

SEQ ID NO: 5643790 - DNA, 25 bp, Homo sapien
atacagatgagggtgtccgctgctg

SEQ ID NO: 5643791 - DNA, 25 bp, Homo sapien
gtcatcgcagtggccattgccacgg

SEQ ID NO: 5643792 - DNA, 25 bp, Homo sapien
ccgtgctgagaacaaagatcgctta

SEQ ID NO: 5643793 - DNA, 25 bp, Homo sapien
tattggatctgtgtcaaaagaagag

SEQ ID NO: 5643794 - DNA, 25 bp, Homo sapien
ttggaggcctcgaggaagagcggga

SEQ ID NO: 5643795 - DNA, 25 bp, Homo sapien
cgagagagttggaggcctcgaggaa

SEQ ID NO: 5643796 - DNA, 25 bp, Homo sapien
ccaaccaatgatgttgatgtgtatt

SEQ ID NO: 5643797 - DNA, 25 bp, Homo sapien
gagtctttgtaatgcttgtacagtt

SEQ ID NO: 5643798 - DNA, 25 bp, Homo sapien
gtgaggagatcccaccgttccaccc

SEQ ID NO: 5643799 - DNA, 25 bp, Homo sapien
tctggagaactacctggctgccttg

SEQ ID NO: 5643800 - DNA, 25 bp, Homo sapien
gtgatgctgaggaagaggcagtatg

SEQ ID NO: 5643801 - DNA, 25 bp, Homo sapien
actatgcacagattaaacttcacct

SEQ ID NO: 5643802 - DNA, 25 bp, Homo sapien
agtttcttgaagtccagtgtttcca

SEQ ID NO: 5643803 - DNA, 25 bp, Homo sapien
gagagaccctcgcaaaatgatgtga

SEQ ID NO: 5643804 - DNA, 25 bp, Homo sapien
tgtgaacattcagactgggaaatgg

SEQ ID NO: 5643805 - DNA, 25 bp, Homo sapien
cttcaagctaagaacctccccaaag

SEQ ID NO: 5643806 - DNA, 25 bp, Homo sapien
atcacaaatgtgatggaggcaaacc

SEQ ID NO: 5643807 - DNA, 25 bp, Homo sapien
gtcaaagaggcatgtctgactcagg

SEQ ID NO: 5643808 - DNA, 25 bp, Homo sapien
agaatcaccagcactggcacacggt

SEQ ID NO: 5643809 - DNA, 25 bp, Homo sapien
ggaggcctcgaggaagagcgggaat

SEQ ID NO: 5643810 - DNA, 25 bp, Homo sapien
atgtatccagagctacagatcacaa

SEQ ID NO: 5643811 - DNA, 25 bp, Homo sapien
gatccaatgctcaccccagaagagc

SEQ ID NO: 5643812 - DNA, 25 bp, Homo sapien
aatctgaaggttctggtaacctgtg

SEQ ID NO: 5643813 - DNA, 25 bp, Homo sapien
agcaatgcaagagtcgctttgttac

SEQ ID NO: 5643814 - DNA, 25 bp, Homo sapien
acttccattgtattgtctgacacat

SEQ ID NO: 5643815 - DNA, 25 bp, Homo sapien
aggctcctgcttctgctgctggtgg

SEQ ID NO: 5643816 - DNA, 25 bp, Homo sapien
aatctcagagacccctgtggacgtc

SEQ ID NO: 5643817 - DNA, 25 bp, Homo sapien
acatcctgacctcctggactgtagg

SEQ ID NO: 5643818 - DNA, 25 bp, Homo sapien
caggagcagcgtgcagatatggacc

SEQ ID NO: 5643819 - DNA, 25 bp, Homo sapien
ccaagggaaagtgcgtgcgctttat

SEQ ID NO: 5643820 - DNA, 25 bp, Homo sapien
ctcattcactgtcctggcttttatt

SEQ ID NO: 5643821 - DNA, 25 bp, Homo sapien
ttattgtatggctgtgtgtaaagcg

SEQ ID NO: 5643822 - DNA, 25 bp, Homo sapien
aaatgatgtgaaaggaccagtttct

SEQ ID NO: 5643823 - DNA, 25 bp, Homo sapien
cctcgttggtacttcgacctctcca

SEQ ID NO: 5643824 - DNA, 25 bp, Homo sapien
gaggaagatgaagaggaagactatg

SEQ ID NO: 5643825 - DNA, 25 bp, Homo sapien
tgtcccctcacctccaccccctcct

SEQ ID NO: 5643826 - DNA, 25 bp, Homo sapien
agcctggtgatgctgaggaagaggc

SEQ ID NO: 5643827 - DNA, 25 bp, Homo sapien
catgtgaacattcagactgggaaat

SEQ ID NO: 5643828 - DNA, 25 bp, Homo sapien
gggtgagctctgaggagagtgagga

SEQ ID NO: 5643829 - DNA, 25 bp, Homo sapien
tggggctcacggcgcctgccttggc

SEQ ID NO: 5643830 - DNA, 25 bp, Homo sapien
aatttcctactgaagcagatctgga

SEQ ID NO: 5643831 - DNA, 25 bp, Homo sapien
ccacgggcaggctcctgcttctgct

SEQ ID NO: 5643832 - DNA, 25 bp, Homo sapien
agtgaatttcctactgaagcagatc

SEQ ID NO: 5643833 - DNA, 25 bp, Homo sapien
tggatgttaaggaaatgattttcaa

SEQ ID NO: 5643834 - DNA, 25 bp, Homo sapien
aagcagctgtggatgaggatgatga

SEQ ID NO: 5643835 - DNA, 25 bp, Homo sapien
tcacctgaacaagatgcagaaccat

SEQ ID NO: 5643836 - DNA, 25 bp, Homo sapien
tcgcagtggccattgccacggtcat

SEQ ID NO: 5643837 - DNA, 25 bp, Homo sapien
aacctccccaaagcagagaggcaga

SEQ ID NO: 5643838 - DNA, 25 bp, Homo sapien
atatataataaatgggaaatgtcga

SEQ ID NO: 5643839 - DNA, 25 bp, Homo sapien
gatgactacaatgaggagaatccta

SEQ ID NO: 5643840 - DNA, 25 bp, Homo sapien
tgcacagattaaacttcacctacaa

SEQ ID NO: 5643841 - DNA, 25 bp, Homo sapien
tggcctgctggtcatcgcagtggcc

SEQ ID NO: 5643842 - DNA, 25 bp, Homo sapien
aatgaccgccgtcggatggctctgg

SEQ ID NO: 5643843 - DNA, 25 bp, Homo sapien
tcaaaggagatgactacaatgagga

SEQ ID NO: 5643844 - DNA, 25 bp, Homo sapien
aagcgatgattcctccaactcctct

SEQ ID NO: 5643845 - DNA, 25 bp, Homo sapien
gactatgatgtttataaaagtgaat

SEQ ID NO: 5643846 - DNA, 25 bp, Homo sapien
agcagtgctctcattggcctgctgg

SEQ ID NO: 5643847 - DNA, 25 bp, Homo sapien
aagtcaactcttcagcctcattcac

SEQ ID NO: 5643848 - DNA, 25 bp, Homo sapien
gccgggccgtgatgcctcgttggta

SEQ ID NO: 5643849 - DNA, 25 bp, Homo sapien
gcggcggcaacaggaacaattttga

SEQ ID NO: 5643850 - DNA, 25 bp, Homo sapien
tttgacattcttcactgtctgttgt

SEQ ID NO: 5643851 - DNA, 25 bp, Homo sapien
ctggcccgagtggaagctatgctga

SEQ ID NO: 5643852 - DNA, 25 bp, Homo sapien
gatgtttataaaagtgaatttccta

SEQ ID NO: 5643853 - DNA, 25 bp, Homo sapien
actgcttctgctttttctttctttt

SEQ ID NO: 5643854 - DNA, 25 bp, Homo sapien
tgtagaactgcaatttccattcttt

SEQ ID NO: 5643855 - DNA, 25 bp, Homo sapien
tggagattcggcaccgcaaccgaat

SEQ ID NO: 5643856 - DNA, 25 bp, Homo sapien
gccgctggcccaggagagaacacgg

SEQ ID NO: 5643857 - DNA, 25 bp, Homo sapien
gcagagaggcagactctgattcagc

SEQ ID NO: 5643858 - DNA, 25 bp, Homo sapien
ggcggccgctggcccaggagagaac

SEQ ID NO: 5643859 - DNA, 25 bp, Homo sapien
tgcttctgctttttctttcttttta

SEQ ID NO: 5643860 - DNA, 25 bp, Homo sapien
gaaccatggctatgagaaccccacc

SEQ ID NO: 5643861 - DNA, 25 bp, Homo sapien
ggaatagggaactgtaatggccact

SEQ ID NO: 5643862 - DNA, 25 bp, Homo sapien
taatggccactgaagcacgtgagag

SEQ ID NO: 5643863 - DNA, 25 bp, Homo sapien
gccgaagagaaagtgattaacagta

SEQ ID NO: 5643864 - DNA, 25 bp, Homo sapien
ttaaaggcattttattccagcgtct

SEQ ID NO: 5643865 - DNA, 25 bp, Homo sapien
cttcagtactgtcaggagatgtatc

SEQ ID NO: 5643866 - DNA, 25 bp, Homo sapien
gatgcaggtgggccggaagatccca

SEQ ID NO: 5643867 - DNA, 25 bp, Homo sapien
ccaactcctctgccaaccaatgatg

SEQ ID NO: 5643868 - DNA, 25 bp, Homo sapien
tcaccccagaagagcgtcacctgaa

SEQ ID NO: 5643869 - DNA, 25 bp, Homo sapien
tgactcagggaatgaccttatatag

SEQ ID NO: 5643870 - DNA, 25 bp, Homo sapien
gagctgctttgaaacaaaagaagaa

SEQ ID NO: 5643871 - DNA, 25 bp, Homo sapien
gagtctgtggacactgtggaaagct

SEQ ID NO: 5643872 - DNA, 25 bp, Homo sapien
cgattttcaataatagacttatatg

SEQ ID NO: 5643873 - DNA, 25 bp, Homo sapien
gacacatgctctcaatatataataa

SEQ ID NO: 5643874 - DNA, 25 bp, Homo sapien
cggatggctctggagaactacctgg

SEQ ID NO: 5643875 - DNA, 25 bp, Homo sapien
gctgctgctttccttcggaatccag

SEQ ID NO: 5643876 - DNA, 25 bp, Homo sapien
cgcaaaatgatgtgaaaggaccagt

SEQ ID NO: 5643877 - DNA, 25 bp, Homo sapien
cgtgggtgaatttgtaagtgatgtc

SEQ ID NO: 5643878 - DNA, 25 bp, Homo sapien
gatcgactgccaagcagcagccgct

SEQ ID NO: 5643879 - DNA, 25 bp, Homo sapien
atatgatctgtggagaatgtacaca

SEQ ID NO: 5643880 - DNA, 25 bp, Homo sapien
ttccattcttttaaatgggtgaaag

SEQ ID NO: 5643881 - DNA, 25 bp, Homo sapien
gctgccttgcagtctgacccgccac

SEQ ID NO: 5643882 - DNA, 25 bp, Homo sapien
ttcaggagcagcgtgcagatatgga

SEQ ID NO: 5643883 - DNA, 25 bp, Homo sapien
cctctgccaaccaatgatgttgatg

SEQ ID NO: 5643884 - DNA, 25 bp, Homo sapien
acgattccgatcgactgccaagcag

SEQ ID NO: 5643885 - DNA, 25 bp, Homo sapien
gaagttcttcagtactgtcaggaga

SEQ ID NO: 5643886 - DNA, 25 bp, Homo sapien
tcattaccagcatgtgttggctgtt

SEQ ID NO: 5643887 - DNA, 25 bp, Homo sapien
atcagccacgggatcgtggaggttg

SEQ ID NO: 5643888 - DNA, 25 bp, Homo sapien
aagtgccagtttttccacaaagagc

SEQ ID NO: 5643889 - DNA, 25 bp, Homo sapien
gctatgagaaccccacctacaaata

SEQ ID NO: 5643890 - DNA, 25 bp, Homo sapien
tccgagtgtgtgagcttgagagccg

SEQ ID NO: 5643891 - DNA, 25 bp, Homo sapien
aagaggcatgtctgactcagggaat

SEQ ID NO: 5643892 - DNA, 25 bp, Homo sapien
gatttaggtggcagggagcgcggca

SEQ ID NO: 5643893 - DNA, 25 bp, Homo sapien
taccgttcacttccccttccaacta

SEQ ID NO: 5643894 - DNA, 25 bp, Homo sapien
ctgagtagcagtgctctcattggcc

SEQ ID NO: 5643895 - DNA, 25 bp, Homo sapien
atgtgtatttcgagacctctgcaga

SEQ ID NO: 5643896 - DNA, 25 bp, Homo sapien
agagaaggaagcagccagtgagaag

SEQ ID NO: 5643897 - DNA, 25 bp, Homo sapien
atggaccagttcactgcctcaatct

SEQ ID NO: 5643898 - DNA, 25 bp, Homo sapien
ggaccgagattactactatgacacc

SEQ ID NO: 5643899 - DNA, 25 bp, Homo sapien
tcaccggccttgtgacattcactca

SEQ ID NO: 5643900 - DNA, 25 bp, Homo sapien
gaaggatctggagtgggagagcagg

SEQ ID NO: 5643901 - DNA, 25 bp, Homo sapien
tgctctacaaagtaccttatgtagc

SEQ ID NO: 5643902 - DNA, 25 bp, Homo sapien
aaatgggtgaaagatggtaatataa

SEQ ID NO: 5643903 - DNA, 25 bp, Homo sapien
ttgaagaaaggaggaaccaaagcct

SEQ ID NO: 5643904 - DNA, 25 bp, Homo sapien
tcattggcctgctggtcatcgcagt

SEQ ID NO: 5643905 - DNA, 25 bp, Homo sapien
ttccaactatgtccagatgtgcagg

SEQ ID NO: 5643906 - DNA, 25 bp, Homo sapien
ggatctgtgtcaaaagaagaggaag

SEQ ID NO: 5643907 - DNA, 25 bp, Homo sapien
tgctgctttccttcggaatccagtg

SEQ ID NO: 5643908 - DNA, 25 bp, Homo sapien
gagggtgtccgctgctgctttcctt

SEQ ID NO: 5643909 - DNA, 25 bp, Homo sapien
cgggaatccgtgggcccactgcggg

SEQ ID NO: 5643910 - DNA, 25 bp, Homo sapien
cagactgggaaatgggaacctgatc

SEQ ID NO: 5643911 - DNA, 25 bp, Homo sapien
caaccgaatggacagggtaaagaag

SEQ ID NO: 5643912 - DNA, 25 bp, Homo sapien
agcagctggagattcggcaccgcaa

SEQ ID NO: 5643913 - DNA, 25 bp, Homo sapien
ccgctgccaggggctgcgtctgaca

SEQ ID NO: 5643914 - DNA, 25 bp, Homo sapien
cccggcagcgacggcaccatgtcag

SEQ ID NO: 5643915 - DNA, 25 bp, Homo sapien
aaagtactactgtagaactgcaatt

SEQ ID NO: 5643916 - DNA, 25 bp, Homo sapien
gtattccctttttaaatgagctttc

SEQ ID NO: 5643917 - DNA, 25 bp, Homo sapien
agcttagtgtatacagatgagggtg

SEQ ID NO: 5643918 - DNA, 25 bp, Homo sapien
tggatgaaaacatggtcattgacga

SEQ ID NO: 5643919 - DNA, 25 bp, Homo sapien
ggaacctgatccaacaggcaccaag

SEQ ID NO: 5643920 - DNA, 25 bp, Homo sapien
aaatcgcaatgttttgtgggaagtt

SEQ ID NO: 5643921 - DNA, 25 bp, Homo sapien
gaaagtgattaacagtaagaataaa

SEQ ID NO: 5643922 - DNA, 25 bp, Homo sapien
agcatgtgttggctgttgacccaga

SEQ ID NO: 5643923 - DNA, 25 bp, Homo sapien
gggaactgtaatggccactgaagca

SEQ ID NO: 5643924 - DNA, 25 bp, Homo sapien
gaggtgtgtgagaatcaccagcact

SEQ ID NO: 5643925 - DNA, 25 bp, Homo sapien
atgcaagagtcgctttgttacacct

SEQ ID NO: 5643926 - DNA, 25 bp, Homo sapien
ctggatacctgtgtgtctccataaa

SEQ ID NO: 5643927 - DNA, 25 bp, Homo sapien
ccacctggcccgagtggaagctatg

SEQ ID NO: 5643928 - DNA, 25 bp, Homo sapien
tgatcggtgccgaagagaaagtgat

SEQ ID NO: 5643929 - DNA, 25 bp, Homo sapien
ctaaggagcagctggagattcggca

SEQ ID NO: 5643930 - DNA, 25 bp, Homo sapien
accagcactggcacacggtagtcaa

SEQ ID NO: 5643931 - DNA, 25 bp, Homo sapien
gcgacccggcgagggatggcggcca

SEQ ID NO: 5643932 - DNA, 25 bp, Homo sapien
tatgttgtgtaagtcaactcttcag

SEQ ID NO: 5643933 - DNA, 25 bp, Homo sapien
gtggacgtccgggtgagctctgagg

SEQ ID NO: 5643934 - DNA, 25 bp, Homo sapien
tcaagtgtctcgtgggtgaatttgt

SEQ ID NO: 5643935 - DNA, 25 bp, Homo sapien
tcccctttgaccctattcatgtctc

SEQ ID NO: 5643936 - DNA, 25 bp, Homo sapien
gcattctccaggccttacggcgtta

SEQ ID NO: 5643937 - DNA, 25 bp, Homo sapien
tatgtgtgctgccctcagacaaaga

SEQ ID NO: 5643938 - DNA, 25 bp, Homo sapien
cacatcaataaatactttaacttcc

SEQ ID NO: 5643939 - DNA, 25 bp, Homo sapien
gttggtacttcgacctctccaaggg

SEQ ID NO: 5643940 - DNA, 25 bp, Homo sapien
gggctgcgtctgacatcctgacctc

SEQ ID NO: 5643941 - DNA, 25 bp, Homo sapien
tagctacggcatgctgctcccatgt

SEQ ID NO: 5643942 - DNA, 25 bp, Homo sapien
gtcgctttgttacacctttcaagtg

SEQ ID NO: 5643943 - DNA, 25 bp, Homo sapien
ccgttcacttccccttccaactatg

SEQ ID NO: 5643944 - DNA, 25 bp, Homo sapien
atataaagtactactgtagaactgc

SEQ ID NO: 5643945 - DNA, 25 bp, Homo sapien
agcagctggtggagacccacctggc

SEQ ID NO: 5643946 - DNA, 25 bp, Homo sapien
acattcactcagagaagaccacacc

SEQ ID NO: 5643947 - DNA, 25 bp, Homo sapien
acaggagtctttgtaatgcttgtac

SEQ ID NO: 5643948 - DNA, 25 bp, Homo sapien
actacaatgaggagaatcctactga

SEQ ID NO: 5643949 - DNA, 25 bp, Homo sapien
gtgcttccacagagattagcctgta

SEQ ID NO: 5643950 - DNA, 25 bp, Homo sapien
gtcgatgctcactgcttctgctttt

SEQ ID NO: 5643951 - DNA, 25 bp, Homo sapien
tggagaatgtacacagtttaaacac

SEQ ID NO: 5643952 - DNA, 25 bp, Homo sapien
accttatatagctacggcatgctgc

SEQ ID NO: 5643953 - DNA, 25 bp, Homo sapien
tgtaatggccactgaagcacgtgag

SEQ ID NO: 5643954 - DNA, 25 bp, Homo sapien
cacaaatgtgatggaggcaaaccag

SEQ ID NO: 5643955 - DNA, 25 bp, Homo sapien
gttacacctttcaagtgtctcgtgg

SEQ ID NO: 5643956 - DNA, 25 bp, Homo sapien
aaaggaaagtagtccaggctgtccc

SEQ ID NO: 5643957 - DNA, 25 bp, Homo sapien
ggctggatacctgtgtgtctccata

SEQ ID NO: 5643958 - DNA, 25 bp, Homo sapien
aggagtctttgtaatgcttgtacag

SEQ ID NO: 5643959 - DNA, 25 bp, Homo sapien
ttttcaatgccgagagagttggagg

SEQ ID NO: 5643960 - DNA, 25 bp, Homo sapien
gggaggaagtggtggaggaccgaga

SEQ ID NO: 5643961 - DNA, 25 bp, Homo sapien
agtccagtgtttccacggctggata

SEQ ID NO: 5643962 - DNA, 25 bp, Homo sapien
gatgttaaggaaatgattttcaatg

SEQ ID NO: 5643963 - DNA, 25 bp, Homo sapien
aaaagtgccagtttttccacaaaga

SEQ ID NO: 5643964 - DNA, 25 bp, Homo sapien
gcagggagcgcggcagccctggcgg

SEQ ID NO: 5643965 - DNA, 25 bp, Homo sapien
atgcaggctgtcgttccggttatgt

SEQ ID NO: 5643966 - DNA, 25 bp, Homo sapien
tgcctcgttggtacttcgacctctc

SEQ ID NO: 5643967 - DNA, 25 bp, Homo sapien
tggaggaccgagattactactatga

SEQ ID NO: 5643968 - DNA, 25 bp, Homo sapien
ctgccctcagacaaagattattgga

SEQ ID NO: 5643969 - DNA, 25 bp, Homo sapien
gaaaccccacttccattgtattgtc

SEQ ID NO: 5643970 - DNA, 25 bp, Homo sapien
tcacagaagcagctgtggatgagga

SEQ ID NO: 5643971 - DNA, 25 bp, Homo sapien
gctctcattggcctgctggtcatcg

SEQ ID NO: 5643972 - DNA, 25 bp, Homo sapien
agagcttcaagctaagaacctcccc

SEQ ID NO: 5643973 - DNA, 25 bp, Homo sapien
atttgctgttgctgagcctcaaatc

SEQ ID NO: 5643974 - DNA, 25 bp, Homo sapien
ctggtggggctcacggcgcctgcct

SEQ ID NO: 5643975 - DNA, 25 bp, Homo sapien
ccggaagatcccacgattccgatcg

SEQ ID NO: 5643976 - DNA, 25 bp, Homo sapien
tcgcattctccaggccttacggcgt

SEQ ID NO: 5643977 - DNA, 25 bp, Homo sapien
gcagatgataatgagcatgctcgct

SEQ ID NO: 5643978 - DNA, 25 bp, Homo sapien
gacgagactctggatgttaaggaaa

SEQ ID NO: 5643979 - DNA, 25 bp, Homo sapien
acggcaccatgtcagacaaggaaat

SEQ ID NO: 5643980 - DNA, 25 bp, Homo sapien
aagtggtggaggaccgagattacta

SEQ ID NO: 5643981 - DNA, 25 bp, Homo sapien
caggccttacggcgttatgtccgtg

SEQ ID NO: 5643982 - DNA, 25 bp, Homo sapien
tgtgtgagcttgagagccgcgcgct

SEQ ID NO: 5643983 - DNA, 25 bp, Homo sapien
ataaaagtcctgtcaccaaggacgt

SEQ ID NO: 5643984 - DNA, 25 bp, Homo sapien
ccaagagctgctttgaaacaaaaga

SEQ ID NO: 5643985 - DNA, 25 bp, Homo sapien
accaaggaggcggccgctggcccag

SEQ ID NO: 5643986 - DNA, 25 bp, Homo sapien
agaatcctactgaacccggcagcga

SEQ ID NO: 5643987 - DNA, 25 bp, Homo sapien
actgaagcacgtgagagaccctcgc

SEQ ID NO: 5643988 - DNA, 25 bp, Homo sapien
aagaagttcttcagtactgtcagga

SEQ ID NO: 5643989 - DNA, 25 bp, Homo sapien
gcagatctggaagacttcacagaag

SEQ ID NO: 5643990 - DNA, 25 bp, Homo sapien
tgtgtgagaatcaccagcactggca

SEQ ID NO: 5643991 - DNA, 25 bp, Homo sapien
gcgtgcgctttatatatggtggctg

SEQ ID NO: 5643992 - DNA, 25 bp, Homo sapien
tctccaggccttacggcgttatgtc

SEQ ID NO: 5643993 - DNA, 25 bp, Homo sapien
atgttgatgtgtatttcgagacctc

SEQ ID NO: 5643994 - DNA, 25 bp, Homo sapien
gtttttccacaaagagcggatggag

SEQ ID NO: 5643995 - DNA, 25 bp, Homo sapien
acggcgcctgccttggcgctggccg

SEQ ID NO: 5643996 - DNA, 25 bp, Homo sapien
tctggatgttaaggaaatgattttc

SEQ ID NO: 5643997 - DNA, 25 bp, Homo sapien
tccgtgggcccactgcgggaggact

SEQ ID NO: 5643998 - DNA, 25 bp, Homo sapien
tgtgagcttgagagccgcgcgctag

SEQ ID NO: 5643999 - DNA, 25 bp, Homo sapien
ttccagaaggctaaggagcagctgg

SEQ ID NO: 5644000 - DNA, 25 bp, Homo sapien
tccagtgtttccacggctggatacc

SEQ ID NO: 5644001 - DNA, 25 bp, Homo sapien
aacattcagactgggaaatgggaac

SEQ ID NO: 5644002 - DNA, 25 bp, Homo sapien
aaggctaaggagcagctggagattc

SEQ ID NO: 5644003 - DNA, 25 bp, Homo sapien
gggcaggctcctgcttctgctgctg

SEQ ID NO: 5644004 - DNA, 25 bp, Homo sapien
attcatgtctctacccactatgcac

SEQ ID NO: 5644005 - DNA, 25 bp, Homo sapien
attttattccagcgtcttctagaga

SEQ ID NO: 5644006 - DNA, 25 bp, Homo sapien
aggactatataaagtactactgtag

SEQ ID NO: 5644007 - DNA, 25 bp, Homo sapien
tgtaaagcgatgattcctccaactc

SEQ ID NO: 5644008 - DNA, 25 bp, Homo sapien
ccctgaaactgagtctgtggacact

SEQ ID NO: 5644009 - DNA, 25 bp, Homo sapien
gtgaaagatggtaatataacaatat

SEQ ID NO: 5644010 - DNA, 25 bp, Homo sapien
ggtggaggaccgagattactactat

SEQ ID NO: 5644011 - DNA, 25 bp, Homo sapien
tcagcacttccaagccatggttaaa

SEQ ID NO: 5644012 - DNA, 25 bp, Homo sapien
tggaaagctttgaacaattgtgttt

SEQ ID NO: 5644013 - DNA, 25 bp, Homo sapien
acccacctggcccgagtggaagcta

SEQ ID NO: 5644014 - DNA, 25 bp, Homo sapien
cggcgagggatggcggccaccggga

SEQ ID NO: 5644015 - DNA, 25 bp, Homo sapien
cagtatggcaccatcagccacggga

SEQ ID NO: 5644016 - DNA, 25 bp, Homo sapien
gaatgggaagaggcagagcttcaag

SEQ ID NO: 5644017 - DNA, 25 bp, Homo sapien
gaaatgggaacctgatccaacaggc

SEQ ID NO: 5644018 - DNA, 25 bp, Homo sapien
tgctctcaatatataataaatggga

SEQ ID NO: 5644019 - DNA, 25 bp, Homo sapien
tatagctacggcatgctgctcccat

SEQ ID NO: 5644020 - DNA, 25 bp, Homo sapien
gaagaggcagagcttcaagctaaga

SEQ ID NO: 5644021 - DNA, 25 bp, Homo sapien
gtgtatttttattttcctgtgactg

SEQ ID NO: 5644022 - DNA, 25 bp, Homo sapien
gaagtccagtgtttccacggctgga

SEQ ID NO: 5644023 - DNA, 25 bp, Homo sapien
ataaagtactactgtagaactgcaa

SEQ ID NO: 5644024 - DNA, 25 bp, Homo sapien
gagcgacccggcgagggatggcggc

SEQ ID NO: 5644025 - DNA, 25 bp, Homo sapien
agagcggatggaggtgtgtgagaat

SEQ ID NO: 5644026 - DNA, 25 bp, Homo sapien
tgagaacaaagatcgcttacatacc

SEQ ID NO: 5644027 - DNA, 25 bp, Homo sapien
agcgtcacctgaacaagatgcagaa

SEQ ID NO: 5644028 - DNA, 25 bp, Homo sapien
ccctggcggagggatgcaggtgggc

SEQ ID NO: 5644029 - DNA, 25 bp, Homo sapien
ggccggaagatcccacgattccgat

SEQ ID NO: 5644030 - DNA, 25 bp, Homo sapien
ggccaccgggaccgcggccgccgca

SEQ ID NO: 5644031 - DNA, 25 bp, Homo sapien
caatgccgagagagttggaggcctc

SEQ ID NO: 5644032 - DNA, 25 bp, Homo sapien
ggagatgtatccagagctacagatc

SEQ ID NO: 5644033 - DNA, 25 bp, Homo sapien
gagaacgaaggatctggagtgggag

SEQ ID NO: 5644034 - DNA, 25 bp, Homo sapien
tttattccagcgtcttctagagagc

SEQ ID NO: 5644035 - DNA, 25 bp, Homo sapien
caggcaccaagagctgctttgaaac

SEQ ID NO: 5644036 - DNA, 25 bp, Homo sapien
aatcctactgaacccggcagcgacg

SEQ ID NO: 5644037 - DNA, 25 bp, Homo sapien
cggcatgctgctcccatgtggggta

SEQ ID NO: 5644038 - DNA, 25 bp, Homo sapien
aacatggtcattgacgagactctgg

SEQ ID NO: 5644039 - DNA, 25 bp, Homo sapien
cagatgcagatttaggtggcaggga

SEQ ID NO: 5644040 - DNA, 25 bp, Homo sapien
agactctgattcagcacttccaagc

SEQ ID NO: 5644041 - DNA, 25 bp, Homo sapien
caagaggaaattgatgagctccttc

SEQ ID NO: 5644042 - DNA, 25 bp, Homo sapien
ctacagatcacaaatgtgatggagg

SEQ ID NO: 5644043 - DNA, 25 bp, Homo sapien
cagatatttgatgtagttttctttt

SEQ ID NO: 5644044 - DNA, 25 bp, Homo sapien
atccagagctacagatcacaaatgt

SEQ ID NO: 5644045 - DNA, 25 bp, Homo sapien
aaccccacttccattgtattgtctg

SEQ ID NO: 5644046 - DNA, 25 bp, Homo sapien
acttccccttccaactatgtccaga

SEQ ID NO: 5644047 - DNA, 25 bp, Homo sapien
tggtcatcgcagtggccattgccac

SEQ ID NO: 5644048 - DNA, 25 bp, Homo sapien
ggctgttgacccagaaaaggcggcc

SEQ ID NO: 5644049 - DNA, 25 bp, Homo sapien
cgtggaggttgatccaatgctcacc

SEQ ID NO: 5644050 - DNA, 25 bp, Homo sapien
gggtggaatagggaactgtaatggc

SEQ ID NO: 5644051 - DNA, 25 bp, Homo sapien
aggcactgaccctcggcctctactt

SEQ ID NO: 5644052 - DNA, 25 bp, Homo sapien
accagcgggttagtattgacaactg

SEQ ID NO: 5644053 - DNA, 25 bp, Homo sapien
ggcgcctgccttggcgctggccggc

SEQ ID NO: 5644054 - DNA, 25 bp, Homo sapien
cctcagacaaagattattggatctg

SEQ ID NO: 5644055 - DNA, 25 bp, Homo sapien
ctgtaggactatataaagtactact

SEQ ID NO: 5644056 - DNA, 25 bp, Homo sapien
agactctggatgttaaggaaatgat

SEQ ID NO: 5644057 - DNA, 25 bp, Homo sapien
cagcgtgcagatatggaccagttca

SEQ ID NO: 5644058 - DNA, 25 bp, Homo sapien
ctactttgtcccctcacctccaccc

SEQ ID NO: 5644059 - DNA, 25 bp, Homo sapien
caattttgagtctgaggattattgt

SEQ ID NO: 5644060 - DNA, 25 bp, Homo sapien
acctggcccgagtggaagctatgct

SEQ ID NO: 5644061 - DNA, 25 bp, Homo sapien
gcactggcacacggtagtcaaagag

SEQ ID NO: 5644062 - DNA, 25 bp, Homo sapien
acctctgcagatgataatgagcatg

SEQ ID NO: 5644063 - DNA, 25 bp, Homo sapien
gtccgggtgagctctgaggagagtg

SEQ ID NO: 5644064 - DNA, 25 bp, Homo sapien
ttgatccaatgctcaccccagaaga

SEQ ID NO: 5644065 - DNA, 25 bp, Homo sapien
agaagcagctgtggatgaggatgat

SEQ ID NO: 5644066 - DNA, 25 bp, Homo sapien
ctgtccctgaaactgagtctgtgga

SEQ ID NO: 5644067 - DNA, 25 bp, Homo sapien
acagaagcagctgtggatgaggatg

SEQ ID NO: 5644068 - DNA, 25 bp, Homo sapien
gtagtccaggctgtccctgaaactg

SEQ ID NO: 5644069 - DNA, 25 bp, Homo sapien
cagcgggttagtattgacaactggt

SEQ ID NO: 5644070 - DNA, 25 bp, Homo sapien
agtggaagctatgctgaatgaccgc

SEQ ID NO: 5644071 - DNA, 25 bp, Homo sapien
cgccgtcggatggctctggagaact

SEQ ID NO: 5644072 - DNA, 25 bp, Homo sapien
tgtgtgtaaagcgatgattcctcca

SEQ ID NO: 5644073 - DNA, 25 bp, Homo sapien
gggtagaccagttccatggcactga

SEQ ID NO: 5644074 - DNA, 25 bp, Homo sapien
gaaattcaagaggaaattgatgagc

SEQ ID NO: 5644075 - DNA, 25 bp, Homo sapien
cgagtgtgtgagcttgagagccgcg

SEQ ID NO: 5644076 - DNA, 25 bp, Homo sapien
tcctactgaagcagatctggaagac

SEQ ID NO: 5644077 - DNA, 25 bp, Homo sapien
tacagttgatgtcgatgctcactgc

SEQ ID NO: 5644078 - DNA, 25 bp, Homo sapien
cctgatccaacaggcaccaagagct

SEQ ID NO: 5644079 - DNA, 25 bp, Homo sapien
acggctggatacctgtgtgtctcca

SEQ ID NO: 5644080 - DNA, 25 bp, Homo sapien
ccatggttaaagctttagagaagga

SEQ ID NO: 5644081 - DNA, 25 bp, Homo sapien
aacttcacctacaaactccttaata

SEQ ID NO: 5644082 - DNA, 25 bp, Homo sapien
ccagccctacctgagaacgaaggat

SEQ ID NO: 5644083 - DNA, 25 bp, Homo sapien
aaggcggcccagatgaaatcccagg

SEQ ID NO: 5644084 - DNA, 25 bp, Homo sapien
gatgcagaaccatggctatgagaac

SEQ ID NO: 5644085 - DNA, 25 bp, Homo sapien
tttcaagtgtctcgtgggtgaattt

SEQ ID NO: 5644086 - DNA, 25 bp, Homo sapien
gtcatcgtcatcagcctggtgatgc

SEQ ID NO: 5644087 - DNA, 25 bp, Homo sapien
cagacaaggaaattactcatgatgt

SEQ ID NO: 5644088 - DNA, 25 bp, Homo sapien
aattcaagaggaaattgatgagctc

SEQ ID NO: 5644089 - DNA, 25 bp, Homo sapien
gttccggttatgttgtgtaagtcaa

SEQ ID NO: 5644090 - DNA, 25 bp, Homo sapien
ttacggcgttatgtccgtgctgaga

SEQ ID NO: 5644091 - DNA, 25 bp, Homo sapien
catgtgttggctgttgacccagaaa

SEQ ID NO: 5644092 - DNA, 25 bp, Homo sapien
gctctggagaactacctggctgcct

SEQ ID NO: 5644093 - DNA, 25 bp, Homo sapien
ggccgtgatgcctcgttggtacttc

SEQ ID NO: 5644094 - DNA, 25 bp, Homo sapien
attcagcacttccaagccatggtta

SEQ ID NO: 5644095 - DNA, 25 bp, Homo sapien
tcttgcagccaatgccggaacagga

SEQ ID NO: 5644096 - DNA, 25 bp, Homo sapien
acagtttaaacacatcaataaatac

SEQ ID NO: 5644097 - DNA, 25 bp, Homo sapien
ccctacctgagaacgaaggatctgg

SEQ ID NO: 5644098 - DNA, 25 bp, Homo sapien
aggcagactctgattcagcacttcc

SEQ ID NO: 5644099 - DNA, 25 bp, Homo sapien
gccaagcagcagccgctgccagggg

SEQ ID NO: 5644100 - DNA, 25 bp, Homo sapien
caggctgtccctgaaactgagtctg

SEQ ID NO: 5644101 - DNA, 25 bp, Homo sapien
gtctgacacatgctctcaatatata

SEQ ID NO: 5644102 - DNA, 25 bp, Homo sapien
ttcaatgccgagagagttggaggcc

SEQ ID NO: 5644103 - DNA, 25 bp, Homo sapien
gggatggcggccaccgggaccgcgg

SEQ ID NO: 5644104 - DNA, 25 bp, Homo sapien
atttccattcttttaaatgggtgaa

SEQ ID NO: 5644105 - DNA, 25 bp, Homo sapien
ctgcgggaggacttcagtctgagta

SEQ ID NO: 5644106 - DNA, 25 bp, Homo sapien
actgatcggtgccgaagagaaagtg

SEQ ID NO: 5644107 - DNA, 25 bp, Homo sapien
ttccacagagattagcctgtagctt

SEQ ID NO: 5644108 - DNA, 25 bp, Homo sapien
ttgaagtccagtgtttccacggctg

SEQ ID NO: 5644109 - DNA, 25 bp, Homo sapien
agatgataatgagcatgctcgcttc

SEQ ID NO: 5644110 - DNA, 25 bp, Homo sapien
tcctccaactcctctgccaaccaat

SEQ ID NO: 5644111 - DNA, 25 bp, Homo sapien
aggtgatgacacatctccacgtgat

SEQ ID NO: 5644112 - DNA, 25 bp, Homo sapien
aagctttgaacaattgtgttttcgt

SEQ ID NO: 5644113 - DNA, 25 bp, Homo sapien
cgtcttctagagagcttagtgtata

SEQ ID NO: 5644114 - DNA, 25 bp, Homo sapien
ttgacgagactctggatgttaagga

SEQ ID NO: 5644115 - DNA, 25 bp, Homo sapien
acaattgttcaaagctttccacagt

SEQ ID NO: 5644116 - DNA, 25 bp, Homo sapien
ccaacgaggcatcacggcccggcag

SEQ ID NO: 5644117 - DNA, 25 bp, Homo sapien
tttgtggaaaaactggcacttttct

SEQ ID NO: 5644118 - DNA, 25 bp, Homo sapien
aacttcctgaaagctcatttaaaaa

SEQ ID NO: 5644119 - DNA, 25 bp, Homo sapien
aatctcggtcctccaccacttcctc

SEQ ID NO: 5644120 - DNA, 25 bp, Homo sapien
tctgggtcaacagccaacacatgct

SEQ ID NO: 5644121 - DNA, 25 bp, Homo sapien
atctgcatctgctccaggtatttgt

SEQ ID NO: 5644122 - DNA, 25 bp, Homo sapien
tacacaacataaccggaacgacagc

SEQ ID NO: 5644123 - DNA, 25 bp, Homo sapien
gactgaagtcctcccgcagtgggcc

SEQ ID NO: 5644124 - DNA, 25 bp, Homo sapien
tgccacctaaatctgcatctgctcc

SEQ ID NO: 5644125 - DNA, 25 bp, Homo sapien
agaggaggagcctgcacatctggac

SEQ ID NO: 5644126 - DNA, 25 bp, Homo sapien
cgtaaggcctggagaatgcgatgag

SEQ ID NO: 5644127 - DNA, 25 bp, Homo sapien
tttatatagtcctacagtccaggag

SEQ ID NO: 5644128 - DNA, 25 bp, Homo sapien
ttccttgtctgacatggtgccgtcg

SEQ ID NO: 5644129 - DNA, 25 bp, Homo sapien
cctcagagctcacccggacgtccac

SEQ ID NO: 5644130 - DNA, 25 bp, Homo sapien
gcatgtgtcagacaatacaatggaa

SEQ ID NO: 5644131 - DNA, 25 bp, Homo sapien
cacgtgcttcagtggccattacagt

SEQ ID NO: 5644132 - DNA, 25 bp, Homo sapien
gtactgaagaacttcttcttttgtt

SEQ ID NO: 5644133 - DNA, 25 bp, Homo sapien
cttcagtggccattacagttcccta

SEQ ID NO: 5644134 - DNA, 25 bp, Homo sapien
cattgctttttgtccctccggcacc

SEQ ID NO: 5644135 - DNA, 25 bp, Homo sapien
aatgcctttaacgtccttggtgaca

SEQ ID NO: 5644136 - DNA, 25 bp, Homo sapien
ggtgggtctccaccagctgctgctt

SEQ ID NO: 5644137 - DNA, 25 bp, Homo sapien
agcattggatcaacctccacgatcc

SEQ ID NO: 5644138 - DNA, 25 bp, Homo sapien
acgatcccgtggctgatggtgccat

SEQ ID NO: 5644139 - DNA, 25 bp, Homo sapien
ccggaacgacagcctgcatataagt

SEQ ID NO: 5644140 - DNA, 25 bp, Homo sapien
atacaatggaagtggggtttctgat

SEQ ID NO: 5644141 - DNA, 25 bp, Homo sapien
aaacaacagacagtgaagaatgtca

SEQ ID NO: 5644142 - DNA, 25 bp, Homo sapien
agcatgctcattatcatctgcagag

SEQ ID NO: 5644143 - DNA, 25 bp, Homo sapien
atcatagtcttcctcttcatcttcc

SEQ ID NO: 5644144 - DNA, 25 bp, Homo sapien
ccacgatcccgtggctgatggtgcc

SEQ ID NO: 5644145 - DNA, 25 bp, Homo sapien
gctgccgcgctccctgccacctaaa

SEQ ID NO: 5644146 - DNA, 25 bp, Homo sapien
ttctccacagatcatattaaggagt

SEQ ID NO: 5644147 - DNA, 25 bp, Homo sapien
aacatcattggttggcagaggagtt

SEQ ID NO: 5644148 - DNA, 25 bp, Homo sapien
caacataaccggaacgacagcctgc

SEQ ID NO: 5644149 - DNA, 25 bp, Homo sapien
agagtctgcctctctgctttgggga

SEQ ID NO: 5644150 - DNA, 25 bp, Homo sapien
cacaacataaccggaacgacagcct

SEQ ID NO: 5644151 - DNA, 25 bp, Homo sapien
aaccggaacgacagcctgcatataa

SEQ ID NO: 5644152 - DNA, 25 bp, Homo sapien
gtcatcgcctcctgggagcagacag

SEQ ID NO: 5644153 - DNA, 25 bp, Homo sapien
ggcgggtcagactgcaaggcagcca

SEQ ID NO: 5644154 - DNA, 25 bp, Homo sapien
ggtgacgctcttctggggtgagcat

SEQ ID NO: 5644155 - DNA, 25 bp, Homo sapien
tccttctttaccctgtccattcggt

SEQ ID NO: 5644156 - DNA, 25 bp, Homo sapien
gaggggacaaagtagaggccgaggg

SEQ ID NO: 5644157 - DNA, 25 bp, Homo sapien
tgttatattaccatctttcacccat

SEQ ID NO: 5644158 - DNA, 25 bp, Homo sapien
ggatttcatctgggccgccttttct

SEQ ID NO: 5644159 - DNA, 25 bp, Homo sapien
agaggccgagggtcagtgcctttgg

SEQ ID NO: 5644160 - DNA, 25 bp, Homo sapien
cttgaatttcttgggctacataagg

SEQ ID NO: 5644161 - DNA, 25 bp, Homo sapien
taatctgtgcatagtgggtagagac

SEQ ID NO: 5644162 - DNA, 25 bp, Homo sapien
aaaagcagaagcagtgagcatcgac

SEQ ID NO: 5644163 - DNA, 25 bp, Homo sapien
gccaacacatgctggtaatgacgga

SEQ ID NO: 5644164 - DNA, 25 bp, Homo sapien
ttctggggtgagcattggatcaacc

SEQ ID NO: 5644165 - DNA, 25 bp, Homo sapien
ccaccagcagcagaagcaggagcct

SEQ ID NO: 5644166 - DNA, 25 bp, Homo sapien
tcaagctcacacactcggactcctc

SEQ ID NO: 5644167 - DNA, 25 bp, Homo sapien
aggttcttagcttgaagctctgcct

SEQ ID NO: 5644168 - DNA, 25 bp, Homo sapien
acaaaacattgcgatttgaggctca

SEQ ID NO: 5644169 - DNA, 25 bp, Homo sapien
cccactccagatccttcgttctcag

SEQ ID NO: 5644170 - DNA, 25 bp, Homo sapien
ttacaaattcacccacgagacactt

SEQ ID NO: 5644171 - DNA, 25 bp, Homo sapien
gaagcaggagcctgcccgtggctgc

SEQ ID NO: 5644172 - DNA, 25 bp, Homo sapien
ccgggtcgctctagcgcgcggctct

SEQ ID NO: 5644173 - DNA, 25 bp, Homo sapien
acgaaaacacaattgttcaaagctt

SEQ ID NO: 5644174 - DNA, 25 bp, Homo sapien
cttcttttgtttcaaagcagctctt

SEQ ID NO: 5644175 - DNA, 25 bp, Homo sapien
aaaactggcacttttctggaactag

SEQ ID NO: 5644176 - DNA, 25 bp, Homo sapien
ccacagtgtccacagactcagtttc

SEQ ID NO: 5644177 - DNA, 25 bp, Homo sapien
tcaaatataagctacaggctaatct

SEQ ID NO: 5644178 - DNA, 25 bp, Homo sapien
agtagtaatctcggtcctccaccac

SEQ ID NO: 5644179 - DNA, 25 bp, Homo sapien
acaaattcacccacgagacacttga

SEQ ID NO: 5644180 - DNA, 25 bp, Homo sapien
caactctctcggcattgaaaatcat

SEQ ID NO: 5644181 - DNA, 25 bp, Homo sapien
gaaggagctcatcaatttcctcttg

SEQ ID NO: 5644182 - DNA, 25 bp, Homo sapien
tcagtgcctttggagaaagtccaga

SEQ ID NO: 5644183 - DNA, 25 bp, Homo sapien
catataagtctattattgaaaatcg

SEQ ID NO: 5644184 - DNA, 25 bp, Homo sapien
tgcctccatcacatttgtgatctgt

SEQ ID NO: 5644185 - DNA, 25 bp, Homo sapien
gacttttatggagacacacaggtat

SEQ ID NO: 5644186 - DNA, 25 bp, Homo sapien
tgggatttcatctgggccgcctttt

SEQ ID NO: 5644187 - DNA, 25 bp, Homo sapien
atcacgtggagatgtgtcatcacct

SEQ ID NO: 5644188 - DNA, 25 bp, Homo sapien
acacatattcagtgccatggaactg

SEQ ID NO: 5644189 - DNA, 25 bp, Homo sapien
tgagtaatttccttgtctgacatgg

SEQ ID NO: 5644190 - DNA, 25 bp, Homo sapien
cggcggtcattcagcatagcttcca

SEQ ID NO: 5644191 - DNA, 25 bp, Homo sapien
aacgacagcctgcatataagtctat

SEQ ID NO: 5644192 - DNA, 25 bp, Homo sapien
tctcctcattgtagtcatctccttt

SEQ ID NO: 5644193 - DNA, 25 bp, Homo sapien
gaaagaaaaagcagaagcagtgagc

SEQ ID NO: 5644194 - DNA, 25 bp, Homo sapien
gaagcactggattccgaaggaaagc

SEQ ID NO: 5644195 - DNA, 25 bp, Homo sapien
agtctattattgaaaatcgacattt

SEQ ID NO: 5644196 - DNA, 25 bp, Homo sapien
atgcatatttaacttcccacaaaac

SEQ ID NO: 5644197 - DNA, 25 bp, Homo sapien
agcacggacataacgccgtaaggcc

SEQ ID NO: 5644198 - DNA, 25 bp, Homo sapien
ggattctcctcattgtagtcatctc

SEQ ID NO: 5644199 - DNA, 25 bp, Homo sapien
ggtctctgagattgaggcagtgaac

SEQ ID NO: 5644200 - DNA, 25 bp, Homo sapien
gccaccatatataaagcgcacgcac

SEQ ID NO: 5644201 - DNA, 25 bp, Homo sapien
cttctgtgaagtcttccagatctgc

SEQ ID NO: 5644202 - DNA, 25 bp, Homo sapien
agagctcacccggacgtccacaggg

SEQ ID NO: 5644203 - DNA, 25 bp, Homo sapien
cacggcccggcagggccccgtcatc

SEQ ID NO: 5644204 - DNA, 25 bp, Homo sapien
gcagccaggtagttctccagagcca

SEQ ID NO: 5644205 - DNA, 25 bp, Homo sapien
gacatcaactgtacaagcattacaa

SEQ ID NO: 5644206 - DNA, 25 bp, Homo sapien
acatattcagtgccatggaactggt

SEQ ID NO: 5644207 - DNA, 25 bp, Homo sapien
tcagagtctgcctctctgctttggg

SEQ ID NO: 5644208 - DNA, 25 bp, Homo sapien
caacagcaaatcctgttccggcatt

SEQ ID NO: 5644209 - DNA, 25 bp, Homo sapien
acagatcatattaaggagtttgtag

SEQ ID NO: 5644210 - DNA, 25 bp, Homo sapien
cacacaggtatccagccgtggaaac

SEQ ID NO: 5644211 - DNA, 25 bp, Homo sapien
atgttcacatgcatatttaacttcc

SEQ ID NO: 5644212 - DNA, 25 bp, Homo sapien
catggtgccgtcgctgccgggttca

SEQ ID NO: 5644213 - DNA, 25 bp, Homo sapien
tcaatttcctcttgaatttcttggg

SEQ ID NO: 5644214 - DNA, 25 bp, Homo sapien
tagagacatgaatagggtcaaaggg

SEQ ID NO: 5644215 - DNA, 25 bp, Homo sapien
cccatttaaaagaatggaaattgca

SEQ ID NO: 5644216 - DNA, 25 bp, Homo sapien
gagacacacaggtatccagccgtgg

SEQ ID NO: 5644217 - DNA, 25 bp, Homo sapien
caaatcctgttccggcattggctgc

SEQ ID NO: 5644218 - DNA, 25 bp, Homo sapien
aggagttggaggaatcatcgcttta

SEQ ID NO: 5644219 - DNA, 25 bp, Homo sapien
tccggcccacctgcatccctccgcc

SEQ ID NO: 5644220 - DNA, 25 bp, Homo sapien
agagcctcgatgtagccggccagcg

SEQ ID NO: 5644221 - DNA, 25 bp, Homo sapien
caccgatcagtcccccatcctgctc

SEQ ID NO: 5644222 - DNA, 25 bp, Homo sapien
gcatcaccaggctgatgacgatgac

SEQ ID NO: 5644223 - DNA, 25 bp, Homo sapien
tctgagattgaggcagtgaactggt

SEQ ID NO: 5644224 - DNA, 25 bp, Homo sapien
gttcaaagctttccacagtgtccac

SEQ ID NO: 5644225 - DNA, 25 bp, Homo sapien
gacggcggtcattcagcatagcttc

SEQ ID NO: 5644226 - DNA, 25 bp, Homo sapien
caggagcctgcccgtggctgcggcg

SEQ ID NO: 5644227 - DNA, 25 bp, Homo sapien
cctacagtccaggaggtcaggatgt

SEQ ID NO: 5644228 - DNA, 25 bp, Homo sapien
agagaggctttggttcctcctttct

SEQ ID NO: 5644229 - DNA, 25 bp, Homo sapien
caatggccactgcgatgaccagcag

SEQ ID NO: 5644230 - DNA, 25 bp, Homo sapien
cggacataacgccgtaaggcctgga

SEQ ID NO: 5644231 - DNA, 25 bp, Homo sapien
gtggcaatggccactgcgatgacca

SEQ ID NO: 5644232 - DNA, 25 bp, Homo sapien
gtctgaatgttcacatgcatattta

SEQ ID NO: 5644233 - DNA, 25 bp, Homo sapien
gcattacaaagactcctgtgacgaa

SEQ ID NO: 5644234 - DNA, 25 bp, Homo sapien
atttattgatgtgtttaaactgtgt

SEQ ID NO: 5644235 - DNA, 25 bp, Homo sapien
tctctcggcattgaaaatcatttcc

SEQ ID NO: 5644236 - DNA, 25 bp, Homo sapien
gcattggctgcaagagcctcgatgt

SEQ ID NO: 5644237 - DNA, 25 bp, Homo sapien
agtcagacatgcctctttgactacc

SEQ ID NO: 5644238 - DNA, 25 bp, Homo sapien
ccgccttttctgggtcaacagccaa

SEQ ID NO: 5644239 - DNA, 25 bp, Homo sapien
caaggcagccaggtagttctccaga

SEQ ID NO: 5644240 - DNA, 25 bp, Homo sapien
aagcagaagcagtgagcatcgacat

SEQ ID NO: 5644241 - DNA, 25 bp, Homo sapien
ttcctcgaggcctccaactctctcg

SEQ ID NO: 5644242 - DNA, 25 bp, Homo sapien
ttccactcgggccaggtgggtctcc

SEQ ID NO: 5644243 - DNA, 25 bp, Homo sapien
gaatctccagctgctccttagcctt

SEQ ID NO: 5644244 - DNA, 25 bp, Homo sapien
gttctctcctgggccagcggccgcc

SEQ ID NO: 5644245 - DNA, 25 bp, Homo sapien
cttctctgagtgaatgtcacaaggc

SEQ ID NO: 5644246 - DNA, 25 bp, Homo sapien
agtctgcctctctgctttggggagg

SEQ ID NO: 5644247 - DNA, 25 bp, Homo sapien
gcatctgctccaggtatttgtaggt

SEQ ID NO: 5644248 - DNA, 25 bp, Homo sapien
cgtgtgccagtgctggtgattctca

SEQ ID NO: 5644249 - DNA, 25 bp, Homo sapien
cagacagtgaagaatgtcaaatata

SEQ ID NO: 5644250 - DNA, 25 bp, Homo sapien
ccatacaataatcctcagactcaaa

SEQ ID NO: 5644251 - DNA, 25 bp, Homo sapien
catttaaaagaatggaaattgcagt

SEQ ID NO: 5644252 - DNA, 25 bp, Homo sapien
aatactaacccgctggtttgcctcc

SEQ ID NO: 5644253 - DNA, 25 bp, Homo sapien
aaaggtgtaacaaagcgactcttgc

SEQ ID NO: 5644254 - DNA, 25 bp, Homo sapien
cttttatggagacacacaggtatcc

SEQ ID NO: 5644255 - DNA, 25 bp, Homo sapien
gggacagcctggactactttccttt

SEQ ID NO: 5644256 - DNA, 25 bp, Homo sapien
tgacgaaaacacaattgttcaaagc

SEQ ID NO: 5644257 - DNA, 25 bp, Homo sapien
gaaagtccagagaggaggagcctgc

SEQ ID NO: 5644258 - DNA, 25 bp, Homo sapien
ccctccgccagggctgccgcgctcc

SEQ ID NO: 5644259 - DNA, 25 bp, Homo sapien
accatggcttggaagtgctgaatca

SEQ ID NO: 5644260 - DNA, 25 bp, Homo sapien
atctgtgcatagtgggtagagacat

SEQ ID NO: 5644261 - DNA, 25 bp, Homo sapien
tcttagcttgaagctctgcctcttc

SEQ ID NO: 5644262 - DNA, 25 bp, Homo sapien
acatccagagtctcgtcaatgacca

SEQ ID NO: 5644263 - DNA, 25 bp, Homo sapien
tcctgttccggcattggctgcaaga

SEQ ID NO: 5644264 - DNA, 25 bp, Homo sapien
ctcctttcttcaatcacgtggagat

SEQ ID NO: 5644265 - DNA, 25 bp, Homo sapien
atctccagctgctccttagccttct

SEQ ID NO: 5644266 - DNA, 25 bp, Homo sapien
ggctgaagagttgacttacacaaca

SEQ ID NO: 5644267 - DNA, 25 bp, Homo sapien
tcaaatatctgcaatagatcatttt

SEQ ID NO: 5644268 - DNA, 25 bp, Homo sapien
ctggtgattctcacacacctccatc

SEQ ID NO: 5644269 - DNA, 25 bp, Homo sapien
tgggatcttccggcccacctgcatc

SEQ ID NO: 5644270 - DNA, 25 bp, Homo sapien
gtgccgtcgctgccgggttcagtag

SEQ ID NO: 5644271 - DNA, 25 bp, Homo sapien
cggctctcaagctcacacactcgga

SEQ ID NO: 5644272 - DNA, 25 bp, Homo sapien
tcattggttggcagaggagttggag

SEQ ID NO: 5644273 - DNA, 25 bp, Homo sapien
gcaccagttgtcaatactaacccgc

SEQ ID NO: 5644274 - DNA, 25 bp, Homo sapien
gcaacttcctgaaagctcatttaaa

SEQ ID NO: 5644275 - DNA, 25 bp, Homo sapien
gagcatgtgtcagacaatacaatgg

SEQ ID NO: 5644276 - DNA, 25 bp, Homo sapien
ccatccgacggcggtcattcagcat

SEQ ID NO: 5644277 - DNA, 25 bp, Homo sapien
catctcctgacagtactgaagaact

SEQ ID NO: 5644278 - DNA, 25 bp, Homo sapien
cgatgaggccgtggcgggtcagact

SEQ ID NO: 5644279 - DNA, 25 bp, Homo sapien
ccgacggcggtcattcagcatagct

SEQ ID NO: 5644280 - DNA, 25 bp, Homo sapien
acatgcatatttaacttcccacaaa

SEQ ID NO: 5644281 - DNA, 25 bp, Homo sapien
aacgaggcatcacggcccggcaggg

SEQ ID NO: 5644282 - DNA, 25 bp, Homo sapien
ggtggccgccatccctcgccgggtc

SEQ ID NO: 5644283 - DNA, 25 bp, Homo sapien
aagtagaggccgagggtcagtgcct

SEQ ID NO: 5644284 - DNA, 25 bp, Homo sapien
tattaaggagtttgtaggtgaagtt

SEQ ID NO: 5644285 - DNA, 25 bp, Homo sapien
catagttggaaggggaagtgaacgg

SEQ ID NO: 5644286 - DNA, 25 bp, Homo sapien
tggagaaagtccagagaggaggagc

SEQ ID NO: 5644287 - DNA, 25 bp, Homo sapien
ttctccagagccatccgacggcggt

SEQ ID NO: 5644288 - DNA, 25 bp, Homo sapien
gacatgaatagggtcaaaggggagg

SEQ ID NO: 5644289 - DNA, 25 bp, Homo sapien
caatcacgtggagatgtgtcatcac

SEQ ID NO: 5644290 - DNA, 25 bp, Homo sapien
gactaccgtgtgccagtgctggtga

SEQ ID NO: 5644291 - DNA, 25 bp, Homo sapien
tccgaaggaaagcagcagcggacac

SEQ ID NO: 5644292 - DNA, 25 bp, Homo sapien
ctgctccaggtatttgtaggtgggg

SEQ ID NO: 5644293 - DNA, 25 bp, Homo sapien
gcagtgagcatcgacatcaactgta

SEQ ID NO: 5644294 - DNA, 25 bp, Homo sapien
gttcttagcttgaagctctgcctct

SEQ ID NO: 5644295 - DNA, 25 bp, Homo sapien
aactggtccatatctgcacgctgct

SEQ ID NO: 5644296 - DNA, 25 bp, Homo sapien
gctttaaccatggcttggaagtgct

SEQ ID NO: 5644297 - DNA, 25 bp, Homo sapien
gcagcatgccgtagctatataaggt

SEQ ID NO: 5644298 - DNA, 25 bp, Homo sapien
aaagaatggaaattgcagttctaca

SEQ ID NO: 5644299 - DNA, 25 bp, Homo sapien
agcaacagcaaatcctgttccggca

SEQ ID NO: 5644300 - DNA, 25 bp, Homo sapien
gacataacgccgtaaggcctggaga

SEQ ID NO: 5644301 - DNA, 25 bp, Homo sapien
tccctgccacctaaatctgcatctg

SEQ ID NO: 5644302 - DNA, 25 bp, Homo sapien
aagtgctgaatcagagtctgcctct

SEQ ID NO: 5644303 - DNA, 25 bp, Homo sapien
tgtaggtggggttctcatagccatg

SEQ ID NO: 5644304 - DNA, 25 bp, Homo sapien
tttaaccatggcttggaagtgctga

SEQ ID NO: 5644305 - DNA, 25 bp, Homo sapien
catggcttggaagtgctgaatcaga

SEQ ID NO: 5644306 - DNA, 25 bp, Homo sapien
cttccttctctaaagctttaaccat

SEQ ID NO: 5644307 - DNA, 25 bp, Homo sapien
tctattattgaaaatcgacatttcc

SEQ ID NO: 5644308 - DNA, 25 bp, Homo sapien
tttggttcctcctttcttcaatcac

SEQ ID NO: 5644309 - DNA, 25 bp, Homo sapien
gttccggcattggctgcaagagcct

SEQ ID NO: 5644310 - DNA, 25 bp, Homo sapien
tttgtctgagggcagcacacatatt

SEQ ID NO: 5644311 - DNA, 25 bp, Homo sapien
ttcacccatttaaaagaatggaaat

SEQ ID NO: 5644312 - DNA, 25 bp, Homo sapien
ctggacttcaagaaactggtccttt

SEQ ID NO: 5644313 - DNA, 25 bp, Homo sapien
tagtcctacagtccaggaggtcagg

SEQ ID NO: 5644314 - DNA, 25 bp, Homo sapien
cagggctgccgcgctccctgccacc

SEQ ID NO: 5644315 - DNA, 25 bp, Homo sapien
catcgcctcctgggagcagacagct

SEQ ID NO: 5644316 - DNA, 25 bp, Homo sapien
tggttcctcctttcttcaatcacgt

SEQ ID NO: 5644317 - DNA, 25 bp, Homo sapien
ggggtgagcattggatcaacctcca

SEQ ID NO: 5644318 - DNA, 25 bp, Homo sapien
atcaacctccacgatcccgtggctg

SEQ ID NO: 5644319 - DNA, 25 bp, Homo sapien
tcccgctcttcctcgaggcctccaa

SEQ ID NO: 5644320 - DNA, 25 bp, Homo sapien
tagtaatctcggtcctccaccactt

SEQ ID NO: 5644321 - DNA, 25 bp, Homo sapien
cacccatttaaaagaatggaaattg

SEQ ID NO: 5644322 - DNA, 25 bp, Homo sapien
ataaaaatacaccacaggttaccag

SEQ ID NO: 5644323 - DNA, 25 bp, Homo sapien
tcggttgcggtgccgaatctccagc

SEQ ID NO: 5644324 - DNA, 25 bp, Homo sapien
gactcagtttcagggacagcctgga

SEQ ID NO: 5644325 - DNA, 25 bp, Homo sapien
aagctctctagaagacgctggaata

SEQ ID NO: 5644326 - DNA, 25 bp, Homo sapien
agcggctgctgcttggcagtcgatc

SEQ ID NO: 5644327 - DNA, 25 bp, Homo sapien
aagtcttccagatctgcttcagtag

SEQ ID NO: 5644328 - DNA, 25 bp, Homo sapien
aaaagaaagaaaaagcagaagcagt

SEQ ID NO: 5644329 - DNA, 25 bp, Homo sapien
tgtccacagactcagtttcagggac

SEQ ID NO: 5644330 - DNA, 25 bp, Homo sapien
gctgatgacgatgaccgtggcaatg

SEQ ID NO: 5644331 - DNA, 25 bp, Homo sapien
atagtgggtagagacatgaataggg

SEQ ID NO: 5644332 - DNA, 25 bp, Homo sapien
tccacagactcagtttcagggacag

SEQ ID NO: 5644333 - DNA, 25 bp, Homo sapien
attctcctcattgtagtcatctcct

SEQ ID NO: 5644334 - DNA, 25 bp, Homo sapien
agtgaactggtccatatctgcacgc

SEQ ID NO: 5644335 - DNA, 25 bp, Homo sapien
ggtccatatctgcacgctgctcctg

SEQ ID NO: 5644336 - DNA, 25 bp, Homo sapien
taaataaaagccaggacagtgaatg

SEQ ID NO: 5644337 - DNA, 25 bp, Homo sapien
aggacatcacttacaaattcaccca

SEQ ID NO: 5644338 - DNA, 25 bp, Homo sapien
ctgctgcttctcactggctgcttcc

SEQ ID NO: 5644339 - DNA, 25 bp, Homo sapien
tcaacagccaacacatgctggtaat

SEQ ID NO: 5644340 - DNA, 25 bp, Homo sapien
acatttgtgatctgtagctctggat

SEQ ID NO: 5644341 - DNA, 25 bp, Homo sapien
aggttcccatttcccagtctgaatg

SEQ ID NO: 5644342 - DNA, 25 bp, Homo sapien
tcctcctttcttcaatcacgtggag

SEQ ID NO: 5644343 - DNA, 25 bp, Homo sapien
cccggacgtccacaggggtctctga

SEQ ID NO: 5644344 - DNA, 25 bp, Homo sapien
agcatagcttccactcgggccaggt

SEQ ID NO: 5644345 - DNA, 25 bp, Homo sapien
cgagcatgctcattatcatctgcag

SEQ ID NO: 5644346 - DNA, 25 bp, Homo sapien
tttcctcttgaatttcttgggctac

SEQ ID NO: 5644347 - DNA, 25 bp, Homo sapien
tgtggtcttctctgagtgaatgtca

SEQ ID NO: 5644348 - DNA, 25 bp, Homo sapien
tctgtatacactaagctctctagaa

SEQ ID NO: 5644349 - DNA, 25 bp, Homo sapien
tcctcatccacagctgcttctgtga

SEQ ID NO: 5644350 - DNA, 25 bp, Homo sapien
atcctcagactcaaaattgttcctg

SEQ ID NO: 5644351 - DNA, 25 bp, Homo sapien
catctgtatacactaagctctctag

SEQ ID NO: 5644352 - DNA, 25 bp, Homo sapien
attgttatattaccatctttcaccc

SEQ ID NO: 5644353 - DNA, 25 bp, Homo sapien
ctcatctgtatacactaagctctct

SEQ ID NO: 5644354 - DNA, 25 bp, Homo sapien
tgctcattatcatctgcagaggtct

SEQ ID NO: 5644355 - DNA, 25 bp, Homo sapien
cttctcactggctgcttccttctct

SEQ ID NO: 5644356 - DNA, 25 bp, Homo sapien
catttccttaacatccagagtctcg

SEQ ID NO: 5644357 - DNA, 25 bp, Homo sapien
tgtaagcgatctttgttctcagcac

SEQ ID NO: 5644358 - DNA, 25 bp, Homo sapien
tatatattgagagcatgtgtcagac

SEQ ID NO: 5644359 - DNA, 25 bp, Homo sapien
ctcacccggacgtccacaggggtct

SEQ ID NO: 5644360 - DNA, 25 bp, Homo sapien
gagaaagtccagagaggaggagcct

SEQ ID NO: 5644361 - DNA, 25 bp, Homo sapien
agtgcctttggagaaagtccagaga

SEQ ID NO: 5644362 - DNA, 25 bp, Homo sapien
gcatccctccgccagggctgccgcg

SEQ ID NO: 5644363 - DNA, 25 bp, Homo sapien
cctcgatgtagccggccagcgccaa

SEQ ID NO: 5644364 - DNA, 25 bp, Homo sapien
aatacacatcaacatcattggttgg

SEQ ID NO: 5644365 - DNA, 25 bp, Homo sapien
catcctcatccacagctgcttctgt

SEQ ID NO: 5644366 - DNA, 25 bp, Homo sapien
ccgctcttcctcgaggcctccaact

SEQ ID NO: 5644367 - DNA, 25 bp, Homo sapien
tgccgccgcagccaccatatataaa

SEQ ID NO: 5644368 - DNA, 25 bp, Homo sapien
gaaaactacatcaaatatctgcaat

SEQ ID NO: 5644369 - DNA, 25 bp, Homo sapien
ggttgcggtgccgaatctccagctg

SEQ ID NO: 5644370 - DNA, 25 bp, Homo sapien
gagggtctctcacgtgcttcagtgg

SEQ ID NO: 5644371 - DNA, 25 bp, Homo sapien
tcagacatgcctctttgactaccgt

SEQ ID NO: 5644372 - DNA, 25 bp, Homo sapien
tcagtaggattctcctcattgtagt

SEQ ID NO: 5644373 - DNA, 25 bp, Homo sapien
acctccacgatcccgtggctgatgg

SEQ ID NO: 5644374 - DNA, 25 bp, Homo sapien
tctgcctcttcccattccttcttta

SEQ ID NO: 5644375 - DNA, 25 bp, Homo sapien
gggctgccgcgctccctgccaccta

SEQ ID NO: 5644376 - DNA, 25 bp, Homo sapien
ggccgcggtcccggtggccgccatc

SEQ ID NO: 5644377 - DNA, 25 bp, Homo sapien
tctcactggctgcttccttctctaa

SEQ ID NO: 5644378 - DNA, 25 bp, Homo sapien
gtccagagaggaggagcctgcacat

SEQ ID NO: 5644379 - DNA, 25 bp, Homo sapien
caccctcatctgtatacactaagct

SEQ ID NO: 5644380 - DNA, 25 bp, Homo sapien
ctccagctgctccttagccttctgg

SEQ ID NO: 5644381 - DNA, 25 bp, Homo sapien
cgctgctcctgaaggagctcatcaa

SEQ ID NO: 5644382 - DNA, 25 bp, Homo sapien
aacggtgggatctcctcactctcct

SEQ ID NO: 5644383 - DNA, 25 bp, Homo sapien
cttctttaccctgtccattcggttg

SEQ ID NO: 5644384 - DNA, 25 bp, Homo sapien
gctacataaggtactttgtagagca

SEQ ID NO: 5644385 - DNA, 25 bp, Homo sapien
gtcagacaatacaatggaagtgggg

SEQ ID NO: 5644386 - DNA, 25 bp, Homo sapien
agctttccacagtgtccacagactc

SEQ ID NO: 5644387 - DNA, 25 bp, Homo sapien
atggtatgtaagcgatctttgttct

SEQ ID NO: 5644388 - DNA, 25 bp, Homo sapien
tcccatttattatatattgagagca

SEQ ID NO: 5644389 - DNA, 25 bp, Homo sapien
agagagaggctttggttcctccttt

SEQ ID NO: 5644390 - DNA, 25 bp, Homo sapien
ttggggaggttcttagcttgaagct

SEQ ID NO: 5644391 - DNA, 25 bp, Homo sapien
cacaggaaaataaaaatacaccaca

SEQ ID NO: 5644392 - DNA, 25 bp, Homo sapien
atcactttctcttcggcaccgatca

SEQ ID NO: 5644393 - DNA, 25 bp, Homo sapien
gaagtggggtttctgattaatttaa

SEQ ID NO: 5644394 - DNA, 25 bp, Homo sapien
cctcgaggcctccaactctctcggc

SEQ ID NO: 5644395 - DNA, 25 bp, Homo sapien
atggaactggtctaccccacatggg

SEQ ID NO: 5644396 - DNA, 25 bp, Homo sapien
agtgagcatcgacatcaactgtaca

SEQ ID NO: 5644397 - DNA, 25 bp, Homo sapien
tctcgaaatacacatcaacatcatt

SEQ ID NO: 5644398 - DNA, 25 bp, Homo sapien
tcgatgtagccggccagcgccaagg

SEQ ID NO: 5644399 - DNA, 25 bp, Homo sapien
tagccttctggaagcgagcatgctc

SEQ ID NO: 5644400 - DNA, 25 bp, Homo sapien
tgtgaagtcttccagatctgcttca

SEQ ID NO: 5644401 - DNA, 25 bp, Homo sapien
ggtgtggtcttctctgagtgaatgt

SEQ ID NO: 5644402 - DNA, 25 bp, Homo sapien
cttgttcaggtgacgctcttctggg

SEQ ID NO: 5644403 - DNA, 25 bp, Homo sapien
ttgcggtgccgaatctccagctgct

SEQ ID NO: 5644404 - DNA, 25 bp, Homo sapien
aactggtctaccccacatgggagca

SEQ ID NO: 5644405 - DNA, 25 bp, Homo sapien
ggggaggttcttagcttgaagctct

SEQ ID NO: 5644406 - DNA, 25 bp, Homo sapien
aaatcatttccttaacatccagagt

SEQ ID NO: 5644407 - DNA, 25 bp, Homo sapien
gacaaagtagaggccgagggtcagt

SEQ ID NO: 5644408 - DNA, 25 bp, Homo sapien
taatcctcagactcaaaattgttcc

SEQ ID NO: 5644409 - DNA, 25 bp, Homo sapien
gctgcttccttctctaaagctttaa

SEQ ID NO: 5644410 - DNA, 25 bp, Homo sapien
agcagcagcggacaccctcatctgt

SEQ ID NO: 5644411 - DNA, 25 bp, Homo sapien
ccaatgagagcactgctactcagac

SEQ ID NO: 5644412 - DNA, 25 bp, Homo sapien
tggctgcttccttctctaaagcttt

SEQ ID NO: 5644413 - DNA, 25 bp, Homo sapien
gactcctgtgacgaaaacacaattg

SEQ ID NO: 5644414 - DNA, 25 bp, Homo sapien
agtgtccacagactcagtttcaggg

SEQ ID NO: 5644415 - DNA, 25 bp, Homo sapien
ctgaagtcctcccgcagtgggccca

SEQ ID NO: 5644416 - DNA, 25 bp, Homo sapien
cgccgggtcgctctagcgcgcggct

SEQ ID NO: 5644417 - DNA, 25 bp, Homo sapien
gacacagatccaataatctttgtct

SEQ ID NO: 5644418 - DNA, 25 bp, Homo sapien
gtagctatataaggtcattccctga

SEQ ID NO: 5644419 - DNA, 25 bp, Homo sapien
tctttgtctgagggcagcacacata

SEQ ID NO: 5644420 - DNA, 25 bp, Homo sapien
gtccttggtgacaggacttttatgg

SEQ ID NO: 5644421 - DNA, 25 bp, Homo sapien
gaatcgtgggatcttccggcccacc

SEQ ID NO: 5644422 - DNA, 25 bp, Homo sapien
gagttggaggaatcatcgctttaca

SEQ ID NO: 5644423 - DNA, 25 bp, Homo sapien
ggcaatggccactgcgatgaccagc

SEQ ID NO: 5644424 - DNA, 25 bp, Homo sapien
aaacacaattgttcaaagctttcca

SEQ ID NO: 5644425 - DNA, 25 bp, Homo sapien
cagccgtggaaacactggacttcaa

SEQ ID NO: 5644426 - DNA, 25 bp, Homo sapien
caggtatccagccgtggaaacactg

SEQ ID NO: 5644427 - DNA, 25 bp, Homo sapien
tccttaacatccagagtctcgtcaa

SEQ ID NO: 5644428 - DNA, 25 bp, Homo sapien
ttttgacacagatccaataatcttt

SEQ ID NO: 5644429 - DNA, 25 bp, Homo sapien
taggaagttaaagtatttattgatg

SEQ ID NO: 5644430 - DNA, 25 bp, Homo sapien
cccagtctgaatgttcacatgcata

SEQ ID NO: 5644431 - DNA, 25 bp, Homo sapien
cagtgaagaatgtcaaatataagct

SEQ ID NO: 5644432 - DNA, 25 bp, Homo sapien
cgatgaccagcaggccaatgagagc

SEQ ID NO: 5644433 - DNA, 25 bp, Homo sapien
agaggagttggaggaatcatcgctt

SEQ ID NO: 5644434 - DNA, 25 bp, Homo sapien
taacgccgtaaggcctggagaatgc

SEQ ID NO: 5644435 - DNA, 25 bp, Homo sapien
gtgctgaatcagagtctgcctctct

SEQ ID NO: 5644436 - DNA, 25 bp, Homo sapien
ccttggtgtggtcttctctgagtga

SEQ ID NO: 5644437 - DNA, 25 bp, Homo sapien
tgggtagagacatgaatagggtcaa

SEQ ID NO: 5644438 - DNA, 25 bp, Homo sapien
ggtggggttctcatagccatggttc

SEQ ID NO: 5644439 - DNA, 25 bp, Homo sapien
gatctgcttcagtaggaaattcact

SEQ ID NO: 5644440 - DNA, 25 bp, Homo sapien
agcatgccgtagctatataaggtca

SEQ ID NO: 5644441 - DNA, 25 bp, Homo sapien
cagacagctttgacatcatgagtaa

SEQ ID NO: 5644442 - DNA, 25 bp, Homo sapien
gggccaggtgggtctccaccagctg

SEQ ID NO: 5644443 - DNA, 25 bp, Homo sapien
agagttgacttacacaacataaccg

SEQ ID NO: 5644444 - DNA, 25 bp, Homo sapien
acggattcccgctcttcctcgaggc

SEQ ID NO: 5644445 - DNA, 25 bp, Homo sapien
ctccgccagggctgccgcgctccct

SEQ ID NO: 5644446 - DNA, 25 bp, Homo sapien
gtgaggggacaaagtagaggccgag

SEQ ID NO: 5644447 - DNA, 25 bp, Homo sapien
tcagcacggacataacgccgtaagg

SEQ ID NO: 5644448 - DNA, 25 bp, Homo sapien
cgtggaaacactggacttcaagaaa

SEQ ID NO: 5644449 - DNA, 25 bp, Homo sapien
tcatctcctttgaaggtgtcatagt

SEQ ID NO: 5644450 - DNA, 25 bp, Homo sapien
caccatatataaagcgcacgcactt

SEQ ID NO: 5644451 - DNA, 25 bp, Homo sapien
tactcagactgaagtcctcccgcag

SEQ ID NO: 5644452 - DNA, 25 bp, Homo sapien
ctgacatggtgccgtcgctgccggg

SEQ ID NO: 5644453 - DNA, 25 bp, Homo sapien
ataagctacaggctaatctctgtgg

SEQ ID NO: 5644454 - DNA, 25 bp, Homo sapien
ttcctcatcctcatcatcctcatcc

SEQ ID NO: 5644455 - DNA, 25 bp, Homo sapien
acttcttcttttgtttcaaagcagc

SEQ ID NO: 5644456 - DNA, 25 bp, Homo sapien
aaaatgcctttaacgtccttggtga

SEQ ID NO: 5644457 - DNA, 25 bp, Homo sapien
tacagtccaggaggtcaggatgtca

SEQ ID NO: 5644458 - DNA, 25 bp, Homo sapien
gaccagcaggccaatgagagcactg

SEQ ID NO: 5644459 - DNA, 25 bp, Homo sapien
gaggtctcgaaatacacatcaacat

SEQ ID NO: 5644460 - DNA, 25 bp, Homo sapien
aagttaaagtatttattgatgtgtt

SEQ ID NO: 5644461 - DNA, 25 bp, Homo sapien
ttcaagaaactggtcctttcacatc

SEQ ID NO: 5644462 - DNA, 25 bp, Homo sapien
gagacatgaatagggtcaaagggga

SEQ ID NO: 5644463 - DNA, 25 bp, Homo sapien
tcaggatgtcagacgcagcccctgg

SEQ ID NO: 5644464 - DNA, 25 bp, Homo sapien
gctcatttaaaaagggaatactgcc

SEQ ID NO: 5644465 - DNA, 25 bp, Homo sapien
aagcagctcttggtgcctgttggat

SEQ ID NO: 5644466 - DNA, 25 bp, Homo sapien
gctccttagccttctggaagcgagc

SEQ ID NO: 5644467 - DNA, 25 bp, Homo sapien
cgacagcctgcatataagtctatta

SEQ ID NO: 5644468 - DNA, 25 bp, Homo sapien
taagtctattattgaaaatcgacat

SEQ ID NO: 5644469 - DNA, 25 bp, Homo sapien
cactttctcttcggcaccgatcagt

SEQ ID NO: 5644470 - DNA, 25 bp, Homo sapien
caaagcgactcttgcattgcttttt

SEQ ID NO: 5644471 - DNA, 25 bp, Homo sapien
cagggacagcctggactactttcct

SEQ ID NO: 5644472 - DNA, 25 bp, Homo sapien
tgtcaaatataagctacaggctaat

SEQ ID NO: 5644473 - DNA, 25 bp, Homo sapien
tgaaaggtgtaacaaagcgactctt

SEQ ID NO: 5644474 - DNA, 25 bp, Homo sapien
cctttcttcaatcacgtggagatgt

SEQ ID NO: 5644475 - DNA, 25 bp, Homo sapien
ttcgttctcaggtagggctgggaag

SEQ ID NO: 5644476 - DNA, 25 bp, Homo sapien
cagtctgaatgttcacatgcatatt

SEQ ID NO: 5644477 - DNA, 25 bp, Homo sapien
atattcagtgccatggaactggtct

SEQ ID NO: 5644478 - DNA, 25 bp, Homo sapien
ccacctgcatccctccgccagggct

SEQ ID NO: 5644479 - DNA, 25 bp, Homo sapien
tgggccgccttttctgggtcaacag

SEQ ID NO: 5644480 - DNA, 25 bp, Homo sapien
aggaggagcctgcacatctggacat

SEQ ID NO: 5644481 - DNA, 25 bp, Homo sapien
gcgccaaggcaggcgccgtgagccc

SEQ ID NO: 5644482 - DNA, 25 bp, Homo sapien
ctgttgccgccgcagccaccatata

SEQ ID NO: 5644483 - DNA, 25 bp, Homo sapien
tcctttcacacaaacaaacctcccc

SEQ ID NO: 5644484 - DNA, 25 bp, Homo sapien
tgttcaggtgacgctcttctggggt

SEQ ID NO: 5644485 - DNA, 25 bp, Homo sapien
ttattgatgtgtttaaactgtgtac

SEQ ID NO: 5644486 - DNA, 25 bp, Homo sapien
cctccggcaccagttgtcaatacta

SEQ ID NO: 5644487 - DNA, 25 bp, Homo sapien
cttagccttctggaagcgagcatgc

SEQ ID NO: 5644488 - DNA, 25 bp, Homo sapien
gccggccagcgccaaggcaggcgcc

SEQ ID NO: 5644489 - DNA, 25 bp, Homo sapien
gctcttcctcgaggcctccaactct

SEQ ID NO: 5644490 - DNA, 25 bp, Homo sapien
ctgaagagttgacttacacaacata

SEQ ID NO: 5644491 - DNA, 25 bp, Homo sapien
agcactggattccgaaggaaagcag

SEQ ID NO: 5644492 - DNA, 25 bp, Homo sapien
tttggagaaagtccagagaggagga

SEQ ID NO: 5644493 - DNA, 25 bp, Homo sapien
cataaggtactttgtagagcagaga

SEQ ID NO: 5644494 - DNA, 25 bp, Homo sapien
gaggctgaagagttgacttacacaa

SEQ ID NO: 5644495 - DNA, 25 bp, Homo sapien
ataaccggaacgacagcctgcatat

SEQ ID NO: 5644496 - DNA, 25 bp, Homo sapien
agtgaatgtcacaaggccggtgaca

SEQ ID NO: 5644497 - DNA, 25 bp, Homo sapien
gacatcacttacaaattcacccacg

SEQ ID NO: 5644498 - DNA, 25 bp, Homo sapien
ctcctgtgacgaaaacacaattgtt

SEQ ID NO: 5644499 - DNA, 25 bp, Homo sapien
gcagctcttggtgcctgttggatca

SEQ ID NO: 5644500 - DNA, 25 bp, Homo sapien
ttgacacagatccaataatctttgt

SEQ ID NO: 5644501 - DNA, 25 bp, Homo sapien
ggtcattcagcatagcttccactcg

SEQ ID NO: 5644502 - DNA, 25 bp, Homo sapien
tcagtggccattacagttccctatt

SEQ ID NO: 5644503 - DNA, 25 bp, Homo sapien
tggccattacagttccctattccac

SEQ ID NO: 5644504 - DNA, 25 bp, Homo sapien
gccttttctgggtcaacagccaaca

SEQ ID NO: 5644505 - DNA, 25 bp, Homo sapien
tttgtccctccggcaccagttgtca

SEQ ID NO: 5644506 - DNA, 25 bp, Homo sapien
gaaaatcatttccttaacatccaga

SEQ ID NO: 5644507 - DNA, 25 bp, Homo sapien
tagctctggatacatctcctgacag

SEQ ID NO: 5644508 - DNA, 25 bp, Homo sapien
ttctcagcaacttcctgaaagctca

SEQ ID NO: 5644509 - DNA, 25 bp, Homo sapien
tgatgtgtttaaactgtgtacattc

SEQ ID NO: 5644510 - DNA, 25 bp, Homo sapien
aggcctggagaatgcgatgaggccg

SEQ ID NO: 5644511 - DNA, 25 bp, Homo sapien
agcctcgatgtagccggccagcgcc

SEQ ID NO: 5644512 - DNA, 25 bp, Homo sapien
caacctccacgatcccgtggctgat

SEQ ID NO: 5644513 - DNA, 25 bp, Homo sapien
aagcgactcttgcattgctttttgt

SEQ ID NO: 5644514 - DNA, 25 bp, Homo sapien
tgtgccagtgctggtgattctcaca

SEQ ID NO: 5644515 - DNA, 25 bp, Homo sapien
cctgcacatctggacatagttggaa

SEQ ID NO: 5644516 - DNA, 25 bp, Homo sapien
agcaggagcctgcccgtggctgcgg

SEQ ID NO: 5644517 - DNA, 25 bp, Homo sapien
agccatccgacggcggtcattcagc

SEQ ID NO: 5644518 - DNA, 25 bp, Homo sapien
ggagaatgcgatgaggccgtggcgg

SEQ ID NO: 5644519 - DNA, 25 bp, Homo sapien
tgtccctccggcaccagttgtcaat

SEQ ID NO: 5644520 - DNA, 25 bp, Homo sapien
taaggcctggagaatgcgatgaggc

SEQ ID NO: 5644521 - DNA, 25 bp, Homo sapien
cgtgcttcagtggccattacagttc

SEQ ID NO: 5644522 - DNA, 25 bp, Homo sapien
cgcagccaccatatataaagcgcac

SEQ ID NO: 5644523 - DNA, 25 bp, Homo sapien
ggggtctctgagattgaggcagtga

SEQ ID NO: 5644524 - DNA, 25 bp, Homo sapien
gacgtccacaggggtctctgagatt

SEQ ID NO: 5644525 - DNA, 25 bp, Homo sapien
gctggaataaaatgcctttaacgtc

SEQ ID NO: 5644526 - DNA, 25 bp, Homo sapien
cacttgaaaggtgtaacaaagcgac

SEQ ID NO: 5644527 - DNA, 25 bp, Homo sapien
agaggctttggttcctcctttcttc

SEQ ID NO: 5644528 - DNA, 25 bp, Homo sapien
tttaggaagttaaagtatttattga

SEQ ID NO: 5644529 - DNA, 25 bp, Homo sapien
tttcctttcacacaaacaaacctcc

SEQ ID NO: 5644530 - DNA, 25 bp, Homo sapien
catgccgtagctatataaggtcatt

SEQ ID NO: 5644531 - DNA, 25 bp, Homo sapien
ggtgacaggagggggtggaggtgag

SEQ ID NO: 5644532 - DNA, 25 bp, Homo sapien
gtgtttaaactgtgtacattctcca

SEQ ID NO: 5644533 - DNA, 25 bp, Homo sapien
ggtcagactgcaaggcagccaggta

SEQ ID NO: 5644534 - DNA, 25 bp, Homo sapien
tggagacacacaggtatccagccgt

SEQ ID NO: 5644535 - DNA, 25 bp, Homo sapien
acgctcttctggggtgagcattgga

SEQ ID NO: 5644536 - DNA, 25 bp, Homo sapien
ccagctgctccttagccttctggaa

SEQ ID NO: 5644537 - DNA, 25 bp, Homo sapien
gctctgcctcttcccattccttctt

SEQ ID NO: 5644538 - DNA, 25 bp, Homo sapien
ccagagccatccgacggcggtcatt

SEQ ID NO: 5644539 - DNA, 25 bp, Homo sapien
tcgacatttcccatttattatatat

SEQ ID NO: 5644540 - DNA, 25 bp, Homo sapien
attatatattgagagcatgtgtcag

SEQ ID NO: 5644541 - DNA, 25 bp, Homo sapien
ttgggctacataaggtactttgtag

SEQ ID NO: 5644542 - DNA, 25 bp, Homo sapien
tccaccagctgctgcttctcactgg

SEQ ID NO: 5644543 - DNA, 25 bp, Homo sapien
ggatcaacctccacgatcccgtggc

SEQ ID NO: 5644544 - DNA, 25 bp, Homo sapien
ctcccgcagtgggcccacggattcc

SEQ ID NO: 5644545 - DNA, 25 bp, Homo sapien
cttcccacaaaacattgcgatttga

SEQ ID NO: 5644546 - DNA, 25 bp, Homo sapien
tctggatacatctcctgacagtact

SEQ ID NO: 5644547 - DNA, 25 bp, Homo sapien
ttggaagtgctgaatcagagtctgc

SEQ ID NO: 5644548 - DNA, 25 bp, Homo sapien
tatccagccgtggaaacactggact

SEQ ID NO: 5644549 - DNA, 25 bp, Homo sapien
acggatggtatgtaagcgatctttg

SEQ ID NO: 5644550 - DNA, 25 bp, Homo sapien
cttttctgggtcaacagccaacaca

SEQ ID NO: 5644551 - DNA, 25 bp, Homo sapien
acataaccggaacgacagcctgcat

SEQ ID NO: 5644552 - DNA, 25 bp, Homo sapien
ggatggtatgtaagcgatctttgtt

SEQ ID NO: 5644553 - DNA, 25 bp, Homo sapien
ccatggaactggtctaccccacatg

SEQ ID NO: 5644554 - DNA, 25 bp, Homo sapien
tggtgccgtcgctgccgggttcagt

SEQ ID NO: 5644555 - DNA, 25 bp, Homo sapien
ctccacagatcatattaaggagttt

SEQ ID NO: 5644556 - DNA, 25 bp, Homo sapien
acaggacttttatggagacacacag

SEQ ID NO: 5644557 - DNA, 25 bp, Homo sapien
acaatggaagtggggtttctgatta

SEQ ID NO: 5644558 - DNA, 25 bp, Homo sapien
tgtcatagtagtaatctcggtcctc

SEQ ID NO: 5644559 - DNA, 25 bp, Homo sapien
tgcagaggtctcgaaatacacatca

SEQ ID NO: 5644560 - DNA, 25 bp, Homo sapien
cgatctttgttctcagcacggacat

SEQ ID NO: 5644561 - DNA, 25 bp, Homo sapien
gagggggtggaggtgaggggacaaa

SEQ ID NO: 5644562 - DNA, 25 bp, Homo sapien
tctctgctttggggaggttcttagc

SEQ ID NO: 5644563 - DNA, 25 bp, Homo sapien
gtttgtaggtgaagtttaatctgtg

SEQ ID NO: 5644564 - DNA, 25 bp, Homo sapien
ctcagcaacttcctgaaagctcatt

SEQ ID NO: 5644565 - DNA, 25 bp, Homo sapien
ctgtacaagcattacaaagactcct

SEQ ID NO: 5644566 - DNA, 25 bp, Homo sapien
ctcagtttcagggacagcctggact

SEQ ID NO: 5644567 - DNA, 25 bp, Homo sapien
tagtcttcctcttcatcttcctctt

SEQ ID NO: 5644568 - DNA, 25 bp, Homo sapien
ctcttgaatttcttgggctacataa

SEQ ID NO: 5644569 - DNA, 25 bp, Homo sapien
ggcctccaactctctcggcattgaa

SEQ ID NO: 5644570 - DNA, 25 bp, Homo sapien
cataacgccgtaaggcctggagaat

SEQ ID NO: 5644571 - DNA, 25 bp, Homo sapien
ctcatccacagctgcttctgtgaag

SEQ ID NO: 5644572 - DNA, 25 bp, Homo sapien
attctcacacacctccatccgctct

SEQ ID NO: 5644573 - DNA, 25 bp, Homo sapien
atataagctacaggctaatctctgt

SEQ ID NO: 5644574 - DNA, 25 bp, Homo sapien
agcactgctactcagactgaagtcc

SEQ ID NO: 5644575 - DNA, 25 bp, Homo sapien
aatctctgtggaagcactggattcc

SEQ ID NO: 5644576 - DNA, 25 bp, Homo sapien
gttcagtaggattctcctcattgta

SEQ ID NO: 5644577 - DNA, 25 bp, Homo sapien
cacttttctggaactagcaggacat

SEQ ID NO: 5644578 - DNA, 25 bp, Homo sapien
ttgcgagggtctctcacgtgcttca

SEQ ID NO: 5644579 - DNA, 25 bp, Homo sapien
atgtgtttaaactgtgtacattctc

SEQ ID NO: 5644580 - DNA, 25 bp, Homo sapien
cacgctgctcctgaaggagctcatc

SEQ ID NO: 5644581 - DNA, 25 bp, Homo sapien
gtgaagaatgtcaaatataagctac

SEQ ID NO: 5644582 - DNA, 25 bp, Homo sapien
ctaacccgctggtttgcctccatca

SEQ ID NO: 5644583 - DNA, 25 bp, Homo sapien
ctggcacttttctggaactagcagg

SEQ ID NO: 5644584 - DNA, 25 bp, Homo sapien
tcgaaatacacatcaacatcattgg

SEQ ID NO: 5644585 - DNA, 25 bp, Homo sapien
attccctgagtcagacatgcctctt

SEQ ID NO: 5644586 - DNA, 25 bp, Homo sapien
ctgcatcttgttcaggtgacgctct

SEQ ID NO: 5644587 - DNA, 25 bp, Homo sapien
ctgctactcagactgaagtcctccc

SEQ ID NO: 5644588 - DNA, 25 bp, Homo sapien
tttctgggtcaacagccaacacatg

SEQ ID NO: 5644589 - DNA, 25 bp, Homo sapien
acttacaaattcacccacgagacac

SEQ ID NO: 5644590 - DNA, 25 bp, Homo sapien
ctgcatccctccgccagggctgccg

SEQ ID NO: 5644591 - DNA, 25 bp, Homo sapien
ccgggttcagtaggattctcctcat

SEQ ID NO: 5644592 - DNA, 25 bp, Homo sapien
gcgccgtgagccccaccagcagcag

SEQ ID NO: 5644593 - DNA, 25 bp, Homo sapien
gatgtagccggccagcgccaaggca

SEQ ID NO: 5644594 - DNA, 25 bp, Homo sapien
tgtctgagggcagcacacatattca

SEQ ID NO: 5644595 - DNA, 25 bp, Homo sapien
atttcccagtctgaatgttcacatg

SEQ ID NO: 5644596 - DNA, 25 bp, Homo sapien
tatattgagagcatgtgtcagacaa

SEQ ID NO: 5644597 - DNA, 25 bp, Homo sapien
atctcctttgaaggtgtcatagtag

SEQ ID NO: 5644598 - DNA, 25 bp, Homo sapien
gccagcggccgcctccttggtgtgg

SEQ ID NO: 5644599 - DNA, 25 bp, Homo sapien
aggtgtaacaaagcgactcttgcat

SEQ ID NO: 5644600 - DNA, 25 bp, Homo sapien
acacacagccatacaataatcctca

SEQ ID NO: 5644601 - DNA, 25 bp, Homo sapien
gaaggggtggaacggtgggatctcc

SEQ ID NO: 5644602 - DNA, 25 bp, Homo sapien
tgaatagggtcaaaggggaggaaaa

SEQ ID NO: 5644603 - DNA, 25 bp, Homo sapien
tatagtcctacagtccaggaggtca

SEQ ID NO: 5644604 - DNA, 25 bp, Homo sapien
gatgtgtcatcacctgggatttcat

SEQ ID NO: 5644605 - DNA, 25 bp, Homo sapien
ctgctcctgaaggagctcatcaatt

SEQ ID NO: 5644606 - DNA, 25 bp, Homo sapien
gacacttgaaaggtgtaacaaagcg

SEQ ID NO: 5644607 - DNA, 25 bp, Homo sapien
ccaggaggtcaggatgtcagacgca

SEQ ID NO: 5644608 - DNA, 25 bp, Homo sapien
tctcacacacctccatccgctcttt

SEQ ID NO: 5644609 - DNA, 25 bp, Homo sapien
taaggtactttgtagagcagagaga

SEQ ID NO: 5644610 - DNA, 25 bp, Homo sapien
aggtaaacaacagacagtgaagaat

SEQ ID NO: 5644611 - DNA, 25 bp, Homo sapien
aagctcatttaaaaagggaatactg

SEQ ID NO: 5644612 - DNA, 25 bp, Homo sapien
cagtgggcccacggattcccgctct

SEQ ID NO: 5644613 - DNA, 25 bp, Homo sapien
cttctctaaagctttaaccatggct

SEQ ID NO: 5644614 - DNA, 25 bp, Homo sapien
cgtggagatgtgtcatcacctggga

SEQ ID NO: 5644615 - DNA, 25 bp, Homo sapien
tacactaagctctctagaagacgct

SEQ ID NO: 5644616 - DNA, 25 bp, Homo sapien
tcgcctcctgggagcagacagcttt

SEQ ID NO: 5644617 - DNA, 25 bp, Homo sapien
atctttgttctcagcacggacataa

SEQ ID NO: 5644618 - DNA, 25 bp, Homo sapien
cgcacgcactttcccttggagaggt

SEQ ID NO: 5644619 - DNA, 25 bp, Homo sapien
gtccattcggttgcggtgccgaatc

SEQ ID NO: 5644620 - DNA, 25 bp, Homo sapien
agcgagcatgctcattatcatctgc

SEQ ID NO: 5644621 - DNA, 25 bp, Homo sapien
tgagcattggatcaacctccacgat

SEQ ID NO: 5644622 - DNA, 25 bp, Homo sapien
aaatctgcatctgctccaggtattt

SEQ ID NO: 5644623 - DNA, 25 bp, Homo sapien
acctccatccgctctttgtggaaaa

SEQ ID NO: 5644624 - DNA, 25 bp, Homo sapien
gaaaaactggcacttttctggaact

SEQ ID NO: 5644625 - DNA, 25 bp, Homo sapien
tggacatagttggaaggggaagtga

SEQ ID NO: 5644626 - DNA, 25 bp, Homo sapien
ggattcccgctcttcctcgaggcct

SEQ ID NO: 5644627 - DNA, 25 bp, Homo sapien
gggatctcctcactctcctcagagc

SEQ ID NO: 5644628 - DNA, 25 bp, Homo sapien
gctgaatcagagtctgcctctctgc

SEQ ID NO: 5644629 - DNA, 25 bp, Homo sapien
atgacgatgaccgtggcaatggcca

SEQ ID NO: 5644630 - DNA, 25 bp, Homo sapien
gatcccgtggctgatggtgccatac

SEQ ID NO: 5644631 - DNA, 25 bp, Homo sapien
ttgcagttctacagtagtactttat

SEQ ID NO: 5644632 - DNA, 25 bp, Homo sapien
cccgtggctgcggcggccgcggtcc

SEQ ID NO: 5644633 - DNA, 25 bp, Homo sapien
caataatctttgtctgagggcagca

SEQ ID NO: 5644634 - DNA, 25 bp, Homo sapien
agcctgcatataagtctattattga

SEQ ID NO: 5644635 - DNA, 25 bp, Homo sapien
cactgctactcagactgaagtcctc

SEQ ID NO: 5644636 - DNA, 25 bp, Homo sapien
gacatggtgccgtcgctgccgggtt

SEQ ID NO: 5644637 - DNA, 25 bp, Homo sapien
gtttcaaagcagctcttggtgcctg

SEQ ID NO: 5644638 - DNA, 25 bp, Homo sapien
acttttataaacatcatagtcttcc

SEQ ID NO: 5644639 - DNA, 25 bp, Homo sapien
gagaggtcgaagtaccaacgaggca

SEQ ID NO: 5644640 - DNA, 25 bp, Homo sapien
aagtatttattgatgtgtttaaact

SEQ ID NO: 5644641 - DNA, 25 bp, Homo sapien
tctagaagacgctggaataaaatgc

SEQ ID NO: 5644642 - DNA, 25 bp, Homo sapien
tcagactgcaaggcagccaggtagt

SEQ ID NO: 5644643 - DNA, 25 bp, Homo sapien
gacatagttggaaggggaagtgaac

SEQ ID NO: 5644644 - DNA, 25 bp, Homo sapien
ctaaatctgcatctgctccaggtat

SEQ ID NO: 5644645 - DNA, 25 bp, Homo sapien
gtcgctctagcgcgcggctctcaag

SEQ ID NO: 5644646 - DNA, 25 bp, Homo sapien
tcgctgccgggttcagtaggattct

SEQ ID NO: 5644647 - DNA, 25 bp, Homo sapien
ataaagcgcacgcactttcccttgg

SEQ ID NO: 5644648 - DNA, 25 bp, Homo sapien
cgggtcagactgcaaggcagccagg

SEQ ID NO: 5644649 - DNA, 25 bp, Homo sapien
aagctcacacactcggactcctcgc

SEQ ID NO: 5644650 - DNA, 25 bp, Homo sapien
tgtcaatactaacccgctggtttgc

SEQ ID NO: 5644651 - DNA, 25 bp, Homo sapien
atatataaagcgcacgcactttccc

SEQ ID NO: 5644652 - DNA, 25 bp, Homo sapien
cgcactttcccttggagaggtcgaa

SEQ ID NO: 5644653 - DNA, 25 bp, Homo sapien
tgtgtcatcacctgggatttcatct

SEQ ID NO: 5644654 - DNA, 25 bp, Homo sapien
ttacacacagccatacaataatcct

SEQ ID NO: 5644655 - DNA, 25 bp, Homo sapien
ctgacagtactgaagaacttcttct

SEQ ID NO: 5644656 - DNA, 25 bp, Homo sapien
gacaccctcatctgtatacactaag

SEQ ID NO: 5644657 - DNA, 25 bp, Homo sapien
tcgggccaggtgggtctccaccagc

SEQ ID NO: 5644658 - DNA, 25 bp, Homo sapien
ttctacagtagtactttatatagtc

SEQ ID NO: 5644659 - DNA, 25 bp, Homo sapien
gaagacgctggaataaaatgccttt

SEQ ID NO: 5644660 - DNA, 25 bp, Homo sapien
tcacccacgagacacttgaaaggtg

SEQ ID NO: 5644661 - DNA, 25 bp, Homo sapien
atccgacggcggtcattcagcatag

SEQ ID NO: 5644662 - DNA, 25 bp, Homo sapien
gggccagcggccgcctccttggtgt

SEQ ID NO: 5644663 - DNA, 25 bp, Homo sapien
gaaaacacaattgttcaaagctttc

SEQ ID NO: 5644664 - DNA, 25 bp, Homo sapien
cttcctgaaagctcatttaaaaagg

SEQ ID NO: 5644665 - DNA, 25 bp, Homo sapien
gaagtcctcccgcagtgggcccacg

SEQ ID NO: 5644666 - DNA, 25 bp, Homo sapien
cctgccacctaaatctgcatctgct

SEQ ID NO: 5644667 - DNA, 25 bp, Homo sapien
tgccgcgctccctgccacctaaatc

SEQ ID NO: 5644668 - DNA, 25 bp, Homo sapien
attccgaaggaaagcagcagcggac

SEQ ID NO: 5644669 - DNA, 25 bp, Homo sapien
gcggccgcctccttggtgtggtctt

SEQ ID NO: 5644670 - DNA, 25 bp, Homo sapien
catcaacatcattggttggcagagg

SEQ ID NO: 5644671 - DNA, 25 bp, Homo sapien
caggtgggtctccaccagctgctgc

SEQ ID NO: 5644672 - DNA, 25 bp, Homo sapien
acagtagtactttatatagtcctac

SEQ ID NO: 5644673 - DNA, 25 bp, Homo sapien
tcctgacagtactgaagaacttctt

SEQ ID NO: 5644674 - DNA, 25 bp, Homo sapien
cttcggcaccgatcagtcccccatc

SEQ ID NO: 5644675 - DNA, 25 bp, Homo sapien
attacaaagactcctgtgacgaaaa

SEQ ID NO: 5644676 - DNA, 25 bp, Homo sapien
ccgcgctccctgccacctaaatctg

SEQ ID NO: 5644677 - DNA, 25 bp, Homo sapien
taaaagccaggacagtgaatgaggc

SEQ ID NO: 5644678 - DNA, 25 bp, Homo sapien
aacccgctggtttgcctccatcaca

SEQ ID NO: 5644679 - DNA, 25 bp, Homo sapien
atttattatatattgagagcatgtg

SEQ ID NO: 5644680 - DNA, 25 bp, Homo sapien
gaactagcaggacatcacttacaaa

SEQ ID NO: 5644681 - DNA, 25 bp, Homo sapien
ccagatccttcgttctcaggtaggg

SEQ ID NO: 5644682 - DNA, 25 bp, Homo sapien
catcacatttgtgatctgtagctct

SEQ ID NO: 5644683 - DNA, 25 bp, Homo sapien
gacagtgaatgaggctgaagagttg

SEQ ID NO: 5644684 - DNA, 25 bp, Homo sapien
gtagaggccgagggtcagtgccttt

SEQ ID NO: 5644685 - DNA, 25 bp, Homo sapien
caggccaatgagagcactgctactc

SEQ ID NO: 5644686 - DNA, 25 bp, Homo sapien
atcatattaaggagtttgtaggtga

SEQ ID NO: 5644687 - DNA, 25 bp, Homo sapien
atcatctgcagaggtctcgaaatac

SEQ ID NO: 5644688 - DNA, 25 bp, Homo sapien
gccagcgccaaggcaggcgccgtga

SEQ ID NO: 5644689 - DNA, 25 bp, Homo sapien
tttgcctccatcacatttgtgatct

SEQ ID NO: 5644690 - DNA, 25 bp, Homo sapien
gggcccacggattcccgctcttcct

SEQ ID NO: 5644691 - DNA, 25 bp, Homo sapien
cgccatccctcgccgggtcgctcta

SEQ ID NO: 5644692 - DNA, 25 bp, Homo sapien
ttaacttcccacaaaacattgcgat

SEQ ID NO: 5644693 - DNA, 25 bp, Homo sapien
tgtcatcacctgggatttcatctgg

SEQ ID NO: 5644694 - DNA, 25 bp, Homo sapien
tgagtcagacatgcctctttgacta

SEQ ID NO: 5644695 - DNA, 25 bp, Homo sapien
gtaacaaagcgactcttgcattgct

SEQ ID NO: 5644696 - DNA, 25 bp, Homo sapien
ctcctgggagcagacagctttgaca

SEQ ID NO: 5644697 - DNA, 25 bp, Homo sapien
tactgttaatcactttctcttcggc

SEQ ID NO: 5644698 - DNA, 25 bp, Homo sapien
ccctcgccgggtcgctctagcgcgc

SEQ ID NO: 5644699 - DNA, 25 bp, Homo sapien
cttcctcagcatcaccaggctgatg

SEQ ID NO: 5644700 - DNA, 25 bp, Homo sapien
cagcacacatattcagtgccatgga

SEQ ID NO: 5644701 - DNA, 25 bp, Homo sapien
actgtgtacattctccacagatcat

SEQ ID NO: 5644702 - DNA, 25 bp, Homo sapien
atcctcatcatcctcatccacagct

SEQ ID NO: 5644703 - DNA, 25 bp, Homo sapien
agagtctcgtcaatgaccatgtttt

SEQ ID NO: 5644704 - DNA, 25 bp, Homo sapien
catcacttacaaattcacccacgag

SEQ ID NO: 5644705 - DNA, 25 bp, Homo sapien
atcgtgggatcttccggcccacctg

SEQ ID NO: 5644706 - DNA, 25 bp, Homo sapien
tgtcagacgcagcccctggcagcgg

SEQ ID NO: 5644707 - DNA, 25 bp, Homo sapien
aaagcgcacgcactttcccttggag

SEQ ID NO: 5644708 - DNA, 25 bp, Homo sapien
agagaggaggagcctgcacatctgg

SEQ ID NO: 5644709 - DNA, 25 bp, Homo sapien
ttcccttggagaggtcgaagtacca

SEQ ID NO: 5644710 - DNA, 25 bp, Homo sapien
ggccactgcgatgaccagcaggcca

SEQ ID NO: 5644711 - DNA, 25 bp, Homo sapien
gttggcagaggagttggaggaatca

SEQ ID NO: 5644712 - DNA, 25 bp, Homo sapien
acaaggccggtgacaggagggggtg

SEQ ID NO: 5644713 - DNA, 25 bp, Homo sapien
atccttcgttctcaggtagggctgg

SEQ ID NO: 5644714 - DNA, 25 bp, Homo sapien
agttctccagagccatccgacggcg

SEQ ID NO: 5644715 - DNA, 25 bp, Homo sapien
ggaaattcacttttataaacatcat

SEQ ID NO: 5644716 - DNA, 25 bp, Homo sapien
cgagggtcagtgcctttggagaaag

SEQ ID NO: 5644717 - DNA, 25 bp, Homo sapien
gaagtaccaacgaggcatcacggcc

SEQ ID NO: 5644718 - DNA, 25 bp, Homo sapien
tcattcagcatagcttccactcggg

SEQ ID NO: 5644719 - DNA, 25 bp, Homo sapien
gtgtcagacaatacaatggaagtgg

SEQ ID NO: 5644720 - DNA, 25 bp, Homo sapien
aggcagccaggtagttctccagagc

SEQ ID NO: 5644721 - DNA, 25 bp, Homo sapien
cttgaagctctgcctcttcccattc

SEQ ID NO: 5644722 - DNA, 25 bp, Homo sapien
tcttgggctacataaggtactttgt

SEQ ID NO: 5644723 - DNA, 25 bp, Homo sapien
atacaccacaggttaccagaacctt

SEQ ID NO: 5644724 - DNA, 25 bp, Homo sapien
attcacttttataaacatcatagtc

SEQ ID NO: 5644725 - DNA, 25 bp, Homo sapien
tcctcttcttttgacacagatccaa

SEQ ID NO: 5644726 - DNA, 25 bp, Homo sapien
catattaaggagtttgtaggtgaag

SEQ ID NO: 5644727 - DNA, 25 bp, Homo sapien
ggcaccgatcagtcccccatcctgc

SEQ ID NO: 5644728 - DNA, 25 bp, Homo sapien
aatgtcaaatataagctacaggcta

SEQ ID NO: 5644729 - DNA, 25 bp, Homo sapien
accagttgtcaatactaacccgctg

SEQ ID NO: 5644730 - DNA, 25 bp, Homo sapien
cattctccacagatcatattaagga

SEQ ID NO: 5644731 - DNA, 25 bp, Homo sapien
aataatcctcagactcaaaattgtt

SEQ ID NO: 5644732 - DNA, 25 bp, Homo sapien
aaactggtcctttcacatcattttg

SEQ ID NO: 5644733 - DNA, 25 bp, Homo sapien
agaagcagtgagcatcgacatcaac

SEQ ID NO: 5644734 - DNA, 25 bp, Homo sapien
ccggtgacaggagggggtggaggtg

SEQ ID NO: 5644735 - DNA, 25 bp, Homo sapien
atccctccgccagggctgccgcgct

SEQ ID NO: 5644736 - DNA, 25 bp, Homo sapien
tctaaagctttaaccatggcttgga

SEQ ID NO: 5644737 - DNA, 25 bp, Homo sapien
tgctctcccactccagatccttcgt

SEQ ID NO: 5644738 - DNA, 25 bp, Homo sapien
gatccaataatctttgtctgagggc

SEQ ID NO: 5644739 - DNA, 25 bp, Homo sapien
acacacctccatccgctctttgtgg

SEQ ID NO: 5644740 - DNA, 25 bp, Homo sapien
gactcttgcattgctttttgtccct

SEQ ID NO: 5644741 - DNA, 25 bp, Homo sapien
tggaggaatcatcgctttacacaca

SEQ ID NO: 5644742 - DNA, 25 bp, Homo sapien
tacataaggtactttgtagagcaga

SEQ ID NO: 5644743 - DNA, 25 bp, Homo sapien
ggtagagacatgaatagggtcaaag

SEQ ID NO: 5644744 - DNA, 25 bp, Homo sapien
agtagtactttatatagtcctacag

SEQ ID NO: 5644745 - DNA, 25 bp, Homo sapien
gtgttctctcctgggccagcggccg

SEQ ID NO: 5644746 - DNA, 25 bp, Homo sapien
ttctgcatcttgttcaggtgacgct

SEQ ID NO: 5644747 - DNA, 25 bp, Homo sapien
gttcccatttcccagtctgaatgtt

SEQ ID NO: 5644748 - DNA, 25 bp, Homo sapien
cccctggcagcggctgctgcttggc

SEQ ID NO: 5644749 - DNA, 25 bp, Homo sapien
tttcacatcattttgcgagggtctc

SEQ ID NO: 5644750 - DNA, 25 bp, Homo sapien
tcgtcaatgaccatgttttcatcca

SEQ ID NO: 5644751 - DNA, 25 bp, Homo sapien
tcttcctcgaggcctccaactctct

SEQ ID NO: 5644752 - DNA, 25 bp, Homo sapien
aaggtcattccctgagtcagacatg

SEQ ID NO: 5644753 - DNA, 25 bp, Homo sapien
actactttcctttcacacaaacaaa

SEQ ID NO: 5644754 - DNA, 25 bp, Homo sapien
tcagatttaaaataaaaagaaagaa

SEQ ID NO: 5644755 - DNA, 25 bp, Homo sapien
ctccagagccatccgacggcggtca

SEQ ID NO: 5644756 - DNA, 25 bp, Homo sapien
tcttttgtttcaaagcagctcttgg

SEQ ID NO: 5644757 - DNA, 25 bp, Homo sapien
tcaacatcattggttggcagaggag

SEQ ID NO: 5644758 - DNA, 25 bp, Homo sapien
ctttgttctcagcacggacataacg

SEQ ID NO: 5644759 - DNA, 25 bp, Homo sapien
aaatacaccacaggttaccagaacc

SEQ ID NO: 5644760 - DNA, 25 bp, Homo sapien
gtagtcatctcctttgaaggtgtca

SEQ ID NO: 5644761 - DNA, 25 bp, Homo sapien
gccgtggaaacactggacttcaaga

SEQ ID NO: 5644762 - DNA, 25 bp, Homo sapien
gtagttctccagagccatccgacgg

SEQ ID NO: 5644763 - DNA, 25 bp, Homo sapien
attcggttgcggtgccgaatctcca

SEQ ID NO: 5644764 - DNA, 25 bp, Homo sapien
accacaggttaccagaaccttcaga

SEQ ID NO: 5644765 - DNA, 25 bp, Homo sapien
tcgaggcctccaactctctcggcat

SEQ ID NO: 5644766 - DNA, 25 bp, Homo sapien
ggaggttcttagcttgaagctctgc

SEQ ID NO: 5644767 - DNA, 25 bp, Homo sapien
aagcagtgagcatcgacatcaactg

SEQ ID NO: 5644768 - DNA, 25 bp, Homo sapien
ggactactttcctttcacacaaaca

SEQ ID NO: 5644769 - DNA, 25 bp, Homo sapien
ccatcctgctctcccactccagatc

SEQ ID NO: 5644770 - DNA, 25 bp, Homo sapien
ctgcctcttcctcagcatcaccagg

SEQ ID NO: 5644771 - DNA, 25 bp, Homo sapien
tgatgacgatgaccgtggcaatggc

SEQ ID NO: 5644772 - DNA, 25 bp, Homo sapien
tggatcaggttcccatttcccagtc

SEQ ID NO: 5644773 - DNA, 25 bp, Homo sapien
gctttggttcctcctttcttcaatc

SEQ ID NO: 5644774 - DNA, 25 bp, Homo sapien
ttctcaggtagggctgggaaggggt

SEQ ID NO: 5644775 - DNA, 25 bp, Homo sapien
cgttctcaggtagggctgggaaggg

SEQ ID NO: 5644776 - DNA, 25 bp, Homo sapien
aatgcgatgaggccgtggcgggtca

SEQ ID NO: 5644777 - DNA, 25 bp, Homo sapien
agcgcacgcactttcccttggagag

SEQ ID NO: 5644778 - DNA, 25 bp, Homo sapien
agcctgcccgtggctgcggcggccg

SEQ ID NO: 5644779 - DNA, 25 bp, Homo sapien
tctgggccgccttttctgggtcaac

SEQ ID NO: 5644780 - DNA, 25 bp, Homo sapien
gctgccgggttcagtaggattctcc

SEQ ID NO: 5644781 - DNA, 25 bp, Homo sapien
ggacttcaagaaactggtcctttca

SEQ ID NO: 5644782 - DNA, 25 bp, Homo sapien
agactcaaaattgttcctgttgccg

SEQ ID NO: 5644783 - DNA, 25 bp, Homo sapien
tcccgtggctgatggtgccatactg

SEQ ID NO: 5644784 - DNA, 25 bp, Homo sapien
gtgaatgaggctgaagagttgactt

SEQ ID NO: 5644785 - DNA, 25 bp, Homo sapien
tttcttcaatcacgtggagatgtgt

SEQ ID NO: 5644786 - DNA, 25 bp, Homo sapien
gcctcttcctcagcatcaccaggct

SEQ ID NO: 5644787 - DNA, 25 bp, Homo sapien
gccgccatccctcgccgggtcgctc

SEQ ID NO: 5644788 - DNA, 25 bp, Homo sapien
ccagcaggccaatgagagcactgct

SEQ ID NO: 5644789 - DNA, 25 bp, Homo sapien
catctgggccgccttttctgggtca

SEQ ID NO: 5644790 - DNA, 25 bp, Homo sapien
tttgaaggtgtcatagtagtaatct

SEQ ID NO: 5644791 - DNA, 25 bp, Homo sapien
gggccccgtcatcgcctcctgggag

SEQ ID NO: 5644792 - DNA, 25 bp, Homo sapien
gagcagagagaggctttggttcctc

SEQ ID NO: 5644793 - DNA, 25 bp, Homo sapien
attcagcatagcttccactcgggcc

SEQ ID NO: 5644794 - DNA, 25 bp, Homo sapien
aaaaaagaaaactacatcaaatatc

SEQ ID NO: 5644795 - DNA, 25 bp, Homo sapien
ggccgccttttctgggtcaacagcc

SEQ ID NO: 5644796 - DNA, 25 bp, Homo sapien
ttgtaggtgaagtttaatctgtgca

SEQ ID NO: 5644797 - DNA, 25 bp, Homo sapien
ctccccgtgttctctcctgggccag

SEQ ID NO: 5644798 - DNA, 25 bp, Homo sapien
ccagctgctgcttctcactggctgc

SEQ ID NO: 5644799 - DNA, 25 bp, Homo sapien
atcatgagtaatttccttgtctgac

SEQ ID NO: 5644800 - DNA, 25 bp, Homo sapien
agcgatctttgttctcagcacggac

SEQ ID NO: 5644801 - DNA, 25 bp, Homo sapien
gcggtgccgaatctccagctgctcc

SEQ ID NO: 5644802 - DNA, 25 bp, Homo sapien
accgtgtgccagtgctggtgattct

SEQ ID NO: 5644803 - DNA, 25 bp, Homo sapien
agaatgcgatgaggccgtggcgggt

SEQ ID NO: 5644804 - DNA, 25 bp, Homo sapien
tttgacatcatgagtaatttccttg

SEQ ID NO: 5644805 - DNA, 25 bp, Homo sapien
tgcattgctttttgtccctccggca

SEQ ID NO: 5644806 - DNA, 25 bp, Homo sapien
acatgcctctttgactaccgtgtgc

SEQ ID NO: 5644807 - DNA, 25 bp, Homo sapien
tagtactttatatagtcctacagtc

SEQ ID NO: 5644808 - DNA, 25 bp, Homo sapien
agtaggaaattcacttttataaaca

SEQ ID NO: 5644809 - DNA, 25 bp, Homo sapien
gcttggcagtcgatcggaatcgtgg

SEQ ID NO: 5644810 - DNA, 25 bp, Homo sapien
acaggagggggtggaggtgagggga

SEQ ID NO: 5644811 - DNA, 25 bp, Homo sapien
tcatcgctttacacacagccataca

SEQ ID NO: 5644812 - DNA, 25 bp, Homo sapien
taaggagtttgtaggtgaagtttaa

SEQ ID NO: 5644813 - DNA, 25 bp, Homo sapien
tctggaagcgagcatgctcattatc

SEQ ID NO: 5644814 - DNA, 25 bp, Homo sapien
gcagagagaggctttggttcctcct

SEQ ID NO: 5644815 - DNA, 25 bp, Homo sapien
agtctcgtcaatgaccatgttttca

SEQ ID NO: 5644816 - DNA, 25 bp, Homo sapien
tcatagtagtaatctcggtcctcca

SEQ ID NO: 5644817 - DNA, 25 bp, Homo sapien
cttggtgcctgttggatcaggttcc

SEQ ID NO: 5644818 - DNA, 25 bp, Homo sapien
aaggtgtcatagtagtaatctcggt

SEQ ID NO: 5644819 - DNA, 25 bp, Homo sapien
agcaaatcctgttccggcattggct

SEQ ID NO: 5644820 - DNA, 25 bp, Homo sapien
acctaaatctgcatctgctccaggt

SEQ ID NO: 5644821 - DNA, 25 bp, Homo sapien
tcacttttataaacatcatagtctt

SEQ ID NO: 5644822 - DNA, 25 bp, Homo sapien
atataaagcgcacgcactttccctt

SEQ ID NO: 5644823 - DNA, 25 bp, Homo sapien
tcacatgcatatttaacttcccaca

SEQ ID NO: 5644824 - DNA, 25 bp, Homo sapien
tcactggctgcttccttctctaaag

SEQ ID NO: 5644825 - DNA, 25 bp, Homo sapien
aagctacaggctaatctctgtggaa

SEQ ID NO: 5644826 - DNA, 25 bp, Homo sapien
tgaagctctgcctcttcccattcct

SEQ ID NO: 5644827 - DNA, 25 bp, Homo sapien
tggctgcggcggccgcggtcccggt

SEQ ID NO: 5644828 - DNA, 25 bp, Homo sapien
cggcattggctgcaagagcctcgat

SEQ ID NO: 5644829 - DNA, 25 bp, Homo sapien
actacatcaaatatctgcaatagat

SEQ ID NO: 5644830 - DNA, 25 bp, Homo sapien
tgaggctcagcaacagcaaatcctg

SEQ ID NO: 5644831 - DNA, 25 bp, Homo sapien
ctcttcctcttcttttgacacagat

SEQ ID NO: 5644832 - DNA, 25 bp, Homo sapien
cactctcctcagagctcacccggac

SEQ ID NO: 5644833 - DNA, 25 bp, Homo sapien
tgccgtagctatataaggtcattcc

SEQ ID NO: 5644834 - DNA, 25 bp, Homo sapien
tagcttccactcgggccaggtgggt

SEQ ID NO: 5644835 - DNA, 25 bp, Homo sapien
aggcatcacggcccggcagggcccc

SEQ ID NO: 5644836 - DNA, 25 bp, Homo sapien
gctcttctggggtgagcattggatc

SEQ ID NO: 5644837 - DNA, 25 bp, Homo sapien
gttgccgccgcagccaccatatata

SEQ ID NO: 5644838 - DNA, 25 bp, Homo sapien
aaaaatacaccacaggttaccagaa

SEQ ID NO: 5644839 - DNA, 25 bp, Homo sapien
acagtgtccacagactcagtttcag

SEQ ID NO: 5644840 - DNA, 25 bp, Homo sapien
ggaactggtctaccccacatgggag

SEQ ID NO: 5644841 - DNA, 25 bp, Homo sapien
ccatttattatatattgagagcatg

SEQ ID NO: 5644842 - DNA, 25 bp, Homo sapien
gggtggaggtgaggggacaaagtag

SEQ ID NO: 5644843 - DNA, 25 bp, Homo sapien
tttaccctgtccattcggttgcggt

SEQ ID NO: 5644844 - DNA, 25 bp, Homo sapien
ggccgtggcgggtcagactgcaagg

SEQ ID NO: 5644845 - DNA, 25 bp, Homo sapien
cctccatcacatttgtgatctgtag

SEQ ID NO: 5644846 - DNA, 25 bp, Homo sapien
tcagcatagcttccactcgggccag

SEQ ID NO: 5644847 - DNA, 25 bp, Homo sapien
ttattgaaaatcgacatttcccatt

SEQ ID NO: 5644848 - DNA, 25 bp, Homo sapien
tattattgaaaatcgacatttccca

SEQ ID NO: 5644849 - DNA, 25 bp, Homo sapien
tcttcaatcacgtggagatgtgtca

SEQ ID NO: 5644850 - DNA, 25 bp, Homo sapien
gcagcggacaccctcatctgtatac

SEQ ID NO: 5644851 - DNA, 25 bp, Homo sapien
tgacaggacttttatggagacacac

SEQ ID NO: 5644852 - DNA, 25 bp, Homo sapien
gaggccgtggcgggtcagactgcaa

SEQ ID NO: 5644853 - DNA, 25 bp, Homo sapien
gttctcagcacggacataacgccgt

SEQ ID NO: 5644854 - DNA, 25 bp, Homo sapien
ttggatcaacctccacgatcccgtg

SEQ ID NO: 5644855 - DNA, 25 bp, Homo sapien
caaggcaggcgccgtgagccccacc

SEQ ID NO: 5644856 - DNA, 25 bp, Homo sapien
gggtctctcacgtgcttcagtggcc

SEQ ID NO: 5644857 - DNA, 25 bp, Homo sapien
gtgcctgttggatcaggttcccatt

SEQ ID NO: 5644858 - DNA, 25 bp, Homo sapien
gatacatctcctgacagtactgaag

SEQ ID NO: 5644859 - DNA, 25 bp, Homo sapien
cacagactcagtttcagggacagcc

SEQ ID NO: 5644860 - DNA, 25 bp, Homo sapien
tttaacgtccttggtgacaggactt

SEQ ID NO: 5644861 - DNA, 25 bp, Homo sapien
ataaacatcatagtcttcctcttca

SEQ ID NO: 5644862 - DNA, 25 bp, Homo sapien
tatctgcacgctgctcctgaaggag

SEQ ID NO: 5644863 - DNA, 25 bp, Homo sapien
tcacatttgtgatctgtagctctgg

SEQ ID NO: 5644864 - DNA, 25 bp, Homo sapien
atggccactgcgatgaccagcaggc

SEQ ID NO: 5644865 - DNA, 25 bp, Homo sapien
catccacagctgcttctgtgaagtc

SEQ ID NO: 5644866 - DNA, 25 bp, Homo sapien
tctgtagctctggatacatctcctg

SEQ ID NO: 5644867 - DNA, 25 bp, Homo sapien
ctgtgcatagtgggtagagacatga

SEQ ID NO: 5644868 - DNA, 25 bp, Homo sapien
taccctgtccattcggttgcggtgc

SEQ ID NO: 5644869 - DNA, 25 bp, Homo sapien
ccattcggttgcggtgccgaatctc

SEQ ID NO: 5644870 - DNA, 25 bp, Homo sapien
cgtgagccccaccagcagcagaagc

SEQ ID NO: 5644871 - DNA, 25 bp, Homo sapien
gcctgttggatcaggttcccatttc

SEQ ID NO: 5644872 - DNA, 25 bp, Homo sapien
gaaaaagcagaagcagtgagcatcg

SEQ ID NO: 5644873 - DNA, 25 bp, Homo sapien
ccatggttctgcatcttgttcaggt

SEQ ID NO: 5644874 - DNA, 25 bp, Homo sapien
gggacaaagtagaggccgagggtca

SEQ ID NO: 5644875 - DNA, 25 bp, Homo sapien
gccgtcgctgccgggttcagtagga

SEQ ID NO: 5644876 - DNA, 25 bp, Homo sapien
catctgcagaggtctcgaaatacac

SEQ ID NO: 5644877 - DNA, 25 bp, Homo sapien
aggccgagggtcagtgcctttggag

SEQ ID NO: 5644878 - DNA, 25 bp, Homo sapien
atgaccagcaggccaatgagagcac

SEQ ID NO: 5644879 - DNA, 25 bp, Homo sapien
agctcacccggacgtccacaggggt

SEQ ID NO: 5644880 - DNA, 25 bp, Homo sapien
tctcggtcctccaccacttcctccc

SEQ ID NO: 5644881 - DNA, 25 bp, Homo sapien
ccactgcgatgaccagcaggccaat

SEQ ID NO: 5644882 - DNA, 25 bp, Homo sapien
tctctgagattgaggcagtgaactg

SEQ ID NO: 5644883 - DNA, 25 bp, Homo sapien
agcgcgcggctctcaagctcacaca

SEQ ID NO: 5644884 - DNA, 25 bp, Homo sapien
tctgagtgaatgtcacaaggccggt

SEQ ID NO: 5644885 - DNA, 25 bp, Homo sapien
gaaatacacatcaacatcattggtt

SEQ ID NO: 5644886 - DNA, 25 bp, Homo sapien
tagccggccagcgccaaggcaggcg

SEQ ID NO: 5644887 - DNA, 25 bp, Homo sapien
gcagcagaagcaggagcctgcccgt

SEQ ID NO: 5644888 - DNA, 25 bp, Homo sapien
atgaggctgaagagttgacttacac

SEQ ID NO: 5644889 - DNA, 25 bp, Homo sapien
aaagctttccacagtgtccacagac

SEQ ID NO: 5644890 - DNA, 25 bp, Homo sapien
ccggcagggccccgtcatcgcctcc

SEQ ID NO: 5644891 - DNA, 25 bp, Homo sapien
tgtagctctggatacatctcctgac

SEQ ID NO: 5644892 - DNA, 25 bp, Homo sapien
aatcatcgctttacacacagccata

SEQ ID NO: 5644893 - DNA, 25 bp, Homo sapien
gaatgaggctgaagagttgacttac

SEQ ID NO: 5644894 - DNA, 25 bp, Homo sapien
gaccgtggcaatggccactgcgatg

SEQ ID NO: 5644895 - DNA, 25 bp, Homo sapien
tcagtaggaaattcacttttataaa

SEQ ID NO: 5644896 - DNA, 25 bp, Homo sapien
cccgctggtttgcctccatcacatt

SEQ ID NO: 5644897 - DNA, 25 bp, Homo sapien
tggccgccatccctcgccgggtcgc

SEQ ID NO: 5644898 - DNA, 25 bp, Homo sapien
ctacagtagtactttatatagtcct

SEQ ID NO: 5644899 - DNA, 25 bp, Homo sapien
gagatgtgtcatcacctgggatttc

SEQ ID NO: 5644900 - DNA, 25 bp, Homo sapien
caatgaccatgttttcatccacttt

SEQ ID NO: 5644901 - DNA, 25 bp, Homo sapien
atatttaacttcccacaaaacattg

SEQ ID NO: 5644902 - DNA, 25 bp, Homo sapien
tagttggaaggggaagtgaacggta

SEQ ID NO: 5644903 - DNA, 25 bp, Homo sapien
agtaccaacgaggcatcacggcccg

SEQ ID NO: 5644904 - DNA, 25 bp, Homo sapien
tgtacattctccacagatcatatta

SEQ ID NO: 5644905 - DNA, 25 bp, Homo sapien
tctgcagaggtctcgaaatacacat

SEQ ID NO: 5644906 - DNA, 25 bp, Homo sapien
tcatagccatggttctgcatcttgt

SEQ ID NO: 5644907 - DNA, 25 bp, Homo sapien
ccacggattcccgctcttcctcgag

SEQ ID NO: 5644908 - DNA, 25 bp, Homo sapien
aggggtggaacggtgggatctcctc

SEQ ID NO: 5644909 - DNA, 25 bp, Homo sapien
taatttccttgtctgacatggtgcc

SEQ ID NO: 5644910 - DNA, 25 bp, Homo sapien
ggtcaacagccaacacatgctggta

SEQ ID NO: 5644911 - DNA, 25 bp, Homo sapien
cctcatcatcctcatccacagctgc

SEQ ID NO: 5644912 - DNA, 25 bp, Homo sapien
cattgaaaatcatttccttaacatc

SEQ ID NO: 5644913 - DNA, 25 bp, Homo sapien
tcacttacaaattcacccacgagac

SEQ ID NO: 5644914 - DNA, 25 bp, Homo sapien
gacagcctggactactttcctttca

SEQ ID NO: 5644915 - DNA, 25 bp, Homo sapien
cctttgaaggtgtcatagtagtaat

SEQ ID NO: 5644916 - DNA, 25 bp, Homo sapien
ccgtagctatataaggtcattccct

SEQ ID NO: 5644917 - DNA, 25 bp, Homo sapien
gggctacataaggtactttgtagag

SEQ ID NO: 5644918 - DNA, 25 bp, Homo sapien
tgcggcggccgcggtcccggtggcc

SEQ ID NO: 5644919 - DNA, 25 bp, Homo sapien
gcggccgcggtcccggtggccgcca

SEQ ID NO: 5644920 - DNA, 25 bp, Homo sapien
ccccacatgggagcagcatgccgta

SEQ ID NO: 5644921 - DNA, 25 bp, Homo sapien
tcctcttcctcttcttttgacacag

SEQ ID NO: 5644922 - DNA, 25 bp, Homo sapien
ggcattgaaaatcatttccttaaca

SEQ ID NO: 5644923 - DNA, 25 bp, Homo sapien
tcctcagcatcaccaggctgatgac

SEQ ID NO: 5644924 - DNA, 25 bp, Homo sapien
tccagatctgcttcagtaggaaatt

SEQ ID NO: 5644925 - DNA, 25 bp, Homo sapien
gctacaggctaatctctgtggaagc

SEQ ID NO: 5644926 - DNA, 25 bp, Homo sapien
acatgctggtaatgacggatggtat

SEQ ID NO: 5644927 - DNA, 25 bp, Homo sapien
atcttgttcaggtgacgctcttctg

SEQ ID NO: 5644928 - DNA, 25 bp, Homo sapien
gtggaacggtgggatctcctcactc

SEQ ID NO: 5644929 - DNA, 25 bp, Homo sapien
gctctctagaagacgctggaataaa

SEQ ID NO: 5644930 - DNA, 25 bp, Homo sapien
tcctgggccagcggccgcctccttg

SEQ ID NO: 5644931 - DNA, 25 bp, Homo sapien
ttaaaaaagaaaactacatcaaata

SEQ ID NO: 5644932 - DNA, 25 bp, Homo sapien
tggtaatgacggatggtatgtaagc

SEQ ID NO: 5644933 - DNA, 25 bp, Homo sapien
ttgtctgacatggtgccgtcgctgc

SEQ ID NO: 5644934 - DNA, 25 bp, Homo sapien
cctgggagcagacagctttgacatc

SEQ ID NO: 5644935 - DNA, 25 bp, Homo sapien
gctacggtaggtaaacaacagacag

SEQ ID NO: 5644936 - DNA, 25 bp, Homo sapien
agtttaatctgtgcatagtgggtag

SEQ ID NO: 5644937 - DNA, 25 bp, Homo sapien
atttaacttcccacaaaacattgcg

SEQ ID NO: 5644938 - DNA, 25 bp, Homo sapien
aagctctgcctcttcccattccttc

SEQ ID NO: 5644939 - DNA, 25 bp, Homo sapien
agcggacaccctcatctgtatacac

SEQ ID NO: 5644940 - DNA, 25 bp, Homo sapien
acagcaaatcctgttccggcattgg

SEQ ID NO: 5644941 - DNA, 25 bp, Homo sapien
aggctgatgacgatgaccgtggcaa

SEQ ID NO: 5644942 - DNA, 25 bp, Homo sapien
cggccagcgccaaggcaggcgccgt

SEQ ID NO: 5644943 - DNA, 25 bp, Homo sapien
cgctggtttgcctccatcacatttg

SEQ ID NO: 5644944 - DNA, 25 bp, Homo sapien
ctgttccggcattggctgcaagagc

SEQ ID NO: 5644945 - DNA, 25 bp, Homo sapien
taacgtccttggtgacaggactttt

SEQ ID NO: 5644946 - DNA, 25 bp, Homo sapien
ctgcatctgctccaggtatttgtag

SEQ ID NO: 5644947 - DNA, 25 bp, Homo sapien
ttctcttcggcaccgatcagtcccc

SEQ ID NO: 5644948 - DNA, 25 bp, Homo sapien
ttgtttcaaagcagctcttggtgcc

SEQ ID NO: 5644949 - DNA, 25 bp, Homo sapien
atcggaatcgtgggatcttccggcc

SEQ ID NO: 5644950 - DNA, 25 bp, Homo sapien
ggaagtgctgaatcagagtctgcct

SEQ ID NO: 5644951 - DNA, 25 bp, Homo sapien
tctctgagtgaatgtcacaaggccg

SEQ ID NO: 5644952 - DNA, 25 bp, Homo sapien
tcatcctcatcatcctcatccacag

SEQ ID NO: 5644953 - DNA, 25 bp, Homo sapien
gcgagggtctctcacgtgcttcagt

SEQ ID NO: 5644954 - DNA, 25 bp, Homo sapien
agccccaccagcagcagaagcagga

SEQ ID NO: 5644955 - DNA, 25 bp, Homo sapien
cgtcgctgccgggttcagtaggatt

SEQ ID NO: 5644956 - DNA, 25 bp, Homo sapien
cttccggcccacctgcatccctccg

SEQ ID NO: 5644957 - DNA, 25 bp, Homo sapien
cagcagcagaagcaggagcctgccc

SEQ ID NO: 5644958 - DNA, 25 bp, Homo sapien
acatgggagcagcatgccgtagcta

SEQ ID NO: 5644959 - DNA, 25 bp, Homo sapien
agcagaagcaggagcctgcccgtgg

SEQ ID NO: 5644960 - DNA, 25 bp, Homo sapien
cctttcacatcattttgcgagggtc

SEQ ID NO: 5644961 - DNA, 25 bp, Homo sapien
gtggaggtgaggggacaaagtagag

SEQ ID NO: 5644962 - DNA, 25 bp, Homo sapien
actttgtagagcagagagaggcttt

SEQ ID NO: 5644963 - DNA, 25 bp, Homo sapien
cacatcaacatcattggttggcaga

SEQ ID NO: 5644964 - DNA, 25 bp, Homo sapien
gcagtgaactggtccatatctgcac

SEQ ID NO: 5644965 - DNA, 25 bp, Homo sapien
gacagtactgaagaacttcttcttt

SEQ ID NO: 5644966 - DNA, 25 bp, Homo sapien
tccttctctaaagctttaaccatgg

SEQ ID NO: 5644967 - DNA, 25 bp, Homo sapien
tttattcttactgttaatcactttc

SEQ ID NO: 5644968 - DNA, 25 bp, Homo sapien
gaagtttaatctgtgcatagtgggt

SEQ ID NO: 5644969 - DNA, 25 bp, Homo sapien
cagtttcagggacagcctggactac

SEQ ID NO: 5644970 - DNA, 25 bp, Homo sapien
atcctgctctcccactccagatcct

SEQ ID NO: 5644971 - DNA, 25 bp, Homo sapien
atcacctgggatttcatctgggccg

SEQ ID NO: 5644972 - DNA, 25 bp, Homo sapien
gccttctggaagcgagcatgctcat

SEQ ID NO: 5644973 - DNA, 25 bp, Homo sapien
gaggaatcatcgctttacacacagc

SEQ ID NO: 5644974 - DNA, 25 bp, Homo sapien
gccgtgagccccaccagcagcagaa

SEQ ID NO: 5644975 - DNA, 25 bp, Homo sapien
tataagtctattattgaaaatcgac

SEQ ID NO: 5644976 - DNA, 25 bp, Homo sapien
atttgtgatctgtagctctggatac

SEQ ID NO: 5644977 - DNA, 25 bp, Homo sapien
tgattctcacacacctccatccgct

SEQ ID NO: 5644978 - DNA, 25 bp, Homo sapien
atgaccatgttttcatccactttat

SEQ ID NO: 5644979 - DNA, 25 bp, Homo sapien
gttaaagtatttattgatgtgttta

SEQ ID NO: 5644980 - DNA, 25 bp, Homo sapien
ctgttaatcactttctcttcggcac

SEQ ID NO: 5644981 - DNA, 25 bp, Homo sapien
tatggagacacacaggtatccagcc

SEQ ID NO: 5644982 - DNA, 25 bp, Homo sapien
aatcctgttccggcattggctgcaa

SEQ ID NO: 5644983 - DNA, 25 bp, Homo sapien
ggtctcgaaatacacatcaacatca

SEQ ID NO: 5644984 - DNA, 25 bp, Homo sapien
acacaattgttcaaagctttccaca

SEQ ID NO: 5644985 - DNA, 25 bp, Homo sapien
cagcaacttcctgaaagctcattta

SEQ ID NO: 5644986 - DNA, 25 bp, Homo sapien
agtcatctcctttgaaggtgtcata

SEQ ID NO: 5644987 - DNA, 25 bp, Homo sapien
agagcactgctactcagactgaagt

SEQ ID NO: 5644988 - DNA, 25 bp, Homo sapien
aagcattacaaagactcctgtgacg

SEQ ID NO: 5644989 - DNA, 25 bp, Homo sapien
tgcctttaacgtccttggtgacagg

SEQ ID NO: 5644990 - DNA, 25 bp, Homo sapien
gcgatttgaggctcagcaacagcaa

SEQ ID NO: 5644991 - DNA, 25 bp, Homo sapien
tcagactcaaaattgttcctgttgc

SEQ ID NO: 5644992 - DNA, 25 bp, Homo sapien
acaagcattacaaagactcctgtga

SEQ ID NO: 5644993 - DNA, 25 bp, Homo sapien
ctgaaggagctcatcaatttcctct

SEQ ID NO: 5644994 - DNA, 25 bp, Homo sapien
cagatccaataatctttgtctgagg

SEQ ID NO: 5644995 - DNA, 25 bp, Homo sapien
ctggtctaccccacatgggagcagc

SEQ ID NO: 5644996 - DNA, 25 bp, Homo sapien
aggcaggcgccgtgagccccaccag

SEQ ID NO: 5644997 - DNA, 25 bp, Homo sapien
agccatacaataatcctcagactca

SEQ ID NO: 5644998 - DNA, 25 bp, Homo sapien
cagactcagtttcagggacagcctg

SEQ ID NO: 5644999 - DNA, 25 bp, Homo sapien
ctggactactttcctttcacacaaa

SEQ ID NO: 5645000 - DNA, 25 bp, Homo sapien
aaagccaggacagtgaatgaggctg

SEQ ID NO: 5645001 - DNA, 25 bp, Homo sapien
cattttgcgagggtctctcacgtgc

SEQ ID NO: 5645002 - DNA, 25 bp, Homo sapien
tttctggaactagcaggacatcact

SEQ ID NO: 5645003 - DNA, 25 bp, Homo sapien
gtgccatactgcctcttcctcagca

SEQ ID NO: 5645004 - DNA, 25 bp, Homo sapien
cactggattccgaaggaaagcagca

SEQ ID NO: 5645005 - DNA, 25 bp, Homo sapien
tgagcatcgacatcaactgtacaag

SEQ ID NO: 5645006 - DNA, 25 bp, Homo sapien
gcccacggattcccgctcttcctcg

SEQ ID NO: 5645007 - DNA, 25 bp, Homo sapien
ccgtcatcgcctcctgggagcagac

SEQ ID NO: 5645008 - DNA, 25 bp, Homo sapien
atatctgcaatagatcatttttttc

SEQ ID NO: 5645009 - DNA, 25 bp, Homo sapien
ctgttggatcaggttcccatttccc

SEQ ID NO: 5645010 - DNA, 25 bp, Homo sapien
tcagagctcacccggacgtccacag

SEQ ID NO: 5645011 - DNA, 25 bp, Homo sapien
atgcctctttgactaccgtgtgcca

SEQ ID NO: 5645012 - DNA, 25 bp, Homo sapien
agtaatttccttgtctgacatggtg

SEQ ID NO: 5645013 - DNA, 25 bp, Homo sapien
aacattgcgatttgaggctcagcaa

SEQ ID NO: 5645014 - DNA, 25 bp, Homo sapien
tccaactctctcggcattgaaaatc

SEQ ID NO: 5645015 - DNA, 25 bp, Homo sapien
cgcgcggctctcaagctcacacact

SEQ ID NO: 5645016 - DNA, 25 bp, Homo sapien
ttcagggacagcctggactactttc

SEQ ID NO: 5645017 - DNA, 25 bp, Homo sapien
cattgtagtcatctcctttgaaggt

SEQ ID NO: 5645018 - DNA, 25 bp, Homo sapien
gcatcacggcccggcagggccccgt

SEQ ID NO: 5645019 - DNA, 25 bp, Homo sapien
cggctgctgcttggcagtcgatcgg

SEQ ID NO: 5645020 - DNA, 25 bp, Homo sapien
tctttaccctgtccattcggttgcg

SEQ ID NO: 5645021 - DNA, 25 bp, Homo sapien
cttacacaacataaccggaacgaca

SEQ ID NO: 5645022 - DNA, 25 bp, Homo sapien
cctctctgctttggggaggttctta

SEQ ID NO: 5645023 - DNA, 25 bp, Homo sapien
gcagaagcagtgagcatcgacatca

SEQ ID NO: 5645024 - DNA, 25 bp, Homo sapien
ccagtgctggtgattctcacacacc

SEQ ID NO: 5645025 - DNA, 25 bp, Homo sapien
gcgactcttgcattgctttttgtcc

SEQ ID NO: 5645026 - DNA, 25 bp, Homo sapien
ctgctccttagccttctggaagcga

SEQ ID NO: 5645027 - DNA, 25 bp, Homo sapien
tgcctctctgctttggggaggttct

SEQ ID NO: 5645028 - DNA, 25 bp, Homo sapien
ttgtagtcatctcctttgaaggtgt

SEQ ID NO: 5645029 - DNA, 25 bp, Homo sapien
tccctccggcaccagttgtcaatac

SEQ ID NO: 5645030 - DNA, 25 bp, Homo sapien
ggtatgtaagcgatctttgttctca

SEQ ID NO: 5645031 - DNA, 25 bp, Homo sapien
tgcatataagtctattattgaaaat

SEQ ID NO: 5645032 - DNA, 25 bp, Homo sapien
ccgtgttctctcctgggccagcggc

SEQ ID NO: 5645033 - DNA, 25 bp, Homo sapien
attggttggcagaggagttggagga

SEQ ID NO: 5645034 - DNA, 25 bp, Homo sapien
atgtgtcagacaatacaatggaagt

SEQ ID NO: 5645035 - DNA, 25 bp, Homo sapien
ctggattccgaaggaaagcagcagc

SEQ ID NO: 5645036 - DNA, 25 bp, Homo sapien
cacacaaacaaacctccccgtgttc

SEQ ID NO: 5645037 - DNA, 25 bp, Homo sapien
tgctttggggaggttcttagcttga

SEQ ID NO: 5645038 - DNA, 25 bp, Homo sapien
tatatagtcctacagtccaggaggt

SEQ ID NO: 5645039 - DNA, 25 bp, Homo sapien
tggagaggtcgaagtaccaacgagg

SEQ ID NO: 5645040 - DNA, 25 bp, Homo sapien
gtgtaacaaagcgactcttgcattg

SEQ ID NO: 5645041 - DNA, 25 bp, Homo sapien
ctcagactgaagtcctcccgcagtg

SEQ ID NO: 5645042 - DNA, 25 bp, Homo sapien
gccgcagccaccatatataaagcgc

SEQ ID NO: 5645043 - DNA, 25 bp, Homo sapien
tctgcttcagtaggaaattcacttt

SEQ ID NO: 5645044 - DNA, 25 bp, Homo sapien
cagtcgatcggaatcgtgggatctt

SEQ ID NO: 5645045 - DNA, 25 bp, Homo sapien
tactttcctttcacacaaacaaacc

SEQ ID NO: 5645046 - DNA, 25 bp, Homo sapien
gggtcgctctagcgcgcggctctca

SEQ ID NO: 5645047 - DNA, 25 bp, Homo sapien
agccaggacagtgaatgaggctgaa

SEQ ID NO: 5645048 - DNA, 25 bp, Homo sapien
tttctttaaataaaagccaggacag

SEQ ID NO: 5645049 - DNA, 25 bp, Homo sapien
cggaatcgtgggatcttccggccca

SEQ ID NO: 5645050 - DNA, 25 bp, Homo sapien
catcaaatatctgcaatagatcatt

SEQ ID NO: 5645051 - DNA, 25 bp, Homo sapien
actggtcctttcacatcattttgcg

SEQ ID NO: 5645052 - DNA, 25 bp, Homo sapien
gccaggtgggtctccaccagctgct

SEQ ID NO: 5645053 - DNA, 25 bp, Homo sapien
ctttggggaggttcttagcttgaag

SEQ ID NO: 5645054 - DNA, 25 bp, Homo sapien
cggacgtccacaggggtctctgaga

SEQ ID NO: 5645055 - DNA, 25 bp, Homo sapien
aatcgacatttcccatttattatat

SEQ ID NO: 5645056 - DNA, 25 bp, Homo sapien
ttcttactgttaatcactttctctt

SEQ ID NO: 5645057 - DNA, 25 bp, Homo sapien
agtcctcccgcagtgggcccacgga

SEQ ID NO: 5645058 - DNA, 25 bp, Homo sapien
gaagcgagcatgctcattatcatct

SEQ ID NO: 5645059 - DNA, 25 bp, Homo sapien
ctttacacacagccatacaataatc

SEQ ID NO: 5645060 - DNA, 25 bp, Homo sapien
tgacggatggtatgtaagcgatctt

SEQ ID NO: 5645061 - DNA, 25 bp, Homo sapien
ctaccgtgtgccagtgctggtgatt

SEQ ID NO: 5645062 - DNA, 25 bp, Homo sapien
aggtgaggggacaaagtagaggccg

SEQ ID NO: 5645063 - DNA, 25 bp, Homo sapien
aacagacagtgaagaatgtcaaata

SEQ ID NO: 5645064 - DNA, 25 bp, Homo sapien
tgacgctcttctggggtgagcattg

SEQ ID NO: 5645065 - DNA, 25 bp, Homo sapien
taggaaattcacttttataaacatc

SEQ ID NO: 5645066 - DNA, 25 bp, Homo sapien
cactccagatccttcgttctcaggt

SEQ ID NO: 5645067 - DNA, 25 bp, Homo sapien
gagagcatgtgtcagacaatacaat

SEQ ID NO: 5645068 - DNA, 25 bp, Homo sapien
cctgcatataagtctattattgaaa

SEQ ID NO: 5645069 - DNA, 25 bp, Homo sapien
gggttcagtaggattctcctcattg

SEQ ID NO: 5645070 - DNA, 25 bp, Homo sapien
cttggagaggtcgaagtaccaacga

SEQ ID NO: 5645071 - DNA, 25 bp, Homo sapien
gacgatgaccgtggcaatggccact

SEQ ID NO: 5645072 - DNA, 25 bp, Homo sapien
attggctgcaagagcctcgatgtag

SEQ ID NO: 5645073 - DNA, 25 bp, Homo sapien
aatggaagtggggtttctgattaat

SEQ ID NO: 5645074 - DNA, 25 bp, Homo sapien
gtttaaactgtgtacattctccaca

SEQ ID NO: 5645075 - DNA, 25 bp, Homo sapien
ctctcccactccagatccttcgttc

SEQ ID NO: 5645076 - DNA, 25 bp, Homo sapien
cagctttgacatcatgagtaatttc

SEQ ID NO: 5645077 - DNA, 25 bp, Homo sapien
ccttgtctgacatggtgccgtcgct

SEQ ID NO: 5645078 - DNA, 25 bp, Homo sapien
ttcatctgggccgccttttctgggt

SEQ ID NO: 5645079 - DNA, 25 bp, Homo sapien
cactttcccttggagaggtcgaagt

SEQ ID NO: 5645080 - DNA, 25 bp, Homo sapien
agtggccattacagttccctattcc

SEQ ID NO: 5645081 - DNA, 25 bp, Homo sapien
gtccaggaggtcaggatgtcagacg

SEQ ID NO: 5645082 - DNA, 25 bp, Homo sapien
tccacaggggtctctgagattgagg

SEQ ID NO: 5645083 - DNA, 25 bp, Homo sapien
agccaggtagttctccagagccatc

SEQ ID NO: 5645084 - DNA, 25 bp, Homo sapien
tagagcagagagaggctttggttcc

SEQ ID NO: 5645085 - DNA, 25 bp, Homo sapien
ctatataaggtcattccctgagtca

SEQ ID NO: 5645086 - DNA, 25 bp, Homo sapien
atggttctgcatcttgttcaggtga

SEQ ID NO: 5645087 - DNA, 25 bp, Homo sapien
tggttggcagaggagttggaggaat

SEQ ID NO: 5645088 - DNA, 25 bp, Homo sapien
ggcagcacacatattcagtgccatg

SEQ ID NO: 5645089 - DNA, 25 bp, Homo sapien
gctcatcaatttcctcttgaatttc

SEQ ID NO: 5645090 - DNA, 25 bp, Homo sapien
tgccatggaactggtctaccccaca

SEQ ID NO: 5645091 - DNA, 25 bp, Homo sapien
taccccacatgggagcagcatgccg

SEQ ID NO: 5645092 - DNA, 25 bp, Homo sapien
caatacaatggaagtggggtttctg

SEQ ID NO: 5645093 - DNA, 25 bp, Homo sapien
cctttggagaaagtccagagaggag

SEQ ID NO: 5645094 - DNA, 25 bp, Homo sapien
tgtgtacattctccacagatcatat

SEQ ID NO: 5645095 - DNA, 25 bp, Homo sapien
cacgtggagatgtgtcatcacctgg

SEQ ID NO: 5645096 - DNA, 25 bp, Homo sapien
cttcttttgacacagatccaataat

SEQ ID NO: 5645097 - DNA, 25 bp, Homo sapien
gatctgtagctctggatacatctcc

SEQ ID NO: 5645098 - DNA, 25 bp, Homo sapien
cactaagctctctagaagacgctgg

SEQ ID NO: 5645099 - DNA, 25 bp, Homo sapien
ctctttgactaccgtgtgccagtgc

SEQ ID NO: 5645100 - DNA, 25 bp, Homo sapien
gaataaaatgcctttaacgtccttg

SEQ ID NO: 5645101 - DNA, 25 bp, Homo sapien
cgcagtgggcccacggattcccgct

SEQ ID NO: 5645102 - DNA, 25 bp, Homo sapien
ccggtggccgccatccctcgccggg

SEQ ID NO: 5645103 - DNA, 25 bp, Homo sapien
tcagacgcagcccctggcagcggct

SEQ ID NO: 5645104 - DNA, 25 bp, Homo sapien
ctcattatcatctgcagaggtctcg

SEQ ID NO: 5645105 - DNA, 25 bp, Homo sapien
cggtaggtaaacaacagacagtgaa

SEQ ID NO: 5645106 - DNA, 25 bp, Homo sapien
tgctgcttggcagtcgatcggaatc

SEQ ID NO: 5645107 - DNA, 25 bp, Homo sapien
aggtgaagtttaatctgtgcatagt

SEQ ID NO: 5645108 - DNA, 25 bp, Homo sapien
ctcacgtgcttcagtggccattaca

SEQ ID NO: 5645109 - DNA, 25 bp, Homo sapien
gtaaacaacagacagtgaagaatgt

SEQ ID NO: 5645110 - DNA, 25 bp, Homo sapien
tttaaataaaagccaggacagtgaa

SEQ ID NO: 5645111 - DNA, 25 bp, Homo sapien
aaaattgttcctgttgccgccgcag

SEQ ID NO: 5645112 - DNA, 25 bp, Homo sapien
catgctcattatcatctgcagaggt

SEQ ID NO: 5645113 - DNA, 25 bp, Homo sapien
tccggcattggctgcaagagcctcg

SEQ ID NO: 5645114 - DNA, 25 bp, Homo sapien
aaaatcgacatttcccatttattat

SEQ ID NO: 5645115 - DNA, 25 bp, Homo sapien
gaaaataaaaatacaccacaggtta

SEQ ID NO: 5645116 - DNA, 25 bp, Homo sapien
tcaggttcccatttcccagtctgaa

SEQ ID NO: 5645117 - DNA, 25 bp, Homo sapien
tgagccccaccagcagcagaagcag

SEQ ID NO: 5645118 - DNA, 25 bp, Homo sapien
aggcgccgtgagccccaccagcagc

SEQ ID NO: 5645119 - DNA, 25 bp, Homo sapien
ccatatataaagcgcacgcactttc

SEQ ID NO: 5645120 - DNA, 25 bp, Homo sapien
ttggtgacaggacttttatggagac

SEQ ID NO: 5645121 - DNA, 25 bp, Homo sapien
ggcacttttctggaactagcaggac

SEQ ID NO: 5645122 - DNA, 25 bp, Homo sapien
aatcagagtctgcctctctgctttg

SEQ ID NO: 5645123 - DNA, 25 bp, Homo sapien
gttcctcctttcttcaatcacgtgg

SEQ ID NO: 5645124 - DNA, 25 bp, Homo sapien
ggcagtcgatcggaatcgtgggatc

SEQ ID NO: 5645125 - DNA, 25 bp, Homo sapien
gccagggctgccgcgctccctgcca

SEQ ID NO: 5645126 - DNA, 25 bp, Homo sapien
cttttctggaactagcaggacatca

SEQ ID NO: 5645127 - DNA, 25 bp, Homo sapien
gtaatgacggatggtatgtaagcga

SEQ ID NO: 5645128 - DNA, 25 bp, Homo sapien
gctgcggcggccgcggtcccggtgg

SEQ ID NO: 5645129 - DNA, 25 bp, Homo sapien
tgaatttcttgggctacataaggta

SEQ ID NO: 5645130 - DNA, 25 bp, Homo sapien
gaaacactggacttcaagaaactgg

SEQ ID NO: 5645131 - DNA, 25 bp, Homo sapien
ctccatccgctctttgtggaaaaac

SEQ ID NO: 5645132 - DNA, 25 bp, Homo sapien
ggtgccgaatctccagctgctcctt

SEQ ID NO: 5645133 - DNA, 25 bp, Homo sapien
actggctgcttccttctctaaagct

SEQ ID NO: 5645134 - DNA, 25 bp, Homo sapien
acgctggaataaaatgcctttaacg

SEQ ID NO: 5645135 - DNA, 25 bp, Homo sapien
ggtgagcattggatcaacctccacg

SEQ ID NO: 5645136 - DNA, 25 bp, Homo sapien
tcaaaattgttcctgttgccgccgc

SEQ ID NO: 5645137 - DNA, 25 bp, Homo sapien
tggcagaggagttggaggaatcatc

SEQ ID NO: 5645138 - DNA, 25 bp, Homo sapien
tgcacgctgctcctgaaggagctca

SEQ ID NO: 5645139 - DNA, 25 bp, Homo sapien
tacacatcaacatcattggttggca

SEQ ID NO: 5645140 - DNA, 25 bp, Homo sapien
tctcctgggccagcggccgcctcct

SEQ ID NO: 5645141 - DNA, 25 bp, Homo sapien
gcggtcccggtggccgccatccctc

SEQ ID NO: 5645142 - DNA, 25 bp, Homo sapien
cttctggaagcgagcatgctcatta

SEQ ID NO: 5645143 - DNA, 25 bp, Homo sapien
ctggtttgcctccatcacatttgtg

SEQ ID NO: 5645144 - DNA, 25 bp, Homo sapien
ttgcgatttgaggctcagcaacagc

SEQ ID NO: 5645145 - DNA, 25 bp, Homo sapien
ggaggtgaggggacaaagtagaggc

SEQ ID NO: 5645146 - DNA, 25 bp, Homo sapien
ccaggacagtgaatgaggctgaaga

SEQ ID NO: 5645147 - DNA, 25 bp, Homo sapien
agcccctggcagcggctgctgcttg

SEQ ID NO: 5645148 - DNA, 25 bp, Homo sapien
tcctcttgaatttcttgggctacat

SEQ ID NO: 5645149 - DNA, 25 bp, Homo sapien
tcacacacctccatccgctctttgt

SEQ ID NO: 5645150 - DNA, 25 bp, Homo sapien
aattgttcctgttgccgccgcagcc

SEQ ID NO: 5645151 - DNA, 25 bp, Homo sapien
ccaggctgatgacgatgaccgtggc

SEQ ID NO: 5645152 - DNA, 25 bp, Homo sapien
gtaggtgaagtttaatctgtgcata

SEQ ID NO: 5645153 - DNA, 25 bp, Homo sapien
tgccgggttcagtaggattctcctc

SEQ ID NO: 5645154 - DNA, 25 bp, Homo sapien
aactggcacttttctggaactagca

SEQ ID NO: 5645155 - DNA, 25 bp, Homo sapien
ggtgtcatagtagtaatctcggtcc

SEQ ID NO: 5645156 - DNA, 25 bp, Homo sapien
ctgtccattcggttgcggtgccgaa

SEQ ID NO: 5645157 - DNA, 25 bp, Homo sapien
tgaaaatcgacatttcccatttatt

SEQ ID NO: 5645158 - DNA, 25 bp, Homo sapien
atcttccggcccacctgcatccctc

SEQ ID NO: 5645159 - DNA, 25 bp, Homo sapien
aggaggtcaggatgtcagacgcagc

SEQ ID NO: 5645160 - DNA, 25 bp, Homo sapien
aacagccaacacatgctggtaatga

SEQ ID NO: 5645161 - DNA, 25 bp, Homo sapien
tggatacatctcctgacagtactga

SEQ ID NO: 5645162 - DNA, 25 bp, Homo sapien
agttctacagtagtactttatatag

SEQ ID NO: 5645163 - DNA, 25 bp, Homo sapien
tgggtcaacagccaacacatgctgg

SEQ ID NO: 5645164 - DNA, 25 bp, Homo sapien
cacgcactttcccttggagaggtcg

SEQ ID NO: 5645165 - DNA, 25 bp, Homo sapien
atcaccaggctgatgacgatgaccg

SEQ ID NO: 5645166 - DNA, 25 bp, Homo sapien
gcctctttgactaccgtgtgccagt

SEQ ID NO: 5645167 - DNA, 25 bp, Homo sapien
ccgcctccttggtgtggtcttctct

SEQ ID NO: 5645168 - DNA, 25 bp, Homo sapien
taagcgatctttgttctcagcacgg

SEQ ID NO: 5645169 - DNA, 25 bp, Homo sapien
cctggcagcggctgctgcttggcag

SEQ ID NO: 5645170 - DNA, 25 bp, Homo sapien
ccctgtccattcggttgcggtgccg

SEQ ID NO: 5645171 - DNA, 25 bp, Homo sapien
ggaatcatcgctttacacacagcca

SEQ ID NO: 5645172 - DNA, 25 bp, Homo sapien
gctctcaagctcacacactcggact

SEQ ID NO: 5645173 - DNA, 25 bp, Homo sapien
tacattctccacagatcatattaag

SEQ ID NO: 5645174 - DNA, 25 bp, Homo sapien
atttctcagcaacttcctgaaagct

SEQ ID NO: 5645175 - DNA, 25 bp, Homo sapien
caaagactcctgtgacgaaaacaca

SEQ ID NO: 5645176 - DNA, 25 bp, Homo sapien
ccgccagggctgccgcgctccctgc

SEQ ID NO: 5645177 - DNA, 25 bp, Homo sapien
attcagtgccatggaactggtctac

SEQ ID NO: 5645178 - DNA, 25 bp, Homo sapien
ttaaactgtgtacattctccacaga

SEQ ID NO: 5645179 - DNA, 25 bp, Homo sapien
aaatataagctacaggctaatctct

SEQ ID NO: 5645180 - DNA, 25 bp, Homo sapien
catatctgcacgctgctcctgaagg

SEQ ID NO: 5645181 - DNA, 25 bp, Homo sapien
taaaaagaaagaaaaagcagaagca

SEQ ID NO: 5645182 - DNA, 25 bp, Homo sapien
tggcttggaagtgctgaatcagagt

SEQ ID NO: 5645183 - DNA, 25 bp, Homo sapien
tgagggcagcacacatattcagtgc

SEQ ID NO: 5645184 - DNA, 25 bp, Homo sapien
aatgacggatggtatgtaagcgatc

SEQ ID NO: 5645185 - DNA, 25 bp, Homo sapien
aacttcccacaaaacattgcgattt

SEQ ID NO: 5645186 - DNA, 25 bp, Homo sapien
tccctgagtcagacatgcctctttg

SEQ ID NO: 5645187 - DNA, 25 bp, Homo sapien
tgacaggagggggtggaggtgaggg

SEQ ID NO: 5645188 - DNA, 25 bp, Homo sapien
tgcgatgaccagcaggccaatgaga

SEQ ID NO: 5645189 - DNA, 25 bp, Homo sapien
caggttaccagaaccttcagattta

SEQ ID NO: 5645190 - DNA, 25 bp, Homo sapien
aacactggacttcaagaaactggtc

SEQ ID NO: 5645191 - DNA, 25 bp, Homo sapien
tgtggaagcactggattccgaagga

SEQ ID NO: 5645192 - DNA, 25 bp, Homo sapien
tactaacccgctggtttgcctccat

SEQ ID NO: 5645193 - DNA, 25 bp, Homo sapien
gaaattgcagttctacagtagtact

SEQ ID NO: 5645194 - DNA, 25 bp, Homo sapien
gctcctgaaggagctcatcaatttc

SEQ ID NO: 5645195 - DNA, 25 bp, Homo sapien
ttgttcctgttgccgccgcagccac

SEQ ID NO: 5645196 - DNA, 25 bp, Homo sapien
acgccgtaaggcctggagaatgcga

SEQ ID NO: 5645197 - DNA, 25 bp, Homo sapien
cttcagtaggaaattcacttttata

SEQ ID NO: 5645198 - DNA, 25 bp, Homo sapien
cctgctctcccactccagatccttc

SEQ ID NO: 5645199 - DNA, 25 bp, Homo sapien
tcacatcattttgcgagggtctctc

SEQ ID NO: 5645200 - DNA, 25 bp, Homo sapien
ggccggtgacaggagggggtggagg

SEQ ID NO: 5645201 - DNA, 25 bp, Homo sapien
tctccaccagctgctgcttctcact

SEQ ID NO: 5645202 - DNA, 25 bp, Homo sapien
aatgagagcactgctactcagactg

SEQ ID NO: 5645203 - DNA, 25 bp, Homo sapien
cagcatcaccaggctgatgacgatg

SEQ ID NO: 5645204 - DNA, 25 bp, Homo sapien
cacaggtatccagccgtggaaacac

SEQ ID NO: 5645205 - DNA, 25 bp, Homo sapien
ctctcacgtgcttcagtggccatta

SEQ ID NO: 5645206 - DNA, 25 bp, Homo sapien
gctttgacatcatgagtaatttcct

SEQ ID NO: 5645207 - DNA, 25 bp, Homo sapien
ccgtggcgggtcagactgcaaggca

SEQ ID NO: 5645208 - DNA, 25 bp, Homo sapien
tggaagtggggtttctgattaattt

SEQ ID NO: 5645209 - DNA, 25 bp, Homo sapien
tcttcctcatcctcatcatcctcat

SEQ ID NO: 5645210 - DNA, 25 bp, Homo sapien
cgctttacacacagccatacaataa

SEQ ID NO: 5645211 - DNA, 25 bp, Homo sapien
ggccaatgagagcactgctactcag

SEQ ID NO: 5645212 - DNA, 25 bp, Homo sapien
ttgctttttgtccctccggcaccag

SEQ ID NO: 5645213 - DNA, 25 bp, Homo sapien
acacctccatccgctctttgtggaa

SEQ ID NO: 5645214 - DNA, 25 bp, Homo sapien
tgctggtgattctcacacacctcca

SEQ ID NO: 5645215 - DNA, 25 bp, Homo sapien
tctcctcactctcctcagagctcac

SEQ ID NO: 5645216 - DNA, 25 bp, Homo sapien
tcctgaaggagctcatcaatttcct

SEQ ID NO: 5645217 - DNA, 25 bp, Homo sapien
aagctacggtaggtaaacaacagac

SEQ ID NO: 5645218 - DNA, 25 bp, Homo sapien
tcggcaccgatcagtcccccatcct

SEQ ID NO: 5645219 - DNA, 25 bp, Homo sapien
agggtcagtgcctttggagaaagtc

SEQ ID NO: 5645220 - DNA, 25 bp, Homo sapien
attcccgctcttcctcgaggcctcc

SEQ ID NO: 5645221 - DNA, 25 bp, Homo sapien
gtctctcacgtgcttcagtggccat

SEQ ID NO: 5645222 - DNA, 25 bp, Homo sapien
tacatctcctgacagtactgaagaa

SEQ ID NO: 5645223 - DNA, 25 bp, Homo sapien
cggcccacctgcatccctccgccag

SEQ ID NO: 5645224 - DNA, 25 bp, Homo sapien
tgggtctccaccagctgctgcttct

SEQ ID NO: 5645225 - DNA, 25 bp, Homo sapien
tttgaggctcagcaacagcaaatcc

SEQ ID NO: 5645226 - DNA, 25 bp, Homo sapien
tcttctggggtgagcattggatcaa

SEQ ID NO: 5645227 - DNA, 25 bp, Homo sapien
cagttgtcaatactaacccgctggt

SEQ ID NO: 5645228 - DNA, 25 bp, Homo sapien
gacagctttgacatcatgagtaatt

SEQ ID NO: 5645229 - DNA, 25 bp, Homo sapien
tgaatgtcacaaggccggtgacagg

SEQ ID NO: 5645230 - DNA, 25 bp, Homo sapien
caggtatttgtaggtggggttctca

SEQ ID NO: 5645231 - DNA, 25 bp, Homo sapien
cacccggacgtccacaggggtctct

SEQ ID NO: 5645232 - DNA, 25 bp, Homo sapien
agagccatccgacggcggtcattca

SEQ ID NO: 5645233 - DNA, 25 bp, Homo sapien
cagcggccgcctccttggtgtggtc

SEQ ID NO: 5645234 - DNA, 25 bp, Homo sapien
ccgcggtcccggtggccgccatccc

SEQ ID NO: 5645235 - DNA, 25 bp, Homo sapien
gcggtcattcagcatagcttccact

SEQ ID NO: 5645236 - DNA, 25 bp, Homo sapien
gagctcatcaatttcctcttgaatt

SEQ ID NO: 5645237 - DNA, 25 bp, Homo sapien
tcatcacctgggatttcatctgggc

SEQ ID NO: 5645238 - DNA, 25 bp, Homo sapien
ttagcttgaagctctgcctcttccc

SEQ ID NO: 5645239 - DNA, 25 bp, Homo sapien
ttttataaacatcatagtcttcctc

SEQ ID NO: 5645240 - DNA, 25 bp, Homo sapien
gaggtcaggatgtcagacgcagccc

SEQ ID NO: 5645241 - DNA, 25 bp, Homo sapien
ctttccacagtgtccacagactcag

SEQ ID NO: 5645242 - DNA, 25 bp, Homo sapien
aggagtttgtaggtgaagtttaatc

SEQ ID NO: 5645243 - DNA, 25 bp, Homo sapien
ttcttcttttgtttcaaagcagctc

SEQ ID NO: 5645244 - DNA, 25 bp, Homo sapien
ccatttcccagtctgaatgttcaca

SEQ ID NO: 5645245 - DNA, 25 bp, Homo sapien
gttcctgttgccgccgcagccacca

SEQ ID NO: 5645246 - DNA, 25 bp, Homo sapien
aggacagtgaatgaggctgaagagt

SEQ ID NO: 5645247 - DNA, 25 bp, Homo sapien
gtgggcccacggattcccgctcttc

SEQ ID NO: 5645248 - DNA, 25 bp, Homo sapien
tgggagcagacagctttgacatcat

SEQ ID NO: 5645249 - DNA, 25 bp, Homo sapien
cagcctggactactttcctttcaca

SEQ ID NO: 5645250 - DNA, 25 bp, Homo sapien
tgcttcagtaggaaattcactttta

SEQ ID NO: 5645251 - DNA, 25 bp, Homo sapien
tcaatactaacccgctggtttgcct

SEQ ID NO: 5645252 - DNA, 25 bp, Homo sapien
taaagctttaaccatggcttggaag

SEQ ID NO: 5645253 - DNA, 25 bp, Homo sapien
ccgctctttgtggaaaaactggcac

SEQ ID NO: 5645254 - DNA, 25 bp, Homo sapien
gctgcttctcactggctgcttcctt

SEQ ID NO: 5645255 - DNA, 25 bp, Homo sapien
ctctagcgcgcggctctcaagctca

SEQ ID NO: 5645256 - DNA, 25 bp, Homo sapien
gggagcagcatgccgtagctatata

SEQ ID NO: 5645257 - DNA, 25 bp, Homo sapien
tgaactggtccatatctgcacgctg

SEQ ID NO: 5645258 - DNA, 25 bp, Homo sapien
cactggacttcaagaaactggtcct

SEQ ID NO: 5645259 - DNA, 25 bp, Homo sapien
gctctttgtggaaaaactggcactt

SEQ ID NO: 5645260 - DNA, 25 bp, Homo sapien
tttaaaagaatggaaattgcagttc

SEQ ID NO: 5645261 - DNA, 25 bp, Homo sapien
gacaatacaatggaagtggggtttc

SEQ ID NO: 5645262 - DNA, 25 bp, Homo sapien
acccacgagacacttgaaaggtgta

SEQ ID NO: 5645263 - DNA, 25 bp, Homo sapien
ccgtggcaatggccactgcgatgac

SEQ ID NO: 5645264 - DNA, 25 bp, Homo sapien
ccacctaaatctgcatctgctccag

SEQ ID NO: 5645265 - DNA, 25 bp, Homo sapien
atagccatggttctgcatcttgttc

SEQ ID NO: 5645266 - DNA, 25 bp, Homo sapien
ggtcattccctgagtcagacatgcc

SEQ ID NO: 5645267 - DNA, 25 bp, Homo sapien
tggcagcggctgctgcttggcagtc

SEQ ID NO: 5645268 - DNA, 25 bp, Homo sapien
tcattccctgagtcagacatgcctc

SEQ ID NO: 5645269 - DNA, 25 bp, Homo sapien
tttaatctgtgcatagtgggtagag

SEQ ID NO: 5645270 - DNA, 25 bp, Homo sapien
tcatcatcctcatccacagctgctt

SEQ ID NO: 5645271 - DNA, 25 bp, Homo sapien
tgcttcagtggccattacagttccc

SEQ ID NO: 5645272 - DNA, 25 bp, Homo sapien
tcacaaggccggtgacaggaggggg

SEQ ID NO: 5645273 - DNA, 25 bp, Homo sapien
taatttaaaaaagaaaactacatca

SEQ ID NO: 5645274 - DNA, 25 bp, Homo sapien
ggatcttccggcccacctgcatccc

SEQ ID NO: 5645275 - DNA, 25 bp, Homo sapien
catcaactgtacaagcattacaaag

SEQ ID NO: 5645276 - DNA, 25 bp, Homo sapien
caagaaactggtcctttcacatcat

SEQ ID NO: 5645277 - DNA, 25 bp, Homo sapien
caaaaacagtcacaggaaaataaaa

SEQ ID NO: 5645278 - DNA, 25 bp, Homo sapien
tggtcctttcacatcattttgcgag

SEQ ID NO: 5645279 - DNA, 25 bp, Homo sapien
ttcaggtgacgctcttctggggtga

SEQ ID NO: 5645280 - DNA, 25 bp, Homo sapien
gatcaggttcccatttcccagtctg

SEQ ID NO: 5645281 - DNA, 25 bp, Homo sapien
cgtccacaggggtctctgagattga

SEQ ID NO: 5645282 - DNA, 25 bp, Homo sapien
atcgctttacacacagccatacaat

SEQ ID NO: 5645283 - DNA, 25 bp, Homo sapien
agctatataaggtcattccctgagt

SEQ ID NO: 5645284 - DNA, 25 bp, Homo sapien
aaagcagcagcggacaccctcatct

SEQ ID NO: 5645285 - DNA, 25 bp, Homo sapien
cagaaccttcagatttaaaataaaa

SEQ ID NO: 5645286 - DNA, 25 bp, Homo sapien
tcccacaaaacattgcgatttgagg

SEQ ID NO: 5645287 - DNA, 25 bp, Homo sapien
gctactcagactgaagtcctcccgc

SEQ ID NO: 5645288 - DNA, 25 bp, Homo sapien
caacacatgctggtaatgacggatg

SEQ ID NO: 5645289 - DNA, 25 bp, Homo sapien
aaggaaagcagcagcggacaccctc

SEQ ID NO: 5645290 - DNA, 25 bp, Homo sapien
ctcctcagagctcacccggacgtcc

SEQ ID NO: 5645291 - DNA, 25 bp, Homo sapien
ggagcctgcacatctggacatagtt

SEQ ID NO: 5645292 - DNA, 25 bp, Homo sapien
tggggttctcatagccatggttctg

SEQ ID NO: 5645293 - DNA, 25 bp, Homo sapien
tggtgcctgttggatcaggttccca

SEQ ID NO: 5645294 - DNA, 25 bp, Homo sapien
ataaggtcattccctgagtcagaca

SEQ ID NO: 5645295 - DNA, 25 bp, Homo sapien
tccatcacatttgtgatctgtagct

SEQ ID NO: 5645296 - DNA, 25 bp, Homo sapien
actttatatagtcctacagtccagg

SEQ ID NO: 5645297 - DNA, 25 bp, Homo sapien
tgagtgaatgtcacaaggccggtga

SEQ ID NO: 5645298 - DNA, 25 bp, Homo sapien
ttgagagcatgtgtcagacaataca

SEQ ID NO: 5645299 - DNA, 25 bp, Homo sapien
agactgcaaggcagccaggtagttc

SEQ ID NO: 5645300 - DNA, 25 bp, Homo sapien
gcttggaagtgctgaatcagagtct

SEQ ID NO: 5645301 - DNA, 25 bp, Homo sapien
ctgcttggcagtcgatcggaatcgt

SEQ ID NO: 5645302 - DNA, 25 bp, Homo sapien
tctctgtggaagcactggattccga

SEQ ID NO: 5645303 - DNA, 25 bp, Homo sapien
aatgtcacaaggccggtgacaggag

SEQ ID NO: 5645304 - DNA, 25 bp, Homo sapien
gcccacctgcatccctccgccaggg

SEQ ID NO: 5645305 - DNA, 25 bp, Homo sapien
gtaggtaaacaacagacagtgaaga

SEQ ID NO: 5645306 - DNA, 25 bp, Homo sapien
tcctgttgccgccgcagccaccata

SEQ ID NO: 5645307 - DNA, 25 bp, Homo sapien
ttatcatctgcagaggtctcgaaat

SEQ ID NO: 5645308 - DNA, 25 bp, Homo sapien
gaagaatgtcaaatataagctacag

SEQ ID NO: 5645309 - DNA, 25 bp, Homo sapien
ccactcgggccaggtgggtctccac

SEQ ID NO: 5645310 - DNA, 25 bp, Homo sapien
tctgtgaagtcttccagatctgctt

SEQ ID NO: 5645311 - DNA, 25 bp, Homo sapien
gcccggcagggccccgtcatcgcct

SEQ ID NO: 5645312 - DNA, 25 bp, Homo sapien
ctgcaatagatcatttttttcattt

SEQ ID NO: 5645313 - DNA, 25 bp, Homo sapien
agctcttggtgcctgttggatcagg

SEQ ID NO: 5645314 - DNA, 25 bp, Homo sapien
tctctcctgggccagcggccgcctc

SEQ ID NO: 5645315 - DNA, 25 bp, Homo sapien
tcgacatcaactgtacaagcattac

SEQ ID NO: 5645316 - DNA, 25 bp, Homo sapien
tctaccccacatgggagcagcatgc

SEQ ID NO: 5645317 - DNA, 25 bp, Homo sapien
tgcaaggcagccaggtagttctcca

SEQ ID NO: 5645318 - DNA, 25 bp, Homo sapien
tattgagagcatgtgtcagacaata

SEQ ID NO: 5645319 - DNA, 25 bp, Homo sapien
aatttcctcttgaatttcttgggct

SEQ ID NO: 5645320 - DNA, 25 bp, Homo sapien
gcctccttggtgtggtcttctctga

SEQ ID NO: 5645321 - DNA, 25 bp, Homo sapien
tggaagcgagcatgctcattatcat

SEQ ID NO: 5645322 - DNA, 25 bp, Homo sapien
atcacggcccggcagggccccgtca

SEQ ID NO: 5645323 - DNA, 25 bp, Homo sapien
tgacatcatgagtaatttccttgtc

SEQ ID NO: 5645324 - DNA, 25 bp, Homo sapien
tgtgacgaaaacacaattgttcaaa

SEQ ID NO: 5645325 - DNA, 25 bp, Homo sapien
ggagcagacagctttgacatcatga

SEQ ID NO: 5645326 - DNA, 25 bp, Homo sapien
tggtgccatactgcctcttcctcag

SEQ ID NO: 5645327 - DNA, 25 bp, Homo sapien
tctggaactagcaggacatcactta

SEQ ID NO: 5645328 - DNA, 25 bp, Homo sapien
ttcacacaaacaaacctccccgtgt

SEQ ID NO: 5645329 - DNA, 25 bp, Homo sapien
tgcttctgtgaagtcttccagatct

SEQ ID NO: 5645330 - DNA, 25 bp, Homo sapien
atgaggccgtggcgggtcagactgc

SEQ ID NO: 5645331 - DNA, 25 bp, Homo sapien
tgaatcagagtctgcctctctgctt

SEQ ID NO: 5645332 - DNA, 25 bp, Homo sapien
tctcgtcaatgaccatgttttcatc

SEQ ID NO: 5645333 - DNA, 25 bp, Homo sapien
gatttgaggctcagcaacagcaaat

SEQ ID NO: 5645334 - DNA, 25 bp, Homo sapien
attgaggcagtgaactggtccatat

SEQ ID NO: 5645335 - DNA, 25 bp, Homo sapien
cagccaacacatgctggtaatgacg

SEQ ID NO: 5645336 - DNA, 25 bp, Homo sapien
agattgaggcagtgaactggtccat

SEQ ID NO: 5645337 - DNA, 25 bp, Homo sapien
tgtagagcagagagaggctttggtt

SEQ ID NO: 5645338 - DNA, 25 bp, Homo sapien
agaacttcttcttttgtttcaaagc

SEQ ID NO: 5645339 - DNA, 25 bp, Homo sapien
tcctcccgcagtgggcccacggatt

SEQ ID NO: 5645340 - DNA, 25 bp, Homo sapien
tggaaacactggacttcaagaaact

SEQ ID NO: 5645341 - DNA, 25 bp, Homo sapien
aaactgtgtacattctccacagatc

SEQ ID NO: 5645342 - DNA, 25 bp, Homo sapien
tacaggctaatctctgtggaagcac

SEQ ID NO: 5645343 - DNA, 25 bp, Homo sapien
ataatctttgtctgagggcagcaca

SEQ ID NO: 5645344 - DNA, 25 bp, Homo sapien
cacggacataacgccgtaaggcctg

SEQ ID NO: 5645345 - DNA, 25 bp, Homo sapien
agctgctgcttctcactggctgctt

SEQ ID NO: 5645346 - DNA, 25 bp, Homo sapien
ccatccgctctttgtggaaaaactg

SEQ ID NO: 5645347 - DNA, 25 bp, Homo sapien
aatctttgtctgagggcagcacaca

SEQ ID NO: 5645348 - DNA, 25 bp, Homo sapien
gtgggatctcctcactctcctcaga

SEQ ID NO: 5645349 - DNA, 25 bp, Homo sapien
tggctgcaagagcctcgatgtagcc

SEQ ID NO: 5645350 - DNA, 25 bp, Homo sapien
tccggcaccagttgtcaatactaac

SEQ ID NO: 5645351 - DNA, 25 bp, Homo sapien
ttgttcaaagctttccacagtgtcc

SEQ ID NO: 5645352 - DNA, 25 bp, Homo sapien
tcggcattgaaaatcatttccttaa

SEQ ID NO: 5645353 - DNA, 25 bp, Homo sapien
cgtggctgcggcggccgcggtcccg

SEQ ID NO: 5645354 - DNA, 25 bp, Homo sapien
ttgactaccgtgtgccagtgctggt

SEQ ID NO: 5645355 - DNA, 25 bp, Homo sapien
ctccttggtgtggtcttctctgagt

SEQ ID NO: 5645356 - DNA, 25 bp, Homo sapien
tcatttaaaaagggaatactgcctt

SEQ ID NO: 5645357 - DNA, 25 bp, Homo sapien
attccaccccatttctcagcaactt

SEQ ID NO: 5645358 - DNA, 25 bp, Homo sapien
cttgcattgctttttgtccctccgg

SEQ ID NO: 5645359 - DNA, 25 bp, Homo sapien
cgcggctctcaagctcacacactcg

SEQ ID NO: 5645360 - DNA, 25 bp, Homo sapien
ctaagctctctagaagacgctggaa

SEQ ID NO: 5645361 - DNA, 25 bp, Homo sapien
aaattcacccacgagacacttgaaa

SEQ ID NO: 5645362 - DNA, 25 bp, Homo sapien
agcaggccaatgagagcactgctac

SEQ ID NO: 5645363 - DNA, 25 bp, Homo sapien
atgggagcagcatgccgtagctata

SEQ ID NO: 5645364 - DNA, 25 bp, Homo sapien
ctttcacccatttaaaagaatggaa

SEQ ID NO: 5645365 - DNA, 25 bp, Homo sapien
cagtactgaagaacttcttcttttg

SEQ ID NO: 5645366 - DNA, 25 bp, Homo sapien
aagaaagaaaaagcagaagcagtga

SEQ ID NO: 5645367 - DNA, 25 bp, Homo sapien
acatcatgagtaatttccttgtctg

SEQ ID NO: 5645368 - DNA, 25 bp, Homo sapien
ttgaaaatcatttccttaacatcca

SEQ ID NO: 5645369 - DNA, 25 bp, Homo sapien
gttcacatgcatatttaacttccca

SEQ ID NO: 5645370 - DNA, 25 bp, Homo sapien
cacctgggatttcatctgggccgcc

SEQ ID NO: 5645371 - DNA, 25 bp, Homo sapien
ggtcaggatgtcagacgcagcccct

SEQ ID NO: 5645372 - DNA, 25 bp, Homo sapien
ttcccagtctgaatgttcacatgca

SEQ ID NO: 5645373 - DNA, 25 bp, Homo sapien
tatttgtaggtggggttctcatagc

SEQ ID NO: 5645374 - DNA, 25 bp, Homo sapien
ggtcgaagtaccaacgaggcatcac

SEQ ID NO: 5645375 - DNA, 25 bp, Homo sapien
cctccaactctctcggcattgaaaa

SEQ ID NO: 5645376 - DNA, 25 bp, Homo sapien
cagaggtctcgaaatacacatcaac

SEQ ID NO: 5645377 - DNA, 25 bp, Homo sapien
ggaagttaaagtatttattgatgtg

SEQ ID NO: 5645378 - DNA, 25 bp, Homo sapien
aacctccccgtgttctctcctgggc

SEQ ID NO: 5645379 - DNA, 25 bp, Homo sapien
aaacatcatagtcttcctcttcatc

SEQ ID NO: 5645380 - DNA, 25 bp, Homo sapien
cctgtgacgaaaacacaattgttca

SEQ ID NO: 5645381 - DNA, 25 bp, Homo sapien
aagaaaactacatcaaatatctgca

SEQ ID NO: 5645382 - DNA, 25 bp, Homo sapien
gcatatttaacttcccacaaaacat

SEQ ID NO: 5645383 - DNA, 25 bp, Homo sapien
ctgaatgttcacatgcatatttaac

SEQ ID NO: 5645384 - DNA, 25 bp, Homo sapien
gctcagcaacagcaaatcctgttcc

SEQ ID NO: 5645385 - DNA, 25 bp, Homo sapien
agcttgaagctctgcctcttcccat

SEQ ID NO: 5645386 - DNA, 25 bp, Homo sapien
caccagctgctgcttctcactggct

SEQ ID NO: 5645387 - DNA, 25 bp, Homo sapien
ctgggccagcggccgcctccttggt

SEQ ID NO: 5645388 - DNA, 25 bp, Homo sapien
actagcaggacatcacttacaaatt

SEQ ID NO: 5645389 - DNA, 25 bp, Homo sapien
tgagattgaggcagtgaactggtcc

SEQ ID NO: 5645390 - DNA, 25 bp, Homo sapien
agacatgcctctttgactaccgtgt

SEQ ID NO: 5645391 - DNA, 25 bp, Homo sapien
tgtcacaaggccggtgacaggaggg

SEQ ID NO: 5645392 - DNA, 25 bp, Homo sapien
aggtactttgtagagcagagagagg

SEQ ID NO: 5645393 - DNA, 25 bp, Homo sapien
ggtcccggtggccgccatccctcgc

SEQ ID NO: 5645394 - DNA, 25 bp, Homo sapien
cgaaggaaagcagcagcggacaccc

SEQ ID NO: 5645395 - DNA, 25 bp, Homo sapien
agccatggttctgcatcttgttcag

SEQ ID NO: 5645396 - DNA, 25 bp, Homo sapien
actgcaaggcagccaggtagttctc

SEQ ID NO: 5645397 - DNA, 25 bp, Homo sapien
tgtatacactaagctctctagaaga

SEQ ID NO: 5645398 - DNA, 25 bp, Homo sapien
tgaaggtgtcatagtagtaatctcg

SEQ ID NO: 5645399 - DNA, 25 bp, Homo sapien
ttgttctcagcacggacataacgcc

SEQ ID NO: 5645400 - DNA, 25 bp, Homo sapien
aattgttcaaagctttccacagtgt

SEQ ID NO: 5645401 - DNA, 25 bp, Homo sapien
tctcaagctcacacactcggactcc

SEQ ID NO: 5645402 - DNA, 25 bp, Homo sapien
atccgctctttgtggaaaaactggc

SEQ ID NO: 5645403 - DNA, 25 bp, Homo sapien
tggaaaaactggcacttttctggaa

SEQ ID NO: 5645404 - DNA, 25 bp, Homo sapien
aagaaaaagcagaagcagtgagcat

SEQ ID NO: 5645405 - DNA, 25 bp, Homo sapien
tctcatagccatggttctgcatctt

SEQ ID NO: 5645406 - DNA, 25 bp, Homo sapien
acatcatagtcttcctcttcatctt

SEQ ID NO: 5645407 - DNA, 25 bp, Homo sapien
ggttctgcatcttgttcaggtgacg

SEQ ID NO: 5645408 - DNA, 25 bp, Homo sapien
ccacagatcatattaaggagtttgt

SEQ ID NO: 5645409 - DNA, 25 bp, Homo sapien
tttcttgggctacataaggtacttt

SEQ ID NO: 5645410 - DNA, 25 bp, Homo sapien
aatttcttgggctacataaggtact

SEQ ID NO: 5645411 - DNA, 25 bp, Homo sapien
gttgtcaatactaacccgctggttt

SEQ ID NO: 5645412 - DNA, 25 bp, Homo sapien
ccatccctcgccgggtcgctctagc

SEQ ID NO: 5645413 - DNA, 25 bp, Homo sapien
catcgacatcaactgtacaagcatt

SEQ ID NO: 5645414 - DNA, 25 bp, Homo sapien
atacaataatcctcagactcaaaat

SEQ ID NO: 5645415 - DNA, 25 bp, Homo sapien
ctggtccatatctgcacgctgctcc

SEQ ID NO: 5645416 - DNA, 25 bp, Homo sapien
atgaccgtggcaatggccactgcga

SEQ ID NO: 5645417 - DNA, 25 bp, Homo sapien
cacagatccaataatctttgtctga

SEQ ID NO: 5645418 - DNA, 25 bp, Homo sapien
ggaaagcagcagcggacaccctcat

SEQ ID NO: 5645419 - DNA, 25 bp, Homo sapien
ggagcctgcccgtggctgcggcggc

SEQ ID NO: 5645420 - DNA, 25 bp, Homo sapien
cagcagcggacaccctcatctgtat

SEQ ID NO: 5645421 - DNA, 25 bp, Homo sapien
tacggtaggtaaacaacagacagtg

SEQ ID NO: 5645422 - DNA, 25 bp, Homo sapien
ctggggtgagcattggatcaacctc

SEQ ID NO: 5645423 - DNA, 25 bp, Homo sapien
tagaagacgctggaataaaatgcct

SEQ ID NO: 5645424 - DNA, 25 bp, Homo sapien
ggcagggccccgtcatcgcctcctg

SEQ ID NO: 5645425 - DNA, 25 bp, Homo sapien
aaggccggtgacaggagggggtgga

SEQ ID NO: 5645426 - DNA, 25 bp, Homo sapien
attgaaaatcgacatttcccattta

SEQ ID NO: 5645427 - DNA, 25 bp, Homo sapien
agtaggattctcctcattgtagtca

SEQ ID NO: 5645428 - DNA, 25 bp, Homo sapien
cttcctcttcttttgacacagatcc

SEQ ID NO: 5645429 - DNA, 25 bp, Homo sapien
agaaactggtcctttcacatcattt

SEQ ID NO: 5645430 - DNA, 25 bp, Homo sapien
agtgctggtgattctcacacacctc

SEQ ID NO: 5645431 - DNA, 25 bp, Homo sapien
gccgagggtcagtgcctttggagaa

SEQ ID NO: 5645432 - DNA, 25 bp, Homo sapien
taacatccagagtctcgtcaatgac

SEQ ID NO: 5645433 - DNA, 25 bp, Homo sapien
acacatgctggtaatgacggatggt

SEQ ID NO: 5645434 - DNA, 25 bp, Homo sapien
gcagcggctgctgcttggcagtcga

SEQ ID NO: 5645435 - DNA, 25 bp, Homo sapien
gttggatcaggttcccatttcccag

SEQ ID NO: 5645436 - DNA, 25 bp, Homo sapien
atccctcgccgggtcgctctagcgc

SEQ ID NO: 5645437 - DNA, 25 bp, Homo sapien
tattcttactgttaatcactttctc

SEQ ID NO: 5645438 - DNA, 25 bp, Homo sapien
tgcttctcactggctgcttccttct

SEQ ID NO: 5645439 - DNA, 25 bp, Homo sapien
atcattttgcgagggtctctcacgt

SEQ ID NO: 5645440 - DNA, 25 bp, Homo sapien
attcacccacgagacacttgaaagg

SEQ ID NO: 5645441 - DNA, 25 bp, Homo sapien
ggtttgcctccatcacatttgtgat

SEQ ID NO: 5645442 - DNA, 25 bp, Homo sapien
atcatttccttaacatccagagtct

SEQ ID NO: 5645443 - DNA, 25 bp, Homo sapien
ccatttctcagcaacttcctgaaag

SEQ ID NO: 5645444 - DNA, 25 bp, Homo sapien
ggtatttgtaggtggggttctcata

SEQ ID NO: 5645445 - DNA, 25 bp, Homo sapien
caggtagggctgggaaggggtggaa

SEQ ID NO: 5645446 - DNA, 25 bp, Homo sapien
attaccatctttcacccatttaaaa

SEQ ID NO: 5645447 - DNA, 25 bp, Homo sapien
agttgacttacacaacataaccgga

SEQ ID NO: 5645448 - DNA, 25 bp, Homo sapien
aacaaaacaaaaacagtcacaggaa

SEQ ID NO: 5645449 - DNA, 25 bp, Homo sapien
cggacaccctcatctgtatacacta

SEQ ID NO: 5645450 - DNA, 25 bp, Homo sapien
gacacacaggtatccagccgtggaa

SEQ ID NO: 5645451 - DNA, 25 bp, Homo sapien
cggcaccagttgtcaatactaaccc

SEQ ID NO: 5645452 - DNA, 25 bp, Homo sapien
gctccaggtatttgtaggtggggtt

SEQ ID NO: 5645453 - DNA, 25 bp, Homo sapien
gctttttgtccctccggcaccagtt

SEQ ID NO: 5645454 - DNA, 25 bp, Homo sapien
agctgctccttagccttctggaagc

SEQ ID NO: 5645455 - DNA, 25 bp, Homo sapien
atcatcctcatccacagctgcttct

SEQ ID NO: 5645456 - DNA, 25 bp, Homo sapien
ctaatctctgtggaagcactggatt

SEQ ID NO: 5645457 - DNA, 25 bp, Homo sapien
gccgtaaggcctggagaatgcgatg

SEQ ID NO: 5645458 - DNA, 25 bp, Homo sapien
attgatgtgtttaaactgtgtacat

SEQ ID NO: 5645459 - DNA, 25 bp, Homo sapien
cagacaatacaatggaagtggggtt

SEQ ID NO: 5645460 - DNA, 25 bp, Homo sapien
cggtgggatctcctcactctcctca

SEQ ID NO: 5645461 - DNA, 25 bp, Homo sapien
atattgttatattaccatctttcac

SEQ ID NO: 5645462 - DNA, 25 bp, Homo sapien
tggaaattgcagttctacagtagta

SEQ ID NO: 5645463 - DNA, 25 bp, Homo sapien
cctgggatttcatctgggccgcctt

SEQ ID NO: 5645464 - DNA, 25 bp, Homo sapien
gtgaagtttaatctgtgcatagtgg

SEQ ID NO: 5645465 - DNA, 25 bp, Homo sapien
agtgccatggaactggtctacccca

SEQ ID NO: 5645466 - DNA, 25 bp, Homo sapien
ctagcgcgcggctctcaagctcaca

SEQ ID NO: 5645467 - DNA, 25 bp, Homo sapien
taaccatggcttggaagtgctgaat

SEQ ID NO: 5645468 - DNA, 25 bp, Homo sapien
ccctcatctgtatacactaagctct

SEQ ID NO: 5645469 - DNA, 25 bp, Homo sapien
agatccttcgttctcaggtagggct

SEQ ID NO: 5645470 - DNA, 25 bp, Homo sapien
ctcaggtagggctgggaaggggtgg

SEQ ID NO: 5645471 - DNA, 25 bp, Homo sapien
cattgcgatttgaggctcagcaaca

SEQ ID NO: 5645472 - DNA, 25 bp, Homo sapien
tactgcctcttcctcagcatcacca

SEQ ID NO: 5645473 - DNA, 25 bp, Homo sapien
ctccagatccttcgttctcaggtag

SEQ ID NO: 5645474 - DNA, 25 bp, Homo sapien
acgtccttggtgacaggacttttat

SEQ ID NO: 5645475 - DNA, 25 bp, Homo sapien
tggaaggggtggaacggtgggatct

SEQ ID NO: 5645476 - DNA, 25 bp, Homo sapien
tttttgtccctccggcaccagttgt

SEQ ID NO: 5645477 - DNA, 25 bp, Homo sapien
gctgggaaggggtggaaggggtgga

SEQ ID NO: 5645478 - DNA, 25 bp, Homo sapien
catagtcttcctcttcatcttcctc

SEQ ID NO: 5645479 - DNA, 25 bp, Homo sapien
ccacgagacacttgaaaggtgtaac

SEQ ID NO: 5645480 - DNA, 25 bp, Homo sapien
aaactacatcaaatatctgcaatag

SEQ ID NO: 5645481 - DNA, 25 bp, Homo sapien
caggggtctctgagattgaggcagt

SEQ ID NO: 5645482 - DNA, 25 bp, Homo sapien
aagactcctgtgacgaaaacacaat

SEQ ID NO: 5645483 - DNA, 25 bp, Homo sapien
gagcagcatgccgtagctatataag

SEQ ID NO: 5645484 - DNA, 25 bp, Homo sapien
tcagtgccatggaactggtctaccc

SEQ ID NO: 5645485 - DNA, 25 bp, Homo sapien
ggtcagtgcctttggagaaagtcca

SEQ ID NO: 5645486 - DNA, 25 bp, Homo sapien
atttccttgtctgacatggtgccgt

SEQ ID NO: 5645487 - DNA, 25 bp, Homo sapien
gcacacatattcagtgccatggaac

SEQ ID NO: 5645488 - DNA, 25 bp, Homo sapien
taggattctcctcattgtagtcatc

SEQ ID NO: 5645489 - DNA, 25 bp, Homo sapien
tcctcactctcctcagagctcaccc

SEQ ID NO: 5645490 - DNA, 25 bp, Homo sapien
tatacactaagctctctagaagacg

SEQ ID NO: 5645491 - DNA, 25 bp, Homo sapien
gggttctcatagccatggttctgca

SEQ ID NO: 5645492 - DNA, 25 bp, Homo sapien
tcctcattgtagtcatctcctttga

SEQ ID NO: 5645493 - DNA, 25 bp, Homo sapien
aagtccagagaggaggagcctgcac

SEQ ID NO: 5645494 - DNA, 25 bp, Homo sapien
gcctcctgggagcagacagctttga

SEQ ID NO: 5645495 - DNA, 25 bp, Homo sapien
gtgcatagtgggtagagacatgaat

SEQ ID NO: 5645496 - DNA, 25 bp, Homo sapien
caaaacaaaaacagtcacaggaaaa

SEQ ID NO: 5645497 - DNA, 25 bp, Homo sapien
ctcttgcattgctttttgtccctcc

SEQ ID NO: 5645498 - DNA, 25 bp, Homo sapien
cattatcatctgcagaggtctcgaa

SEQ ID NO: 5645499 - DNA, 25 bp, Homo sapien
gcctggagaatgcgatgaggccgtg

SEQ ID NO: 5645500 - DNA, 25 bp, Homo sapien
gaaagctcatttaaaaagggaatac

SEQ ID NO: 5645501 - DNA, 25 bp, Homo sapien
gcaggcgccgtgagccccaccagca

SEQ ID NO: 5645502 - DNA, 25 bp, Homo sapien
gacttacacaacataaccggaacga

SEQ ID NO: 5645503 - DNA, 25 bp, Homo sapien
ctttcccttggagaggtcgaagtac

SEQ ID NO: 5645504 - DNA, 25 bp, Homo sapien
aggagggggtggaggtgaggggaca

SEQ ID NO: 5645505 - DNA, 25 bp, Homo sapien
taatcactttctcttcggcaccgat

SEQ ID NO: 5645506 - DNA, 25 bp, Homo sapien
tctggacatagttggaaggggaagt

SEQ ID NO: 5645507 - DNA, 25 bp, Homo sapien
tctttaaataaaagccaggacagtg

SEQ ID NO: 5645508 - DNA, 25 bp, Homo sapien
acttcaagaaactggtcctttcaca

SEQ ID NO: 5645509 - DNA, 25 bp, Homo sapien
acacagccatacaataatcctcaga

SEQ ID NO: 5645510 - DNA, 25 bp, Homo sapien
tctcggcattgaaaatcatttcctt

SEQ ID NO: 5645511 - DNA, 25 bp, Homo sapien
gtacaagcattacaaagactcctgt

SEQ ID NO: 5645512 - DNA, 25 bp, Homo sapien
gagacacttgaaaggtgtaacaaag

SEQ ID NO: 5645513 - DNA, 25 bp, Homo sapien
cggcccggcagggccccgtcatcgc

SEQ ID NO: 5645514 - DNA, 25 bp, Homo sapien
caaagcagctcttggtgcctgttgg

SEQ ID NO: 5645515 - DNA, 25 bp, Homo sapien
caggtgacgctcttctggggtgagc

SEQ ID NO: 5645516 - DNA, 25 bp, Homo sapien
ctcagcatcaccaggctgatgacga

SEQ ID NO: 5645517 - DNA, 25 bp, Homo sapien
ttaccagaaccttcagatttaaaat

SEQ ID NO: 5645518 - DNA, 25 bp, Homo sapien
tcaactgtacaagcattacaaagac

SEQ ID NO: 5645519 - DNA, 25 bp, Homo sapien
tctcagcacggacataacgccgtaa

SEQ ID NO: 5645520 - DNA, 25 bp, Homo sapien
ttattatatattgagagcatgtgtc

SEQ ID NO: 5645521 - DNA, 25 bp, Homo sapien
ccagagaggaggagcctgcacatct

SEQ ID NO: 5645522 - DNA, 25 bp, Homo sapien
gaagagttgacttacacaacataac

SEQ ID NO: 5645523 - DNA, 25 bp, Homo sapien
cgaggcatcacggcccggcagggcc

SEQ ID NO: 5645524 - DNA, 25 bp, Homo sapien
gcctggactactttcctttcacaca

SEQ ID NO: 5645525 - DNA, 25 bp, Homo sapien
ggaacggtgggatctcctcactctc

SEQ ID NO: 5645526 - DNA, 25 bp, Homo sapien
aactgtacaagcattacaaagactc

SEQ ID NO: 5645527 - DNA, 25 bp, Homo sapien
gggtggaacggtgggatctcctcac

SEQ ID NO: 5645528 - DNA, 25 bp, Homo sapien
gttctcatagccatggttctgcatc

SEQ ID NO: 5645529 - DNA, 25 bp, Homo sapien
ctccacgatcccgtggctgatggtg

SEQ ID NO: 5645530 - DNA, 25 bp, Homo sapien
tccaataatctttgtctgagggcag

SEQ ID NO: 5645531 - DNA, 25 bp, Homo sapien
tctttgtggaaaaactggcactttt

SEQ ID NO: 5645532 - DNA, 25 bp, Homo sapien
cattggatcaacctccacgatcccg

SEQ ID NO: 5645533 - DNA, 25 bp, Homo sapien
agaatggaaattgcagttctacagt

SEQ ID NO: 5645534 - DNA, 25 bp, Homo sapien
aacaaagcgactcttgcattgcttt

SEQ ID NO: 5645535 - DNA, 25 bp, Homo sapien
tgcttccttctctaaagctttaacc

SEQ ID NO: 5645536 - DNA, 25 bp, Homo sapien
agcagacagctttgacatcatgagt

SEQ ID NO: 5645537 - DNA, 25 bp, Homo sapien
gcagttctacagtagtactttatat

SEQ ID NO: 5645538 - DNA, 25 bp, Homo sapien
aagctttaaccatggcttggaagtg

SEQ ID NO: 5645539 - DNA, 25 bp, Homo sapien
gcttccactcgggccaggtgggtct

SEQ ID NO: 5645540 - DNA, 25 bp, Homo sapien
cacatctggacatagttggaagggg

SEQ ID NO: 5645541 - DNA, 25 bp, Homo sapien
aggcagtgaactggtccatatctgc

SEQ ID NO: 5645542 - DNA, 25 bp, Homo sapien
atctgcaatagatcatttttttcat

SEQ ID NO: 5645543 - DNA, 25 bp, Homo sapien
cacaaacaaacctccccgtgttctc

SEQ ID NO: 5645544 - DNA, 25 bp, Homo sapien
tctgagggcagcacacatattcagt

SEQ ID NO: 5645545 - DNA, 25 bp, Homo sapien
aattgcagttctacagtagtacttt

SEQ ID NO: 5645546 - DNA, 25 bp, Homo sapien
gatctcctcactctcctcagagctc

SEQ ID NO: 5645547 - DNA, 25 bp, Homo sapien
gcatagtgggtagagacatgaatag

SEQ ID NO: 5645548 - DNA, 25 bp, Homo sapien
ctggagaatgcgatgaggccgtggc

SEQ ID NO: 5645549 - DNA, 25 bp, Homo sapien
gtactttgtagagcagagagaggct

SEQ ID NO: 5645550 - DNA, 25 bp, Homo sapien
gctggtaatgacggatggtatgtaa

SEQ ID NO: 5645551 - DNA, 25 bp, Homo sapien
tgaggcagtgaactggtccatatct

SEQ ID NO: 5645552 - DNA, 25 bp, Homo sapien
tttgtaggtggggttctcatagcca

SEQ ID NO: 5645553 - DNA, 25 bp, Homo sapien
gccaaggcaggcgccgtgagcccca

SEQ ID NO: 5645554 - DNA, 25 bp, Homo sapien
ctcttcttttgacacagatccaata

SEQ ID NO: 5645555 - DNA, 25 bp, Homo sapien
cttccagatctgcttcagtaggaaa

SEQ ID NO: 5645556 - DNA, 25 bp, Homo sapien
cagtcacaggaaaataaaaatacac

SEQ ID NO: 5645557 - DNA, 25 bp, Homo sapien
acaccacaggttaccagaaccttca

SEQ ID NO: 5645558 - DNA, 25 bp, Homo sapien
ccgtggctgatggtgccatactgcc

SEQ ID NO: 5645559 - DNA, 25 bp, Homo sapien
acagcctgcatataagtctattatt

SEQ ID NO: 5645560 - DNA, 25 bp, Homo sapien
tttccttaacatccagagtctcgtc

SEQ ID NO: 5645561 - DNA, 25 bp, Homo sapien
taaaagaatggaaattgcagttcta

SEQ ID NO: 5645562 - DNA, 25 bp, Homo sapien
ctcttggtgcctgttggatcaggtt

SEQ ID NO: 5645563 - DNA, 25 bp, Homo sapien
ttataaacatcatagtcttcctctt

SEQ ID NO: 5645564 - DNA, 25 bp, Homo sapien
ccttggtgacaggacttttatggag

SEQ ID NO: 5645565 - DNA, 25 bp, Homo sapien
ttccacagtgtccacagactcagtt

SEQ ID NO: 5645566 - DNA, 25 bp, Homo sapien
ggtgacaggacttttatggagacac

SEQ ID NO: 5645567 - DNA, 25 bp, Homo sapien
acaacagacagtgaagaatgtcaaa

SEQ ID NO: 5645568 - DNA, 25 bp, Homo sapien
tgagagcactgctactcagactgaa

SEQ ID NO: 5645569 - DNA, 25 bp, Homo sapien
ttggtgtggtcttctctgagtgaat

SEQ ID NO: 5645570 - DNA, 25 bp, Homo sapien
acctgcatccctccgccagggctgc

SEQ ID NO: 5645571 - DNA, 25 bp, Homo sapien
tctctaaagctttaaccatggcttg

SEQ ID NO: 5645572 - DNA, 25 bp, Homo sapien
aataaaagccaggacagtgaatgag

SEQ ID NO: 5645573 - DNA, 25 bp, Homo sapien
gtactttatatagtcctacagtcca

SEQ ID NO: 5645574 - DNA, 25 bp, Homo sapien
cgtgggatcttccggcccacctgca

SEQ ID NO: 5645575 - DNA, 25 bp, Homo sapien
ttttgcgagggtctctcacgtgctt

SEQ ID NO: 5645576 - DNA, 25 bp, Homo sapien
gctccctgccacctaaatctgcatc

SEQ ID NO: 5645577 - DNA, 25 bp, Homo sapien
acgagacacttgaaaggtgtaacaa

SEQ ID NO: 5645578 - DNA, 25 bp, Homo sapien
gtatttattgatgtgtttaaactgt

SEQ ID NO: 5645579 - DNA, 25 bp, Homo sapien
tccatatctgcacgctgctcctgaa

SEQ ID NO: 5645580 - DNA, 25 bp, Homo sapien
aaatatctgcaatagatcatttttt

SEQ ID NO: 5645581 - DNA, 25 bp, Homo sapien
gtaatctcggtcctccaccacttcc

SEQ ID NO: 5645582 - DNA, 25 bp, Homo sapien
tgcaagagcctcgatgtagccggcc

SEQ ID NO: 5645583 - DNA, 25 bp, Homo sapien
caccaggctgatgacgatgaccgtg

SEQ ID NO: 5645584 - DNA, 25 bp, Homo sapien
agcctgcacatctggacatagttgg

SEQ ID NO: 5645585 - DNA, 25 bp, Homo sapien
cagccaccatatataaagcgcacgc

SEQ ID NO: 5645586 - DNA, 25 bp, Homo sapien
gtcttccagatctgcttcagtagga

SEQ ID NO: 5645587 - DNA, 25 bp, Homo sapien
tccaggtatttgtaggtggggttct

SEQ ID NO: 5645588 - DNA, 25 bp, Homo sapien
cgatcggaatcgtgggatcttccgg

SEQ ID NO: 5645589 - DNA, 25 bp, Homo sapien
tctgcacgctgctcctgaaggagct

SEQ ID NO: 5645590 - DNA, 25 bp, Homo sapien
cctgcccgtggctgcggcggccgcg

SEQ ID NO: 5645591 - DNA, 25 bp, Homo sapien
gtcctttcacatcattttgcgaggg

SEQ ID NO: 5645592 - DNA, 25 bp, Homo sapien
atattaccatctttcacccatttaa

SEQ ID NO: 5645593 - DNA, 25 bp, Homo sapien
cagcgccaaggcaggcgccgtgagc

SEQ ID NO: 5645594 - DNA, 25 bp, Homo sapien
gaatgttcacatgcatatttaactt

SEQ ID NO: 5645595 - DNA, 25 bp, Homo sapien
cttactgttaatcactttctcttcg

SEQ ID NO: 5645596 - DNA, 25 bp, Homo sapien
cctttaacgtccttggtgacaggac

SEQ ID NO: 5645597 - DNA, 25 bp, Homo sapien
cctcagactcaaaattgttcctgtt

SEQ ID NO: 5645598 - DNA, 25 bp, Homo sapien
gcagaggagttggaggaatcatcgc

SEQ ID NO: 5645599 - DNA, 25 bp, Homo sapien
tggtcttctctgagtgaatgtcaca

SEQ ID NO: 5645600 - DNA, 25 bp, Homo sapien
ctcactctcctcagagctcacccgg

SEQ ID NO: 5645601 - DNA, 25 bp, Homo sapien
tccacagctgcttctgtgaagtctt

SEQ ID NO: 5645602 - DNA, 25 bp, Homo sapien
tcccggtggccgccatccctcgccg

SEQ ID NO: 5645603 - DNA, 25 bp, Homo sapien
ggtatccagccgtggaaacactgga

SEQ ID NO: 5645604 - DNA, 25 bp, Homo sapien
accagcagcagaagcaggagcctgc

SEQ ID NO: 5645605 - DNA, 25 bp, Homo sapien
gtcaatgaccatgttttcatccact

SEQ ID NO: 5645606 - DNA, 25 bp, Homo sapien
gaggcctccaactctctcggcattg

SEQ ID NO: 5645607 - DNA, 25 bp, Homo sapien
aacaaaaacagtcacaggaaaataa

SEQ ID NO: 5645608 - DNA, 25 bp, Homo sapien
gcgctccctgccacctaaatctgca

SEQ ID NO: 5645609 - DNA, 25 bp, Homo sapien
ttgtgatctgtagctctggatacat

SEQ ID NO: 5645610 - DNA, 25 bp, Homo sapien
gcatcttgttcaggtgacgctcttc

SEQ ID NO: 5645611 - DNA, 25 bp, Homo sapien
ccttcgttctcaggtagggctggga

SEQ ID NO: 5645612 - DNA, 25 bp, Homo sapien
tcttttgacacagatccaataatct

SEQ ID NO: 5645613 - DNA, 25 bp, Homo sapien
tggaataaaatgcctttaacgtcct

SEQ ID NO: 5645614 - DNA, 25 bp, Homo sapien
ttatattaccatctttcacccattt

SEQ ID NO: 5645615 - DNA, 25 bp, Homo sapien
tgtagccggccagcgccaaggcagg

SEQ ID NO: 5645616 - DNA, 25 bp, Homo sapien
ctttctcttcggcaccgatcagtcc

SEQ ID NO: 5645617 - DNA, 25 bp, Homo sapien
cagctgcttctgtgaagtcttccag

SEQ ID NO: 5645618 - DNA, 25 bp, Homo sapien
agacgcagcccctggcagcggctgc

SEQ ID NO: 5645619 - DNA, 25 bp, Homo sapien
aggctcagcaacagcaaatcctgtt

SEQ ID NO: 5645620 - DNA, 25 bp, Homo sapien
caggaaaataaaaatacaccacagg

SEQ ID NO: 5645621 - DNA, 25 bp, Homo sapien
aacagtcacaggaaaataaaaatac

SEQ ID NO: 5645622 - DNA, 25 bp, Homo sapien
accagaaccttcagatttaaaataa

SEQ ID NO: 5645623 - DNA, 25 bp, Homo sapien
ttggcagtcgatcggaatcgtggga

SEQ ID NO: 5645624 - DNA, 25 bp, Homo sapien
tcaaagctttccacagtgtccacag

SEQ ID NO: 5645625 - DNA, 25 bp, Homo sapien
cagactgaagtcctcccgcagtggg

SEQ ID NO: 5645626 - DNA, 25 bp, Homo sapien
tcgaagtaccaacgaggcatcacgg

SEQ ID NO: 5645627 - DNA, 25 bp, Homo sapien
atccagagtctcgtcaatgaccatg

SEQ ID NO: 5645628 - DNA, 25 bp, Homo sapien
catctggacatagttggaaggggaa

SEQ ID NO: 5645629 - DNA, 25 bp, Homo sapien
aatggaaattgcagttctacagtag

SEQ ID NO: 5645630 - DNA, 25 bp, Homo sapien
catactgcctcttcctcagcatcac

SEQ ID NO: 5645631 - DNA, 25 bp, Homo sapien
acagccatacaataatcctcagact

SEQ ID NO: 5645632 - DNA, 25 bp, Homo sapien
caaagtagaggccgagggtcagtgc

SEQ ID NO: 5645633 - DNA, 25 bp, Homo sapien
acaataatcctcagactcaaaattg

SEQ ID NO: 5645634 - DNA, 25 bp, Homo sapien
cctgagtcagacatgcctctttgac

SEQ ID NO: 5645635 - DNA, 25 bp, Homo sapien
aggagctcatcaatttcctcttgaa

SEQ ID NO: 5645636 - DNA, 25 bp, Homo sapien
cacaggttaccagaaccttcagatt

SEQ ID NO: 5645637 - DNA, 25 bp, Homo sapien
aggatgtcagacgcagcccctggca

SEQ ID NO: 5645638 - DNA, 25 bp, Homo sapien
gttaatcactttctcttcggcaccg

SEQ ID NO: 5645639 - DNA, 25 bp, Homo sapien
gaggagcctgcacatctggacatag

SEQ ID NO: 5645640 - DNA, 25 bp, Homo sapien
agatcatattaaggagtttgtaggt

SEQ ID NO: 5645641 - DNA, 25 bp, Homo sapien
gtggcgggtcagactgcaaggcagc

SEQ ID NO: 5645642 - DNA, 25 bp, Homo sapien
gtctgacatggtgccgtcgctgccg

SEQ ID NO: 5645643 - DNA, 25 bp, Homo sapien
tcccatttcccagtctgaatgttca

SEQ ID NO: 5645644 - DNA, 25 bp, Homo sapien
atataaggtcattccctgagtcaga

SEQ ID NO: 5645645 - DNA, 25 bp, Homo sapien
tagcaggacatcacttacaaattca

SEQ ID NO: 5645646 - DNA, 25 bp, Homo sapien
gctctggatacatctcctgacagta

SEQ ID NO: 5645647 - DNA, 25 bp, Homo sapien
cttaacatccagagtctcgtcaatg

SEQ ID NO: 5645648 - DNA, 25 bp, Homo sapien
ggccgcctccttggtgtggtcttct

SEQ ID NO: 5645649 - DNA, 25 bp, Homo sapien
tctgcctctctgctttggggaggtt

SEQ ID NO: 5645650 - DNA, 25 bp, Homo sapien
ttttgtttcaaagcagctcttggtg

SEQ ID NO: 5645651 - DNA, 25 bp, Homo sapien
gaccatgttttcatccactttattc

SEQ ID NO: 5645652 - DNA, 25 bp, Homo sapien
aggtagttctccagagccatccgac

SEQ ID NO: 5645653 - DNA, 25 bp, Homo sapien
agacgctggaataaaatgcctttaa

SEQ ID NO: 5645654 - DNA, 25 bp, Homo sapien
actctctcggcattgaaaatcattt

SEQ ID NO: 5645655 - DNA, 25 bp, Homo sapien
cccttggagaggtcgaagtaccaac

SEQ ID NO: 5645656 - DNA, 25 bp, Homo sapien
gtgatctgtagctctggatacatct

SEQ ID NO: 5645657 - DNA, 25 bp, Homo sapien
cttgaaaggtgtaacaaagcgactc

SEQ ID NO: 5645658 - DNA, 25 bp, Homo sapien
ctgaaagctcatttaaaaagggaat

SEQ ID NO: 5645659 - DNA, 25 bp, Homo sapien
tgcgatgaggccgtggcgggtcaga

SEQ ID NO: 5645660 - DNA, 25 bp, Homo sapien
tgcacatctggacatagttggaagg

SEQ ID NO: 5645661 - DNA, 25 bp, Homo sapien
aaaacattgcgatttgaggctcagc

SEQ ID NO: 5645662 - DNA, 25 bp, Homo sapien
cacagctgcttctgtgaagtcttcc

SEQ ID NO: 5645663 - DNA, 25 bp, Homo sapien
ttcaaagcagctcttggtgcctgtt

SEQ ID NO: 5645664 - DNA, 25 bp, Homo sapien
gtcacaggaaaataaaaatacacca

SEQ ID NO: 5645665 - DNA, 25 bp, Homo sapien
cagatctgcttcagtaggaaattca

SEQ ID NO: 5645666 - DNA, 25 bp, Homo sapien
ccgccgcagccaccatatataaagc

SEQ ID NO: 5645667 - DNA, 25 bp, Homo sapien
tctcctgacagtactgaagaacttc

SEQ ID NO: 5645668 - DNA, 25 bp, Homo sapien
gcaggacatcacttacaaattcacc

SEQ ID NO: 5645669 - DNA, 25 bp, Homo sapien
ctctcctcagagctcacccggacgt

SEQ ID NO: 5645670 - DNA, 25 bp, Homo sapien
gatgtcagacgcagcccctggcagc

SEQ ID NO: 5645671 - DNA, 25 bp, Homo sapien
gatggtgccatactgcctcttcctc

SEQ ID NO: 5645672 - DNA, 25 bp, Homo sapien
gtcttctctgagtgaatgtcacaag

SEQ ID NO: 5645673 - DNA, 25 bp, Homo sapien
cccgcagtgggcccacggattcccg

SEQ ID NO: 5645674 - DNA, 25 bp, Homo sapien
tatgtaagcgatctttgttctcagc

SEQ ID NO: 5645675 - DNA, 25 bp, Homo sapien
cagtgaatgaggctgaagagttgac

SEQ ID NO: 5645676 - DNA, 25 bp, Homo sapien
gtcctacagtccaggaggtcaggat

SEQ ID NO: 5645677 - DNA, 25 bp, Homo sapien
gccattacagttccctattccaccc

SEQ ID NO: 5645678 - DNA, 25 bp, Homo sapien
gctgcaagagcctcgatgtagccgg

SEQ ID NO: 5645679 - DNA, 25 bp, Homo sapien
catcattggttggcagaggagttgg

SEQ ID NO: 5645680 - DNA, 25 bp, Homo sapien
acatcattttgcgagggtctctcac

SEQ ID NO: 5645681 - DNA, 25 bp, Homo sapien
ggaacgacagcctgcatataagtct

SEQ ID NO: 5645682 - DNA, 25 bp, Homo sapien
ccattccttctttaccctgtccatt

SEQ ID NO: 5645683 - DNA, 25 bp, Homo sapien
ctcctttgaaggtgtcatagtagta

SEQ ID NO: 5645684 - DNA, 25 bp, Homo sapien
ggttaccagaaccttcagatttaaa

SEQ ID NO: 5645685 - DNA, 25 bp, Homo sapien
aggacttttatggagacacacaggt

SEQ ID NO: 5645686 - DNA, 25 bp, Homo sapien
ctcccactccagatccttcgttctc

SEQ ID NO: 5645687 - DNA, 25 bp, Homo sapien
cagaagcaggagcctgcccgtggct

SEQ ID NO: 5645688 - DNA, 25 bp, Homo sapien
aggctttggttcctcctttcttcaa

SEQ ID NO: 5645689 - DNA, 25 bp, Homo sapien
taggtggggttctcatagccatggt

SEQ ID NO: 5645690 - DNA, 25 bp, Homo sapien
tgccgaatctccagctgctccttag

SEQ ID NO: 5645691 - DNA, 25 bp, Homo sapien
ccagagtctcgtcaatgaccatgtt

SEQ ID NO: 5645692 - DNA, 25 bp, Homo sapien
atccactttattcttactgttaatc

SEQ ID NO: 5645693 - DNA, 25 bp, Homo sapien
tttgtagagcagagagaggctttgg

SEQ ID NO: 5645694 - DNA, 25 bp, Homo sapien
catgaatagggtcaaaggggaggaa

SEQ ID NO: 5645695 - DNA, 25 bp, Homo sapien
atctgctccaggtatttgtaggtgg

SEQ ID NO: 5645696 - DNA, 25 bp, Homo sapien
agaatgtcaaatataagctacaggc

SEQ ID NO: 5645697 - DNA, 25 bp, Homo sapien
actgcgatgaccagcaggccaatga

SEQ ID NO: 5645698 - DNA, 25 bp, Homo sapien
gctgctgcttggcagtcgatcggaa

SEQ ID NO: 5645699 - DNA, 25 bp, Homo sapien
tggagatgtgtcatcacctgggatt

SEQ ID NO: 5645700 - DNA, 25 bp, Homo sapien
aaaagaaaactacatcaaatatctg

SEQ ID NO: 5645701 - DNA, 25 bp, Homo sapien
tcctgaaagctcatttaaaaaggga

SEQ ID NO: 5645702 - DNA, 25 bp, Homo sapien
ccccgtcatcgcctcctgggagcag

SEQ ID NO: 5645703 - DNA, 25 bp, Homo sapien
ggattccgaaggaaagcagcagcgg

SEQ ID NO: 5645704 - DNA, 25 bp, Homo sapien
ccacaaaacattgcgatttgaggct

SEQ ID NO: 5645705 - DNA, 25 bp, Homo sapien
catgagtaatttccttgtctgacat

SEQ ID NO: 5645706 - DNA, 25 bp, Homo sapien
tctgtggaagcactggattccgaag

SEQ ID NO: 5645707 - DNA, 25 bp, Homo sapien
tgccagtgctggtgattctcacaca

SEQ ID NO: 5645708 - DNA, 25 bp, Homo sapien
gacagtgaagaatgtcaaatataag

SEQ ID NO: 5645709 - DNA, 25 bp, Homo sapien
attccttctttaccctgtccattcg

SEQ ID NO: 5645710 - DNA, 25 bp, Homo sapien
cgatgaccgtggcaatggccactgc

SEQ ID NO: 5645711 - DNA, 25 bp, Homo sapien
tttatggagacacacaggtatccag

SEQ ID NO: 5645712 - DNA, 25 bp, Homo sapien
ccaggtagttctccagagccatccg

SEQ ID NO: 5645713 - DNA, 25 bp, Homo sapien
tgcctttggagaaagtccagagagg

SEQ ID NO: 5645714 - DNA, 25 bp, Homo sapien
ccacatgggagcagcatgccgtagc

SEQ ID NO: 5645715 - DNA, 25 bp, Homo sapien
gccatactgcctcttcctcagcatc

SEQ ID NO: 5645716 - DNA, 25 bp, Homo sapien
cagtccaggaggtcaggatgtcaga

SEQ ID NO: 5645717 - DNA, 25 bp, Homo sapien
ggtctaccccacatgggagcagcat

SEQ ID NO: 5645718 - DNA, 25 bp, Homo sapien
atctttcacccatttaaaagaatgg

SEQ ID NO: 5645719 - DNA, 25 bp, Homo sapien
atagtagtaatctcggtcctccacc

SEQ ID NO: 5645720 - DNA, 25 bp, Homo sapien
tgcccgtggctgcggcggccgcggt

SEQ ID NO: 5645721 - DNA, 25 bp, Homo sapien
cgctctagcgcgcggctctcaagct

SEQ ID NO: 5645722 - DNA, 25 bp, Homo sapien
caggctaatctctgtggaagcactg

SEQ ID NO: 5645723 - DNA, 25 bp, Homo sapien
ccccaccagcagcagaagcaggagc

SEQ ID NO: 5645724 - DNA, 25 bp, Homo sapien
agcatcgacatcaactgtacaagca

SEQ ID NO: 5645725 - DNA, 25 bp, Homo sapien
ctcattgtagtcatctcctttgaag

SEQ ID NO: 5645726 - DNA, 25 bp, Homo sapien
actcgggccaggtgggtctccacca

SEQ ID NO: 5645727 - DNA, 25 bp, Homo sapien
ggtgattctcacacacctccatccg

SEQ ID NO: 5645728 - DNA, 25 bp, Homo sapien
gaggtcgaagtaccaacgaggcatc

SEQ ID NO: 5645729 - DNA, 25 bp, Homo sapien
ctcgccgggtcgctctagcgcgcgg

SEQ ID NO: 5645730 - DNA, 25 bp, Homo sapien
agtgggtagagacatgaatagggtc

SEQ ID NO: 5645731 - DNA, 25 bp, Homo sapien
ttgacttacacaacataaccggaac

SEQ ID NO: 5645732 - DNA, 25 bp, Homo sapien
tacaaagactcctgtgacgaaaaca

SEQ ID NO: 5645733 - DNA, 25 bp, Homo sapien
agggcagcacacatattcagtgcca

SEQ ID NO: 5645734 - DNA, 25 bp, Homo sapien
tacatcaaatatctgcaatagatca

SEQ ID NO: 5645735 - DNA, 25 bp, Homo sapien
tctgctttggggaggttcttagctt

SEQ ID NO: 5645736 - DNA, 25 bp, Homo sapien
tggaagcactggattccgaaggaaa

SEQ ID NO: 5645737 - DNA, 25 bp, Homo sapien
gctgcttctgtgaagtcttccagat

SEQ ID NO: 5645738 - DNA, 25 bp, Homo sapien
tgtggaaaaactggcacttttctgg

SEQ ID NO: 5645739 - DNA, 25 bp, Homo sapien
taccaacgaggcatcacggcccggc

SEQ ID NO: 5645740 - DNA, 25 bp, Homo sapien
gtggctgatggtgccatactgcctc

SEQ ID NO: 5645741 - DNA, 25 bp, Homo sapien
actcaaaattgttcctgttgccgcc

SEQ ID NO: 5645742 - DNA, 25 bp, Homo sapien
tgaagtcttccagatctgcttcagt

SEQ ID NO: 5645743 - DNA, 25 bp, Homo sapien
atgctggtaatgacggatggtatgt

SEQ ID NO: 5645744 - DNA, 25 bp, Homo sapien
caagagcctcgatgtagccggccag

SEQ ID NO: 5645745 - DNA, 25 bp, Homo sapien
tccagccgtggaaacactggacttc

SEQ ID NO: 5645746 - DNA, 25 bp, Homo sapien
atttcatctgggccgccttttctgg

SEQ ID NO: 5645747 - DNA, 25 bp, Homo sapien
ctcttcctcagcatcaccaggctga

SEQ ID NO: 5645748 - DNA, 25 bp, Homo sapien
ctttgactaccgtgtgccagtgctg

SEQ ID NO: 5645749 - DNA, 25 bp, Homo sapien
ctcttcggcaccgatcagtccccca

SEQ ID NO: 5645750 - DNA, 25 bp, Homo sapien
tctctagaagacgctggaataaaat

SEQ ID NO: 5645751 - DNA, 25 bp, Homo sapien
ggtctccaccagctgctgcttctca

SEQ ID NO: 5645752 - DNA, 25 bp, Homo sapien
tcagcaacagcaaatcctgttccgg

SEQ ID NO: 5645753 - DNA, 25 bp, Homo sapien
ctgatggtgccatactgcctcttcc

SEQ ID NO: 5645754 - DNA, 25 bp, Homo sapien
gtttcagggacagcctggactactt

SEQ ID NO: 5645755 - DNA, 25 bp, Homo sapien
gagtttgtaggtgaagtttaatctg

SEQ ID NO: 5645756 - DNA, 25 bp, Homo sapien
ggctgatggtgccatactgcctctt

SEQ ID NO: 5645757 - DNA, 25 bp, Homo sapien
catagcttccactcgggccaggtgg

SEQ ID NO: 5645758 - DNA, 25 bp, Homo sapien
ttcaatcacgtggagatgtgtcatc

SEQ ID NO: 5645759 - DNA, 25 bp, Homo sapien
tccttagccttctggaagcgagcat

SEQ ID NO: 5645760 - DNA, 25 bp, Homo sapien
cacaggggtctctgagattgaggca

SEQ ID NO: 5645761 - DNA, 25 bp, Homo sapien
gtcgatcggaatcgtgggatcttcc

SEQ ID NO: 5645762 - DNA, 25 bp, Homo sapien
ccgaatctccagctgctccttagcc

SEQ ID NO: 5645763 - DNA, 25 bp, Homo sapien
gttggaggaatcatcgctttacaca

SEQ ID NO: 5645764 - DNA, 25 bp, Homo sapien
cggcggccgcggtcccggtggccgc

SEQ ID NO: 5645765 - DNA, 25 bp, Homo sapien
tggaactagcaggacatcacttaca

SEQ ID NO: 5645766 - DNA, 25 bp, Homo sapien
ggctaatctctgtggaagcactgga

SEQ ID NO: 5645767 - DNA, 25 bp, Homo sapien
aaagaagtagtcagtggagtttgta

SEQ ID NO: 5645768 - DNA, 25 bp, Homo sapien
tacaaactccactgactacttcttt

SEQ ID NO: 5645769 - DNA, 25 bp, Homo sapien
ccgcgggcgttcacaagtggtgctc

SEQ ID NO: 5645770 - DNA, 25 bp, Homo sapien
gagcaccacttgtgaacgcccgcgg

SEQ ID NO: 5645771 - DNA, 25 bp, Homo sapien
gagtctcatatctccggcgtcggtg

SEQ ID NO: 5645772 - DNA, 25 bp, Homo sapien
caccgacgccggagatatgagactc

SEQ ID NO: 5645773 - DNA, 25 bp, Homo sapien
gaggcgaaagccggccggagcccgt

SEQ ID NO: 5645774 - DNA, 25 bp, Homo sapien
acgggctccggccggctttcgcctc

SEQ ID NO: 5645775 - DNA, 25 bp, Homo sapien
gaacggccagaggaagagggagcga

SEQ ID NO: 5645776 - DNA, 25 bp, Homo sapien
tcgctccctcttcctctggccgttc

SEQ ID NO: 5645777 - DNA, 25 bp, Homo sapien
ggtggcactgcagggcccggagccg

SEQ ID NO: 5645778 - DNA, 25 bp, Homo sapien
cggctccgggccctgcagtgccacc

SEQ ID NO: 5645779 - DNA, 25 bp, Homo sapien
tctcctgtcctaacaccaagcctgg

SEQ ID NO: 5645780 - DNA, 25 bp, Homo sapien
gctcacgcctataatcccagcactt

SEQ ID NO: 5645781 - DNA, 25 bp, Homo sapien
gccccatgaaattgccccaatagaa

SEQ ID NO: 5645782 - DNA, 25 bp, Homo sapien
tccacaccgggctgccttaatctgt

SEQ ID NO: 5645783 - DNA, 25 bp, Homo sapien
tgaggagaagatctgcagaagatga

SEQ ID NO: 5645784 - DNA, 25 bp, Homo sapien
ggcggaggttgcagtgagctgaaat

SEQ ID NO: 5645785 - DNA, 25 bp, Homo sapien
cggaggttgcagtgagctgaaatcg

SEQ ID NO: 5645786 - DNA, 25 bp, Homo sapien
tgcatctgttgctggctctgtggag

SEQ ID NO: 5645787 - DNA, 25 bp, Homo sapien
gttaaaagataaaaagacgccagag

SEQ ID NO: 5645788 - DNA, 25 bp, Homo sapien
ccagcctgggtgacagagcgagact

SEQ ID NO: 5645789 - DNA, 25 bp, Homo sapien
gtggaaggtggagaccaactccagg

SEQ ID NO: 5645790 - DNA, 25 bp, Homo sapien
cgagagatcatccctttgtctgcat

SEQ ID NO: 5645791 - DNA, 25 bp, Homo sapien
cacactccagcctgggtgacagagc

SEQ ID NO: 5645792 - DNA, 25 bp, Homo sapien
cggaactgcatcatctcgctggtaa

SEQ ID NO: 5645793 - DNA, 25 bp, Homo sapien
tgacctccaaatggtctgttttggc

SEQ ID NO: 5645794 - DNA, 25 bp, Homo sapien
gccagagttctcgctgaagaatgtg

SEQ ID NO: 5645795 - DNA, 25 bp, Homo sapien
aaacatggcatccctgacctccaaa

SEQ ID NO: 5645796 - DNA, 25 bp, Homo sapien
cagatcacctgaggtcaatagttcg

SEQ ID NO: 5645797 - DNA, 25 bp, Homo sapien
atgagaggtttcttacaggaagggg

SEQ ID NO: 5645798 - DNA, 25 bp, Homo sapien
aagctcattgcatctgttgctggct

SEQ ID NO: 5645799 - DNA, 25 bp, Homo sapien
ctgcttggagagtgacttgtaagat

SEQ ID NO: 5645800 - DNA, 25 bp, Homo sapien
aaccagatacattggtgaagtagga

SEQ ID NO: 5645801 - DNA, 25 bp, Homo sapien
atttacccaacacctgagcacaaag

SEQ ID NO: 5645802 - DNA, 25 bp, Homo sapien
cggccctgtgacggcctccagccca

SEQ ID NO: 5645803 - DNA, 25 bp, Homo sapien
aagacatcttaaagccagaaataat

SEQ ID NO: 5645804 - DNA, 25 bp, Homo sapien
ttaaatgactgagaatgcagctggt

SEQ ID NO: 5645805 - DNA, 25 bp, Homo sapien
aaggcacagtgccccatgaaattgc

SEQ ID NO: 5645806 - DNA, 25 bp, Homo sapien
aagtgcacagtgttacagtcgaatg

SEQ ID NO: 5645807 - DNA, 25 bp, Homo sapien
gtgggacgaatcacagaggttcaac

SEQ ID NO: 5645808 - DNA, 25 bp, Homo sapien
gggagaagagaagctcattgcatct

SEQ ID NO: 5645809 - DNA, 25 bp, Homo sapien
gtgctgaggtccaggcagtgttctc

SEQ ID NO: 5645810 - DNA, 25 bp, Homo sapien
gagaatgcagctggtaaagttggaa

SEQ ID NO: 5645811 - DNA, 25 bp, Homo sapien
agagcgagactgtgtttcaaagaaa

SEQ ID NO: 5645812 - DNA, 25 bp, Homo sapien
ggttgcagtgagctgaaatcgcgta

SEQ ID NO: 5645813 - DNA, 25 bp, Homo sapien
aaatacaaaaaattagccaggtgtg

SEQ ID NO: 5645814 - DNA, 25 bp, Homo sapien
tcattgcatctgttgctggctctgt

SEQ ID NO: 5645815 - DNA, 25 bp, Homo sapien
gtgaaacggcagaagacccactttc

SEQ ID NO: 5645816 - DNA, 25 bp, Homo sapien
ttggagagtgacttgtaagatgctg

SEQ ID NO: 5645817 - DNA, 25 bp, Homo sapien
atctgcagaagatgagcttgcaatg

SEQ ID NO: 5645818 - DNA, 25 bp, Homo sapien
ggcgggcagatcacctgaggtcaat

SEQ ID NO: 5645819 - DNA, 25 bp, Homo sapien
gaaataatggaggagattgtgatgg

SEQ ID NO: 5645820 - DNA, 25 bp, Homo sapien
taacttgtggatgattcagagttaa

SEQ ID NO: 5645821 - DNA, 25 bp, Homo sapien
ctgctttctcctgtcctaacaccaa

SEQ ID NO: 5645822 - DNA, 25 bp, Homo sapien
tttctcctgtcctaacaccaagcct

SEQ ID NO: 5645823 - DNA, 25 bp, Homo sapien
tgatgtgtggtccccatatgtggct

SEQ ID NO: 5645824 - DNA, 25 bp, Homo sapien
gaacctgggaggcggaggttgcagt

SEQ ID NO: 5645825 - DNA, 25 bp, Homo sapien
cctgtactgctatgaagcatccctt

SEQ ID NO: 5645826 - DNA, 25 bp, Homo sapien
ttggaacaggagggataaggaggtg

SEQ ID NO: 5645827 - DNA, 25 bp, Homo sapien
actcactgtcattcacaaggcacag

SEQ ID NO: 5645828 - DNA, 25 bp, Homo sapien
agtaggagacatcgtagtgggacga

SEQ ID NO: 5645829 - DNA, 25 bp, Homo sapien
aacacctgagcacaaagaagaggaa

SEQ ID NO: 5645830 - DNA, 25 bp, Homo sapien
acaggcctgctttctcctgtcctaa

SEQ ID NO: 5645831 - DNA, 25 bp, Homo sapien
gagagctgaggagaagatctgcaga

SEQ ID NO: 5645832 - DNA, 25 bp, Homo sapien
tggagactgggaaagcaaagctgtt

SEQ ID NO: 5645833 - DNA, 25 bp, Homo sapien
ccttaatctgtcctgcttggagagt

SEQ ID NO: 5645834 - DNA, 25 bp, Homo sapien
agactgggccgcgacactaagaaac

SEQ ID NO: 5645835 - DNA, 25 bp, Homo sapien
agccagaaataatggaggagattgt

SEQ ID NO: 5645836 - DNA, 25 bp, Homo sapien
agctgaaatcgcgtaccacactcca

SEQ ID NO: 5645837 - DNA, 25 bp, Homo sapien
atgggagaagagaagctcattgcat

SEQ ID NO: 5645838 - DNA, 25 bp, Homo sapien
taatacagtgaatgttctgggtcca

SEQ ID NO: 5645839 - DNA, 25 bp, Homo sapien
tgccttaatctgtcctgcttggaga

SEQ ID NO: 5645840 - DNA, 25 bp, Homo sapien
gtagtcccagctatttgggaggctg

SEQ ID NO: 5645841 - DNA, 25 bp, Homo sapien
ttttgcttggttggaatctgatttt

SEQ ID NO: 5645842 - DNA, 25 bp, Homo sapien
ccaggcagtgttctctgacggagct

SEQ ID NO: 5645843 - DNA, 25 bp, Homo sapien
gaggtcaatagttcgagaccagcct

SEQ ID NO: 5645844 - DNA, 25 bp, Homo sapien
tcctttaaatgactgagaatgcagc

SEQ ID NO: 5645845 - DNA, 25 bp, Homo sapien
agctctttcaaagtgcacagtgtta

SEQ ID NO: 5645846 - DNA, 25 bp, Homo sapien
gttttcatcctataattgaagtagt

SEQ ID NO: 5645847 - DNA, 25 bp, Homo sapien
caccgggctgccttaatctgtcctg

SEQ ID NO: 5645848 - DNA, 25 bp, Homo sapien
tgtcttccactcactgtcattcaca

SEQ ID NO: 5645849 - DNA, 25 bp, Homo sapien
tgtggtgcctcagtgattctcggta

SEQ ID NO: 5645850 - DNA, 25 bp, Homo sapien
ttgacggccctgtgacggcctccag

SEQ ID NO: 5645851 - DNA, 25 bp, Homo sapien
gaggaagcagggggcttcattgcaa

SEQ ID NO: 5645852 - DNA, 25 bp, Homo sapien
aagaaaaatggagactgggaaagca

SEQ ID NO: 5645853 - DNA, 25 bp, Homo sapien
cctggccaacaaggtgaaaccccat

SEQ ID NO: 5645854 - DNA, 25 bp, Homo sapien
tggtgcctcagtgattctcggtaac

SEQ ID NO: 5645855 - DNA, 25 bp, Homo sapien
gaagatctgcagaagatgagcttgc

SEQ ID NO: 5645856 - DNA, 25 bp, Homo sapien
cggcttcggaactgcatcatctcgc

SEQ ID NO: 5645857 - DNA, 25 bp, Homo sapien
tcacgcctataatcccagcacttag

SEQ ID NO: 5645858 - DNA, 25 bp, Homo sapien
acgtatatgggagaagagaagctca

SEQ ID NO: 5645859 - DNA, 25 bp, Homo sapien
aatcacttgaacctgggaggcggag

SEQ ID NO: 5645860 - DNA, 25 bp, Homo sapien
tcacaaggcacagtgccccatgaaa

SEQ ID NO: 5645861 - DNA, 25 bp, Homo sapien
acggacacaggattcatgcggggcc

SEQ ID NO: 5645862 - DNA, 25 bp, Homo sapien
tagggaggccaaggcgggcagatca

SEQ ID NO: 5645863 - DNA, 25 bp, Homo sapien
gtgaagactgtgatgtgtggtcccc

SEQ ID NO: 5645864 - DNA, 25 bp, Homo sapien
aaacaagttgatctgtgtgaaagct

SEQ ID NO: 5645865 - DNA, 25 bp, Homo sapien
tgataccagcatcctgtactgctat

SEQ ID NO: 5645866 - DNA, 25 bp, Homo sapien
atgtactcagataaacatgaagaaa

SEQ ID NO: 5645867 - DNA, 25 bp, Homo sapien
cttgctgctctcgtccatgaacctt

SEQ ID NO: 5645868 - DNA, 25 bp, Homo sapien
gagtaaacaagttgatctgtgtgaa

SEQ ID NO: 5645869 - DNA, 25 bp, Homo sapien
ttcctatatcctttaaatgactgag

SEQ ID NO: 5645870 - DNA, 25 bp, Homo sapien
aacaacggcttcatctggatttacc

SEQ ID NO: 5645871 - DNA, 25 bp, Homo sapien
acaagttgatctgtgtgaaagcttt

SEQ ID NO: 5645872 - DNA, 25 bp, Homo sapien
ttagcgagagactgggccgcgacac

SEQ ID NO: 5645873 - DNA, 25 bp, Homo sapien
agtcgaatgggctcccatcctggaa

SEQ ID NO: 5645874 - DNA, 25 bp, Homo sapien
acagagcgagactgtgtttcaaaga

SEQ ID NO: 5645875 - DNA, 25 bp, Homo sapien
caacggcttcatctggatttaccca

SEQ ID NO: 5645876 - DNA, 25 bp, Homo sapien
caagcaggccaggcacggtggctca

SEQ ID NO: 5645877 - DNA, 25 bp, Homo sapien
atggcgatggagatgaggcttccag

SEQ ID NO: 5645878 - DNA, 25 bp, Homo sapien
gtaaacaagttgatctgtgtgaaag

SEQ ID NO: 5645879 - DNA, 25 bp, Homo sapien
ttcatgatttgccatgtggtgcctc

SEQ ID NO: 5645880 - DNA, 25 bp, Homo sapien
tggaacgtatatgggagaagagaag

SEQ ID NO: 5645881 - DNA, 25 bp, Homo sapien
ttgaacctgggaggcggaggttgca

SEQ ID NO: 5645882 - DNA, 25 bp, Homo sapien
gagaagatctgcagaagatgagctt

SEQ ID NO: 5645883 - DNA, 25 bp, Homo sapien
ctaagaaacatctagtggtgccggg

SEQ ID NO: 5645884 - DNA, 25 bp, Homo sapien
cccctccctggtgaaacggcagaag

SEQ ID NO: 5645885 - DNA, 25 bp, Homo sapien
gcctcagtgattctcggtaacaacg

SEQ ID NO: 5645886 - DNA, 25 bp, Homo sapien
cagagttctcgctgaagaatgtgag

SEQ ID NO: 5645887 - DNA, 25 bp, Homo sapien
atcctggaataatatggagaatcct

SEQ ID NO: 5645888 - DNA, 25 bp, Homo sapien
atgaacagtgcttccttgggttgcc

SEQ ID NO: 5645889 - DNA, 25 bp, Homo sapien
tcgcgtaccacactccagcctgggt

SEQ ID NO: 5645890 - DNA, 25 bp, Homo sapien
aatggagactgggaaagcaaagctg

SEQ ID NO: 5645891 - DNA, 25 bp, Homo sapien
gtgtgaaagctttgaaaaccagata

SEQ ID NO: 5645892 - DNA, 25 bp, Homo sapien
cacatcagatcaaagacatcttaaa

SEQ ID NO: 5645893 - DNA, 25 bp, Homo sapien
ttgcttggttggaatctgattttct

SEQ ID NO: 5645894 - DNA, 25 bp, Homo sapien
agaggatgatgctgtatgataccag

SEQ ID NO: 5645895 - DNA, 25 bp, Homo sapien
ttaaagccagaaataatggaggaga

SEQ ID NO: 5645896 - DNA, 25 bp, Homo sapien
ttctctgacggagctgtctctttgc

SEQ ID NO: 5645897 - DNA, 25 bp, Homo sapien
agcacttagggaggccaaggcgggc

SEQ ID NO: 5645898 - DNA, 25 bp, Homo sapien
gagcctgtctctcttgctgatcgag

SEQ ID NO: 5645899 - DNA, 25 bp, Homo sapien
tcagatcaaagacatcttaaagcca

SEQ ID NO: 5645900 - DNA, 25 bp, Homo sapien
gtgtggtggtgtgcacctgtagtcc

SEQ ID NO: 5645901 - DNA, 25 bp, Homo sapien
aaaattagccaggtgtggtggtgtg

SEQ ID NO: 5645902 - DNA, 25 bp, Homo sapien
cagcccacaggcctgctttctcctg

SEQ ID NO: 5645903 - DNA, 25 bp, Homo sapien
aagcatcccttccacatcagatcaa

SEQ ID NO: 5645904 - DNA, 25 bp, Homo sapien
gagagtaaacaagttgatctgtgtg

SEQ ID NO: 5645905 - DNA, 25 bp, Homo sapien
gagctgaggagaagatctgcagaag

SEQ ID NO: 5645906 - DNA, 25 bp, Homo sapien
gcatcctgtactgctatgaagcatc

SEQ ID NO: 5645907 - DNA, 25 bp, Homo sapien
gaggctgaggtgggagaatcacttg

SEQ ID NO: 5645908 - DNA, 25 bp, Homo sapien
tggtgtgcacctgtagtcccagcta

SEQ ID NO: 5645909 - DNA, 25 bp, Homo sapien
gctcattgcatctgttgctggctct

SEQ ID NO: 5645910 - DNA, 25 bp, Homo sapien
gtgccccatgaaattgccccaatag

SEQ ID NO: 5645911 - DNA, 25 bp, Homo sapien
gaaatcgcgtaccacactccagcct

SEQ ID NO: 5645912 - DNA, 25 bp, Homo sapien
acacaggattcatgcggggccatgg

SEQ ID NO: 5645913 - DNA, 25 bp, Homo sapien
gagattgtgatggaaacacgccaga

SEQ ID NO: 5645914 - DNA, 25 bp, Homo sapien
gttaaccaagcaggccaggcacggt

SEQ ID NO: 5645915 - DNA, 25 bp, Homo sapien
agcgagagactgggccgcgacacta

SEQ ID NO: 5645916 - DNA, 25 bp, Homo sapien
aggggaccttatcagtgctgaggtc

SEQ ID NO: 5645917 - DNA, 25 bp, Homo sapien
aacctggagcctgtctctcttgctg

SEQ ID NO: 5645918 - DNA, 25 bp, Homo sapien
tatcctttaaatgactgagaatgca

SEQ ID NO: 5645919 - DNA, 25 bp, Homo sapien
cctgtgacggcctccagcccacagg

SEQ ID NO: 5645920 - DNA, 25 bp, Homo sapien
tcgagaggtgatatcccggcttcgg

SEQ ID NO: 5645921 - DNA, 25 bp, Homo sapien
tcacagaggttcaacagaagaggtg

SEQ ID NO: 5645922 - DNA, 25 bp, Homo sapien
gtggtggtgtgcacctgtagtccca

SEQ ID NO: 5645923 - DNA, 25 bp, Homo sapien
gggaggctgaggtgggagaatcact

SEQ ID NO: 5645924 - DNA, 25 bp, Homo sapien
caggagggataaggaggtgctccag

SEQ ID NO: 5645925 - DNA, 25 bp, Homo sapien
gcgacactaagaaacatctagtggt

SEQ ID NO: 5645926 - DNA, 25 bp, Homo sapien
cggtaacaacggcttcatctggatt

SEQ ID NO: 5645927 - DNA, 25 bp, Homo sapien
gccctgtgacggcctccagcccaca

SEQ ID NO: 5645928 - DNA, 25 bp, Homo sapien
gaagtaggagacatcgtagtgggac

SEQ ID NO: 5645929 - DNA, 25 bp, Homo sapien
attgaagtagtgtggagcattaact

SEQ ID NO: 5645930 - DNA, 25 bp, Homo sapien
agtgttctctgacggagctgtctct

SEQ ID NO: 5645931 - DNA, 25 bp, Homo sapien
agaagacccactttcatgatttgcc

SEQ ID NO: 5645932 - DNA, 25 bp, Homo sapien
aataagcaaagaaaaatggagactg

SEQ ID NO: 5645933 - DNA, 25 bp, Homo sapien
ggtgacagagcgagactgtgtttca

SEQ ID NO: 5645934 - DNA, 25 bp, Homo sapien
caatgagaggtttcttacaggaagg

SEQ ID NO: 5645935 - DNA, 25 bp, Homo sapien
gaagactgtgatgtgtggtccccat

SEQ ID NO: 5645936 - DNA, 25 bp, Homo sapien
actcagaggatgatgctgtatgata

SEQ ID NO: 5645937 - DNA, 25 bp, Homo sapien
cagctgagtcccggtattagggaat

SEQ ID NO: 5645938 - DNA, 25 bp, Homo sapien
gccatggaacgtatatgggagaaga

SEQ ID NO: 5645939 - DNA, 25 bp, Homo sapien
tgtggagcattaacttgtggatgat

SEQ ID NO: 5645940 - DNA, 25 bp, Homo sapien
ctgtagtcccagctatttgggaggc

SEQ ID NO: 5645941 - DNA, 25 bp, Homo sapien
tgtatgataccagcatcctgtactg

SEQ ID NO: 5645942 - DNA, 25 bp, Homo sapien
ccaatagaaaacatggcatccctga

SEQ ID NO: 5645943 - DNA, 25 bp, Homo sapien
cacaccgggctgccttaatctgtcc

SEQ ID NO: 5645944 - DNA, 25 bp, Homo sapien
gccatagatgtgattatgtccacac

SEQ ID NO: 5645945 - DNA, 25 bp, Homo sapien
taaaagataaaaagacgccagagtt

SEQ ID NO: 5645946 - DNA, 25 bp, Homo sapien
aggttcaacagaagaggtggaaggt

SEQ ID NO: 5645947 - DNA, 25 bp, Homo sapien
cctggaataatatggagaatccttt

SEQ ID NO: 5645948 - DNA, 25 bp, Homo sapien
cgaatcacagaggttcaacagaaga

SEQ ID NO: 5645949 - DNA, 25 bp, Homo sapien
cccactttcatgatttgccatgtgg

SEQ ID NO: 5645950 - DNA, 25 bp, Homo sapien
cgggcagatcacctgaggtcaatag

SEQ ID NO: 5645951 - DNA, 25 bp, Homo sapien
cctataattgaagtagtgtggagca

SEQ ID NO: 5645952 - DNA, 25 bp, Homo sapien
gaacagtgcttccttgggttgccag

SEQ ID NO: 5645953 - DNA, 25 bp, Homo sapien
gggatacaatcactacggacacagg

SEQ ID NO: 5645954 - DNA, 25 bp, Homo sapien
tgtactgctatgaagcatcccttcc

SEQ ID NO: 5645955 - DNA, 25 bp, Homo sapien
ggtggctcacgcctataatcccagc

SEQ ID NO: 5645956 - DNA, 25 bp, Homo sapien
tcgagaccagcctggccaacaaggt

SEQ ID NO: 5645957 - DNA, 25 bp, Homo sapien
tcttagcgagagactgggccgcgac

SEQ ID NO: 5645958 - DNA, 25 bp, Homo sapien
catggaacgtatatgggagaagaga

SEQ ID NO: 5645959 - DNA, 25 bp, Homo sapien
agagactgggccgcgacactaagaa

SEQ ID NO: 5645960 - DNA, 25 bp, Homo sapien
tggagaatcctttgtcttccactca

SEQ ID NO: 5645961 - DNA, 25 bp, Homo sapien
gtcccggtattagggaatagtttca

SEQ ID NO: 5645962 - DNA, 25 bp, Homo sapien
ttttggcctccattcctatatcctt

SEQ ID NO: 5645963 - DNA, 25 bp, Homo sapien
tccattcctatatcctttaaatgac

SEQ ID NO: 5645964 - DNA, 25 bp, Homo sapien
gtgatggaaacacgccagaggcttt

SEQ ID NO: 5645965 - DNA, 25 bp, Homo sapien
actgtgatgtgtggtccccatatgt

SEQ ID NO: 5645966 - DNA, 25 bp, Homo sapien
tagggaatagtttcagctctttcaa

SEQ ID NO: 5645967 - DNA, 25 bp, Homo sapien
ggctgaggtgggagaatcacttgaa

SEQ ID NO: 5645968 - DNA, 25 bp, Homo sapien
ttatcagtgctgaggtccaggcagt

SEQ ID NO: 5645969 - DNA, 25 bp, Homo sapien
aatatggagaatcctttgtcttcca

SEQ ID NO: 5645970 - DNA, 25 bp, Homo sapien
tgaggtccaggcagtgttctctgac

SEQ ID NO: 5645971 - DNA, 25 bp, Homo sapien
tgtggctcagcaaagactcgagaga

SEQ ID NO: 5645972 - DNA, 25 bp, Homo sapien
ggaggagagctgaggagaagatctg

SEQ ID NO: 5645973 - DNA, 25 bp, Homo sapien
acaggaaggggaccttatcagtgct

SEQ ID NO: 5645974 - DNA, 25 bp, Homo sapien
ccactcactgtcattcacaaggcac

SEQ ID NO: 5645975 - DNA, 25 bp, Homo sapien
gcaaagctgttttcatcctataatt

SEQ ID NO: 5645976 - DNA, 25 bp, Homo sapien
ggagaatcacttgaacctgggaggc

SEQ ID NO: 5645977 - DNA, 25 bp, Homo sapien
gcacctgtagtcccagctatttggg

SEQ ID NO: 5645978 - DNA, 25 bp, Homo sapien
ctgctctcgtccatgaaccttcctg

SEQ ID NO: 5645979 - DNA, 25 bp, Homo sapien
gagaggtttcttacaggaaggggac

SEQ ID NO: 5645980 - DNA, 25 bp, Homo sapien
cccatatgtggctcagcaaagactc

SEQ ID NO: 5645981 - DNA, 25 bp, Homo sapien
acagtcgaatgggctcccatcctgg

SEQ ID NO: 5645982 - DNA, 25 bp, Homo sapien
acaaaaaattagccaggtgtggtgg

SEQ ID NO: 5645983 - DNA, 25 bp, Homo sapien
tctgcattgacggccctgtgacggc

SEQ ID NO: 5645984 - DNA, 25 bp, Homo sapien
cacagtgccccatgaaattgcccca

SEQ ID NO: 5645985 - DNA, 25 bp, Homo sapien
aggagagctgaggagaagatctgca

SEQ ID NO: 5645986 - DNA, 25 bp, Homo sapien
cacttagggaggccaaggcgggcag

SEQ ID NO: 5645987 - DNA, 25 bp, Homo sapien
ctgttttcatcctataattgaagta

SEQ ID NO: 5645988 - DNA, 25 bp, Homo sapien
gctttgaaaaccagatacattggtg

SEQ ID NO: 5645989 - DNA, 25 bp, Homo sapien
agacatcgtagtgggacgaatcaca

SEQ ID NO: 5645990 - DNA, 25 bp, Homo sapien
gctgtctctttgcacacgaggagcc

SEQ ID NO: 5645991 - DNA, 25 bp, Homo sapien
ggttgccagctgagtcccggtatta

SEQ ID NO: 5645992 - DNA, 25 bp, Homo sapien
ttgctggctctgtggagagagtaaa

SEQ ID NO: 5645993 - DNA, 25 bp, Homo sapien
tttcagctctttcaaagtgcacagt

SEQ ID NO: 5645994 - DNA, 25 bp, Homo sapien
tctcgtccatgaaccttcctggagg

SEQ ID NO: 5645995 - DNA, 25 bp, Homo sapien
aacagaagaggtggaaggtggagac

SEQ ID NO: 5645996 - DNA, 25 bp, Homo sapien
ggtctgttttggcctccattcctat

SEQ ID NO: 5645997 - DNA, 25 bp, Homo sapien
gataatacagtgaatgttctgggtc

SEQ ID NO: 5645998 - DNA, 25 bp, Homo sapien
tcagcaaagactcgagagatcatcc

SEQ ID NO: 5645999 - DNA, 25 bp, Homo sapien
catgaaattgccccaatagaaaaca

SEQ ID NO: 5646000 - DNA, 25 bp, Homo sapien
gcaggagtgaagactgtgatgtgtg

SEQ ID NO: 5646001 - DNA, 25 bp, Homo sapien
gaactgcatcatctcgctggtaact

SEQ ID NO: 5646002 - DNA, 25 bp, Homo sapien
aaaaaattagccaggtgtggtggtg

SEQ ID NO: 5646003 - DNA, 25 bp, Homo sapien
tccagcccacaggcctgctttctcc

SEQ ID NO: 5646004 - DNA, 25 bp, Homo sapien
agccttttgcttggttggaatctga

SEQ ID NO: 5646005 - DNA, 25 bp, Homo sapien
tgtggaccttgcaggagtgaagact

SEQ ID NO: 5646006 - DNA, 25 bp, Homo sapien
tggctctgtggagagagtaaacaag

SEQ ID NO: 5646007 - DNA, 25 bp, Homo sapien
tgctgatcgagaggtgatatcccgg

SEQ ID NO: 5646008 - DNA, 25 bp, Homo sapien
cctgggtggcagatgaacagtgctt

SEQ ID NO: 5646009 - DNA, 25 bp, Homo sapien
ccaggcacggtggctcacgcctata

SEQ ID NO: 5646010 - DNA, 25 bp, Homo sapien
tctgtcctgcttggagagtgacttg

SEQ ID NO: 5646011 - DNA, 25 bp, Homo sapien
agaggtggaaggtggagaccaactc

SEQ ID NO: 5646012 - DNA, 25 bp, Homo sapien
ctgagaatgcagctggtaaagttgg

SEQ ID NO: 5646013 - DNA, 25 bp, Homo sapien
aggcctgctttctcctgtcctaaca

SEQ ID NO: 5646014 - DNA, 25 bp, Homo sapien
gtattagggaatagtttcagctctt

SEQ ID NO: 5646015 - DNA, 25 bp, Homo sapien
gtctctcttgctgatcgagaggtga

SEQ ID NO: 5646016 - DNA, 25 bp, Homo sapien
gaccttatcagtgctgaggtccagg

SEQ ID NO: 5646017 - DNA, 25 bp, Homo sapien
gaagagaagctcattgcatctgttg

SEQ ID NO: 5646018 - DNA, 25 bp, Homo sapien
ctccaggctggattcggtcttgctg

SEQ ID NO: 5646019 - DNA, 25 bp, Homo sapien
gaaccttcctggaggagagctgagg

SEQ ID NO: 5646020 - DNA, 25 bp, Homo sapien
agatctgcagaagatgagcttgcaa

SEQ ID NO: 5646021 - DNA, 25 bp, Homo sapien
acagtgcttccttgggttgccagct

SEQ ID NO: 5646022 - DNA, 25 bp, Homo sapien
aaaccccatctctactaaaaataca

SEQ ID NO: 5646023 - DNA, 25 bp, Homo sapien
gcgtgttccttgtagccatagatgt

SEQ ID NO: 5646024 - DNA, 25 bp, Homo sapien
tgggccgcgacactaagaaacatct

SEQ ID NO: 5646025 - DNA, 25 bp, Homo sapien
atttgccatgtggtgcctcagtgat

SEQ ID NO: 5646026 - DNA, 25 bp, Homo sapien
ttcatgcggggccatggaacgtata

SEQ ID NO: 5646027 - DNA, 25 bp, Homo sapien
aaagccagaaataatggaggagatt

SEQ ID NO: 5646028 - DNA, 25 bp, Homo sapien
cagaagcacgggactgtggaccttg

SEQ ID NO: 5646029 - DNA, 25 bp, Homo sapien
tgaagcatcccttccacatcagatc

SEQ ID NO: 5646030 - DNA, 25 bp, Homo sapien
agcctcttagcgagagactgggccg

SEQ ID NO: 5646031 - DNA, 25 bp, Homo sapien
tggaataatatggagaatcctttgt

SEQ ID NO: 5646032 - DNA, 25 bp, Homo sapien
aagcaaagctgttttcatcctataa

SEQ ID NO: 5646033 - DNA, 25 bp, Homo sapien
tgtgatgtgtggtccccatatgtgg

SEQ ID NO: 5646034 - DNA, 25 bp, Homo sapien
gtatatgggagaagagaagctcatt

SEQ ID NO: 5646035 - DNA, 25 bp, Homo sapien
gttccttgtagccatagatgtgatt

SEQ ID NO: 5646036 - DNA, 25 bp, Homo sapien
tcatctggatttacccaacacctga

SEQ ID NO: 5646037 - DNA, 25 bp, Homo sapien
tcttccactcactgtcattcacaag

SEQ ID NO: 5646038 - DNA, 25 bp, Homo sapien
gcagccttttgcttggttggaatct

SEQ ID NO: 5646039 - DNA, 25 bp, Homo sapien
ttaatctgtcctgcttggagagtga

SEQ ID NO: 5646040 - DNA, 25 bp, Homo sapien
gaccttgcaggagtgaagactgtga

SEQ ID NO: 5646041 - DNA, 25 bp, Homo sapien
aagtagtgtggagcattaacttgtg

SEQ ID NO: 5646042 - DNA, 25 bp, Homo sapien
gtactcagataaacatgaagaaaat

SEQ ID NO: 5646043 - DNA, 25 bp, Homo sapien
ccttgcaggagtgaagactgtgatg

SEQ ID NO: 5646044 - DNA, 25 bp, Homo sapien
gtgcctcagtgattctcggtaacaa

SEQ ID NO: 5646045 - DNA, 25 bp, Homo sapien
tcccatcctggaataatatggagaa

SEQ ID NO: 5646046 - DNA, 25 bp, Homo sapien
taaccaagcaggccaggcacggtgg

SEQ ID NO: 5646047 - DNA, 25 bp, Homo sapien
aagctttgaaaaccagatacattgg

SEQ ID NO: 5646048 - DNA, 25 bp, Homo sapien
atgaggcttccagtggctcgcaagc

SEQ ID NO: 5646049 - DNA, 25 bp, Homo sapien
gaattattcatgataatacagtgaa

SEQ ID NO: 5646050 - DNA, 25 bp, Homo sapien
ttgccatgtggtgcctcagtgattc

SEQ ID NO: 5646051 - DNA, 25 bp, Homo sapien
cggggccatggaacgtatatgggag

SEQ ID NO: 5646052 - DNA, 25 bp, Homo sapien
gggaggcggaggttgcagtgagctg

SEQ ID NO: 5646053 - DNA, 25 bp, Homo sapien
tgggtggcagatgaacagtgcttcc

SEQ ID NO: 5646054 - DNA, 25 bp, Homo sapien
tgggttgccagctgagtcccggtat

SEQ ID NO: 5646055 - DNA, 25 bp, Homo sapien
tgcttccttgggttgccagctgagt

SEQ ID NO: 5646056 - DNA, 25 bp, Homo sapien
cactttcatgatttgccatgtggtg

SEQ ID NO: 5646057 - DNA, 25 bp, Homo sapien
cagagttaaaagataaaaagacgcc

SEQ ID NO: 5646058 - DNA, 25 bp, Homo sapien
acctgtagtcccagctatttgggag

SEQ ID NO: 5646059 - DNA, 25 bp, Homo sapien
acggcttcatctggatttacccaac

SEQ ID NO: 5646060 - DNA, 25 bp, Homo sapien
gggctgccttaatctgtcctgcttg

SEQ ID NO: 5646061 - DNA, 25 bp, Homo sapien
ccagctatttgggaggctgaggtgg

SEQ ID NO: 5646062 - DNA, 25 bp, Homo sapien
aagatgctgaattattcatgataat

SEQ ID NO: 5646063 - DNA, 25 bp, Homo sapien
gcttggagagtgacttgtaagatgc

SEQ ID NO: 5646064 - DNA, 25 bp, Homo sapien
atatcccggcttcggaactgcatca

SEQ ID NO: 5646065 - DNA, 25 bp, Homo sapien
ccatgaaccttcctggaggagagct

SEQ ID NO: 5646066 - DNA, 25 bp, Homo sapien
gctgagtcccggtattagggaatag

SEQ ID NO: 5646067 - DNA, 25 bp, Homo sapien
ttgcagtgagctgaaatcgcgtacc

SEQ ID NO: 5646068 - DNA, 25 bp, Homo sapien
cagtgctgaggtccaggcagtgttc

SEQ ID NO: 5646069 - DNA, 25 bp, Homo sapien
tttgaaaaccagatacattggtgaa

SEQ ID NO: 5646070 - DNA, 25 bp, Homo sapien
agaagctcattgcatctgttgctgg

SEQ ID NO: 5646071 - DNA, 25 bp, Homo sapien
tgagcttgcaatgagaggtttctta

SEQ ID NO: 5646072 - DNA, 25 bp, Homo sapien
agtgacttgtaagatgctgaattat

SEQ ID NO: 5646073 - DNA, 25 bp, Homo sapien
ataccagcatcctgtactgctatga

SEQ ID NO: 5646074 - DNA, 25 bp, Homo sapien
atgtgtggtccccatatgtggctca

SEQ ID NO: 5646075 - DNA, 25 bp, Homo sapien
gattcggtcttgctgctctcgtcca

SEQ ID NO: 5646076 - DNA, 25 bp, Homo sapien
gtggctcgcaagcctcttagcgaga

SEQ ID NO: 5646077 - DNA, 25 bp, Homo sapien
attaacttgtggatgattcagagtt

SEQ ID NO: 5646078 - DNA, 25 bp, Homo sapien
tgatttgccatgtggtgcctcagtg

SEQ ID NO: 5646079 - DNA, 25 bp, Homo sapien
agaataaagttaaccaagcaggcca

SEQ ID NO: 5646080 - DNA, 25 bp, Homo sapien
gaaacggcagaagacccactttcat

SEQ ID NO: 5646081 - DNA, 25 bp, Homo sapien
gccaacaaggtgaaaccccatctct

SEQ ID NO: 5646082 - DNA, 25 bp, Homo sapien
tgaagtagtgtggagcattaacttg

SEQ ID NO: 5646083 - DNA, 25 bp, Homo sapien
ctgaggtgggagaatcacttgaacc

SEQ ID NO: 5646084 - DNA, 25 bp, Homo sapien
aggtccaggcagtgttctctgacgg

SEQ ID NO: 5646085 - DNA, 25 bp, Homo sapien
agcgagactgtgtttcaaagaaaaa

SEQ ID NO: 5646086 - DNA, 25 bp, Homo sapien
ccgcgacactaagaaacatctagtg

SEQ ID NO: 5646087 - DNA, 25 bp, Homo sapien
tagccatagatgtgattatgtccac

SEQ ID NO: 5646088 - DNA, 25 bp, Homo sapien
cactacggacacaggattcatgcgg

SEQ ID NO: 5646089 - DNA, 25 bp, Homo sapien
attcatgataatacagtgaatgttc

SEQ ID NO: 5646090 - DNA, 25 bp, Homo sapien
gatgagcttgcaatgagaggtttct

SEQ ID NO: 5646091 - DNA, 25 bp, Homo sapien
cggcagaagacccactttcatgatt

SEQ ID NO: 5646092 - DNA, 25 bp, Homo sapien
aatctgattttctgttgcgtgttcc

SEQ ID NO: 5646093 - DNA, 25 bp, Homo sapien
ggccgcgacactaagaaacatctag

SEQ ID NO: 5646094 - DNA, 25 bp, Homo sapien
taactcagaggatgatgctgtatga

SEQ ID NO: 5646095 - DNA, 25 bp, Homo sapien
tcatctcgctggtaactcagaggat

SEQ ID NO: 5646096 - DNA, 25 bp, Homo sapien
aaggcgggcagatcacctgaggtca

SEQ ID NO: 5646097 - DNA, 25 bp, Homo sapien
gtcttgctgctctcgtccatgaacc

SEQ ID NO: 5646098 - DNA, 25 bp, Homo sapien
ggtgaaaccccatctctactaaaaa

SEQ ID NO: 5646099 - DNA, 25 bp, Homo sapien
tggagagagtaaacaagttgatctg

SEQ ID NO: 5646100 - DNA, 25 bp, Homo sapien
gatgctgaattattcatgataatac

SEQ ID NO: 5646101 - DNA, 25 bp, Homo sapien
aaagctgttttcatcctataattga

SEQ ID NO: 5646102 - DNA, 25 bp, Homo sapien
aggcagtgttctctgacggagctgt

SEQ ID NO: 5646103 - DNA, 25 bp, Homo sapien
cggagctgtctctttgcacacgagg

SEQ ID NO: 5646104 - DNA, 25 bp, Homo sapien
agcctggccaacaaggtgaaacccc

SEQ ID NO: 5646105 - DNA, 25 bp, Homo sapien
gcctgctttctcctgtcctaacacc

SEQ ID NO: 5646106 - DNA, 25 bp, Homo sapien
tgtcctgcttggagagtgacttgta

SEQ ID NO: 5646107 - DNA, 25 bp, Homo sapien
tgagctgaaatcgcgtaccacactc

SEQ ID NO: 5646108 - DNA, 25 bp, Homo sapien
tatgtccacaccgggctgccttaat

SEQ ID NO: 5646109 - DNA, 25 bp, Homo sapien
gaggtgatatcccggcttcggaact

SEQ ID NO: 5646110 - DNA, 25 bp, Homo sapien
tgttctgggtccatgtactcagata

SEQ ID NO: 5646111 - DNA, 25 bp, Homo sapien
accccatctctactaaaaatacaaa

SEQ ID NO: 5646112 - DNA, 25 bp, Homo sapien
atcatccctttgtctgcattgacgg

SEQ ID NO: 5646113 - DNA, 25 bp, Homo sapien
agaggttcaacagaagaggtggaag

SEQ ID NO: 5646114 - DNA, 25 bp, Homo sapien
gcacagtgttacagtcgaatgggct

SEQ ID NO: 5646115 - DNA, 25 bp, Homo sapien
atcccggcttcggaactgcatcatc

SEQ ID NO: 5646116 - DNA, 25 bp, Homo sapien
tcttacaggaaggggaccttatcag

SEQ ID NO: 5646117 - DNA, 25 bp, Homo sapien
gcccacaggcctgctttctcctgtc

SEQ ID NO: 5646118 - DNA, 25 bp, Homo sapien
gggtccatgtactcagataaacatg

SEQ ID NO: 5646119 - DNA, 25 bp, Homo sapien
ctacggacacaggattcatgcgggg

SEQ ID NO: 5646120 - DNA, 25 bp, Homo sapien
gactgggaaagcaaagctgttttca

SEQ ID NO: 5646121 - DNA, 25 bp, Homo sapien
aaatgactgagaatgcagctggtaa

SEQ ID NO: 5646122 - DNA, 25 bp, Homo sapien
ggtccccatatgtggctcagcaaag

SEQ ID NO: 5646123 - DNA, 25 bp, Homo sapien
ggcgatggagatgaggcttccagtg

SEQ ID NO: 5646124 - DNA, 25 bp, Homo sapien
ggtggtgtgcacctgtagtcccagc

SEQ ID NO: 5646125 - DNA, 25 bp, Homo sapien
tctctttgcacacgaggagcctgaa

SEQ ID NO: 5646126 - DNA, 25 bp, Homo sapien
tgcggggccatggaacgtatatggg

SEQ ID NO: 5646127 - DNA, 25 bp, Homo sapien
aatctgtcctgcttggagagtgact

SEQ ID NO: 5646128 - DNA, 25 bp, Homo sapien
ggttggaatctgattttctgttgcg

SEQ ID NO: 5646129 - DNA, 25 bp, Homo sapien
acggtggctcacgcctataatccca

SEQ ID NO: 5646130 - DNA, 25 bp, Homo sapien
agagatcatccctttgtctgcattg

SEQ ID NO: 5646131 - DNA, 25 bp, Homo sapien
cgaggagcctgaaatatggaaaact

SEQ ID NO: 5646132 - DNA, 25 bp, Homo sapien
tgctgaattattcatgataatacag

SEQ ID NO: 5646133 - DNA, 25 bp, Homo sapien
aggcttttggaacaggagggataag

SEQ ID NO: 5646134 - DNA, 25 bp, Homo sapien
aagatgagcttgcaatgagaggttt

SEQ ID NO: 5646135 - DNA, 25 bp, Homo sapien
ttacagtcgaatgggctcccatcct

SEQ ID NO: 5646136 - DNA, 25 bp, Homo sapien
cggtattagggaatagtttcagctc

SEQ ID NO: 5646137 - DNA, 25 bp, Homo sapien
gtcctaacaccaagcctgggtggca

SEQ ID NO: 5646138 - DNA, 25 bp, Homo sapien
ggcttccagtggctcgcaagcctct

SEQ ID NO: 5646139 - DNA, 25 bp, Homo sapien
ctgggtccatgtactcagataaaca

SEQ ID NO: 5646140 - DNA, 25 bp, Homo sapien
gctcagcaaagactcgagagatcat

SEQ ID NO: 5646141 - DNA, 25 bp, Homo sapien
tctagtggtgccgggggatacaatc

SEQ ID NO: 5646142 - DNA, 25 bp, Homo sapien
cttgtagccatagatgtgattatgt

SEQ ID NO: 5646143 - DNA, 25 bp, Homo sapien
gtccaggcagtgttctctgacggag

SEQ ID NO: 5646144 - DNA, 25 bp, Homo sapien
caatcactacggacacaggattcat

SEQ ID NO: 5646145 - DNA, 25 bp, Homo sapien
atggcatccctgacctccaaatggt

SEQ ID NO: 5646146 - DNA, 25 bp, Homo sapien
ctttcatgatttgccatgtggtgcc

SEQ ID NO: 5646147 - DNA, 25 bp, Homo sapien
ccagaaataatggaggagattgtga

SEQ ID NO: 5646148 - DNA, 25 bp, Homo sapien
ccatcctggaataatatggagaatc

SEQ ID NO: 5646149 - DNA, 25 bp, Homo sapien
tgcaatgagaggtttcttacaggaa

SEQ ID NO: 5646150 - DNA, 25 bp, Homo sapien
gggaatagtttcagctctttcaaag

SEQ ID NO: 5646151 - DNA, 25 bp, Homo sapien
gagactgggaaagcaaagctgtttt

SEQ ID NO: 5646152 - DNA, 25 bp, Homo sapien
gaaacacgccagaggcttttggaac

SEQ ID NO: 5646153 - DNA, 25 bp, Homo sapien
tgagcacaaagaagaggaagcaggg

SEQ ID NO: 5646154 - DNA, 25 bp, Homo sapien
gggaggccaaggcgggcagatcacc

SEQ ID NO: 5646155 - DNA, 25 bp, Homo sapien
tggctcacgcctataatcccagcac

SEQ ID NO: 5646156 - DNA, 25 bp, Homo sapien
cctttgtctgcattgacggccctgt

SEQ ID NO: 5646157 - DNA, 25 bp, Homo sapien
tccacatcagatcaaagacatctta

SEQ ID NO: 5646158 - DNA, 25 bp, Homo sapien
atggaggagattgtgatggaaacac

SEQ ID NO: 5646159 - DNA, 25 bp, Homo sapien
tggccaacaaggtgaaaccccatct

SEQ ID NO: 5646160 - DNA, 25 bp, Homo sapien
cggtcttgctgctctcgtccatgaa

SEQ ID NO: 5646161 - DNA, 25 bp, Homo sapien
ataaaaagacgccagagttctcgct

SEQ ID NO: 5646162 - DNA, 25 bp, Homo sapien
atcctataattgaagtagtgtggag

SEQ ID NO: 5646163 - DNA, 25 bp, Homo sapien
cgggactgtggaccttgcaggagtg

SEQ ID NO: 5646164 - DNA, 25 bp, Homo sapien
aaggaggtgctccagaagcacggga

SEQ ID NO: 5646165 - DNA, 25 bp, Homo sapien
gatgatgctgtatgataccagcatc

SEQ ID NO: 5646166 - DNA, 25 bp, Homo sapien
ggccaaggcgggcagatcacctgag

SEQ ID NO: 5646167 - DNA, 25 bp, Homo sapien
cgtagtgggacgaatcacagaggtt

SEQ ID NO: 5646168 - DNA, 25 bp, Homo sapien
tctgttgcgtgttccttgtagccat

SEQ ID NO: 5646169 - DNA, 25 bp, Homo sapien
agtgtggagcattaacttgtggatg

SEQ ID NO: 5646170 - DNA, 25 bp, Homo sapien
ctggtaactcagaggatgatgctgt

SEQ ID NO: 5646171 - DNA, 25 bp, Homo sapien
aatagttcgagaccagcctggccaa

SEQ ID NO: 5646172 - DNA, 25 bp, Homo sapien
cactccagcctgggtgacagagcga

SEQ ID NO: 5646173 - DNA, 25 bp, Homo sapien
gatgtgattatgtccacaccgggct

SEQ ID NO: 5646174 - DNA, 25 bp, Homo sapien
agataaaaagacgccagagttctcg

SEQ ID NO: 5646175 - DNA, 25 bp, Homo sapien
gacggccctgtgacggcctccagcc

SEQ ID NO: 5646176 - DNA, 25 bp, Homo sapien
gacactaagaaacatctagtggtgc

SEQ ID NO: 5646177 - DNA, 25 bp, Homo sapien
gtgtggtccccatatgtggctcagc

SEQ ID NO: 5646178 - DNA, 25 bp, Homo sapien
ctctttcaaagtgcacagtgttaca

SEQ ID NO: 5646179 - DNA, 25 bp, Homo sapien
gaggccaaggcgggcagatcacctg

SEQ ID NO: 5646180 - DNA, 25 bp, Homo sapien
gaataatatggagaatcctttgtct

SEQ ID NO: 5646181 - DNA, 25 bp, Homo sapien
atcccttccacatcagatcaaagac

SEQ ID NO: 5646182 - DNA, 25 bp, Homo sapien
cccttccacatcagatcaaagacat

SEQ ID NO: 5646183 - DNA, 25 bp, Homo sapien
ccatgtactcagataaacatgaaga

SEQ ID NO: 5646184 - DNA, 25 bp, Homo sapien
gagaccaactccaggctggattcgg

SEQ ID NO: 5646185 - DNA, 25 bp, Homo sapien
tttcttacaggaaggggaccttatc

SEQ ID NO: 5646186 - DNA, 25 bp, Homo sapien
ctataatcccagcacttagggaggc

SEQ ID NO: 5646187 - DNA, 25 bp, Homo sapien
acatcgtagtgggacgaatcacaga

SEQ ID NO: 5646188 - DNA, 25 bp, Homo sapien
aaggtggagaccaactccaggctgg

SEQ ID NO: 5646189 - DNA, 25 bp, Homo sapien
cttgctgatcgagaggtgatatccc

SEQ ID NO: 5646190 - DNA, 25 bp, Homo sapien
gaggcttccagtggctcgcaagcct

SEQ ID NO: 5646191 - DNA, 25 bp, Homo sapien
tcctgcttggagagtgacttgtaag

SEQ ID NO: 5646192 - DNA, 25 bp, Homo sapien
gaggtgggagaatcacttgaacctg

SEQ ID NO: 5646193 - DNA, 25 bp, Homo sapien
ttggaatctgattttctgttgcgtg

SEQ ID NO: 5646194 - DNA, 25 bp, Homo sapien
cccggtattagggaatagtttcagc

SEQ ID NO: 5646195 - DNA, 25 bp, Homo sapien
cttccagtggctcgcaagcctctta

SEQ ID NO: 5646196 - DNA, 25 bp, Homo sapien
tataattgaagtagtgtggagcatt

SEQ ID NO: 5646197 - DNA, 25 bp, Homo sapien
ggcagatcacctgaggtcaatagtt

SEQ ID NO: 5646198 - DNA, 25 bp, Homo sapien
tgttctctgacggagctgtctcttt

SEQ ID NO: 5646199 - DNA, 25 bp, Homo sapien
tatggagaatcctttgtcttccact

SEQ ID NO: 5646200 - DNA, 25 bp, Homo sapien
catcatctcgctggtaactcagagg

SEQ ID NO: 5646201 - DNA, 25 bp, Homo sapien
gcttggttggaatctgattttctgt

SEQ ID NO: 5646202 - DNA, 25 bp, Homo sapien
gagttctcgctgaagaatgtgagaa

SEQ ID NO: 5646203 - DNA, 25 bp, Homo sapien
aacatctagtggtgccgggggatac

SEQ ID NO: 5646204 - DNA, 25 bp, Homo sapien
tgtagccatagatgtgattatgtcc

SEQ ID NO: 5646205 - DNA, 25 bp, Homo sapien
acgccagagttctcgctgaagaatg

SEQ ID NO: 5646206 - DNA, 25 bp, Homo sapien
tgttgctggctctgtggagagagta

SEQ ID NO: 5646207 - DNA, 25 bp, Homo sapien
ggatttacccaacacctgagcacaa

SEQ ID NO: 5646208 - DNA, 25 bp, Homo sapien
ctcgctggtaactcagaggatgatg

SEQ ID NO: 5646209 - DNA, 25 bp, Homo sapien
cccatctctactaaaaatacaaaaa

SEQ ID NO: 5646210 - DNA, 25 bp, Homo sapien
ccacaggcctgctttctcctgtcct

SEQ ID NO: 5646211 - DNA, 25 bp, Homo sapien
gggctcccatcctggaataatatgg

SEQ ID NO: 5646212 - DNA, 25 bp, Homo sapien
ggagagtgacttgtaagatgctgaa

SEQ ID NO: 5646213 - DNA, 25 bp, Homo sapien
acagtgttacagtcgaatgggctcc

SEQ ID NO: 5646214 - DNA, 25 bp, Homo sapien
ttggttggaatctgattttctgttg

SEQ ID NO: 5646215 - DNA, 25 bp, Homo sapien
gctcccatcctggaataatatggag

SEQ ID NO: 5646216 - DNA, 25 bp, Homo sapien
acaggattcatgcggggccatggaa

SEQ ID NO: 5646217 - DNA, 25 bp, Homo sapien
ggcttcatctggatttacccaacac

SEQ ID NO: 5646218 - DNA, 25 bp, Homo sapien
ttacaggaaggggaccttatcagtg

SEQ ID NO: 5646219 - DNA, 25 bp, Homo sapien
agaggcttttggaacaggagggata

SEQ ID NO: 5646220 - DNA, 25 bp, Homo sapien
actgggccgcgacactaagaaacat

SEQ ID NO: 5646221 - DNA, 25 bp, Homo sapien
tgttacagtcgaatgggctcccatc

SEQ ID NO: 5646222 - DNA, 25 bp, Homo sapien
ccttttgcttggttggaatctgatt

SEQ ID NO: 5646223 - DNA, 25 bp, Homo sapien
taaagttaaccaagcaggccaggca

SEQ ID NO: 5646224 - DNA, 25 bp, Homo sapien
attgcaaacctggagcctgtctctc

SEQ ID NO: 5646225 - DNA, 25 bp, Homo sapien
agatcatccctttgtctgcattgac

SEQ ID NO: 5646226 - DNA, 25 bp, Homo sapien
atgataatacagtgaatgttctggg

SEQ ID NO: 5646227 - DNA, 25 bp, Homo sapien
atggtctgttttggcctccattcct

SEQ ID NO: 5646228 - DNA, 25 bp, Homo sapien
ctgggaggcggaggttgcagtgagc

SEQ ID NO: 5646229 - DNA, 25 bp, Homo sapien
tgacggcctccagcccacaggcctg

SEQ ID NO: 5646230 - DNA, 25 bp, Homo sapien
tcttaaagccagaaataatggagga

SEQ ID NO: 5646231 - DNA, 25 bp, Homo sapien
ccagcacttagggaggccaaggcgg

SEQ ID NO: 5646232 - DNA, 25 bp, Homo sapien
gtgttccttgtagccatagatgtga

SEQ ID NO: 5646233 - DNA, 25 bp, Homo sapien
catatgtggctcagcaaagactcga

SEQ ID NO: 5646234 - DNA, 25 bp, Homo sapien
ggtcaatagttcgagaccagcctgg

SEQ ID NO: 5646235 - DNA, 25 bp, Homo sapien
agctatttgggaggctgaggtggga

SEQ ID NO: 5646236 - DNA, 25 bp, Homo sapien
gcagatgaacagtgcttccttgggt

SEQ ID NO: 5646237 - DNA, 25 bp, Homo sapien
tggtgaagtaggagacatcgtagtg

SEQ ID NO: 5646238 - DNA, 25 bp, Homo sapien
agcacgggactgtggaccttgcagg

SEQ ID NO: 5646239 - DNA, 25 bp, Homo sapien
aataatggaggagattgtgatggaa

SEQ ID NO: 5646240 - DNA, 25 bp, Homo sapien
ctccagcctgggtgacagagcgaga

SEQ ID NO: 5646241 - DNA, 25 bp, Homo sapien
caaagaaaaatggagactgggaaag

SEQ ID NO: 5646242 - DNA, 25 bp, Homo sapien
gtgcacagtgttacagtcgaatggg

SEQ ID NO: 5646243 - DNA, 25 bp, Homo sapien
tgattatgtccacaccgggctgcct

SEQ ID NO: 5646244 - DNA, 25 bp, Homo sapien
caagcctgggtggcagatgaacagt

SEQ ID NO: 5646245 - DNA, 25 bp, Homo sapien
ttagccaggtgtggtggtgtgcacc

SEQ ID NO: 5646246 - DNA, 25 bp, Homo sapien
agcaaagaaaaatggagactgggaa

SEQ ID NO: 5646247 - DNA, 25 bp, Homo sapien
catgtggtgcctcagtgattctcgg

SEQ ID NO: 5646248 - DNA, 25 bp, Homo sapien
cagaagaggtggaaggtggagacca

SEQ ID NO: 5646249 - DNA, 25 bp, Homo sapien
ccaactccaggctggattcggtctt

SEQ ID NO: 5646250 - DNA, 25 bp, Homo sapien
accaagcctgggtggcagatgaaca

SEQ ID NO: 5646251 - DNA, 25 bp, Homo sapien
aggagaagatctgcagaagatgagc

SEQ ID NO: 5646252 - DNA, 25 bp, Homo sapien
ctgtgtgaaagctttgaaaaccaga

SEQ ID NO: 5646253 - DNA, 25 bp, Homo sapien
ggatgattcagagttaaaagataaa

SEQ ID NO: 5646254 - DNA, 25 bp, Homo sapien
gttcaacagaagaggtggaaggtgg

SEQ ID NO: 5646255 - DNA, 25 bp, Homo sapien
gattcatgcggggccatggaacgta

SEQ ID NO: 5646256 - DNA, 25 bp, Homo sapien
gtccatgaaccttcctggaggagag

SEQ ID NO: 5646257 - DNA, 25 bp, Homo sapien
gaaggggaccttatcagtgctgagg

SEQ ID NO: 5646258 - DNA, 25 bp, Homo sapien
gtggtccccatatgtggctcagcaa

SEQ ID NO: 5646259 - DNA, 25 bp, Homo sapien
ttctgggtccatgtactcagataaa

SEQ ID NO: 5646260 - DNA, 25 bp, Homo sapien
attcacaaggcacagtgccccatga

SEQ ID NO: 5646261 - DNA, 25 bp, Homo sapien
acaccaagcctgggtggcagatgaa

SEQ ID NO: 5646262 - DNA, 25 bp, Homo sapien
catctgttgctggctctgtggagag

SEQ ID NO: 5646263 - DNA, 25 bp, Homo sapien
acagtgaatgttctgggtccatgta

SEQ ID NO: 5646264 - DNA, 25 bp, Homo sapien
aaagataaaaagacgccagagttct

SEQ ID NO: 5646265 - DNA, 25 bp, Homo sapien
gaatcctttgtcttccactcactgt

SEQ ID NO: 5646266 - DNA, 25 bp, Homo sapien
actgtggaccttgcaggagtgaaga

SEQ ID NO: 5646267 - DNA, 25 bp, Homo sapien
aggctggattcggtcttgctgctct

SEQ ID NO: 5646268 - DNA, 25 bp, Homo sapien
tttccccctccctggtgaaacggca

SEQ ID NO: 5646269 - DNA, 25 bp, Homo sapien
gtagtgtggagcattaacttgtgga

SEQ ID NO: 5646270 - DNA, 25 bp, Homo sapien
tttcatcctataattgaagtagtgt

SEQ ID NO: 5646271 - DNA, 25 bp, Homo sapien
catctagtggtgccgggggatacaa

SEQ ID NO: 5646272 - DNA, 25 bp, Homo sapien
tgaaaaccagatacattggtgaagt

SEQ ID NO: 5646273 - DNA, 25 bp, Homo sapien
gctctcgtccatgaaccttcctgga

SEQ ID NO: 5646274 - DNA, 25 bp, Homo sapien
gttggaagaataaagttaaccaagc

SEQ ID NO: 5646275 - DNA, 25 bp, Homo sapien
caaagacatcttaaagccagaaata

SEQ ID NO: 5646276 - DNA, 25 bp, Homo sapien
agatgaacagtgcttccttgggttg

SEQ ID NO: 5646277 - DNA, 25 bp, Homo sapien
gaaaacatggcatccctgacctcca

SEQ ID NO: 5646278 - DNA, 25 bp, Homo sapien
gcattaacttgtggatgattcagag

SEQ ID NO: 5646279 - DNA, 25 bp, Homo sapien
tgatctgtgtgaaagctttgaaaac

SEQ ID NO: 5646280 - DNA, 25 bp, Homo sapien
tgggagaatcacttgaacctgggag

SEQ ID NO: 5646281 - DNA, 25 bp, Homo sapien
cccggcttcggaactgcatcatctc

SEQ ID NO: 5646282 - DNA, 25 bp, Homo sapien
tccccatatgtggctcagcaaagac

SEQ ID NO: 5646283 - DNA, 25 bp, Homo sapien
tgaatgttctgggtccatgtactca

SEQ ID NO: 5646284 - DNA, 25 bp, Homo sapien
atcgtagtgggacgaatcacagagg

SEQ ID NO: 5646285 - DNA, 25 bp, Homo sapien
gagaccagcctggccaacaaggtga

SEQ ID NO: 5646286 - DNA, 25 bp, Homo sapien
tagtggtgccgggggatacaatcac

SEQ ID NO: 5646287 - DNA, 25 bp, Homo sapien
gctggattcggtcttgctgctctcg

SEQ ID NO: 5646288 - DNA, 25 bp, Homo sapien
ccgggggatacaatcactacggaca

SEQ ID NO: 5646289 - DNA, 25 bp, Homo sapien
tttctgttgcgtgttccttgtagcc

SEQ ID NO: 5646290 - DNA, 25 bp, Homo sapien
ggactgtggaccttgcaggagtgaa

SEQ ID NO: 5646291 - DNA, 25 bp, Homo sapien
gagaggtgatatcccggcttcggaa

SEQ ID NO: 5646292 - DNA, 25 bp, Homo sapien
cacgaggagcctgaaatatggaaaa

SEQ ID NO: 5646293 - DNA, 25 bp, Homo sapien
gcagctggtaaagttggaagaataa

SEQ ID NO: 5646294 - DNA, 25 bp, Homo sapien
cagtgattctcggtaacaacggctt

SEQ ID NO: 5646295 - DNA, 25 bp, Homo sapien
accttcctggaggagagctgaggag

SEQ ID NO: 5646296 - DNA, 25 bp, Homo sapien
ataatatggagaatcctttgtcttc

SEQ ID NO: 5646297 - DNA, 25 bp, Homo sapien
agctgttttcatcctataattgaag

SEQ ID NO: 5646298 - DNA, 25 bp, Homo sapien
tcgctgaagaatgtgagaaaaaaaa

SEQ ID NO: 5646299 - DNA, 25 bp, Homo sapien
aagactcgagagatcatccctttgt

SEQ ID NO: 5646300 - DNA, 25 bp, Homo sapien
attttctgttgcgtgttccttgtag

SEQ ID NO: 5646301 - DNA, 25 bp, Homo sapien
ccaaggcgggcagatcacctgaggt

SEQ ID NO: 5646302 - DNA, 25 bp, Homo sapien
cactaagaaacatctagtggtgccg

SEQ ID NO: 5646303 - DNA, 25 bp, Homo sapien
gactgagaatgcagctggtaaagtt

SEQ ID NO: 5646304 - DNA, 25 bp, Homo sapien
cctgacctccaaatggtctgttttg

SEQ ID NO: 5646305 - DNA, 25 bp, Homo sapien
aggagcctgaaatatggaaaactag

SEQ ID NO: 5646306 - DNA, 25 bp, Homo sapien
cattcctatatcctttaaatgactg

SEQ ID NO: 5646307 - DNA, 25 bp, Homo sapien
aatgttctgggtccatgtactcaga

SEQ ID NO: 5646308 - DNA, 25 bp, Homo sapien
gtgtgcacctgtagtcccagctatt

SEQ ID NO: 5646309 - DNA, 25 bp, Homo sapien
gggccatggaacgtatatgggagaa

SEQ ID NO: 5646310 - DNA, 25 bp, Homo sapien
aggtggaaggtggagaccaactcca

SEQ ID NO: 5646311 - DNA, 25 bp, Homo sapien
ctgggaaagcaaagctgttttcatc

SEQ ID NO: 5646312 - DNA, 25 bp, Homo sapien
gagcctgaaatatggaaaactaggt

SEQ ID NO: 5646313 - DNA, 25 bp, Homo sapien
ggtgccgggggatacaatcactacg

SEQ ID NO: 5646314 - DNA, 25 bp, Homo sapien
atcctgtactgctatgaagcatccc

SEQ ID NO: 5646315 - DNA, 25 bp, Homo sapien
agtcccagctatttgggaggctgag

SEQ ID NO: 5646316 - DNA, 25 bp, Homo sapien
cttgcaatgagaggtttcttacagg

SEQ ID NO: 5646317 - DNA, 25 bp, Homo sapien
tgctgctctcgtccatgaaccttcc

SEQ ID NO: 5646318 - DNA, 25 bp, Homo sapien
gaggttgcagtgagctgaaatcgcg

SEQ ID NO: 5646319 - DNA, 25 bp, Homo sapien
agtgagctgaaatcgcgtaccacac

SEQ ID NO: 5646320 - DNA, 25 bp, Homo sapien
gcagggggcttcattgcaaacctgg

SEQ ID NO: 5646321 - DNA, 25 bp, Homo sapien
gtgctccagaagcacgggactgtgg

SEQ ID NO: 5646322 - DNA, 25 bp, Homo sapien
cttccttgggttgccagctgagtcc

SEQ ID NO: 5646323 - DNA, 25 bp, Homo sapien
ggtggagaccaactccaggctggat

SEQ ID NO: 5646324 - DNA, 25 bp, Homo sapien
aatcccagcacttagggaggccaag

SEQ ID NO: 5646325 - DNA, 25 bp, Homo sapien
aattagccaggtgtggtggtgtgca

SEQ ID NO: 5646326 - DNA, 25 bp, Homo sapien
tatgaagcatcccttccacatcaga

SEQ ID NO: 5646327 - DNA, 25 bp, Homo sapien
tgtccacaccgggctgccttaatct

SEQ ID NO: 5646328 - DNA, 25 bp, Homo sapien
atcctttgtcttccactcactgtca

SEQ ID NO: 5646329 - DNA, 25 bp, Homo sapien
agcctgggtggcagatgaacagtgc

SEQ ID NO: 5646330 - DNA, 25 bp, Homo sapien
cctccagcccacaggcctgctttct

SEQ ID NO: 5646331 - DNA, 25 bp, Homo sapien
acggcctccagcccacaggcctgct

SEQ ID NO: 5646332 - DNA, 25 bp, Homo sapien
aagacccactttcatgatttgccat

SEQ ID NO: 5646333 - DNA, 25 bp, Homo sapien
attgcatctgttgctggctctgtgg

SEQ ID NO: 5646334 - DNA, 25 bp, Homo sapien
ggcctccattcctatatcctttaaa

SEQ ID NO: 5646335 - DNA, 25 bp, Homo sapien
aataaagttaaccaagcaggccagg

SEQ ID NO: 5646336 - DNA, 25 bp, Homo sapien
acctgggaggcggaggttgcagtga

SEQ ID NO: 5646337 - DNA, 25 bp, Homo sapien
ctttaaatgactgagaatgcagctg

SEQ ID NO: 5646338 - DNA, 25 bp, Homo sapien
tgggtgacagagcgagactgtgttt

SEQ ID NO: 5646339 - DNA, 25 bp, Homo sapien
attggtgaagtaggagacatcgtag

SEQ ID NO: 5646340 - DNA, 25 bp, Homo sapien
cagtgccccatgaaattgccccaat

SEQ ID NO: 5646341 - DNA, 25 bp, Homo sapien
agagaagctcattgcatctgttgct

SEQ ID NO: 5646342 - DNA, 25 bp, Homo sapien
catagatgtgattatgtccacaccg

SEQ ID NO: 5646343 - DNA, 25 bp, Homo sapien
gccatgtggtgcctcagtgattctc

SEQ ID NO: 5646344 - DNA, 25 bp, Homo sapien
tggattcggtcttgctgctctcgtc

SEQ ID NO: 5646345 - DNA, 25 bp, Homo sapien
aagaaacatctagtggtgccggggg

SEQ ID NO: 5646346 - DNA, 25 bp, Homo sapien
gggaccttatcagtgctgaggtcca

SEQ ID NO: 5646347 - DNA, 25 bp, Homo sapien
ttcggtcttgctgctctcgtccatg

SEQ ID NO: 5646348 - DNA, 25 bp, Homo sapien
ggtgggagaatcacttgaacctggg

SEQ ID NO: 5646349 - DNA, 25 bp, Homo sapien
ttcggaactgcatcatctcgctggt

SEQ ID NO: 5646350 - DNA, 25 bp, Homo sapien
gctctgtggagagagtaaacaagtt

SEQ ID NO: 5646351 - DNA, 25 bp, Homo sapien
atgactgagaatgcagctggtaaag

SEQ ID NO: 5646352 - DNA, 25 bp, Homo sapien
aggagtgaagactgtgatgtgtggt

SEQ ID NO: 5646353 - DNA, 25 bp, Homo sapien
acaaggcacagtgccccatgaaatt

SEQ ID NO: 5646354 - DNA, 25 bp, Homo sapien
ttgcgtgttccttgtagccatagat

SEQ ID NO: 5646355 - DNA, 25 bp, Homo sapien
atcaaagacatcttaaagccagaaa

SEQ ID NO: 5646356 - DNA, 25 bp, Homo sapien
acaagcagccttttgcttggttgga

SEQ ID NO: 5646357 - DNA, 25 bp, Homo sapien
ggcatccctgacctccaaatggtct

SEQ ID NO: 5646358 - DNA, 25 bp, Homo sapien
gaagcacgggactgtggaccttgca

SEQ ID NO: 5646359 - DNA, 25 bp, Homo sapien
ccccaatagaaaacatggcatccct

SEQ ID NO: 5646360 - DNA, 25 bp, Homo sapien
cctcttagcgagagactgggccgcg

SEQ ID NO: 5646361 - DNA, 25 bp, Homo sapien
ggataaggaggtgctccagaagcac

SEQ ID NO: 5646362 - DNA, 25 bp, Homo sapien
tccttgtagccatagatgtgattat

SEQ ID NO: 5646363 - DNA, 25 bp, Homo sapien
gaatgcagctggtaaagttggaaga

SEQ ID NO: 5646364 - DNA, 25 bp, Homo sapien
gctatgaagcatcccttccacatca

SEQ ID NO: 5646365 - DNA, 25 bp, Homo sapien
tcacctgaggtcaatagttcgagac

SEQ ID NO: 5646366 - DNA, 25 bp, Homo sapien
gctggctctgtggagagagtaaaca

SEQ ID NO: 5646367 - DNA, 25 bp, Homo sapien
ccgggctgccttaatctgtcctgct

SEQ ID NO: 5646368 - DNA, 25 bp, Homo sapien
acttgtaagatgctgaattattcat

SEQ ID NO: 5646369 - DNA, 25 bp, Homo sapien
agatacattggtgaagtaggagaca

SEQ ID NO: 5646370 - DNA, 25 bp, Homo sapien
ctcagtgattctcggtaacaacggc

SEQ ID NO: 5646371 - DNA, 25 bp, Homo sapien
tcattcacaaggcacagtgccccat

SEQ ID NO: 5646372 - DNA, 25 bp, Homo sapien
cctttgtcttccactcactgtcatt

SEQ ID NO: 5646373 - DNA, 25 bp, Homo sapien
tgcaaacctggagcctgtctctctt

SEQ ID NO: 5646374 - DNA, 25 bp, Homo sapien
aatcacagaggttcaacagaagagg

SEQ ID NO: 5646375 - DNA, 25 bp, Homo sapien
ggagacatcgtagtgggacgaatca

SEQ ID NO: 5646376 - DNA, 25 bp, Homo sapien
tgccccaatagaaaacatggcatcc

SEQ ID NO: 5646377 - DNA, 25 bp, Homo sapien
tggcagatgaacagtgcttccttgg

SEQ ID NO: 5646378 - DNA, 25 bp, Homo sapien
ttggcctccattcctatatccttta

SEQ ID NO: 5646379 - DNA, 25 bp, Homo sapien
ggtaactcagaggatgatgctgtat

SEQ ID NO: 5646380 - DNA, 25 bp, Homo sapien
cttcctggaggagagctgaggagaa

SEQ ID NO: 5646381 - DNA, 25 bp, Homo sapien
ttacccaacacctgagcacaaagaa

SEQ ID NO: 5646382 - DNA, 25 bp, Homo sapien
ctgaaatcgcgtaccacactccagc

SEQ ID NO: 5646383 - DNA, 25 bp, Homo sapien
gaccagcctggccaacaaggtgaaa

SEQ ID NO: 5646384 - DNA, 25 bp, Homo sapien
gcagtgttctctgacggagctgtct

SEQ ID NO: 5646385 - DNA, 25 bp, Homo sapien
ttgcaggagtgaagactgtgatgtg

SEQ ID NO: 5646386 - DNA, 25 bp, Homo sapien
gatcacctgaggtcaatagttcgag

SEQ ID NO: 5646387 - DNA, 25 bp, Homo sapien
taattgaagtagtgtggagcattaa

SEQ ID NO: 5646388 - DNA, 25 bp, Homo sapien
ctgcagaagatgagcttgcaatgag

SEQ ID NO: 5646389 - DNA, 25 bp, Homo sapien
attgccccaatagaaaacatggcat

SEQ ID NO: 5646390 - DNA, 25 bp, Homo sapien
aggatgatgctgtatgataccagca

SEQ ID NO: 5646391 - DNA, 25 bp, Homo sapien
ggctcgcaagcctcttagcgagaga

SEQ ID NO: 5646392 - DNA, 25 bp, Homo sapien
tggagcattaacttgtggatgattc

SEQ ID NO: 5646393 - DNA, 25 bp, Homo sapien
tcctgtcctaacaccaagcctgggt

SEQ ID NO: 5646394 - DNA, 25 bp, Homo sapien
tccctttgtctgcattgacggccct

SEQ ID NO: 5646395 - DNA, 25 bp, Homo sapien
ctcgagagatcatccctttgtctgc

SEQ ID NO: 5646396 - DNA, 25 bp, Homo sapien
gtgattctcggtaacaacggcttca

SEQ ID NO: 5646397 - DNA, 25 bp, Homo sapien
gtggatgattcagagttaaaagata

SEQ ID NO: 5646398 - DNA, 25 bp, Homo sapien
gggacgaatcacagaggttcaacag

SEQ ID NO: 5646399 - DNA, 25 bp, Homo sapien
tagaaaacatggcatccctgacctc

SEQ ID NO: 5646400 - DNA, 25 bp, Homo sapien
tgttgcgtgttccttgtagccatag

SEQ ID NO: 5646401 - DNA, 25 bp, Homo sapien
actgcatcatctcgctggtaactca

SEQ ID NO: 5646402 - DNA, 25 bp, Homo sapien
gcatcccttccacatcagatcaaag

SEQ ID NO: 5646403 - DNA, 25 bp, Homo sapien
gttgatctgtgtgaaagctttgaaa

SEQ ID NO: 5646404 - DNA, 25 bp, Homo sapien
ctgtcctaacaccaagcctgggtgg

SEQ ID NO: 5646405 - DNA, 25 bp, Homo sapien
atggagatgaggcttccagtggctc

SEQ ID NO: 5646406 - DNA, 25 bp, Homo sapien
gacggagctgtctctttgcacacga

SEQ ID NO: 5646407 - DNA, 25 bp, Homo sapien
tgcacacgaggagcctgaaatatgg

SEQ ID NO: 5646408 - DNA, 25 bp, Homo sapien
tctcgctgaagaatgtgagaaaaaa

SEQ ID NO: 5646409 - DNA, 25 bp, Homo sapien
tgttttggcctccattcctatatcc

SEQ ID NO: 5646410 - DNA, 25 bp, Homo sapien
tcattgcaaacctggagcctgtctc

SEQ ID NO: 5646411 - DNA, 25 bp, Homo sapien
caaagactcgagagatcatcccttt

SEQ ID NO: 5646412 - DNA, 25 bp, Homo sapien
ttgtaagatgctgaattattcatga

SEQ ID NO: 5646413 - DNA, 25 bp, Homo sapien
gagctgtctctttgcacacgaggag

SEQ ID NO: 5646414 - DNA, 25 bp, Homo sapien
gaaagcaaagctgttttcatcctat

SEQ ID NO: 5646415 - DNA, 25 bp, Homo sapien
ctgaaatatggaaaactaggtcagg

SEQ ID NO: 5646416 - DNA, 25 bp, Homo sapien
aggtgctccagaagcacgggactgt

SEQ ID NO: 5646417 - DNA, 25 bp, Homo sapien
atctgtgtgaaagctttgaaaacca

SEQ ID NO: 5646418 - DNA, 25 bp, Homo sapien
ggaatctgattttctgttgcgtgtt

SEQ ID NO: 5646419 - DNA, 25 bp, Homo sapien
ttttggaacaggagggataaggagg

SEQ ID NO: 5646420 - DNA, 25 bp, Homo sapien
ggtgatatcccggcttcggaactgc

SEQ ID NO: 5646421 - DNA, 25 bp, Homo sapien
tctgattttctgttgcgtgttcctt

SEQ ID NO: 5646422 - DNA, 25 bp, Homo sapien
atacagtgaatgttctgggtccatg

SEQ ID NO: 5646423 - DNA, 25 bp, Homo sapien
tcatcctataattgaagtagtgtgg

SEQ ID NO: 5646424 - DNA, 25 bp, Homo sapien
aaggtgaaaccccatctctactaaa

SEQ ID NO: 5646425 - DNA, 25 bp, Homo sapien
gaatgggctcccatcctggaataat

SEQ ID NO: 5646426 - DNA, 25 bp, Homo sapien
accagcatcctgtactgctatgaag

SEQ ID NO: 5646427 - DNA, 25 bp, Homo sapien
aaaaaaacaagcagccttttgcttg

SEQ ID NO: 5646428 - DNA, 25 bp, Homo sapien
gcacggtggctcacgcctataatcc

SEQ ID NO: 5646429 - DNA, 25 bp, Homo sapien
atgaaccttcctggaggagagctga

SEQ ID NO: 5646430 - DNA, 25 bp, Homo sapien
tgcattgacggccctgtgacggcct

SEQ ID NO: 5646431 - DNA, 25 bp, Homo sapien
agcaaagactcgagagatcatccct

SEQ ID NO: 5646432 - DNA, 25 bp, Homo sapien
tgcatcatctcgctggtaactcaga

SEQ ID NO: 5646433 - DNA, 25 bp, Homo sapien
acgcctataatcccagcacttaggg

SEQ ID NO: 5646434 - DNA, 25 bp, Homo sapien
tggaccttgcaggagtgaagactgt

SEQ ID NO: 5646435 - DNA, 25 bp, Homo sapien
tccctgacctccaaatggtctgttt

SEQ ID NO: 5646436 - DNA, 25 bp, Homo sapien
aagttaaccaagcaggccaggcacg

SEQ ID NO: 5646437 - DNA, 25 bp, Homo sapien
taacaccaagcctgggtggcagatg

SEQ ID NO: 5646438 - DNA, 25 bp, Homo sapien
ctggaggagagctgaggagaagatc

SEQ ID NO: 5646439 - DNA, 25 bp, Homo sapien
ggaggagattgtgatggaaacacgc

SEQ ID NO: 5646440 - DNA, 25 bp, Homo sapien
atgggctcccatcctggaataatat

SEQ ID NO: 5646441 - DNA, 25 bp, Homo sapien
ggagatgaggcttccagtggctcgc

SEQ ID NO: 5646442 - DNA, 25 bp, Homo sapien
tttgcacacgaggagcctgaaatat

SEQ ID NO: 5646443 - DNA, 25 bp, Homo sapien
tgaaaccccatctctactaaaaata

SEQ ID NO: 5646444 - DNA, 25 bp, Homo sapien
ctgacggagctgtctctttgcacac

SEQ ID NO: 5646445 - DNA, 25 bp, Homo sapien
tcgaatgggctcccatcctggaata

SEQ ID NO: 5646446 - DNA, 25 bp, Homo sapien
gagttaaaagataaaaagacgccag

SEQ ID NO: 5646447 - DNA, 25 bp, Homo sapien
tgccgggggatacaatcactacgga

SEQ ID NO: 5646448 - DNA, 25 bp, Homo sapien
agaagatgagcttgcaatgagaggt

SEQ ID NO: 5646449 - DNA, 25 bp, Homo sapien
agactgtgatgtgtggtccccatat

SEQ ID NO: 5646450 - DNA, 25 bp, Homo sapien
aaaaccagatacattggtgaagtag

SEQ ID NO: 5646451 - DNA, 25 bp, Homo sapien
gtccaggtttccccctccctggtga

SEQ ID NO: 5646452 - DNA, 25 bp, Homo sapien
agcaggccaggcacggtggctcacg

SEQ ID NO: 5646453 - DNA, 25 bp, Homo sapien
atttgggaggctgaggtgggagaat

SEQ ID NO: 5646454 - DNA, 25 bp, Homo sapien
agtttcagctctttcaaagtgcaca

SEQ ID NO: 5646455 - DNA, 25 bp, Homo sapien
cattgacggccctgtgacggcctcc

SEQ ID NO: 5646456 - DNA, 25 bp, Homo sapien
tatgataccagcatcctgtactgct

SEQ ID NO: 5646457 - DNA, 25 bp, Homo sapien
ataaggaggtgctccagaagcacgg

SEQ ID NO: 5646458 - DNA, 25 bp, Homo sapien
cctccctggtgaaacggcagaagac

SEQ ID NO: 5646459 - DNA, 25 bp, Homo sapien
gaacgtatatgggagaagagaagct

SEQ ID NO: 5646460 - DNA, 25 bp, Homo sapien
ttgccagctgagtcccggtattagg

SEQ ID NO: 5646461 - DNA, 25 bp, Homo sapien
tttgtctgcattgacggccctgtga

SEQ ID NO: 5646462 - DNA, 25 bp, Homo sapien
tccccctccctggtgaaacggcaga

SEQ ID NO: 5646463 - DNA, 25 bp, Homo sapien
gaaacatctagtggtgccgggggat

SEQ ID NO: 5646464 - DNA, 25 bp, Homo sapien
agggggcttcattgcaaacctggag

SEQ ID NO: 5646465 - DNA, 25 bp, Homo sapien
ccttatcagtgctgaggtccaggca

SEQ ID NO: 5646466 - DNA, 25 bp, Homo sapien
cagcatcctgtactgctatgaagca

SEQ ID NO: 5646467 - DNA, 25 bp, Homo sapien
tcacttgaacctgggaggcggaggt

SEQ ID NO: 5646468 - DNA, 25 bp, Homo sapien
atgcagctggtaaagttggaagaat

SEQ ID NO: 5646469 - DNA, 25 bp, Homo sapien
cttcattgcaaacctggagcctgtc

SEQ ID NO: 5646470 - DNA, 25 bp, Homo sapien
agtgttacagtcgaatgggctccca

SEQ ID NO: 5646471 - DNA, 25 bp, Homo sapien
atctcgctggtaactcagaggatga

SEQ ID NO: 5646472 - DNA, 25 bp, Homo sapien
gagaagagaagctcattgcatctgt

SEQ ID NO: 5646473 - DNA, 25 bp, Homo sapien
caaagtgcacagtgttacagtcgaa

SEQ ID NO: 5646474 - DNA, 25 bp, Homo sapien
cacgggactgtggaccttgcaggag

SEQ ID NO: 5646475 - DNA, 25 bp, Homo sapien
ctggatttacccaacacctgagcac

SEQ ID NO: 5646476 - DNA, 25 bp, Homo sapien
tctttgcacacgaggagcctgaaat

SEQ ID NO: 5646477 - DNA, 25 bp, Homo sapien
acatggcatccctgacctccaaatg

SEQ ID NO: 5646478 - DNA, 25 bp, Homo sapien
aacggcagaagacccactttcatga

SEQ ID NO: 5646479 - DNA, 25 bp, Homo sapien
gagcattaacttgtggatgattcag

SEQ ID NO: 5646480 - DNA, 25 bp, Homo sapien
gattgtgatggaaacacgccagagg

SEQ ID NO: 5646481 - DNA, 25 bp, Homo sapien
cacctgagcacaaagaagaggaagc

SEQ ID NO: 5646482 - DNA, 25 bp, Homo sapien
gttcgagaccagcctggccaacaag

SEQ ID NO: 5646483 - DNA, 25 bp, Homo sapien
tggaaacacgccagaggcttttgga

SEQ ID NO: 5646484 - DNA, 25 bp, Homo sapien
tagtgggacgaatcacagaggttca

SEQ ID NO: 5646485 - DNA, 25 bp, Homo sapien
tttgtcttccactcactgtcattca

SEQ ID NO: 5646486 - DNA, 25 bp, Homo sapien
gaaagctttgaaaaccagatacatt

SEQ ID NO: 5646487 - DNA, 25 bp, Homo sapien
gccagctgagtcccggtattaggga

SEQ ID NO: 5646488 - DNA, 25 bp, Homo sapien
gcctgaaatatggaaaactaggtca

SEQ ID NO: 5646489 - DNA, 25 bp, Homo sapien
tcgtccatgaaccttcctggaggag

SEQ ID NO: 5646490 - DNA, 25 bp, Homo sapien
ggcacagtgccccatgaaattgccc

SEQ ID NO: 5646491 - DNA, 25 bp, Homo sapien
aatcgcgtaccacactccagcctgg

SEQ ID NO: 5646492 - DNA, 25 bp, Homo sapien
gaagaggtggaaggtggagaccaac

SEQ ID NO: 5646493 - DNA, 25 bp, Homo sapien
gctccagaagcacgggactgtggac

SEQ ID NO: 5646494 - DNA, 25 bp, Homo sapien
tggagcctgtctctcttgctgatcg

SEQ ID NO: 5646495 - DNA, 25 bp, Homo sapien
agcttgcaatgagaggtttcttaca

SEQ ID NO: 5646496 - DNA, 25 bp, Homo sapien
caacaaggtgaaaccccatctctac

SEQ ID NO: 5646497 - DNA, 25 bp, Homo sapien
tgatgctgtatgataccagcatcct

SEQ ID NO: 5646498 - DNA, 25 bp, Homo sapien
aaaaagacgccagagttctcgctga

SEQ ID NO: 5646499 - DNA, 25 bp, Homo sapien
taatggaggagattgtgatggaaac

SEQ ID NO: 5646500 - DNA, 25 bp, Homo sapien
ggccaggcacggtggctcacgccta

SEQ ID NO: 5646501 - DNA, 25 bp, Homo sapien
ggcctccagcccacaggcctgcttt

SEQ ID NO: 5646502 - DNA, 25 bp, Homo sapien
gaagaataaagttaaccaagcaggc

SEQ ID NO: 5646503 - DNA, 25 bp, Homo sapien
tgacagagcgagactgtgtttcaaa

SEQ ID NO: 5646504 - DNA, 25 bp, Homo sapien
accaagcaggccaggcacggtggct

SEQ ID NO: 5646505 - DNA, 25 bp, Homo sapien
agcctgggtgacagagcgagactgt

SEQ ID NO: 5646506 - DNA, 25 bp, Homo sapien
aggattcatgcggggccatggaacg

SEQ ID NO: 5646507 - DNA, 25 bp, Homo sapien
gagagagtaaacaagttgatctgtg

SEQ ID NO: 5646508 - DNA, 25 bp, Homo sapien
acattggtgaagtaggagacatcgt

SEQ ID NO: 5646509 - DNA, 25 bp, Homo sapien
ttctcggtaacaacggcttcatctg

SEQ ID NO: 5646510 - DNA, 25 bp, Homo sapien
cacacgaggagcctgaaatatggaa

SEQ ID NO: 5646511 - DNA, 25 bp, Homo sapien
cctgggtgacagagcgagactgtgt

SEQ ID NO: 5646512 - DNA, 25 bp, Homo sapien
tgtcattcacaaggcacagtgcccc

SEQ ID NO: 5646513 - DNA, 25 bp, Homo sapien
tccagtggctcgcaagcctcttagc

SEQ ID NO: 5646514 - DNA, 25 bp, Homo sapien
aaattgccccaatagaaaacatggc

SEQ ID NO: 5646515 - DNA, 25 bp, Homo sapien
gtccatgtactcagataaacatgaa

SEQ ID NO: 5646516 - DNA, 25 bp, Homo sapien
ctttcaaagtgcacagtgttacagt

SEQ ID NO: 5646517 - DNA, 25 bp, Homo sapien
agaatcacttgaacctgggaggcgg

SEQ ID NO: 5646518 - DNA, 25 bp, Homo sapien
acccaacacctgagcacaaagaaga

SEQ ID NO: 5646519 - DNA, 25 bp, Homo sapien
gagaatcctttgtcttccactcact

SEQ ID NO: 5646520 - DNA, 25 bp, Homo sapien
cctggtgaaacggcagaagacccac

SEQ ID NO: 5646521 - DNA, 25 bp, Homo sapien
gcagtgagctgaaatcgcgtaccac

SEQ ID NO: 5646522 - DNA, 25 bp, Homo sapien
catcttaaagccagaaataatggag

SEQ ID NO: 5646523 - DNA, 25 bp, Homo sapien
gacgaatcacagaggttcaacagaa

SEQ ID NO: 5646524 - DNA, 25 bp, Homo sapien
cgatggagatgaggcttccagtggc

SEQ ID NO: 5646525 - DNA, 25 bp, Homo sapien
gcagaagacccactttcatgatttg

SEQ ID NO: 5646526 - DNA, 25 bp, Homo sapien
cgagactgtgtttcaaagaaaaaaa

SEQ ID NO: 5646527 - DNA, 25 bp, Homo sapien
tgaaattgccccaatagaaaacatg

SEQ ID NO: 5646528 - DNA, 25 bp, Homo sapien
tatatcctttaaatgactgagaatg

SEQ ID NO: 5646529 - DNA, 25 bp, Homo sapien
aggagattgtgatggaaacacgcca

SEQ ID NO: 5646530 - DNA, 25 bp, Homo sapien
gtaagatgctgaattattcatgata

SEQ ID NO: 5646531 - DNA, 25 bp, Homo sapien
cgccagaggcttttggaacaggagg

SEQ ID NO: 5646532 - DNA, 25 bp, Homo sapien
caagcctcttagcgagagactgggc

SEQ ID NO: 5646533 - DNA, 25 bp, Homo sapien
cctggagcctgtctctcttgctgat

SEQ ID NO: 5646534 - DNA, 25 bp, Homo sapien
gacccactttcatgatttgccatgt

SEQ ID NO: 5646535 - DNA, 25 bp, Homo sapien
gtgaagtaggagacatcgtagtggg

SEQ ID NO: 5646536 - DNA, 25 bp, Homo sapien
agtgcttccttgggttgccagctga

SEQ ID NO: 5646537 - DNA, 25 bp, Homo sapien
tgtctctttgcacacgaggagcctg

SEQ ID NO: 5646538 - DNA, 25 bp, Homo sapien
gagtgaagactgtgatgtgtggtcc

SEQ ID NO: 5646539 - DNA, 25 bp, Homo sapien
tcccagcacttagggaggccaaggc

SEQ ID NO: 5646540 - DNA, 25 bp, Homo sapien
accacactccagcctgggtgacaga

SEQ ID NO: 5646541 - DNA, 25 bp, Homo sapien
ccagcctggccaacaaggtgaaacc

SEQ ID NO: 5646542 - DNA, 25 bp, Homo sapien
ctctcttgctgatcgagaggtgata

SEQ ID NO: 5646543 - DNA, 25 bp, Homo sapien
tccagaagcacgggactgtggacct

SEQ ID NO: 5646544 - DNA, 25 bp, Homo sapien
aaacaagcagccttttgcttggttg

SEQ ID NO: 5646545 - DNA, 25 bp, Homo sapien
gtgcacctgtagtcccagctatttg

SEQ ID NO: 5646546 - DNA, 25 bp, Homo sapien
tccttgggttgccagctgagtcccg

SEQ ID NO: 5646547 - DNA, 25 bp, Homo sapien
gcctgtctctcttgctgatcgagag

SEQ ID NO: 5646548 - DNA, 25 bp, Homo sapien
aggtgtggtggtgtgcacctgtagt

SEQ ID NO: 5646549 - DNA, 25 bp, Homo sapien
atatgggagaagagaagctcattgc

SEQ ID NO: 5646550 - DNA, 25 bp, Homo sapien
tgtctgcattgacggccctgtgacg

SEQ ID NO: 5646551 - DNA, 25 bp, Homo sapien
agccaggtgtggtggtgtgcacctg

SEQ ID NO: 5646552 - DNA, 25 bp, Homo sapien
aacaggagggataaggaggtgctcc

SEQ ID NO: 5646553 - DNA, 25 bp, Homo sapien
tacaatcactacggacacaggattc

SEQ ID NO: 5646554 - DNA, 25 bp, Homo sapien
ggggcttcattgcaaacctggagcc

SEQ ID NO: 5646555 - DNA, 25 bp, Homo sapien
ctgatcgagaggtgatatcccggct

SEQ ID NO: 5646556 - DNA, 25 bp, Homo sapien
ccaaatggtctgttttggcctccat

SEQ ID NO: 5646557 - DNA, 25 bp, Homo sapien
ccagaggcttttggaacaggaggga

SEQ ID NO: 5646558 - DNA, 25 bp, Homo sapien
aaatggtctgttttggcctccattc

SEQ ID NO: 5646559 - DNA, 25 bp, Homo sapien
ttgggaggctgaggtgggagaatca

SEQ ID NO: 5646560 - DNA, 25 bp, Homo sapien
aagcagccttttgcttggttggaat

SEQ ID NO: 5646561 - DNA, 25 bp, Homo sapien
gctgaggtccaggcagtgttctctg

SEQ ID NO: 5646562 - DNA, 25 bp, Homo sapien
caggccaggcacggtggctcacgcc

SEQ ID NO: 5646563 - DNA, 25 bp, Homo sapien
ccagatacattggtgaagtaggaga

SEQ ID NO: 5646564 - DNA, 25 bp, Homo sapien
gatggaaacacgccagaggcttttg

SEQ ID NO: 5646565 - DNA, 25 bp, Homo sapien
ttgtggatgattcagagttaaaaga

SEQ ID NO: 5646566 - DNA, 25 bp, Homo sapien
agatcaaagacatcttaaagccaga

SEQ ID NO: 5646567 - DNA, 25 bp, Homo sapien
cagtggctcgcaagcctcttagcga

SEQ ID NO: 5646568 - DNA, 25 bp, Homo sapien
ggcttcattgcaaacctggagcctg

SEQ ID NO: 5646569 - DNA, 25 bp, Homo sapien
acctccaaatggtctgttttggcct

SEQ ID NO: 5646570 - DNA, 25 bp, Homo sapien
ggaggtgctccagaagcacgggact

SEQ ID NO: 5646571 - DNA, 25 bp, Homo sapien
tgtgacggcctccagcccacaggcc

SEQ ID NO: 5646572 - DNA, 25 bp, Homo sapien
tactgctatgaagcatcccttccac

SEQ ID NO: 5646573 - DNA, 25 bp, Homo sapien
tagatgtgattatgtccacaccggg

SEQ ID NO: 5646574 - DNA, 25 bp, Homo sapien
ctcttgctgatcgagaggtgatatc

SEQ ID NO: 5646575 - DNA, 25 bp, Homo sapien
cttgggttgccagctgagtcccggt

SEQ ID NO: 5646576 - DNA, 25 bp, Homo sapien
acttgaacctgggaggcggaggttg

SEQ ID NO: 5646577 - DNA, 25 bp, Homo sapien
gaggcggaggttgcagtgagctgaa

SEQ ID NO: 5646578 - DNA, 25 bp, Homo sapien
tcaatagttcgagaccagcctggcc

SEQ ID NO: 5646579 - DNA, 25 bp, Homo sapien
catccctttgtctgcattgacggcc

SEQ ID NO: 5646580 - DNA, 25 bp, Homo sapien
cttcatctggatttacccaacacct

SEQ ID NO: 5646581 - DNA, 25 bp, Homo sapien
cctaacaccaagcctgggtggcaga

SEQ ID NO: 5646582 - DNA, 25 bp, Homo sapien
agggataaggaggtgctccagaagc

SEQ ID NO: 5646583 - DNA, 25 bp, Homo sapien
tgagtcccggtattagggaatagtt

SEQ ID NO: 5646584 - DNA, 25 bp, Homo sapien
acaaggtgaaaccccatctctacta

SEQ ID NO: 5646585 - DNA, 25 bp, Homo sapien
gttctcgctgaagaatgtgagaaaa

SEQ ID NO: 5646586 - DNA, 25 bp, Homo sapien
tcactgtcattcacaaggcacagtg

SEQ ID NO: 5646587 - DNA, 25 bp, Homo sapien
tcaacagaagaggtggaaggtggag

SEQ ID NO: 5646588 - DNA, 25 bp, Homo sapien
tctgttgctggctctgtggagagag

SEQ ID NO: 5646589 - DNA, 25 bp, Homo sapien
cttagggaggccaaggcgggcagat

SEQ ID NO: 5646590 - DNA, 25 bp, Homo sapien
tatgtggctcagcaaagactcgaga

SEQ ID NO: 5646591 - DNA, 25 bp, Homo sapien
aaaaacaagcagccttttgcttggt

SEQ ID NO: 5646592 - DNA, 25 bp, Homo sapien
ctgtctctcttgctgatcgagaggt

SEQ ID NO: 5646593 - DNA, 25 bp, Homo sapien
gctttctcctgtcctaacaccaagc

SEQ ID NO: 5646594 - DNA, 25 bp, Homo sapien
ccaacacctgagcacaaagaagagg

SEQ ID NO: 5646595 - DNA, 25 bp, Homo sapien
agacgccagagttctcgctgaagaa

SEQ ID NO: 5646596 - DNA, 25 bp, Homo sapien
gggggatacaatcactacggacaca

SEQ ID NO: 5646597 - DNA, 25 bp, Homo sapien
tggctcagcaaagactcgagagatc

SEQ ID NO: 5646598 - DNA, 25 bp, Homo sapien
cctgagcacaaagaagaggaagcag

SEQ ID NO: 5646599 - DNA, 25 bp, Homo sapien
cccatgaaattgccccaatagaaaa

SEQ ID NO: 5646600 - DNA, 25 bp, Homo sapien
atcagtgctgaggtccaggcagtgt

SEQ ID NO: 5646601 - DNA, 25 bp, Homo sapien
catgcggggccatggaacgtatatg

SEQ ID NO: 5646602 - DNA, 25 bp, Homo sapien
tggagaccaactccaggctggattc

SEQ ID NO: 5646603 - DNA, 25 bp, Homo sapien
agtgaatgttctgggtccatgtact

SEQ ID NO: 5646604 - DNA, 25 bp, Homo sapien
acttgtggatgattcagagttaaaa

SEQ ID NO: 5646605 - DNA, 25 bp, Homo sapien
catgatttgccatgtggtgcctcag

SEQ ID NO: 5646606 - DNA, 25 bp, Homo sapien
ggtggcagatgaacagtgcttcctt

SEQ ID NO: 5646607 - DNA, 25 bp, Homo sapien
attagggaatagtttcagctctttc

SEQ ID NO: 5646608 - DNA, 25 bp, Homo sapien
gctgccttaatctgtcctgcttgga

SEQ ID NO: 5646609 - DNA, 25 bp, Homo sapien
tctgttttggcctccattcctatat

SEQ ID NO: 5646610 - DNA, 25 bp, Homo sapien
aactccaggctggattcggtcttgc

SEQ ID NO: 5646611 - DNA, 25 bp, Homo sapien
tgatatcccggcttcggaactgcat

SEQ ID NO: 5646612 - DNA, 25 bp, Homo sapien
tggaagaataaagttaaccaagcag

SEQ ID NO: 5646613 - DNA, 25 bp, Homo sapien
cttccacatcagatcaaagacatct

SEQ ID NO: 5646614 - DNA, 25 bp, Homo sapien
aggcacggtggctcacgcctataat

SEQ ID NO: 5646615 - DNA, 25 bp, Homo sapien
gcgtaccacactccagcctgggtga

SEQ ID NO: 5646616 - DNA, 25 bp, Homo sapien
cacgccagaggcttttggaacagga

SEQ ID NO: 5646617 - DNA, 25 bp, Homo sapien
gtaccacactccagcctgggtgaca

SEQ ID NO: 5646618 - DNA, 25 bp, Homo sapien
gatcgagaggtgatatcccggcttc

SEQ ID NO: 5646619 - DNA, 25 bp, Homo sapien
gctgtatgataccagcatcctgtac

SEQ ID NO: 5646620 - DNA, 25 bp, Homo sapien
tcagctctttcaaagtgcacagtgt

SEQ ID NO: 5646621 - DNA, 25 bp, Homo sapien
catccctgacctccaaatggtctgt

SEQ ID NO: 5646622 - DNA, 25 bp, Homo sapien
catcagatcaaagacatcttaaagc

SEQ ID NO: 5646623 - DNA, 25 bp, Homo sapien
gcagaagatgagcttgcaatgagag

SEQ ID NO: 5646624 - DNA, 25 bp, Homo sapien
gaaaaatggagactgggaaagcaaa

SEQ ID NO: 5646625 - DNA, 25 bp, Homo sapien
ctatttgggaggctgaggtgggaga

SEQ ID NO: 5646626 - DNA, 25 bp, Homo sapien
actgtcattcacaaggcacagtgcc

SEQ ID NO: 5646627 - DNA, 25 bp, Homo sapien
gtaacaacggcttcatctggattta

SEQ ID NO: 5646628 - DNA, 25 bp, Homo sapien
tcagaggatgatgctgtatgatacc

SEQ ID NO: 5646629 - DNA, 25 bp, Homo sapien
agatgaggcttccagtggctcgcaa

SEQ ID NO: 5646630 - DNA, 25 bp, Homo sapien
gcttttggaacaggagggataagga

SEQ ID NO: 5646631 - DNA, 25 bp, Homo sapien
acagaggttcaacagaagaggtgga

SEQ ID NO: 5646632 - DNA, 25 bp, Homo sapien
gggaaagcaaagctgttttcatcct

SEQ ID NO: 5646633 - DNA, 25 bp, Homo sapien
gtggtgccgggggatacaatcacta

SEQ ID NO: 5646634 - DNA, 25 bp, Homo sapien
aacacgccagaggcttttggaacag

SEQ ID NO: 5646635 - DNA, 25 bp, Homo sapien
tcccagctatttgggaggctgaggt

SEQ ID NO: 5646636 - DNA, 25 bp, Homo sapien
gcttcggaactgcatcatctcgctg

SEQ ID NO: 5646637 - DNA, 25 bp, Homo sapien
tgattttctgttgcgtgttccttgt

SEQ ID NO: 5646638 - DNA, 25 bp, Homo sapien
atacattggtgaagtaggagacatc

SEQ ID NO: 5646639 - DNA, 25 bp, Homo sapien
ctcggtaacaacggcttcatctgga

SEQ ID NO: 5646640 - DNA, 25 bp, Homo sapien
cgctggtaactcagaggatgatgct

SEQ ID NO: 5646641 - DNA, 25 bp, Homo sapien
ggaaggtggagaccaactccaggct

SEQ ID NO: 5646642 - DNA, 25 bp, Homo sapien
ctgctatgaagcatcccttccacat

SEQ ID NO: 5646643 - DNA, 25 bp, Homo sapien
gtgaaagctttgaaaaccagataca

SEQ ID NO: 5646644 - DNA, 25 bp, Homo sapien
ggagggataaggaggtgctccagaa

SEQ ID NO: 5646645 - DNA, 25 bp, Homo sapien
ggaacaggagggataaggaggtgct

SEQ ID NO: 5646646 - DNA, 25 bp, Homo sapien
ttcaaagtgcacagtgttacagtcg

SEQ ID NO: 5646647 - DNA, 25 bp, Homo sapien
aatagaaaacatggcatccctgacc

SEQ ID NO: 5646648 - DNA, 25 bp, Homo sapien
ccaggctggattcggtcttgctgct

SEQ ID NO: 5646649 - DNA, 25 bp, Homo sapien
cctatatcctttaaatgactgagaa

SEQ ID NO: 5646650 - DNA, 25 bp, Homo sapien
ggaagcagggggcttcattgcaaac

SEQ ID NO: 5646651 - DNA, 25 bp, Homo sapien
atacaaaaaattagccaggtgtggt

SEQ ID NO: 5646652 - DNA, 25 bp, Homo sapien
atcactacggacacaggattcatgc

SEQ ID NO: 5646653 - DNA, 25 bp, Homo sapien
gcctataatcccagcacttagggag

SEQ ID NO: 5646654 - DNA, 25 bp, Homo sapien
tagttcgagaccagcctggccaaca

SEQ ID NO: 5646655 - DNA, 25 bp, Homo sapien
gactcgagagatcatccctttgtct

SEQ ID NO: 5646656 - DNA, 25 bp, Homo sapien
gaccaactccaggctggattcggtc

SEQ ID NO: 5646657 - DNA, 25 bp, Homo sapien
ctcgcaagcctcttagcgagagact

SEQ ID NO: 5646658 - DNA, 25 bp, Homo sapien
ataatcccagcacttagggaggcca

SEQ ID NO: 5646659 - DNA, 25 bp, Homo sapien
ctccaaatggtctgttttggcctcc

SEQ ID NO: 5646660 - DNA, 25 bp, Homo sapien
tccctggtgaaacggcagaagaccc

SEQ ID NO: 5646661 - DNA, 25 bp, Homo sapien
ggacacaggattcatgcggggccat

SEQ ID NO: 5646662 - DNA, 25 bp, Homo sapien
aagttgatctgtgtgaaagctttga

SEQ ID NO: 5646663 - DNA, 25 bp, Homo sapien
ccaggtgtggtggtgtgcacctgta

SEQ ID NO: 5646664 - DNA, 25 bp, Homo sapien
aaagacgccagagttctcgctgaag

SEQ ID NO: 5646665 - DNA, 25 bp, Homo sapien
gctgaggagaagatctgcagaagat

SEQ ID NO: 5646666 - DNA, 25 bp, Homo sapien
attatgtccacaccgggctgcctta

SEQ ID NO: 5646667 - DNA, 25 bp, Homo sapien
atgctgtatgataccagcatcctgt

SEQ ID NO: 5646668 - DNA, 25 bp, Homo sapien
agatggcgatggagatgaggcttcc

SEQ ID NO: 5646669 - DNA, 25 bp, Homo sapien
ttgtgatggaaacacgccagaggct

SEQ ID NO: 5646670 - DNA, 25 bp, Homo sapien
tgtgattatgtccacaccgggctgc

SEQ ID NO: 5646671 - DNA, 25 bp, Homo sapien
caaacctggagcctgtctctcttgc

SEQ ID NO: 5646672 - DNA, 25 bp, Homo sapien
ctgaattattcatgataatacagtg

SEQ ID NO: 5646673 - DNA, 25 bp, Homo sapien
gacatcttaaagccagaaataatgg

SEQ ID NO: 5646674 - DNA, 25 bp, Homo sapien
ttccactcactgtcattcacaaggc

SEQ ID NO: 5646675 - DNA, 25 bp, Homo sapien
aaaatggagactgggaaagcaaagc

SEQ ID NO: 5646676 - DNA, 25 bp, Homo sapien
cctccattcctatatcctttaaatg

SEQ ID NO: 5646677 - DNA, 25 bp, Homo sapien
tcatgataatacagtgaatgttctg

SEQ ID NO: 5646678 - DNA, 25 bp, Homo sapien
cgcaagcctcttagcgagagactgg

SEQ ID NO: 5646679 - DNA, 25 bp, Homo sapien
gaatagtttcagctctttcaaagtg

SEQ ID NO: 5646680 - DNA, 25 bp, Homo sapien
tggtgaaacggcagaagacccactt

SEQ ID NO: 5646681 - DNA, 25 bp, Homo sapien
gatacaatcactacggacacaggat

SEQ ID NO: 5646682 - DNA, 25 bp, Homo sapien
ctctgacggagctgtctctttgcac

SEQ ID NO: 5646683 - DNA, 25 bp, Homo sapien
tgacttgtaagatgctgaattattc

SEQ ID NO: 5646684 - DNA, 25 bp, Homo sapien
ctgaggtcaatagttcgagaccagc

SEQ ID NO: 5646685 - DNA, 25 bp, Homo sapien
aggaaggggaccttatcagtgctga

SEQ ID NO: 5646686 - DNA, 25 bp, Homo sapien
tctgtggagagagtaaacaagttga

SEQ ID NO: 5646687 - DNA, 25 bp, Homo sapien
tcctggaggagagctgaggagaaga

SEQ ID NO: 5646688 - DNA, 25 bp, Homo sapien
atagtttcagctctttcaaagtgca

SEQ ID NO: 5646689 - DNA, 25 bp, Homo sapien
gattctcggtaacaacggcttcatc

SEQ ID NO: 5646690 - DNA, 25 bp, Homo sapien
atctggatttacccaacacctgagc

SEQ ID NO: 5646691 - DNA, 25 bp, Homo sapien
acctgaggtcaatagttcgagacca

SEQ ID NO: 5646692 - DNA, 25 bp, Homo sapien
aagcagggggcttcattgcaaacct

SEQ ID NO: 5646693 - DNA, 25 bp, Homo sapien
cgagagactgggccgcgacactaag

SEQ ID NO: 5646694 - DNA, 25 bp, Homo sapien
taagcaaagaaaaatggagactggg

SEQ ID NO: 5646695 - DNA, 25 bp, Homo sapien
taggagacatcgtagtgggacgaat

SEQ ID NO: 5646696 - DNA, 25 bp, Homo sapien
tgtggagagagtaaacaagttgatc

SEQ ID NO: 5646697 - DNA, 25 bp, Homo sapien
agctggtaaagttggaagaataaag

SEQ ID NO: 5646698 - DNA, 25 bp, Homo sapien
agagtgacttgtaagatgctgaatt

SEQ ID NO: 5646699 - DNA, 25 bp, Homo sapien
tgctttcccagtctccatttttctt

SEQ ID NO: 5646700 - DNA, 25 bp, Homo sapien
cacacagatcaacttgtttactctc

SEQ ID NO: 5646701 - DNA, 25 bp, Homo sapien
ccctaagtgctgggattataggcgt

SEQ ID NO: 5646702 - DNA, 25 bp, Homo sapien
caccaatgtatctggttttcaaagc

SEQ ID NO: 5646703 - DNA, 25 bp, Homo sapien
ccgaatccagcctggagttggtctc

SEQ ID NO: 5646704 - DNA, 25 bp, Homo sapien
acagagccagcaacagatgcaatga

SEQ ID NO: 5646705 - DNA, 25 bp, Homo sapien
tcatgaataattcagcatcttacaa

SEQ ID NO: 5646706 - DNA, 25 bp, Homo sapien
atgaataattcagcatcttacaagt

SEQ ID NO: 5646707 - DNA, 25 bp, Homo sapien
tgaagccgttgttaccgagaatcac

SEQ ID NO: 5646708 - DNA, 25 bp, Homo sapien
ctccattatttctggctttaagatg

SEQ ID NO: 5646709 - DNA, 25 bp, Homo sapien
cactagatgtttcttagtgtcgcgg

SEQ ID NO: 5646710 - DNA, 25 bp, Homo sapien
tcagattccaaccaagcaaaaggct

SEQ ID NO: 5646711 - DNA, 25 bp, Homo sapien
ttataggatgaaaacagctttgctt

SEQ ID NO: 5646712 - DNA, 25 bp, Homo sapien
actgcaacctccgcctcccaggttc

SEQ ID NO: 5646713 - DNA, 25 bp, Homo sapien
cctggagttggtctccaccttccac

SEQ ID NO: 5646714 - DNA, 25 bp, Homo sapien
gttaccgagaatcactgaggcacca

SEQ ID NO: 5646715 - DNA, 25 bp, Homo sapien
ggccaggctggtctcgaactattga

SEQ ID NO: 5646716 - DNA, 25 bp, Homo sapien
gctcactgcaacctccgcctcccag

SEQ ID NO: 5646717 - DNA, 25 bp, Homo sapien
catcacagtcttcactcctgcaagg

SEQ ID NO: 5646718 - DNA, 25 bp, Homo sapien
ctgcttcctcttctttgtgctcagg

SEQ ID NO: 5646719 - DNA, 25 bp, Homo sapien
cttcatagcagtacaggatgctggt

SEQ ID NO: 5646720 - DNA, 25 bp, Homo sapien
gagccactggaagcctcatctccat

SEQ ID NO: 5646721 - DNA, 25 bp, Homo sapien
tctgagtacatggacccagaacatt

SEQ ID NO: 5646722 - DNA, 25 bp, Homo sapien
ggaccacacatcacagtcttcactc

SEQ ID NO: 5646723 - DNA, 25 bp, Homo sapien
tggggcaatttcatggggcactgtg

SEQ ID NO: 5646724 - DNA, 25 bp, Homo sapien
gctaagaggcttgcgagccactgga

SEQ ID NO: 5646725 - DNA, 25 bp, Homo sapien
atgtctttgatctgatgtggaaggg

SEQ ID NO: 5646726 - DNA, 25 bp, Homo sapien
ggctccaggtttgcaatgaagcccc

SEQ ID NO: 5646727 - DNA, 25 bp, Homo sapien
ctagttttccatatttcaggctcct

SEQ ID NO: 5646728 - DNA, 25 bp, Homo sapien
ccaactttaccagctgcattctcag

SEQ ID NO: 5646729 - DNA, 25 bp, Homo sapien
actgtaacactgtgcactttgaaag

SEQ ID NO: 5646730 - DNA, 25 bp, Homo sapien
ataggatgaaaacagctttgctttc

SEQ ID NO: 5646731 - DNA, 25 bp, Homo sapien
tcttccaactttaccagctgcattc

SEQ ID NO: 5646732 - DNA, 25 bp, Homo sapien
gcaagaccgaatccagcctggagtt

SEQ ID NO: 5646733 - DNA, 25 bp, Homo sapien
tcttcatgtttatctgagtacatgg

SEQ ID NO: 5646734 - DNA, 25 bp, Homo sapien
ttcagcatcttacaagtcactctcc

SEQ ID NO: 5646735 - DNA, 25 bp, Homo sapien
agcacctccttatccctcctgttcc

SEQ ID NO: 5646736 - DNA, 25 bp, Homo sapien
tctcctccattatttctggctttaa

SEQ ID NO: 5646737 - DNA, 25 bp, Homo sapien
tgtatttttagtagagatggggttt

SEQ ID NO: 5646738 - DNA, 25 bp, Homo sapien
gttccaaaagcctctggcgtgtttc

SEQ ID NO: 5646739 - DNA, 25 bp, Homo sapien
ggcgtctttttatcttttaactctg

SEQ ID NO: 5646740 - DNA, 25 bp, Homo sapien
cactcctgcaaggtccacagtcccg

SEQ ID NO: 5646741 - DNA, 25 bp, Homo sapien
attatcatgaataattcagcatctt

SEQ ID NO: 5646742 - DNA, 25 bp, Homo sapien
cttctgcagatcttctcctcagctc

SEQ ID NO: 5646743 - DNA, 25 bp, Homo sapien
ctggcaacccaaggaagcactgttc

SEQ ID NO: 5646744 - DNA, 25 bp, Homo sapien
cccactacgatgtctcctacttcac

SEQ ID NO: 5646745 - DNA, 25 bp, Homo sapien
tgcaacctccgcctcccaggttcaa

SEQ ID NO: 5646746 - DNA, 25 bp, Homo sapien
aacttgtttactctctccacagagc

SEQ ID NO: 5646747 - DNA, 25 bp, Homo sapien
tgctccacactacttcaattatagg

SEQ ID NO: 5646748 - DNA, 25 bp, Homo sapien
tcatgaaagtgggtcttctgccgtt

SEQ ID NO: 5646749 - DNA, 25 bp, Homo sapien
acagaccatttggaggtcagggatg

SEQ ID NO: 5646750 - DNA, 25 bp, Homo sapien
ttctgttgaacctctgtgattcgtc

SEQ ID NO: 5646751 - DNA, 25 bp, Homo sapien
agatgcaatgagcttctcttctccc

SEQ ID NO: 5646752 - DNA, 25 bp, Homo sapien
gtattatcatgaataattcagcatc

SEQ ID NO: 5646753 - DNA, 25 bp, Homo sapien
cattcttcagcgagaactctggcgt

SEQ ID NO: 5646754 - DNA, 25 bp, Homo sapien
ccccgcatgaatcctgtgtccgtag

SEQ ID NO: 5646755 - DNA, 25 bp, Homo sapien
ctggtatcatacagcatcatcctct

SEQ ID NO: 5646756 - DNA, 25 bp, Homo sapien
atggaggccaaaacagaccatttgg

SEQ ID NO: 5646757 - DNA, 25 bp, Homo sapien
acataatcacatctatggctacaag

SEQ ID NO: 5646758 - DNA, 25 bp, Homo sapien
agacagctccgtcagagaacactgc

SEQ ID NO: 5646759 - DNA, 25 bp, Homo sapien
aggatgctggtatcatacagcatca

SEQ ID NO: 5646760 - DNA, 25 bp, Homo sapien
gggtcttctgccgtttcaccaggga

SEQ ID NO: 5646761 - DNA, 25 bp, Homo sapien
tgtttatctgagtacatggacccag

SEQ ID NO: 5646762 - DNA, 25 bp, Homo sapien
tcacaatctcctccattatttctgg

SEQ ID NO: 5646763 - DNA, 25 bp, Homo sapien
ttcactcctgcaaggtccacagtcc

SEQ ID NO: 5646764 - DNA, 25 bp, Homo sapien
accatttggaggtcagggatgccat

SEQ ID NO: 5646765 - DNA, 25 bp, Homo sapien
aggtccacagtcccgtgcttctgga

SEQ ID NO: 5646766 - DNA, 25 bp, Homo sapien
tgagccaccgtgcctggcctgcttg

SEQ ID NO: 5646767 - DNA, 25 bp, Homo sapien
agaaaatcagattccaaccaagcaa

SEQ ID NO: 5646768 - DNA, 25 bp, Homo sapien
cccattcgactgtaacactgtgcac

SEQ ID NO: 5646769 - DNA, 25 bp, Homo sapien
ttcccagtctccatttttctttgct

SEQ ID NO: 5646770 - DNA, 25 bp, Homo sapien
ttctattggggcaatttcatggggc

SEQ ID NO: 5646771 - DNA, 25 bp, Homo sapien
tgttggccaggctggtctcgaacta

SEQ ID NO: 5646772 - DNA, 25 bp, Homo sapien
acaaagggatgatctctcgagtctt

SEQ ID NO: 5646773 - DNA, 25 bp, Homo sapien
tcacctctcgatcagcaagagagac

SEQ ID NO: 5646774 - DNA, 25 bp, Homo sapien
aactctggcgtctttttatctttta

SEQ ID NO: 5646775 - DNA, 25 bp, Homo sapien
atcctgtgtccgtagtgattgtatc

SEQ ID NO: 5646776 - DNA, 25 bp, Homo sapien
caggaaggttcatggacgagagcag

SEQ ID NO: 5646777 - DNA, 25 bp, Homo sapien
taaaggatataggaatggaggccaa

SEQ ID NO: 5646778 - DNA, 25 bp, Homo sapien
aggacaggagaaagcaggcctgtgg

SEQ ID NO: 5646779 - DNA, 25 bp, Homo sapien
tcatagcagtacaggatgctggtat

SEQ ID NO: 5646780 - DNA, 25 bp, Homo sapien
tggaggtcagggatgccatgttttc

SEQ ID NO: 5646781 - DNA, 25 bp, Homo sapien
ggggaccacacatcacagtcttcac

SEQ ID NO: 5646782 - DNA, 25 bp, Homo sapien
caatgcagacaaagggatgatctct

SEQ ID NO: 5646783 - DNA, 25 bp, Homo sapien
tgcttcatagcagtacaggatgctg

SEQ ID NO: 5646784 - DNA, 25 bp, Homo sapien
ggaagcactgttcatctgccaccca

SEQ ID NO: 5646785 - DNA, 25 bp, Homo sapien
ttcctgtaagaaacctctcattgca

SEQ ID NO: 5646786 - DNA, 25 bp, Homo sapien
aactttaccagctgcattctcagtc

SEQ ID NO: 5646787 - DNA, 25 bp, Homo sapien
ttaactctgaatcatccacaagtta

SEQ ID NO: 5646788 - DNA, 25 bp, Homo sapien
tatacgttccatggccccgcatgaa

SEQ ID NO: 5646789 - DNA, 25 bp, Homo sapien
tttagtagagatggggtttcacctt

SEQ ID NO: 5646790 - DNA, 25 bp, Homo sapien
atcactgaggcaccacatggcaaat

SEQ ID NO: 5646791 - DNA, 25 bp, Homo sapien
tttatcttttaactctgaatcatcc

SEQ ID NO: 5646792 - DNA, 25 bp, Homo sapien
ggaacacgcaacagaaaatcagatt

SEQ ID NO: 5646793 - DNA, 25 bp, Homo sapien
tgtgtccgtagtgattgtatccccc

SEQ ID NO: 5646794 - DNA, 25 bp, Homo sapien
ctccatattattccaggatgggagc

SEQ ID NO: 5646795 - DNA, 25 bp, Homo sapien
cacaagttaatgctccacactactt

SEQ ID NO: 5646796 - DNA, 25 bp, Homo sapien
tatttctggctttaagatgtctttg

SEQ ID NO: 5646797 - DNA, 25 bp, Homo sapien
cactacgatgtctcctacttcacca

SEQ ID NO: 5646798 - DNA, 25 bp, Homo sapien
gagagacaggctccaggtttgcaat

SEQ ID NO: 5646799 - DNA, 25 bp, Homo sapien
ctggaggccgtcacagggccgtcaa

SEQ ID NO: 5646800 - DNA, 25 bp, Homo sapien
cctaataccgggactcagctggcaa

SEQ ID NO: 5646801 - DNA, 25 bp, Homo sapien
tttttgtatttttagtagagatggg

SEQ ID NO: 5646802 - DNA, 25 bp, Homo sapien
tacttcaattataggatgaaaacag

SEQ ID NO: 5646803 - DNA, 25 bp, Homo sapien
aaacacagtctcgctctgtcaccca

SEQ ID NO: 5646804 - DNA, 25 bp, Homo sapien
aactctgaatcatccacaagttaat

SEQ ID NO: 5646805 - DNA, 25 bp, Homo sapien
attccaaccaagcaaaaggctgctt

SEQ ID NO: 5646806 - DNA, 25 bp, Homo sapien
cctctgagttaccagcgagatgatg

SEQ ID NO: 5646807 - DNA, 25 bp, Homo sapien
ccgcatgaatcctgtgtccgtagtg

SEQ ID NO: 5646808 - DNA, 25 bp, Homo sapien
catatacgttccatggccccgcatg

SEQ ID NO: 5646809 - DNA, 25 bp, Homo sapien
gcttggtgttaggacaggagaaagc

SEQ ID NO: 5646810 - DNA, 25 bp, Homo sapien
atcatccacaagttaatgctccaca

SEQ ID NO: 5646811 - DNA, 25 bp, Homo sapien
agtcactctccaagcaggacagatt

SEQ ID NO: 5646812 - DNA, 25 bp, Homo sapien
tgcagatcttctcctcagctctcct

SEQ ID NO: 5646813 - DNA, 25 bp, Homo sapien
cagcaagaccgaatccagcctggag

SEQ ID NO: 5646814 - DNA, 25 bp, Homo sapien
ggatgccatgttttctattggggca

SEQ ID NO: 5646815 - DNA, 25 bp, Homo sapien
gctcatcttctgcagatcttctcct

SEQ ID NO: 5646816 - DNA, 25 bp, Homo sapien
ggatataggaatggaggccaaaaca

SEQ ID NO: 5646817 - DNA, 25 bp, Homo sapien
gtctttgctgagccacatatgggga

SEQ ID NO: 5646818 - DNA, 25 bp, Homo sapien
gttttcaaagctttcacacagatca

SEQ ID NO: 5646819 - DNA, 25 bp, Homo sapien
gtggaagggatgcttcatagcagta

SEQ ID NO: 5646820 - DNA, 25 bp, Homo sapien
tggcctccctaagtgctgggattat

SEQ ID NO: 5646821 - DNA, 25 bp, Homo sapien
cttagtgtcgcggcccagtctctcg

SEQ ID NO: 5646822 - DNA, 25 bp, Homo sapien
agattccaaccaagcaaaaggctgc

SEQ ID NO: 5646823 - DNA, 25 bp, Homo sapien
ctccaccttccacctcttctgttga

SEQ ID NO: 5646824 - DNA, 25 bp, Homo sapien
tgacctcaggtgatctgcccgcctt

SEQ ID NO: 5646825 - DNA, 25 bp, Homo sapien
ttgtatcccccggcaccactagatg

SEQ ID NO: 5646826 - DNA, 25 bp, Homo sapien
cccaggttcaagtgattctcccacc

SEQ ID NO: 5646827 - DNA, 25 bp, Homo sapien
atcttctgcagatcttctcctcagc

SEQ ID NO: 5646828 - DNA, 25 bp, Homo sapien
aattataggatgaaaacagctttgc

SEQ ID NO: 5646829 - DNA, 25 bp, Homo sapien
tccacaagttaatgctccacactac

SEQ ID NO: 5646830 - DNA, 25 bp, Homo sapien
gaacactgcctggacctcagcactg

SEQ ID NO: 5646831 - DNA, 25 bp, Homo sapien
gtcccactacgatgtctcctacttc

SEQ ID NO: 5646832 - DNA, 25 bp, Homo sapien
tcctacttcaccaatgtatctggtt

SEQ ID NO: 5646833 - DNA, 25 bp, Homo sapien
ccgccttggcctccctaagtgctgg

SEQ ID NO: 5646834 - DNA, 25 bp, Homo sapien
ttaccagcgagatgatgcagttccg

SEQ ID NO: 5646835 - DNA, 25 bp, Homo sapien
tcctgttccaaaagcctctggcgtg

SEQ ID NO: 5646836 - DNA, 25 bp, Homo sapien
cattgcaagctcatcttctgcagat

SEQ ID NO: 5646837 - DNA, 25 bp, Homo sapien
atgaaagtgggtcttctgccgtttc

SEQ ID NO: 5646838 - DNA, 25 bp, Homo sapien
gaatggaggccaaaacagaccattt

SEQ ID NO: 5646839 - DNA, 25 bp, Homo sapien
aaagctttcacacagatcaacttgt

SEQ ID NO: 5646840 - DNA, 25 bp, Homo sapien
actgtgcactttgaaagagctgaaa

SEQ ID NO: 5646841 - DNA, 25 bp, Homo sapien
cttgttggccaggctggtctcgaac

SEQ ID NO: 5646842 - DNA, 25 bp, Homo sapien
agtcccgtgcttctggagcacctcc

SEQ ID NO: 5646843 - DNA, 25 bp, Homo sapien
catttaaaggatataggaatggagg

SEQ ID NO: 5646844 - DNA, 25 bp, Homo sapien
tgcaaggtccacagtcccgtgcttc

SEQ ID NO: 5646845 - DNA, 25 bp, Homo sapien
gccaaaacagaccatttggaggtca

SEQ ID NO: 5646846 - DNA, 25 bp, Homo sapien
gcagacaaagggatgatctctcgag

SEQ ID NO: 5646847 - DNA, 25 bp, Homo sapien
gctgaaactattccctaataccggg

SEQ ID NO: 5646848 - DNA, 25 bp, Homo sapien
tcaccagggagggggaaacctggac

SEQ ID NO: 5646849 - DNA, 25 bp, Homo sapien
aaggaacacgcaacagaaaatcaga

SEQ ID NO: 5646850 - DNA, 25 bp, Homo sapien
cgagagcagcaagaccgaatccagc

SEQ ID NO: 5646851 - DNA, 25 bp, Homo sapien
aatcacatctatggctacaaggaac

SEQ ID NO: 5646852 - DNA, 25 bp, Homo sapien
gtgctgggattataggcgtgagcca

SEQ ID NO: 5646853 - DNA, 25 bp, Homo sapien
gatctgatgtggaagggatgcttca

SEQ ID NO: 5646854 - DNA, 25 bp, Homo sapien
ctctggcgtctttttatcttttaac

SEQ ID NO: 5646855 - DNA, 25 bp, Homo sapien
agtgattctcccacctcagcctccc

SEQ ID NO: 5646856 - DNA, 25 bp, Homo sapien
aaacagaccatttggaggtcaggga

SEQ ID NO: 5646857 - DNA, 25 bp, Homo sapien
tgtgggctggaggccgtcacagggc

SEQ ID NO: 5646858 - DNA, 25 bp, Homo sapien
accagctgcattctcagtcatttaa

SEQ ID NO: 5646859 - DNA, 25 bp, Homo sapien
tggcgtgtttccatcacaatctcct

SEQ ID NO: 5646860 - DNA, 25 bp, Homo sapien
ggagcccattcgactgtaacactgt

SEQ ID NO: 5646861 - DNA, 25 bp, Homo sapien
aagcactgttcatctgccacccagg

SEQ ID NO: 5646862 - DNA, 25 bp, Homo sapien
ctagatgtttcttagtgtcgcggcc

SEQ ID NO: 5646863 - DNA, 25 bp, Homo sapien
tcaattataggatgaaaacagcttt

SEQ ID NO: 5646864 - DNA, 25 bp, Homo sapien
gagctgaaactattccctaataccg

SEQ ID NO: 5646865 - DNA, 25 bp, Homo sapien
cagagaacactgcctggacctcagc

SEQ ID NO: 5646866 - DNA, 25 bp, Homo sapien
cactgaggcaccacatggcaaatca

SEQ ID NO: 5646867 - DNA, 25 bp, Homo sapien
tggacccagaacattcactgtatta

SEQ ID NO: 5646868 - DNA, 25 bp, Homo sapien
agaaagcaggcctgtgggctggagg

SEQ ID NO: 5646869 - DNA, 25 bp, Homo sapien
agaaacctctcattgcaagctcatc

SEQ ID NO: 5646870 - DNA, 25 bp, Homo sapien
aggcttgcgagccactggaagcctc

SEQ ID NO: 5646871 - DNA, 25 bp, Homo sapien
tatctgagtacatggacccagaaca

SEQ ID NO: 5646872 - DNA, 25 bp, Homo sapien
taggcgtgagccaccgtgcctggcc

SEQ ID NO: 5646873 - DNA, 25 bp, Homo sapien
atggcaaatcatgaaagtgggtctt

SEQ ID NO: 5646874 - DNA, 25 bp, Homo sapien
aggtgttgggtaaatccagatgaag

SEQ ID NO: 5646875 - DNA, 25 bp, Homo sapien
gccgtcacagggccgtcaatgcaga

SEQ ID NO: 5646876 - DNA, 25 bp, Homo sapien
gagatgatgcagttccgaagccggg

SEQ ID NO: 5646877 - DNA, 25 bp, Homo sapien
gcttctggagcacctccttatccct

SEQ ID NO: 5646878 - DNA, 25 bp, Homo sapien
acccaaggaagcactgttcatctgc

SEQ ID NO: 5646879 - DNA, 25 bp, Homo sapien
attaaggcagcccggtgtggacata

SEQ ID NO: 5646880 - DNA, 25 bp, Homo sapien
ttttctattggggcaatttcatggg

SEQ ID NO: 5646881 - DNA, 25 bp, Homo sapien
atataggaatggaggccaaaacaga

SEQ ID NO: 5646882 - DNA, 25 bp, Homo sapien
accaagcaaaaggctgcttgttttt

SEQ ID NO: 5646883 - DNA, 25 bp, Homo sapien
aggatgaaaacagctttgctttccc

SEQ ID NO: 5646884 - DNA, 25 bp, Homo sapien
acacagtctcgctctgtcacccagg

SEQ ID NO: 5646885 - DNA, 25 bp, Homo sapien
ccgtgcttctggagcacctccttat

SEQ ID NO: 5646886 - DNA, 25 bp, Homo sapien
tcacagtcttcactcctgcaaggtc

SEQ ID NO: 5646887 - DNA, 25 bp, Homo sapien
agggatgccatgttttctattgggg

SEQ ID NO: 5646888 - DNA, 25 bp, Homo sapien
gaatcctgtgtccgtagtgattgta

SEQ ID NO: 5646889 - DNA, 25 bp, Homo sapien
cacacctggctaattttttgtattt

SEQ ID NO: 5646890 - DNA, 25 bp, Homo sapien
cctgacctagttttccatatttcag

SEQ ID NO: 5646891 - DNA, 25 bp, Homo sapien
gtcttctgccgtttcaccagggagg

SEQ ID NO: 5646892 - DNA, 25 bp, Homo sapien
gttggtctccaccttccacctcttc

SEQ ID NO: 5646893 - DNA, 25 bp, Homo sapien
tcgtcccactacgatgtctcctact

SEQ ID NO: 5646894 - DNA, 25 bp, Homo sapien
tccagatgaagccgttgttaccgag

SEQ ID NO: 5646895 - DNA, 25 bp, Homo sapien
actgcctggacctcagcactgataa

SEQ ID NO: 5646896 - DNA, 25 bp, Homo sapien
ggtgatctgcccgccttggcctccc

SEQ ID NO: 5646897 - DNA, 25 bp, Homo sapien
gccttgtgaatgacagtgagtggaa

SEQ ID NO: 5646898 - DNA, 25 bp, Homo sapien
agatgtttcttagtgtcgcggccca

SEQ ID NO: 5646899 - DNA, 25 bp, Homo sapien
ggaagggatgcttcatagcagtaca

SEQ ID NO: 5646900 - DNA, 25 bp, Homo sapien
tctccaagcaggacagattaaggca

SEQ ID NO: 5646901 - DNA, 25 bp, Homo sapien
tgattcgtcccactacgatgtctcc

SEQ ID NO: 5646902 - DNA, 25 bp, Homo sapien
cttccacctcttctgttgaacctct

SEQ ID NO: 5646903 - DNA, 25 bp, Homo sapien
gatatcacctctcgatcagcaagag

SEQ ID NO: 5646904 - DNA, 25 bp, Homo sapien
cccggtgtggacataatcacatcta

SEQ ID NO: 5646905 - DNA, 25 bp, Homo sapien
ggccgtcaatgcagacaaagggatg

SEQ ID NO: 5646906 - DNA, 25 bp, Homo sapien
aggctggtctcgaactattgacctc

SEQ ID NO: 5646907 - DNA, 25 bp, Homo sapien
agaccatttggaggtcagggatgcc

SEQ ID NO: 5646908 - DNA, 25 bp, Homo sapien
tgtccgtagtgattgtatcccccgg

SEQ ID NO: 5646909 - DNA, 25 bp, Homo sapien
tctggcgtgtttccatcacaatctc

SEQ ID NO: 5646910 - DNA, 25 bp, Homo sapien
taccgagaatcactgaggcaccaca

SEQ ID NO: 5646911 - DNA, 25 bp, Homo sapien
tacatggacccagaacattcactgt

SEQ ID NO: 5646912 - DNA, 25 bp, Homo sapien
atccagcctggagttggtctccacc

SEQ ID NO: 5646913 - DNA, 25 bp, Homo sapien
cctcagctctcctccaggaaggttc

SEQ ID NO: 5646914 - DNA, 25 bp, Homo sapien
agagccagcaacagatgcaatgagc

SEQ ID NO: 5646915 - DNA, 25 bp, Homo sapien
aatagctgggactacaggtgcacac

SEQ ID NO: 5646916 - DNA, 25 bp, Homo sapien
agctggcaacccaaggaagcactgt

SEQ ID NO: 5646917 - DNA, 25 bp, Homo sapien
gagttggtctccaccttccacctct

SEQ ID NO: 5646918 - DNA, 25 bp, Homo sapien
cctcagcactgataaggtccccttc

SEQ ID NO: 5646919 - DNA, 25 bp, Homo sapien
tttgctttcccagtctccatttttc

SEQ ID NO: 5646920 - DNA, 25 bp, Homo sapien
cctgtaagaaacctctcattgcaag

SEQ ID NO: 5646921 - DNA, 25 bp, Homo sapien
tacaagtcactctccaagcaggaca

SEQ ID NO: 5646922 - DNA, 25 bp, Homo sapien
acccaggcttggtgttaggacagga

SEQ ID NO: 5646923 - DNA, 25 bp, Homo sapien
acactgcctggacctcagcactgat

SEQ ID NO: 5646924 - DNA, 25 bp, Homo sapien
cctggacctcagcactgataaggtc

SEQ ID NO: 5646925 - DNA, 25 bp, Homo sapien
ctgtgccttgtgaatgacagtgagt

SEQ ID NO: 5646926 - DNA, 25 bp, Homo sapien
caaccaagcaaaaggctgcttgttt

SEQ ID NO: 5646927 - DNA, 25 bp, Homo sapien
accttgttggccaggctggtctcga

SEQ ID NO: 5646928 - DNA, 25 bp, Homo sapien
agtctctcgctaagaggcttgcgag

SEQ ID NO: 5646929 - DNA, 25 bp, Homo sapien
ctcctccaggaaggttcatggacga

SEQ ID NO: 5646930 - DNA, 25 bp, Homo sapien
cattcgactgtaacactgtgcactt

SEQ ID NO: 5646931 - DNA, 25 bp, Homo sapien
cctcgtgtgcaaagagacagctccg

SEQ ID NO: 5646932 - DNA, 25 bp, Homo sapien
tccaaccaagcaaaaggctgcttgt

SEQ ID NO: 5646933 - DNA, 25 bp, Homo sapien
tgagccacatatggggaccacacat

SEQ ID NO: 5646934 - DNA, 25 bp, Homo sapien
acaaggaacacgcaacagaaaatca

SEQ ID NO: 5646935 - DNA, 25 bp, Homo sapien
ccgaagccgggatatcacctctcga

SEQ ID NO: 5646936 - DNA, 25 bp, Homo sapien
cagcatcttacaagtcactctccaa

SEQ ID NO: 5646937 - DNA, 25 bp, Homo sapien
atgaatcctgtgtccgtagtgattg

SEQ ID NO: 5646938 - DNA, 25 bp, Homo sapien
gacaggctccaggtttgcaatgaag

SEQ ID NO: 5646939 - DNA, 25 bp, Homo sapien
atcagcaagagagacaggctccagg

SEQ ID NO: 5646940 - DNA, 25 bp, Homo sapien
tcaggtgttgggtaaatccagatga

SEQ ID NO: 5646941 - DNA, 25 bp, Homo sapien
ccccttcctgtaagaaacctctcat

SEQ ID NO: 5646942 - DNA, 25 bp, Homo sapien
agctccgtcagagaacactgcctgg

SEQ ID NO: 5646943 - DNA, 25 bp, Homo sapien
ttaatgctccacactacttcaatta

SEQ ID NO: 5646944 - DNA, 25 bp, Homo sapien
ctgttgaacctctgtgattcgtccc

SEQ ID NO: 5646945 - DNA, 25 bp, Homo sapien
ccaggatgggagcccattcgactgt

SEQ ID NO: 5646946 - DNA, 25 bp, Homo sapien
aaaacagctttgctttcccagtctc

SEQ ID NO: 5646947 - DNA, 25 bp, Homo sapien
aatcatgaaagtgggtcttctgccg

SEQ ID NO: 5646948 - DNA, 25 bp, Homo sapien
acaaaggattctccatattattcca

SEQ ID NO: 5646949 - DNA, 25 bp, Homo sapien
ttctcacattcttcagcgagaactc

SEQ ID NO: 5646950 - DNA, 25 bp, Homo sapien
ggacataatcacatctatggctaca

SEQ ID NO: 5646951 - DNA, 25 bp, Homo sapien
gaagacaaaggattctccatattat

SEQ ID NO: 5646952 - DNA, 25 bp, Homo sapien
tttttagtagagatggggtttcacc

SEQ ID NO: 5646953 - DNA, 25 bp, Homo sapien
accactagatgtttcttagtgtcgc

SEQ ID NO: 5646954 - DNA, 25 bp, Homo sapien
catgttttctattggggcaatttca

SEQ ID NO: 5646955 - DNA, 25 bp, Homo sapien
tttttctttgaaacacagtctcgct

SEQ ID NO: 5646956 - DNA, 25 bp, Homo sapien
agctttcacacagatcaacttgttt

SEQ ID NO: 5646957 - DNA, 25 bp, Homo sapien
ggccccgcatgaatcctgtgtccgt

SEQ ID NO: 5646958 - DNA, 25 bp, Homo sapien
attccctaataccgggactcagctg

SEQ ID NO: 5646959 - DNA, 25 bp, Homo sapien
tccctcctgttccaaaagcctctgg

SEQ ID NO: 5646960 - DNA, 25 bp, Homo sapien
gcaatgagcttctcttctcccatat

SEQ ID NO: 5646961 - DNA, 25 bp, Homo sapien
cacagatcaacttgtttactctctc

SEQ ID NO: 5646962 - DNA, 25 bp, Homo sapien
atggctacaaggaacacgcaacaga

SEQ ID NO: 5646963 - DNA, 25 bp, Homo sapien
agcagcaagaccgaatccagcctgg

SEQ ID NO: 5646964 - DNA, 25 bp, Homo sapien
gcaaagagacagctccgtcagagaa

SEQ ID NO: 5646965 - DNA, 25 bp, Homo sapien
accacacatcacagtcttcactcct

SEQ ID NO: 5646966 - DNA, 25 bp, Homo sapien
tgcctggcctgcttggttaacttta

SEQ ID NO: 5646967 - DNA, 25 bp, Homo sapien
tctgatgtggaagggatgcttcata

SEQ ID NO: 5646968 - DNA, 25 bp, Homo sapien
cgtgcctggcctgcttggttaactt

SEQ ID NO: 5646969 - DNA, 25 bp, Homo sapien
tattccaggatgggagcccattcga

SEQ ID NO: 5646970 - DNA, 25 bp, Homo sapien
gatgaagccgttgttaccgagaatc

SEQ ID NO: 5646971 - DNA, 25 bp, Homo sapien
caggtgcacaccaccacacctggct

SEQ ID NO: 5646972 - DNA, 25 bp, Homo sapien
agcccattcgactgtaacactgtgc

SEQ ID NO: 5646973 - DNA, 25 bp, Homo sapien
gtttcttagtgtcgcggcccagtct

SEQ ID NO: 5646974 - DNA, 25 bp, Homo sapien
cactgataaggtccccttcctgtaa

SEQ ID NO: 5646975 - DNA, 25 bp, Homo sapien
ctctcattgcaagctcatcttctgc

SEQ ID NO: 5646976 - DNA, 25 bp, Homo sapien
tgtctcctacttcaccaatgtatct

SEQ ID NO: 5646977 - DNA, 25 bp, Homo sapien
ccatggccccgcatgaatcctgtgt

SEQ ID NO: 5646978 - DNA, 25 bp, Homo sapien
aagagctgaaactattccctaatac

SEQ ID NO: 5646979 - DNA, 25 bp, Homo sapien
acccaggctggagtgtggtacgcga

SEQ ID NO: 5646980 - DNA, 25 bp, Homo sapien
ggggtttcaccttgttggccaggct

SEQ ID NO: 5646981 - DNA, 25 bp, Homo sapien
taataccgggactcagctggcaacc

SEQ ID NO: 5646982 - DNA, 25 bp, Homo sapien
tctcgctaagaggcttgcgagccac

SEQ ID NO: 5646983 - DNA, 25 bp, Homo sapien
tttgaaacacagtctcgctctgtca

SEQ ID NO: 5646984 - DNA, 25 bp, Homo sapien
caagcaaaaggctgcttgttttttt

SEQ ID NO: 5646985 - DNA, 25 bp, Homo sapien
atttcagctcactgcaacctccgcc

SEQ ID NO: 5646986 - DNA, 25 bp, Homo sapien
tagtagagatggggtttcaccttgt

SEQ ID NO: 5646987 - DNA, 25 bp, Homo sapien
gtcatttaaaggatataggaatgga

SEQ ID NO: 5646988 - DNA, 25 bp, Homo sapien
gaatcactgaggcaccacatggcaa

SEQ ID NO: 5646989 - DNA, 25 bp, Homo sapien
gagaatcactgaggcaccacatggc

SEQ ID NO: 5646990 - DNA, 25 bp, Homo sapien
agttaccagcgagatgatgcagttc

SEQ ID NO: 5646991 - DNA, 25 bp, Homo sapien
tcgtgtgcaaagagacagctccgtc

SEQ ID NO: 5646992 - DNA, 25 bp, Homo sapien
ctcagtcatttaaaggatataggaa

SEQ ID NO: 5646993 - DNA, 25 bp, Homo sapien
aggaatggaggccaaaacagaccat

SEQ ID NO: 5646994 - DNA, 25 bp, Homo sapien
catctgccacccaggcttggtgtta

SEQ ID NO: 5646995 - DNA, 25 bp, Homo sapien
gcccgccttggcctccctaagtgct

SEQ ID NO: 5646996 - DNA, 25 bp, Homo sapien
gtgccttgtgaatgacagtgagtgg

SEQ ID NO: 5646997 - DNA, 25 bp, Homo sapien
caccaccacacctggctaatttttt

SEQ ID NO: 5646998 - DNA, 25 bp, Homo sapien
gaccgaatccagcctggagttggtc

SEQ ID NO: 5646999 - DNA, 25 bp, Homo sapien
tcgagtctttgctgagccacatatg

SEQ ID NO: 5647000 - DNA, 25 bp, Homo sapien
ccgcctcccaggttcaagtgattct

SEQ ID NO: 5647001 - DNA, 25 bp, Homo sapien
aaagggatgatctctcgagtctttg

SEQ ID NO: 5647002 - DNA, 25 bp, Homo sapien
ccacccaggcttggtgttaggacag

SEQ ID NO: 5647003 - DNA, 25 bp, Homo sapien
gtggtacgcgatttcagctcactgc

SEQ ID NO: 5647004 - DNA, 25 bp, Homo sapien
tcttctcccatatacgttccatggc

SEQ ID NO: 5647005 - DNA, 25 bp, Homo sapien
cagtctccatttttctttgcttatt

SEQ ID NO: 5647006 - DNA, 25 bp, Homo sapien
cattctcagtcatttaaaggatata

SEQ ID NO: 5647007 - DNA, 25 bp, Homo sapien
actacttcaattataggatgaaaac

SEQ ID NO: 5647008 - DNA, 25 bp, Homo sapien
ggttcaagtgattctcccacctcag

SEQ ID NO: 5647009 - DNA, 25 bp, Homo sapien
ttctggagcacctccttatccctcc

SEQ ID NO: 5647010 - DNA, 25 bp, Homo sapien
tcagctggcaacccaaggaagcact

SEQ ID NO: 5647011 - DNA, 25 bp, Homo sapien
tctgtcacccaggctggagtgtggt

SEQ ID NO: 5647012 - DNA, 25 bp, Homo sapien
cacattcttcagcgagaactctggc

SEQ ID NO: 5647013 - DNA, 25 bp, Homo sapien
cagctcactgcaacctccgcctccc

SEQ ID NO: 5647014 - DNA, 25 bp, Homo sapien
atgatctctcgagtctttgctgagc

SEQ ID NO: 5647015 - DNA, 25 bp, Homo sapien
gatgggagcccattcgactgtaaca

SEQ ID NO: 5647016 - DNA, 25 bp, Homo sapien
tgttaggacaggagaaagcaggcct

SEQ ID NO: 5647017 - DNA, 25 bp, Homo sapien
tttctttgaaacacagtctcgctct

SEQ ID NO: 5647018 - DNA, 25 bp, Homo sapien
aattcagcatcttacaagtcactct

SEQ ID NO: 5647019 - DNA, 25 bp, Homo sapien
cggcaccactagatgtttcttagtg

SEQ ID NO: 5647020 - DNA, 25 bp, Homo sapien
tctcgctctgtcacccaggctggag

SEQ ID NO: 5647021 - DNA, 25 bp, Homo sapien
caggctccaggtttgcaatgaagcc

SEQ ID NO: 5647022 - DNA, 25 bp, Homo sapien
tcaacttgtttactctctccacaga

SEQ ID NO: 5647023 - DNA, 25 bp, Homo sapien
atatttcaggctcctcgtgtgcaaa

SEQ ID NO: 5647024 - DNA, 25 bp, Homo sapien
accgggactcagctggcaacccaag

SEQ ID NO: 5647025 - DNA, 25 bp, Homo sapien
atgcaatgagcttctcttctcccat

SEQ ID NO: 5647026 - DNA, 25 bp, Homo sapien
agcctctggcgtgtttccatcacaa

SEQ ID NO: 5647027 - DNA, 25 bp, Homo sapien
gtgtgcaaagagacagctccgtcag

SEQ ID NO: 5647028 - DNA, 25 bp, Homo sapien
ccaggcttggtgttaggacaggaga

SEQ ID NO: 5647029 - DNA, 25 bp, Homo sapien
gctgggattataggcgtgagccacc

SEQ ID NO: 5647030 - DNA, 25 bp, Homo sapien
cccaaatagctgggactacaggtgc

SEQ ID NO: 5647031 - DNA, 25 bp, Homo sapien
tgaaaacagctttgctttcccagtc

SEQ ID NO: 5647032 - DNA, 25 bp, Homo sapien
ttggtgttaggacaggagaaagcag

SEQ ID NO: 5647033 - DNA, 25 bp, Homo sapien
ctttattcttccaactttaccagct

SEQ ID NO: 5647034 - DNA, 25 bp, Homo sapien
aatccagatgaagccgttgttaccg

SEQ ID NO: 5647035 - DNA, 25 bp, Homo sapien
caacccaaggaagcactgttcatct

SEQ ID NO: 5647036 - DNA, 25 bp, Homo sapien
ctgcttggttaactttattcttcca

SEQ ID NO: 5647037 - DNA, 25 bp, Homo sapien
catcatcctctgagttaccagcgag

SEQ ID NO: 5647038 - DNA, 25 bp, Homo sapien
ttcgactgtaacactgtgcactttg

SEQ ID NO: 5647039 - DNA, 25 bp, Homo sapien
gaagccgggatatcacctctcgatc

SEQ ID NO: 5647040 - DNA, 25 bp, Homo sapien
tcatcttctgcagatcttctcctca

SEQ ID NO: 5647041 - DNA, 25 bp, Homo sapien
attcttccaactttaccagctgcat

SEQ ID NO: 5647042 - DNA, 25 bp, Homo sapien
aaaatcagattccaaccaagcaaaa

SEQ ID NO: 5647043 - DNA, 25 bp, Homo sapien
aagggatgcttcatagcagtacagg

SEQ ID NO: 5647044 - DNA, 25 bp, Homo sapien
acagaaaatcagattccaaccaagc

SEQ ID NO: 5647045 - DNA, 25 bp, Homo sapien
ggaaggttcatggacgagagcagca

SEQ ID NO: 5647046 - DNA, 25 bp, Homo sapien
ccacactacttcaattataggatga

SEQ ID NO: 5647047 - DNA, 25 bp, Homo sapien
agtgagtggaagacaaaggattctc

SEQ ID NO: 5647048 - DNA, 25 bp, Homo sapien
agcccggtgtggacataatcacatc

SEQ ID NO: 5647049 - DNA, 25 bp, Homo sapien
aaggaagcactgttcatctgccacc

SEQ ID NO: 5647050 - DNA, 25 bp, Homo sapien
tgggagcccattcgactgtaacact

SEQ ID NO: 5647051 - DNA, 25 bp, Homo sapien
ccatatttcaggctcctcgtgtgca

SEQ ID NO: 5647052 - DNA, 25 bp, Homo sapien
ccacctcagcctcccaaatagctgg

SEQ ID NO: 5647053 - DNA, 25 bp, Homo sapien
aagagagacaggctccaggtttgca

SEQ ID NO: 5647054 - DNA, 25 bp, Homo sapien
cagtacaggatgctggtatcataca

SEQ ID NO: 5647055 - DNA, 25 bp, Homo sapien
gagtctttgctgagccacatatggg

SEQ ID NO: 5647056 - DNA, 25 bp, Homo sapien
ctcgaactattgacctcaggtgatc

SEQ ID NO: 5647057 - DNA, 25 bp, Homo sapien
gggatgcttcatagcagtacaggat

SEQ ID NO: 5647058 - DNA, 25 bp, Homo sapien
acctcaggtgatctgcccgccttgg

SEQ ID NO: 5647059 - DNA, 25 bp, Homo sapien
tttgtatttttagtagagatggggt

SEQ ID NO: 5647060 - DNA, 25 bp, Homo sapien
cttctgccgtttcaccagggagggg

SEQ ID NO: 5647061 - DNA, 25 bp, Homo sapien
aacagctttgctttcccagtctcca

SEQ ID NO: 5647062 - DNA, 25 bp, Homo sapien
cctgtgggctggaggccgtcacagg

SEQ ID NO: 5647063 - DNA, 25 bp, Homo sapien
actacaggtgcacaccaccacacct

SEQ ID NO: 5647064 - DNA, 25 bp, Homo sapien
acaggatgctggtatcatacagcat

SEQ ID NO: 5647065 - DNA, 25 bp, Homo sapien
ttcactgtattatcatgaataattc

SEQ ID NO: 5647066 - DNA, 25 bp, Homo sapien
cctctggcgtgtttccatcacaatc

SEQ ID NO: 5647067 - DNA, 25 bp, Homo sapien
gtctttgatctgatgtggaagggat

SEQ ID NO: 5647068 - DNA, 25 bp, Homo sapien
tctgtgattcgtcccactacgatgt

SEQ ID NO: 5647069 - DNA, 25 bp, Homo sapien
tttaagatgtctttgatctgatgtg

SEQ ID NO: 5647070 - DNA, 25 bp, Homo sapien
aaggatataggaatggaggccaaaa

SEQ ID NO: 5647071 - DNA, 25 bp, Homo sapien
tctgcagatcttctcctcagctctc

SEQ ID NO: 5647072 - DNA, 25 bp, Homo sapien
acatggcaaatcatgaaagtgggtc

SEQ ID NO: 5647073 - DNA, 25 bp, Homo sapien
aatttcatggggcactgtgccttgt

SEQ ID NO: 5647074 - DNA, 25 bp, Homo sapien
ctgttccaaaagcctctggcgtgtt

SEQ ID NO: 5647075 - DNA, 25 bp, Homo sapien
tataggcgtgagccaccgtgcctgg

SEQ ID NO: 5647076 - DNA, 25 bp, Homo sapien
acctagttttccatatttcaggctc

SEQ ID NO: 5647077 - DNA, 25 bp, Homo sapien
agcttctcttctcccatatacgttc

SEQ ID NO: 5647078 - DNA, 25 bp, Homo sapien
gcctcccaggttcaagtgattctcc

SEQ ID NO: 5647079 - DNA, 25 bp, Homo sapien
cgatcagcaagagagacaggctcca

SEQ ID NO: 5647080 - DNA, 25 bp, Homo sapien
gatcaacttgtttactctctccaca

SEQ ID NO: 5647081 - DNA, 25 bp, Homo sapien
tgccgtttcaccagggagggggaaa

SEQ ID NO: 5647082 - DNA, 25 bp, Homo sapien
ctccgcctcccaggttcaagtgatt

SEQ ID NO: 5647083 - DNA, 25 bp, Homo sapien
gtttgcaatgaagccccctgcttcc

SEQ ID NO: 5647084 - DNA, 25 bp, Homo sapien
acagtctcgctctgtcacccaggct

SEQ ID NO: 5647085 - DNA, 25 bp, Homo sapien
tctttgaaacacagtctcgctctgt

SEQ ID NO: 5647086 - DNA, 25 bp, Homo sapien
gaggcaccacatggcaaatcatgaa

SEQ ID NO: 5647087 - DNA, 25 bp, Homo sapien
tgggactacaggtgcacaccaccac

SEQ ID NO: 5647088 - DNA, 25 bp, Homo sapien
gaatcatccacaagttaatgctcca

SEQ ID NO: 5647089 - DNA, 25 bp, Homo sapien
tcaccttgttggccaggctggtctc

SEQ ID NO: 5647090 - DNA, 25 bp, Homo sapien
ttgcaatgaagccccctgcttcctc

SEQ ID NO: 5647091 - DNA, 25 bp, Homo sapien
ggtacgcgatttcagctcactgcaa

SEQ ID NO: 5647092 - DNA, 25 bp, Homo sapien
accacacctggctaattttttgtat

SEQ ID NO: 5647093 - DNA, 25 bp, Homo sapien
agttaatgctccacactacttcaat

SEQ ID NO: 5647094 - DNA, 25 bp, Homo sapien
ctcacattcttcagcgagaactctg

SEQ ID NO: 5647095 - DNA, 25 bp, Homo sapien
tctggctttaagatgtctttgatct

SEQ ID NO: 5647096 - DNA, 25 bp, Homo sapien
tgatctgcccgccttggcctcccta

SEQ ID NO: 5647097 - DNA, 25 bp, Homo sapien
tgtaagaaacctctcattgcaagct

SEQ ID NO: 5647098 - DNA, 25 bp, Homo sapien
attggggcaatttcatggggcactg

SEQ ID NO: 5647099 - DNA, 25 bp, Homo sapien
gccgttgttaccgagaatcactgag

SEQ ID NO: 5647100 - DNA, 25 bp, Homo sapien
gccactggaagcctcatctccatcg

SEQ ID NO: 5647101 - DNA, 25 bp, Homo sapien
acagtcccgtgcttctggagcacct

SEQ ID NO: 5647102 - DNA, 25 bp, Homo sapien
gtccccttcctgtaagaaacctctc

SEQ ID NO: 5647103 - DNA, 25 bp, Homo sapien
ttcctcttctttgtgctcaggtgtt

SEQ ID NO: 5647104 - DNA, 25 bp, Homo sapien
cactgtgccttgtgaatgacagtga

SEQ ID NO: 5647105 - DNA, 25 bp, Homo sapien
aggccgtcacagggccgtcaatgca

SEQ ID NO: 5647106 - DNA, 25 bp, Homo sapien
acaatctcctccattatttctggct

SEQ ID NO: 5647107 - DNA, 25 bp, Homo sapien
gcactgttcatctgccacccaggct

SEQ ID NO: 5647108 - DNA, 25 bp, Homo sapien
tgagcttctcttctcccatatacgt

SEQ ID NO: 5647109 - DNA, 25 bp, Homo sapien
tcatacagcatcatcctctgagtta

SEQ ID NO: 5647110 - DNA, 25 bp, Homo sapien
ggaggccaaaacagaccatttggag

SEQ ID NO: 5647111 - DNA, 25 bp, Homo sapien
tgaaactattccctaataccgggac

SEQ ID NO: 5647112 - DNA, 25 bp, Homo sapien
ggagaaagcaggcctgtgggctgga

SEQ ID NO: 5647113 - DNA, 25 bp, Homo sapien
ggctggaggccgtcacagggccgtc

SEQ ID NO: 5647114 - DNA, 25 bp, Homo sapien
tttttttctttgaaacacagtctcg

SEQ ID NO: 5647115 - DNA, 25 bp, Homo sapien
aactattccctaataccgggactca

SEQ ID NO: 5647116 - DNA, 25 bp, Homo sapien
tgattctcccacctcagcctcccaa

SEQ ID NO: 5647117 - DNA, 25 bp, Homo sapien
ggtcagggatgccatgttttctatt

SEQ ID NO: 5647118 - DNA, 25 bp, Homo sapien
atcttacaagtcactctccaagcag

SEQ ID NO: 5647119 - DNA, 25 bp, Homo sapien
gtgtcgcggcccagtctctcgctaa

SEQ ID NO: 5647120 - DNA, 25 bp, Homo sapien
caagcaggacagattaaggcagccc

SEQ ID NO: 5647121 - DNA, 25 bp, Homo sapien
gcaatttcatggggcactgtgcctt

SEQ ID NO: 5647122 - DNA, 25 bp, Homo sapien
tcttctgttgaacctctgtgattcg

SEQ ID NO: 5647123 - DNA, 25 bp, Homo sapien
aaagagacagctccgtcagagaaca

SEQ ID NO: 5647124 - DNA, 25 bp, Homo sapien
tggctttaagatgtctttgatctga

SEQ ID NO: 5647125 - DNA, 25 bp, Homo sapien
ccaggctggtctcgaactattgacc

SEQ ID NO: 5647126 - DNA, 25 bp, Homo sapien
tggttttcaaagctttcacacagat

SEQ ID NO: 5647127 - DNA, 25 bp, Homo sapien
tatccctcctgttccaaaagcctct

SEQ ID NO: 5647128 - DNA, 25 bp, Homo sapien
cctcctgttccaaaagcctctggcg

SEQ ID NO: 5647129 - DNA, 25 bp, Homo sapien
gatctctcgagtctttgctgagcca

SEQ ID NO: 5647130 - DNA, 25 bp, Homo sapien
taagatgtctttgatctgatgtgga

SEQ ID NO: 5647131 - DNA, 25 bp, Homo sapien
cgttccatggccccgcatgaatcct

SEQ ID NO: 5647132 - DNA, 25 bp, Homo sapien
atatggggaccacacatcacagtct

SEQ ID NO: 5647133 - DNA, 25 bp, Homo sapien
tgtcacccaggctggagtgtggtac

SEQ ID NO: 5647134 - DNA, 25 bp, Homo sapien
ctctcgatcagcaagagagacaggc

SEQ ID NO: 5647135 - DNA, 25 bp, Homo sapien
acagcatcatcctctgagttaccag

SEQ ID NO: 5647136 - DNA, 25 bp, Homo sapien
gagaacactgcctggacctcagcac

SEQ ID NO: 5647137 - DNA, 25 bp, Homo sapien
tacgcgatttcagctcactgcaacc

SEQ ID NO: 5647138 - DNA, 25 bp, Homo sapien
tcagcactgataaggtccccttcct

SEQ ID NO: 5647139 - DNA, 25 bp, Homo sapien
ctcagcctcccaaatagctgggact

SEQ ID NO: 5647140 - DNA, 25 bp, Homo sapien
tccgtagtgattgtatcccccggca

SEQ ID NO: 5647141 - DNA, 25 bp, Homo sapien
tgatgcagttccgaagccgggatat

SEQ ID NO: 5647142 - DNA, 25 bp, Homo sapien
cagctgcattctcagtcatttaaag

SEQ ID NO: 5647143 - DNA, 25 bp, Homo sapien
tgggctggaggccgtcacagggccg

SEQ ID NO: 5647144 - DNA, 25 bp, Homo sapien
tttatctgagtacatggacccagaa

SEQ ID NO: 5647145 - DNA, 25 bp, Homo sapien
cctgcaaggtccacagtcccgtgct

SEQ ID NO: 5647146 - DNA, 25 bp, Homo sapien
catgtttatctgagtacatggaccc

SEQ ID NO: 5647147 - DNA, 25 bp, Homo sapien
aggcagcccggtgtggacataatca

SEQ ID NO: 5647148 - DNA, 25 bp, Homo sapien
caaatcatgaaagtgggtcttctgc

SEQ ID NO: 5647149 - DNA, 25 bp, Homo sapien
tgatgtggaagggatgcttcatagc

SEQ ID NO: 5647150 - DNA, 25 bp, Homo sapien
ccaggtttgcaatgaagccccctgc

SEQ ID NO: 5647151 - DNA, 25 bp, Homo sapien
gataaggtccccttcctgtaagaaa

SEQ ID NO: 5647152 - DNA, 25 bp, Homo sapien
attctcccacctcagcctcccaaat

SEQ ID NO: 5647153 - DNA, 25 bp, Homo sapien
ctacttcaccaatgtatctggtttt

SEQ ID NO: 5647154 - DNA, 25 bp, Homo sapien
ttctcagtcatttaaaggatatagg

SEQ ID NO: 5647155 - DNA, 25 bp, Homo sapien
ctcgatcagcaagagagacaggctc

SEQ ID NO: 5647156 - DNA, 25 bp, Homo sapien
acagattaaggcagcccggtgtgga

SEQ ID NO: 5647157 - DNA, 25 bp, Homo sapien
tcagctctcctccaggaaggttcat

SEQ ID NO: 5647158 - DNA, 25 bp, Homo sapien
ctcctgcaaggtccacagtcccgtg

SEQ ID NO: 5647159 - DNA, 25 bp, Homo sapien
gcatgaatcctgtgtccgtagtgat

SEQ ID NO: 5647160 - DNA, 25 bp, Homo sapien
ttgatctgatgtggaagggatgctt

SEQ ID NO: 5647161 - DNA, 25 bp, Homo sapien
atctatggctacaaggaacacgcaa

SEQ ID NO: 5647162 - DNA, 25 bp, Homo sapien
tcccgtgcttctggagcacctcctt

SEQ ID NO: 5647163 - DNA, 25 bp, Homo sapien
attgacctcaggtgatctgcccgcc

SEQ ID NO: 5647164 - DNA, 25 bp, Homo sapien
gctgcattctcagtcatttaaagga

SEQ ID NO: 5647165 - DNA, 25 bp, Homo sapien
gtcgcggcccagtctctcgctaaga

SEQ ID NO: 5647166 - DNA, 25 bp, Homo sapien
ttttctcacattcttcagcgagaac

SEQ ID NO: 5647167 - DNA, 25 bp, Homo sapien
tatctggttttcaaagctttcacac

SEQ ID NO: 5647168 - DNA, 25 bp, Homo sapien
gctgggactacaggtgcacaccacc

SEQ ID NO: 5647169 - DNA, 25 bp, Homo sapien
gattgtatcccccggcaccactaga

SEQ ID NO: 5647170 - DNA, 25 bp, Homo sapien
attcgtcccactacgatgtctccta

SEQ ID NO: 5647171 - DNA, 25 bp, Homo sapien
ggcctgtgggctggaggccgtcaca

SEQ ID NO: 5647172 - DNA, 25 bp, Homo sapien
ctacgatgtctcctacttcaccaat

SEQ ID NO: 5647173 - DNA, 25 bp, Homo sapien
ctgtattatcatgaataattcagca

SEQ ID NO: 5647174 - DNA, 25 bp, Homo sapien
gagacaggctccaggtttgcaatga

SEQ ID NO: 5647175 - DNA, 25 bp, Homo sapien
cagctttgctttcccagtctccatt

SEQ ID NO: 5647176 - DNA, 25 bp, Homo sapien
agcaggcctgtgggctggaggccgt

SEQ ID NO: 5647177 - DNA, 25 bp, Homo sapien
cagcaagagagacaggctccaggtt

SEQ ID NO: 5647178 - DNA, 25 bp, Homo sapien
ctccctaagtgctgggattataggc

SEQ ID NO: 5647179 - DNA, 25 bp, Homo sapien
ttgcaagctcatcttctgcagatct

SEQ ID NO: 5647180 - DNA, 25 bp, Homo sapien
cactgtattatcatgaataattcag

SEQ ID NO: 5647181 - DNA, 25 bp, Homo sapien
caagttaatgctccacactacttca

SEQ ID NO: 5647182 - DNA, 25 bp, Homo sapien
tctggttttcaaagctttcacacag

SEQ ID NO: 5647183 - DNA, 25 bp, Homo sapien
cagcgagatgatgcagttccgaagc

SEQ ID NO: 5647184 - DNA, 25 bp, Homo sapien
atcccccggcaccactagatgtttc

SEQ ID NO: 5647185 - DNA, 25 bp, Homo sapien
aaacctctcattgcaagctcatctt

SEQ ID NO: 5647186 - DNA, 25 bp, Homo sapien
taaatccagatgaagccgttgttac

SEQ ID NO: 5647187 - DNA, 25 bp, Homo sapien
ggctacaaggaacacgcaacagaaa

SEQ ID NO: 5647188 - DNA, 25 bp, Homo sapien
tggtctccaccttccacctcttctg

SEQ ID NO: 5647189 - DNA, 25 bp, Homo sapien
tagtgattgtatcccccggcaccac

SEQ ID NO: 5647190 - DNA, 25 bp, Homo sapien
caccacatggcaaatcatgaaagtg

SEQ ID NO: 5647191 - DNA, 25 bp, Homo sapien
ggaggccgtcacagggccgtcaatg

SEQ ID NO: 5647192 - DNA, 25 bp, Homo sapien
cagcctcccaaatagctgggactac

SEQ ID NO: 5647193 - DNA, 25 bp, Homo sapien
tgtaacactgtgcactttgaaagag

SEQ ID NO: 5647194 - DNA, 25 bp, Homo sapien
actcagctggcaacccaaggaagca

SEQ ID NO: 5647195 - DNA, 25 bp, Homo sapien
cttacaagtcactctccaagcagga

SEQ ID NO: 5647196 - DNA, 25 bp, Homo sapien
atctgcccgccttggcctccctaag

SEQ ID NO: 5647197 - DNA, 25 bp, Homo sapien
gatgtctcctacttcaccaatgtat

SEQ ID NO: 5647198 - DNA, 25 bp, Homo sapien
agccgggatatcacctctcgatcag

SEQ ID NO: 5647199 - DNA, 25 bp, Homo sapien
aacacgcaacagaaaatcagattcc

SEQ ID NO: 5647200 - DNA, 25 bp, Homo sapien
aatctcctccattatttctggcttt

SEQ ID NO: 5647201 - DNA, 25 bp, Homo sapien
ccatcacaatctcctccattatttc

SEQ ID NO: 5647202 - DNA, 25 bp, Homo sapien
ttcaagtgattctcccacctcagcc

SEQ ID NO: 5647203 - DNA, 25 bp, Homo sapien
cctccaggaaggttcatggacgaga

SEQ ID NO: 5647204 - DNA, 25 bp, Homo sapien
ctcctcgtgtgcaaagagacagctc

SEQ ID NO: 5647205 - DNA, 25 bp, Homo sapien
ctttaccagctgcattctcagtcat

SEQ ID NO: 5647206 - DNA, 25 bp, Homo sapien
gattctccatattattccaggatgg

SEQ ID NO: 5647207 - DNA, 25 bp, Homo sapien
ttttaactctgaatcatccacaagt

SEQ ID NO: 5647208 - DNA, 25 bp, Homo sapien
tttcaccttgttggccaggctggtc

SEQ ID NO: 5647209 - DNA, 25 bp, Homo sapien
gccttggcctccctaagtgctggga

SEQ ID NO: 5647210 - DNA, 25 bp, Homo sapien
tcctccattatttctggctttaaga

SEQ ID NO: 5647211 - DNA, 25 bp, Homo sapien
tgggattataggcgtgagccaccgt

SEQ ID NO: 5647212 - DNA, 25 bp, Homo sapien
ctttgatctgatgtggaagggatgc

SEQ ID NO: 5647213 - DNA, 25 bp, Homo sapien
cttctcttctcccatatacgttcca

SEQ ID NO: 5647214 - DNA, 25 bp, Homo sapien
ggcaccacatggcaaatcatgaaag

SEQ ID NO: 5647215 - DNA, 25 bp, Homo sapien
ccaaggaagcactgttcatctgcca

SEQ ID NO: 5647216 - DNA, 25 bp, Homo sapien
ctttgaaagagctgaaactattccc

SEQ ID NO: 5647217 - DNA, 25 bp, Homo sapien
ctattggggcaatttcatggggcac

SEQ ID NO: 5647218 - DNA, 25 bp, Homo sapien
gccatgttttctattggggcaattt

SEQ ID NO: 5647219 - DNA, 25 bp, Homo sapien
ctggcgtctttttatcttttaactc

SEQ ID NO: 5647220 - DNA, 25 bp, Homo sapien
agtcttcactcctgcaaggtccaca

SEQ ID NO: 5647221 - DNA, 25 bp, Homo sapien
ctttgtgctcaggtgttgggtaaat

SEQ ID NO: 5647222 - DNA, 25 bp, Homo sapien
tctcccacctcagcctcccaaatag

SEQ ID NO: 5647223 - DNA, 25 bp, Homo sapien
gacccagaacattcactgtattatc

SEQ ID NO: 5647224 - DNA, 25 bp, Homo sapien
ataatcacatctatggctacaagga

SEQ ID NO: 5647225 - DNA, 25 bp, Homo sapien
acagggccgtcaatgcagacaaagg

SEQ ID NO: 5647226 - DNA, 25 bp, Homo sapien
aggatgggagcccattcgactgtaa

SEQ ID NO: 5647227 - DNA, 25 bp, Homo sapien
aagctcatcttctgcagatcttctc

SEQ ID NO: 5647228 - DNA, 25 bp, Homo sapien
atcctctgagttaccagcgagatga

SEQ ID NO: 5647229 - DNA, 25 bp, Homo sapien
atggggcactgtgccttgtgaatga

SEQ ID NO: 5647230 - DNA, 25 bp, Homo sapien
atggggtttcaccttgttggccagg

SEQ ID NO: 5647231 - DNA, 25 bp, Homo sapien
tcttctttgtgctcaggtgttgggt

SEQ ID NO: 5647232 - DNA, 25 bp, Homo sapien
atgcagacaaagggatgatctctcg

SEQ ID NO: 5647233 - DNA, 25 bp, Homo sapien
acagatgcaatgagcttctcttctc

SEQ ID NO: 5647234 - DNA, 25 bp, Homo sapien
ctgataaggtccccttcctgtaaga

SEQ ID NO: 5647235 - DNA, 25 bp, Homo sapien
tcacatctatggctacaaggaacac

SEQ ID NO: 5647236 - DNA, 25 bp, Homo sapien
ggtgcacaccaccacacctggctaa

SEQ ID NO: 5647237 - DNA, 25 bp, Homo sapien
ccttcctgtaagaaacctctcattg

SEQ ID NO: 5647238 - DNA, 25 bp, Homo sapien
gtggacataatcacatctatggcta

SEQ ID NO: 5647239 - DNA, 25 bp, Homo sapien
caaggtccacagtcccgtgcttctg

SEQ ID NO: 5647240 - DNA, 25 bp, Homo sapien
tctgccgtttcaccagggaggggga

SEQ ID NO: 5647241 - DNA, 25 bp, Homo sapien
ttctttgtgctcaggtgttgggtaa

SEQ ID NO: 5647242 - DNA, 25 bp, Homo sapien
agaggcttgcgagccactggaagcc

SEQ ID NO: 5647243 - DNA, 25 bp, Homo sapien
acctcagcctcccaaatagctggga

SEQ ID NO: 5647244 - DNA, 25 bp, Homo sapien
cctcttctttgtgctcaggtgttgg

SEQ ID NO: 5647245 - DNA, 25 bp, Homo sapien
gcaagctcatcttctgcagatcttc

SEQ ID NO: 5647246 - DNA, 25 bp, Homo sapien
cacctcttctgttgaacctctgtga

SEQ ID NO: 5647247 - DNA, 25 bp, Homo sapien
ggtgttaggacaggagaaagcaggc

SEQ ID NO: 5647248 - DNA, 25 bp, Homo sapien
ctattccctaataccgggactcagc

SEQ ID NO: 5647249 - DNA, 25 bp, Homo sapien
aaagcaggcctgtgggctggaggcc

SEQ ID NO: 5647250 - DNA, 25 bp, Homo sapien
tgtttactctctccacagagccagc

SEQ ID NO: 5647251 - DNA, 25 bp, Homo sapien
ctggaagcctcatctccatcgccat

SEQ ID NO: 5647252 - DNA, 25 bp, Homo sapien
taacactgtgcactttgaaagagct

SEQ ID NO: 5647253 - DNA, 25 bp, Homo sapien
gctgagccacatatggggaccacac

SEQ ID NO: 5647254 - DNA, 25 bp, Homo sapien
cgtagtgattgtatcccccggcacc

SEQ ID NO: 5647255 - DNA, 25 bp, Homo sapien
ggtttcaccttgttggccaggctgg

SEQ ID NO: 5647256 - DNA, 25 bp, Homo sapien
gcgagccactggaagcctcatctcc

SEQ ID NO: 5647257 - DNA, 25 bp, Homo sapien
taaggcagcccggtgtggacataat

SEQ ID NO: 5647258 - DNA, 25 bp, Homo sapien
agttttccatatttcaggctcctcg

SEQ ID NO: 5647259 - DNA, 25 bp, Homo sapien
tcttttaactctgaatcatccacaa

SEQ ID NO: 5647260 - DNA, 25 bp, Homo sapien
gtagagatggggtttcaccttgttg

SEQ ID NO: 5647261 - DNA, 25 bp, Homo sapien
aggcttggtgttaggacaggagaaa

SEQ ID NO: 5647262 - DNA, 25 bp, Homo sapien
gtacaggatgctggtatcatacagc

SEQ ID NO: 5647263 - DNA, 25 bp, Homo sapien
agcgagaactctggcgtctttttat

SEQ ID NO: 5647264 - DNA, 25 bp, Homo sapien
tggagttggtctccaccttccacct

SEQ ID NO: 5647265 - DNA, 25 bp, Homo sapien
gctcaggtgttgggtaaatccagat

SEQ ID NO: 5647266 - DNA, 25 bp, Homo sapien
ctcaggtgatctgcccgccttggcc

SEQ ID NO: 5647267 - DNA, 25 bp, Homo sapien
attataggcgtgagccaccgtgcct

SEQ ID NO: 5647268 - DNA, 25 bp, Homo sapien
tgtgcactttgaaagagctgaaact

SEQ ID NO: 5647269 - DNA, 25 bp, Homo sapien
catttggaggtcagggatgccatgt

SEQ ID NO: 5647270 - DNA, 25 bp, Homo sapien
cctcttctgttgaacctctgtgatt

SEQ ID NO: 5647271 - DNA, 25 bp, Homo sapien
ccaccacacctggctaattttttgt

SEQ ID NO: 5647272 - DNA, 25 bp, Homo sapien
tccaaaagcctctggcgtgtttcca

SEQ ID NO: 5647273 - DNA, 25 bp, Homo sapien
catggacccagaacattcactgtat

SEQ ID NO: 5647274 - DNA, 25 bp, Homo sapien
aaggttcatggacgagagcagcaag

SEQ ID NO: 5647275 - DNA, 25 bp, Homo sapien
acagtcttcactcctgcaaggtcca

SEQ ID NO: 5647276 - DNA, 25 bp, Homo sapien
gtcaatgcagacaaagggatgatct

SEQ ID NO: 5647277 - DNA, 25 bp, Homo sapien
gacaggagaaagcaggcctgtgggc

SEQ ID NO: 5647278 - DNA, 25 bp, Homo sapien
gtctccaccttccacctcttctgtt

SEQ ID NO: 5647279 - DNA, 25 bp, Homo sapien
gctttaagatgtctttgatctgatg

SEQ ID NO: 5647280 - DNA, 25 bp, Homo sapien
ttttccatatttcaggctcctcgtg

SEQ ID NO: 5647281 - DNA, 25 bp, Homo sapien
tgcacaccaccacacctggctaatt

SEQ ID NO: 5647282 - DNA, 25 bp, Homo sapien
aagccgttgttaccgagaatcactg

SEQ ID NO: 5647283 - DNA, 25 bp, Homo sapien
acatatggggaccacacatcacagt

SEQ ID NO: 5647284 - DNA, 25 bp, Homo sapien
gtgcaaagagacagctccgtcagag

SEQ ID NO: 5647285 - DNA, 25 bp, Homo sapien
aaaggattctccatattattccagg

SEQ ID NO: 5647286 - DNA, 25 bp, Homo sapien
gtgcttctggagcacctccttatcc

SEQ ID NO: 5647287 - DNA, 25 bp, Homo sapien
cgcaacagaaaatcagattccaacc

SEQ ID NO: 5647288 - DNA, 25 bp, Homo sapien
gggatatcacctctcgatcagcaag

SEQ ID NO: 5647289 - DNA, 25 bp, Homo sapien
gatcttctcctcagctctcctccag

SEQ ID NO: 5647290 - DNA, 25 bp, Homo sapien
ttggccaggctggtctcgaactatt

SEQ ID NO: 5647291 - DNA, 25 bp, Homo sapien
cccagtctccatttttctttgctta

SEQ ID NO: 5647292 - DNA, 25 bp, Homo sapien
ttttttttctcacattcttcagcga

SEQ ID NO: 5647293 - DNA, 25 bp, Homo sapien
gcttcctcttctttgtgctcaggtg

SEQ ID NO: 5647294 - DNA, 25 bp, Homo sapien
tacaggtgcacaccaccacacctgg

SEQ ID NO: 5647295 - DNA, 25 bp, Homo sapien
cgtcacagggccgtcaatgcagaca

SEQ ID NO: 5647296 - DNA, 25 bp, Homo sapien
gtgtggtacgcgatttcagctcact

SEQ ID NO: 5647297 - DNA, 25 bp, Homo sapien
caggcctgtgggctggaggccgtca

SEQ ID NO: 5647298 - DNA, 25 bp, Homo sapien
atgccatgttttctattggggcaat

SEQ ID NO: 5647299 - DNA, 25 bp, Homo sapien
ttcatggacgagagcagcaagaccg

SEQ ID NO: 5647300 - DNA, 25 bp, Homo sapien
caacagaaaatcagattccaaccaa

SEQ ID NO: 5647301 - DNA, 25 bp, Homo sapien
cttgtttactctctccacagagcca

SEQ ID NO: 5647302 - DNA, 25 bp, Homo sapien
tccacctcttctgttgaacctctgt

SEQ ID NO: 5647303 - DNA, 25 bp, Homo sapien
ttcatgtttatctgagtacatggac

SEQ ID NO: 5647304 - DNA, 25 bp, Homo sapien
ccaccgtgcctggcctgcttggtta

SEQ ID NO: 5647305 - DNA, 25 bp, Homo sapien
ccaatgtatctggttttcaaagctt

SEQ ID NO: 5647306 - DNA, 25 bp, Homo sapien
cacaccaccacacctggctaatttt

SEQ ID NO: 5647307 - DNA, 25 bp, Homo sapien
caagtcactctccaagcaggacaga

SEQ ID NO: 5647308 - DNA, 25 bp, Homo sapien
atgtggaagggatgcttcatagcag

SEQ ID NO: 5647309 - DNA, 25 bp, Homo sapien
ttccaactttaccagctgcattctc

SEQ ID NO: 5647310 - DNA, 25 bp, Homo sapien
gtttccatcacaatctcctccatta

SEQ ID NO: 5647311 - DNA, 25 bp, Homo sapien
tgctggtatcatacagcatcatcct

SEQ ID NO: 5647312 - DNA, 25 bp, Homo sapien
acttcaccaatgtatctggttttca

SEQ ID NO: 5647313 - DNA, 25 bp, Homo sapien
taagaggcttgcgagccactggaag

SEQ ID NO: 5647314 - DNA, 25 bp, Homo sapien
tcacccaggctggagtgtggtacgc

SEQ ID NO: 5647315 - DNA, 25 bp, Homo sapien
caagtgattctcccacctcagcctc

SEQ ID NO: 5647316 - DNA, 25 bp, Homo sapien
gatgcttcatagcagtacaggatgc

SEQ ID NO: 5647317 - DNA, 25 bp, Homo sapien
tgagtggaagacaaaggattctcca

SEQ ID NO: 5647318 - DNA, 25 bp, Homo sapien
tggaagacaaaggattctccatatt

SEQ ID NO: 5647319 - DNA, 25 bp, Homo sapien
gcttgcgagccactggaagcctcat

SEQ ID NO: 5647320 - DNA, 25 bp, Homo sapien
accgtgcctggcctgcttggttaac

SEQ ID NO: 5647321 - DNA, 25 bp, Homo sapien
ccgagaatcactgaggcaccacatg

SEQ ID NO: 5647322 - DNA, 25 bp, Homo sapien
ccacatggcaaatcatgaaagtggg

SEQ ID NO: 5647323 - DNA, 25 bp, Homo sapien
gcgtgtttccatcacaatctcctcc

SEQ ID NO: 5647324 - DNA, 25 bp, Homo sapien
cggtgtggacataatcacatctatg

SEQ ID NO: 5647325 - DNA, 25 bp, Homo sapien
agggccgtcaatgcagacaaaggga

SEQ ID NO: 5647326 - DNA, 25 bp, Homo sapien
ggctcctcgtgtgcaaagagacagc

SEQ ID NO: 5647327 - DNA, 25 bp, Homo sapien
cagatcttctcctcagctctcctcc

SEQ ID NO: 5647328 - DNA, 25 bp, Homo sapien
tatcacctctcgatcagcaagagag

SEQ ID NO: 5647329 - DNA, 25 bp, Homo sapien
ccatattattccaggatgggagccc

SEQ ID NO: 5647330 - DNA, 25 bp, Homo sapien
gtgtttccatcacaatctcctccat

SEQ ID NO: 5647331 - DNA, 25 bp, Homo sapien
ggtatcatacagcatcatcctctga

SEQ ID NO: 5647332 - DNA, 25 bp, Homo sapien
agctctcctccaggaaggttcatgg

SEQ ID NO: 5647333 - DNA, 25 bp, Homo sapien
ctcccaggttcaagtgattctccca

SEQ ID NO: 5647334 - DNA, 25 bp, Homo sapien
ccagcctggagttggtctccacctt

SEQ ID NO: 5647335 - DNA, 25 bp, Homo sapien
aatgacagtgagtggaagacaaagg

SEQ ID NO: 5647336 - DNA, 25 bp, Homo sapien
agcaacagatgcaatgagcttctct

SEQ ID NO: 5647337 - DNA, 25 bp, Homo sapien
ttcttcagcgagaactctggcgtct

SEQ ID NO: 5647338 - DNA, 25 bp, Homo sapien
ccacagagccagcaacagatgcaat

SEQ ID NO: 5647339 - DNA, 25 bp, Homo sapien
ccgggatatcacctctcgatcagca

SEQ ID NO: 5647340 - DNA, 25 bp, Homo sapien
cttcaattataggatgaaaacagct

SEQ ID NO: 5647341 - DNA, 25 bp, Homo sapien
ctcctcagctctcctccaggaaggt

SEQ ID NO: 5647342 - DNA, 25 bp, Homo sapien
ttaggacaggagaaagcaggcctgt

SEQ ID NO: 5647343 - DNA, 25 bp, Homo sapien
tcgctctgtcacccaggctggagtg

SEQ ID NO: 5647344 - DNA, 25 bp, Homo sapien
attattccaggatgggagcccattc

SEQ ID NO: 5647345 - DNA, 25 bp, Homo sapien
gcatcttacaagtcactctccaagc

SEQ ID NO: 5647346 - DNA, 25 bp, Homo sapien
aatgctccacactacttcaattata

SEQ ID NO: 5647347 - DNA, 25 bp, Homo sapien
ggacagattaaggcagcccggtgtg

SEQ ID NO: 5647348 - DNA, 25 bp, Homo sapien
aaagcctctggcgtgtttccatcac

SEQ ID NO: 5647349 - DNA, 25 bp, Homo sapien
ataattcagcatcttacaagtcact

SEQ ID NO: 5647350 - DNA, 25 bp, Homo sapien
accttccacctcttctgttgaacct

SEQ ID NO: 5647351 - DNA, 25 bp, Homo sapien
tttaaaggatataggaatggaggcc

SEQ ID NO: 5647352 - DNA, 25 bp, Homo sapien
ctctctccacagagccagcaacaga

SEQ ID NO: 5647353 - DNA, 25 bp, Homo sapien
gtctcgaactattgacctcaggtga

SEQ ID NO: 5647354 - DNA, 25 bp, Homo sapien
ggatgatctctcgagtctttgctga

SEQ ID NO: 5647355 - DNA, 25 bp, Homo sapien
gcctgcttggttaactttattcttc

SEQ ID NO: 5647356 - DNA, 25 bp, Homo sapien
caggctcctcgtgtgcaaagagaca

SEQ ID NO: 5647357 - DNA, 25 bp, Homo sapien
gttgaacctctgtgattcgtcccac

SEQ ID NO: 5647358 - DNA, 25 bp, Homo sapien
tcatcctctgagttaccagcgagat

SEQ ID NO: 5647359 - DNA, 25 bp, Homo sapien
gggcaatttcatggggcactgtgcc

SEQ ID NO: 5647360 - DNA, 25 bp, Homo sapien
atgcagttccgaagccgggatatca

SEQ ID NO: 5647361 - DNA, 25 bp, Homo sapien
tttctggctttaagatgtctttgat

SEQ ID NO: 5647362 - DNA, 25 bp, Homo sapien
ggattataggcgtgagccaccgtgc

SEQ ID NO: 5647363 - DNA, 25 bp, Homo sapien
tgccacccaggcttggtgttaggac

SEQ ID NO: 5647364 - DNA, 25 bp, Homo sapien
gacctcagcactgataaggtcccct

SEQ ID NO: 5647365 - DNA, 25 bp, Homo sapien
gtgttgggtaaatccagatgaagcc

SEQ ID NO: 5647366 - DNA, 25 bp, Homo sapien
ctccgtcagagaacactgcctggac

SEQ ID NO: 5647367 - DNA, 25 bp, Homo sapien
tcccacctcagcctcccaaatagct

SEQ ID NO: 5647368 - DNA, 25 bp, Homo sapien
atacagcatcatcctctgagttacc

SEQ ID NO: 5647369 - DNA, 25 bp, Homo sapien
agacaaagggatgatctctcgagtc

SEQ ID NO: 5647370 - DNA, 25 bp, Homo sapien
tagtgtcgcggcccagtctctcgct

SEQ ID NO: 5647371 - DNA, 25 bp, Homo sapien
ctctgaatcatccacaagttaatgc

SEQ ID NO: 5647372 - DNA, 25 bp, Homo sapien
ttcaccaatgtatctggttttcaaa

SEQ ID NO: 5647373 - DNA, 25 bp, Homo sapien
gcagcccggtgtggacataatcaca

SEQ ID NO: 5647374 - DNA, 25 bp, Homo sapien
tccaagcaggacagattaaggcagc

SEQ ID NO: 5647375 - DNA, 25 bp, Homo sapien
aggtttgcaatgaagccccctgctt

SEQ ID NO: 5647376 - DNA, 25 bp, Homo sapien
ccctgcttcctcttctttgtgctca

SEQ ID NO: 5647377 - DNA, 25 bp, Homo sapien
ccagcaacagatgcaatgagcttct

SEQ ID NO: 5647378 - DNA, 25 bp, Homo sapien
tcacagggccgtcaatgcagacaaa

SEQ ID NO: 5647379 - DNA, 25 bp, Homo sapien
ggactcagctggcaacccaaggaag

SEQ ID NO: 5647380 - DNA, 25 bp, Homo sapien
gcctcccaaatagctgggactacag

SEQ ID NO: 5647381 - DNA, 25 bp, Homo sapien
tttactctctccacagagccagcaa

SEQ ID NO: 5647382 - DNA, 25 bp, Homo sapien
tgtgaatgacagtgagtggaagaca

SEQ ID NO: 5647383 - DNA, 25 bp, Homo sapien
gctctgtcacccaggctggagtgtg

SEQ ID NO: 5647384 - DNA, 25 bp, Homo sapien
cagatgaagccgttgttaccgagaa

SEQ ID NO: 5647385 - DNA, 25 bp, Homo sapien
tggcctgcttggttaactttattct

SEQ ID NO: 5647386 - DNA, 25 bp, Homo sapien
aggccaaaacagaccatttggaggt

SEQ ID NO: 5647387 - DNA, 25 bp, Homo sapien
tcagggatgccatgttttctattgg

SEQ ID NO: 5647388 - DNA, 25 bp, Homo sapien
ctttgctgagccacatatggggacc

SEQ ID NO: 5647389 - DNA, 25 bp, Homo sapien
cgggactcagctggcaacccaagga

SEQ ID NO: 5647390 - DNA, 25 bp, Homo sapien
catccacaagttaatgctccacact

SEQ ID NO: 5647391 - DNA, 25 bp, Homo sapien
ttcagctcactgcaacctccgcctc

SEQ ID NO: 5647392 - DNA, 25 bp, Homo sapien
ggcaaatcatgaaagtgggtcttct

SEQ ID NO: 5647393 - DNA, 25 bp, Homo sapien
tatcttttaactctgaatcatccac

SEQ ID NO: 5647394 - DNA, 25 bp, Homo sapien
ctccaggtttgcaatgaagccccct

SEQ ID NO: 5647395 - DNA, 25 bp, Homo sapien
tgcctggacctcagcactgataagg

SEQ ID NO: 5647396 - DNA, 25 bp, Homo sapien
ttccatcacaatctcctccattatt

SEQ ID NO: 5647397 - DNA, 25 bp, Homo sapien
acctctcattgcaagctcatcttct

SEQ ID NO: 5647398 - DNA, 25 bp, Homo sapien
cagaacattcactgtattatcatga

SEQ ID NO: 5647399 - DNA, 25 bp, Homo sapien
tctcgagtctttgctgagccacata

SEQ ID NO: 5647400 - DNA, 25 bp, Homo sapien
cgagaactctggcgtctttttatct

SEQ ID NO: 5647401 - DNA, 25 bp, Homo sapien
tcagcgagaactctggcgtcttttt

SEQ ID NO: 5647402 - DNA, 25 bp, Homo sapien
gatgatgcagttccgaagccgggat

SEQ ID NO: 5647403 - DNA, 25 bp, Homo sapien
agtctcgctctgtcacccaggctgg

SEQ ID NO: 5647404 - DNA, 25 bp, Homo sapien
ccagtctctcgctaagaggcttgcg

SEQ ID NO: 5647405 - DNA, 25 bp, Homo sapien
tgaatgacagtgagtggaagacaaa

SEQ ID NO: 5647406 - DNA, 25 bp, Homo sapien
ctggagcacctccttatccctcctg

SEQ ID NO: 5647407 - DNA, 25 bp, Homo sapien
tcttctcctcagctctcctccagga

SEQ ID NO: 5647408 - DNA, 25 bp, Homo sapien
atttcaggctcctcgtgtgcaaaga

SEQ ID NO: 5647409 - DNA, 25 bp, Homo sapien
agcactgataaggtccccttcctgt

SEQ ID NO: 5647410 - DNA, 25 bp, Homo sapien
ccacatatggggaccacacatcaca

SEQ ID NO: 5647411 - DNA, 25 bp, Homo sapien
tcttcactcctgcaaggtccacagt

SEQ ID NO: 5647412 - DNA, 25 bp, Homo sapien
ctccacagagccagcaacagatgca

SEQ ID NO: 5647413 - DNA, 25 bp, Homo sapien
gtatcccccggcaccactagatgtt

SEQ ID NO: 5647414 - DNA, 25 bp, Homo sapien
ttctccatattattccaggatggga

SEQ ID NO: 5647415 - DNA, 25 bp, Homo sapien
ggactacaggtgcacaccaccacac

SEQ ID NO: 5647416 - DNA, 25 bp, Homo sapien
cgaactattgacctcaggtgatctg

SEQ ID NO: 5647417 - DNA, 25 bp, Homo sapien
aactattgacctcaggtgatctgcc

SEQ ID NO: 5647418 - DNA, 25 bp, Homo sapien
tttggaggtcagggatgccatgttt

SEQ ID NO: 5647419 - DNA, 25 bp, Homo sapien
tccctaataccgggactcagctggc

SEQ ID NO: 5647420 - DNA, 25 bp, Homo sapien
gcaccactagatgtttcttagtgtc

SEQ ID NO: 5647421 - DNA, 25 bp, Homo sapien
ggcactgtgccttgtgaatgacagt

SEQ ID NO: 5647422 - DNA, 25 bp, Homo sapien
taagaaacctctcattgcaagctca

SEQ ID NO: 5647423 - DNA, 25 bp, Homo sapien
cccccggcaccactagatgtttctt

SEQ ID NO: 5647424 - DNA, 25 bp, Homo sapien
atggggaccacacatcacagtcttc

SEQ ID NO: 5647425 - DNA, 25 bp, Homo sapien
ttctcccatatacgttccatggccc

SEQ ID NO: 5647426 - DNA, 25 bp, Homo sapien
cgcgatttcagctcactgcaacctc

SEQ ID NO: 5647427 - DNA, 25 bp, Homo sapien
tacgttccatggccccgcatgaatc

SEQ ID NO: 5647428 - DNA, 25 bp, Homo sapien
tgcactttgaaagagctgaaactat

SEQ ID NO: 5647429 - DNA, 25 bp, Homo sapien
ggggcactgtgccttgtgaatgaca

SEQ ID NO: 5647430 - DNA, 25 bp, Homo sapien
ttcatctgccacccaggcttggtgt

SEQ ID NO: 5647431 - DNA, 25 bp, Homo sapien
tctgccacccaggcttggtgttagg

SEQ ID NO: 5647432 - DNA, 25 bp, Homo sapien
tttcatggggcactgtgccttgtga

SEQ ID NO: 5647433 - DNA, 25 bp, Homo sapien
gcgagatgatgcagttccgaagccg

SEQ ID NO: 5647434 - DNA, 25 bp, Homo sapien
ggcaacccaaggaagcactgttcat

SEQ ID NO: 5647435 - DNA, 25 bp, Homo sapien
atattattccaggatgggagcccat

SEQ ID NO: 5647436 - DNA, 25 bp, Homo sapien
ttattcttccaactttaccagctgc

SEQ ID NO: 5647437 - DNA, 25 bp, Homo sapien
ctacaaggaacacgcaacagaaaat

SEQ ID NO: 5647438 - DNA, 25 bp, Homo sapien
gaatccagcctggagttggtctcca

SEQ ID NO: 5647439 - DNA, 25 bp, Homo sapien
cctctgtgattcgtcccactacgat

SEQ ID NO: 5647440 - DNA, 25 bp, Homo sapien
agtacatggacccagaacattcact

SEQ ID NO: 5647441 - DNA, 25 bp, Homo sapien
tgttttctattggggcaatttcatg

SEQ ID NO: 5647442 - DNA, 25 bp, Homo sapien
cgactgtaacactgtgcactttgaa

SEQ ID NO: 5647443 - DNA, 25 bp, Homo sapien
gaaagagctgaaactattccctaat

SEQ ID NO: 5647444 - DNA, 25 bp, Homo sapien
gcctccctaagtgctgggattatag

SEQ ID NO: 5647445 - DNA, 25 bp, Homo sapien
ttctcctcagctctcctccaggaag

SEQ ID NO: 5647446 - DNA, 25 bp, Homo sapien
cagtcatttaaaggatataggaatg

SEQ ID NO: 5647447 - DNA, 25 bp, Homo sapien
ttccatatttcaggctcctcgtgtg

SEQ ID NO: 5647448 - DNA, 25 bp, Homo sapien
cctgtgtccgtagtgattgtatccc

SEQ ID NO: 5647449 - DNA, 25 bp, Homo sapien
atggccccgcatgaatcctgtgtcc

SEQ ID NO: 5647450 - DNA, 25 bp, Homo sapien
agcaggacagattaaggcagcccgg

SEQ ID NO: 5647451 - DNA, 25 bp, Homo sapien
tgacctagttttccatatttcaggc

SEQ ID NO: 5647452 - DNA, 25 bp, Homo sapien
tgagttaccagcgagatgatgcagt

SEQ ID NO: 5647453 - DNA, 25 bp, Homo sapien
cctggcctgcttggttaactttatt

SEQ ID NO: 5647454 - DNA, 25 bp, Homo sapien
caaaagcctctggcgtgtttccatc

SEQ ID NO: 5647455 - DNA, 25 bp, Homo sapien
tgtatctggttttcaaagctttcac

SEQ ID NO: 5647456 - DNA, 25 bp, Homo sapien
gcaagagagacaggctccaggtttg

SEQ ID NO: 5647457 - DNA, 25 bp, Homo sapien
caggagaaagcaggcctgtgggctg

SEQ ID NO: 5647458 - DNA, 25 bp, Homo sapien
aatgagcttctcttctcccatatac

SEQ ID NO: 5647459 - DNA, 25 bp, Homo sapien
cagatcaacttgtttactctctcca

SEQ ID NO: 5647460 - DNA, 25 bp, Homo sapien
aggctggagtgtggtacgcgatttc

SEQ ID NO: 5647461 - DNA, 25 bp, Homo sapien
tactctctccacagagccagcaaca

SEQ ID NO: 5647462 - DNA, 25 bp, Homo sapien
ctatggctacaaggaacacgcaaca

SEQ ID NO: 5647463 - DNA, 25 bp, Homo sapien
actctccaagcaggacagattaagg

SEQ ID NO: 5647464 - DNA, 25 bp, Homo sapien
tggtctcgaactattgacctcaggt

SEQ ID NO: 5647465 - DNA, 25 bp, Homo sapien
cactttgaaagagctgaaactattc

SEQ ID NO: 5647466 - DNA, 25 bp, Homo sapien
caggttcaagtgattctcccacctc

SEQ ID NO: 5647467 - DNA, 25 bp, Homo sapien
ataggaatggaggccaaaacagacc

SEQ ID NO: 5647468 - DNA, 25 bp, Homo sapien
gacgagagcagcaagaccgaatcca

SEQ ID NO: 5647469 - DNA, 25 bp, Homo sapien
acgatgtctcctacttcaccaatgt

SEQ ID NO: 5647470 - DNA, 25 bp, Homo sapien
ttcttagtgtcgcggcccagtctct

SEQ ID NO: 5647471 - DNA, 25 bp, Homo sapien
gctggagtgtggtacgcgatttcag

SEQ ID NO: 5647472 - DNA, 25 bp, Homo sapien
tcaaagctttcacacagatcaactt

SEQ ID NO: 5647473 - DNA, 25 bp, Homo sapien
ctaagtgctgggattataggcgtga

SEQ ID NO: 5647474 - DNA, 25 bp, Homo sapien
cttggcctccctaagtgctgggatt

SEQ ID NO: 5647475 - DNA, 25 bp, Homo sapien
tttcttcatgtttatctgagtacat

SEQ ID NO: 5647476 - DNA, 25 bp, Homo sapien
ttgctgagccacatatggggaccac

SEQ ID NO: 5647477 - DNA, 25 bp, Homo sapien
gcttggttaactttattcttccaac

SEQ ID NO: 5647478 - DNA, 25 bp, Homo sapien
tcactgcaacctccgcctcccaggt

SEQ ID NO: 5647479 - DNA, 25 bp, Homo sapien
ctctcctccaggaaggttcatggac

SEQ ID NO: 5647480 - DNA, 25 bp, Homo sapien
agtggaagacaaaggattctccata

SEQ ID NO: 5647481 - DNA, 25 bp, Homo sapien
aggattctccatattattccaggat

SEQ ID NO: 5647482 - DNA, 25 bp, Homo sapien
gtccacagtcccgtgcttctggagc

SEQ ID NO: 5647483 - DNA, 25 bp, Homo sapien
gaacattcactgtattatcatgaat

SEQ ID NO: 5647484 - DNA, 25 bp, Homo sapien
tctcctacttcaccaatgtatctgg

SEQ ID NO: 5647485 - DNA, 25 bp, Homo sapien
atgtttcttagtgtcgcggcccagt

SEQ ID NO: 5647486 - DNA, 25 bp, Homo sapien
agatggggtttcaccttgttggcca

SEQ ID NO: 5647487 - DNA, 25 bp, Homo sapien
ttcaggctcctcgtgtgcaaagaga

SEQ ID NO: 5647488 - DNA, 25 bp, Homo sapien
agagacagctccgtcagagaacact

SEQ ID NO: 5647489 - DNA, 25 bp, Homo sapien
tggacctcagcactgataaggtccc

SEQ ID NO: 5647490 - DNA, 25 bp, Homo sapien
tctcttctcccatatacgttccatg

SEQ ID NO: 5647491 - DNA, 25 bp, Homo sapien
agttccgaagccgggatatcacctc

SEQ ID NO: 5647492 - DNA, 25 bp, Homo sapien
gcagttccgaagccgggatatcacc

SEQ ID NO: 5647493 - DNA, 25 bp, Homo sapien
acactgtgcactttgaaagagctga

SEQ ID NO: 5647494 - DNA, 25 bp, Homo sapien
cacctccttatccctcctgttccaa

SEQ ID NO: 5647495 - DNA, 25 bp, Homo sapien
tctctcgctaagaggcttgcgagcc

SEQ ID NO: 5647496 - DNA, 25 bp, Homo sapien
tgaaacacagtctcgctctgtcacc

SEQ ID NO: 5647497 - DNA, 25 bp, Homo sapien
gtcagagaacactgcctggacctca

SEQ ID NO: 5647498 - DNA, 25 bp, Homo sapien
aagtgctgggattataggcgtgagc

SEQ ID NO: 5647499 - DNA, 25 bp, Homo sapien
ctccacactacttcaattataggat

SEQ ID NO: 5647500 - DNA, 25 bp, Homo sapien
ttccatggccccgcatgaatcctgt

SEQ ID NO: 5647501 - DNA, 25 bp, Homo sapien
cacgcaacagaaaatcagattccaa

SEQ ID NO: 5647502 - DNA, 25 bp, Homo sapien
agccaccgtgcctggcctgcttggt

SEQ ID NO: 5647503 - DNA, 25 bp, Homo sapien
attttcttcatgtttatctgagtac

SEQ ID NO: 5647504 - DNA, 25 bp, Homo sapien
ggagcacctccttatccctcctgtt

SEQ ID NO: 5647505 - DNA, 25 bp, Homo sapien
ttgtgctcaggtgttgggtaaatcc

SEQ ID NO: 5647506 - DNA, 25 bp, Homo sapien
tatcatacagcatcatcctctgagt

SEQ ID NO: 5647507 - DNA, 25 bp, Homo sapien
ttccgaagccgggatatcacctctc

SEQ ID NO: 5647508 - DNA, 25 bp, Homo sapien
tgaacctctgtgattcgtcccacta

SEQ ID NO: 5647509 - DNA, 25 bp, Homo sapien
gcccagtctctcgctaagaggcttg

SEQ ID NO: 5647510 - DNA, 25 bp, Homo sapien
tccaggaaggttcatggacgagagc

SEQ ID NO: 5647511 - DNA, 25 bp, Homo sapien
ccattatttctggctttaagatgtc

SEQ ID NO: 5647512 - DNA, 25 bp, Homo sapien
cgttgttaccgagaatcactgaggc

SEQ ID NO: 5647513 - DNA, 25 bp, Homo sapien
gctggtctcgaactattgacctcag

SEQ ID NO: 5647514 - DNA, 25 bp, Homo sapien
tcactctccaagcaggacagattaa

SEQ ID NO: 5647515 - DNA, 25 bp, Homo sapien
caggacagattaaggcagcccggtg

SEQ ID NO: 5647516 - DNA, 25 bp, Homo sapien
ccacagtcccgtgcttctggagcac

SEQ ID NO: 5647517 - DNA, 25 bp, Homo sapien
tcgctaagaggcttgcgagccactg

SEQ ID NO: 5647518 - DNA, 25 bp, Homo sapien
ggttcatggacgagagcagcaagac

SEQ ID NO: 5647519 - DNA, 25 bp, Homo sapien
agggatgatctctcgagtctttgct

SEQ ID NO: 5647520 - DNA, 25 bp, Homo sapien
ctttcccagtctccatttttctttg

SEQ ID NO: 5647521 - DNA, 25 bp, Homo sapien
caacagatgcaatgagcttctcttc

SEQ ID NO: 5647522 - DNA, 25 bp, Homo sapien
agcagtacaggatgctggtatcata

SEQ ID NO: 5647523 - DNA, 25 bp, Homo sapien
ggcgtgagccaccgtgcctggcctg

SEQ ID NO: 5647524 - DNA, 25 bp, Homo sapien
tctgagttaccagcgagatgatgca

SEQ ID NO: 5647525 - DNA, 25 bp, Homo sapien
ttgcgagccactggaagcctcatct

SEQ ID NO: 5647526 - DNA, 25 bp, Homo sapien
gtgattgtatcccccggcaccacta

SEQ ID NO: 5647527 - DNA, 25 bp, Homo sapien
aacctctgtgattcgtcccactacg

SEQ ID NO: 5647528 - DNA, 25 bp, Homo sapien
agagatggggtttcaccttgttggc

SEQ ID NO: 5647529 - DNA, 25 bp, Homo sapien
cctccttatccctcctgttccaaaa

SEQ ID NO: 5647530 - DNA, 25 bp, Homo sapien
cccagaacattcactgtattatcat

SEQ ID NO: 5647531 - DNA, 25 bp, Homo sapien
gagtgtggtacgcgatttcagctca

SEQ ID NO: 5647532 - DNA, 25 bp, Homo sapien
ccaggctggagtgtggtacgcgatt

SEQ ID NO: 5647533 - DNA, 25 bp, Homo sapien
tgggtaaatccagatgaagccgttg

SEQ ID NO: 5647534 - DNA, 25 bp, Homo sapien
ctcattgcaagctcatcttctgcag

SEQ ID NO: 5647535 - DNA, 25 bp, Homo sapien
gaggtcagggatgccatgttttcta

SEQ ID NO: 5647536 - DNA, 25 bp, Homo sapien
ctgcccgccttggcctccctaagtg

SEQ ID NO: 5647537 - DNA, 25 bp, Homo sapien
actgttcatctgccacccaggcttg

SEQ ID NO: 5647538 - DNA, 25 bp, Homo sapien
ctattgacctcaggtgatctgcccg

SEQ ID NO: 5647539 - DNA, 25 bp, Homo sapien
cactggaagcctcatctccatcgcc

SEQ ID NO: 5647540 - DNA, 25 bp, Homo sapien
cacatcacagtcttcactcctgcaa

SEQ ID NO: 5647541 - DNA, 25 bp, Homo sapien
aagtgggtcttctgccgtttcacca

SEQ ID NO: 5647542 - DNA, 25 bp, Homo sapien
cgatttcagctcactgcaacctccg

SEQ ID NO: 5647543 - DNA, 25 bp, Homo sapien
agattaaggcagcccggtgtggaca

SEQ ID NO: 5647544 - DNA, 25 bp, Homo sapien
gaaagtgggtcttctgccgtttcac

SEQ ID NO: 5647545 - DNA, 25 bp, Homo sapien
ttttttctcacattcttcagcgaga

SEQ ID NO: 5647546 - DNA, 25 bp, Homo sapien
cttcagcgagaactctggcgtcttt

SEQ ID NO: 5647547 - DNA, 25 bp, Homo sapien
tcatggggcactgtgccttgtgaat

SEQ ID NO: 5647548 - DNA, 25 bp, Homo sapien
acagtgagtggaagacaaaggattc

SEQ ID NO: 5647549 - DNA, 25 bp, Homo sapien
ttaccagctgcattctcagtcattt

SEQ ID NO: 5647550 - DNA, 25 bp, Homo sapien
ctcccatatacgttccatggccccg

SEQ ID NO: 5647551 - DNA, 25 bp, Homo sapien
ctgaatcatccacaagttaatgctc

SEQ ID NO: 5647552 - DNA, 25 bp, Homo sapien
tatttttagtagagatggggtttca

SEQ ID NO: 5647553 - DNA, 25 bp, Homo sapien
ccgtcagagaacactgcctggacct

SEQ ID NO: 5647554 - DNA, 25 bp, Homo sapien
gtgggtcttctgccgtttcaccagg

SEQ ID NO: 5647555 - DNA, 25 bp, Homo sapien
caaaacagaccatttggaggtcagg

SEQ ID NO: 5647556 - DNA, 25 bp, Homo sapien
tgtgattcgtcccactacgatgtct

SEQ ID NO: 5647557 - DNA, 25 bp, Homo sapien
acctctcgatcagcaagagagacag

SEQ ID NO: 5647558 - DNA, 25 bp, Homo sapien
tctctcgagtctttgctgagccaca

SEQ ID NO: 5647559 - DNA, 25 bp, Homo sapien
agccagcaacagatgcaatgagctt

SEQ ID NO: 5647560 - DNA, 25 bp, Homo sapien
cgcggcccagtctctcgctaagagg

SEQ ID NO: 5647561 - DNA, 25 bp, Homo sapien
ctttcacacagatcaacttgtttac

SEQ ID NO: 5647562 - DNA, 25 bp, Homo sapien
cggcccagtctctcgctaagaggct

SEQ ID NO: 5647563 - DNA, 25 bp, Homo sapien
acctccgcctcccaggttcaagtga

SEQ ID NO: 5647564 - DNA, 25 bp, Homo sapien
atagcagtacaggatgctggtatca

SEQ ID NO: 5647565 - DNA, 25 bp, Homo sapien
ccaccttccacctcttctgttgaac

SEQ ID NO: 5647566 - DNA, 25 bp, Homo sapien
ataccgggactcagctggcaaccca

SEQ ID NO: 5647567 - DNA, 25 bp, Homo sapien
tgacagtgagtggaagacaaaggat

SEQ ID NO: 5647568 - DNA, 25 bp, Homo sapien
cacacatcacagtcttcactcctgc

SEQ ID NO: 5647569 - DNA, 25 bp, Homo sapien
tatcatgaataattcagcatcttac

SEQ ID NO: 5647570 - DNA, 25 bp, Homo sapien
ggtaaatccagatgaagccgttgtt

SEQ ID NO: 5647571 - DNA, 25 bp, Homo sapien
cccatatacgttccatggccccgca

SEQ ID NO: 5647572 - DNA, 25 bp, Homo sapien
ccgtcaatgcagacaaagggatgat

SEQ ID NO: 5647573 - DNA, 25 bp, Homo sapien
agagcagcaagaccgaatccagcct

SEQ ID NO: 5647574 - DNA, 25 bp, Homo sapien
tgcattctcagtcatttaaaggata

SEQ ID NO: 5647575 - DNA, 25 bp, Homo sapien
tgttcatctgccacccaggcttggt

SEQ ID NO: 5647576 - DNA, 25 bp, Homo sapien
ctcccaaatagctgggactacaggt

SEQ ID NO: 5647577 - DNA, 25 bp, Homo sapien
tttcaaagctttcacacagatcaac

SEQ ID NO: 5647578 - DNA, 25 bp, Homo sapien
caaatagctgggactacaggtgcac

SEQ ID NO: 5647579 - DNA, 25 bp, Homo sapien
cgtgagccaccgtgcctggcctgct

SEQ ID NO: 5647580 - DNA, 25 bp, Homo sapien
accagcgagatgatgcagttccgaa

SEQ ID NO: 5647581 - DNA, 25 bp, Homo sapien
acactacttcaattataggatgaaa

SEQ ID NO: 5647582 - DNA, 25 bp, Homo sapien
tccttatccctcctgttccaaaagc

SEQ ID NO: 5647583 - DNA, 25 bp, Homo sapien
aagaccgaatccagcctggagttgg

SEQ ID NO: 5647584 - DNA, 25 bp, Homo sapien
ttcacacagatcaacttgtttactc

SEQ ID NO: 5647585 - DNA, 25 bp, Homo sapien
aatcagattccaaccaagcaaaagg

SEQ ID NO: 5647586 - DNA, 25 bp, Homo sapien
agccacatatggggaccacacatca

SEQ ID NO: 5647587 - DNA, 25 bp, Homo sapien
ttgttaccgagaatcactgaggcac

SEQ ID NO: 5647588 - DNA, 25 bp, Homo sapien
tggacgagagcagcaagaccgaatc

SEQ ID NO: 5647589 - DNA, 25 bp, Homo sapien
agaactctggcgtctttttatcttt

SEQ ID NO: 5647590 - DNA, 25 bp, Homo sapien
gtgctcaggtgttgggtaaatccag

SEQ ID NO: 5647591 - DNA, 25 bp, Homo sapien
gttgggtaaatccagatgaagccgt

SEQ ID NO: 5647592 - DNA, 25 bp, Homo sapien
attatttctggctttaagatgtctt

SEQ ID NO: 5647593 - DNA, 25 bp, Homo sapien
aatgtatctggttttcaaagctttc

SEQ ID NO: 5647594 - DNA, 25 bp, Homo sapien
caacctccgcctcccaggttcaagt

SEQ ID NO: 5647595 - DNA, 25 bp, Homo sapien
agatgtctttgatctgatgtggaag

SEQ ID NO: 5647596 - DNA, 25 bp, Homo sapien
tagctgggactacaggtgcacacca

SEQ ID NO: 5647597 - DNA, 25 bp, Homo sapien
gatgaaaacagctttgctttcccag

SEQ ID NO: 5647598 - DNA, 25 bp, Homo sapien
caggtgatctgcccgccttggcctc

SEQ ID NO: 5647599 - DNA, 25 bp, Homo sapien
gctttgctttcccagtctccatttt

SEQ ID NO: 5647600 - DNA, 25 bp, Homo sapien
cttatccctcctgttccaaaagcct

SEQ ID NO: 5647601 - DNA, 25 bp, Homo sapien
ttccaggatgggagcccattcgact

SEQ ID NO: 5647602 - DNA, 25 bp, Homo sapien
acatctatggctacaaggaacacgc

SEQ ID NO: 5647603 - DNA, 25 bp, Homo sapien
acagctccgtcagagaacactgcct

SEQ ID NO: 5647604 - DNA, 25 bp, Homo sapien
ggaagcctcatctccatcgccatct

SEQ ID NO: 5647605 - DNA, 25 bp, Homo sapien
gaataattcagcatcttacaagtca

SEQ ID NO: 5647606 - DNA, 25 bp, Homo sapien
gtgtggacataatcacatctatggc

SEQ ID NO: 5647607 - DNA, 25 bp, Homo sapien
cccggcaccactagatgtttcttag

SEQ ID NO: 5647608 - DNA, 25 bp, Homo sapien
gatgctggtatcatacagcatcatc

SEQ ID NO: 5647609 - DNA, 25 bp, Homo sapien
catggacgagagcagcaagaccgaa

SEQ ID NO: 5647610 - DNA, 25 bp, Homo sapien
ctctccacagagccagcaacagatg

SEQ ID NO: 5647611 - DNA, 25 bp, Homo sapien
agcatcatcctctgagttaccagcg

SEQ ID NO: 5647612 - DNA, 25 bp, Homo sapien
cttgtgaatgacagtgagtggaaga

SEQ ID NO: 5647613 - DNA, 25 bp, Homo sapien
tgagtacatggacccagaacattca

SEQ ID NO: 5647614 - DNA, 25 bp, Homo sapien
ttgaaagagctgaaactattcccta

SEQ ID NO: 5647615 - DNA, 25 bp, Homo sapien
ctgaggcaccacatggcaaatcatg

SEQ ID NO: 5647616 - DNA, 25 bp, Homo sapien
agacaaaggattctccatattattc

SEQ ID NO: 5647617 - DNA, 25 bp, Homo sapien
agcctggagttggtctccaccttcc

SEQ ID NO: 5647618 - DNA, 25 bp, Homo sapien
tggagtgtggtacgcgatttcagct

SEQ ID NO: 5647619 - DNA, 25 bp, Homo sapien
tcgttctcacctgttggacgtgctt

SEQ ID NO: 5647620 - DNA, 25 bp, Homo sapien
aagcacgtccaacaggtgagaacga

SEQ ID NO: 5647621 - DNA, 25 bp, Homo sapien
tcttattgtacacgttactctttat

SEQ ID NO: 5647622 - DNA, 25 bp, Homo sapien
ataaagagtaacgtgtacaataaga

SEQ ID NO: 5647623 - DNA, 25 bp, Homo sapien
agaagaaccctgtgttctcaggaag

SEQ ID NO: 5647624 - DNA, 25 bp, Homo sapien
gacttagggatctttcacctgctgt

SEQ ID NO: 5647625 - DNA, 25 bp, Homo sapien
cctaccagccctcctcttcctcctc

SEQ ID NO: 5647626 - DNA, 25 bp, Homo sapien
agtattgcccagctggatccagagg

SEQ ID NO: 5647627 - DNA, 25 bp, Homo sapien
cctcctgtgggaggtggtcagtggg

SEQ ID NO: 5647628 - DNA, 25 bp, Homo sapien
atggctttctcatgtagggctctct

SEQ ID NO: 5647629 - DNA, 25 bp, Homo sapien
acttttaatgggcacttctgggacc

SEQ ID NO: 5647630 - DNA, 25 bp, Homo sapien
tcaaaaggtgtcctccatccaagaa

SEQ ID NO: 5647631 - DNA, 25 bp, Homo sapien
catgtagggctctctgtggtatttg

SEQ ID NO: 5647632 - DNA, 25 bp, Homo sapien
tttgaattgggtggcggttgactgt

SEQ ID NO: 5647633 - DNA, 25 bp, Homo sapien
atctgcagcagcatacggacccaca

SEQ ID NO: 5647634 - DNA, 25 bp, Homo sapien
tcccagctgaatcctccctgctctc

SEQ ID NO: 5647635 - DNA, 25 bp, Homo sapien
cccacaccagttaggtagagctgtc

SEQ ID NO: 5647636 - DNA, 25 bp, Homo sapien
ggacttttaatgggcacttctggga

SEQ ID NO: 5647637 - DNA, 25 bp, Homo sapien
gctagtcccacaccagttaggtaga

SEQ ID NO: 5647638 - DNA, 25 bp, Homo sapien
aagaagagaactcagtccatacaag

SEQ ID NO: 5647639 - DNA, 25 bp, Homo sapien
tgcgcgagatgaactggcttgacta

SEQ ID NO: 5647640 - DNA, 25 bp, Homo sapien
ggcagaacctcctcaaggaggtgga

SEQ ID NO: 5647641 - DNA, 25 bp, Homo sapien
tcgggaccgcaggtacgtgcctggc

SEQ ID NO: 5647642 - DNA, 25 bp, Homo sapien
acatcctcttcaccctgccctgcct

SEQ ID NO: 5647643 - DNA, 25 bp, Homo sapien
gggaacaggggcgggtgtgacttgc

SEQ ID NO: 5647644 - DNA, 25 bp, Homo sapien
aagaccaaatactggtttggagaca

SEQ ID NO: 5647645 - DNA, 25 bp, Homo sapien
cctccccctaccagccctcctcttc

SEQ ID NO: 5647646 - DNA, 25 bp, Homo sapien
ggtcaagccgtgctaacactgttac

SEQ ID NO: 5647647 - DNA, 25 bp, Homo sapien
ggtaatacaggtagatgaaatgata

SEQ ID NO: 5647648 - DNA, 25 bp, Homo sapien
agtgttttatgtttatccctgttta

SEQ ID NO: 5647649 - DNA, 25 bp, Homo sapien
gctccccaaggctctgcgcgagatg

SEQ ID NO: 5647650 - DNA, 25 bp, Homo sapien
gtggtccccgtccgccctcctcgtc

SEQ ID NO: 5647651 - DNA, 25 bp, Homo sapien
tcaaggaggtggataacctctacaa

SEQ ID NO: 5647652 - DNA, 25 bp, Homo sapien
ggaaaaggtcaagccgtgctaacac

SEQ ID NO: 5647653 - DNA, 25 bp, Homo sapien
cacttctgggaccctgaagagactt

SEQ ID NO: 5647654 - DNA, 25 bp, Homo sapien
gctcttctacctccctagttagtgg

SEQ ID NO: 5647655 - DNA, 25 bp, Homo sapien
agttaggtagagctgtctgttcacc

SEQ ID NO: 5647656 - DNA, 25 bp, Homo sapien
ttattgtttgagtgtgaagttccag

SEQ ID NO: 5647657 - DNA, 25 bp, Homo sapien
aggcttgaaggcacatggctttctc

SEQ ID NO: 5647658 - DNA, 25 bp, Homo sapien
gcagcagtgacctcagtagggaaca

SEQ ID NO: 5647659 - DNA, 25 bp, Homo sapien
tagtggaaatttggataagggaact

SEQ ID NO: 5647660 - DNA, 25 bp, Homo sapien
gacttcttcccttcaggcttattgt

SEQ ID NO: 5647661 - DNA, 25 bp, Homo sapien
acacgaaaggtaatacaggtagatg

SEQ ID NO: 5647662 - DNA, 25 bp, Homo sapien
aagggcagtagtcgggtggccaaga

SEQ ID NO: 5647663 - DNA, 25 bp, Homo sapien
tggcagcagtgacctcagtagggaa

SEQ ID NO: 5647664 - DNA, 25 bp, Homo sapien
aactccaggcctgacacccaggttt

SEQ ID NO: 5647665 - DNA, 25 bp, Homo sapien
ttgagggggcgaagaagaaccctgt

SEQ ID NO: 5647666 - DNA, 25 bp, Homo sapien
aagctctccaaccgtctcgcccaaa

SEQ ID NO: 5647667 - DNA, 25 bp, Homo sapien
tcaagccgtgctaacactgttaccc

SEQ ID NO: 5647668 - DNA, 25 bp, Homo sapien
cctgtgttctcaggaagactgcctc

SEQ ID NO: 5647669 - DNA, 25 bp, Homo sapien
gctattcagacacccctgaaatctg

SEQ ID NO: 5647670 - DNA, 25 bp, Homo sapien
gcagcagcatacggacccacaaatg

SEQ ID NO: 5647671 - DNA, 25 bp, Homo sapien
ggagaatcatgtgctatgttctaag

SEQ ID NO: 5647672 - DNA, 25 bp, Homo sapien
gaaggcacatggctttctcatgtag

SEQ ID NO: 5647673 - DNA, 25 bp, Homo sapien
tgtccatggtcaaaccaactccagg

SEQ ID NO: 5647674 - DNA, 25 bp, Homo sapien
agcacttctctcttatggggttcat

SEQ ID NO: 5647675 - DNA, 25 bp, Homo sapien
attccatgtgtgcctgtgcctgggg

SEQ ID NO: 5647676 - DNA, 25 bp, Homo sapien
ctctctctcactggcacagcgaggt

SEQ ID NO: 5647677 - DNA, 25 bp, Homo sapien
aacctctacaacatcgagatcctgc

SEQ ID NO: 5647678 - DNA, 25 bp, Homo sapien
acaggtagatgaaatgatagtggaa

SEQ ID NO: 5647679 - DNA, 25 bp, Homo sapien
atacaggtagatgaaatgatagtgg

SEQ ID NO: 5647680 - DNA, 25 bp, Homo sapien
gctctgcgcgagatgaactggcttg

SEQ ID NO: 5647681 - DNA, 25 bp, Homo sapien
tgttaagcagagtcagcagtgaggt

SEQ ID NO: 5647682 - DNA, 25 bp, Homo sapien
tagtcgggtggccaagaccaactcc

SEQ ID NO: 5647683 - DNA, 25 bp, Homo sapien
tgaagttccagagcaaggagccatg

SEQ ID NO: 5647684 - DNA, 25 bp, Homo sapien
ccagttaggtagagctgtctgttca

SEQ ID NO: 5647685 - DNA, 25 bp, Homo sapien
ttgacaggatggacttttaatgggc

SEQ ID NO: 5647686 - DNA, 25 bp, Homo sapien
agtcagcagtgaggtcctcattctc

SEQ ID NO: 5647687 - DNA, 25 bp, Homo sapien
tccgccctcctcgtccctacccagt

SEQ ID NO: 5647688 - DNA, 25 bp, Homo sapien
gtccctacccagtttcttgcttccc

SEQ ID NO: 5647689 - DNA, 25 bp, Homo sapien
cctcttcaccctgccctgcctgcag

SEQ ID NO: 5647690 - DNA, 25 bp, Homo sapien
agcaggagagcggatttacaacatc

SEQ ID NO: 5647691 - DNA, 25 bp, Homo sapien
caccaaagttgacaggatggacttt

SEQ ID NO: 5647692 - DNA, 25 bp, Homo sapien
tgtgcctgtgcctggggcatggact

SEQ ID NO: 5647693 - DNA, 25 bp, Homo sapien
tacccagagaacctctgcatctggc

SEQ ID NO: 5647694 - DNA, 25 bp, Homo sapien
gccgattggaggtgtccatggtcaa

SEQ ID NO: 5647695 - DNA, 25 bp, Homo sapien
ctgacacccaggtttgactcaaggg

SEQ ID NO: 5647696 - DNA, 25 bp, Homo sapien
gctgctgccttttgcctcctgcaac

SEQ ID NO: 5647697 - DNA, 25 bp, Homo sapien
tgtggtatttgttattattttgcaa

SEQ ID NO: 5647698 - DNA, 25 bp, Homo sapien
aggtagagctgtctgttcaccctcc

SEQ ID NO: 5647699 - DNA, 25 bp, Homo sapien
ctctaagctatccatggtccagtgg

SEQ ID NO: 5647700 - DNA, 25 bp, Homo sapien
ttgggtggcggttgactgtagagcc

SEQ ID NO: 5647701 - DNA, 25 bp, Homo sapien
tgtagagccgctctctctcactggc

SEQ ID NO: 5647702 - DNA, 25 bp, Homo sapien
gttcaccctcccatcccagctgatc

SEQ ID NO: 5647703 - DNA, 25 bp, Homo sapien
attggccacagaataactgtctcta

SEQ ID NO: 5647704 - DNA, 25 bp, Homo sapien
aggcacagtattgcccagctggatc

SEQ ID NO: 5647705 - DNA, 25 bp, Homo sapien
atcttcaaactgcaagagtcaaaag

SEQ ID NO: 5647706 - DNA, 25 bp, Homo sapien
gctctccaaccgtctcgcccaaatc

SEQ ID NO: 5647707 - DNA, 25 bp, Homo sapien
tacctccctagttagtggaaatttg

SEQ ID NO: 5647708 - DNA, 25 bp, Homo sapien
gaccaaatactggtttggagacaac

SEQ ID NO: 5647709 - DNA, 25 bp, Homo sapien
ggcctcattccatgtgtgcctgtgc

SEQ ID NO: 5647710 - DNA, 25 bp, Homo sapien
cctgaaatctgccaaaacacgaaag

SEQ ID NO: 5647711 - DNA, 25 bp, Homo sapien
caccctgccctgcctgcagttgagg

SEQ ID NO: 5647712 - DNA, 25 bp, Homo sapien
gagcaggacagttggcagcagtgac

SEQ ID NO: 5647713 - DNA, 25 bp, Homo sapien
tgcggctccccaaggctctgcgcga

SEQ ID NO: 5647714 - DNA, 25 bp, Homo sapien
aagaaccctgtgttctcaggaagac

SEQ ID NO: 5647715 - DNA, 25 bp, Homo sapien
tcaagacccctggcctgcgtactcc

SEQ ID NO: 5647716 - DNA, 25 bp, Homo sapien
ctgcatctggcatttctgctctcta

SEQ ID NO: 5647717 - DNA, 25 bp, Homo sapien
tcagacgtgctagtcccacaccagt

SEQ ID NO: 5647718 - DNA, 25 bp, Homo sapien
cctcaaggaggtggataacctctac

SEQ ID NO: 5647719 - DNA, 25 bp, Homo sapien
cagcagcaggagagcggatttacaa

SEQ ID NO: 5647720 - DNA, 25 bp, Homo sapien
aatgggcacttctgggaccctgaag

SEQ ID NO: 5647721 - DNA, 25 bp, Homo sapien
tcaaactgcaagagtcaaaaggtgt

SEQ ID NO: 5647722 - DNA, 25 bp, Homo sapien
gggccatgagagggtaggtccagaa

SEQ ID NO: 5647723 - DNA, 25 bp, Homo sapien
gataagtgagctctgggccatgaga

SEQ ID NO: 5647724 - DNA, 25 bp, Homo sapien
acccagtttcttgcttccctgcccc

SEQ ID NO: 5647725 - DNA, 25 bp, Homo sapien
tgatcccagtcactgcttgctgggg

SEQ ID NO: 5647726 - DNA, 25 bp, Homo sapien
gacaggatggacttttaatgggcac

SEQ ID NO: 5647727 - DNA, 25 bp, Homo sapien
aggcctgacacccaggtttgactca

SEQ ID NO: 5647728 - DNA, 25 bp, Homo sapien
ccgggaggtttaggctcagataagt

SEQ ID NO: 5647729 - DNA, 25 bp, Homo sapien
tgtcctccatccaagaagagaactc

SEQ ID NO: 5647730 - DNA, 25 bp, Homo sapien
ttgcagaggcacagtattgcccagc

SEQ ID NO: 5647731 - DNA, 25 bp, Homo sapien
ccgaaataaacaaactaacagcaga

SEQ ID NO: 5647732 - DNA, 25 bp, Homo sapien
tattcagacacccctgaaatctgcc

SEQ ID NO: 5647733 - DNA, 25 bp, Homo sapien
gtcaaaccaactccaggcctgacac

SEQ ID NO: 5647734 - DNA, 25 bp, Homo sapien
agagctgtctgttcaccctcccatc

SEQ ID NO: 5647735 - DNA, 25 bp, Homo sapien
acttcgaccgtgaagtggaaatacg

SEQ ID NO: 5647736 - DNA, 25 bp, Homo sapien
gggcgaagaagaaccctgtgttctc

SEQ ID NO: 5647737 - DNA, 25 bp, Homo sapien
tggtttggagacaacttccatgtct

SEQ ID NO: 5647738 - DNA, 25 bp, Homo sapien
gagacttcttcccttcaggcttatt

SEQ ID NO: 5647739 - DNA, 25 bp, Homo sapien
agtgggcggcggagagagcctgcga

SEQ ID NO: 5647740 - DNA, 25 bp, Homo sapien
ggtttaggctcagataagtgagctc

SEQ ID NO: 5647741 - DNA, 25 bp, Homo sapien
cggttgactgtagagccgctctctc

SEQ ID NO: 5647742 - DNA, 25 bp, Homo sapien
cggcaacagctgacctggatatcac

SEQ ID NO: 5647743 - DNA, 25 bp, Homo sapien
ttgagaccgggaggtttaggctcag

SEQ ID NO: 5647744 - DNA, 25 bp, Homo sapien
ggagccatgttcctctaagggaatt

SEQ ID NO: 5647745 - DNA, 25 bp, Homo sapien
aggaaacaaacaggccctggaagag

SEQ ID NO: 5647746 - DNA, 25 bp, Homo sapien
taatacaggtagatgaaatgatagt

SEQ ID NO: 5647747 - DNA, 25 bp, Homo sapien
aacagctgacctggatatcaccgaa

SEQ ID NO: 5647748 - DNA, 25 bp, Homo sapien
ctcctcaaggaggtggataacctct

SEQ ID NO: 5647749 - DNA, 25 bp, Homo sapien
tcatccccaggcttgaaggcacatg

SEQ ID NO: 5647750 - DNA, 25 bp, Homo sapien
cctctctgccctggagaatcatgtg

SEQ ID NO: 5647751 - DNA, 25 bp, Homo sapien
agttgacaggatggacttttaatgg

SEQ ID NO: 5647752 - DNA, 25 bp, Homo sapien
ccaaatactggtttggagacaactt

SEQ ID NO: 5647753 - DNA, 25 bp, Homo sapien
tccttacggaggcggaagctcgcct

SEQ ID NO: 5647754 - DNA, 25 bp, Homo sapien
atcccagtcactgcttgctggggcc

SEQ ID NO: 5647755 - DNA, 25 bp, Homo sapien
ctttctcatgtagggctctctgtgg

SEQ ID NO: 5647756 - DNA, 25 bp, Homo sapien
ctcactggcacagcgaggttttgct

SEQ ID NO: 5647757 - DNA, 25 bp, Homo sapien
ctgggccatgagagggtaggtccag

SEQ ID NO: 5647758 - DNA, 25 bp, Homo sapien
aggtacgtgcctggcgacttcttcg

SEQ ID NO: 5647759 - DNA, 25 bp, Homo sapien
gagcaaggagccatgttcctctaag

SEQ ID NO: 5647760 - DNA, 25 bp, Homo sapien
tcaggcttattgtttgagtgtgaag

SEQ ID NO: 5647761 - DNA, 25 bp, Homo sapien
tgaaatctgccaaaacacgaaaggt

SEQ ID NO: 5647762 - DNA, 25 bp, Homo sapien
agagcacttctctcttatggggttc

SEQ ID NO: 5647763 - DNA, 25 bp, Homo sapien
ttcctcactgtgccagtgggcggcg

SEQ ID NO: 5647764 - DNA, 25 bp, Homo sapien
ctggcatttctgctctctatgcttg

SEQ ID NO: 5647765 - DNA, 25 bp, Homo sapien
ttgctggggccatgccatggaagct

SEQ ID NO: 5647766 - DNA, 25 bp, Homo sapien
acagcaaagagatcttcctcactgt

SEQ ID NO: 5647767 - DNA, 25 bp, Homo sapien
tagacttcagagagcacttctctct

SEQ ID NO: 5647768 - DNA, 25 bp, Homo sapien
gggccgattggaggtgtccatggtc

SEQ ID NO: 5647769 - DNA, 25 bp, Homo sapien
gcgtactccagcagcaggagagcgg

SEQ ID NO: 5647770 - DNA, 25 bp, Homo sapien
gttccagagcaaggagccatgttcc

SEQ ID NO: 5647771 - DNA, 25 bp, Homo sapien
ctctcactggcacagcgaggttttg

SEQ ID NO: 5647772 - DNA, 25 bp, Homo sapien
cagttggcagcagtgacctcagtag

SEQ ID NO: 5647773 - DNA, 25 bp, Homo sapien
tccctagttagtggaaatttggata

SEQ ID NO: 5647774 - DNA, 25 bp, Homo sapien
gaatttgagaactagagtcctcatc

SEQ ID NO: 5647775 - DNA, 25 bp, Homo sapien
gagatcttcctcactgtgccagtgg

SEQ ID NO: 5647776 - DNA, 25 bp, Homo sapien
caggtttgactcaagggtcttcaag

SEQ ID NO: 5647777 - DNA, 25 bp, Homo sapien
agagcggatttacaacatctcaggg

SEQ ID NO: 5647778 - DNA, 25 bp, Homo sapien
ggaagggcagtagtcgggtggccaa

SEQ ID NO: 5647779 - DNA, 25 bp, Homo sapien
aaatgaacgtaagaatcttcaaact

SEQ ID NO: 5647780 - DNA, 25 bp, Homo sapien
tagttagtggaaatttggataaggg

SEQ ID NO: 5647781 - DNA, 25 bp, Homo sapien
gtcactgcttgctggggccatgcca

SEQ ID NO: 5647782 - DNA, 25 bp, Homo sapien
ttactgaagaccaaatactggtttg

SEQ ID NO: 5647783 - DNA, 25 bp, Homo sapien
tgggaccctgaagagacttcttccc

SEQ ID NO: 5647784 - DNA, 25 bp, Homo sapien
acctcctcaaggaggtggataacct

SEQ ID NO: 5647785 - DNA, 25 bp, Homo sapien
gggaattcaggaattcagacgtgct

SEQ ID NO: 5647786 - DNA, 25 bp, Homo sapien
gtgggaggtggtcagtgggacttag

SEQ ID NO: 5647787 - DNA, 25 bp, Homo sapien
gaaacaaacaggccctggaagaggc

SEQ ID NO: 5647788 - DNA, 25 bp, Homo sapien
caacatcgagatcctgcggctcccc

SEQ ID NO: 5647789 - DNA, 25 bp, Homo sapien
cctttctgaaagacttcgaccgtga

SEQ ID NO: 5647790 - DNA, 25 bp, Homo sapien
cagcgaggttttgctcagcccttgt

SEQ ID NO: 5647791 - DNA, 25 bp, Homo sapien
caacaagaccattttagtaaaacaa

SEQ ID NO: 5647792 - DNA, 25 bp, Homo sapien
gactacttcgcccttggaggaaaca

SEQ ID NO: 5647793 - DNA, 25 bp, Homo sapien
aggtagatgaaatgatagtggaaga

SEQ ID NO: 5647794 - DNA, 25 bp, Homo sapien
taggctcagataagtgagctctggg

SEQ ID NO: 5647795 - DNA, 25 bp, Homo sapien
actttgttaagcagagtcagcagtg

SEQ ID NO: 5647796 - DNA, 25 bp, Homo sapien
acgtgcctggcgacttcttcgggtg

SEQ ID NO: 5647797 - DNA, 25 bp, Homo sapien
agcaaattgagtcagacaggcagaa

SEQ ID NO: 5647798 - DNA, 25 bp, Homo sapien
actggcttgactacttcgcccttgg

SEQ ID NO: 5647799 - DNA, 25 bp, Homo sapien
aaagggaaaaggtcaagccgtgcta

SEQ ID NO: 5647800 - DNA, 25 bp, Homo sapien
acattaagaagctctccaaccgtct

SEQ ID NO: 5647801 - DNA, 25 bp, Homo sapien
gtaagaatcttcaaactgcaagagt

SEQ ID NO: 5647802 - DNA, 25 bp, Homo sapien
gctctctgtggtatttgttattatt

SEQ ID NO: 5647803 - DNA, 25 bp, Homo sapien
gctccccgcagcctccgccgagcgc

SEQ ID NO: 5647804 - DNA, 25 bp, Homo sapien
cgagatgaactggcttgactacttc

SEQ ID NO: 5647805 - DNA, 25 bp, Homo sapien
cactggcacagcgaggttttgctca

SEQ ID NO: 5647806 - DNA, 25 bp, Homo sapien
catggtccagtggtccctgccaagt

SEQ ID NO: 5647807 - DNA, 25 bp, Homo sapien
aaatactggtttggagacaacttcc

SEQ ID NO: 5647808 - DNA, 25 bp, Homo sapien
tgaagagacttcttcccttcaggct

SEQ ID NO: 5647809 - DNA, 25 bp, Homo sapien
tccccctaccagccctcctcttcct

SEQ ID NO: 5647810 - DNA, 25 bp, Homo sapien
ctcagataagtgagctctgggccat

SEQ ID NO: 5647811 - DNA, 25 bp, Homo sapien
gccaagaccaactccttacggaggc

SEQ ID NO: 5647812 - DNA, 25 bp, Homo sapien
ccgtgggccgattggaggtgtccat

SEQ ID NO: 5647813 - DNA, 25 bp, Homo sapien
ttgctcttctacctccctagttagt

SEQ ID NO: 5647814 - DNA, 25 bp, Homo sapien
aatcatgtgctatgttctaagaatt

SEQ ID NO: 5647815 - DNA, 25 bp, Homo sapien
tccgccgctccccgcagcctccgcc

SEQ ID NO: 5647816 - DNA, 25 bp, Homo sapien
caaagagatcttcctcactgtgcca

SEQ ID NO: 5647817 - DNA, 25 bp, Homo sapien
gtgaggtcctcattctccagccagc

SEQ ID NO: 5647818 - DNA, 25 bp, Homo sapien
tggggggaactgtacagatcagcag

SEQ ID NO: 5647819 - DNA, 25 bp, Homo sapien
atgagacaccaaagttgacaggatg

SEQ ID NO: 5647820 - DNA, 25 bp, Homo sapien
agccgtgggccgattggaggtgtcc

SEQ ID NO: 5647821 - DNA, 25 bp, Homo sapien
gaatcctccctgctctctgagctgc

SEQ ID NO: 5647822 - DNA, 25 bp, Homo sapien
tgaattgggtggcggttgactgtag

SEQ ID NO: 5647823 - DNA, 25 bp, Homo sapien
gaaaatgaacgtaagaatcttcaaa

SEQ ID NO: 5647824 - DNA, 25 bp, Homo sapien
cagacacccctgaaatctgccaaaa

SEQ ID NO: 5647825 - DNA, 25 bp, Homo sapien
ggcccagattctggaggttttatgt

SEQ ID NO: 5647826 - DNA, 25 bp, Homo sapien
gaattcaggaattcagacgtgctag

SEQ ID NO: 5647827 - DNA, 25 bp, Homo sapien
ttctggaggttttatgtcattggcc

SEQ ID NO: 5647828 - DNA, 25 bp, Homo sapien
ctggcgacttcttcgggtggtcccc

SEQ ID NO: 5647829 - DNA, 25 bp, Homo sapien
ccccagccgtgggccgattggaggt

SEQ ID NO: 5647830 - DNA, 25 bp, Homo sapien
gggaactgtacagatcagcagagca

SEQ ID NO: 5647831 - DNA, 25 bp, Homo sapien
tctccaaccgtctcgcccaaatctg

SEQ ID NO: 5647832 - DNA, 25 bp, Homo sapien
gatctttcacctgctgtgcccagta

SEQ ID NO: 5647833 - DNA, 25 bp, Homo sapien
aggcacatggctttctcatgtaggg

SEQ ID NO: 5647834 - DNA, 25 bp, Homo sapien
cttgtggagcagtgttttatgttta

SEQ ID NO: 5647835 - DNA, 25 bp, Homo sapien
gctgatcccagtcactgcttgctgg

SEQ ID NO: 5647836 - DNA, 25 bp, Homo sapien
gaggtggtcagtgggacttagggat

SEQ ID NO: 5647837 - DNA, 25 bp, Homo sapien
ctgcgtactccagcagcaggagagc

SEQ ID NO: 5647838 - DNA, 25 bp, Homo sapien
cagcctccgccgagcgccatggctc

SEQ ID NO: 5647839 - DNA, 25 bp, Homo sapien
cgcgagatgaactggcttgactact

SEQ ID NO: 5647840 - DNA, 25 bp, Homo sapien
cctaggaagggcagtagtcgggtgg

SEQ ID NO: 5647841 - DNA, 25 bp, Homo sapien
tgctgccttttgcctcctgcaactc

SEQ ID NO: 5647842 - DNA, 25 bp, Homo sapien
ttcagacacccctgaaatctgccaa

SEQ ID NO: 5647843 - DNA, 25 bp, Homo sapien
tgcctgcagttgagggggcgaagaa

SEQ ID NO: 5647844 - DNA, 25 bp, Homo sapien
ctctctcactggcacagcgaggttt

SEQ ID NO: 5647845 - DNA, 25 bp, Homo sapien
gggtgtgacttgcttggtggcctca

SEQ ID NO: 5647846 - DNA, 25 bp, Homo sapien
gtcagacaggcagaacctcctcaag

SEQ ID NO: 5647847 - DNA, 25 bp, Homo sapien
cctgcgattattggccagtgacttg

SEQ ID NO: 5647848 - DNA, 25 bp, Homo sapien
gccgtgctaacactgttaccccagc

SEQ ID NO: 5647849 - DNA, 25 bp, Homo sapien
tccatgtcttgctcttctacctccc

SEQ ID NO: 5647850 - DNA, 25 bp, Homo sapien
caagaccaactccttacggaggcgg

SEQ ID NO: 5647851 - DNA, 25 bp, Homo sapien
ccctggagaatcatgtgctatgttc

SEQ ID NO: 5647852 - DNA, 25 bp, Homo sapien
cgtccgccctcctcgtccctaccca

SEQ ID NO: 5647853 - DNA, 25 bp, Homo sapien
tcaggaattcagacgtgctagtccc

SEQ ID NO: 5647854 - DNA, 25 bp, Homo sapien
gtgtgacttgcttggtggcctcatt

SEQ ID NO: 5647855 - DNA, 25 bp, Homo sapien
tggccacagaataactgtctctaag

SEQ ID NO: 5647856 - DNA, 25 bp, Homo sapien
cctagttagtggaaatttggataag

SEQ ID NO: 5647857 - DNA, 25 bp, Homo sapien
actcaagggtcttcaagacccctgg

SEQ ID NO: 5647858 - DNA, 25 bp, Homo sapien
aggggcgggtgtgacttgcttggtg

SEQ ID NO: 5647859 - DNA, 25 bp, Homo sapien
ctcaacatcctcttcaccctgccct

SEQ ID NO: 5647860 - DNA, 25 bp, Homo sapien
cagctgatcccagtcactgcttgct

SEQ ID NO: 5647861 - DNA, 25 bp, Homo sapien
atctgccaaaacacgaaaggtaata

SEQ ID NO: 5647862 - DNA, 25 bp, Homo sapien
gcccaaatctgcagcagcatacgga

SEQ ID NO: 5647863 - DNA, 25 bp, Homo sapien
tcttcaccctgccctgcctgcagtt

SEQ ID NO: 5647864 - DNA, 25 bp, Homo sapien
tccatggtccagtggtccctgccaa

SEQ ID NO: 5647865 - DNA, 25 bp, Homo sapien
gtctaccctctcgcactcatgacac

SEQ ID NO: 5647866 - DNA, 25 bp, Homo sapien
gagccgctctctctcactggcacag

SEQ ID NO: 5647867 - DNA, 25 bp, Homo sapien
acccacaaatgagacaccaaagttg

SEQ ID NO: 5647868 - DNA, 25 bp, Homo sapien
ctgccctgcctgcagttgagggggc

SEQ ID NO: 5647869 - DNA, 25 bp, Homo sapien
gctcgcctcctttctgaaagacttc

SEQ ID NO: 5647870 - DNA, 25 bp, Homo sapien
agttctgaagtctgcttgtggagca

SEQ ID NO: 5647871 - DNA, 25 bp, Homo sapien
agctctgggccatgagagggtaggt

SEQ ID NO: 5647872 - DNA, 25 bp, Homo sapien
tctctgccctggagaatcatgtgct

SEQ ID NO: 5647873 - DNA, 25 bp, Homo sapien
caggaagactgcctccaccaccgct

SEQ ID NO: 5647874 - DNA, 25 bp, Homo sapien
gttggcagcagtgacctcagtaggg

SEQ ID NO: 5647875 - DNA, 25 bp, Homo sapien
gaggtttaggctcagataagtgagc

SEQ ID NO: 5647876 - DNA, 25 bp, Homo sapien
ctaacactgttaccccagccgtggg

SEQ ID NO: 5647877 - DNA, 25 bp, Homo sapien
catgtgtgcctgtgcctggggcatg

SEQ ID NO: 5647878 - DNA, 25 bp, Homo sapien
ggcacttctgggaccctgaagagac

SEQ ID NO: 5647879 - DNA, 25 bp, Homo sapien
cttccatgtcttgctcttctacctc

SEQ ID NO: 5647880 - DNA, 25 bp, Homo sapien
acggacccacaaatgagacaccaaa

SEQ ID NO: 5647881 - DNA, 25 bp, Homo sapien
tcttcccttcaggcttattgtttga

SEQ ID NO: 5647882 - DNA, 25 bp, Homo sapien
tgaaagacttcgaccgtgaagtgga

SEQ ID NO: 5647883 - DNA, 25 bp, Homo sapien
gcagagtcagcagtgaggtcctcat

SEQ ID NO: 5647884 - DNA, 25 bp, Homo sapien
gaggtcctcattctccagccagcct

SEQ ID NO: 5647885 - DNA, 25 bp, Homo sapien
agtgtgaagttccagagcaaggagc

SEQ ID NO: 5647886 - DNA, 25 bp, Homo sapien
aagctatccatggtccagtggtccc

SEQ ID NO: 5647887 - DNA, 25 bp, Homo sapien
tccccaaggctctgcgcgagatgaa

SEQ ID NO: 5647888 - DNA, 25 bp, Homo sapien
ttccctgccccatctccgccgctcc

SEQ ID NO: 5647889 - DNA, 25 bp, Homo sapien
cagcatacggacccacaaatgagac

SEQ ID NO: 5647890 - DNA, 25 bp, Homo sapien
ccttggaggaaacaaacaggccctg

SEQ ID NO: 5647891 - DNA, 25 bp, Homo sapien
gtgacctcagtagggaacatgtccg

SEQ ID NO: 5647892 - DNA, 25 bp, Homo sapien
gccttttgcctcctgcaactcaaca

SEQ ID NO: 5647893 - DNA, 25 bp, Homo sapien
tcagtagggaacatgtccgtctacc

SEQ ID NO: 5647894 - DNA, 25 bp, Homo sapien
gaacatgtccgtctaccctctcgca

SEQ ID NO: 5647895 - DNA, 25 bp, Homo sapien
cctccctgctctctgagctgctgcc

SEQ ID NO: 5647896 - DNA, 25 bp, Homo sapien
gtagggcccagattctggaggtttt

SEQ ID NO: 5647897 - DNA, 25 bp, Homo sapien
ggaaatttggataagggaactgtag

SEQ ID NO: 5647898 - DNA, 25 bp, Homo sapien
tcattccatgtgtgcctgtgcctgg

SEQ ID NO: 5647899 - DNA, 25 bp, Homo sapien
gatcttcctcactgtgccagtgggc

SEQ ID NO: 5647900 - DNA, 25 bp, Homo sapien
accctgaagagacttcttcccttca

SEQ ID NO: 5647901 - DNA, 25 bp, Homo sapien
tccccgtccgccctcctcgtcccta

SEQ ID NO: 5647902 - DNA, 25 bp, Homo sapien
ctcctcgtccctacccagtttcttg

SEQ ID NO: 5647903 - DNA, 25 bp, Homo sapien
atgttcctctaagggaattcaggaa

SEQ ID NO: 5647904 - DNA, 25 bp, Homo sapien
gatgaaatgatagtggaagaggaag

SEQ ID NO: 5647905 - DNA, 25 bp, Homo sapien
tcttcctcactgtgccagtgggcgg

SEQ ID NO: 5647906 - DNA, 25 bp, Homo sapien
cgtgctaacactgttaccccagccg

SEQ ID NO: 5647907 - DNA, 25 bp, Homo sapien
ctcagggaatggcagccctcttgct

SEQ ID NO: 5647908 - DNA, 25 bp, Homo sapien
aggtggataacctctacaacatcga

SEQ ID NO: 5647909 - DNA, 25 bp, Homo sapien
gcttattgtttgagtgtgaagttcc

SEQ ID NO: 5647910 - DNA, 25 bp, Homo sapien
ccctgtttactgaagaccaaatact

SEQ ID NO: 5647911 - DNA, 25 bp, Homo sapien
tgacctggatatcaccgaaataaac

SEQ ID NO: 5647912 - DNA, 25 bp, Homo sapien
tcagagagcacttctctcttatggg

SEQ ID NO: 5647913 - DNA, 25 bp, Homo sapien
tctcttatggggttcatgggaacag

SEQ ID NO: 5647914 - DNA, 25 bp, Homo sapien
gagcagtgttttatgtttatccctg

SEQ ID NO: 5647915 - DNA, 25 bp, Homo sapien
gggggaactgtacagatcagcagag

SEQ ID NO: 5647916 - DNA, 25 bp, Homo sapien
acgaatcaagcaaattgagtcagac

SEQ ID NO: 5647917 - DNA, 25 bp, Homo sapien
ctgccccatctccgccgctccccgc

SEQ ID NO: 5647918 - DNA, 25 bp, Homo sapien
actagagtcctcatccccaggcttg

SEQ ID NO: 5647919 - DNA, 25 bp, Homo sapien
tcttgcttccctgccccatctccgc

SEQ ID NO: 5647920 - DNA, 25 bp, Homo sapien
ggaagactgcctccaccaccgctac

SEQ ID NO: 5647921 - DNA, 25 bp, Homo sapien
tgacttgcagaggcacagtattgcc

SEQ ID NO: 5647922 - DNA, 25 bp, Homo sapien
agtttgaattgggtggcggttgact

SEQ ID NO: 5647923 - DNA, 25 bp, Homo sapien
cctgctctctgagctgctgcctttt

SEQ ID NO: 5647924 - DNA, 25 bp, Homo sapien
tcaagggtcttcaagacccctggcc

SEQ ID NO: 5647925 - DNA, 25 bp, Homo sapien
ggcggcaacagctgacctggatatc

SEQ ID NO: 5647926 - DNA, 25 bp, Homo sapien
aaggtaatacaggtagatgaaatga

SEQ ID NO: 5647927 - DNA, 25 bp, Homo sapien
atacgaatcaagcaaattgagtcag

SEQ ID NO: 5647928 - DNA, 25 bp, Homo sapien
ggaggcggaagctcgcctcctttct

SEQ ID NO: 5647929 - DNA, 25 bp, Homo sapien
aagactgcctccaccaccgctaccc

SEQ ID NO: 5647930 - DNA, 25 bp, Homo sapien
atcccagctgatcccagtcactgct

SEQ ID NO: 5647931 - DNA, 25 bp, Homo sapien
cctcccatcccagctgatcccagtc

SEQ ID NO: 5647932 - DNA, 25 bp, Homo sapien
gaccgggaggtttaggctcagataa

SEQ ID NO: 5647933 - DNA, 25 bp, Homo sapien
aagaggcggcaacagctgacctgga

SEQ ID NO: 5647934 - DNA, 25 bp, Homo sapien
gtgggccgattggaggtgtccatgg

SEQ ID NO: 5647935 - DNA, 25 bp, Homo sapien
aagaatttgagaactagagtcctca

SEQ ID NO: 5647936 - DNA, 25 bp, Homo sapien
acatggctttctcatgtagggctct

SEQ ID NO: 5647937 - DNA, 25 bp, Homo sapien
cagtgaggtcctcattctccagcca

SEQ ID NO: 5647938 - DNA, 25 bp, Homo sapien
atgcttgagaccgggaggtttaggc

SEQ ID NO: 5647939 - DNA, 25 bp, Homo sapien
aggcttattgtttgagtgtgaagtt

SEQ ID NO: 5647940 - DNA, 25 bp, Homo sapien
tgtacagatcagcagagcaggacag

SEQ ID NO: 5647941 - DNA, 25 bp, Homo sapien
tattattttgcaacaagaccatttt

SEQ ID NO: 5647942 - DNA, 25 bp, Homo sapien
actgaagaccaaatactggtttgga

SEQ ID NO: 5647943 - DNA, 25 bp, Homo sapien
ggagacaacttccatgtcttgctct

SEQ ID NO: 5647944 - DNA, 25 bp, Homo sapien
ccagtgggcggcggagagagcctgc

SEQ ID NO: 5647945 - DNA, 25 bp, Homo sapien
atccccaggcttgaaggcacatggc

SEQ ID NO: 5647946 - DNA, 25 bp, Homo sapien
gggtcttcaagacccctggcctgcg

SEQ ID NO: 5647947 - DNA, 25 bp, Homo sapien
tgaagaccaaatactggtttggaga

SEQ ID NO: 5647948 - DNA, 25 bp, Homo sapien
agagtcagcagtgaggtcctcattc

SEQ ID NO: 5647949 - DNA, 25 bp, Homo sapien
tagggctctctgtggtatttgttat

SEQ ID NO: 5647950 - DNA, 25 bp, Homo sapien
gctacccagagaacctctgcatctg

SEQ ID NO: 5647951 - DNA, 25 bp, Homo sapien
taaacaaactaacagcagaagctat

SEQ ID NO: 5647952 - DNA, 25 bp, Homo sapien
tgtagacttcagagagcacttctct

SEQ ID NO: 5647953 - DNA, 25 bp, Homo sapien
ctctgggccatgagagggtaggtcc

SEQ ID NO: 5647954 - DNA, 25 bp, Homo sapien
gtggcggttgactgtagagccgctc

SEQ ID NO: 5647955 - DNA, 25 bp, Homo sapien
ggagagcggatttacaacatctcag

SEQ ID NO: 5647956 - DNA, 25 bp, Homo sapien
ccatggaagcttcccatcagtctcc

SEQ ID NO: 5647957 - DNA, 25 bp, Homo sapien
tggggccatgccatggaagcttccc

SEQ ID NO: 5647958 - DNA, 25 bp, Homo sapien
gaccgcaggtacgtgcctggcgact

SEQ ID NO: 5647959 - DNA, 25 bp, Homo sapien
cgattattggccagtgacttgcaga

SEQ ID NO: 5647960 - DNA, 25 bp, Homo sapien
ccagccctcctcttcctcctcctcc

SEQ ID NO: 5647961 - DNA, 25 bp, Homo sapien
atatcaccgaaataaacaaactaac

SEQ ID NO: 5647962 - DNA, 25 bp, Homo sapien
ggtggccaagaccaactccttacgg

SEQ ID NO: 5647963 - DNA, 25 bp, Homo sapien
aactgtctctaagctatccatggtc

SEQ ID NO: 5647964 - DNA, 25 bp, Homo sapien
tgccctggagaatcatgtgctatgt

SEQ ID NO: 5647965 - DNA, 25 bp, Homo sapien
cccaggtttgactcaagggtcttca

SEQ ID NO: 5647966 - DNA, 25 bp, Homo sapien
gcttccctgccccatctccgccgct

SEQ ID NO: 5647967 - DNA, 25 bp, Homo sapien
aactcagtccatacaaggaaaagga

SEQ ID NO: 5647968 - DNA, 25 bp, Homo sapien
cccctgaaatctgccaaaacacgaa

SEQ ID NO: 5647969 - DNA, 25 bp, Homo sapien
aatttggataagggaactgtagggc

SEQ ID NO: 5647970 - DNA, 25 bp, Homo sapien
cccttcaggcttattgtttgagtgt

SEQ ID NO: 5647971 - DNA, 25 bp, Homo sapien
tcaccctcccatcccagctgatccc

SEQ ID NO: 5647972 - DNA, 25 bp, Homo sapien
agagaactcagtccatacaaggaaa

SEQ ID NO: 5647973 - DNA, 25 bp, Homo sapien
gaatggcagccctcttgctgacagc

SEQ ID NO: 5647974 - DNA, 25 bp, Homo sapien
ccctgccctgcctgcagttgagggg

SEQ ID NO: 5647975 - DNA, 25 bp, Homo sapien
cagatcagcagagcaggacagttgg

SEQ ID NO: 5647976 - DNA, 25 bp, Homo sapien
agatgaactggcttgactacttcgc

SEQ ID NO: 5647977 - DNA, 25 bp, Homo sapien
tgtagggctctctgtggtatttgtt

SEQ ID NO: 5647978 - DNA, 25 bp, Homo sapien
gtccagaaggtggggggaactgtac

SEQ ID NO: 5647979 - DNA, 25 bp, Homo sapien
aaacacgaaaggtaatacaggtaga

SEQ ID NO: 5647980 - DNA, 25 bp, Homo sapien
aaaaggtgtcctccatccaagaaga

SEQ ID NO: 5647981 - DNA, 25 bp, Homo sapien
agtctgcttgtggagcagtgtttta

SEQ ID NO: 5647982 - DNA, 25 bp, Homo sapien
tcagcccttgtctcgggaccgcagg

SEQ ID NO: 5647983 - DNA, 25 bp, Homo sapien
accctcccatcccagctgatcccag

SEQ ID NO: 5647984 - DNA, 25 bp, Homo sapien
caccgctacccagagaacctctgca

SEQ ID NO: 5647985 - DNA, 25 bp, Homo sapien
gcctccaccaccgctacccagagaa

SEQ ID NO: 5647986 - DNA, 25 bp, Homo sapien
aggaattcagacgtgctagtcccac

SEQ ID NO: 5647987 - DNA, 25 bp, Homo sapien
tttcttgcttccctgccccatctcc

SEQ ID NO: 5647988 - DNA, 25 bp, Homo sapien
aacttccatgtcttgctcttctacc

SEQ ID NO: 5647989 - DNA, 25 bp, Homo sapien
tttaggctcagataagtgagctctg

SEQ ID NO: 5647990 - DNA, 25 bp, Homo sapien
gccgctctctctcactggcacagcg

SEQ ID NO: 5647991 - DNA, 25 bp, Homo sapien
aactcaacatcctcttcaccctgcc

SEQ ID NO: 5647992 - DNA, 25 bp, Homo sapien
caaggctctgcgcgagatgaactgg

SEQ ID NO: 5647993 - DNA, 25 bp, Homo sapien
cacagcgaggttttgctcagccctt

SEQ ID NO: 5647994 - DNA, 25 bp, Homo sapien
gggcatggactttgttaagcagagt

SEQ ID NO: 5647995 - DNA, 25 bp, Homo sapien
gaaaagggaaaaggtcaagccgtgc

SEQ ID NO: 5647996 - DNA, 25 bp, Homo sapien
acatcgagatcctgcggctccccaa

SEQ ID NO: 5647997 - DNA, 25 bp, Homo sapien
gcggagagagcctgcgattattggc

SEQ ID NO: 5647998 - DNA, 25 bp, Homo sapien
ggatccagaggccttgggaaacatt

SEQ ID NO: 5647999 - DNA, 25 bp, Homo sapien
gagtcctcatccccaggcttgaagg

SEQ ID NO: 5648000 - DNA, 25 bp, Homo sapien
cctccctagttagtggaaatttgga

SEQ ID NO: 5648001 - DNA, 25 bp, Homo sapien
tagagtcctcatccccaggcttgaa

SEQ ID NO: 5648002 - DNA, 25 bp, Homo sapien
tgcaagagtcaaaaggtgtcctcca

SEQ ID NO: 5648003 - DNA, 25 bp, Homo sapien
gcctgacacccaggtttgactcaag

SEQ ID NO: 5648004 - DNA, 25 bp, Homo sapien
atcctgcggctccccaaggctctgc

SEQ ID NO: 5648005 - DNA, 25 bp, Homo sapien
ttaggtagagctgtctgttcaccct

SEQ ID NO: 5648006 - DNA, 25 bp, Homo sapien
agacaacttccatgtcttgctcttc

SEQ ID NO: 5648007 - DNA, 25 bp, Homo sapien
tggtatttgttattattttgcaaca

SEQ ID NO: 5648008 - DNA, 25 bp, Homo sapien
tctgtagacttcagagagcacttct

SEQ ID NO: 5648009 - DNA, 25 bp, Homo sapien
gtgcctggcgacttcttcgggtggt

SEQ ID NO: 5648010 - DNA, 25 bp, Homo sapien
gccctgcctgcagttgagggggcga

SEQ ID NO: 5648011 - DNA, 25 bp, Homo sapien
ccaccaccgctacccagagaacctc

SEQ ID NO: 5648012 - DNA, 25 bp, Homo sapien
tgtgtgcctgtgcctggggcatgga

SEQ ID NO: 5648013 - DNA, 25 bp, Homo sapien
catggtcaaaccaactccaggcctg

SEQ ID NO: 5648014 - DNA, 25 bp, Homo sapien
tccagagcaaggagccatgttcctc

SEQ ID NO: 5648015 - DNA, 25 bp, Homo sapien
atcaagcaaattgagtcagacaggc

SEQ ID NO: 5648016 - DNA, 25 bp, Homo sapien
atggacttttaatgggcacttctgg

SEQ ID NO: 5648017 - DNA, 25 bp, Homo sapien
agctggatccagaggccttgggaaa

SEQ ID NO: 5648018 - DNA, 25 bp, Homo sapien
gttattattttgcaacaagaccatt

SEQ ID NO: 5648019 - DNA, 25 bp, Homo sapien
ttgaaggcacatggctttctcatgt

SEQ ID NO: 5648020 - DNA, 25 bp, Homo sapien
ccatgttcctctaagggaattcagg

SEQ ID NO: 5648021 - DNA, 25 bp, Homo sapien
gggaacatgtccgtctaccctctcg

SEQ ID NO: 5648022 - DNA, 25 bp, Homo sapien
cccagctgatcccagtcactgcttg

SEQ ID NO: 5648023 - DNA, 25 bp, Homo sapien
gtttactgaagaccaaatactggtt

SEQ ID NO: 5648024 - DNA, 25 bp, Homo sapien
ccaaatctgcagcagcatacggacc

SEQ ID NO: 5648025 - DNA, 25 bp, Homo sapien
gtacgtgcctggcgacttcttcggg

SEQ ID NO: 5648026 - DNA, 25 bp, Homo sapien
aattgggtggcggttgactgtagag

SEQ ID NO: 5648027 - DNA, 25 bp, Homo sapien
caggatggacttttaatgggcactt

SEQ ID NO: 5648028 - DNA, 25 bp, Homo sapien
ctcaggaagactgcctccaccaccg

SEQ ID NO: 5648029 - DNA, 25 bp, Homo sapien
gtggagtttgaattgggtggcggtt

SEQ ID NO: 5648030 - DNA, 25 bp, Homo sapien
attggaggtgtccatggtcaaacca

SEQ ID NO: 5648031 - DNA, 25 bp, Homo sapien
agtcaaaaggtgtcctccatccaag

SEQ ID NO: 5648032 - DNA, 25 bp, Homo sapien
gtagttctgaagtctgcttgtggag

SEQ ID NO: 5648033 - DNA, 25 bp, Homo sapien
agagtcaaaaggtgtcctccatcca

SEQ ID NO: 5648034 - DNA, 25 bp, Homo sapien
actggtttggagacaacttccatgt

SEQ ID NO: 5648035 - DNA, 25 bp, Homo sapien
gaatcttcaaactgcaagagtcaaa

SEQ ID NO: 5648036 - DNA, 25 bp, Homo sapien
ctgttcaccctcccatcccagctga

SEQ ID NO: 5648037 - DNA, 25 bp, Homo sapien
ttttgctcagcccttgtctcgggac

SEQ ID NO: 5648038 - DNA, 25 bp, Homo sapien
tctgaaagacttcgaccgtgaagtg

SEQ ID NO: 5648039 - DNA, 25 bp, Homo sapien
atccctgtttactgaagaccaaata

SEQ ID NO: 5648040 - DNA, 25 bp, Homo sapien
ggcacagcgaggttttgctcagccc

SEQ ID NO: 5648041 - DNA, 25 bp, Homo sapien
accaactccttacggaggcggaagc

SEQ ID NO: 5648042 - DNA, 25 bp, Homo sapien
cagagaacctctgcatctggcattt

SEQ ID NO: 5648043 - DNA, 25 bp, Homo sapien
gctcagcccttgtctcgggaccgca

SEQ ID NO: 5648044 - DNA, 25 bp, Homo sapien
tcagtctcccagctgaatcctccct

SEQ ID NO: 5648045 - DNA, 25 bp, Homo sapien
tgctctctgagctgctgccttttgc

SEQ ID NO: 5648046 - DNA, 25 bp, Homo sapien
tcgcccaaatctgcagcagcatacg

SEQ ID NO: 5648047 - DNA, 25 bp, Homo sapien
cagattctggaggttttatgtcatt

SEQ ID NO: 5648048 - DNA, 25 bp, Homo sapien
tcgtccctacccagtttcttgcttc

SEQ ID NO: 5648049 - DNA, 25 bp, Homo sapien
acttcgcccttggaggaaacaaaca

SEQ ID NO: 5648050 - DNA, 25 bp, Homo sapien
acagtattgcccagctggatccaga

SEQ ID NO: 5648051 - DNA, 25 bp, Homo sapien
acggaggcggaagctcgcctccttt

SEQ ID NO: 5648052 - DNA, 25 bp, Homo sapien
aagacccctggcctgcgtactccag

SEQ ID NO: 5648053 - DNA, 25 bp, Homo sapien
tcctgcaactcaacatcctcttcac

SEQ ID NO: 5648054 - DNA, 25 bp, Homo sapien
ctccaccaccgctacccagagaacc

SEQ ID NO: 5648055 - DNA, 25 bp, Homo sapien
tccatgtgtgcctgtgcctggggca

SEQ ID NO: 5648056 - DNA, 25 bp, Homo sapien
gggatctttcacctgctgtgcccag

SEQ ID NO: 5648057 - DNA, 25 bp, Homo sapien
ctctgagctgctgccttttgcctcc

SEQ ID NO: 5648058 - DNA, 25 bp, Homo sapien
ggaagaggcggcaacagctgacctg

SEQ ID NO: 5648059 - DNA, 25 bp, Homo sapien
gtggcctcattccatgtgtgcctgt

SEQ ID NO: 5648060 - DNA, 25 bp, Homo sapien
gaggttttgctcagcccttgtctcg

SEQ ID NO: 5648061 - DNA, 25 bp, Homo sapien
aactaacagcagaagctattcagac

SEQ ID NO: 5648062 - DNA, 25 bp, Homo sapien
gccctcttgctgacagcaaagagat

SEQ ID NO: 5648063 - DNA, 25 bp, Homo sapien
ctgcagttgagggggcgaagaagaa

SEQ ID NO: 5648064 - DNA, 25 bp, Homo sapien
atactggtttggagacaacttccat

SEQ ID NO: 5648065 - DNA, 25 bp, Homo sapien
tgacagcaaagagatcttcctcact

SEQ ID NO: 5648066 - DNA, 25 bp, Homo sapien
aaatctgccaaaacacgaaaggtaa

SEQ ID NO: 5648067 - DNA, 25 bp, Homo sapien
cccaaggctctgcgcgagatgaact

SEQ ID NO: 5648068 - DNA, 25 bp, Homo sapien
cccctaccagccctcctcttcctcc

SEQ ID NO: 5648069 - DNA, 25 bp, Homo sapien
gaagaagaaccctgtgttctcagga

SEQ ID NO: 5648070 - DNA, 25 bp, Homo sapien
ttgagaactagagtcctcatcccca

SEQ ID NO: 5648071 - DNA, 25 bp, Homo sapien
accgtctcgcccaaatctgcagcag

SEQ ID NO: 5648072 - DNA, 25 bp, Homo sapien
aagcttcccatcagtctcccagctg

SEQ ID NO: 5648073 - DNA, 25 bp, Homo sapien
tcctcctcctgtgggaggtggtcag

SEQ ID NO: 5648074 - DNA, 25 bp, Homo sapien
cctcttgctgacagcaaagagatct

SEQ ID NO: 5648075 - DNA, 25 bp, Homo sapien
tcttcctcctcctcctcctcctgtg

SEQ ID NO: 5648076 - DNA, 25 bp, Homo sapien
tacagatcagcagagcaggacagtt

SEQ ID NO: 5648077 - DNA, 25 bp, Homo sapien
ctggaagaggcggcaacagctgacc

SEQ ID NO: 5648078 - DNA, 25 bp, Homo sapien
tatccatggtccagtggtccctgcc

SEQ ID NO: 5648079 - DNA, 25 bp, Homo sapien
gatcagcagagcaggacagttggca

SEQ ID NO: 5648080 - DNA, 25 bp, Homo sapien
cctcactgtgccagtgggcggcgga

SEQ ID NO: 5648081 - DNA, 25 bp, Homo sapien
ccagctgaatcctccctgctctctg

SEQ ID NO: 5648082 - DNA, 25 bp, Homo sapien
ctccagccagcctctctgccctgga

SEQ ID NO: 5648083 - DNA, 25 bp, Homo sapien
acgaaaggtaatacaggtagatgaa

SEQ ID NO: 5648084 - DNA, 25 bp, Homo sapien
gacctcagtagggaacatgtccgtc

SEQ ID NO: 5648085 - DNA, 25 bp, Homo sapien
tgtttgagtgtgaagttccagagca

SEQ ID NO: 5648086 - DNA, 25 bp, Homo sapien
atctggcatttctgctctctatgct

SEQ ID NO: 5648087 - DNA, 25 bp, Homo sapien
tttggataagggaactgtagggccc

SEQ ID NO: 5648088 - DNA, 25 bp, Homo sapien
caaacaggccctggaagaggcggca

SEQ ID NO: 5648089 - DNA, 25 bp, Homo sapien
ttctccagccagcctctctgccctg

SEQ ID NO: 5648090 - DNA, 25 bp, Homo sapien
tgagagggtaggtccagaaggtggg

SEQ ID NO: 5648091 - DNA, 25 bp, Homo sapien
tacaacatctcagggaatggcagcc

SEQ ID NO: 5648092 - DNA, 25 bp, Homo sapien
ttgttattattttgcaacaagacca

SEQ ID NO: 5648093 - DNA, 25 bp, Homo sapien
ggctttctcatgtagggctctctgt

SEQ ID NO: 5648094 - DNA, 25 bp, Homo sapien
ggataacctctacaacatcgagatc

SEQ ID NO: 5648095 - DNA, 25 bp, Homo sapien
tcctcattctccagccagcctctct

SEQ ID NO: 5648096 - DNA, 25 bp, Homo sapien
tagggaacatgtccgtctaccctct

SEQ ID NO: 5648097 - DNA, 25 bp, Homo sapien
gggacttagggatctttcacctgct

SEQ ID NO: 5648098 - DNA, 25 bp, Homo sapien
tggataagggaactgtagggcccag

SEQ ID NO: 5648099 - DNA, 25 bp, Homo sapien
cttcaagacccctggcctgcgtact

SEQ ID NO: 5648100 - DNA, 25 bp, Homo sapien
ggtggggggaactgtacagatcagc

SEQ ID NO: 5648101 - DNA, 25 bp, Homo sapien
ccaagaagagaactcagtccataca

SEQ ID NO: 5648102 - DNA, 25 bp, Homo sapien
ggcagccctcttgctgacagcaaag

SEQ ID NO: 5648103 - DNA, 25 bp, Homo sapien
ccaaagttgacaggatggactttta

SEQ ID NO: 5648104 - DNA, 25 bp, Homo sapien
tttacaacatctcagggaatggcag

SEQ ID NO: 5648105 - DNA, 25 bp, Homo sapien
tcctctaagggaattcaggaattca

SEQ ID NO: 5648106 - DNA, 25 bp, Homo sapien
gtttatccctgtttactgaagacca

SEQ ID NO: 5648107 - DNA, 25 bp, Homo sapien
cttgggaaacattaagaagctctcc

SEQ ID NO: 5648108 - DNA, 25 bp, Homo sapien
agcagtgacctcagtagggaacatg

SEQ ID NO: 5648109 - DNA, 25 bp, Homo sapien
acttgcagaggcacagtattgccca

SEQ ID NO: 5648110 - DNA, 25 bp, Homo sapien
tagtcccacaccagttaggtagagc

SEQ ID NO: 5648111 - DNA, 25 bp, Homo sapien
acctggatatcaccgaaataaacaa

SEQ ID NO: 5648112 - DNA, 25 bp, Homo sapien
ttaatgggcacttctgggaccctga

SEQ ID NO: 5648113 - DNA, 25 bp, Homo sapien
ctctctgagctgctgccttttgcct

SEQ ID NO: 5648114 - DNA, 25 bp, Homo sapien
ggccctggaagaggcggcaacagct

SEQ ID NO: 5648115 - DNA, 25 bp, Homo sapien
gcttgaaggcacatggctttctcat

SEQ ID NO: 5648116 - DNA, 25 bp, Homo sapien
agaactcagtccatacaaggaaaag

SEQ ID NO: 5648117 - DNA, 25 bp, Homo sapien
gctgacagcaaagagatcttcctca

SEQ ID NO: 5648118 - DNA, 25 bp, Homo sapien
tgggcggcggagagagcctgcgatt

SEQ ID NO: 5648119 - DNA, 25 bp, Homo sapien
gcacagtattgcccagctggatcca

SEQ ID NO: 5648120 - DNA, 25 bp, Homo sapien
caccagttaggtagagctgtctgtt

SEQ ID NO: 5648121 - DNA, 25 bp, Homo sapien
cgtgaagtggaaatacgaatcaagc

SEQ ID NO: 5648122 - DNA, 25 bp, Homo sapien
gagaactagagtcctcatccccagg

SEQ ID NO: 5648123 - DNA, 25 bp, Homo sapien
tgctaacactgttaccccagccgtg

SEQ ID NO: 5648124 - DNA, 25 bp, Homo sapien
ttattttgcaacaagaccattttag

SEQ ID NO: 5648125 - DNA, 25 bp, Homo sapien
ctgccttttgcctcctgcaactcaa

SEQ ID NO: 5648126 - DNA, 25 bp, Homo sapien
ttcctcctcctcctcctcctgtggg

SEQ ID NO: 5648127 - DNA, 25 bp, Homo sapien
gattctggaggttttatgtcattgg

SEQ ID NO: 5648128 - DNA, 25 bp, Homo sapien
agccatgttcctctaagggaattca

SEQ ID NO: 5648129 - DNA, 25 bp, Homo sapien
ccctggaagaggcggcaacagctga

SEQ ID NO: 5648130 - DNA, 25 bp, Homo sapien
agtgacttgcagaggcacagtattg

SEQ ID NO: 5648131 - DNA, 25 bp, Homo sapien
aagctattcagacacccctgaaatc

SEQ ID NO: 5648132 - DNA, 25 bp, Homo sapien
gtggataacctctacaacatcgaga

SEQ ID NO: 5648133 - DNA, 25 bp, Homo sapien
gcgaggttttgctcagcccttgtct

SEQ ID NO: 5648134 - DNA, 25 bp, Homo sapien
gttagtggaaatttggataagggaa

SEQ ID NO: 5648135 - DNA, 25 bp, Homo sapien
caggcagaacctcctcaaggaggtg

SEQ ID NO: 5648136 - DNA, 25 bp, Homo sapien
gtccgtctaccctctcgcactcatg

SEQ ID NO: 5648137 - DNA, 25 bp, Homo sapien
gcctggcgacttcttcgggtggtcc

SEQ ID NO: 5648138 - DNA, 25 bp, Homo sapien
ctcattctccagccagcctctctgc

SEQ ID NO: 5648139 - DNA, 25 bp, Homo sapien
ctggatccagaggccttgggaaaca

SEQ ID NO: 5648140 - DNA, 25 bp, Homo sapien
tgtcattggccacagaataactgtc

SEQ ID NO: 5648141 - DNA, 25 bp, Homo sapien
cagggaatggcagccctcttgctga

SEQ ID NO: 5648142 - DNA, 25 bp, Homo sapien
actgtgccagtgggcggcggagaga

SEQ ID NO: 5648143 - DNA, 25 bp, Homo sapien
tgcctgtgcctggggcatggacttt

SEQ ID NO: 5648144 - DNA, 25 bp, Homo sapien
ctgcaactcaacatcctcttcaccc

SEQ ID NO: 5648145 - DNA, 25 bp, Homo sapien
ctcctcctcctcctgtgggaggtgg

SEQ ID NO: 5648146 - DNA, 25 bp, Homo sapien
cgccatggctcctaggaagggcagt

SEQ ID NO: 5648147 - DNA, 25 bp, Homo sapien
gcctccgccgagcgccatggctcct

SEQ ID NO: 5648148 - DNA, 25 bp, Homo sapien
taagaagctctccaaccgtctcgcc

SEQ ID NO: 5648149 - DNA, 25 bp, Homo sapien
ttacggaggcggaagctcgcctcct

SEQ ID NO: 5648150 - DNA, 25 bp, Homo sapien
tatgtcattggccacagaataactg

SEQ ID NO: 5648151 - DNA, 25 bp, Homo sapien
agggaactgtagggcccagattctg

SEQ ID NO: 5648152 - DNA, 25 bp, Homo sapien
tgggcacttctgggaccctgaagag

SEQ ID NO: 5648153 - DNA, 25 bp, Homo sapien
cgagatcctgcggctccccaaggct

SEQ ID NO: 5648154 - DNA, 25 bp, Homo sapien
attcaggaattcagacgtgctagtc

SEQ ID NO: 5648155 - DNA, 25 bp, Homo sapien
tgcttggtggcctcattccatgtgt

SEQ ID NO: 5648156 - DNA, 25 bp, Homo sapien
aaaaggtcaagccgtgctaacactg

SEQ ID NO: 5648157 - DNA, 25 bp, Homo sapien
caacatctcagggaatggcagccct

SEQ ID NO: 5648158 - DNA, 25 bp, Homo sapien
gttaccccagccgtgggccgattgg

SEQ ID NO: 5648159 - DNA, 25 bp, Homo sapien
cttgcttggtggcctcattccatgt

SEQ ID NO: 5648160 - DNA, 25 bp, Homo sapien
gagaccgggaggtttaggctcagat

SEQ ID NO: 5648161 - DNA, 25 bp, Homo sapien
ttgcttccctgccccatctccgccg

SEQ ID NO: 5648162 - DNA, 25 bp, Homo sapien
tattggccagtgacttgcagaggca

SEQ ID NO: 5648163 - DNA, 25 bp, Homo sapien
acatctcagggaatggcagccctct

SEQ ID NO: 5648164 - DNA, 25 bp, Homo sapien
tggtcaaaccaactccaggcctgac

SEQ ID NO: 5648165 - DNA, 25 bp, Homo sapien
atttgagaactagagtcctcatccc

SEQ ID NO: 5648166 - DNA, 25 bp, Homo sapien
ggtgtcctccatccaagaagagaac

SEQ ID NO: 5648167 - DNA, 25 bp, Homo sapien
ttgcccagctggatccagaggcctt

SEQ ID NO: 5648168 - DNA, 25 bp, Homo sapien
agcagcatacggacccacaaatgag

SEQ ID NO: 5648169 - DNA, 25 bp, Homo sapien
ggccagtgacttgcagaggcacagt

SEQ ID NO: 5648170 - DNA, 25 bp, Homo sapien
ccagtggtccctgccaagtctgtag

SEQ ID NO: 5648171 - DNA, 25 bp, Homo sapien
ccaggcttgaaggcacatggctttc

SEQ ID NO: 5648172 - DNA, 25 bp, Homo sapien
tttatgtcattggccacagaataac

SEQ ID NO: 5648173 - DNA, 25 bp, Homo sapien
ctgctgtgcccagtagttctgaagt

SEQ ID NO: 5648174 - DNA, 25 bp, Homo sapien
ggctcagataagtgagctctgggcc

SEQ ID NO: 5648175 - DNA, 25 bp, Homo sapien
tcctcctcctcctcctgtgggaggt

SEQ ID NO: 5648176 - DNA, 25 bp, Homo sapien
gcagtgttttatgtttatccctgtt

SEQ ID NO: 5648177 - DNA, 25 bp, Homo sapien
gccttgggaaacattaagaagctct

SEQ ID NO: 5648178 - DNA, 25 bp, Homo sapien
agcaaagagatcttcctcactgtgc

SEQ ID NO: 5648179 - DNA, 25 bp, Homo sapien
atggctcctaggaagggcagtagtc

SEQ ID NO: 5648180 - DNA, 25 bp, Homo sapien
agcccttgtctcgggaccgcaggta

SEQ ID NO: 5648181 - DNA, 25 bp, Homo sapien
gccacagaataactgtctctaagct

SEQ ID NO: 5648182 - DNA, 25 bp, Homo sapien
tccatggtcaaaccaactccaggcc

SEQ ID NO: 5648183 - DNA, 25 bp, Homo sapien
gccaagtctgtagacttcagagagc

SEQ ID NO: 5648184 - DNA, 25 bp, Homo sapien
tcgcctcctttctgaaagacttcga

SEQ ID NO: 5648185 - DNA, 25 bp, Homo sapien
tctgcgcgagatgaactggcttgac

SEQ ID NO: 5648186 - DNA, 25 bp, Homo sapien
gcttgactacttcgcccttggagga

SEQ ID NO: 5648187 - DNA, 25 bp, Homo sapien
ccgccgagcgccatggctcctagga

SEQ ID NO: 5648188 - DNA, 25 bp, Homo sapien
ctgttaccccagccgtgggccgatt

SEQ ID NO: 5648189 - DNA, 25 bp, Homo sapien
aggctctgcgcgagatgaactggct

SEQ ID NO: 5648190 - DNA, 25 bp, Homo sapien
tgcttgtggagcagtgttttatgtt

SEQ ID NO: 5648191 - DNA, 25 bp, Homo sapien
gttcctctaagggaattcaggaatt

SEQ ID NO: 5648192 - DNA, 25 bp, Homo sapien
cccctggcctgcgtactccagcagc

SEQ ID NO: 5648193 - DNA, 25 bp, Homo sapien
tttgcaacaagaccattttagtaaa

SEQ ID NO: 5648194 - DNA, 25 bp, Homo sapien
cacccaggtttgactcaagggtctt

SEQ ID NO: 5648195 - DNA, 25 bp, Homo sapien
gcttgagaccgggaggtttaggctc

SEQ ID NO: 5648196 - DNA, 25 bp, Homo sapien
gtatttgttattattttgcaacaag

SEQ ID NO: 5648197 - DNA, 25 bp, Homo sapien
gctgacctggatatcaccgaaataa

SEQ ID NO: 5648198 - DNA, 25 bp, Homo sapien
gcgaagaagaaccctgtgttctcag

SEQ ID NO: 5648199 - DNA, 25 bp, Homo sapien
ctacccagtttcttgcttccctgcc

SEQ ID NO: 5648200 - DNA, 25 bp, Homo sapien
gggggcgaagaagaaccctgtgttc

SEQ ID NO: 5648201 - DNA, 25 bp, Homo sapien
agaatcatgtgctatgttctaagaa

SEQ ID NO: 5648202 - DNA, 25 bp, Homo sapien
atctcagggaatggcagccctcttg

SEQ ID NO: 5648203 - DNA, 25 bp, Homo sapien
aaggtcaagccgtgctaacactgtt

SEQ ID NO: 5648204 - DNA, 25 bp, Homo sapien
tgaagtggaaatacgaatcaagcaa

SEQ ID NO: 5648205 - DNA, 25 bp, Homo sapien
ttcgaccgtgaagtggaaatacgaa

SEQ ID NO: 5648206 - DNA, 25 bp, Homo sapien
aaatgagacaccaaagttgacagga

SEQ ID NO: 5648207 - DNA, 25 bp, Homo sapien
ttgagtcagacaggcagaacctcct

SEQ ID NO: 5648208 - DNA, 25 bp, Homo sapien
gaaaggtaatacaggtagatgaaat

SEQ ID NO: 5648209 - DNA, 25 bp, Homo sapien
gcagtagtcgggtggccaagaccaa

SEQ ID NO: 5648210 - DNA, 25 bp, Homo sapien
ttaagcagagtcagcagtgaggtcc

SEQ ID NO: 5648211 - DNA, 25 bp, Homo sapien
tggtggcctcattccatgtgtgcct

SEQ ID NO: 5648212 - DNA, 25 bp, Homo sapien
ggaggtggataacctctacaacatc

SEQ ID NO: 5648213 - DNA, 25 bp, Homo sapien
tctacaacatcgagatcctgcggct

SEQ ID NO: 5648214 - DNA, 25 bp, Homo sapien
tgtgccagtgggcggcggagagagc

SEQ ID NO: 5648215 - DNA, 25 bp, Homo sapien
cagagcaggacagttggcagcagtg

SEQ ID NO: 5648216 - DNA, 25 bp, Homo sapien
gacttcagagagcacttctctctta

SEQ ID NO: 5648217 - DNA, 25 bp, Homo sapien
aagcagagtcagcagtgaggtcctc

SEQ ID NO: 5648218 - DNA, 25 bp, Homo sapien
acctgctgtgcccagtagttctgaa

SEQ ID NO: 5648219 - DNA, 25 bp, Homo sapien
gcatggactttgttaagcagagtca

SEQ ID NO: 5648220 - DNA, 25 bp, Homo sapien
agtctgtagacttcagagagcactt

SEQ ID NO: 5648221 - DNA, 25 bp, Homo sapien
agtagggaacatgtccgtctaccct

SEQ ID NO: 5648222 - DNA, 25 bp, Homo sapien
ctcatgtagggctctctgtggtatt

SEQ ID NO: 5648223 - DNA, 25 bp, Homo sapien
gatttacaacatctcagggaatggc

SEQ ID NO: 5648224 - DNA, 25 bp, Homo sapien
agccctcctcttcctcctcctcctc

SEQ ID NO: 5648225 - DNA, 25 bp, Homo sapien
agcagtgaggtcctcattctccagc

SEQ ID NO: 5648226 - DNA, 25 bp, Homo sapien
gctggggccatgccatggaagcttc

SEQ ID NO: 5648227 - DNA, 25 bp, Homo sapien
tctctgtggtatttgttattatttt

SEQ ID NO: 5648228 - DNA, 25 bp, Homo sapien
cttggtggcctcattccatgtgtgc

SEQ ID NO: 5648229 - DNA, 25 bp, Homo sapien
cctcagtagggaacatgtccgtcta

SEQ ID NO: 5648230 - DNA, 25 bp, Homo sapien
ctgaatcctccctgctctctgagct

SEQ ID NO: 5648231 - DNA, 25 bp, Homo sapien
gaacgtaagaatcttcaaactgcaa

SEQ ID NO: 5648232 - DNA, 25 bp, Homo sapien
agagagcacttctctcttatggggt

SEQ ID NO: 5648233 - DNA, 25 bp, Homo sapien
cctctacaacatcgagatcctgcgg

SEQ ID NO: 5648234 - DNA, 25 bp, Homo sapien
gacttgcttggtggcctcattccat

SEQ ID NO: 5648235 - DNA, 25 bp, Homo sapien
atccagaggccttgggaaacattaa

SEQ ID NO: 5648236 - DNA, 25 bp, Homo sapien
cgggtggccaagaccaactccttac

SEQ ID NO: 5648237 - DNA, 25 bp, Homo sapien
gaagagaactcagtccatacaagga

SEQ ID NO: 5648238 - DNA, 25 bp, Homo sapien
catctccgccgctccccgcagcctc

SEQ ID NO: 5648239 - DNA, 25 bp, Homo sapien
tgcaacaagaccattttagtaaaac

SEQ ID NO: 5648240 - DNA, 25 bp, Homo sapien
gcgggtgtgacttgcttggtggcct

SEQ ID NO: 5648241 - DNA, 25 bp, Homo sapien
tctgctctctatgcttgagaccggg

SEQ ID NO: 5648242 - DNA, 25 bp, Homo sapien
catgagagggtaggtccagaaggtg

SEQ ID NO: 5648243 - DNA, 25 bp, Homo sapien
aagggaattcaggaattcagacgtg

SEQ ID NO: 5648244 - DNA, 25 bp, Homo sapien
gtttggagacaacttccatgtcttg

SEQ ID NO: 5648245 - DNA, 25 bp, Homo sapien
ggtttgactcaagggtcttcaagac

SEQ ID NO: 5648246 - DNA, 25 bp, Homo sapien
ctatgcttgagaccgggaggtttag

SEQ ID NO: 5648247 - DNA, 25 bp, Homo sapien
cagctgacctggatatcaccgaaat

SEQ ID NO: 5648248 - DNA, 25 bp, Homo sapien
agagcctgcgattattggccagtga

SEQ ID NO: 5648249 - DNA, 25 bp, Homo sapien
ttttatgtttatccctgtttactga

SEQ ID NO: 5648250 - DNA, 25 bp, Homo sapien
ggcggcggagagagcctgcgattat

SEQ ID NO: 5648251 - DNA, 25 bp, Homo sapien
actcatgacacctccccctaccagc

SEQ ID NO: 5648252 - DNA, 25 bp, Homo sapien
ttctcaggaagactgcctccaccac

SEQ ID NO: 5648253 - DNA, 25 bp, Homo sapien
tgttttatgtttatccctgtttact

SEQ ID NO: 5648254 - DNA, 25 bp, Homo sapien
caaattgagtcagacaggcagaacc

SEQ ID NO: 5648255 - DNA, 25 bp, Homo sapien
ttgctgacagcaaagagatcttcct

SEQ ID NO: 5648256 - DNA, 25 bp, Homo sapien
gcctcctttctgaaagacttcgacc

SEQ ID NO: 5648257 - DNA, 25 bp, Homo sapien
gtctctaagctatccatggtccagt

SEQ ID NO: 5648258 - DNA, 25 bp, Homo sapien
ctgaagtctgcttgtggagcagtgt

SEQ ID NO: 5648259 - DNA, 25 bp, Homo sapien
tttctgctctctatgcttgagaccg

SEQ ID NO: 5648260 - DNA, 25 bp, Homo sapien
atgaactggcttgactacttcgccc

SEQ ID NO: 5648261 - DNA, 25 bp, Homo sapien
tctcccagctgaatcctccctgctc

SEQ ID NO: 5648262 - DNA, 25 bp, Homo sapien
cttcaggcttattgtttgagtgtga

SEQ ID NO: 5648263 - DNA, 25 bp, Homo sapien
gagggggcgaagaagaaccctgtgt

SEQ ID NO: 5648264 - DNA, 25 bp, Homo sapien
gaattcagacgtgctagtcccacac

SEQ ID NO: 5648265 - DNA, 25 bp, Homo sapien
tgtgcccagtagttctgaagtctgc

SEQ ID NO: 5648266 - DNA, 25 bp, Homo sapien
accgtgaagtggaaatacgaatcaa

SEQ ID NO: 5648267 - DNA, 25 bp, Homo sapien
gaacaggggcgggtgtgacttgctt

SEQ ID NO: 5648268 - DNA, 25 bp, Homo sapien
caaactaacagcagaagctattcag

SEQ ID NO: 5648269 - DNA, 25 bp, Homo sapien
agatcctgcggctccccaaggctct

SEQ ID NO: 5648270 - DNA, 25 bp, Homo sapien
cgctctctctcactggcacagcgag

SEQ ID NO: 5648271 - DNA, 25 bp, Homo sapien
gcctgcgtactccagcagcaggaga

SEQ ID NO: 5648272 - DNA, 25 bp, Homo sapien
attcagacgtgctagtcccacacca

SEQ ID NO: 5648273 - DNA, 25 bp, Homo sapien
ttctacctccctagttagtggaaat

SEQ ID NO: 5648274 - DNA, 25 bp, Homo sapien
gcagcaggagagcggatttacaaca

SEQ ID NO: 5648275 - DNA, 25 bp, Homo sapien
tcttctacctccctagttagtggaa

SEQ ID NO: 5648276 - DNA, 25 bp, Homo sapien
gttgactgtagagccgctctctctc

SEQ ID NO: 5648277 - DNA, 25 bp, Homo sapien
atgtttatccctgtttactgaagac

SEQ ID NO: 5648278 - DNA, 25 bp, Homo sapien
aaggtggggggaactgtacagatca

SEQ ID NO: 5648279 - DNA, 25 bp, Homo sapien
tgcctcctgcaactcaacatcctct

SEQ ID NO: 5648280 - DNA, 25 bp, Homo sapien
aagtggaaatacgaatcaagcaaat

SEQ ID NO: 5648281 - DNA, 25 bp, Homo sapien
cccagagaacctctgcatctggcat

SEQ ID NO: 5648282 - DNA, 25 bp, Homo sapien
attttgcaacaagaccattttagta

SEQ ID NO: 5648283 - DNA, 25 bp, Homo sapien
gaagaagaaaatgaacgtaagaatc

SEQ ID NO: 5648284 - DNA, 25 bp, Homo sapien
gaagtctgcttgtggagcagtgttt

SEQ ID NO: 5648285 - DNA, 25 bp, Homo sapien
taggaagggcagtagtcgggtggcc

SEQ ID NO: 5648286 - DNA, 25 bp, Homo sapien
accaccgctacccagagaacctctg

SEQ ID NO: 5648287 - DNA, 25 bp, Homo sapien
actgtacagatcagcagagcaggac

SEQ ID NO: 5648288 - DNA, 25 bp, Homo sapien
ctggcacagcgaggttttgctcagc

SEQ ID NO: 5648289 - DNA, 25 bp, Homo sapien
caagagtcaaaaggtgtcctccatc

SEQ ID NO: 5648290 - DNA, 25 bp, Homo sapien
agctgtctgttcaccctcccatccc

SEQ ID NO: 5648291 - DNA, 25 bp, Homo sapien
catgtcttgctcttctacctcccta

SEQ ID NO: 5648292 - DNA, 25 bp, Homo sapien
tcttatggggttcatgggaacaggg

SEQ ID NO: 5648293 - DNA, 25 bp, Homo sapien
aaatacgaatcaagcaaattgagtc

SEQ ID NO: 5648294 - DNA, 25 bp, Homo sapien
gacaggcagaacctcctcaaggagg

SEQ ID NO: 5648295 - DNA, 25 bp, Homo sapien
agaaggtggggggaactgtacagat

SEQ ID NO: 5648296 - DNA, 25 bp, Homo sapien
gaaataaacaaactaacagcagaag

SEQ ID NO: 5648297 - DNA, 25 bp, Homo sapien
gcagaagctattcagacacccctga

SEQ ID NO: 5648298 - DNA, 25 bp, Homo sapien
tgagctctgggccatgagagggtag

SEQ ID NO: 5648299 - DNA, 25 bp, Homo sapien
gactgcctccaccaccgctacccag

SEQ ID NO: 5648300 - DNA, 25 bp, Homo sapien
agacgtgctagtcccacaccagtta

SEQ ID NO: 5648301 - DNA, 25 bp, Homo sapien
cctcctgcaactcaacatcctcttc

SEQ ID NO: 5648302 - DNA, 25 bp, Homo sapien
gtgctatgttctaagaatttgagaa

SEQ ID NO: 5648303 - DNA, 25 bp, Homo sapien
gcaactcaacatcctcttcaccctg

SEQ ID NO: 5648304 - DNA, 25 bp, Homo sapien
atttgttattattttgcaacaagac

SEQ ID NO: 5648305 - DNA, 25 bp, Homo sapien
ccgtctaccctctcgcactcatgac

SEQ ID NO: 5648306 - DNA, 25 bp, Homo sapien
ttctcatgtagggctctctgtggta

SEQ ID NO: 5648307 - DNA, 25 bp, Homo sapien
cttcagagagcacttctctcttatg

SEQ ID NO: 5648308 - DNA, 25 bp, Homo sapien
ggcatttctgctctctatgcttgag

SEQ ID NO: 5648309 - DNA, 25 bp, Homo sapien
cccagtcactgcttgctggggccat

SEQ ID NO: 5648310 - DNA, 25 bp, Homo sapien
aaatctgcagcagcatacggaccca

SEQ ID NO: 5648311 - DNA, 25 bp, Homo sapien
ctcctcttcctcctcctcctcctcc

SEQ ID NO: 5648312 - DNA, 25 bp, Homo sapien
aattgagtcagacaggcagaacctc

SEQ ID NO: 5648313 - DNA, 25 bp, Homo sapien
caggccctggaagaggcggcaacag

SEQ ID NO: 5648314 - DNA, 25 bp, Homo sapien
cccgcagcctccgccgagcgccatg

SEQ ID NO: 5648315 - DNA, 25 bp, Homo sapien
actccttacggaggcggaagctcgc

SEQ ID NO: 5648316 - DNA, 25 bp, Homo sapien
agaggccttgggaaacattaagaag

SEQ ID NO: 5648317 - DNA, 25 bp, Homo sapien
tggcttgactacttcgcccttggag

SEQ ID NO: 5648318 - DNA, 25 bp, Homo sapien
gacccctggcctgcgtactccagca

SEQ ID NO: 5648319 - DNA, 25 bp, Homo sapien
ggaggaaacaaacaggccctggaag

SEQ ID NO: 5648320 - DNA, 25 bp, Homo sapien
cgagcgccatggctcctaggaaggg

SEQ ID NO: 5648321 - DNA, 25 bp, Homo sapien
gacagttggcagcagtgacctcagt

SEQ ID NO: 5648322 - DNA, 25 bp, Homo sapien
ggactttgttaagcagagtcagcag

SEQ ID NO: 5648323 - DNA, 25 bp, Homo sapien
agaggcacagtattgcccagctgga

SEQ ID NO: 5648324 - DNA, 25 bp, Homo sapien
tctcgggaccgcaggtacgtgcctg

SEQ ID NO: 5648325 - DNA, 25 bp, Homo sapien
ctaacagcagaagctattcagacac

SEQ ID NO: 5648326 - DNA, 25 bp, Homo sapien
gtcttcaagacccctggcctgcgta

SEQ ID NO: 5648327 - DNA, 25 bp, Homo sapien
tggtccctgccaagtctgtagactt

SEQ ID NO: 5648328 - DNA, 25 bp, Homo sapien
acaggggcgggtgtgacttgcttgg

SEQ ID NO: 5648329 - DNA, 25 bp, Homo sapien
gagctgctgccttttgcctcctgca

SEQ ID NO: 5648330 - DNA, 25 bp, Homo sapien
cagcagaagctattcagacacccct

SEQ ID NO: 5648331 - DNA, 25 bp, Homo sapien
ggtggtcagtgggacttagggatct

SEQ ID NO: 5648332 - DNA, 25 bp, Homo sapien
cacccctgaaatctgccaaaacacg

SEQ ID NO: 5648333 - DNA, 25 bp, Homo sapien
gcgacttcttcgggtggtccccgtc

SEQ ID NO: 5648334 - DNA, 25 bp, Homo sapien
gctgtgcccagtagttctgaagtct

SEQ ID NO: 5648335 - DNA, 25 bp, Homo sapien
ctccaggcctgacacccaggtttga

SEQ ID NO: 5648336 - DNA, 25 bp, Homo sapien
tgagtgtgaagttccagagcaagga

SEQ ID NO: 5648337 - DNA, 25 bp, Homo sapien
cccagattctggaggttttatgtca

SEQ ID NO: 5648338 - DNA, 25 bp, Homo sapien
tattgcccagctggatccagaggcc

SEQ ID NO: 5648339 - DNA, 25 bp, Homo sapien
ggcggttgactgtagagccgctctc

SEQ ID NO: 5648340 - DNA, 25 bp, Homo sapien
tcagcagagcaggacagttggcagc

SEQ ID NO: 5648341 - DNA, 25 bp, Homo sapien
attaagaagctctccaaccgtctcg

SEQ ID NO: 5648342 - DNA, 25 bp, Homo sapien
tttgactcaagggtcttcaagaccc

SEQ ID NO: 5648343 - DNA, 25 bp, Homo sapien
ctccatccaagaagagaactcagtc

SEQ ID NO: 5648344 - DNA, 25 bp, Homo sapien
ggttttgctcagcccttgtctcggg

SEQ ID NO: 5648345 - DNA, 25 bp, Homo sapien
gcggaagctcgcctcctttctgaaa

SEQ ID NO: 5648346 - DNA, 25 bp, Homo sapien
cagaacctcctcaaggaggtggata

SEQ ID NO: 5648347 - DNA, 25 bp, Homo sapien
ctccgccgagcgccatggctcctag

SEQ ID NO: 5648348 - DNA, 25 bp, Homo sapien
agtagtcgggtggccaagaccaact

SEQ ID NO: 5648349 - DNA, 25 bp, Homo sapien
actgtagagccgctctctctcactg

SEQ ID NO: 5648350 - DNA, 25 bp, Homo sapien
atacggacccacaaatgagacacca

SEQ ID NO: 5648351 - DNA, 25 bp, Homo sapien
tgcgattattggccagtgacttgca

SEQ ID NO: 5648352 - DNA, 25 bp, Homo sapien
aggacagttggcagcagtgacctca

SEQ ID NO: 5648353 - DNA, 25 bp, Homo sapien
ttctaagaatttgagaactagagtc

SEQ ID NO: 5648354 - DNA, 25 bp, Homo sapien
tggagcagtgttttatgtttatccc

SEQ ID NO: 5648355 - DNA, 25 bp, Homo sapien
gacacccaggtttgactcaagggtc

SEQ ID NO: 5648356 - DNA, 25 bp, Homo sapien
cgaccgtgaagtggaaatacgaatc

SEQ ID NO: 5648357 - DNA, 25 bp, Homo sapien
gtctgttcaccctcccatcccagct

SEQ ID NO: 5648358 - DNA, 25 bp, Homo sapien
ctaagctatccatggtccagtggtc

SEQ ID NO: 5648359 - DNA, 25 bp, Homo sapien
agcgccatggctcctaggaagggca

SEQ ID NO: 5648360 - DNA, 25 bp, Homo sapien
cttctctcttatggggttcatggga

SEQ ID NO: 5648361 - DNA, 25 bp, Homo sapien
cctgcggctccccaaggctctgcgc

SEQ ID NO: 5648362 - DNA, 25 bp, Homo sapien
gaacctcctcaaggaggtggataac

SEQ ID NO: 5648363 - DNA, 25 bp, Homo sapien
gggcgggtgtgacttgcttggtggc

SEQ ID NO: 5648364 - DNA, 25 bp, Homo sapien
ctaagaatttgagaactagagtcct

SEQ ID NO: 5648365 - DNA, 25 bp, Homo sapien
cacaccagttaggtagagctgtctg

SEQ ID NO: 5648366 - DNA, 25 bp, Homo sapien
ctaagggaattcaggaattcagacg

SEQ ID NO: 5648367 - DNA, 25 bp, Homo sapien
ctgtgggaggtggtcagtgggactt

SEQ ID NO: 5648368 - DNA, 25 bp, Homo sapien
ggttcatgggaacaggggcgggtgt

SEQ ID NO: 5648369 - DNA, 25 bp, Homo sapien
tgttctcaggaagactgcctccacc

SEQ ID NO: 5648370 - DNA, 25 bp, Homo sapien
ttcccttcaggcttattgtttgagt

SEQ ID NO: 5648371 - DNA, 25 bp, Homo sapien
cagtgacctcagtagggaacatgtc

SEQ ID NO: 5648372 - DNA, 25 bp, Homo sapien
gacacctccccctaccagccctcct

SEQ ID NO: 5648373 - DNA, 25 bp, Homo sapien
ctgtagggcccagattctggaggtt

SEQ ID NO: 5648374 - DNA, 25 bp, Homo sapien
cattctccagccagcctctctgccc

SEQ ID NO: 5648375 - DNA, 25 bp, Homo sapien
tgactcaagggtcttcaagacccct

SEQ ID NO: 5648376 - DNA, 25 bp, Homo sapien
cgccgctccccgcagcctccgccga

SEQ ID NO: 5648377 - DNA, 25 bp, Homo sapien
tcactgtgccagtgggcggcggaga

SEQ ID NO: 5648378 - DNA, 25 bp, Homo sapien
cctcctcctcctgtgggaggtggtc

SEQ ID NO: 5648379 - DNA, 25 bp, Homo sapien
agtgagctctgggccatgagagggt

SEQ ID NO: 5648380 - DNA, 25 bp, Homo sapien
taccagccctcctcttcctcctcct

SEQ ID NO: 5648381 - DNA, 25 bp, Homo sapien
atggcagccctcttgctgacagcaa

SEQ ID NO: 5648382 - DNA, 25 bp, Homo sapien
ggaaacattaagaagctctccaacc

SEQ ID NO: 5648383 - DNA, 25 bp, Homo sapien
tttgttaagcagagtcagcagtgag

SEQ ID NO: 5648384 - DNA, 25 bp, Homo sapien
gccctcctcgtccctacccagtttc

SEQ ID NO: 5648385 - DNA, 25 bp, Homo sapien
tctgccctggagaatcatgtgctat

SEQ ID NO: 5648386 - DNA, 25 bp, Homo sapien
gaaccctgtgttctcaggaagactg

SEQ ID NO: 5648387 - DNA, 25 bp, Homo sapien
aacactgttaccccagccgtgggcc

SEQ ID NO: 5648388 - DNA, 25 bp, Homo sapien
caactccttacggaggcggaagctc

SEQ ID NO: 5648389 - DNA, 25 bp, Homo sapien
cccttgtctcgggaccgcaggtacg

SEQ ID NO: 5648390 - DNA, 25 bp, Homo sapien
acgtaagaatcttcaaactgcaaga

SEQ ID NO: 5648391 - DNA, 25 bp, Homo sapien
ccgcaggtacgtgcctggcgacttc

SEQ ID NO: 5648392 - DNA, 25 bp, Homo sapien
cggcggagagagcctgcgattattg

SEQ ID NO: 5648393 - DNA, 25 bp, Homo sapien
cagagcaaggagccatgttcctcta

SEQ ID NO: 5648394 - DNA, 25 bp, Homo sapien
cttttgcctcctgcaactcaacatc

SEQ ID NO: 5648395 - DNA, 25 bp, Homo sapien
atgggaacaggggcgggtgtgactt

SEQ ID NO: 5648396 - DNA, 25 bp, Homo sapien
tcacctgctgtgcccagtagttctg

SEQ ID NO: 5648397 - DNA, 25 bp, Homo sapien
tttgcctcctgcaactcaacatcct

SEQ ID NO: 5648398 - DNA, 25 bp, Homo sapien
ctggatatcaccgaaataaacaaac

SEQ ID NO: 5648399 - DNA, 25 bp, Homo sapien
aaggaggtggataacctctacaaca

SEQ ID NO: 5648400 - DNA, 25 bp, Homo sapien
ccatccaagaagagaactcagtcca

SEQ ID NO: 5648401 - DNA, 25 bp, Homo sapien
ggacccacaaatgagacaccaaagt

SEQ ID NO: 5648402 - DNA, 25 bp, Homo sapien
taagtgagctctgggccatgagagg

SEQ ID NO: 5648403 - DNA, 25 bp, Homo sapien
cttgtctcgggaccgcaggtacgtg

SEQ ID NO: 5648404 - DNA, 25 bp, Homo sapien
cagtcactgcttgctggggccatgc

SEQ ID NO: 5648405 - DNA, 25 bp, Homo sapien
catgccatggaagcttcccatcagt

SEQ ID NO: 5648406 - DNA, 25 bp, Homo sapien
gccaaaacacgaaaggtaatacagg

SEQ ID NO: 5648407 - DNA, 25 bp, Homo sapien
tagggatctttcacctgctgtgccc

SEQ ID NO: 5648408 - DNA, 25 bp, Homo sapien
cctcgtccctacccagtttcttgct

SEQ ID NO: 5648409 - DNA, 25 bp, Homo sapien
agcctgcgattattggccagtgact

SEQ ID NO: 5648410 - DNA, 25 bp, Homo sapien
tggaggtgtccatggtcaaaccaac

SEQ ID NO: 5648411 - DNA, 25 bp, Homo sapien
tggggcatggactttgttaagcaga

SEQ ID NO: 5648412 - DNA, 25 bp, Homo sapien
ctgagctgctgccttttgcctcctg

SEQ ID NO: 5648413 - DNA, 25 bp, Homo sapien
aaggagccatgttcctctaagggaa

SEQ ID NO: 5648414 - DNA, 25 bp, Homo sapien
cgcagcctccgccgagcgccatggc

SEQ ID NO: 5648415 - DNA, 25 bp, Homo sapien
ccccaggcttgaaggcacatggctt

SEQ ID NO: 5648416 - DNA, 25 bp, Homo sapien
ccagtgacttgcagaggcacagtat

SEQ ID NO: 5648417 - DNA, 25 bp, Homo sapien
cctcattccatgtgtgcctgtgcct

SEQ ID NO: 5648418 - DNA, 25 bp, Homo sapien
gaactggcttgactacttcgccctt

SEQ ID NO: 5648419 - DNA, 25 bp, Homo sapien
gaacctctgcatctggcatttctgc

SEQ ID NO: 5648420 - DNA, 25 bp, Homo sapien
ggtcctcattctccagccagcctct

SEQ ID NO: 5648421 - DNA, 25 bp, Homo sapien
cttagggatctttcacctgctgtgc

SEQ ID NO: 5648422 - DNA, 25 bp, Homo sapien
atccaagaagagaactcagtccata

SEQ ID NO: 5648423 - DNA, 25 bp, Homo sapien
tggtcagtgggacttagggatcttt

SEQ ID NO: 5648424 - DNA, 25 bp, Homo sapien
agggcccagattctggaggttttat

SEQ ID NO: 5648425 - DNA, 25 bp, Homo sapien
ttatccctgtttactgaagaccaaa

SEQ ID NO: 5648426 - DNA, 25 bp, Homo sapien
tagagccgctctctctcactggcac

SEQ ID NO: 5648427 - DNA, 25 bp, Homo sapien
ggaccctgaagagacttcttccctt

SEQ ID NO: 5648428 - DNA, 25 bp, Homo sapien
aagggtcttcaagacccctggcctg

SEQ ID NO: 5648429 - DNA, 25 bp, Homo sapien
actgcaagagtcaaaaggtgtcctc

SEQ ID NO: 5648430 - DNA, 25 bp, Homo sapien
ctcctcctgtgggaggtggtcagtg

SEQ ID NO: 5648431 - DNA, 25 bp, Homo sapien
atcctccctgctctctgagctgctg

SEQ ID NO: 5648432 - DNA, 25 bp, Homo sapien
tcttgctgacagcaaagagatcttc

SEQ ID NO: 5648433 - DNA, 25 bp, Homo sapien
gaataactgtctctaagctatccat

SEQ ID NO: 5648434 - DNA, 25 bp, Homo sapien
cagacaggcagaacctcctcaagga

SEQ ID NO: 5648435 - DNA, 25 bp, Homo sapien
gtggaaatttggataagggaactgt

SEQ ID NO: 5648436 - DNA, 25 bp, Homo sapien
tggccaagaccaactccttacggag

SEQ ID NO: 5648437 - DNA, 25 bp, Homo sapien
gtgggacttagggatctttcacctg

SEQ ID NO: 5648438 - DNA, 25 bp, Homo sapien
gtagagctgtctgttcaccctccca

SEQ ID NO: 5648439 - DNA, 25 bp, Homo sapien
tcatgacacctccccctaccagccc

SEQ ID NO: 5648440 - DNA, 25 bp, Homo sapien
tgcccagtagttctgaagtctgctt

SEQ ID NO: 5648441 - DNA, 25 bp, Homo sapien
cctgtgcctggggcatggactttgt

SEQ ID NO: 5648442 - DNA, 25 bp, Homo sapien
cactgttaccccagccgtgggccga

SEQ ID NO: 5648443 - DNA, 25 bp, Homo sapien
aacaaacaggccctggaagaggcgg

SEQ ID NO: 5648444 - DNA, 25 bp, Homo sapien
ctctatgcttgagaccgggaggttt

SEQ ID NO: 5648445 - DNA, 25 bp, Homo sapien
ctcctttctgaaagacttcgaccgt

SEQ ID NO: 5648446 - DNA, 25 bp, Homo sapien
cgcccttggaggaaacaaacaggcc

SEQ ID NO: 5648447 - DNA, 25 bp, Homo sapien
ctgcctccaccaccgctacccagag

SEQ ID NO: 5648448 - DNA, 25 bp, Homo sapien
ggatatcaccgaaataaacaaacta

SEQ ID NO: 5648449 - DNA, 25 bp, Homo sapien
gcttcccatcagtctcccagctgaa

SEQ ID NO: 5648450 - DNA, 25 bp, Homo sapien
acaaatgagacaccaaagttgacag

SEQ ID NO: 5648451 - DNA, 25 bp, Homo sapien
gccatgccatggaagcttcccatca

SEQ ID NO: 5648452 - DNA, 25 bp, Homo sapien
aggcggaagctcgcctcctttctga

SEQ ID NO: 5648453 - DNA, 25 bp, Homo sapien
ataactgtctctaagctatccatgg

SEQ ID NO: 5648454 - DNA, 25 bp, Homo sapien
ctgcttgctggggccatgccatgga

SEQ ID NO: 5648455 - DNA, 25 bp, Homo sapien
gcactcatgacacctccccctacca

SEQ ID NO: 5648456 - DNA, 25 bp, Homo sapien
ctggagaatcatgtgctatgttcta

SEQ ID NO: 5648457 - DNA, 25 bp, Homo sapien
ctctaagggaattcaggaattcaga

SEQ ID NO: 5648458 - DNA, 25 bp, Homo sapien
cctctcgcactcatgacacctcccc

SEQ ID NO: 5648459 - DNA, 25 bp, Homo sapien
agcctctctgccctggagaatcatg

SEQ ID NO: 5648460 - DNA, 25 bp, Homo sapien
caaaacacgaaaggtaatacaggta

SEQ ID NO: 5648461 - DNA, 25 bp, Homo sapien
ctgtttactgaagaccaaatactgg

SEQ ID NO: 5648462 - DNA, 25 bp, Homo sapien
ttggaggaaacaaacaggccctgga

SEQ ID NO: 5648463 - DNA, 25 bp, Homo sapien
agacttcgaccgtgaagtggaaata

SEQ ID NO: 5648464 - DNA, 25 bp, Homo sapien
aagctcgcctcctttctgaaagact

SEQ ID NO: 5648465 - DNA, 25 bp, Homo sapien
accctgtgttctcaggaagactgcc

SEQ ID NO: 5648466 - DNA, 25 bp, Homo sapien
ttcccatcagtctcccagctgaatc

SEQ ID NO: 5648467 - DNA, 25 bp, Homo sapien
aaagttgacaggatggacttttaat

SEQ ID NO: 5648468 - DNA, 25 bp, Homo sapien
ccatggctcctaggaagggcagtag

SEQ ID NO: 5648469 - DNA, 25 bp, Homo sapien
tttctgaaagacttcgaccgtgaag

SEQ ID NO: 5648470 - DNA, 25 bp, Homo sapien
acaacttccatgtcttgctcttcta

SEQ ID NO: 5648471 - DNA, 25 bp, Homo sapien
gcaggacagttggcagcagtgacct

SEQ ID NO: 5648472 - DNA, 25 bp, Homo sapien
tgccatggaagcttcccatcagtct

SEQ ID NO: 5648473 - DNA, 25 bp, Homo sapien
cactgcttgctggggccatgccatg

SEQ ID NO: 5648474 - DNA, 25 bp, Homo sapien
ctgtctctaagctatccatggtcca

SEQ ID NO: 5648475 - DNA, 25 bp, Homo sapien
atgaacgtaagaatcttcaaactgc

SEQ ID NO: 5648476 - DNA, 25 bp, Homo sapien
ccctacccagtttcttgcttccctg

SEQ ID NO: 5648477 - DNA, 25 bp, Homo sapien
tcagcagtgaggtcctcattctcca

SEQ ID NO: 5648478 - DNA, 25 bp, Homo sapien
aagccgtgctaacactgttacccca

SEQ ID NO: 5648479 - DNA, 25 bp, Homo sapien
cctcctcctcctcctcctgtgggag

SEQ ID NO: 5648480 - DNA, 25 bp, Homo sapien
atcgagatcctgcggctccccaagg

SEQ ID NO: 5648481 - DNA, 25 bp, Homo sapien
ggctcctaggaagggcagtagtcgg

SEQ ID NO: 5648482 - DNA, 25 bp, Homo sapien
ggaactgtagggcccagattctgga

SEQ ID NO: 5648483 - DNA, 25 bp, Homo sapien
cctcttcctcctcctcctcctcctg

SEQ ID NO: 5648484 - DNA, 25 bp, Homo sapien
agaagctattcagacacccctgaaa

SEQ ID NO: 5648485 - DNA, 25 bp, Homo sapien
tgtgaagttccagagcaaggagcca

SEQ ID NO: 5648486 - DNA, 25 bp, Homo sapien
gccccatctccgccgctccccgcag

SEQ ID NO: 5648487 - DNA, 25 bp, Homo sapien
taagggaactgtagggcccagattc

SEQ ID NO: 5648488 - DNA, 25 bp, Homo sapien
gtccagtggtccctgccaagtctgt

SEQ ID NO: 5648489 - DNA, 25 bp, Homo sapien
ccctcctcttcctcctcctcctcct

SEQ ID NO: 5648490 - DNA, 25 bp, Homo sapien
aggccttgggaaacattaagaagct

SEQ ID NO: 5648491 - DNA, 25 bp, Homo sapien
gcacatggctttctcatgtagggct

SEQ ID NO: 5648492 - DNA, 25 bp, Homo sapien
gtccctgccaagtctgtagacttca

SEQ ID NO: 5648493 - DNA, 25 bp, Homo sapien
gcaaggagccatgttcctctaaggg

SEQ ID NO: 5648494 - DNA, 25 bp, Homo sapien
agcagagcaggacagttggcagcag

SEQ ID NO: 5648495 - DNA, 25 bp, Homo sapien
cccagtagttctgaagtctgcttgt

SEQ ID NO: 5648496 - DNA, 25 bp, Homo sapien
tacaacatcgagatcctgcggctcc

SEQ ID NO: 5648497 - DNA, 25 bp, Homo sapien
caacatcctcttcaccctgccctgc

SEQ ID NO: 5648498 - DNA, 25 bp, Homo sapien
agaagctctccaaccgtctcgccca

SEQ ID NO: 5648499 - DNA, 25 bp, Homo sapien
tctttcacctgctgtgcccagtagt

SEQ ID NO: 5648500 - DNA, 25 bp, Homo sapien
ttgctcagcccttgtctcgggaccg

SEQ ID NO: 5648501 - DNA, 25 bp, Homo sapien
gggaggtttaggctcagataagtga

SEQ ID NO: 5648502 - DNA, 25 bp, Homo sapien
tcctccatccaagaagagaactcag

SEQ ID NO: 5648503 - DNA, 25 bp, Homo sapien
atggactttgttaagcagagtcagc

SEQ ID NO: 5648504 - DNA, 25 bp, Homo sapien
gggaccgcaggtacgtgcctggcga

SEQ ID NO: 5648505 - DNA, 25 bp, Homo sapien
tctccgccgctccccgcagcctccg

SEQ ID NO: 5648506 - DNA, 25 bp, Homo sapien
atgtgctatgttctaagaatttgag

SEQ ID NO: 5648507 - DNA, 25 bp, Homo sapien
cctcatccccaggcttgaaggcaca

SEQ ID NO: 5648508 - DNA, 25 bp, Homo sapien
atcaccgaaataaacaaactaacag

SEQ ID NO: 5648509 - DNA, 25 bp, Homo sapien
tcatgtgctatgttctaagaatttg

SEQ ID NO: 5648510 - DNA, 25 bp, Homo sapien
atggaagcttcccatcagtctccca

SEQ ID NO: 5648511 - DNA, 25 bp, Homo sapien
acatgtccgtctaccctctcgcact

SEQ ID NO: 5648512 - DNA, 25 bp, Homo sapien
agtttcttgcttccctgccccatct

SEQ ID NO: 5648513 - DNA, 25 bp, Homo sapien
ctcagtccatacaaggaaaaggaaa

SEQ ID NO: 5648514 - DNA, 25 bp, Homo sapien
tcgcactcatgacacctccccctac

SEQ ID NO: 5648515 - DNA, 25 bp, Homo sapien
aagaatcttcaaactgcaagagtca

SEQ ID NO: 5648516 - DNA, 25 bp, Homo sapien
caaccgtctcgcccaaatctgcagc

SEQ ID NO: 5648517 - DNA, 25 bp, Homo sapien
gtcagtgggacttagggatctttca

SEQ ID NO: 5648518 - DNA, 25 bp, Homo sapien
cccatctccgccgctccccgcagcc

SEQ ID NO: 5648519 - DNA, 25 bp, Homo sapien
gtcctcatccccaggcttgaaggca

SEQ ID NO: 5648520 - DNA, 25 bp, Homo sapien
ccagaggccttgggaaacattaaga

SEQ ID NO: 5648521 - DNA, 25 bp, Homo sapien
gaggtgtccatggtcaaaccaactc

SEQ ID NO: 5648522 - DNA, 25 bp, Homo sapien
ctcctaggaagggcagtagtcgggt

SEQ ID NO: 5648523 - DNA, 25 bp, Homo sapien
tgggaaacattaagaagctctccaa

SEQ ID NO: 5648524 - DNA, 25 bp, Homo sapien
cacagaataactgtctctaagctat

SEQ ID NO: 5648525 - DNA, 25 bp, Homo sapien
gtcccacaccagttaggtagagctg

SEQ ID NO: 5648526 - DNA, 25 bp, Homo sapien
gacaccaaagttgacaggatggact

SEQ ID NO: 5648527 - DNA, 25 bp, Homo sapien
tttcacctgctgtgcccagtagttc

SEQ ID NO: 5648528 - DNA, 25 bp, Homo sapien
aactgtagggcccagattctggagg

SEQ ID NO: 5648529 - DNA, 25 bp, Homo sapien
tgtggagcagtgttttatgtttatc

SEQ ID NO: 5648530 - DNA, 25 bp, Homo sapien
cgtctcgcccaaatctgcagcagca

SEQ ID NO: 5648531 - DNA, 25 bp, Homo sapien
agggaaaaggtcaagccgtgctaac

SEQ ID NO: 5648532 - DNA, 25 bp, Homo sapien
gccgagcgccatggctcctaggaag

SEQ ID NO: 5648533 - DNA, 25 bp, Homo sapien
gctatccatggtccagtggtccctg

SEQ ID NO: 5648534 - DNA, 25 bp, Homo sapien
ccgctccccgcagcctccgccgagc

SEQ ID NO: 5648535 - DNA, 25 bp, Homo sapien
ctgtctgttcaccctcccatcccag

SEQ ID NO: 5648536 - DNA, 25 bp, Homo sapien
ggaggttttatgtcattggccacag

SEQ ID NO: 5648537 - DNA, 25 bp, Homo sapien
gaatcaagcaaattgagtcagacag

SEQ ID NO: 5648538 - DNA, 25 bp, Homo sapien
tcattggccacagaataactgtctc

SEQ ID NO: 5648539 - DNA, 25 bp, Homo sapien
ttttaatgggcacttctgggaccct

SEQ ID NO: 5648540 - DNA, 25 bp, Homo sapien
attattggccagtgacttgcagagg

SEQ ID NO: 5648541 - DNA, 25 bp, Homo sapien
caaaccaactccaggcctgacaccc

SEQ ID NO: 5648542 - DNA, 25 bp, Homo sapien
agcggatttacaacatctcagggaa

SEQ ID NO: 5648543 - DNA, 25 bp, Homo sapien
tggtccagtggtccctgccaagtct

SEQ ID NO: 5648544 - DNA, 25 bp, Homo sapien
cgattggaggtgtccatggtcaaac

SEQ ID NO: 5648545 - DNA, 25 bp, Homo sapien
cccatcagtctcccagctgaatcct

SEQ ID NO: 5648546 - DNA, 25 bp, Homo sapien
agtctcccagctgaatcctccctgc

SEQ ID NO: 5648547 - DNA, 25 bp, Homo sapien
ccaggcctgacacccaggtttgact

SEQ ID NO: 5648548 - DNA, 25 bp, Homo sapien
tccaaccgtctcgcccaaatctgca

SEQ ID NO: 5648549 - DNA, 25 bp, Homo sapien
gtgctagtcccacaccagttaggta

SEQ ID NO: 5648550 - DNA, 25 bp, Homo sapien
aacagcagaagctattcagacaccc

SEQ ID NO: 5648551 - DNA, 25 bp, Homo sapien
aataaacaaactaacagcagaagct

SEQ ID NO: 5648552 - DNA, 25 bp, Homo sapien
aacaggccctggaagaggcggcaac

SEQ ID NO: 5648553 - DNA, 25 bp, Homo sapien
gaactgtacagatcagcagagcagg

SEQ ID NO: 5648554 - DNA, 25 bp, Homo sapien
gagaacctctgcatctggcatttct

SEQ ID NO: 5648555 - DNA, 25 bp, Homo sapien
aaggtgtcctccatccaagaagaga

SEQ ID NO: 5648556 - DNA, 25 bp, Homo sapien
ggagtttgaattgggtggcggttga

SEQ ID NO: 5648557 - DNA, 25 bp, Homo sapien
ttgactacttcgcccttggaggaaa

SEQ ID NO: 5648558 - DNA, 25 bp, Homo sapien
cagtgggacttagggatctttcacc

SEQ ID NO: 5648559 - DNA, 25 bp, Homo sapien
ttggccagtgacttgcagaggcaca

SEQ ID NO: 5648560 - DNA, 25 bp, Homo sapien
ctgcagcagcatacggacccacaaa

SEQ ID NO: 5648561 - DNA, 25 bp, Homo sapien
tcccatcccagctgatcccagtcac

SEQ ID NO: 5648562 - DNA, 25 bp, Homo sapien
acgtgctagtcccacaccagttagg

SEQ ID NO: 5648563 - DNA, 25 bp, Homo sapien
ctggaggttttatgtcattggccac

SEQ ID NO: 5648564 - DNA, 25 bp, Homo sapien
tcttgctcttctacctccctagtta

SEQ ID NO: 5648565 - DNA, 25 bp, Homo sapien
gggaggtggtcagtgggacttaggg

SEQ ID NO: 5648566 - DNA, 25 bp, Homo sapien
cacctccccctaccagccctcctct

SEQ ID NO: 5648567 - DNA, 25 bp, Homo sapien
attgtttgagtgtgaagttccagag

SEQ ID NO: 5648568 - DNA, 25 bp, Homo sapien
tgaaatgatagtggaagaggaagaa

SEQ ID NO: 5648569 - DNA, 25 bp, Homo sapien
cggatttacaacatctcagggaatg

SEQ ID NO: 5648570 - DNA, 25 bp, Homo sapien
atgacacctccccctaccagccctc

SEQ ID NO: 5648571 - DNA, 25 bp, Homo sapien
agtggtccctgccaagtctgtagac

SEQ ID NO: 5648572 - DNA, 25 bp, Homo sapien
ccagccgtgggccgattggaggtgt

SEQ ID NO: 5648573 - DNA, 25 bp, Homo sapien
ccagtttcttgcttccctgccccat

SEQ ID NO: 5648574 - DNA, 25 bp, Homo sapien
tggcctgcgtactccagcagcagga

SEQ ID NO: 5648575 - DNA, 25 bp, Homo sapien
ctgccaagtctgtagacttcagaga

SEQ ID NO: 5648576 - DNA, 25 bp, Homo sapien
ctgccaaaacacgaaaggtaataca

SEQ ID NO: 5648577 - DNA, 25 bp, Homo sapien
gtactccagcagcaggagagcggat

SEQ ID NO: 5648578 - DNA, 25 bp, Homo sapien
tctgggaccctgaagagacttcttc

SEQ ID NO: 5648579 - DNA, 25 bp, Homo sapien
tctcgcactcatgacacctccccct

SEQ ID NO: 5648580 - DNA, 25 bp, Homo sapien
agagagcctgcgattattggccagt

SEQ ID NO: 5648581 - DNA, 25 bp, Homo sapien
tccagcagcaggagagcggatttac

SEQ ID NO: 5648582 - DNA, 25 bp, Homo sapien
caggagagcggatttacaacatctc

SEQ ID NO: 5648583 - DNA, 25 bp, Homo sapien
gggcagtagtcgggtggccaagacc

SEQ ID NO: 5648584 - DNA, 25 bp, Homo sapien
gttttatgtcattggccacagaata

SEQ ID NO: 5648585 - DNA, 25 bp, Homo sapien
ctctgcatctggcatttctgctctc

SEQ ID NO: 5648586 - DNA, 25 bp, Homo sapien
ctaccctctcgcactcatgacacct

SEQ ID NO: 5648587 - DNA, 25 bp, Homo sapien
ttcgcccttggaggaaacaaacagg

SEQ ID NO: 5648588 - DNA, 25 bp, Homo sapien
aaacattaagaagctctccaaccgt

SEQ ID NO: 5648589 - DNA, 25 bp, Homo sapien
gtggaaatacgaatcaagcaaattg

SEQ ID NO: 5648590 - DNA, 25 bp, Homo sapien
ggtgtccatggtcaaaccaactcca

SEQ ID NO: 5648591 - DNA, 25 bp, Homo sapien
ctctctatgcttgagaccgggaggt

SEQ ID NO: 5648592 - DNA, 25 bp, Homo sapien
gcaacagctgacctggatatcaccg

SEQ ID NO: 5648593 - DNA, 25 bp, Homo sapien
ttcaccctgccctgcctgcagttga

SEQ ID NO: 5648594 - DNA, 25 bp, Homo sapien
cttctgggaccctgaagagacttct

SEQ ID NO: 5648595 - DNA, 25 bp, Homo sapien
gggtggcggttgactgtagagccgc

SEQ ID NO: 5648596 - DNA, 25 bp, Homo sapien
ggatggacttttaatgggcacttct

SEQ ID NO: 5648597 - DNA, 25 bp, Homo sapien
catcagtctcccagctgaatcctcc

SEQ ID NO: 5648598 - DNA, 25 bp, Homo sapien
tctcgcccaaatctgcagcagcata

SEQ ID NO: 5648599 - DNA, 25 bp, Homo sapien
aaactgcaagagtcaaaaggtgtcc

SEQ ID NO: 5648600 - DNA, 25 bp, Homo sapien
agccagcctctctgccctggagaat

SEQ ID NO: 5648601 - DNA, 25 bp, Homo sapien
gtcgggtggccaagaccaactcctt

SEQ ID NO: 5648602 - DNA, 25 bp, Homo sapien
gcagaggcacagtattgcccagctg

SEQ ID NO: 5648603 - DNA, 25 bp, Homo sapien
ctacttcgcccttggaggaaacaaa

SEQ ID NO: 5648604 - DNA, 25 bp, Homo sapien
gaactagagtcctcatccccaggct

SEQ ID NO: 5648605 - DNA, 25 bp, Homo sapien
ccagcctctctgccctggagaatca

SEQ ID NO: 5648606 - DNA, 25 bp, Homo sapien
tgctctctatgcttgagaccgggag

SEQ ID NO: 5648607 - DNA, 25 bp, Homo sapien
tcctgtgggaggtggtcagtgggac

SEQ ID NO: 5648608 - DNA, 25 bp, Homo sapien
acctctgcatctggcatttctgctc

SEQ ID NO: 5648609 - DNA, 25 bp, Homo sapien
gcttgctggggccatgccatggaag

SEQ ID NO: 5648610 - DNA, 25 bp, Homo sapien
aacaaactaacagcagaagctattc

SEQ ID NO: 5648611 - DNA, 25 bp, Homo sapien
aaatgatagtggaagaggaagaaga

SEQ ID NO: 5648612 - DNA, 25 bp, Homo sapien
atgtccgtctaccctctcgcactca

SEQ ID NO: 5648613 - DNA, 25 bp, Homo sapien
tttgagtgtgaagttccagagcaag

SEQ ID NO: 5648614 - DNA, 25 bp, Homo sapien
catttctgctctctatgcttgagac

SEQ ID NO: 5648615 - DNA, 25 bp, Homo sapien
cctgaagagacttcttcccttcagg

SEQ ID NO: 5648616 - DNA, 25 bp, Homo sapien
gcatctggcatttctgctctctatg

SEQ ID NO: 5648617 - DNA, 25 bp, Homo sapien
aaccaactccaggcctgacacccag

SEQ ID NO: 5648618 - DNA, 25 bp, Homo sapien
tccctgctctctgagctgctgcctt

SEQ ID NO: 5648619 - DNA, 25 bp, Homo sapien
tgtgcctggggcatggactttgtta

SEQ ID NO: 5648620 - DNA, 25 bp, Homo sapien
tgcctggggcatggactttgttaag

SEQ ID NO: 5648621 - DNA, 25 bp, Homo sapien
ccacaaatgagacaccaaagttgac

SEQ ID NO: 5648622 - DNA, 25 bp, Homo sapien
gctatgttctaagaatttgagaact

SEQ ID NO: 5648623 - DNA, 25 bp, Homo sapien
tgtgttctcaggaagactgcctcca

SEQ ID NO: 5648624 - DNA, 25 bp, Homo sapien
gccatgagagggtaggtccagaagg

SEQ ID NO: 5648625 - DNA, 25 bp, Homo sapien
gcaggtacgtgcctggcgacttctt

SEQ ID NO: 5648626 - DNA, 25 bp, Homo sapien
caccgaaataaacaaactaacagca

SEQ ID NO: 5648627 - DNA, 25 bp, Homo sapien
ccgctacccagagaacctctgcatc

SEQ ID NO: 5648628 - DNA, 25 bp, Homo sapien
tgtcttgctcttctacctccctagt

SEQ ID NO: 5648629 - DNA, 25 bp, Homo sapien
gggaatggcagccctcttgctgaca

SEQ ID NO: 5648630 - DNA, 25 bp, Homo sapien
accctctcgcactcatgacacctcc

SEQ ID NO: 5648631 - DNA, 25 bp, Homo sapien
ccagccagcctctctgccctggaga

SEQ ID NO: 5648632 - DNA, 25 bp, Homo sapien
ccaactccaggcctgacacccaggt

SEQ ID NO: 5648633 - DNA, 25 bp, Homo sapien
agaccaactccttacggaggcggaa

SEQ ID NO: 5648634 - DNA, 25 bp, Homo sapien
ttctgaagtctgcttgtggagcagt

SEQ ID NO: 5648635 - DNA, 25 bp, Homo sapien
aagagatcttcctcactgtgccagt

SEQ ID NO: 5648636 - DNA, 25 bp, Homo sapien
gagtcagacaggcagaacctcctca

SEQ ID NO: 5648637 - DNA, 25 bp, Homo sapien
gagacaccaaagttgacaggatgga

SEQ ID NO: 5648638 - DNA, 25 bp, Homo sapien
cttcaaactgcaagagtcaaaaggt

SEQ ID NO: 5648639 - DNA, 25 bp, Homo sapien
cagccctcttgctgacagcaaagag

SEQ ID NO: 5648640 - DNA, 25 bp, Homo sapien
ccctgccaagtctgtagacttcaga

SEQ ID NO: 5648641 - DNA, 25 bp, Homo sapien
caagtctgtagacttcagagagcac

SEQ ID NO: 5648642 - DNA, 25 bp, Homo sapien
aagagacttcttcccttcaggctta

SEQ ID NO: 5648643 - DNA, 25 bp, Homo sapien
gtgacttgcttggtggcctcattcc

SEQ ID NO: 5648644 - DNA, 25 bp, Homo sapien
cagtccatacaaggaaaaggaaaag

SEQ ID NO: 5648645 - DNA, 25 bp, Homo sapien
ggaagcttcccatcagtctcccagc

SEQ ID NO: 5648646 - DNA, 25 bp, Homo sapien
aagttccagagcaaggagccatgtt

SEQ ID NO: 5648647 - DNA, 25 bp, Homo sapien
ttggagacaacttccatgtcttgct

SEQ ID NO: 5648648 - DNA, 25 bp, Homo sapien
caagcaaattgagtcagacaggcag

SEQ ID NO: 5648649 - DNA, 25 bp, Homo sapien
agctgaatcctccctgctctctgag

SEQ ID NO: 5648650 - DNA, 25 bp, Homo sapien
ataacctctacaacatcgagatcct

SEQ ID NO: 5648651 - DNA, 25 bp, Homo sapien
gcatacggacccacaaatgagacac

SEQ ID NO: 5648652 - DNA, 25 bp, Homo sapien
ccatcccagctgatcccagtcactg

SEQ ID NO: 5648653 - DNA, 25 bp, Homo sapien
tgtctcgggaccgcaggtacgtgcc

SEQ ID NO: 5648654 - DNA, 25 bp, Homo sapien
ggaagctcgcctcctttctgaaaga

SEQ ID NO: 5648655 - DNA, 25 bp, Homo sapien
cctggggcatggactttgttaagca

SEQ ID NO: 5648656 - DNA, 25 bp, Homo sapien
tgactgtagagccgctctctctcac

SEQ ID NO: 5648657 - DNA, 25 bp, Homo sapien
gcccagctggatccagaggccttgg

SEQ ID NO: 5648658 - DNA, 25 bp, Homo sapien
tctgcttgtggagcagtgttttatg

SEQ ID NO: 5648659 - DNA, 25 bp, Homo sapien
tctctcttatggggttcatgggaac

SEQ ID NO: 5648660 - DNA, 25 bp, Homo sapien
actccagcagcaggagagcggattt

SEQ ID NO: 5648661 - DNA, 25 bp, Homo sapien
cagtagttctgaagtctgcttgtgg

SEQ ID NO: 5648662 - DNA, 25 bp, Homo sapien
ttatgtttatccctgtttactgaag

SEQ ID NO: 5648663 - DNA, 25 bp, Homo sapien
atcctcttcaccctgccctgcctgc

SEQ ID NO: 5648664 - DNA, 25 bp, Homo sapien
ccctgccccatctccgccgctcccc

SEQ ID NO: 5648665 - DNA, 25 bp, Homo sapien
gaggcggcaacagctgacctggata

SEQ ID NO: 5648666 - DNA, 25 bp, Homo sapien
aggttttatgtcattggccacagaa

SEQ ID NO: 5648667 - DNA, 25 bp, Homo sapien
gggccatgccatggaagcttcccat

SEQ ID NO: 5648668 - DNA, 25 bp, Homo sapien
ggagagagcctgcgattattggcca

SEQ ID NO: 5648669 - DNA, 25 bp, Homo sapien
cggctccccaaggctctgcgcgaga

SEQ ID NO: 5648670 - DNA, 25 bp, Homo sapien
cctggcctgcgtactccagcagcag

SEQ ID NO: 5648671 - DNA, 25 bp, Homo sapien
taccccagccgtgggccgattggag

SEQ ID NO: 5648672 - DNA, 25 bp, Homo sapien
tgccagtgggcggcggagagagcct

SEQ ID NO: 5648673 - DNA, 25 bp, Homo sapien
gggctctctgtggtatttgttatta

SEQ ID NO: 5648674 - DNA, 25 bp, Homo sapien
cagataagtgagctctgggccatga

SEQ ID NO: 5648675 - DNA, 25 bp, Homo sapien
cagaataactgtctctaagctatcc

SEQ ID NO: 5648676 - DNA, 25 bp, Homo sapien
ccagctggatccagaggccttggga

SEQ ID NO: 5648677 - DNA, 25 bp, Homo sapien
aaagacttcgaccgtgaagtggaaa

SEQ ID NO: 5648678 - DNA, 25 bp, Homo sapien
gataagggaactgtagggcccagat

SEQ ID NO: 5648679 - DNA, 25 bp, Homo sapien
aagaaaatgaacgtaagaatcttca

SEQ ID NO: 5648680 - DNA, 25 bp, Homo sapien
tccccgcagcctccgccgagcgcca

SEQ ID NO: 5648681 - DNA, 25 bp, Homo sapien
ggaaatacgaatcaagcaaattgag

SEQ ID NO: 5648682 - DNA, 25 bp, Homo sapien
gacacccctgaaatctgccaaaaca

SEQ ID NO: 5648683 - DNA, 25 bp, Homo sapien
cacttctctcttatggggttcatgg

SEQ ID NO: 5648684 - DNA, 25 bp, Homo sapien
cttcttcccttcaggcttattgttt

SEQ ID NO: 5648685 - DNA, 25 bp, Homo sapien
tctgtggtatttgttattattttgc

SEQ ID NO: 5648686 - DNA, 25 bp, Homo sapien
tgaggccaccaagcaagtcacaccc

SEQ ID NO: 5648687 - DNA, 25 bp, Homo sapien
ggaggcaaaaggcagcagctcagag

SEQ ID NO: 5648688 - DNA, 25 bp, Homo sapien
ccaaggcctctggatccagctgggc

SEQ ID NO: 5648689 - DNA, 25 bp, Homo sapien
tttccttgtatggactgagttctct

SEQ ID NO: 5648690 - DNA, 25 bp, Homo sapien
cctggggatgaggactctagttctc

SEQ ID NO: 5648691 - DNA, 25 bp, Homo sapien
acctcgctgtgccagtgagagagag

SEQ ID NO: 5648692 - DNA, 25 bp, Homo sapien
ttcatctacctgtattacctttcgt

SEQ ID NO: 5648693 - DNA, 25 bp, Homo sapien
ggtgaaagatccctaagtcccactg

SEQ ID NO: 5648694 - DNA, 25 bp, Homo sapien
gatatccaggtcagctgttgccgcc

SEQ ID NO: 5648695 - DNA, 25 bp, Homo sapien
catgattctccagggcagagaggct

SEQ ID NO: 5648696 - DNA, 25 bp, Homo sapien
gcaggctctctccgccgcccactgg

SEQ ID NO: 5648697 - DNA, 25 bp, Homo sapien
tcaaacaataagcctgaagggaaga

SEQ ID NO: 5648698 - DNA, 25 bp, Homo sapien
atggcccagagctcacttatctgag

SEQ ID NO: 5648699 - DNA, 25 bp, Homo sapien
tgtatggactgagttctcttcttgg

SEQ ID NO: 5648700 - DNA, 25 bp, Homo sapien
tcgcaggctctctccgccgcccact

SEQ ID NO: 5648701 - DNA, 25 bp, Homo sapien
ttctctgggtagcggtggtggaggc

SEQ ID NO: 5648702 - DNA, 25 bp, Homo sapien
gagaacacagggttcttcttcgccc

SEQ ID NO: 5648703 - DNA, 25 bp, Homo sapien
gctctacctaactggtgtgggacta

SEQ ID NO: 5648704 - DNA, 25 bp, Homo sapien
ccactggcacagtgaggaagatctc

SEQ ID NO: 5648705 - DNA, 25 bp, Homo sapien
agggtcccagaagtgcccattaaaa

SEQ ID NO: 5648706 - DNA, 25 bp, Homo sapien
gtcccgagacaagggctgagcaaaa

SEQ ID NO: 5648707 - DNA, 25 bp, Homo sapien
tagaacatagcacatgattctccag

SEQ ID NO: 5648708 - DNA, 25 bp, Homo sapien
tactgggcacagcaggtgaaagatc

SEQ ID NO: 5648709 - DNA, 25 bp, Homo sapien
tccagctgggcaatactgtgcctct

SEQ ID NO: 5648710 - DNA, 25 bp, Homo sapien
caggaggaggaggaggaggaagagg

SEQ ID NO: 5648711 - DNA, 25 bp, Homo sapien
ggtcgaagtctttcagaaaggaggc

SEQ ID NO: 5648712 - DNA, 25 bp, Homo sapien
cttcctgagaacacagggttcttct

SEQ ID NO: 5648713 - DNA, 25 bp, Homo sapien
ataaaacctccagaatctgggccct

SEQ ID NO: 5648714 - DNA, 25 bp, Homo sapien
gtagggggaggtgtcatgagtgcga

SEQ ID NO: 5648715 - DNA, 25 bp, Homo sapien
acttatctgagcctaaacctcccgg

SEQ ID NO: 5648716 - DNA, 25 bp, Homo sapien
ctcagagagcagggaggattcagct

SEQ ID NO: 5648717 - DNA, 25 bp, Homo sapien
ctgcctgtctgactcaatttgcttg

SEQ ID NO: 5648718 - DNA, 25 bp, Homo sapien
agaggatgttgagttgcaggaggca

SEQ ID NO: 5648719 - DNA, 25 bp, Homo sapien
atgccagatgcagaggttctctggg

SEQ ID NO: 5648720 - DNA, 25 bp, Homo sapien
actgtgcctctgcaagtcactggcc

SEQ ID NO: 5648721 - DNA, 25 bp, Homo sapien
agagaagtgctctctgaagtctaca

SEQ ID NO: 5648722 - DNA, 25 bp, Homo sapien
ccactatcatttcatctacctgtat

SEQ ID NO: 5648723 - DNA, 25 bp, Homo sapien
aaagtccatcctgtcaactttggtg

SEQ ID NO: 5648724 - DNA, 25 bp, Homo sapien
cggcggagatggggcagggaagcaa

SEQ ID NO: 5648725 - DNA, 25 bp, Homo sapien
tccttttccttgtatggactgagtt

SEQ ID NO: 5648726 - DNA, 25 bp, Homo sapien
ctacagtcaaccgccacccaattca

SEQ ID NO: 5648727 - DNA, 25 bp, Homo sapien
gctgcagatttgggcgagacggttg

SEQ ID NO: 5648728 - DNA, 25 bp, Homo sapien
aggggtgtctgaatagcttctgctg

SEQ ID NO: 5648729 - DNA, 25 bp, Homo sapien
gacatgttccctactgaggtcactg

SEQ ID NO: 5648730 - DNA, 25 bp, Homo sapien
tgtgccttcaagcctggggatgagg

SEQ ID NO: 5648731 - DNA, 25 bp, Homo sapien
tccatcctgtcaactttggtgtctc

SEQ ID NO: 5648732 - DNA, 25 bp, Homo sapien
ctaaacctcccggtctcaagcatag

SEQ ID NO: 5648733 - DNA, 25 bp, Homo sapien
tcacttatctgagcctaaacctccc

SEQ ID NO: 5648734 - DNA, 25 bp, Homo sapien
ccaggcacaggcacacatggaatga

SEQ ID NO: 5648735 - DNA, 25 bp, Homo sapien
aggagggctggtagggggaggtgtc

SEQ ID NO: 5648736 - DNA, 25 bp, Homo sapien
accctctcatggcccagagctcact

SEQ ID NO: 5648737 - DNA, 25 bp, Homo sapien
cctaactggtgtgggactagcacgt

SEQ ID NO: 5648738 - DNA, 25 bp, Homo sapien
acacagggttcttcttcgccccctc

SEQ ID NO: 5648739 - DNA, 25 bp, Homo sapien
catcctgtcaactttggtgtctcat

SEQ ID NO: 5648740 - DNA, 25 bp, Homo sapien
acttggcagggaccactggaccatg

SEQ ID NO: 5648741 - DNA, 25 bp, Homo sapien
gggcacagcaggtgaaagatcccta

SEQ ID NO: 5648742 - DNA, 25 bp, Homo sapien
cgagacaagggctgagcaaaacctc

SEQ ID NO: 5648743 - DNA, 25 bp, Homo sapien
tctggatccagctgggcaatactgt

SEQ ID NO: 5648744 - DNA, 25 bp, Homo sapien
ccgcctcttccagggcctgtttgtt

SEQ ID NO: 5648745 - DNA, 25 bp, Homo sapien
gggccctacagttcccttatccaaa

SEQ ID NO: 5648746 - DNA, 25 bp, Homo sapien
tttgactcttgcagtttgaagattc

SEQ ID NO: 5648747 - DNA, 25 bp, Homo sapien
actcttgcagtttgaagattcttac

SEQ ID NO: 5648748 - DNA, 25 bp, Homo sapien
cccgagacaagggctgagcaaaacc

SEQ ID NO: 5648749 - DNA, 25 bp, Homo sapien
tactaaaatggtcttgttgcaaaat

SEQ ID NO: 5648750 - DNA, 25 bp, Homo sapien
tggaggcagtcttcctgagaacaca

SEQ ID NO: 5648751 - DNA, 25 bp, Homo sapien
aaacactgctccacaagcagacttc

SEQ ID NO: 5648752 - DNA, 25 bp, Homo sapien
ttgtttatttcggtgatatccaggt

SEQ ID NO: 5648753 - DNA, 25 bp, Homo sapien
ggacctaccctctcatggcccagag

SEQ ID NO: 5648754 - DNA, 25 bp, Homo sapien
caggcacgtacctgcggtcccgaga

SEQ ID NO: 5648755 - DNA, 25 bp, Homo sapien
tcgcgcagagccttggggagccgca

SEQ ID NO: 5648756 - DNA, 25 bp, Homo sapien
catctcgcgcagagccttggggagc

SEQ ID NO: 5648757 - DNA, 25 bp, Homo sapien
ttgtaaatccgctctcctgctgctg

SEQ ID NO: 5648758 - DNA, 25 bp, Homo sapien
ttgaccatggacacctccaatcggc

SEQ ID NO: 5648759 - DNA, 25 bp, Homo sapien
gttcccatgaaccccataagagaga

SEQ ID NO: 5648760 - DNA, 25 bp, Homo sapien
ttcttggatggaggacaccttttga

SEQ ID NO: 5648761 - DNA, 25 bp, Homo sapien
ggccaggggtcttgaagacccttga

SEQ ID NO: 5648762 - DNA, 25 bp, Homo sapien
gcgctcggcggaggctgcggggagc

SEQ ID NO: 5648763 - DNA, 25 bp, Homo sapien
cagagctcacttatctgagcctaaa

SEQ ID NO: 5648764 - DNA, 25 bp, Homo sapien
gcttgattcgtatttccacttcacg

SEQ ID NO: 5648765 - DNA, 25 bp, Homo sapien
ctactgcccttcctaggagccatgg

SEQ ID NO: 5648766 - DNA, 25 bp, Homo sapien
cttgctctggaacttcacactcaaa

SEQ ID NO: 5648767 - DNA, 25 bp, Homo sapien
aagacccttgagtcaaacctgggtg

SEQ ID NO: 5648768 - DNA, 25 bp, Homo sapien
agagaggctggctggagaatgagga

SEQ ID NO: 5648769 - DNA, 25 bp, Homo sapien
ctctgggtagcggtggtggaggcag

SEQ ID NO: 5648770 - DNA, 25 bp, Homo sapien
tgtttcccaaggcctctggatccag

SEQ ID NO: 5648771 - DNA, 25 bp, Homo sapien
gaatagcttctgctgttagtttgtt

SEQ ID NO: 5648772 - DNA, 25 bp, Homo sapien
tctgctgttagtttgtttatttcgg

SEQ ID NO: 5648773 - DNA, 25 bp, Homo sapien
cctgaagggaagaagtctcttcagg

SEQ ID NO: 5648774 - DNA, 25 bp, Homo sapien
cctgcggtcccgagacaagggctga

SEQ ID NO: 5648775 - DNA, 25 bp, Homo sapien
tctcgatgttgtagaggttatccac

SEQ ID NO: 5648776 - DNA, 25 bp, Homo sapien
ctgctgatctgtacagttcccccca

SEQ ID NO: 5648777 - DNA, 25 bp, Homo sapien
agccttggggagccgcaggatctcg

SEQ ID NO: 5648778 - DNA, 25 bp, Homo sapien
atctctttgctgtcagcaagagggc

SEQ ID NO: 5648779 - DNA, 25 bp, Homo sapien
tggccaataatcgcaggctctctcc

SEQ ID NO: 5648780 - DNA, 25 bp, Homo sapien
tgcaggaggcaaaaggcagcagctc

SEQ ID NO: 5648781 - DNA, 25 bp, Homo sapien
aggcagggcagggtgaagaggatgt

SEQ ID NO: 5648782 - DNA, 25 bp, Homo sapien
gatggaggacaccttttgactcttg

SEQ ID NO: 5648783 - DNA, 25 bp, Homo sapien
ccgcctccgtaaggagttggtcttg

SEQ ID NO: 5648784 - DNA, 25 bp, Homo sapien
aaacctcgctgtgccagtgagagag

SEQ ID NO: 5648785 - DNA, 25 bp, Homo sapien
ggttctctgggtagcggtggtggag

SEQ ID NO: 5648786 - DNA, 25 bp, Homo sapien
gtggccaatgacataaaacctccag

SEQ ID NO: 5648787 - DNA, 25 bp, Homo sapien
gaggaggaagaggagggctggtagg

SEQ ID NO: 5648788 - DNA, 25 bp, Homo sapien
tggctggagaatgaggacctcactg

SEQ ID NO: 5648789 - DNA, 25 bp, Homo sapien
taagagagaagtgctctctgaagtc

SEQ ID NO: 5648790 - DNA, 25 bp, Homo sapien
ttgttttactaaaatggtcttgttg

SEQ ID NO: 5648791 - DNA, 25 bp, Homo sapien
gagaatgaggacctcactgctgact

SEQ ID NO: 5648792 - DNA, 25 bp, Homo sapien
gagttggtttgaccatggacacctc

SEQ ID NO: 5648793 - DNA, 25 bp, Homo sapien
tttcctccaagggcgaagtagtcaa

SEQ ID NO: 5648794 - DNA, 25 bp, Homo sapien
cgtctgaattcctgaattcccttag

SEQ ID NO: 5648795 - DNA, 25 bp, Homo sapien
gactgagttctcttcttggatggag

SEQ ID NO: 5648796 - DNA, 25 bp, Homo sapien
tctccgccgcccactggcacagtga

SEQ ID NO: 5648797 - DNA, 25 bp, Homo sapien
actggcacagtgaggaagatctctt

SEQ ID NO: 5648798 - DNA, 25 bp, Homo sapien
caatttgcttgattcgtatttccac

SEQ ID NO: 5648799 - DNA, 25 bp, Homo sapien
actctgcttaacaaagtccatgccc

SEQ ID NO: 5648800 - DNA, 25 bp, Homo sapien
ccagcaagcagtgactgggatcagc

SEQ ID NO: 5648801 - DNA, 25 bp, Homo sapien
gtgccagtgagagagagcggctcta

SEQ ID NO: 5648802 - DNA, 25 bp, Homo sapien
acatgagaaagccatgtgccttcaa

SEQ ID NO: 5648803 - DNA, 25 bp, Homo sapien
ttccctgagatgttgtaaatccgct

SEQ ID NO: 5648804 - DNA, 25 bp, Homo sapien
aggctggctggagaatgaggacctc

SEQ ID NO: 5648805 - DNA, 25 bp, Homo sapien
tcgccaggcacgtacctgcggtccc

SEQ ID NO: 5648806 - DNA, 25 bp, Homo sapien
aatcgcaggctctctccgccgccca

SEQ ID NO: 5648807 - DNA, 25 bp, Homo sapien
cagctgggcaatactgtgcctctgc

SEQ ID NO: 5648808 - DNA, 25 bp, Homo sapien
gttattctgtggccaatgacataaa

SEQ ID NO: 5648809 - DNA, 25 bp, Homo sapien
tgattctccagggcagagaggctgg

SEQ ID NO: 5648810 - DNA, 25 bp, Homo sapien
gttgcaggaggcaaaaggcagcagc

SEQ ID NO: 5648811 - DNA, 25 bp, Homo sapien
tttgaagattcttacgttcattttc

SEQ ID NO: 5648812 - DNA, 25 bp, Homo sapien
agtccatcctgtcaactttggtgtc

SEQ ID NO: 5648813 - DNA, 25 bp, Homo sapien
gtctgaatagcttctgctgttagtt

SEQ ID NO: 5648814 - DNA, 25 bp, Homo sapien
gatgcagaggttctctgggtagcgg

SEQ ID NO: 5648815 - DNA, 25 bp, Homo sapien
tggagttggtttgaccatggacacc

SEQ ID NO: 5648816 - DNA, 25 bp, Homo sapien
agccagttcatctcgcgcagagcct

SEQ ID NO: 5648817 - DNA, 25 bp, Homo sapien
atggccccagcaagcagtgactggg

SEQ ID NO: 5648818 - DNA, 25 bp, Homo sapien
atccgctctcctgctgctggagtac

SEQ ID NO: 5648819 - DNA, 25 bp, Homo sapien
gtgtcatgagtgcgagagggtagac

SEQ ID NO: 5648820 - DNA, 25 bp, Homo sapien
tccaaatttccactaactagggagg

SEQ ID NO: 5648821 - DNA, 25 bp, Homo sapien
ttgtagaggttatccacctccttga

SEQ ID NO: 5648822 - DNA, 25 bp, Homo sapien
agagagccctacatgagaaagccat

SEQ ID NO: 5648823 - DNA, 25 bp, Homo sapien
atgaaccccataagagagaagtgct

SEQ ID NO: 5648824 - DNA, 25 bp, Homo sapien
aggttatccacctccttgaggaggt

SEQ ID NO: 5648825 - DNA, 25 bp, Homo sapien
ctccaatcggcccacggctggggta

SEQ ID NO: 5648826 - DNA, 25 bp, Homo sapien
tccacctccttgaggaggttctgcc

SEQ ID NO: 5648827 - DNA, 25 bp, Homo sapien
ctcccggtctcaagcatagagagca

SEQ ID NO: 5648828 - DNA, 25 bp, Homo sapien
cttcagggtcccagaagtgcccatt

SEQ ID NO: 5648829 - DNA, 25 bp, Homo sapien
taaaagtccatcctgtcaactttgg

SEQ ID NO: 5648830 - DNA, 25 bp, Homo sapien
gtttatttcggtgatatccaggtca

SEQ ID NO: 5648831 - DNA, 25 bp, Homo sapien
ctgagatgttgtaaatccgctctcc

SEQ ID NO: 5648832 - DNA, 25 bp, Homo sapien
gtggtggaggcagtcttcctgagaa

SEQ ID NO: 5648833 - DNA, 25 bp, Homo sapien
ggctgccattccctgagatgttgta

SEQ ID NO: 5648834 - DNA, 25 bp, Homo sapien
tgaggactctagttctcaaattctt

SEQ ID NO: 5648835 - DNA, 25 bp, Homo sapien
cttccagggcctgtttgtttcctcc

SEQ ID NO: 5648836 - DNA, 25 bp, Homo sapien
taaacagggataaacataaaacact

SEQ ID NO: 5648837 - DNA, 25 bp, Homo sapien
actttggtgtctcatttgtgggtcc

SEQ ID NO: 5648838 - DNA, 25 bp, Homo sapien
gaacatagcacatgattctccaggg

SEQ ID NO: 5648839 - DNA, 25 bp, Homo sapien
acagggttcttcttcgccccctcaa

SEQ ID NO: 5648840 - DNA, 25 bp, Homo sapien
atctgggccctacagttcccttatc

SEQ ID NO: 5648841 - DNA, 25 bp, Homo sapien
caatactgtgcctctgcaagtcact

SEQ ID NO: 5648842 - DNA, 25 bp, Homo sapien
ccactggaccatggatagcttagag

SEQ ID NO: 5648843 - DNA, 25 bp, Homo sapien
gcccactggcacagtgaggaagatc

SEQ ID NO: 5648844 - DNA, 25 bp, Homo sapien
ctttgctgtcagcaagagggctgcc

SEQ ID NO: 5648845 - DNA, 25 bp, Homo sapien
ttatttcggtgatatccaggtcagc

SEQ ID NO: 5648846 - DNA, 25 bp, Homo sapien
cccttagaggaacatggctccttgc

SEQ ID NO: 5648847 - DNA, 25 bp, Homo sapien
gagatgttgtaaatccgctctcctg

SEQ ID NO: 5648848 - DNA, 25 bp, Homo sapien
ggaacatggctccttgctctggaac

SEQ ID NO: 5648849 - DNA, 25 bp, Homo sapien
gttagtttgtttatttcggtgatat

SEQ ID NO: 5648850 - DNA, 25 bp, Homo sapien
tgaaagatccctaagtcccactgac

SEQ ID NO: 5648851 - DNA, 25 bp, Homo sapien
atttgcttgattcgtatttccactt

SEQ ID NO: 5648852 - DNA, 25 bp, Homo sapien
gcgaagtagtcaagccagttcatct

SEQ ID NO: 5648853 - DNA, 25 bp, Homo sapien
cagggaccactggaccatggatagc

SEQ ID NO: 5648854 - DNA, 25 bp, Homo sapien
aacagacagctctacctaactggtg

SEQ ID NO: 5648855 - DNA, 25 bp, Homo sapien
tgcttaacaaagtccatgccccagg

SEQ ID NO: 5648856 - DNA, 25 bp, Homo sapien
acagcaggtgaaagatccctaagtc

SEQ ID NO: 5648857 - DNA, 25 bp, Homo sapien
cagaactactgggcacagcaggtga

SEQ ID NO: 5648858 - DNA, 25 bp, Homo sapien
gggcagagaggctggctggagaatg

SEQ ID NO: 5648859 - DNA, 25 bp, Homo sapien
gtctcttcagggtcccagaagtgcc

SEQ ID NO: 5648860 - DNA, 25 bp, Homo sapien
ggtgaacagacagctctacctaact

SEQ ID NO: 5648861 - DNA, 25 bp, Homo sapien
acggttggagagcttcttaatgttt

SEQ ID NO: 5648862 - DNA, 25 bp, Homo sapien
aagcaagtcacacccgcccctgttc

SEQ ID NO: 5648863 - DNA, 25 bp, Homo sapien
gctgactctgcttaacaaagtccat

SEQ ID NO: 5648864 - DNA, 25 bp, Homo sapien
aaaaggcagcagctcagagagcagg

SEQ ID NO: 5648865 - DNA, 25 bp, Homo sapien
ccacccgactactgcccttcctagg

SEQ ID NO: 5648866 - DNA, 25 bp, Homo sapien
ccgcccactggcacagtgaggaaga

SEQ ID NO: 5648867 - DNA, 25 bp, Homo sapien
gcctaaacctcccggtctcaagcat

SEQ ID NO: 5648868 - DNA, 25 bp, Homo sapien
atgaggacctcactgctgactctgc

SEQ ID NO: 5648869 - DNA, 25 bp, Homo sapien
acactgctccacaagcagacttcag

SEQ ID NO: 5648870 - DNA, 25 bp, Homo sapien
ggaagttgtctccaaaccagtattt

SEQ ID NO: 5648871 - DNA, 25 bp, Homo sapien
aacagggataaacataaaacactgc

SEQ ID NO: 5648872 - DNA, 25 bp, Homo sapien
atttccactaactagggaggtagaa

SEQ ID NO: 5648873 - DNA, 25 bp, Homo sapien
catagagagcagaaatgccagatgc

SEQ ID NO: 5648874 - DNA, 25 bp, Homo sapien
gctgagcaaaacctcgctgtgccag

SEQ ID NO: 5648875 - DNA, 25 bp, Homo sapien
gaaccccataagagagaagtgctct

SEQ ID NO: 5648876 - DNA, 25 bp, Homo sapien
tgttgtagaggttatccacctcctt

SEQ ID NO: 5648877 - DNA, 25 bp, Homo sapien
cacaggaggaggaggaggaggaaga

SEQ ID NO: 5648878 - DNA, 25 bp, Homo sapien
agggtgaacagacagctctacctaa

SEQ ID NO: 5648879 - DNA, 25 bp, Homo sapien
tgttgagttgcaggaggcaaaaggc

SEQ ID NO: 5648880 - DNA, 25 bp, Homo sapien
tccttgtatggactgagttctcttc

SEQ ID NO: 5648881 - DNA, 25 bp, Homo sapien
tatttggtcttcagtaaacagggat

SEQ ID NO: 5648882 - DNA, 25 bp, Homo sapien
tggaggacaccttttgactcttgca

SEQ ID NO: 5648883 - DNA, 25 bp, Homo sapien
gagagagcggctctacagtcaaccg

SEQ ID NO: 5648884 - DNA, 25 bp, Homo sapien
ctgagaacacagggttcttcttcgc

SEQ ID NO: 5648885 - DNA, 25 bp, Homo sapien
aaaataataacaaataccacagaga

SEQ ID NO: 5648886 - DNA, 25 bp, Homo sapien
ccagaagtgcccattaaaagtccat

SEQ ID NO: 5648887 - DNA, 25 bp, Homo sapien
ggacaccttttgactcttgcagttt

SEQ ID NO: 5648888 - DNA, 25 bp, Homo sapien
tgagtgcgagagggtagacggacat

SEQ ID NO: 5648889 - DNA, 25 bp, Homo sapien
gtcactgctgccaactgtcctgctc

SEQ ID NO: 5648890 - DNA, 25 bp, Homo sapien
tgagtcaaacctgggtgtcaggcct

SEQ ID NO: 5648891 - DNA, 25 bp, Homo sapien
ctcatttgtgggtccgtatgctgct

SEQ ID NO: 5648892 - DNA, 25 bp, Homo sapien
ggagactgatgggaagcttccatgg

SEQ ID NO: 5648893 - DNA, 25 bp, Homo sapien
agcggtggtggaggcagtcttcctg

SEQ ID NO: 5648894 - DNA, 25 bp, Homo sapien
gacggacatgttccctactgaggtc

SEQ ID NO: 5648895 - DNA, 25 bp, Homo sapien
cttaacaaagtccatgccccaggca

SEQ ID NO: 5648896 - DNA, 25 bp, Homo sapien
actcaaacaataagcctgaagggaa

SEQ ID NO: 5648897 - DNA, 25 bp, Homo sapien
aacagtgttagcacggcttgacctt

SEQ ID NO: 5648898 - DNA, 25 bp, Homo sapien
gagttctcttcttggatggaggaca

SEQ ID NO: 5648899 - DNA, 25 bp, Homo sapien
ctgcaggcagggcagggtgaagagg

SEQ ID NO: 5648900 - DNA, 25 bp, Homo sapien
ccttggggagccgcaggatctcgat

SEQ ID NO: 5648901 - DNA, 25 bp, Homo sapien
tagagagcagaaatgccagatgcag

SEQ ID NO: 5648902 - DNA, 25 bp, Homo sapien
tgccccaggcacaggcacacatgga

SEQ ID NO: 5648903 - DNA, 25 bp, Homo sapien
gtacagttccccccaccttctggac

SEQ ID NO: 5648904 - DNA, 25 bp, Homo sapien
ataatcgcaggctctctccgccgcc

SEQ ID NO: 5648905 - DNA, 25 bp, Homo sapien
ggcagcagctcagagagcagggagg

SEQ ID NO: 5648906 - DNA, 25 bp, Homo sapien
gcagagaggctggctggagaatgag

SEQ ID NO: 5648907 - DNA, 25 bp, Homo sapien
cgtacctgcggtcccgagacaaggg

SEQ ID NO: 5648908 - DNA, 25 bp, Homo sapien
tatttccacttcacggtcgaagtct

SEQ ID NO: 5648909 - DNA, 25 bp, Homo sapien
ctacagttcccttatccaaatttcc

SEQ ID NO: 5648910 - DNA, 25 bp, Homo sapien
aacataaaacactgctccacaagca

SEQ ID NO: 5648911 - DNA, 25 bp, Homo sapien
cccctcaactgcaggcagggcaggg

SEQ ID NO: 5648912 - DNA, 25 bp, Homo sapien
aaggcagcagctcagagagcaggga

SEQ ID NO: 5648913 - DNA, 25 bp, Homo sapien
tttccacttcacggtcgaagtcttt

SEQ ID NO: 5648914 - DNA, 25 bp, Homo sapien
ctgaccacctcccacaggaggagga

SEQ ID NO: 5648915 - DNA, 25 bp, Homo sapien
cataagagagaagtgctctctgaag

SEQ ID NO: 5648916 - DNA, 25 bp, Homo sapien
ccaagggcgaagtagtcaagccagt

SEQ ID NO: 5648917 - DNA, 25 bp, Homo sapien
tcccagaagtgcccattaaaagtcc

SEQ ID NO: 5648918 - DNA, 25 bp, Homo sapien
gccagatgcagaggttctctgggta

SEQ ID NO: 5648919 - DNA, 25 bp, Homo sapien
gatgggagggtgaacagacagctct

SEQ ID NO: 5648920 - DNA, 25 bp, Homo sapien
gactactgcccttcctaggagccat

SEQ ID NO: 5648921 - DNA, 25 bp, Homo sapien
tgactcttgcagtttgaagattctt

SEQ ID NO: 5648922 - DNA, 25 bp, Homo sapien
tattctgtggccaatgacataaaac

SEQ ID NO: 5648923 - DNA, 25 bp, Homo sapien
agaagtctcttcagggtcccagaag

SEQ ID NO: 5648924 - DNA, 25 bp, Homo sapien
ctggagtacgcaggccaggggtctt

SEQ ID NO: 5648925 - DNA, 25 bp, Homo sapien
tatggactgagttctcttcttggat

SEQ ID NO: 5648926 - DNA, 25 bp, Homo sapien
gatgttgagttgcaggaggcaaaag

SEQ ID NO: 5648927 - DNA, 25 bp, Homo sapien
caagaaactgggtagggacgaggag

SEQ ID NO: 5648928 - DNA, 25 bp, Homo sapien
agttcatctcgcgcagagccttggg

SEQ ID NO: 5648929 - DNA, 25 bp, Homo sapien
gaagaggatgttgagttgcaggagg

SEQ ID NO: 5648930 - DNA, 25 bp, Homo sapien
ttctgtggccaatgacataaaacct

SEQ ID NO: 5648931 - DNA, 25 bp, Homo sapien
aatcggcccacggctggggtaacag

SEQ ID NO: 5648932 - DNA, 25 bp, Homo sapien
gggctggtagggggaggtgtcatga

SEQ ID NO: 5648933 - DNA, 25 bp, Homo sapien
ttgcaaaataataacaaataccaca

SEQ ID NO: 5648934 - DNA, 25 bp, Homo sapien
tttcaggggtgtctgaatagcttct

SEQ ID NO: 5648935 - DNA, 25 bp, Homo sapien
ctctacagtcaaccgccacccaatt

SEQ ID NO: 5648936 - DNA, 25 bp, Homo sapien
tcttaatgtttcccaaggcctctgg

SEQ ID NO: 5648937 - DNA, 25 bp, Homo sapien
ggtagacggacatgttccctactga

SEQ ID NO: 5648938 - DNA, 25 bp, Homo sapien
gcggggagcggcggagatggggcag

SEQ ID NO: 5648939 - DNA, 25 bp, Homo sapien
tcgaagtctttcagaaaggaggcga

SEQ ID NO: 5648940 - DNA, 25 bp, Homo sapien
agagcaagacatggaagttgtctcc

SEQ ID NO: 5648941 - DNA, 25 bp, Homo sapien
agccgcaggatctcgatgttgtaga

SEQ ID NO: 5648942 - DNA, 25 bp, Homo sapien
cccttatccaaatttccactaacta

SEQ ID NO: 5648943 - DNA, 25 bp, Homo sapien
agggcagggtgaagaggatgttgag

SEQ ID NO: 5648944 - DNA, 25 bp, Homo sapien
gcagaaatgccagatgcagaggttc

SEQ ID NO: 5648945 - DNA, 25 bp, Homo sapien
tctgcaagtcactggccaataatcg

SEQ ID NO: 5648946 - DNA, 25 bp, Homo sapien
atctgtacagttccccccaccttct

SEQ ID NO: 5648947 - DNA, 25 bp, Homo sapien
ccaactgtcctgctctgctgatctg

SEQ ID NO: 5648948 - DNA, 25 bp, Homo sapien
agagccttggggagccgcaggatct

SEQ ID NO: 5648949 - DNA, 25 bp, Homo sapien
ctacagacttggcagggaccactgg

SEQ ID NO: 5648950 - DNA, 25 bp, Homo sapien
gcgcagagccttggggagccgcagg

SEQ ID NO: 5648951 - DNA, 25 bp, Homo sapien
ggacacctccaatcggcccacggct

SEQ ID NO: 5648952 - DNA, 25 bp, Homo sapien
gggataaacataaaacactgctcca

SEQ ID NO: 5648953 - DNA, 25 bp, Homo sapien
gaactactgggcacagcaggtgaaa

SEQ ID NO: 5648954 - DNA, 25 bp, Homo sapien
agagggctgccattccctgagatgt

SEQ ID NO: 5648955 - DNA, 25 bp, Homo sapien
gcaaaaggcagcagctcagagagca

SEQ ID NO: 5648956 - DNA, 25 bp, Homo sapien
tcatggcccagagctcacttatctg

SEQ ID NO: 5648957 - DNA, 25 bp, Homo sapien
ttcagaactactgggcacagcaggt

SEQ ID NO: 5648958 - DNA, 25 bp, Homo sapien
tgaagtctacagacttggcagggac

SEQ ID NO: 5648959 - DNA, 25 bp, Homo sapien
agtagtcaagccagttcatctcgcg

SEQ ID NO: 5648960 - DNA, 25 bp, Homo sapien
actggaccatggatagcttagagac

SEQ ID NO: 5648961 - DNA, 25 bp, Homo sapien
gcagacttcagaactactgggcaca

SEQ ID NO: 5648962 - DNA, 25 bp, Homo sapien
cataaaacactgctccacaagcaga

SEQ ID NO: 5648963 - DNA, 25 bp, Homo sapien
ggatagcttagagacagttattctg

SEQ ID NO: 5648964 - DNA, 25 bp, Homo sapien
acccgactactgcccttcctaggag

SEQ ID NO: 5648965 - DNA, 25 bp, Homo sapien
aaccagtatttggtcttcagtaaac

SEQ ID NO: 5648966 - DNA, 25 bp, Homo sapien
tttcagaaaggaggcgagcttccgc

SEQ ID NO: 5648967 - DNA, 25 bp, Homo sapien
tggaccatggatagcttagagacag

SEQ ID NO: 5648968 - DNA, 25 bp, Homo sapien
tccgtatgctgctgcagatttgggc

SEQ ID NO: 5648969 - DNA, 25 bp, Homo sapien
tacctaactggtgtgggactagcac

SEQ ID NO: 5648970 - DNA, 25 bp, Homo sapien
tctacctaactggtgtgggactagc

SEQ ID NO: 5648971 - DNA, 25 bp, Homo sapien
gctgtcagcaagagggctgccattc

SEQ ID NO: 5648972 - DNA, 25 bp, Homo sapien
aagtgctctctgaagtctacagact

SEQ ID NO: 5648973 - DNA, 25 bp, Homo sapien
gagagcggctctacagtcaaccgcc

SEQ ID NO: 5648974 - DNA, 25 bp, Homo sapien
gccattccctgagatgttgtaaatc

SEQ ID NO: 5648975 - DNA, 25 bp, Homo sapien
caagcatagagagcagaaatgccag

SEQ ID NO: 5648976 - DNA, 25 bp, Homo sapien
ttcccttagaggaacatggctcctt

SEQ ID NO: 5648977 - DNA, 25 bp, Homo sapien
cccttgagtcaaacctgggtgtcag

SEQ ID NO: 5648978 - DNA, 25 bp, Homo sapien
tgggagactgatgggaagcttccat

SEQ ID NO: 5648979 - DNA, 25 bp, Homo sapien
caagtcactggccaataatcgcagg

SEQ ID NO: 5648980 - DNA, 25 bp, Homo sapien
tccaaaccagtatttggtcttcagt

SEQ ID NO: 5648981 - DNA, 25 bp, Homo sapien
ggagcggcggagatggggcagggaa

SEQ ID NO: 5648982 - DNA, 25 bp, Homo sapien
atttcggtgatatccaggtcagctg

SEQ ID NO: 5648983 - DNA, 25 bp, Homo sapien
tccagggcctgtttgtttcctccaa

SEQ ID NO: 5648984 - DNA, 25 bp, Homo sapien
actgggtagggacgaggagggcgga

SEQ ID NO: 5648985 - DNA, 25 bp, Homo sapien
aggattcagctgggagactgatggg

SEQ ID NO: 5648986 - DNA, 25 bp, Homo sapien
tcgccccctcaactgcaggcagggc

SEQ ID NO: 5648987 - DNA, 25 bp, Homo sapien
acagttcccttatccaaatttccac

SEQ ID NO: 5648988 - DNA, 25 bp, Homo sapien
ctgagttctcttcttggatggagga

SEQ ID NO: 5648989 - DNA, 25 bp, Homo sapien
tgaattcccttagaggaacatggct

SEQ ID NO: 5648990 - DNA, 25 bp, Homo sapien
acttcagaactactgggcacagcag

SEQ ID NO: 5648991 - DNA, 25 bp, Homo sapien
tggggatgaggactctagttctcaa

SEQ ID NO: 5648992 - DNA, 25 bp, Homo sapien
acggtcgaagtctttcagaaaggag

SEQ ID NO: 5648993 - DNA, 25 bp, Homo sapien
ccaatcggcccacggctggggtaac

SEQ ID NO: 5648994 - DNA, 25 bp, Homo sapien
ggtcccagaagtgcccattaaaagt

SEQ ID NO: 5648995 - DNA, 25 bp, Homo sapien
ccctgagatgttgtaaatccgctct

SEQ ID NO: 5648996 - DNA, 25 bp, Homo sapien
cgcaggccaggggtcttgaagaccc

SEQ ID NO: 5648997 - DNA, 25 bp, Homo sapien
gcctgtctgactcaatttgcttgat

SEQ ID NO: 5648998 - DNA, 25 bp, Homo sapien
aggcaaaaggcagcagctcagagag

SEQ ID NO: 5648999 - DNA, 25 bp, Homo sapien
gaaagccatgtgccttcaagcctgg

SEQ ID NO: 5649000 - DNA, 25 bp, Homo sapien
agcagtgactgggatcagctgggat

SEQ ID NO: 5649001 - DNA, 25 bp, Homo sapien
gctcacttatctgagcctaaacctc

SEQ ID NO: 5649002 - DNA, 25 bp, Homo sapien
cctgaattcccttagaggaacatgg

SEQ ID NO: 5649003 - DNA, 25 bp, Homo sapien
acctttcgtgttttggcagatttca

SEQ ID NO: 5649004 - DNA, 25 bp, Homo sapien
gagttgcaggaggcaaaaggcagca

SEQ ID NO: 5649005 - DNA, 25 bp, Homo sapien
aatgaggccaccaagcaagtcacac

SEQ ID NO: 5649006 - DNA, 25 bp, Homo sapien
agagagaagtgctctctgaagtcta

SEQ ID NO: 5649007 - DNA, 25 bp, Homo sapien
ccagtatttggtcttcagtaaacag

SEQ ID NO: 5649008 - DNA, 25 bp, Homo sapien
gttatccacctccttgaggaggttc

SEQ ID NO: 5649009 - DNA, 25 bp, Homo sapien
gtgggactagcacgtctgaattcct

SEQ ID NO: 5649010 - DNA, 25 bp, Homo sapien
agggtagacggacatgttccctact

SEQ ID NO: 5649011 - DNA, 25 bp, Homo sapien
ttcttcgccccctcaactgcaggca

SEQ ID NO: 5649012 - DNA, 25 bp, Homo sapien
cttagaggaacatggctccttgctc

SEQ ID NO: 5649013 - DNA, 25 bp, Homo sapien
ataacaaataccacagagagcccta

SEQ ID NO: 5649014 - DNA, 25 bp, Homo sapien
cttagaacatagcacatgattctcc

SEQ ID NO: 5649015 - DNA, 25 bp, Homo sapien
taactagggaggtagaagagcaaga

SEQ ID NO: 5649016 - DNA, 25 bp, Homo sapien
aagaagtcgccaggcacgtacctgc

SEQ ID NO: 5649017 - DNA, 25 bp, Homo sapien
ctgctgccaactgtcctgctctgct

SEQ ID NO: 5649018 - DNA, 25 bp, Homo sapien
ggcgagacggttggagagcttctta

SEQ ID NO: 5649019 - DNA, 25 bp, Homo sapien
tccaggtcagctgttgccgcctctt

SEQ ID NO: 5649020 - DNA, 25 bp, Homo sapien
actaactagggaggtagaagagcaa

SEQ ID NO: 5649021 - DNA, 25 bp, Homo sapien
aggcgagcttccgcctccgtaagga

SEQ ID NO: 5649022 - DNA, 25 bp, Homo sapien
ctagcacgtctgaattcctgaattc

SEQ ID NO: 5649023 - DNA, 25 bp, Homo sapien
ctgttcccatgaaccccataagaga

SEQ ID NO: 5649024 - DNA, 25 bp, Homo sapien
ccttcaagcctggggatgaggactc

SEQ ID NO: 5649025 - DNA, 25 bp, Homo sapien
ggctgcggggagcggcggagatggg

SEQ ID NO: 5649026 - DNA, 25 bp, Homo sapien
gactcaatttgcttgattcgtattt

SEQ ID NO: 5649027 - DNA, 25 bp, Homo sapien
tgctccacaagcagacttcagaact

SEQ ID NO: 5649028 - DNA, 25 bp, Homo sapien
aacttcacactcaaacaataagcct

SEQ ID NO: 5649029 - DNA, 25 bp, Homo sapien
tcttggccacccgactactgccctt

SEQ ID NO: 5649030 - DNA, 25 bp, Homo sapien
ttcggtgatatccaggtcagctgtt

SEQ ID NO: 5649031 - DNA, 25 bp, Homo sapien
tccagggcagagaggctggctggag

SEQ ID NO: 5649032 - DNA, 25 bp, Homo sapien
aagtcccactgaccacctcccacag

SEQ ID NO: 5649033 - DNA, 25 bp, Homo sapien
ggggagcggcggagatggggcaggg

SEQ ID NO: 5649034 - DNA, 25 bp, Homo sapien
tgatgggaagcttccatggcatggc

SEQ ID NO: 5649035 - DNA, 25 bp, Homo sapien
cacctccttgaggaggttctgcctg

SEQ ID NO: 5649036 - DNA, 25 bp, Homo sapien
tcagtaaacagggataaacataaaa

SEQ ID NO: 5649037 - DNA, 25 bp, Homo sapien
gaagtctttcagaaaggaggcgagc

SEQ ID NO: 5649038 - DNA, 25 bp, Homo sapien
cacatgattctccagggcagagagg

SEQ ID NO: 5649039 - DNA, 25 bp, Homo sapien
ctaccctctcatggcccagagctca

SEQ ID NO: 5649040 - DNA, 25 bp, Homo sapien
agtcaaccgccacccaattcaaact

SEQ ID NO: 5649041 - DNA, 25 bp, Homo sapien
aaaacctccagaatctgggccctac

SEQ ID NO: 5649042 - DNA, 25 bp, Homo sapien
aaatgccagatgcagaggttctctg

SEQ ID NO: 5649043 - DNA, 25 bp, Homo sapien
agtgaggaagatctctttgctgtca

SEQ ID NO: 5649044 - DNA, 25 bp, Homo sapien
catggcgctcggcggaggctgcggg

SEQ ID NO: 5649045 - DNA, 25 bp, Homo sapien
caagccagttcatctcgcgcagagc

SEQ ID NO: 5649046 - DNA, 25 bp, Homo sapien
ggcctctggatccagctgggcaata

SEQ ID NO: 5649047 - DNA, 25 bp, Homo sapien
gggtgtctgaatagcttctgctgtt

SEQ ID NO: 5649048 - DNA, 25 bp, Homo sapien
gagagcagaaatgccagatgcagag

SEQ ID NO: 5649049 - DNA, 25 bp, Homo sapien
tgccaactgtcctgctctgctgatc

SEQ ID NO: 5649050 - DNA, 25 bp, Homo sapien
gccccctcaactgcaggcagggcag

SEQ ID NO: 5649051 - DNA, 25 bp, Homo sapien
tgaggaagatctctttgctgtcagc

SEQ ID NO: 5649052 - DNA, 25 bp, Homo sapien
catttgtgggtccgtatgctgctgc

SEQ ID NO: 5649053 - DNA, 25 bp, Homo sapien
tcctgctgctggagtacgcaggcca

SEQ ID NO: 5649054 - DNA, 25 bp, Homo sapien
ggccccagcaagcagtgactgggat

SEQ ID NO: 5649055 - DNA, 25 bp, Homo sapien
cctgctctgctgatctgtacagttc

SEQ ID NO: 5649056 - DNA, 25 bp, Homo sapien
taccacagagagccctacatgagaa

SEQ ID NO: 5649057 - DNA, 25 bp, Homo sapien
caggccaggggtcttgaagaccctt

SEQ ID NO: 5649058 - DNA, 25 bp, Homo sapien
cacgtctgaattcctgaattccctt

SEQ ID NO: 5649059 - DNA, 25 bp, Homo sapien
ccgactactgcccttcctaggagcc

SEQ ID NO: 5649060 - DNA, 25 bp, Homo sapien
agagggtagacggacatgttcccta

SEQ ID NO: 5649061 - DNA, 25 bp, Homo sapien
ccccaggcacaggcacacatggaat

SEQ ID NO: 5649062 - DNA, 25 bp, Homo sapien
cggacatgttccctactgaggtcac

SEQ ID NO: 5649063 - DNA, 25 bp, Homo sapien
tggtcttgttgcaaaataataacaa

SEQ ID NO: 5649064 - DNA, 25 bp, Homo sapien
cttgtatggactgagttctcttctt

SEQ ID NO: 5649065 - DNA, 25 bp, Homo sapien
aatgtttcccaaggcctctggatcc

SEQ ID NO: 5649066 - DNA, 25 bp, Homo sapien
tccttgctctggaacttcacactca

SEQ ID NO: 5649067 - DNA, 25 bp, Homo sapien
agggctgccattccctgagatgttg

SEQ ID NO: 5649068 - DNA, 25 bp, Homo sapien
agaggctggctggagaatgaggacc

SEQ ID NO: 5649069 - DNA, 25 bp, Homo sapien
tacctgtattacctttcgtgttttg

SEQ ID NO: 5649070 - DNA, 25 bp, Homo sapien
agcaagaaactgggtagggacgagg

SEQ ID NO: 5649071 - DNA, 25 bp, Homo sapien
gttctcttcttggatggaggacacc

SEQ ID NO: 5649072 - DNA, 25 bp, Homo sapien
aagggcgaagtagtcaagccagttc

SEQ ID NO: 5649073 - DNA, 25 bp, Homo sapien
gcggagatggggcagggaagcaaga

SEQ ID NO: 5649074 - DNA, 25 bp, Homo sapien
ctactgaggtcactgctgccaactg

SEQ ID NO: 5649075 - DNA, 25 bp, Homo sapien
gttttactaaaatggtcttgttgca

SEQ ID NO: 5649076 - DNA, 25 bp, Homo sapien
ggggagccgcaggatctcgatgttg

SEQ ID NO: 5649077 - DNA, 25 bp, Homo sapien
ctgctgactctgcttaacaaagtcc

SEQ ID NO: 5649078 - DNA, 25 bp, Homo sapien
gaccactggaccatggatagcttag

SEQ ID NO: 5649079 - DNA, 25 bp, Homo sapien
cccggtctcaagcatagagagcaga

SEQ ID NO: 5649080 - DNA, 25 bp, Homo sapien
tggatggaggacaccttttgactct

SEQ ID NO: 5649081 - DNA, 25 bp, Homo sapien
gggatgggagggtgaacagacagct

SEQ ID NO: 5649082 - DNA, 25 bp, Homo sapien
gccagtgagagagagcggctctaca

SEQ ID NO: 5649083 - DNA, 25 bp, Homo sapien
cttagagacagttattctgtggcca

SEQ ID NO: 5649084 - DNA, 25 bp, Homo sapien
ctgagcctaaacctcccggtctcaa

SEQ ID NO: 5649085 - DNA, 25 bp, Homo sapien
ggcccacggctggggtaacagtgtt

SEQ ID NO: 5649086 - DNA, 25 bp, Homo sapien
aacctccagaatctgggccctacag

SEQ ID NO: 5649087 - DNA, 25 bp, Homo sapien
ccctaagtcccactgaccacctccc

SEQ ID NO: 5649088 - DNA, 25 bp, Homo sapien
aactgtcctgctctgctgatctgta

SEQ ID NO: 5649089 - DNA, 25 bp, Homo sapien
aatgacataaaacctccagaatctg

SEQ ID NO: 5649090 - DNA, 25 bp, Homo sapien
ttcatctcgcgcagagccttgggga

SEQ ID NO: 5649091 - DNA, 25 bp, Homo sapien
catgagtgcgagagggtagacggac

SEQ ID NO: 5649092 - DNA, 25 bp, Homo sapien
tggcatggccccagcaagcagtgac

SEQ ID NO: 5649093 - DNA, 25 bp, Homo sapien
tcacactcaaacaataagcctgaag

SEQ ID NO: 5649094 - DNA, 25 bp, Homo sapien
gaatgaggacctcactgctgactct

SEQ ID NO: 5649095 - DNA, 25 bp, Homo sapien
tgcagatttgggcgagacggttgga

SEQ ID NO: 5649096 - DNA, 25 bp, Homo sapien
gagagcagggaggattcagctggga

SEQ ID NO: 5649097 - DNA, 25 bp, Homo sapien
gataaacataaaacactgctccaca

SEQ ID NO: 5649098 - DNA, 25 bp, Homo sapien
tggtttgaccatggacacctccaat

SEQ ID NO: 5649099 - DNA, 25 bp, Homo sapien
gtctgactcaatttgcttgattcgt

SEQ ID NO: 5649100 - DNA, 25 bp, Homo sapien
aataagcctgaagggaagaagtctc

SEQ ID NO: 5649101 - DNA, 25 bp, Homo sapien
ggggaccacccgaagaagtcgccag

SEQ ID NO: 5649102 - DNA, 25 bp, Homo sapien
cagcagctcagagagcagggaggat

SEQ ID NO: 5649103 - DNA, 25 bp, Homo sapien
caagcctggggatgaggactctagt

SEQ ID NO: 5649104 - DNA, 25 bp, Homo sapien
tctccaaaccagtatttggtcttca

SEQ ID NO: 5649105 - DNA, 25 bp, Homo sapien
gggatgaggactctagttctcaaat

SEQ ID NO: 5649106 - DNA, 25 bp, Homo sapien
cctcaactgcaggcagggcagggtg

SEQ ID NO: 5649107 - DNA, 25 bp, Homo sapien
ctcaaattcttagaacatagcacat

SEQ ID NO: 5649108 - DNA, 25 bp, Homo sapien
agtgcgagagggtagacggacatgt

SEQ ID NO: 5649109 - DNA, 25 bp, Homo sapien
agcaagagggctgccattccctgag

SEQ ID NO: 5649110 - DNA, 25 bp, Homo sapien
gctggagaatgaggacctcactgct

SEQ ID NO: 5649111 - DNA, 25 bp, Homo sapien
cagaatctgggccctacagttccct

SEQ ID NO: 5649112 - DNA, 25 bp, Homo sapien
acataaaacctccagaatctgggcc

SEQ ID NO: 5649113 - DNA, 25 bp, Homo sapien
gtcaagccagttcatctcgcgcaga

SEQ ID NO: 5649114 - DNA, 25 bp, Homo sapien
ttcgtatttccacttcacggtcgaa

SEQ ID NO: 5649115 - DNA, 25 bp, Homo sapien
agcttagagacagttattctgtggc

SEQ ID NO: 5649116 - DNA, 25 bp, Homo sapien
gggctgagcaaaacctcgctgtgcc

SEQ ID NO: 5649117 - DNA, 25 bp, Homo sapien
tggtgtctcatttgtgggtccgtat

SEQ ID NO: 5649118 - DNA, 25 bp, Homo sapien
ccttctggacctaccctctcatggc

SEQ ID NO: 5649119 - DNA, 25 bp, Homo sapien
ggagggtgaacagacagctctacct

SEQ ID NO: 5649120 - DNA, 25 bp, Homo sapien
ggagagcttcttaatgtttcccaag

SEQ ID NO: 5649121 - DNA, 25 bp, Homo sapien
aaatccgctctcctgctgctggagt

SEQ ID NO: 5649122 - DNA, 25 bp, Homo sapien
ccctactgaggtcactgctgccaac

SEQ ID NO: 5649123 - DNA, 25 bp, Homo sapien
agcctgaagggaagaagtctcttca

SEQ ID NO: 5649124 - DNA, 25 bp, Homo sapien
gcctcttccagggcctgtttgtttc

SEQ ID NO: 5649125 - DNA, 25 bp, Homo sapien
ccacaagcagacttcagaactactg

SEQ ID NO: 5649126 - DNA, 25 bp, Homo sapien
tcggcccacggctggggtaacagtg

SEQ ID NO: 5649127 - DNA, 25 bp, Homo sapien
gtaaggagttggtcttggccacccg

SEQ ID NO: 5649128 - DNA, 25 bp, Homo sapien
gtcatgagtgcgagagggtagacgg

SEQ ID NO: 5649129 - DNA, 25 bp, Homo sapien
tgtattacctttcgtgttttggcag

SEQ ID NO: 5649130 - DNA, 25 bp, Homo sapien
cccttcctaggagccatggcgctcg

SEQ ID NO: 5649131 - DNA, 25 bp, Homo sapien
ctgtctgactcaatttgcttgattc

SEQ ID NO: 5649132 - DNA, 25 bp, Homo sapien
ttcccttatccaaatttccactaac

SEQ ID NO: 5649133 - DNA, 25 bp, Homo sapien
acagagagccctacatgagaaagcc

SEQ ID NO: 5649134 - DNA, 25 bp, Homo sapien
gccaataatcgcaggctctctccgc

SEQ ID NO: 5649135 - DNA, 25 bp, Homo sapien
gatgaggactctagttctcaaattc

SEQ ID NO: 5649136 - DNA, 25 bp, Homo sapien
gggaagcaagaaactgggtagggac

SEQ ID NO: 5649137 - DNA, 25 bp, Homo sapien
gactctagttctcaaattcttagaa

SEQ ID NO: 5649138 - DNA, 25 bp, Homo sapien
agactgatgggaagcttccatggca

SEQ ID NO: 5649139 - DNA, 25 bp, Homo sapien
tcaggggtgtctgaatagcttctgc

SEQ ID NO: 5649140 - DNA, 25 bp, Homo sapien
gagacagttattctgtggccaatga

SEQ ID NO: 5649141 - DNA, 25 bp, Homo sapien
ggagccgcaggatctcgatgttgta

SEQ ID NO: 5649142 - DNA, 25 bp, Homo sapien
actggccaataatcgcaggctctct

SEQ ID NO: 5649143 - DNA, 25 bp, Homo sapien
tcccatgaaccccataagagagaag

SEQ ID NO: 5649144 - DNA, 25 bp, Homo sapien
cggaggctgcggggagcggcggaga

SEQ ID NO: 5649145 - DNA, 25 bp, Homo sapien
agggaggattcagctgggagactga

SEQ ID NO: 5649146 - DNA, 25 bp, Homo sapien
acaccttttgactcttgcagtttga

SEQ ID NO: 5649147 - DNA, 25 bp, Homo sapien
atagcacatgattctccagggcaga

SEQ ID NO: 5649148 - DNA, 25 bp, Homo sapien
ggtagaagagcaagacatggaagtt

SEQ ID NO: 5649149 - DNA, 25 bp, Homo sapien
gtcttcagtaaacagggataaacat

SEQ ID NO: 5649150 - DNA, 25 bp, Homo sapien
gttagcacggcttgaccttttccct

SEQ ID NO: 5649151 - DNA, 25 bp, Homo sapien
cgtgttttggcagatttcaggggtg

SEQ ID NO: 5649152 - DNA, 25 bp, Homo sapien
aggaggaggaagaggagggctggta

SEQ ID NO: 5649153 - DNA, 25 bp, Homo sapien
ttaatgtttcccaaggcctctggat

SEQ ID NO: 5649154 - DNA, 25 bp, Homo sapien
agcttcttaatgtttcccaaggcct

SEQ ID NO: 5649155 - DNA, 25 bp, Homo sapien
tagggacgaggagggcggacgggga

SEQ ID NO: 5649156 - DNA, 25 bp, Homo sapien
ctggaacttcacactcaaacaataa

SEQ ID NO: 5649157 - DNA, 25 bp, Homo sapien
tcaactgcaggcagggcagggtgaa

SEQ ID NO: 5649158 - DNA, 25 bp, Homo sapien
tgatctgtacagttccccccacctt

SEQ ID NO: 5649159 - DNA, 25 bp, Homo sapien
gaagtcgccaggcacgtacctgcgg

SEQ ID NO: 5649160 - DNA, 25 bp, Homo sapien
acctgggtgtcaggcctggagttgg

SEQ ID NO: 5649161 - DNA, 25 bp, Homo sapien
tagggaggtagaagagcaagacatg

SEQ ID NO: 5649162 - DNA, 25 bp, Homo sapien
cagtgactgggatcagctgggatgg

SEQ ID NO: 5649163 - DNA, 25 bp, Homo sapien
tgggcgagacggttggagagcttct

SEQ ID NO: 5649164 - DNA, 25 bp, Homo sapien
gaagcttccatggcatggccccagc

SEQ ID NO: 5649165 - DNA, 25 bp, Homo sapien
gaggttctctgggtagcggtggtgg

SEQ ID NO: 5649166 - DNA, 25 bp, Homo sapien
cagtcttcctgagaacacagggttc

SEQ ID NO: 5649167 - DNA, 25 bp, Homo sapien
cccaccttctggacctaccctctca

SEQ ID NO: 5649168 - DNA, 25 bp, Homo sapien
tatgctgctgcagatttgggcgaga

SEQ ID NO: 5649169 - DNA, 25 bp, Homo sapien
tagcacggcttgaccttttcccttt

SEQ ID NO: 5649170 - DNA, 25 bp, Homo sapien
tggcgctcggcggaggctgcgggga

SEQ ID NO: 5649171 - DNA, 25 bp, Homo sapien
tctcctgctgctggagtacgcaggc

SEQ ID NO: 5649172 - DNA, 25 bp, Homo sapien
tcctaggagccatggcgctcggcgg

SEQ ID NO: 5649173 - DNA, 25 bp, Homo sapien
caagacatggaagttgtctccaaac

SEQ ID NO: 5649174 - DNA, 25 bp, Homo sapien
gctcggcggaggctgcggggagcgg

SEQ ID NO: 5649175 - DNA, 25 bp, Homo sapien
acaataagcctgaagggaagaagtc

SEQ ID NO: 5649176 - DNA, 25 bp, Homo sapien
ctgggcacagcaggtgaaagatccc

SEQ ID NO: 5649177 - DNA, 25 bp, Homo sapien
acactcaaacaataagcctgaaggg

SEQ ID NO: 5649178 - DNA, 25 bp, Homo sapien
gtagaggttatccacctccttgagg

SEQ ID NO: 5649179 - DNA, 25 bp, Homo sapien
caaataccacagagagccctacatg

SEQ ID NO: 5649180 - DNA, 25 bp, Homo sapien
aattcctgaattcccttagaggaac

SEQ ID NO: 5649181 - DNA, 25 bp, Homo sapien
acacatggaatgaggccaccaagca

SEQ ID NO: 5649182 - DNA, 25 bp, Homo sapien
gcagctcagagagcagggaggattc

SEQ ID NO: 5649183 - DNA, 25 bp, Homo sapien
gactgggatcagctgggatgggagg

SEQ ID NO: 5649184 - DNA, 25 bp, Homo sapien
acatggaagttgtctccaaaccagt

SEQ ID NO: 5649185 - DNA, 25 bp, Homo sapien
acaggcacacatggaatgaggccac

SEQ ID NO: 5649186 - DNA, 25 bp, Homo sapien
attctccagggcagagaggctggct

SEQ ID NO: 5649187 - DNA, 25 bp, Homo sapien
ccacctcccacaggaggaggaggag

SEQ ID NO: 5649188 - DNA, 25 bp, Homo sapien
taaacataaaacactgctccacaag

SEQ ID NO: 5649189 - DNA, 25 bp, Homo sapien
tagacggacatgttccctactgagg

SEQ ID NO: 5649190 - DNA, 25 bp, Homo sapien
tcactggccaataatcgcaggctct

SEQ ID NO: 5649191 - DNA, 25 bp, Homo sapien
gactagcacgtctgaattcctgaat

SEQ ID NO: 5649192 - DNA, 25 bp, Homo sapien
ggcagggaagcaagaaactgggtag

SEQ ID NO: 5649193 - DNA, 25 bp, Homo sapien
tttgtttcctccaagggcgaagtag

SEQ ID NO: 5649194 - DNA, 25 bp, Homo sapien
catggctccttgctctggaacttca

SEQ ID NO: 5649195 - DNA, 25 bp, Homo sapien
accttttgactcttgcagtttgaag

SEQ ID NO: 5649196 - DNA, 25 bp, Homo sapien
cctgtttgtttcctccaagggcgaa

SEQ ID NO: 5649197 - DNA, 25 bp, Homo sapien
agtaaacagggataaacataaaaca

SEQ ID NO: 5649198 - DNA, 25 bp, Homo sapien
gtgtcaggcctggagttggtttgac

SEQ ID NO: 5649199 - DNA, 25 bp, Homo sapien
gagctcacttatctgagcctaaacc

SEQ ID NO: 5649200 - DNA, 25 bp, Homo sapien
cagaggttctctgggtagcggtggt

SEQ ID NO: 5649201 - DNA, 25 bp, Homo sapien
gtcttgaagacccttgagtcaaacc

SEQ ID NO: 5649202 - DNA, 25 bp, Homo sapien
aggcacacatggaatgaggccacca

SEQ ID NO: 5649203 - DNA, 25 bp, Homo sapien
aggaggttctgcctgtctgactcaa

SEQ ID NO: 5649204 - DNA, 25 bp, Homo sapien
gaagagcaagacatggaagttgtct

SEQ ID NO: 5649205 - DNA, 25 bp, Homo sapien
tttccttttccttgtatggactgag

SEQ ID NO: 5649206 - DNA, 25 bp, Homo sapien
aattcttagaacatagcacatgatt

SEQ ID NO: 5649207 - DNA, 25 bp, Homo sapien
cgaagaagtcgccaggcacgtacct

SEQ ID NO: 5649208 - DNA, 25 bp, Homo sapien
tcgatgttgtagaggttatccacct

SEQ ID NO: 5649209 - DNA, 25 bp, Homo sapien
gaccatggatagcttagagacagtt

SEQ ID NO: 5649210 - DNA, 25 bp, Homo sapien
caggaggcaaaaggcagcagctcag

SEQ ID NO: 5649211 - DNA, 25 bp, Homo sapien
aggaggaggaggaggaagaggaggg

SEQ ID NO: 5649212 - DNA, 25 bp, Homo sapien
gccatgtgccttcaagcctggggat

SEQ ID NO: 5649213 - DNA, 25 bp, Homo sapien
tacgcaggccaggggtcttgaagac

SEQ ID NO: 5649214 - DNA, 25 bp, Homo sapien
cacgtacctgcggtcccgagacaag

SEQ ID NO: 5649215 - DNA, 25 bp, Homo sapien
tgaggaggttctgcctgtctgactc

SEQ ID NO: 5649216 - DNA, 25 bp, Homo sapien
gccaccaagcaagtcacacccgccc

SEQ ID NO: 5649217 - DNA, 25 bp, Homo sapien
agcacgtctgaattcctgaattccc

SEQ ID NO: 5649218 - DNA, 25 bp, Homo sapien
agtctttcagaaaggaggcgagctt

SEQ ID NO: 5649219 - DNA, 25 bp, Homo sapien
ctgttgccgcctcttccagggcctg

SEQ ID NO: 5649220 - DNA, 25 bp, Homo sapien
ctgctgcagatttgggcgagacggt

SEQ ID NO: 5649221 - DNA, 25 bp, Homo sapien
gctctctgaagtctacagacttggc

SEQ ID NO: 5649222 - DNA, 25 bp, Homo sapien
gtgtctcatttgtgggtccgtatgc

SEQ ID NO: 5649223 - DNA, 25 bp, Homo sapien
gtcttgttgcaaaataataacaaat

SEQ ID NO: 5649224 - DNA, 25 bp, Homo sapien
agctgggatgggagggtgaacagac

SEQ ID NO: 5649225 - DNA, 25 bp, Homo sapien
aaagatccctaagtcccactgacca

SEQ ID NO: 5649226 - DNA, 25 bp, Homo sapien
actgaggtcactgctgccaactgtc

SEQ ID NO: 5649227 - DNA, 25 bp, Homo sapien
ggaccacccgaagaagtcgccaggc

SEQ ID NO: 5649228 - DNA, 25 bp, Homo sapien
gagcggctctacagtcaaccgccac

SEQ ID NO: 5649229 - DNA, 25 bp, Homo sapien
ggcctggagttggtttgaccatgga

SEQ ID NO: 5649230 - DNA, 25 bp, Homo sapien
agttcccttatccaaatttccacta

SEQ ID NO: 5649231 - DNA, 25 bp, Homo sapien
agacatggaagttgtctccaaacca

SEQ ID NO: 5649232 - DNA, 25 bp, Homo sapien
tgactctgcttaacaaagtccatgc

SEQ ID NO: 5649233 - DNA, 25 bp, Homo sapien
tgtgcctctgcaagtcactggccaa

SEQ ID NO: 5649234 - DNA, 25 bp, Homo sapien
ttggcagggaccactggaccatgga

SEQ ID NO: 5649235 - DNA, 25 bp, Homo sapien
aaggcctctggatccagctgggcaa

SEQ ID NO: 5649236 - DNA, 25 bp, Homo sapien
ttgattcgtatttccacttcacggt

SEQ ID NO: 5649237 - DNA, 25 bp, Homo sapien
gttgtctccaaaccagtatttggtc

SEQ ID NO: 5649238 - DNA, 25 bp, Homo sapien
ggacctcactgctgactctgcttaa

SEQ ID NO: 5649239 - DNA, 25 bp, Homo sapien
ttcgtgttttggcagatttcagggg

SEQ ID NO: 5649240 - DNA, 25 bp, Homo sapien
gacagctctacctaactggtgtggg

SEQ ID NO: 5649241 - DNA, 25 bp, Homo sapien
tgaacagacagctctacctaactgg

SEQ ID NO: 5649242 - DNA, 25 bp, Homo sapien
atggatagcttagagacagttattc

SEQ ID NO: 5649243 - DNA, 25 bp, Homo sapien
gtcttcctgagaacacagggttctt

SEQ ID NO: 5649244 - DNA, 25 bp, Homo sapien
ggaggaggaggaagaggagggctgg

SEQ ID NO: 5649245 - DNA, 25 bp, Homo sapien
cgtatgctgctgcagatttgggcga

SEQ ID NO: 5649246 - DNA, 25 bp, Homo sapien
agtcactggccaataatcgcaggct

SEQ ID NO: 5649247 - DNA, 25 bp, Homo sapien
agcaagcagtgactgggatcagctg

SEQ ID NO: 5649248 - DNA, 25 bp, Homo sapien
gattcagctgggagactgatgggaa

SEQ ID NO: 5649249 - DNA, 25 bp, Homo sapien
aaagtccatgccccaggcacaggca

SEQ ID NO: 5649250 - DNA, 25 bp, Homo sapien
ggccaatgacataaaacctccagaa

SEQ ID NO: 5649251 - DNA, 25 bp, Homo sapien
ctgtgccagtgagagagagcggctc

SEQ ID NO: 5649252 - DNA, 25 bp, Homo sapien
cttatccaaatttccactaactagg

SEQ ID NO: 5649253 - DNA, 25 bp, Homo sapien
cagagagcagggaggattcagctgg

SEQ ID NO: 5649254 - DNA, 25 bp, Homo sapien
gggaggtagaagagcaagacatgga

SEQ ID NO: 5649255 - DNA, 25 bp, Homo sapien
tagagacagttattctgtggccaat

SEQ ID NO: 5649256 - DNA, 25 bp, Homo sapien
ctccacaagcagacttcagaactac

SEQ ID NO: 5649257 - DNA, 25 bp, Homo sapien
gtaacagtgttagcacggcttgacc

SEQ ID NO: 5649258 - DNA, 25 bp, Homo sapien
gaggcagtcttcctgagaacacagg

SEQ ID NO: 5649259 - DNA, 25 bp, Homo sapien
gaggacaccttttgactcttgcagt

SEQ ID NO: 5649260 - DNA, 25 bp, Homo sapien
cacttcacggtcgaagtctttcaga

SEQ ID NO: 5649261 - DNA, 25 bp, Homo sapien
gggtaacagtgttagcacggcttga

SEQ ID NO: 5649262 - DNA, 25 bp, Homo sapien
ttggcagatttcaggggtgtctgaa

SEQ ID NO: 5649263 - DNA, 25 bp, Homo sapien
ttcagctgggagactgatgggaagc

SEQ ID NO: 5649264 - DNA, 25 bp, Homo sapien
tgcagaggttctctgggtagcggtg

SEQ ID NO: 5649265 - DNA, 25 bp, Homo sapien
aagtgcccattaaaagtccatcctg

SEQ ID NO: 5649266 - DNA, 25 bp, Homo sapien
aattcccttagaggaacatggctcc

SEQ ID NO: 5649267 - DNA, 25 bp, Homo sapien
agtcaaacctgggtgtcaggcctgg

SEQ ID NO: 5649268 - DNA, 25 bp, Homo sapien
atgagaaagccatgtgccttcaagc

SEQ ID NO: 5649269 - DNA, 25 bp, Homo sapien
tgttgcaaaataataacaaatacca

SEQ ID NO: 5649270 - DNA, 25 bp, Homo sapien
agcttctgctgttagtttgtttatt

SEQ ID NO: 5649271 - DNA, 25 bp, Homo sapien
cagggataaacataaaacactgctc

SEQ ID NO: 5649272 - DNA, 25 bp, Homo sapien
gttggtttgaccatggacacctcca

SEQ ID NO: 5649273 - DNA, 25 bp, Homo sapien
tttgggcgagacggttggagagctt

SEQ ID NO: 5649274 - DNA, 25 bp, Homo sapien
acatggaatgaggccaccaagcaag

SEQ ID NO: 5649275 - DNA, 25 bp, Homo sapien
tcagctgggatgggagggtgaacag

SEQ ID NO: 5649276 - DNA, 25 bp, Homo sapien
ctcgctgtgccagtgagagagagcg

SEQ ID NO: 5649277 - DNA, 25 bp, Homo sapien
atttcatctacctgtattacctttc

SEQ ID NO: 5649278 - DNA, 25 bp, Homo sapien
aagcagacttcagaactactgggca

SEQ ID NO: 5649279 - DNA, 25 bp, Homo sapien
agtatttggtcttcagtaaacaggg

SEQ ID NO: 5649280 - DNA, 25 bp, Homo sapien
tggggtaacagtgttagcacggctt

SEQ ID NO: 5649281 - DNA, 25 bp, Homo sapien
tggactgagttctcttcttggatgg

SEQ ID NO: 5649282 - DNA, 25 bp, Homo sapien
gtgcccattaaaagtccatcctgtc

SEQ ID NO: 5649283 - DNA, 25 bp, Homo sapien
cttccatggcatggccccagcaagc

SEQ ID NO: 5649284 - DNA, 25 bp, Homo sapien
tgctgttagtttgtttatttcggtg

SEQ ID NO: 5649285 - DNA, 25 bp, Homo sapien
ttcaagcctggggatgaggactcta

SEQ ID NO: 5649286 - DNA, 25 bp, Homo sapien
tcttgcagtttgaagattcttacgt

SEQ ID NO: 5649287 - DNA, 25 bp, Homo sapien
aggatgttgagttgcaggaggcaaa

SEQ ID NO: 5649288 - DNA, 25 bp, Homo sapien
gaagaagtctcttcagggtcccaga

SEQ ID NO: 5649289 - DNA, 25 bp, Homo sapien
tgacataaaacctccagaatctggg

SEQ ID NO: 5649290 - DNA, 25 bp, Homo sapien
cttcacggtcgaagtctttcagaaa

SEQ ID NO: 5649291 - DNA, 25 bp, Homo sapien
tttggtcttcagtaaacagggataa

SEQ ID NO: 5649292 - DNA, 25 bp, Homo sapien
aggaagatctctttgctgtcagcaa

SEQ ID NO: 5649293 - DNA, 25 bp, Homo sapien
gagccatggcgctcggcggaggctg

SEQ ID NO: 5649294 - DNA, 25 bp, Homo sapien
ccacagagagccctacatgagaaag

SEQ ID NO: 5649295 - DNA, 25 bp, Homo sapien
ctacatgagaaagccatgtgccttc

SEQ ID NO: 5649296 - DNA, 25 bp, Homo sapien
ttgcttgattcgtatttccacttca

SEQ ID NO: 5649297 - DNA, 25 bp, Homo sapien
tccacttcacggtcgaagtctttca

SEQ ID NO: 5649298 - DNA, 25 bp, Homo sapien
cccataagagagaagtgctctctga

SEQ ID NO: 5649299 - DNA, 25 bp, Homo sapien
actgatgggaagcttccatggcatg

SEQ ID NO: 5649300 - DNA, 25 bp, Homo sapien
cagggtgaagaggatgttgagttgc

SEQ ID NO: 5649301 - DNA, 25 bp, Homo sapien
tcccaaggcctctggatccagctgg

SEQ ID NO: 5649302 - DNA, 25 bp, Homo sapien
acaagggctgagcaaaacctcgctg

SEQ ID NO: 5649303 - DNA, 25 bp, Homo sapien
aggtcactgctgccaactgtcctgc

SEQ ID NO: 5649304 - DNA, 25 bp, Homo sapien
tcagcaagagggctgccattccctg

SEQ ID NO: 5649305 - DNA, 25 bp, Homo sapien
gggaagaagtctcttcagggtccca

SEQ ID NO: 5649306 - DNA, 25 bp, Homo sapien
cctccttgaggaggttctgcctgtc

SEQ ID NO: 5649307 - DNA, 25 bp, Homo sapien
acacctccaatcggcccacggctgg

SEQ ID NO: 5649308 - DNA, 25 bp, Homo sapien
agttctcaaattcttagaacatagc

SEQ ID NO: 5649309 - DNA, 25 bp, Homo sapien
tcatttcatctacctgtattacctt

SEQ ID NO: 5649310 - DNA, 25 bp, Homo sapien
ctcttccagggcctgtttgtttcct

SEQ ID NO: 5649311 - DNA, 25 bp, Homo sapien
aatggtcttgttgcaaaataataac

SEQ ID NO: 5649312 - DNA, 25 bp, Homo sapien
ctgccattccctgagatgttgtaaa

SEQ ID NO: 5649313 - DNA, 25 bp, Homo sapien
tacctgcggtcccgagacaagggct

SEQ ID NO: 5649314 - DNA, 25 bp, Homo sapien
atggacacctccaatcggcccacgg

SEQ ID NO: 5649315 - DNA, 25 bp, Homo sapien
cagtgagagagagcggctctacagt

SEQ ID NO: 5649316 - DNA, 25 bp, Homo sapien
tggatccagctgggcaatactgtgc

SEQ ID NO: 5649317 - DNA, 25 bp, Homo sapien
gggcgaagtagtcaagccagttcat

SEQ ID NO: 5649318 - DNA, 25 bp, Homo sapien
cagggcagagaggctggctggagaa

SEQ ID NO: 5649319 - DNA, 25 bp, Homo sapien
cctctggatccagctgggcaatact

SEQ ID NO: 5649320 - DNA, 25 bp, Homo sapien
acaaagtccatgccccaggcacagg

SEQ ID NO: 5649321 - DNA, 25 bp, Homo sapien
taagcctgaagggaagaagtctctt

SEQ ID NO: 5649322 - DNA, 25 bp, Homo sapien
tatccaaatttccactaactaggga

SEQ ID NO: 5649323 - DNA, 25 bp, Homo sapien
tgctctggaacttcacactcaaaca

SEQ ID NO: 5649324 - DNA, 25 bp, Homo sapien
ttacctttcgtgttttggcagattt

SEQ ID NO: 5649325 - DNA, 25 bp, Homo sapien
cagggcctgtttgtttcctccaagg

SEQ ID NO: 5649326 - DNA, 25 bp, Homo sapien
cctccagaatctgggccctacagtt

SEQ ID NO: 5649327 - DNA, 25 bp, Homo sapien
agctcagagagcagggaggattcag

SEQ ID NO: 5649328 - DNA, 25 bp, Homo sapien
gcatggccccagcaagcagtgactg

SEQ ID NO: 5649329 - DNA, 25 bp, Homo sapien
ctgggtgtcaggcctggagttggtt

SEQ ID NO: 5649330 - DNA, 25 bp, Homo sapien
ggaggaggaggaggaggaagaggag

SEQ ID NO: 5649331 - DNA, 25 bp, Homo sapien
ctggacctaccctctcatggcccag

SEQ ID NO: 5649332 - DNA, 25 bp, Homo sapien
gagcagaaatgccagatgcagaggt

SEQ ID NO: 5649333 - DNA, 25 bp, Homo sapien
agacttcagaactactgggcacagc

SEQ ID NO: 5649334 - DNA, 25 bp, Homo sapien
gcaggatctcgatgttgtagaggtt

SEQ ID NO: 5649335 - DNA, 25 bp, Homo sapien
cgtatttccacttcacggtcgaagt

SEQ ID NO: 5649336 - DNA, 25 bp, Homo sapien
ccctacatgagaaagccatgtgcct

SEQ ID NO: 5649337 - DNA, 25 bp, Homo sapien
cttttccttttccttgtatggactg

SEQ ID NO: 5649338 - DNA, 25 bp, Homo sapien
agtacgcaggccaggggtcttgaag

SEQ ID NO: 5649339 - DNA, 25 bp, Homo sapien
aggagccatggcgctcggcggaggc

SEQ ID NO: 5649340 - DNA, 25 bp, Homo sapien
agaagtgcccattaaaagtccatcc

SEQ ID NO: 5649341 - DNA, 25 bp, Homo sapien
gatccagctgggcaatactgtgcct

SEQ ID NO: 5649342 - DNA, 25 bp, Homo sapien
tgggcaatactgtgcctctgcaagt

SEQ ID NO: 5649343 - DNA, 25 bp, Homo sapien
cttcctaggagccatggcgctcggc

SEQ ID NO: 5649344 - DNA, 25 bp, Homo sapien
caaatttccactaactagggaggta

SEQ ID NO: 5649345 - DNA, 25 bp, Homo sapien
tttcccaaggcctctggatccagct

SEQ ID NO: 5649346 - DNA, 25 bp, Homo sapien
gctggtagggggaggtgtcatgagt

SEQ ID NO: 5649347 - DNA, 25 bp, Homo sapien
cttgaagacccttgagtcaaacctg

SEQ ID NO: 5649348 - DNA, 25 bp, Homo sapien
atggggcagggaagcaagaaactgg

SEQ ID NO: 5649349 - DNA, 25 bp, Homo sapien
tgtttgtttcctccaagggcgaagt

SEQ ID NO: 5649350 - DNA, 25 bp, Homo sapien
gtgatatccaggtcagctgttgccg

SEQ ID NO: 5649351 - DNA, 25 bp, Homo sapien
gacccttgagtcaaacctgggtgtc

SEQ ID NO: 5649352 - DNA, 25 bp, Homo sapien
aggaagaggagggctggtaggggga

SEQ ID NO: 5649353 - DNA, 25 bp, Homo sapien
gatgttgtaaatccgctctcctgct

SEQ ID NO: 5649354 - DNA, 25 bp, Homo sapien
gctgctggagtacgcaggccagggg

SEQ ID NO: 5649355 - DNA, 25 bp, Homo sapien
actgctccacaagcagacttcagaa

SEQ ID NO: 5649356 - DNA, 25 bp, Homo sapien
ccctgttcccatgaaccccataaga

SEQ ID NO: 5649357 - DNA, 25 bp, Homo sapien
tccgccgcccactggcacagtgagg

SEQ ID NO: 5649358 - DNA, 25 bp, Homo sapien
ctaaaatggtcttgttgcaaaataa

SEQ ID NO: 5649359 - DNA, 25 bp, Homo sapien
gggaccactggaccatggatagctt

SEQ ID NO: 5649360 - DNA, 25 bp, Homo sapien
gcctccgtaaggagttggtcttggc

SEQ ID NO: 5649361 - DNA, 25 bp, Homo sapien
tctctgaagtctacagacttggcag

SEQ ID NO: 5649362 - DNA, 25 bp, Homo sapien
cggtggtggaggcagtcttcctgag

SEQ ID NO: 5649363 - DNA, 25 bp, Homo sapien
ctgggccctacagttcccttatcca

SEQ ID NO: 5649364 - DNA, 25 bp, Homo sapien
ctaggagccatggcgctcggcggag

SEQ ID NO: 5649365 - DNA, 25 bp, Homo sapien
agagccctacatgagaaagccatgt

SEQ ID NO: 5649366 - DNA, 25 bp, Homo sapien
aagttgtctccaaaccagtatttgg

SEQ ID NO: 5649367 - DNA, 25 bp, Homo sapien
ctaagtcccactgaccacctcccac

SEQ ID NO: 5649368 - DNA, 25 bp, Homo sapien
tggcacagtgaggaagatctctttg

SEQ ID NO: 5649369 - DNA, 25 bp, Homo sapien
agaggttatccacctccttgaggag

SEQ ID NO: 5649370 - DNA, 25 bp, Homo sapien
caagagggctgccattccctgagat

SEQ ID NO: 5649371 - DNA, 25 bp, Homo sapien
tggctccttgctctggaacttcaca

SEQ ID NO: 5649372 - DNA, 25 bp, Homo sapien
agaggagggctggtagggggaggtg

SEQ ID NO: 5649373 - DNA, 25 bp, Homo sapien
cagggaagcaagaaactgggtaggg

SEQ ID NO: 5649374 - DNA, 25 bp, Homo sapien
aaacctgggtgtcaggcctggagtt

SEQ ID NO: 5649375 - DNA, 25 bp, Homo sapien
tgggtagggacgaggagggcggacg

SEQ ID NO: 5649376 - DNA, 25 bp, Homo sapien
ctgactcaatttgcttgattcgtat

SEQ ID NO: 5649377 - DNA, 25 bp, Homo sapien
gaaactgggtagggacgaggagggc

SEQ ID NO: 5649378 - DNA, 25 bp, Homo sapien
ttatctgagcctaaacctcccggtc

SEQ ID NO: 5649379 - DNA, 25 bp, Homo sapien
cgagagggtagacggacatgttccc

SEQ ID NO: 5649380 - DNA, 25 bp, Homo sapien
catgtgccttcaagcctggggatga

SEQ ID NO: 5649381 - DNA, 25 bp, Homo sapien
aataccacagagagccctacatgag

SEQ ID NO: 5649382 - DNA, 25 bp, Homo sapien
ggaatgaggccaccaagcaagtcac

SEQ ID NO: 5649383 - DNA, 25 bp, Homo sapien
gcaagtcacacccgcccctgttccc

SEQ ID NO: 5649384 - DNA, 25 bp, Homo sapien
ggggcagggaagcaagaaactgggt

SEQ ID NO: 5649385 - DNA, 25 bp, Homo sapien
gatttcaggggtgtctgaatagctt

SEQ ID NO: 5649386 - DNA, 25 bp, Homo sapien
gagcagggaggattcagctgggaga

SEQ ID NO: 5649387 - DNA, 25 bp, Homo sapien
caataatcgcaggctctctccgccg

SEQ ID NO: 5649388 - DNA, 25 bp, Homo sapien
tgttccctactgaggtcactgctgc

SEQ ID NO: 5649389 - DNA, 25 bp, Homo sapien
agggggaggtgtcatgagtgcgaga

SEQ ID NO: 5649390 - DNA, 25 bp, Homo sapien
tgttgtaaatccgctctcctgctgc

SEQ ID NO: 5649391 - DNA, 25 bp, Homo sapien
acacccgcccctgttcccatgaacc

SEQ ID NO: 5649392 - DNA, 25 bp, Homo sapien
tatccacctccttgaggaggttctg

SEQ ID NO: 5649393 - DNA, 25 bp, Homo sapien
ttcttcttcgccccctcaactgcag

SEQ ID NO: 5649394 - DNA, 25 bp, Homo sapien
tgctggagtacgcaggccaggggtc

SEQ ID NO: 5649395 - DNA, 25 bp, Homo sapien
gatctcgatgttgtagaggttatcc

SEQ ID NO: 5649396 - DNA, 25 bp, Homo sapien
acctcccggtctcaagcatagagag

SEQ ID NO: 5649397 - DNA, 25 bp, Homo sapien
acaagcagacttcagaactactggg

SEQ ID NO: 5649398 - DNA, 25 bp, Homo sapien
ttgcagtttgaagattcttacgttc

SEQ ID NO: 5649399 - DNA, 25 bp, Homo sapien
cagatttgggcgagacggttggaga

SEQ ID NO: 5649400 - DNA, 25 bp, Homo sapien
cccagagctcacttatctgagccta

SEQ ID NO: 5649401 - DNA, 25 bp, Homo sapien
agaagtgctctctgaagtctacaga

SEQ ID NO: 5649402 - DNA, 25 bp, Homo sapien
gtcaggcctggagttggtttgacca

SEQ ID NO: 5649403 - DNA, 25 bp, Homo sapien
accacccgaagaagtcgccaggcac

SEQ ID NO: 5649404 - DNA, 25 bp, Homo sapien
ctcaatttgcttgattcgtatttcc

SEQ ID NO: 5649405 - DNA, 25 bp, Homo sapien
ggtccgtatgctgctgcagatttgg

SEQ ID NO: 5649406 - DNA, 25 bp, Homo sapien
ggcccagagctcacttatctgagcc

SEQ ID NO: 5649407 - DNA, 25 bp, Homo sapien
tgcaagtcactggccaataatcgca

SEQ ID NO: 5649408 - DNA, 25 bp, Homo sapien
ggtggaggcagtcttcctgagaaca

SEQ ID NO: 5649409 - DNA, 25 bp, Homo sapien
gccaggcacgtacctgcggtcccga

SEQ ID NO: 5649410 - DNA, 25 bp, Homo sapien
gggtcttgaagacccttgagtcaaa

SEQ ID NO: 5649411 - DNA, 25 bp, Homo sapien
taactggtgtgggactagcacgtct

SEQ ID NO: 5649412 - DNA, 25 bp, Homo sapien
ctgggatcagctgggatgggagggt

SEQ ID NO: 5649413 - DNA, 25 bp, Homo sapien
cagctgggagactgatgggaagctt

SEQ ID NO: 5649414 - DNA, 25 bp, Homo sapien
gccctacagttcccttatccaaatt

SEQ ID NO: 5649415 - DNA, 25 bp, Homo sapien
ggaggaagaggagggctggtagggg

SEQ ID NO: 5649416 - DNA, 25 bp, Homo sapien
atctgagcctaaacctcccggtctc

SEQ ID NO: 5649417 - DNA, 25 bp, Homo sapien
ttctgcctgtctgactcaatttgct

SEQ ID NO: 5649418 - DNA, 25 bp, Homo sapien
ccaagcaagtcacacccgcccctgt

SEQ ID NO: 5649419 - DNA, 25 bp, Homo sapien
ggcctgtttgtttcctccaagggcg

SEQ ID NO: 5649420 - DNA, 25 bp, Homo sapien
gcacggcttgaccttttcccttttc

SEQ ID NO: 5649421 - DNA, 25 bp, Homo sapien
gggaagcttccatggcatggcccca

SEQ ID NO: 5649422 - DNA, 25 bp, Homo sapien
ggaggtgtcatgagtgcgagagggt

SEQ ID NO: 5649423 - DNA, 25 bp, Homo sapien
cctgtattacctttcgtgttttggc

SEQ ID NO: 5649424 - DNA, 25 bp, Homo sapien
acctcccacaggaggaggaggagga

SEQ ID NO: 5649425 - DNA, 25 bp, Homo sapien
gatttgggcgagacggttggagagc

SEQ ID NO: 5649426 - DNA, 25 bp, Homo sapien
gagcctaaacctcccggtctcaagc

SEQ ID NO: 5649427 - DNA, 25 bp, Homo sapien
ctgtcctgctctgctgatctgtaca

SEQ ID NO: 5649428 - DNA, 25 bp, Homo sapien
caactttggtgtctcatttgtgggt

SEQ ID NO: 5649429 - DNA, 25 bp, Homo sapien
gacggggaccacccgaagaagtcgc

SEQ ID NO: 5649430 - DNA, 25 bp, Homo sapien
tccagaatctgggccctacagttcc

SEQ ID NO: 5649431 - DNA, 25 bp, Homo sapien
ggagtacgcaggccaggggtcttga

SEQ ID NO: 5649432 - DNA, 25 bp, Homo sapien
tctctccgccgcccactggcacagt

SEQ ID NO: 5649433 - DNA, 25 bp, Homo sapien
cgagacggttggagagcttcttaat

SEQ ID NO: 5649434 - DNA, 25 bp, Homo sapien
ggaggattcagctgggagactgatg

SEQ ID NO: 5649435 - DNA, 25 bp, Homo sapien
ttcttcctcttccactatcatttca

SEQ ID NO: 5649436 - DNA, 25 bp, Homo sapien
tcacggtcgaagtctttcagaaagg

SEQ ID NO: 5649437 - DNA, 25 bp, Homo sapien
ggcacgtacctgcggtcccgagaca

SEQ ID NO: 5649438 - DNA, 25 bp, Homo sapien
cttcagtaaacagggataaacataa

SEQ ID NO: 5649439 - DNA, 25 bp, Homo sapien
acatagcacatgattctccagggca

SEQ ID NO: 5649440 - DNA, 25 bp, Homo sapien
ccgctctcctgctgctggagtacgc

SEQ ID NO: 5649441 - DNA, 25 bp, Homo sapien
caccaagcaagtcacacccgcccct

SEQ ID NO: 5649442 - DNA, 25 bp, Homo sapien
agcggcggagatggggcagggaagc

SEQ ID NO: 5649443 - DNA, 25 bp, Homo sapien
gcgagcttccgcctccgtaaggagt

SEQ ID NO: 5649444 - DNA, 25 bp, Homo sapien
tctcgcgcagagccttggggagccg

SEQ ID NO: 5649445 - DNA, 25 bp, Homo sapien
tgccgcctcttccagggcctgtttg

SEQ ID NO: 5649446 - DNA, 25 bp, Homo sapien
catctacctgtattacctttcgtgt

SEQ ID NO: 5649447 - DNA, 25 bp, Homo sapien
aggccaccaagcaagtcacacccgc

SEQ ID NO: 5649448 - DNA, 25 bp, Homo sapien
agtttgaagattcttacgttcattt

SEQ ID NO: 5649449 - DNA, 25 bp, Homo sapien
caggtgaaagatccctaagtcccac

SEQ ID NO: 5649450 - DNA, 25 bp, Homo sapien
agtcgccaggcacgtacctgcggtc

SEQ ID NO: 5649451 - DNA, 25 bp, Homo sapien
tcagctgttgccgcctcttccaggg

SEQ ID NO: 5649452 - DNA, 25 bp, Homo sapien
tgccttcaagcctggggatgaggac

SEQ ID NO: 5649453 - DNA, 25 bp, Homo sapien
actatcatttcatctacctgtatta

SEQ ID NO: 5649454 - DNA, 25 bp, Homo sapien
cttctgctgttagtttgtttatttc

SEQ ID NO: 5649455 - DNA, 25 bp, Homo sapien
acctcactgctgactctgcttaaca

SEQ ID NO: 5649456 - DNA, 25 bp, Homo sapien
aactgcaggcagggcagggtgaaga

SEQ ID NO: 5649457 - DNA, 25 bp, Homo sapien
tcctgagaacacagggttcttcttc

SEQ ID NO: 5649458 - DNA, 25 bp, Homo sapien
cagatttcaggggtgtctgaatagc

SEQ ID NO: 5649459 - DNA, 25 bp, Homo sapien
tgggtccgtatgctgctgcagattt

SEQ ID NO: 5649460 - DNA, 25 bp, Homo sapien
tctccagggcagagaggctggctgg

SEQ ID NO: 5649461 - DNA, 25 bp, Homo sapien
gcagggaggattcagctgggagact

SEQ ID NO: 5649462 - DNA, 25 bp, Homo sapien
taaaacactgctccacaagcagact

SEQ ID NO: 5649463 - DNA, 25 bp, Homo sapien
gattcttacgttcattttcttcttc

SEQ ID NO: 5649464 - DNA, 25 bp, Homo sapien
tggtcttcagtaaacagggataaac

SEQ ID NO: 5649465 - DNA, 25 bp, Homo sapien
ctccgtaaggagttggtcttggcca

SEQ ID NO: 5649466 - DNA, 25 bp, Homo sapien
gacgaggagggcggacggggaccac

SEQ ID NO: 5649467 - DNA, 25 bp, Homo sapien
aaacaataagcctgaagggaagaag

SEQ ID NO: 5649468 - DNA, 25 bp, Homo sapien
ggcagtcttcctgagaacacagggt

SEQ ID NO: 5649469 - DNA, 25 bp, Homo sapien
aataataacaaataccacagagagc

SEQ ID NO: 5649470 - DNA, 25 bp, Homo sapien
agaaatgccagatgcagaggttctc

SEQ ID NO: 5649471 - DNA, 25 bp, Homo sapien
aagggctgagcaaaacctcgctgtg

SEQ ID NO: 5649472 - DNA, 25 bp, Homo sapien
aaacctcccggtctcaagcatagag

SEQ ID NO: 5649473 - DNA, 25 bp, Homo sapien
ttggagagcttcttaatgtttccca

SEQ ID NO: 5649474 - DNA, 25 bp, Homo sapien
agcacatgattctccagggcagaga

SEQ ID NO: 5649475 - DNA, 25 bp, Homo sapien
tatccaggtcagctgttgccgcctc

SEQ ID NO: 5649476 - DNA, 25 bp, Homo sapien
gagaaagccatgtgccttcaagcct

SEQ ID NO: 5649477 - DNA, 25 bp, Homo sapien
agatggggcagggaagcaagaaact

SEQ ID NO: 5649478 - DNA, 25 bp, Homo sapien
accccataagagagaagtgctctct

SEQ ID NO: 5649479 - DNA, 25 bp, Homo sapien
agatccctaagtcccactgaccacc

SEQ ID NO: 5649480 - DNA, 25 bp, Homo sapien
caaaccagtatttggtcttcagtaa

SEQ ID NO: 5649481 - DNA, 25 bp, Homo sapien
cacggctggggtaacagtgttagca

SEQ ID NO: 5649482 - DNA, 25 bp, Homo sapien
gtcaactttggtgtctcatttgtgg

SEQ ID NO: 5649483 - DNA, 25 bp, Homo sapien
agcttccatggcatggccccagcaa

SEQ ID NO: 5649484 - DNA, 25 bp, Homo sapien
tgcctctgcaagtcactggccaata

SEQ ID NO: 5649485 - DNA, 25 bp, Homo sapien
tgaattcctgaattcccttagagga

SEQ ID NO: 5649486 - DNA, 25 bp, Homo sapien
ctctttgctgtcagcaagagggctg

SEQ ID NO: 5649487 - DNA, 25 bp, Homo sapien
aaggagttggtcttggccacccgac

SEQ ID NO: 5649488 - DNA, 25 bp, Homo sapien
agcaggtgaaagatccctaagtccc

SEQ ID NO: 5649489 - DNA, 25 bp, Homo sapien
ctgtggccaatgacataaaacctcc

SEQ ID NO: 5649490 - DNA, 25 bp, Homo sapien
atactgtgcctctgcaagtcactgg

SEQ ID NO: 5649491 - DNA, 25 bp, Homo sapien
ttctcaaattcttagaacatagcac

SEQ ID NO: 5649492 - DNA, 25 bp, Homo sapien
gagggctggtagggggaggtgtcat

SEQ ID NO: 5649493 - DNA, 25 bp, Homo sapien
gtgactgggatcagctgggatggga

SEQ ID NO: 5649494 - DNA, 25 bp, Homo sapien
gatgttgtagaggttatccacctcc

SEQ ID NO: 5649495 - DNA, 25 bp, Homo sapien
gtcccactgaccacctcccacagga

SEQ ID NO: 5649496 - DNA, 25 bp, Homo sapien
gctccttgctctggaacttcacact

SEQ ID NO: 5649497 - DNA, 25 bp, Homo sapien
gaccacctcccacaggaggaggagg

SEQ ID NO: 5649498 - DNA, 25 bp, Homo sapien
gtgaagaggatgttgagttgcagga

SEQ ID NO: 5649499 - DNA, 25 bp, Homo sapien
tccatggcatggccccagcaagcag

SEQ ID NO: 5649500 - DNA, 25 bp, Homo sapien
aggatctcgatgttgtagaggttat

SEQ ID NO: 5649501 - DNA, 25 bp, Homo sapien
cactgctgactctgcttaacaaagt

SEQ ID NO: 5649502 - DNA, 25 bp, Homo sapien
gtaaatccgctctcctgctgctgga

SEQ ID NO: 5649503 - DNA, 25 bp, Homo sapien
tagtcaagccagttcatctcgcgca

SEQ ID NO: 5649504 - DNA, 25 bp, Homo sapien
tgtgggtccgtatgctgctgcagat

SEQ ID NO: 5649505 - DNA, 25 bp, Homo sapien
gggtgtcaggcctggagttggtttg

SEQ ID NO: 5649506 - DNA, 25 bp, Homo sapien
ggagatggggcagggaagcaagaaa

SEQ ID NO: 5649507 - DNA, 25 bp, Homo sapien
tgtttcctccaagggcgaagtagtc

SEQ ID NO: 5649508 - DNA, 25 bp, Homo sapien
cagttattctgtggccaatgacata

SEQ ID NO: 5649509 - DNA, 25 bp, Homo sapien
aagggaagaagtctcttcagggtcc

SEQ ID NO: 5649510 - DNA, 25 bp, Homo sapien
tttggtgtctcatttgtgggtccgt

SEQ ID NO: 5649511 - DNA, 25 bp, Homo sapien
cccgaagaagtcgccaggcacgtac

SEQ ID NO: 5649512 - DNA, 25 bp, Homo sapien
gtctcatttgtgggtccgtatgctg

SEQ ID NO: 5649513 - DNA, 25 bp, Homo sapien
agcaagacatggaagttgtctccaa

SEQ ID NO: 5649514 - DNA, 25 bp, Homo sapien
taataacaaataccacagagagccc

SEQ ID NO: 5649515 - DNA, 25 bp, Homo sapien
tctttcagaaaggaggcgagcttcc

SEQ ID NO: 5649516 - DNA, 25 bp, Homo sapien
gtgctctctgaagtctacagacttg

SEQ ID NO: 5649517 - DNA, 25 bp, Homo sapien
gcggctctacagtcaaccgccaccc

SEQ ID NO: 5649518 - DNA, 25 bp, Homo sapien
cttttgactcttgcagtttgaagat

SEQ ID NO: 5649519 - DNA, 25 bp, Homo sapien
ccagttcatctcgcgcagagccttg

SEQ ID NO: 5649520 - DNA, 25 bp, Homo sapien
cgctgtgccagtgagagagagcggc

SEQ ID NO: 5649521 - DNA, 25 bp, Homo sapien
aagtcacacccgcccctgttcccat

SEQ ID NO: 5649522 - DNA, 25 bp, Homo sapien
cttttccttgtatggactgagttct

SEQ ID NO: 5649523 - DNA, 25 bp, Homo sapien
cccacggctggggtaacagtgttag

SEQ ID NO: 5649524 - DNA, 25 bp, Homo sapien
gcagggcagggtgaagaggatgttg

SEQ ID NO: 5649525 - DNA, 25 bp, Homo sapien
gggtgaagaggatgttgagttgcag

SEQ ID NO: 5649526 - DNA, 25 bp, Homo sapien
ttctggacctaccctctcatggccc

SEQ ID NO: 5649527 - DNA, 25 bp, Homo sapien
ctccaagggcgaagtagtcaagcca

SEQ ID NO: 5649528 - DNA, 25 bp, Homo sapien
tgtcagcaagagggctgccattccc

SEQ ID NO: 5649529 - DNA, 25 bp, Homo sapien
caagcagtgactgggatcagctggg

SEQ ID NO: 5649530 - DNA, 25 bp, Homo sapien
tgaagggaagaagtctcttcagggt

SEQ ID NO: 5649531 - DNA, 25 bp, Homo sapien
agacaagggctgagcaaaacctcgc

SEQ ID NO: 5649532 - DNA, 25 bp, Homo sapien
gtgtctgaatagcttctgctgttag

SEQ ID NO: 5649533 - DNA, 25 bp, Homo sapien
atagcttagagacagttattctgtg

SEQ ID NO: 5649534 - DNA, 25 bp, Homo sapien
ctgaatagcttctgctgttagtttg

SEQ ID NO: 5649535 - DNA, 25 bp, Homo sapien
tgaagattcttacgttcattttctt

SEQ ID NO: 5649536 - DNA, 25 bp, Homo sapien
ttggtcttggccacccgactactgc

SEQ ID NO: 5649537 - DNA, 25 bp, Homo sapien
cctctcatggcccagagctcactta

SEQ ID NO: 5649538 - DNA, 25 bp, Homo sapien
caaattcttagaacatagcacatga

SEQ ID NO: 5649539 - DNA, 25 bp, Homo sapien
gtgagagagagcggctctacagtca

SEQ ID NO: 5649540 - DNA, 25 bp, Homo sapien
tttgtgggtccgtatgctgctgcag

SEQ ID NO: 5649541 - DNA, 25 bp, Homo sapien
catgccccaggcacaggcacacatg

SEQ ID NO: 5649542 - DNA, 25 bp, Homo sapien
tcagggtcccagaagtgcccattaa

SEQ ID NO: 5649543 - DNA, 25 bp, Homo sapien
tgctctgctgatctgtacagttccc

SEQ ID NO: 5649544 - DNA, 25 bp, Homo sapien
gctgggcaatactgtgcctctgcaa

SEQ ID NO: 5649545 - DNA, 25 bp, Homo sapien
acctccaatcggcccacggctgggg

SEQ ID NO: 5649546 - DNA, 25 bp, Homo sapien
atccctaagtcccactgaccacctc

SEQ ID NO: 5649547 - DNA, 25 bp, Homo sapien
ccatggatagcttagagacagttat

SEQ ID NO: 5649548 - DNA, 25 bp, Homo sapien
gaagcaagaaactgggtagggacga

SEQ ID NO: 5649549 - DNA, 25 bp, Homo sapien
gaggaggaggaggaagaggagggct

SEQ ID NO: 5649550 - DNA, 25 bp, Homo sapien
gcagagccttggggagccgcaggat

SEQ ID NO: 5649551 - DNA, 25 bp, Homo sapien
tgaggtcactgctgccaactgtcct

SEQ ID NO: 5649552 - DNA, 25 bp, Homo sapien
tagaagagcaagacatggaagttgt

SEQ ID NO: 5649553 - DNA, 25 bp, Homo sapien
catgttccctactgaggtcactgct

SEQ ID NO: 5649554 - DNA, 25 bp, Homo sapien
aggtgtcatgagtgcgagagggtag

SEQ ID NO: 5649555 - DNA, 25 bp, Homo sapien
tattacctttcgtgttttggcagat

SEQ ID NO: 5649556 - DNA, 25 bp, Homo sapien
ccactaactagggaggtagaagagc

SEQ ID NO: 5649557 - DNA, 25 bp, Homo sapien
gaagtagtcaagccagttcatctcg

SEQ ID NO: 5649558 - DNA, 25 bp, Homo sapien
gcagtttgaagattcttacgttcat

SEQ ID NO: 5649559 - DNA, 25 bp, Homo sapien
aacatggctccttgctctggaactt

SEQ ID NO: 5649560 - DNA, 25 bp, Homo sapien
cttgagtcaaacctgggtgtcaggc

SEQ ID NO: 5649561 - DNA, 25 bp, Homo sapien
gctgggagactgatgggaagcttcc

SEQ ID NO: 5649562 - DNA, 25 bp, Homo sapien
ccatgaaccccataagagagaagtg

SEQ ID NO: 5649563 - DNA, 25 bp, Homo sapien
tggtgtgggactagcacgtctgaat

SEQ ID NO: 5649564 - DNA, 25 bp, Homo sapien
cctctgcaagtcactggccaataat

SEQ ID NO: 5649565 - DNA, 25 bp, Homo sapien
tctgaattcctgaattcccttagag

SEQ ID NO: 5649566 - DNA, 25 bp, Homo sapien
aagtctcttcagggtcccagaagtg

SEQ ID NO: 5649567 - DNA, 25 bp, Homo sapien
tgcggtcccgagacaagggctgagc

SEQ ID NO: 5649568 - DNA, 25 bp, Homo sapien
cttcacactcaaacaataagcctga

SEQ ID NO: 5649569 - DNA, 25 bp, Homo sapien
aggggtcttgaagacccttgagtca

SEQ ID NO: 5649570 - DNA, 25 bp, Homo sapien
ctgggatgggagggtgaacagacag

SEQ ID NO: 5649571 - DNA, 25 bp, Homo sapien
gtcctgctctgctgatctgtacagt

SEQ ID NO: 5649572 - DNA, 25 bp, Homo sapien
ttccactatcatttcatctacctgt

SEQ ID NO: 5649573 - DNA, 25 bp, Homo sapien
tccttgaggaggttctgcctgtctg

SEQ ID NO: 5649574 - DNA, 25 bp, Homo sapien
tggagaatgaggacctcactgctga

SEQ ID NO: 5649575 - DNA, 25 bp, Homo sapien
ttcttagaacatagcacatgattct

SEQ ID NO: 5649576 - DNA, 25 bp, Homo sapien
tgagcaaaacctcgctgtgccagtg

SEQ ID NO: 5649577 - DNA, 25 bp, Homo sapien
atgggaagcttccatggcatggccc

SEQ ID NO: 5649578 - DNA, 25 bp, Homo sapien
tatcatttcatctacctgtattacc

SEQ ID NO: 5649579 - DNA, 25 bp, Homo sapien
gaacacagggttcttcttcgccccc

SEQ ID NO: 5649580 - DNA, 25 bp, Homo sapien
agtccatgccccaggcacaggcaca

SEQ ID NO: 5649581 - DNA, 25 bp, Homo sapien
ctgctgctggagtacgcaggccagg

SEQ ID NO: 5649582 - DNA, 25 bp, Homo sapien
gattcgtatttccacttcacggtcg

SEQ ID NO: 5649583 - DNA, 25 bp, Homo sapien
aggaggcgagcttccgcctccgtaa

SEQ ID NO: 5649584 - DNA, 25 bp, Homo sapien
ccccagcaagcagtgactgggatca

SEQ ID NO: 5649585 - DNA, 25 bp, Homo sapien
tggtagggggaggtgtcatgagtgc

SEQ ID NO: 5649586 - DNA, 25 bp, Homo sapien
tctcatggcccagagctcacttatc

SEQ ID NO: 5649587 - DNA, 25 bp, Homo sapien
ctcttcagggtcccagaagtgccca

SEQ ID NO: 5649588 - DNA, 25 bp, Homo sapien
taacaaagtccatgccccaggcaca

SEQ ID NO: 5649589 - DNA, 25 bp, Homo sapien
gaatctgggccctacagttccctta

SEQ ID NO: 5649590 - DNA, 25 bp, Homo sapien
gaagatctctttgctgtcagcaaga

SEQ ID NO: 5649591 - DNA, 25 bp, Homo sapien
actggtgtgggactagcacgtctga

SEQ ID NO: 5649592 - DNA, 25 bp, Homo sapien
cggtgatatccaggtcagctgttgc

SEQ ID NO: 5649593 - DNA, 25 bp, Homo sapien
cactgctgccaactgtcctgctctg

SEQ ID NO: 5649594 - DNA, 25 bp, Homo sapien
agccctacatgagaaagccatgtgc

SEQ ID NO: 5649595 - DNA, 25 bp, Homo sapien
attaaaagtccatcctgtcaacttt

SEQ ID NO: 5649596 - DNA, 25 bp, Homo sapien
ctctggaacttcacactcaaacaat

SEQ ID NO: 5649597 - DNA, 25 bp, Homo sapien
tcggcggaggctgcggggagcggcg

SEQ ID NO: 5649598 - DNA, 25 bp, Homo sapien
ttccactaactagggaggtagaaga

SEQ ID NO: 5649599 - DNA, 25 bp, Homo sapien
gagagagagcggctctacagtcaac

SEQ ID NO: 5649600 - DNA, 25 bp, Homo sapien
actgcccttcctaggagccatggcg

SEQ ID NO: 5649601 - DNA, 25 bp, Homo sapien
ggctctacagtcaaccgccacccaa

SEQ ID NO: 5649602 - DNA, 25 bp, Homo sapien
tcctgtcaactttggtgtctcattt

SEQ ID NO: 5649603 - DNA, 25 bp, Homo sapien
gcacacatggaatgaggccaccaag

SEQ ID NO: 5649604 - DNA, 25 bp, Homo sapien
tcttcttggatggaggacacctttt

SEQ ID NO: 5649605 - DNA, 25 bp, Homo sapien
gtctcaagcatagagagcagaaatg

SEQ ID NO: 5649606 - DNA, 25 bp, Homo sapien
cagtgttagcacggcttgacctttt

SEQ ID NO: 5649607 - DNA, 25 bp, Homo sapien
ggttctgcctgtctgactcaatttg

SEQ ID NO: 5649608 - DNA, 25 bp, Homo sapien
gggtagcggtggtggaggcagtctt

SEQ ID NO: 5649609 - DNA, 25 bp, Homo sapien
cgccgcccactggcacagtgaggaa

SEQ ID NO: 5649610 - DNA, 25 bp, Homo sapien
aaaggaggcgagcttccgcctccgt

SEQ ID NO: 5649611 - DNA, 25 bp, Homo sapien
cccacaggaggaggaggaggaggaa

SEQ ID NO: 5649612 - DNA, 25 bp, Homo sapien
gcaggcagggcagggtgaagaggat

SEQ ID NO: 5649613 - DNA, 25 bp, Homo sapien
ccgtaaggagttggtcttggccacc

SEQ ID NO: 5649614 - DNA, 25 bp, Homo sapien
ctcaagcatagagagcagaaatgcc

SEQ ID NO: 5649615 - DNA, 25 bp, Homo sapien
ccgcaggatctcgatgttgtagagg

SEQ ID NO: 5649616 - DNA, 25 bp, Homo sapien
agaaaggaggcgagcttccgcctcc

SEQ ID NO: 5649617 - DNA, 25 bp, Homo sapien
ttcctgaattcccttagaggaacat

SEQ ID NO: 5649618 - DNA, 25 bp, Homo sapien
tctcttcttggatggaggacacctt

SEQ ID NO: 5649619 - DNA, 25 bp, Homo sapien
atagcttctgctgttagtttgttta

SEQ ID NO: 5649620 - DNA, 25 bp, Homo sapien
ctgtcaactttggtgtctcatttgt

SEQ ID NO: 5649621 - DNA, 25 bp, Homo sapien
cttggatggaggacaccttttgact

SEQ ID NO: 5649622 - DNA, 25 bp, Homo sapien
ctcactgctgactctgcttaacaaa

SEQ ID NO: 5649623 - DNA, 25 bp, Homo sapien
caaaacctcgctgtgccagtgagag

SEQ ID NO: 5649624 - DNA, 25 bp, Homo sapien
agacggttggagagcttcttaatgt

SEQ ID NO: 5649625 - DNA, 25 bp, Homo sapien
agagcttcttaatgtttcccaaggc

SEQ ID NO: 5649626 - DNA, 25 bp, Homo sapien
ccattaaaagtccatcctgtcaact

SEQ ID NO: 5649627 - DNA, 25 bp, Homo sapien
tcagaaaggaggcgagcttccgcct

SEQ ID NO: 5649628 - DNA, 25 bp, Homo sapien
ctgggtagcggtggtggaggcagtc

SEQ ID NO: 5649629 - DNA, 25 bp, Homo sapien
gctgatctgtacagttccccccacc

SEQ ID NO: 5649630 - DNA, 25 bp, Homo sapien
tgctgctgcagatttgggcgagacg

SEQ ID NO: 5649631 - DNA, 25 bp, Homo sapien
cactgaccacctcccacaggaggag

SEQ ID NO: 5649632 - DNA, 25 bp, Homo sapien
acctaccctctcatggcccagagct

SEQ ID NO: 5649633 - DNA, 25 bp, Homo sapien
gaggaacatggctccttgctctgga

SEQ ID NO: 5649634 - DNA, 25 bp, Homo sapien
cggtcccgagacaagggctgagcaa

SEQ ID NO: 5649635 - DNA, 25 bp, Homo sapien
gctgccaactgtcctgctctgctga

SEQ ID NO: 5649636 - DNA, 25 bp, Homo sapien
ctctgctgatctgtacagttccccc

SEQ ID NO: 5649637 - DNA, 25 bp, Homo sapien
ctcccacaggaggaggaggaggagg

SEQ ID NO: 5649638 - DNA, 25 bp, Homo sapien
agcctggggatgaggactctagttc

SEQ ID NO: 5649639 - DNA, 25 bp, Homo sapien
aaaatggtcttgttgcaaaataata

SEQ ID NO: 5649640 - DNA, 25 bp, Homo sapien
cagacagctctacctaactggtgtg

SEQ ID NO: 5649641 - DNA, 25 bp, Homo sapien
tctgaagtctacagacttggcaggg

SEQ ID NO: 5649642 - DNA, 25 bp, Homo sapien
acagacttggcagggaccactggac

SEQ ID NO: 5649643 - DNA, 25 bp, Homo sapien
cttcctcttccactatcatttcatc

SEQ ID NO: 5649644 - DNA, 25 bp, Homo sapien
ggcaatactgtgcctctgcaagtca

SEQ ID NO: 5649645 - DNA, 25 bp, Homo sapien
cggctggggtaacagtgttagcacg

SEQ ID NO: 5649646 - DNA, 25 bp, Homo sapien
aaccgccacccaattcaaactccac

SEQ ID NO: 5649647 - DNA, 25 bp, Homo sapien
gtttgaccatggacacctccaatcg

SEQ ID NO: 5649648 - DNA, 25 bp, Homo sapien
ccatggacacctccaatcggcccac

SEQ ID NO: 5649649 - DNA, 25 bp, Homo sapien
gtagcggtggtggaggcagtcttcc

SEQ ID NO: 5649650 - DNA, 25 bp, Homo sapien
ttgctgtcagcaagagggctgccat

SEQ ID NO: 5649651 - DNA, 25 bp, Homo sapien
ccaggggtcttgaagacccttgagt

SEQ ID NO: 5649652 - DNA, 25 bp, Homo sapien
gccatggcgctcggcggaggctgcg

SEQ ID NO: 5649653 - DNA, 25 bp, Homo sapien
tgcccttcctaggagccatggcgct

SEQ ID NO: 5649654 - DNA, 25 bp, Homo sapien
gaagaggagggctggtagggggagg

SEQ ID NO: 5649655 - DNA, 25 bp, Homo sapien
actactgggcacagcaggtgaaaga

SEQ ID NO: 5649656 - DNA, 25 bp, Homo sapien
ttccctactgaggtcactgctgcca

SEQ ID NO: 5649657 - DNA, 25 bp, Homo sapien
gggactagcacgtctgaattcctga

SEQ ID NO: 5649658 - DNA, 25 bp, Homo sapien
gggatcagctgggatgggagggtga

SEQ ID NO: 5649659 - DNA, 25 bp, Homo sapien
ttttggcagatttcaggggtgtctg

SEQ ID NO: 5649660 - DNA, 25 bp, Homo sapien
ttccgcctccgtaaggagttggtct

SEQ ID NO: 5649661 - DNA, 25 bp, Homo sapien
tgggagggtgaacagacagctctac

SEQ ID NO: 5649662 - DNA, 25 bp, Homo sapien
gctctcctgctgctggagtacgcag

SEQ ID NO: 5649663 - DNA, 25 bp, Homo sapien
agatctctttgctgtcagcaagagg

SEQ ID NO: 5649664 - DNA, 25 bp, Homo sapien
tcaaccgccacccaattcaaactcc

SEQ ID NO: 5649665 - DNA, 25 bp, Homo sapien
gaccatggacacctccaatcggccc

SEQ ID NO: 5649666 - DNA, 25 bp, Homo sapien
tagaggaacatggctccttgctctg

SEQ ID NO: 5649667 - DNA, 25 bp, Homo sapien
tctacctgtattacctttcgtgttt

SEQ ID NO: 5649668 - DNA, 25 bp, Homo sapien
cctggagttggtttgaccatggaca

SEQ ID NO: 5649669 - DNA, 25 bp, Homo sapien
ggttggagagcttcttaatgtttcc

SEQ ID NO: 5649670 - DNA, 25 bp, Homo sapien
catggcatggccccagcaagcagtg

SEQ ID NO: 5649671 - DNA, 25 bp, Homo sapien
cggtctcaagcatagagagcagaaa

SEQ ID NO: 5649672 - DNA, 25 bp, Homo sapien
agttggtcttggccacccgactact

SEQ ID NO: 5649673 - DNA, 25 bp, Homo sapien
aggctctctccgccgcccactggca

SEQ ID NO: 5649674 - DNA, 25 bp, Homo sapien
ttgagttgcaggaggcaaaaggcag

SEQ ID NO: 5649675 - DNA, 25 bp, Homo sapien
agctgttgccgcctcttccagggcc

SEQ ID NO: 5649676 - DNA, 25 bp, Homo sapien
aggcacaggcacacatggaatgagg

SEQ ID NO: 5649677 - DNA, 25 bp, Homo sapien
tcttcttcctcttccactatcattt

SEQ ID NO: 5649678 - DNA, 25 bp, Homo sapien
tcctccaagggcgaagtagtcaagc

SEQ ID NO: 5649679 - DNA, 25 bp, Homo sapien
aacaaataccacagagagccctaca

SEQ ID NO: 5649680 - DNA, 25 bp, Homo sapien
gctggggtaacagtgttagcacggc

SEQ ID NO: 5649681 - DNA, 25 bp, Homo sapien
cagctctacctaactggtgtgggac

SEQ ID NO: 5649682 - DNA, 25 bp, Homo sapien
aagtctacagacttggcagggacca

SEQ ID NO: 5649683 - DNA, 25 bp, Homo sapien
tgaagacccttgagtcaaacctggg

SEQ ID NO: 5649684 - DNA, 25 bp, Homo sapien
gtgtgggactagcacgtctgaattc

SEQ ID NO: 5649685 - DNA, 25 bp, Homo sapien
gttgccgcctcttccagggcctgtt

SEQ ID NO: 5649686 - DNA, 25 bp, Homo sapien
tcaaacctgggtgtcaggcctggag

SEQ ID NO: 5649687 - DNA, 25 bp, Homo sapien
gacagttattctgtggccaatgaca

SEQ ID NO: 5649688 - DNA, 25 bp, Homo sapien
gtgttagcacggcttgaccttttcc

SEQ ID NO: 5649689 - DNA, 25 bp, Homo sapien
tgttttggcagatttcaggggtgtc

SEQ ID NO: 5649690 - DNA, 25 bp, Homo sapien
actagggaggtagaagagcaagaca

SEQ ID NO: 5649691 - DNA, 25 bp, Homo sapien
tttactaaaatggtcttgttgcaaa

SEQ ID NO: 5649692 - DNA, 25 bp, Homo sapien
gcaaaataataacaaataccacaga

SEQ ID NO: 5649693 - DNA, 25 bp, Homo sapien
gaggctgcggggagcggcggagatg

SEQ ID NO: 5649694 - DNA, 25 bp, Homo sapien
ggccacccgactactgcccttccta

SEQ ID NO: 5649695 - DNA, 25 bp, Homo sapien
cccactgaccacctcccacaggagg

SEQ ID NO: 5649696 - DNA, 25 bp, Homo sapien
atggaatgaggccaccaagcaagtc

SEQ ID NO: 5649697 - DNA, 25 bp, Homo sapien
tctgcttaacaaagtccatgcccca

SEQ ID NO: 5649698 - DNA, 25 bp, Homo sapien
gctctctccgccgcccactggcaca

SEQ ID NO: 5649699 - DNA, 25 bp, Homo sapien
gcttccgcctccgtaaggagttggt

SEQ ID NO: 5649700 - DNA, 25 bp, Homo sapien
ggcggaggctgcggggagcggcgga

SEQ ID NO: 5649701 - DNA, 25 bp, Homo sapien
acagtcaaccgccacccaattcaaa

SEQ ID NO: 5649702 - DNA, 25 bp, Homo sapien
ggggaggtgtcatgagtgcgagagg

SEQ ID NO: 5649703 - DNA, 25 bp, Homo sapien
ggaacttcacactcaaacaataagc

SEQ ID NO: 5649704 - DNA, 25 bp, Homo sapien
gcacagcaggtgaaagatccctaag

SEQ ID NO: 5649705 - DNA, 25 bp, Homo sapien
ggtcagctgttgccgcctcttccag

SEQ ID NO: 5649706 - DNA, 25 bp, Homo sapien
caccttctggacctaccctctcatg

SEQ ID NO: 5649707 - DNA, 25 bp, Homo sapien
gaggtagaagagcaagacatggaag

SEQ ID NO: 5649708 - DNA, 25 bp, Homo sapien
agcaaaacctcgctgtgccagtgag

SEQ ID NO: 5649709 - DNA, 25 bp, Homo sapien
ccaatgacataaaacctccagaatc

SEQ ID NO: 5649710 - DNA, 25 bp, Homo sapien
atggaagttgtctccaaaccagtat

SEQ ID NO: 5649711 - DNA, 25 bp, Homo sapien
aggactctagttctcaaattcttag

SEQ ID NO: 5649712 - DNA, 25 bp, Homo sapien
ggcagggaccactggaccatggata

SEQ ID NO: 5649713 - DNA, 25 bp, Homo sapien
ggcagatttcaggggtgtctgaata

SEQ ID NO: 5649714 - DNA, 25 bp, Homo sapien
cttgttgcaaaataataacaaatac

SEQ ID NO: 5649715 - DNA, 25 bp, Homo sapien
tgcgagagggtagacggacatgttc

SEQ ID NO: 5649716 - DNA, 25 bp, Homo sapien
gatcagctgggatgggagggtgaac

SEQ ID NO: 5649717 - DNA, 25 bp, Homo sapien
cttgaggaggttctgcctgtctgac

SEQ ID NO: 5649718 - DNA, 25 bp, Homo sapien
agacttggcagggaccactggacca

SEQ ID NO: 5649719 - DNA, 25 bp, Homo sapien
gagcttccgcctccgtaaggagttg

SEQ ID NO: 5649720 - DNA, 25 bp, Homo sapien
cattccctgagatgttgtaaatccg

SEQ ID NO: 5649721 - DNA, 25 bp, Homo sapien
gtctacagacttggcagggaccact

SEQ ID NO: 5649722 - DNA, 25 bp, Homo sapien
ctgttagtttgtttatttcggtgat

SEQ ID NO: 5649723 - DNA, 25 bp, Homo sapien
aagccatgtgccttcaagcctgggg

SEQ ID NO: 5649724 - DNA, 25 bp, Homo sapien
ggcagggtgaagaggatgttgagtt

SEQ ID NO: 5649725 - DNA, 25 bp, Homo sapien
ggagttggtcttggccacccgacta

SEQ ID NO: 5649726 - DNA, 25 bp, Homo sapien
tccatgccccaggcacaggcacaca

SEQ ID NO: 5649727 - DNA, 25 bp, Homo sapien
tcttccactatcatttcatctacct

SEQ ID NO: 5649728 - DNA, 25 bp, Homo sapien
cttcttaatgtttcccaaggcctct

SEQ ID NO: 5649729 - DNA, 25 bp, Homo sapien
cacccgaagaagtcgccaggcacgt

SEQ ID NO: 5649730 - DNA, 25 bp, Homo sapien
gtttgtttatttcggtgatatccag

SEQ ID NO: 5649731 - DNA, 25 bp, Homo sapien
gcacaggcacacatggaatgaggcc

SEQ ID NO: 5649732 - DNA, 25 bp, Homo sapien
gcacagtgaggaagatctctttgct

SEQ ID NO: 5649733 - DNA, 25 bp, Homo sapien
ggtcttggccacccgactactgccc

SEQ ID NO: 5649734 - DNA, 25 bp, Homo sapien
ttggggagccgcaggatctcgatgt

SEQ ID NO: 5649735 - DNA, 25 bp, Homo sapien
tagtttgtttatttcggtgatatcc

SEQ ID NO: 5649736 - DNA, 25 bp, Homo sapien
ttggccacccgactactgcccttcc

SEQ ID NO: 5649737 - DNA, 25 bp, Homo sapien
gctggctggagaatgaggacctcac

SEQ ID NO: 5649738 - DNA, 25 bp, Homo sapien
ctttcgtgttttggcagatttcagg

SEQ ID NO: 5649739 - DNA, 25 bp, Homo sapien
acagtgaggaagatctctttgctgt

SEQ ID NO: 5649740 - DNA, 25 bp, Homo sapien
cagatgcagaggttctctgggtagc

SEQ ID NO: 5649741 - DNA, 25 bp, Homo sapien
caggtcagctgttgccgcctcttcc

SEQ ID NO: 5649742 - DNA, 25 bp, Homo sapien
agcatagagagcagaaatgccagat

SEQ ID NO: 5649743 - DNA, 25 bp, Homo sapien
ctgcggggagcggcggagatggggc

SEQ ID NO: 5649744 - DNA, 25 bp, Homo sapien
gcccattaaaagtccatcctgtcaa

SEQ ID NO: 5649745 - DNA, 25 bp, Homo sapien
gaggacctcactgctgactctgctt

SEQ ID NO: 5649746 - DNA, 25 bp, Homo sapien
gaggttctgcctgtctgactcaatt

SEQ ID NO: 5649747 - DNA, 25 bp, Homo sapien
caggcctggagttggtttgaccatg

SEQ ID NO: 5649748 - DNA, 25 bp, Homo sapien
tgtctccaaaccagtatttggtctt

SEQ ID NO: 5649749 - DNA, 25 bp, Homo sapien
agacttactcgctttattgaaaaaa

SEQ ID NO: 5649750 - DNA, 25 bp, Homo sapien
ttttttcaataaagcgagtaagtct

SEQ ID NO: 5649751 - DNA, 25 bp, Homo sapien
taattataaagaacacggtctatta

SEQ ID NO: 5649752 - DNA, 25 bp, Homo sapien
taatagaccgtgttctttataatta

SEQ ID NO: 5649753 - DNA, 25 bp, Homo sapien
ataaaccagattacaagtactaaac

SEQ ID NO: 5649754 - DNA, 25 bp, Homo sapien
gtttagtacttgtaatctggtttat

SEQ ID NO: 5649755 - DNA, 25 bp, Homo sapien
ccgacgcagtcgagcaggagccgca

SEQ ID NO: 5649756 - DNA, 25 bp, Homo sapien
tgcggctcctgctcgactgcgtcgg

SEQ ID NO: 5649757 - DNA, 25 bp, Homo sapien
cccgggtcgtgttgggcacgcaccc

SEQ ID NO: 5649758 - DNA, 25 bp, Homo sapien
gggtgcgtgcccaacacgacccggg

SEQ ID NO: 5649759 - DNA, 25 bp, Homo sapien
cacctggtgtaaagtggtgggcttt

SEQ ID NO: 5649760 - DNA, 25 bp, Homo sapien
aaagcccaccactttacaccaggtg

SEQ ID NO: 5649761 - DNA, 25 bp, Homo sapien
tcgggagtagaaacagacccccgta

SEQ ID NO: 5649762 - DNA, 25 bp, Homo sapien
tacgggggtctgtttctactcccga

SEQ ID NO: 5649763 - DNA, 25 bp, Homo sapien
tgtcaaggtttgaaacatgaaacat

SEQ ID NO: 5649764 - DNA, 25 bp, Homo sapien
atgtttcatgtttcaaaccttgaca

SEQ ID NO: 5649765 - DNA, 25 bp, Homo sapien
tggtcgagaggcatcggctctgact

SEQ ID NO: 5649766 - DNA, 25 bp, Homo sapien
agtcagagccgatgcctctcgacca

SEQ ID NO: 5649767 - DNA, 25 bp, Homo sapien
tggtcgagtccactctgcgaccgac

SEQ ID NO: 5649768 - DNA, 25 bp, Homo sapien
gtcggtcgcagagtggactcgacca

SEQ ID NO: 5649769 - DNA, 25 bp, Homo sapien
tattccatgttatgttaactcttcg

SEQ ID NO: 5649770 - DNA, 25 bp, Homo sapien
cgaagagttaacataacatggaata

SEQ ID NO: 5649771 - DNA, 25 bp, Homo sapien
caggactttgagttacccgaacaaa

SEQ ID NO: 5649772 - DNA, 25 bp, Homo sapien
tttgttcgggtaactcaaagtcctg

SEQ ID NO: 5649773 - DNA, 25 bp, Homo sapien
cagtgggatcctaaaccttctagat

SEQ ID NO: 5649774 - DNA, 25 bp, Homo sapien
atctagaaggtttaggatcccactg

SEQ ID NO: 5649775 - DNA, 25 bp, Homo sapien
ccgtggagcggagggactggtatga

SEQ ID NO: 5649776 - DNA, 25 bp, Homo sapien
tcataccagtccctccgctccacgg

SEQ ID NO: 5649777 - DNA, 25 bp, Homo sapien
ccaacaggtagtagtctttataagg

SEQ ID NO: 5649778 - DNA, 25 bp, Homo sapien
ccttataaagactactacctgttgg

SEQ ID NO: 5649779 - DNA, 25 bp, Homo sapien
acccggagtcggttcgccggcactg

SEQ ID NO: 5649780 - DNA, 25 bp, Homo sapien
cagtgccggcgaaccgactccgggt

SEQ ID NO: 5649781 - DNA, 25 bp, Homo sapien
gattgttattgaagtagtttaaaat

SEQ ID NO: 5649782 - DNA, 25 bp, Homo sapien
attttaaactacttcaataacaatc

SEQ ID NO: 5649783 - DNA, 25 bp, Homo sapien
tctatttttacagagtagaactaag

SEQ ID NO: 5649784 - DNA, 25 bp, Homo sapien
cttagttctactctgtaaaaataga

SEQ ID NO: 5649785 - DNA, 25 bp, Homo sapien
gtgtaagggcggtcatccggtgcat

SEQ ID NO: 5649786 - DNA, 25 bp, Homo sapien
atgcaccggatgaccgcccttacac

SEQ ID NO: 5649787 - DNA, 25 bp, Homo sapien
atggtcacctatctacccggtttac

SEQ ID NO: 5649788 - DNA, 25 bp, Homo sapien
gtaaaccgggtagataggtgaccat

SEQ ID NO: 5649789 - DNA, 25 bp, Homo sapien
ccgcatcggtgggacggtccatgtg

SEQ ID NO: 5649790 - DNA, 25 bp, Homo sapien
cacatggaccgtcccaccgatgcgg

SEQ ID NO: 5649791 - DNA, 25 bp, Homo sapien
ccgcgcgacgccgtgtcaggtcctc

SEQ ID NO: 5649792 - DNA, 25 bp, Homo sapien
gaggacctgacacggcgtcgcgcgg

SEQ ID NO: 5649793 - DNA, 25 bp, Homo sapien
gtctcgtccgtgcgcgggcggccgt

SEQ ID NO: 5649794 - DNA, 25 bp, Homo sapien
acggccgcccgcgcacggacgagac

SEQ ID NO: 5649795 - DNA, 25 bp, Homo sapien
cctgtctcgtccgtgcgcgggcggc

SEQ ID NO: 5649796 - DNA, 25 bp, Homo sapien
gccgcccgcgcacggacgagacagg

SEQ ID NO: 5649797 - DNA, 25 bp, Homo sapien
caacgtcgaggagagtatgcaggtc

SEQ ID NO: 5649798 - DNA, 25 bp, Homo sapien
gacctgcatactctcctcgacgttg

SEQ ID NO: 5649799 - DNA, 25 bp, Homo sapien
ggaaaaaacttagaagatttgtctc

SEQ ID NO: 5649800 - DNA, 25 bp, Homo sapien
gagacaaatcttctaagttttttcc

SEQ ID NO: 5649801 - DNA, 25 bp, Homo sapien
ccgagacagtcaaatcaggtgaacc

SEQ ID NO: 5649802 - DNA, 25 bp, Homo sapien
ggttcacctgatttgactgtctcgg

SEQ ID NO: 5649803 - DNA, 25 bp, Homo sapien
cgttccgagatctgacgctcctaga

SEQ ID NO: 5649804 - DNA, 25 bp, Homo sapien
tctaggagcgtcagatctcggaacg

SEQ ID NO: 5649805 - DNA, 25 bp, Homo sapien
gcaactaccaagtctccactcttaa

SEQ ID NO: 5649806 - DNA, 25 bp, Homo sapien
ttaagagtggagacttggtagttgc

SEQ ID NO: 5649807 - DNA, 25 bp, Homo sapien
ccctcataaaatccttaccggctgt

SEQ ID NO: 5649808 - DNA, 25 bp, Homo sapien
acagccggtaaggattttatgaggg

SEQ ID NO: 5649809 - DNA, 25 bp, Homo sapien
atgtctttaagaccatcagaaggtt

SEQ ID NO: 5649810 - DNA, 25 bp, Homo sapien
aaccttctgatggtcttaaagacat

SEQ ID NO: 5649811 - DNA, 25 bp, Homo sapien
tgccgcgtgcgactcccgccgccga

SEQ ID NO: 5649812 - DNA, 25 bp, Homo sapien
tcggcggcgggagtcgcacgcggca

SEQ ID NO: 5649813 - DNA, 25 bp, Homo sapien
ggtgtgccgcgtgcgactcccgccg

SEQ ID NO: 5649814 - DNA, 25 bp, Homo sapien
cggcgggagtcgcacgcggcacacc

SEQ ID NO: 5649815 - DNA, 25 bp, Homo sapien
gatttcaggtactgcgtctccgtct

SEQ ID NO: 5649816 - DNA, 25 bp, Homo sapien
agacggagacgcagtacctgaaatc

SEQ ID NO: 5649817 - DNA, 25 bp, Homo sapien
cgaaccagttcctgacttctgtcgt

SEQ ID NO: 5649818 - DNA, 25 bp, Homo sapien
acgacagaagtcaggaactggttcg

SEQ ID NO: 5649819 - DNA, 25 bp, Homo sapien
cgaggctcgtaggtgtcggagaaaa

SEQ ID NO: 5649820 - DNA, 25 bp, Homo sapien
ttttctccgacacctacgagcctcg

SEQ ID NO: 5649821 - DNA, 25 bp, Homo sapien
tccgggcggggggtcatcgcaccta

SEQ ID NO: 5649822 - DNA, 25 bp, Homo sapien
taggtgcgatgaccccccgcccgga

SEQ ID NO: 5649823 - DNA, 25 bp, Homo sapien
gaagaaacaaaatagtatccgtcag

SEQ ID NO: 5649824 - DNA, 25 bp, Homo sapien
ctgacggatactattttgtttcttc

SEQ ID NO: 5649825 - DNA, 25 bp, Homo sapien
agaggagaggaggacggtttggaag

SEQ ID NO: 5649826 - DNA, 25 bp, Homo sapien
cttccaaaccgtcctcctctcctct

SEQ ID NO: 5649827 - DNA, 25 bp, Homo sapien
tctgaaatacagagcattgactttt

SEQ ID NO: 5649828 - DNA, 25 bp, Homo sapien
aaaagtcaatgctctgtatttcaga

SEQ ID NO: 5649829 - DNA, 25 bp, Homo sapien
cgtaggaccagctccacccgtggag

SEQ ID NO: 5649830 - DNA, 25 bp, Homo sapien
ctccacgggtggagctggtcctacg

SEQ ID NO: 5649831 - DNA, 25 bp, Homo sapien
gctcgcccgccacccttggtgagcg

SEQ ID NO: 5649832 - DNA, 25 bp, Homo sapien
cgctcaccaagggtggcgggcgagc

SEQ ID NO: 5649833 - DNA, 25 bp, Homo sapien
ctctgttatgtagggattcaacgac

SEQ ID NO: 5649834 - DNA, 25 bp, Homo sapien
gtcgttgaatccctacataacagag

SEQ ID NO: 5649835 - DNA, 25 bp, Homo sapien
gcgcggtctcggcgcgggcctccgg

SEQ ID NO: 5649836 - DNA, 25 bp, Homo sapien
ccggaggcccgcgccgagaccgcgc

SEQ ID NO: 5649837 - DNA, 25 bp, Homo sapien
gggcgacggggcactcccgaggtag

SEQ ID NO: 5649838 - DNA, 25 bp, Homo sapien
ctacctcgggagtgccccgtcgccc

SEQ ID NO: 5649839 - DNA, 25 bp, Homo sapien
acagaataaccagaaagatccgtct

SEQ ID NO: 5649840 - DNA, 25 bp, Homo sapien
agacggatctttctggttattctgt

SEQ ID NO: 5649841 - DNA, 25 bp, Homo sapien
tgtacacaggggcttctcaaagaga

SEQ ID NO: 5649842 - DNA, 25 bp, Homo sapien
tctctttgagaagcccctgtgtaca

SEQ ID NO: 5649843 - DNA, 25 bp, Homo sapien
tcacaacatttcctgacattcggtt

SEQ ID NO: 5649844 - DNA, 25 bp, Homo sapien
aaccgaatgtcaggaaatgttgtga

SEQ ID NO: 5649845 - DNA, 25 bp, Homo sapien
gtcccgaagcctcgtgcgcaactat

SEQ ID NO: 5649846 - DNA, 25 bp, Homo sapien
atagttgcgcacgaggcttcgggac

SEQ ID NO: 5649847 - DNA, 25 bp, Homo sapien
acataggtaatgtaggtttacaaaa

SEQ ID NO: 5649848 - DNA, 25 bp, Homo sapien
ttttgtaaacctacattacctatgt

SEQ ID NO: 5649849 - DNA, 25 bp, Homo sapien
gtttcccgcagtgggtgacaacaac

SEQ ID NO: 5649850 - DNA, 25 bp, Homo sapien
gttgttgtcacccactgcgggaaac

SEQ ID NO: 5649851 - DNA, 25 bp, Homo sapien
taaacttgttcaggtttttatagaa

SEQ ID NO: 5649852 - DNA, 25 bp, Homo sapien
ttctataaaaacctgaacaagttta

SEQ ID NO: 5649853 - DNA, 25 bp, Homo sapien
agaatcacagtcacattagtagtta

SEQ ID NO: 5649854 - DNA, 25 bp, Homo sapien
taactactaatgtgactgtgattct

SEQ ID NO: 5649855 - DNA, 25 bp, Homo sapien
tgcgacgacctgagcgtgcccctcg

SEQ ID NO: 5649856 - DNA, 25 bp, Homo sapien
cgaggggcacgctcaggtcgtcgca

SEQ ID NO: 5649857 - DNA, 25 bp, Homo sapien
cccggtcaggtcgacaggacgggtc

SEQ ID NO: 5649858 - DNA, 25 bp, Homo sapien
gacccgtcctgtcgacctgaccggg

SEQ ID NO: 5649859 - DNA, 25 bp, Homo sapien
ttgccgttttcctcgggaagaagag

SEQ ID NO: 5649860 - DNA, 25 bp, Homo sapien
ctcttcttcccgaggaaaacggcaa

SEQ ID NO: 5649861 - DNA, 25 bp, Homo sapien
tcgcgtctcgcctgggctgcgccgc

SEQ ID NO: 5649862 - DNA, 25 bp, Homo sapien
gcggcgcagcccaggcgagacgcga

SEQ ID NO: 5649863 - DNA, 25 bp, Homo sapien
agactcattgacgagtcaggtaagt

SEQ ID NO: 5649864 - DNA, 25 bp, Homo sapien
acttacctgactcgtcaatgagtct

SEQ ID NO: 5649865 - DNA, 25 bp, Homo sapien
cgcagggtcttgacgactgcagtgt

SEQ ID NO: 5649866 - DNA, 25 bp, Homo sapien
acactgcagtcgtcaagaccctgcg

SEQ ID NO: 5649867 - DNA, 25 bp, Homo sapien
tcgccacagaacgacccgggagatg

SEQ ID NO: 5649868 - DNA, 25 bp, Homo sapien
catctcccgggtcgttctgtggcga

SEQ ID NO: 5649869 - DNA, 25 bp, Homo sapien
taagactgaaaagaagagcataatt

SEQ ID NO: 5649870 - DNA, 25 bp, Homo sapien
aattatgctcttcttttcagtctta

SEQ ID NO: 5649871 - DNA, 25 bp, Homo sapien
gaaacatctatttaggttatgtcat

SEQ ID NO: 5649872 - DNA, 25 bp, Homo sapien
atgacataacctaaatagatgtttc

SEQ ID NO: 5649873 - DNA, 25 bp, Homo sapien
aaaaggtcttcatgtttattagaag

SEQ ID NO: 5649874 - DNA, 25 bp, Homo sapien
cttctaataaacatgaagacctttt

SEQ ID NO: 5649875 - DNA, 25 bp, Homo sapien
tttatttaacttagtgattagtagt

SEQ ID NO: 5649876 - DNA, 25 bp, Homo sapien
actactaatcactaagttaaataaa

SEQ ID NO: 5649877 - DNA, 25 bp, Homo sapien
tcttttgatattagaaggtctataa

SEQ ID NO: 5649878 - DNA, 25 bp, Homo sapien
ttatagaccttctaatatcaaaaga

SEQ ID NO: 5649879 - DNA, 25 bp, Homo sapien
gtagtggcacgacacaggcggtgac

SEQ ID NO: 5649880 - DNA, 25 bp, Homo sapien
gtcaccgcctgtgtcgtgccactac

SEQ ID NO: 5649881 - DNA, 25 bp, Homo sapien
gcctcctatatgtggctcaactaca

SEQ ID NO: 5649882 - DNA, 25 bp, Homo sapien
tgtagttgagccacatataggaggc

SEQ ID NO: 5649883 - DNA, 25 bp, Homo sapien
aggacacgaacagggctagtggagg

SEQ ID NO: 5649884 - DNA, 25 bp, Homo sapien
cctccactagccctgttcgtgtcct

SEQ ID NO: 5649885 - DNA, 25 bp, Homo sapien
gtcttactgctactcaaccatgctg

SEQ ID NO: 5649886 - DNA, 25 bp, Homo sapien
cagcatggttgagtagcagtaagac

SEQ ID NO: 5649887 - DNA, 25 bp, Homo sapien
gagaacaatttgctaaaaatattag

SEQ ID NO: 5649888 - DNA, 25 bp, Homo sapien
ctaatatttttagcaaattgttctc

SEQ ID NO: 5649889 - DNA, 25 bp, Homo sapien
aaactgttgattgcgttccaggaat

SEQ ID NO: 5649890 - DNA, 25 bp, Homo sapien
attcctggaacgcaatcaacagttt

SEQ ID NO: 5649891 - DNA, 25 bp, Homo sapien
gtgagaagaacggacttgtttacct

SEQ ID NO: 5649892 - DNA, 25 bp, Homo sapien
aggtaaacaagtccgttcttctcac

SEQ ID NO: 5649893 - DNA, 25 bp, Homo sapien
tcgaaacaggtctgtgtcactatag

SEQ ID NO: 5649894 - DNA, 25 bp, Homo sapien
ctatagtgacacagacctgtttcga

SEQ ID NO: 5649895 - DNA, 25 bp, Homo sapien
tgacagggttgggcctcggggcgcg

SEQ ID NO: 5649896 - DNA, 25 bp, Homo sapien
cgcgccccgaggcccaaccctgtca

SEQ ID NO: 5649897 - DNA, 25 bp, Homo sapien
aagaacccggtgacaaggtaatgac

SEQ ID NO: 5649898 - DNA, 25 bp, Homo sapien
gtcattaccttgtcaccgggttctt

SEQ ID NO: 5649899 - DNA, 25 bp, Homo sapien
aatcgaaactcaagaagatcaaaga

SEQ ID NO: 5649900 - DNA, 25 bp, Homo sapien
tctttgatcttcttgagtttcgatt

SEQ ID NO: 5649901 - DNA, 25 bp, Homo sapien
acacacaggtatgtgtaacgtgtag

SEQ ID NO: 5649902 - DNA, 25 bp, Homo sapien
ctacacgttacacatacctgtgtgt

SEQ ID NO: 5649903 - DNA, 25 bp, Homo sapien
tttgaacactgtcggaaaaattctt

SEQ ID NO: 5649904 - DNA, 25 bp, Homo sapien
aagaatttttccgacagtgttcaaa

SEQ ID NO: 5649905 - DNA, 25 bp, Homo sapien
aaaggaaataggtatgactcctggt

SEQ ID NO: 5649906 - DNA, 25 bp, Homo sapien
accaggagtcatacctatttccttt

SEQ ID NO: 5649907 - DNA, 25 bp, Homo sapien
cagtaatttagacttcaaaaatggt

SEQ ID NO: 5649908 - DNA, 25 bp, Homo sapien
accatttttgaagtctaaattactg

SEQ ID NO: 5649909 - DNA, 25 bp, Homo sapien
aggtgactcccaatcgtaaacgtat

SEQ ID NO: 5649910 - DNA, 25 bp, Homo sapien
atacgtttacgattgggagtcacct

SEQ ID NO: 5649911 - DNA, 25 bp, Homo sapien
gcatctggggcacgagacacctctc

SEQ ID NO: 5649912 - DNA, 25 bp, Homo sapien
gagaggtgtctcgtgccccagatgc

SEQ ID NO: 5649913 - DNA, 25 bp, Homo sapien
gtctcagtcacagacacgccgagta

SEQ ID NO: 5649914 - DNA, 25 bp, Homo sapien
tactcggcgtgtctgtgactgagac

SEQ ID NO: 5649915 - DNA, 25 bp, Homo sapien
gtcgtctgtgccggcgcgccgaggt

SEQ ID NO: 5649916 - DNA, 25 bp, Homo sapien
acctcggcgcgccggcacagacgac

SEQ ID NO: 5649917 - DNA, 25 bp, Homo sapien
ggtcgtctgtgccggcgcgccgagg

SEQ ID NO: 5649918 - DNA, 25 bp, Homo sapien
cctcggcgcgccggcacagacgacc

SEQ ID NO: 5649919 - DNA, 25 bp, Homo sapien
acagaaacaacagcccgaacaaaag

SEQ ID NO: 5649920 - DNA, 25 bp, Homo sapien
cttttgttcgggctgttgtttctgt

SEQ ID NO: 5649921 - DNA, 25 bp, Homo sapien
gagcagcccggtccgccggcgagct

SEQ ID NO: 5649922 - DNA, 25 bp, Homo sapien
agctcgccggcggaccgggctgctc

SEQ ID NO: 5649923 - DNA, 25 bp, Homo sapien
cccggtccgccggcgagctctcggc

SEQ ID NO: 5649924 - DNA, 25 bp, Homo sapien
gccgagagctcgccggcggaccggg

SEQ ID NO: 5649925 - DNA, 25 bp, Homo sapien
gcccggtccgccggcgagctctcgg

SEQ ID NO: 5649926 - DNA, 25 bp, Homo sapien
ccgagagctcgccggcggaccgggc

SEQ ID NO: 5649927 - DNA, 25 bp, Homo sapien
ctccctatatgataggaatgtttat

SEQ ID NO: 5649928 - DNA, 25 bp, Homo sapien
ataaacattcctatcatatagggag

SEQ ID NO: 5649929 - DNA, 25 bp, Homo sapien
ctgtcgtcttctacctattcctgtt

SEQ ID NO: 5649930 - DNA, 25 bp, Homo sapien
aacaggaataggtagaagacgacag

SEQ ID NO: 5649931 - DNA, 25 bp, Homo sapien
tcttatgtaagacttaagtttttac

SEQ ID NO: 5649932 - DNA, 25 bp, Homo sapien
gtaaaaacttaagtcttacataaga

SEQ ID NO: 5649933 - DNA, 25 bp, Homo sapien
caatcgaaaagtcccacggagaact

SEQ ID NO: 5649934 - DNA, 25 bp, Homo sapien
agttctccgtgggacttttcgattg

SEQ ID NO: 5649935 - DNA, 25 bp, Homo sapien
atttctgtgtatgttgtcgttataa

SEQ ID NO: 5649936 - DNA, 25 bp, Homo sapien
ttataacgacaacatacacagaaat

SEQ ID NO: 5649937 - DNA, 25 bp, Homo sapien
cccaagaagaagagcagcacagacg

SEQ ID NO: 5649938 - DNA, 25 bp, Homo sapien
cgtctgtgctgctcttcttcttggg

SEQ ID NO: 5649939 - DNA, 25 bp, Homo sapien
ctggtccggtattcccacagaaggg

SEQ ID NO: 5649940 - DNA, 25 bp, Homo sapien
cccttctgtgggaataccggaccag

SEQ ID NO: 5649941 - DNA, 25 bp, Homo sapien
gctattctgttgtagacgtgaaaat

SEQ ID NO: 5649942 - DNA, 25 bp, Homo sapien
attttcacgtctacaacagaatagc

SEQ ID NO: 5649943 - DNA, 25 bp, Homo sapien
aacgacccgggagctcgtgcgtcta

SEQ ID NO: 5649944 - DNA, 25 bp, Homo sapien
tagacgcacgagctcccgggtcgtt

SEQ ID NO: 5649945 - DNA, 25 bp, Homo sapien
caaagggtgagggcgtcttgtctgg

SEQ ID NO: 5649946 - DNA, 25 bp, Homo sapien
ccagacaagacgccctcaccctttg

SEQ ID NO: 5649947 - DNA, 25 bp, Homo sapien
gccaatccgacatagtcactcgact

SEQ ID NO: 5649948 - DNA, 25 bp, Homo sapien
agtcgagtgactatgtcggattggc

SEQ ID NO: 5649949 - DNA, 25 bp, Homo sapien
gcggcgagaggctcgagctaggcga

SEQ ID NO: 5649950 - DNA, 25 bp, Homo sapien
tcgcctagctcgagcctctcgccgc

SEQ ID NO: 5649951 - DNA, 25 bp, Homo sapien
aattatatacgattttagaactagt

SEQ ID NO: 5649952 - DNA, 25 bp, Homo sapien
actagttctaaaatcgtatataatt

SEQ ID NO: 5649953 - DNA, 25 bp, Homo sapien
cctcccgtgttccggcgccgccgcc

SEQ ID NO: 5649954 - DNA, 25 bp, Homo sapien
ggcggcggcgccggaacacgggagg

SEQ ID NO: 5649955 - DNA, 25 bp, Homo sapien
ccctcccgtgttccggcgccgccgc

SEQ ID NO: 5649956 - DNA, 25 bp, Homo sapien
gcggcggcgccggaacacgggaggg

SEQ ID NO: 5649957 - DNA, 25 bp, Homo sapien
cggttctaacatgtgacatcctcat

SEQ ID NO: 5649958 - DNA, 25 bp, Homo sapien
atgaggatgtcacatgttagaaccg

SEQ ID NO: 5649959 - DNA, 25 bp, Homo sapien
gattgacttgttctaaggttttgtg

SEQ ID NO: 5649960 - DNA, 25 bp, Homo sapien
cacaaaaccttagaacaagtcaatc

SEQ ID NO: 5649961 - DNA, 25 bp, Homo sapien
ccgggtgcgtgtgtgtcctaccgac

SEQ ID NO: 5649962 - DNA, 25 bp, Homo sapien
gtcggtaggacacacacgcacccgg

SEQ ID NO: 5649963 - DNA, 25 bp, Homo sapien
aagagctaacattaataactggtaa

SEQ ID NO: 5649964 - DNA, 25 bp, Homo sapien
ttaccagttattaatgttagctctt

SEQ ID NO: 5649965 - DNA, 25 bp, Homo sapien
actcgtggagccgggacgtcctccg

SEQ ID NO: 5649966 - DNA, 25 bp, Homo sapien
cggaggacgtcccggctccacgagt

SEQ ID NO: 5649967 - DNA, 25 bp, Homo sapien
aattactatacagaggtcacctccg

SEQ ID NO: 5649968 - DNA, 25 bp, Homo sapien
cggaggtgacctctgtatagtaatt

SEQ ID NO: 5649969 - DNA, 25 bp, Homo sapien
ttagtcccacgtccagatgtgttct

SEQ ID NO: 5649970 - DNA, 25 bp, Homo sapien
agaacacatctggacgtgggactaa

SEQ ID NO: 5649971 - DNA, 25 bp, Homo sapien
gggaccacgtatcccgaaagcagaa

SEQ ID NO: 5649972 - DNA, 25 bp, Homo sapien
ttctgctttcgggatacgtggtccc

SEQ ID NO: 5649973 - DNA, 25 bp, Homo sapien
gtttatgtataagcaacttaaaaac

SEQ ID NO: 5649974 - DNA, 25 bp, Homo sapien
gtttttaagttgcttatacataaac

SEQ ID NO: 5649975 - DNA, 25 bp, Homo sapien
ttgtttatgtataagcaacttaaaa

SEQ ID NO: 5649976 - DNA, 25 bp, Homo sapien
ttttaagttgcttatacataaacaa

SEQ ID NO: 5649977 - DNA, 25 bp, Homo sapien
cgcgcgtgcgccagggccacacgtc

SEQ ID NO: 5649978 - DNA, 25 bp, Homo sapien
gacgtgtggccctggcgcacgcgcg

SEQ ID NO: 5649979 - DNA, 25 bp, Homo sapien
tcttaagacgtcgtcacgtctataa

SEQ ID NO: 5649980 - DNA, 25 bp, Homo sapien
ttatagacgtgacgacgtcttaaga

SEQ ID NO: 5649981 - DNA, 25 bp, Homo sapien
gtatataagaggacataggctgtct

SEQ ID NO: 5649982 - DNA, 25 bp, Homo sapien
agacagcctatgtcctcttatatac

SEQ ID NO: 5649983 - DNA, 25 bp, Homo sapien
ctcacgtagttgataaagactttat

SEQ ID NO: 5649984 - DNA, 25 bp, Homo sapien
ataaagtctttatcaactacgtgag

SEQ ID NO: 5649985 - DNA, 25 bp, Homo sapien
gacttccactaacacgtaaggaggt

SEQ ID NO: 5649986 - DNA, 25 bp, Homo sapien
acctccttacgtgttagtggaagtc

SEQ ID NO: 5649987 - DNA, 25 bp, Homo sapien
gacgcctgaagatcggggaactccc

SEQ ID NO: 5649988 - DNA, 25 bp, Homo sapien
gggagttccccgatcttcaggcgtc

SEQ ID NO: 5649989 - DNA, 25 bp, Homo sapien
cgggcactagccacgcgctgggccc

SEQ ID NO: 5649990 - DNA, 25 bp, Homo sapien
gggcccagcgcgtggctagtgcccg

SEQ ID NO: 5649991 - DNA, 25 bp, Homo sapien
gcccccgggcactagccacgcgctg

SEQ ID NO: 5649992 - DNA, 25 bp, Homo sapien
cagcgcgtggctagtgcccgggggc

SEQ ID NO: 5649993 - DNA, 25 bp, Homo sapien
aggagtcgtacaaatactttccacg

SEQ ID NO: 5649994 - DNA, 25 bp, Homo sapien
cgtggaaagtatttgtacgactcct

SEQ ID NO: 5649995 - DNA, 25 bp, Homo sapien
cgggatttccagagaatgtcagtag

SEQ ID NO: 5649996 - DNA, 25 bp, Homo sapien
ctactgacattctctggaaatcccg

SEQ ID NO: 5649997 - DNA, 25 bp, Homo sapien
tttagaagactttccgagacattaa

SEQ ID NO: 5649998 - DNA, 25 bp, Homo sapien
ttaatgtctcggaaagtcttctaaa

SEQ ID NO: 5649999 - DNA, 25 bp, Homo sapien
ctcccggaacttctgctggaccgtg

SEQ ID NO: 5650000 - DNA, 25 bp, Homo sapien
cacggtccagcagaagttccgggag

SEQ ID NO: 5650001 - DNA, 25 bp, Homo sapien
agtcggtgacgcacgaccggtccga

SEQ ID NO: 5650002 - DNA, 25 bp, Homo sapien
tcggaccggtcgtgcgtcaccgact

SEQ ID NO: 5650003 - DNA, 25 bp, Homo sapien
tatcgagtcaaagaaaatccgggta

SEQ ID NO: 5650004 - DNA, 25 bp, Homo sapien
tacccggattttctttgactcgata

SEQ ID NO: 5650005 - DNA, 25 bp, Homo sapien
aacaatttattatgctttagtttac

SEQ ID NO: 5650006 - DNA, 25 bp, Homo sapien
gtaaactaaagcataataaattgtt

SEQ ID NO: 5650007 - DNA, 25 bp, Homo sapien
aatatgctacaagtcctgacacgaa

SEQ ID NO: 5650008 - DNA, 25 bp, Homo sapien
ttcgtgtcaggacttgtagcatatt

SEQ ID NO: 5650009 - DNA, 25 bp, Homo sapien
ggaggtgagccttcgggaggaaaga

SEQ ID NO: 5650010 - DNA, 25 bp, Homo sapien
tctttcctcccgaaggctcacctcc

SEQ ID NO: 5650011 - DNA, 25 bp, Homo sapien
gggggttcaggcaccggccgcgagt

SEQ ID NO: 5650012 - DNA, 25 bp, Homo sapien
actcgcggccggtgcctgaaccccc

SEQ ID NO: 5650013 - DNA, 25 bp, Homo sapien
caaggaactataccgtttggaacga

SEQ ID NO: 5650014 - DNA, 25 bp, Homo sapien
tcgttccaaacggtatagttccttg

SEQ ID NO: 5650015 - DNA, 25 bp, Homo sapien
tgggtgtctcccggtatcggcacac

SEQ ID NO: 5650016 - DNA, 25 bp, Homo sapien
gtgtgccgataccgggagacaccca

SEQ ID NO: 5650017 - DNA, 25 bp, Homo sapien
actcaaactaaacgtcattagagag

SEQ ID NO: 5650018 - DNA, 25 bp, Homo sapien
ctctctaatgacgtttagtttgagt

SEQ ID NO: 5650019 - DNA, 25 bp, Homo sapien
acggaggatcaacaccagcaccaca

SEQ ID NO: 5650020 - DNA, 25 bp, Homo sapien
tgtggtgctggtgttgatcctccgt

SEQ ID NO: 5650021 - DNA, 25 bp, Homo sapien
cacgttcgatgttttcgactcccct

SEQ ID NO: 5650022 - DNA, 25 bp, Homo sapien
aggggagtcgaaaacatcgaacgtg

SEQ ID NO: 5650023 - DNA, 25 bp, Homo sapien
cgtccgccccgctcgaggggagtcc

SEQ ID NO: 5650024 - DNA, 25 bp, Homo sapien
ggactcccctcgagcggggcggacg

SEQ ID NO: 5650025 - DNA, 25 bp, Homo sapien
attaatcttagtctattatctcaag

SEQ ID NO: 5650026 - DNA, 25 bp, Homo sapien
cttgagataatagactaagattaat

SEQ ID NO: 5650027 - DNA, 25 bp, Homo sapien
gtctttacattatcttattcttttg

SEQ ID NO: 5650028 - DNA, 25 bp, Homo sapien
caaaagaataagataatgtaaagac

SEQ ID NO: 5650029 - DNA, 25 bp, Homo sapien
aggtgaacaaggtggaaactataaa

SEQ ID NO: 5650030 - DNA, 25 bp, Homo sapien
tttatagtttccaccttgttcacct

SEQ ID NO: 5650031 - DNA, 25 bp, Homo sapien
tttgttccatctccttaacagggtg

SEQ ID NO: 5650032 - DNA, 25 bp, Homo sapien
caccctgttaaggagatggaacaaa

SEQ ID NO: 5650033 - DNA, 25 bp, Homo sapien
aaccgtaacagacttcagactgaag

SEQ ID NO: 5650034 - DNA, 25 bp, Homo sapien
cttcagtctgaagtctgttacggtt

SEQ ID NO: 5650035 - DNA, 25 bp, Homo sapien
ggagatagacatattgacccaaggg

SEQ ID NO: 5650036 - DNA, 25 bp, Homo sapien
cccttgggtcaatatgtctatctcc

SEQ ID NO: 5650037 - DNA, 25 bp, Homo sapien
tactctttaattagtgtattaagtg

SEQ ID NO: 5650038 - DNA, 25 bp, Homo sapien
cacttaatacactaattaaagagta

SEQ ID NO: 5650039 - DNA, 25 bp, Homo sapien
atactctttaattagtgtattaagt

SEQ ID NO: 5650040 - DNA, 25 bp, Homo sapien
acttaatacactaattaaagagtat

SEQ ID NO: 5650041 - DNA, 25 bp, Homo sapien
gatactctttaattagtgtattaag

SEQ ID NO: 5650042 - DNA, 25 bp, Homo sapien
cttaatacactaattaaagagtatc

SEQ ID NO: 5650043 - DNA, 25 bp, Homo sapien
agaccttaagatctcttctacgaaa

SEQ ID NO: 5650044 - DNA, 25 bp, Homo sapien
tttcgtagaagagatcttaaggtct

SEQ ID NO: 5650045 - DNA, 25 bp, Homo sapien
acttggaatcttaggccttctggag

SEQ ID NO: 5650046 - DNA, 25 bp, Homo sapien
ctccagaaggcctaagattccaagt

SEQ ID NO: 5650047 - DNA, 25 bp, Homo sapien
tccgtggcgccccggtcgtctgtgg

SEQ ID NO: 5650048 - DNA, 25 bp, Homo sapien
ccacagacgaccggggcgccacgga

SEQ ID NO: 5650049 - DNA, 25 bp, Homo sapien
gtcgtctgtggacggccgccggtcg

SEQ ID NO: 5650050 - DNA, 25 bp, Homo sapien
cgaccggcggccgtccacagacgac

SEQ ID NO: 5650051 - DNA, 25 bp, Homo sapien
gtccgggatctgggccctcgtgcgc

SEQ ID NO: 5650052 - DNA, 25 bp, Homo sapien
gcgcacgagggcccagatcccggac

SEQ ID NO: 5650053 - DNA, 25 bp, Homo sapien
gggatctgggccctcgtgcgcgccg

SEQ ID NO: 5650054 - DNA, 25 bp, Homo sapien
cggcgcgcacgagggcccagatccc

SEQ ID NO: 5650055 - DNA, 25 bp, Homo sapien
gtccattatcacatctatatagaag

SEQ ID NO: 5650056 - DNA, 25 bp, Homo sapien
cttctatatagatgtgataatggac

SEQ ID NO: 5650057 - DNA, 25 bp, Homo sapien
tccccggcaggggtgatgaagtcac

SEQ ID NO: 5650058 - DNA, 25 bp, Homo sapien
gtgacttcatcacccctgccgggga

SEQ ID NO: 5650059 - DNA, 25 bp, Homo sapien
acggcaatcacgaatccttctctgc

SEQ ID NO: 5650060 - DNA, 25 bp, Homo sapien
gcagagaaggattcgtgattgccgt

SEQ ID NO: 5650061 - DNA, 25 bp, Homo sapien
cctcgtaagatcgttccgggacggc

SEQ ID NO: 5650062 - DNA, 25 bp, Homo sapien
gccgtcccggaacgatcttacgagg

SEQ ID NO: 5650063 - DNA, 25 bp, Homo sapien
attcggtcttccgagggaatcgagg

SEQ ID NO: 5650064 - DNA, 25 bp, Homo sapien
cctcgattccctcggaagaccgaat

SEQ ID NO: 5650065 - DNA, 25 bp, Homo sapien
cccggccccggacaaggcgcgagtg

SEQ ID NO: 5650066 - DNA, 25 bp, Homo sapien
cactcgcgccttgtccggggccggg

SEQ ID NO: 5650067 - DNA, 25 bp, Homo sapien
gcccggccccggacaaggcgcgagt

SEQ ID NO: 5650068 - DNA, 25 bp, Homo sapien
actcgcgccttgtccggggccgggc

SEQ ID NO: 5650069 - DNA, 25 bp, Homo sapien
ggcccggccccggacaaggcgcgag

SEQ ID NO: 5650070 - DNA, 25 bp, Homo sapien
ctcgcgccttgtccggggccgggcc

SEQ ID NO: 5650071 - DNA, 25 bp, Homo sapien
gcggcccggccccggacaaggcgcg

SEQ ID NO: 5650072 - DNA, 25 bp, Homo sapien
cgcgccttgtccggggccgggccgc

SEQ ID NO: 5650073 - DNA, 25 bp, Homo sapien
tcgacagaccgttggtcaccattgg

SEQ ID NO: 5650074 - DNA, 25 bp, Homo sapien
ccaatggtgaccaacggtctgtcga

SEQ ID NO: 5650075 - DNA, 25 bp, Homo sapien
ttgttacaccattacacaatcaaaa

SEQ ID NO: 5650076 - DNA, 25 bp, Homo sapien
ttttgattgtgtaatggtgtaacaa

SEQ ID NO: 5650077 - DNA, 25 bp, Homo sapien
tctatctagtcttgtagtgtggtgt

SEQ ID NO: 5650078 - DNA, 25 bp, Homo sapien
acaccacactacaagactagataga

SEQ ID NO: 5650079 - DNA, 25 bp, Homo sapien
gacgacggccagaggcgcgcgagtg

SEQ ID NO: 5650080 - DNA, 25 bp, Homo sapien
cactcgcgcgcctctggccgtcgtc

SEQ ID NO: 5650081 - DNA, 25 bp, Homo sapien
taagcgcttccccataacttaccga

SEQ ID NO: 5650082 - DNA, 25 bp, Homo sapien
tcggtaagttatggggaagcgctta

SEQ ID NO: 5650083 - DNA, 25 bp, Homo sapien
acaccagggtccagtggttcgctaa

SEQ ID NO: 5650084 - DNA, 25 bp, Homo sapien
ttagcgaaccactggaccctggtgt

SEQ ID NO: 5650085 - DNA, 25 bp, Homo sapien
agtataatagaataacatggtttac

SEQ ID NO: 5650086 - DNA, 25 bp, Homo sapien
gtaaaccatgttattctattatact

SEQ ID NO: 5650087 - DNA, 25 bp, Homo sapien
acgactggtctcaatgggcaagatg

SEQ ID NO: 5650088 - DNA, 25 bp, Homo sapien
catcttgcccattgagaccagtcgt

SEQ ID NO: 5650089 - DNA, 25 bp, Homo sapien
gtgttcatggcgtagacgtcagacc

SEQ ID NO: 5650090 - DNA, 25 bp, Homo sapien
ggtctgacgtctacgccatgaacac

SEQ ID NO: 5650091 - DNA, 25 bp, Homo sapien
gagaaaaggactacaactcgaacga

SEQ ID NO: 5650092 - DNA, 25 bp, Homo sapien
tcgttcgagttgtagtccttttctc

SEQ ID NO: 5650093 - DNA, 25 bp, Homo sapien
tataaaatagacttaatatgattcg

SEQ ID NO: 5650094 - DNA, 25 bp, Homo sapien
cgaatcatattaagtctattttata

SEQ ID NO: 5650095 - DNA, 25 bp, Homo sapien
atccattcgtctttatttgagggtt

SEQ ID NO: 5650096 - DNA, 25 bp, Homo sapien
aaccctcaaataaagacgaatggat

SEQ ID NO: 5650097 - DNA, 25 bp, Homo sapien
gatccctgtttcttatttttttgta

SEQ ID NO: 5650098 - DNA, 25 bp, Homo sapien
tacaaaaaaataagaaacagggatc

SEQ ID NO: 5650099 - DNA, 25 bp, Homo sapien
agtccatgaatttcaatcgaggttt

SEQ ID NO: 5650100 - DNA, 25 bp, Homo sapien
aaacctcgattgaaattcatggact

SEQ ID NO: 5650101 - DNA, 25 bp, Homo sapien
tcctccgacggttattcgatttcag

SEQ ID NO: 5650102 - DNA, 25 bp, Homo sapien
ctgaaatcgaataaccgtcggagga

SEQ ID NO: 5650103 - DNA, 25 bp, Homo sapien
ccgtggaagtggtcggaccccgctc

SEQ ID NO: 5650104 - DNA, 25 bp, Homo sapien
gagcggggtccgaccacttccacgg

SEQ ID NO: 5650105 - DNA, 25 bp, Homo sapien
tctcgtctgggcttcgtccagacgg

SEQ ID NO: 5650106 - DNA, 25 bp, Homo sapien
ccgtctggacgaagcccagacgaga

SEQ ID NO: 5650107 - DNA, 25 bp, Homo sapien
ggtgcgagggccgtagccggcggag

SEQ ID NO: 5650108 - DNA, 25 bp, Homo sapien
ctccgccggctacggccctcgcacc

SEQ ID NO: 5650109 - DNA, 25 bp, Homo sapien
taaaatcgtatacgatactaaaagt

SEQ ID NO: 5650110 - DNA, 25 bp, Homo sapien
acttttagtatcgtatacgatttta

SEQ ID NO: 5650111 - DNA, 25 bp, Homo sapien
aaaccaattaaaatcgtatacgata

SEQ ID NO: 5650112 - DNA, 25 bp, Homo sapien
tatcgtatacgattttaattggttt

SEQ ID NO: 5650113 - DNA, 25 bp, Homo sapien
gaaagacgtagtaattagttaccac

SEQ ID NO: 5650114 - DNA, 25 bp, Homo sapien
gtggtaactaattactacgtctttc

SEQ ID NO: 5650115 - DNA, 25 bp, Homo sapien
atggtcgcttcacaccgtatcggta

SEQ ID NO: 5650116 - DNA, 25 bp, Homo sapien
taccgatacggtgtgaagcgaccat

SEQ ID NO: 5650117 - DNA, 25 bp, Homo sapien
cggcgtgggcggcacgccctaggga

SEQ ID NO: 5650118 - DNA, 25 bp, Homo sapien
tccctagggcgtgccgcccacgccg

SEQ ID NO: 5650119 - DNA, 25 bp, Homo sapien
cggcgtgggcggcatggacggcgta

SEQ ID NO: 5650120 - DNA, 25 bp, Homo sapien
tacgccgtccatgccgcccacgccg

SEQ ID NO: 5650121 - DNA, 25 bp, Homo sapien
taaacgtagaaggttgaactcagaa

SEQ ID NO: 5650122 - DNA, 25 bp, Homo sapien
ttctgagttcaaccttctacgttta

SEQ ID NO: 5650123 - DNA, 25 bp, Homo sapien
ggacgagtcacaacccacctcggtg

SEQ ID NO: 5650124 - DNA, 25 bp, Homo sapien
caccgaggtgggttgtgactcgtcc

SEQ ID NO: 5650125 - DNA, 25 bp, Homo sapien
cacaagtggacggtcgtgcgtcgac

SEQ ID NO: 5650126 - DNA, 25 bp, Homo sapien
gtcgacgcacgaccgtccacttgtg

SEQ ID NO: 5650127 - DNA, 25 bp, Homo sapien
ttaagaagagagtgttactccagaa

SEQ ID NO: 5650128 - DNA, 25 bp, Homo sapien
ttctggagtaacactctcttcttaa

SEQ ID NO: 5650129 - DNA, 25 bp, Homo sapien
tcggtaatttataatgtcgacatat

SEQ ID NO: 5650130 - DNA, 25 bp, Homo sapien
atatgtcgacattataaattaccga

SEQ ID NO: 5650131 - DNA, 25 bp, Homo sapien
ccccgccccgcctctacgtcagcag

SEQ ID NO: 5650132 - DNA, 25 bp, Homo sapien
ctgctgacgtagaggcggggcgggg

SEQ ID NO: 5650133 - DNA, 25 bp, Homo sapien
accccgccccgcctctacgtcagca

SEQ ID NO: 5650134 - DNA, 25 bp, Homo sapien
tgctgacgtagaggcggggcggggt

SEQ ID NO: 5650135 - DNA, 25 bp, Homo sapien
aagtaggaaaaaatctagaacacaa

SEQ ID NO: 5650136 - DNA, 25 bp, Homo sapien
ttgtgttctagattttttcctactt

SEQ ID NO: 5650137 - DNA, 25 bp, Homo sapien
gcgaggaggcgcgtcttcgcggccg

SEQ ID NO: 5650138 - DNA, 25 bp, Homo sapien
cggccgcgaagacgcgcctcctcgc

SEQ ID NO: 5650139 - DNA, 25 bp, Homo sapien
cgagaagtgtaggtgggaagaatct

SEQ ID NO: 5650140 - DNA, 25 bp, Homo sapien
agattcttcccacctacacttctcg

SEQ ID NO: 5650141 - DNA, 25 bp, Homo sapien
acctctatgtgatgtttactaacta

SEQ ID NO: 5650142 - DNA, 25 bp, Homo sapien
tagttagtaaacatcacatagaggt

SEQ ID NO: 5650143 - DNA, 25 bp, Homo sapien
cacttatttatggttcaagatacgg

SEQ ID NO: 5650144 - DNA, 25 bp, Homo sapien
ccgtatcttgaaccataaataagtg

SEQ ID NO: 5650145 - DNA, 25 bp, Homo sapien
tgtagaggtgtgagaagtcccaacc

SEQ ID NO: 5650146 - DNA, 25 bp, Homo sapien
ggttgggacttctcacacctctaca

SEQ ID NO: 5650147 - DNA, 25 bp, Homo sapien
ctgtctacgccggtcgccgccggtg

SEQ ID NO: 5650148 - DNA, 25 bp, Homo sapien
caccggcggcgaccggcgtagacag

SEQ ID NO: 5650149 - DNA, 25 bp, Homo sapien
ggtccgttcggctcgatcggtcccc

SEQ ID NO: 5650150 - DNA, 25 bp, Homo sapien
ggggaccgatcgagccgaacggacc

SEQ ID NO: 5650151 - DNA, 25 bp, Homo sapien
agagacatagaaccttagagcaaac

SEQ ID NO: 5650152 - DNA, 25 bp, Homo sapien
gtttgctctaaggttctatgtctct

SEQ ID NO: 5650153 - DNA, 25 bp, Homo sapien
cgggagggaaccacgactagtcgac

SEQ ID NO: 5650154 - DNA, 25 bp, Homo sapien
gtcgactagtcgtggttccctcccg

SEQ ID NO: 5650155 - DNA, 25 bp, Homo sapien
atgactgaagaagtctgtgatccga

SEQ ID NO: 5650156 - DNA, 25 bp, Homo sapien
tcggatcacagacttcttcagtcat

SEQ ID NO: 5650157 - DNA, 25 bp, Homo sapien
tgtacccctcggaggcccacggtgg

SEQ ID NO: 5650158 - DNA, 25 bp, Homo sapien
ccaccgtgggcctccgaggggtaca

SEQ ID NO: 5650159 - DNA, 25 bp, Homo sapien
ccctccagctcgaaccccgtcgttc

SEQ ID NO: 5650160 - DNA, 25 bp, Homo sapien
gaacgacggggttcgagctggaggg

SEQ ID NO: 5650161 - DNA, 25 bp, Homo sapien
cttcgcacacttggacggctgggcg

SEQ ID NO: 5650162 - DNA, 25 bp, Homo sapien
cgcccagccgtccaagtgtgcgaag

SEQ ID NO: 5650163 - DNA, 25 bp, Homo sapien
ccgccgttccgaacgcgccccactg

SEQ ID NO: 5650164 - DNA, 25 bp, Homo sapien
cagtggggcgcgttcggaacggcgg

SEQ ID NO: 5650165 - DNA, 25 bp, Homo sapien
gccggcgcggtgttccccggctccc

SEQ ID NO: 5650166 - DNA, 25 bp, Homo sapien
gggagccggggaacaccgcgccggc

SEQ ID NO: 5650167 - DNA, 25 bp, Homo sapien
agaagacttacagtttaggacaaat

SEQ ID NO: 5650168 - DNA, 25 bp, Homo sapien
atttgtcctaaactgtaagtcttct

SEQ ID NO: 5650169 - DNA, 25 bp, Homo sapien
accgtagtggcagcctcaggccgag

SEQ ID NO: 5650170 - DNA, 25 bp, Homo sapien
ctcggcctgaggctgccactacggt

SEQ ID NO: 5650171 - DNA, 25 bp, Homo sapien
gtaaaaacaaacgttgtgttctgag

SEQ ID NO: 5650172 - DNA, 25 bp, Homo sapien
ctcagaacacaacgtttgtttttac

SEQ ID NO: 5650173 - DNA, 25 bp, Homo sapien
agggccgcgggaggacatcgccggg

SEQ ID NO: 5650174 - DNA, 25 bp, Homo sapien
cccggcgatgtcctcccgcggccct

SEQ ID NO: 5650175 - DNA, 25 bp, Homo sapien
atatcaataaacatcagtaataaag

SEQ ID NO: 5650176 - DNA, 25 bp, Homo sapien
ctttattactgatgtttattgatat

SEQ ID NO: 5650177 - DNA, 25 bp, Homo sapien
caatatcaataaacatcagtaataa

SEQ ID NO: 5650178 - DNA, 25 bp, Homo sapien
ttattactgatgtttattgatattg

SEQ ID NO: 5650179 - DNA, 25 bp, Homo sapien
atcaatatcaataaacatcagtaat

SEQ ID NO: 5650180 - DNA, 25 bp, Homo sapien
attactgatgtttattgatattgat

SEQ ID NO: 5650181 - DNA, 25 bp, Homo sapien
aatcaatatcaataaacatcagtaa

SEQ ID NO: 5650182 - DNA, 25 bp, Homo sapien
ttactgatgtttattgatattgatt

SEQ ID NO: 5650183 - DNA, 25 bp, Homo sapien
tgagacccctagacctacgacagtc

SEQ ID NO: 5650184 - DNA, 25 bp, Homo sapien
gactgtcgtaggtctaggggtctca

SEQ ID NO: 5650185 - DNA, 25 bp, Homo sapien
cgtaacgtaagcacctctactttat

SEQ ID NO: 5650186 - DNA, 25 bp, Homo sapien
ataaagtagaggtgcttacgttacg

SEQ ID NO: 5650187 - DNA, 25 bp, Homo sapien
gtgaaccgagaaagttcccgcaaag

SEQ ID NO: 5650188 - DNA, 25 bp, Homo sapien
ctttgcgggaactttctcggttcac

SEQ ID NO: 5650189 - DNA, 25 bp, Homo sapien
gaacggaatccccatagtctaaagg

SEQ ID NO: 5650190 - DNA, 25 bp, Homo sapien
cctttagactatggggattccgttc

SEQ ID NO: 5650191 - DNA, 25 bp, Homo sapien
cgcctcttccgggacagccgcgggc

SEQ ID NO: 5650192 - DNA, 25 bp, Homo sapien
gcccgcggctgtcccggaagaggcg

SEQ ID NO: 5650193 - DNA, 25 bp, Homo sapien
cgagggtccaaagagacttgaccat

SEQ ID NO: 5650194 - DNA, 25 bp, Homo sapien
atggtcaagtctctttggaccctcg

SEQ ID NO: 5650195 - DNA, 25 bp, Homo sapien
gctccaaagggtccatccttcctgt

SEQ ID NO: 5650196 - DNA, 25 bp, Homo sapien
acaggaaggatggaccctttggagc

SEQ ID NO: 5650197 - DNA, 25 bp, Homo sapien
gaacacgcctctgtcatggaggagg

SEQ ID NO: 5650198 - DNA, 25 bp, Homo sapien
cctcctccatgacagaggcgtgttc

SEQ ID NO: 5650199 - DNA, 25 bp, Homo sapien
gaggactcctacaagactcctgtgt

SEQ ID NO: 5650200 - DNA, 25 bp, Homo sapien
acacaggagtcttgtaggagtcctc

SEQ ID NO: 5650201 - DNA, 25 bp, Homo sapien
atataagttggaaccagttcaaaac

SEQ ID NO: 5650202 - DNA, 25 bp, Homo sapien
gttttgaactggttccaacttatat

SEQ ID NO: 5650203 - DNA, 25 bp, Homo sapien
agtattgccactataacttccgtct

SEQ ID NO: 5650204 - DNA, 25 bp, Homo sapien
agacggaagttatagtggcaatact

SEQ ID NO: 5650205 - DNA, 25 bp, Homo sapien
aggatccgggtattcgactgcacac

SEQ ID NO: 5650206 - DNA, 25 bp, Homo sapien
gtgtgcagtcgaatacccggatcct

SEQ ID NO: 5650207 - DNA, 25 bp, Homo sapien
cgaagccacggttccaccctggaca

SEQ ID NO: 5650208 - DNA, 25 bp, Homo sapien
tgtccagggtggaaccgtggcttcg

SEQ ID NO: 5650209 - DNA, 25 bp, Homo sapien
gaccttcgtaattgtgaaacaacgg

SEQ ID NO: 5650210 - DNA, 25 bp, Homo sapien
ccgttgtttcacaattacgaaggtc

SEQ ID NO: 5650211 - DNA, 25 bp, Homo sapien
aagtcacatctccacggggtctacg

SEQ ID NO: 5650212 - DNA, 25 bp, Homo sapien
cgtagaccccgtggagatgtgactt

SEQ ID NO: 5650213 - DNA, 25 bp, Homo sapien
agtcccgcgacacgcgtgccccggt

SEQ ID NO: 5650214 - DNA, 25 bp, Homo sapien
accggggcacgcgtgtcgcgggact

SEQ ID NO: 5650215 - DNA, 25 bp, Homo sapien
aatcttcccagcaaagtataagaag

SEQ ID NO: 5650216 - DNA, 25 bp, Homo sapien
cttcttatactttgctgggaagatt

SEQ ID NO: 5650217 - DNA, 25 bp, Homo sapien
ctgaaggagccctcgcgtctagaca

SEQ ID NO: 5650218 - DNA, 25 bp, Homo sapien
tgtctagacgcgagggctccttcag

SEQ ID NO: 5650219 - DNA, 25 bp, Homo sapien
cccgcgcgtggccagtcgcctccgc

SEQ ID NO: 5650220 - DNA, 25 bp, Homo sapien
gcggaggcgactggccacgcgcggg

SEQ ID NO: 5650221 - DNA, 25 bp, Homo sapien
agagtacccaagtgccgactacgac

SEQ ID NO: 5650222 - DNA, 25 bp, Homo sapien
gtcgtagtcggcacttgggtactct

SEQ ID NO: 5650223 - DNA, 25 bp, Homo sapien
acctagtttaacacccttatatgtc

SEQ ID NO: 5650224 - DNA, 25 bp, Homo sapien
gacatataagggtgttaaactaggt

SEQ ID NO: 5650225 - DNA, 25 bp, Homo sapien
cgtggaagttatacgtgacgcgtcc

SEQ ID NO: 5650226 - DNA, 25 bp, Homo sapien
ggacgcgtcacgtataacttccacg

SEQ ID NO: 5650227 - DNA, 25 bp, Homo sapien
ccgtaggccatagaagggtgtaacc

SEQ ID NO: 5650228 - DNA, 25 bp, Homo sapien
ggttacacccttctatggcctacgg

SEQ ID NO: 5650229 - DNA, 25 bp, Homo sapien
cggtggagagtaggccgtccgcccg

SEQ ID NO: 5650230 - DNA, 25 bp, Homo sapien
cgggcggacggcctactctccaccg

SEQ ID NO: 5650231 - DNA, 25 bp, Homo sapien
aaatttcaagggtgacagttgagat

SEQ ID NO: 5650232 - DNA, 25 bp, Homo sapien
atctcaactgtcacccttgaaattt

SEQ ID NO: 5650233 - DNA, 25 bp, Homo sapien
gggaactggagccacactccgccga

SEQ ID NO: 5650234 - DNA, 25 bp, Homo sapien
tcggcggagtgtggctccagttccc

SEQ ID NO: 5650235 - DNA, 25 bp, Homo sapien
gacggggaactggagccacactccg

SEQ ID NO: 5650236 - DNA, 25 bp, Homo sapien
cggagtgtggctccagttccccgtc

SEQ ID NO: 5650237 - DNA, 25 bp, Homo sapien
gctcccaccccgagcctacgtacaa

SEQ ID NO: 5650238 - DNA, 25 bp, Homo sapien
ttgtacgtaggctcggggtgggagc

SEQ ID NO: 5650239 - DNA, 25 bp, Homo sapien
taggtggctcttcggcgcacccgaa

SEQ ID NO: 5650240 - DNA, 25 bp, Homo sapien
ttcgggtgcgccgaagagccaccta

SEQ ID NO: 5650241 - DNA, 25 bp, Homo sapien
acggcccgacgtgatccctaggggc

SEQ ID NO: 5650242 - DNA, 25 bp, Homo sapien
gcccctagggatcacgtcgggccgt

SEQ ID NO: 5650243 - DNA, 25 bp, Homo sapien
tgcgtgtgcggaccgtgtgagctac

SEQ ID NO: 5650244 - DNA, 25 bp, Homo sapien
gtagctcacacggtccgcacacgca

SEQ ID NO: 5650245 - DNA, 25 bp, Homo sapien
gtgaccgcacgagcgagggcggtcc

SEQ ID NO: 5650246 - DNA, 25 bp, Homo sapien
ggaccgccctcgctcgtgcggtcac

SEQ ID NO: 5650247 - DNA, 25 bp, Homo sapien
gcgtgaccgcacgagcgagggcggt

SEQ ID NO: 5650248 - DNA, 25 bp, Homo sapien
accgccctcgctcgtgcggtcacgc

SEQ ID NO: 5650249 - DNA, 25 bp, Homo sapien
gcgcgtgaccgcacgagcgagggcg

SEQ ID NO: 5650250 - DNA, 25 bp, Homo sapien
cgccctcgctcgtgcggtcacgcgc

SEQ ID NO: 5650251 - DNA, 25 bp, Homo sapien
agtcctgtgttgtaatcaatgttca

SEQ ID NO: 5650252 - DNA, 25 bp, Homo sapien
tgaacattgattacaacacaggact

SEQ ID NO: 5650253 - DNA, 25 bp, Homo sapien
cgacggaaccactaaagcgtctctt

SEQ ID NO: 5650254 - DNA, 25 bp, Homo sapien
aagagacgctttagtggttccgtcg

SEQ ID NO: 5650255 - DNA, 25 bp, Homo sapien
ataacgaaatataagacggaaccaa

SEQ ID NO: 5650256 - DNA, 25 bp, Homo sapien
ttggttccgtcttatatttcgttat

SEQ ID NO: 5650257 - DNA, 25 bp, Homo sapien
cactgagaacatctcggttcccgaa

SEQ ID NO: 5650258 - DNA, 25 bp, Homo sapien
ttcgggaaccgagatgttctcagtg

SEQ ID NO: 5650259 - DNA, 25 bp, Homo sapien
gcctggtgccagagcgagggccagg

SEQ ID NO: 5650260 - DNA, 25 bp, Homo sapien
cctggccctcgctctggcaccaggc

SEQ ID NO: 5650261 - DNA, 25 bp, Homo sapien
tgcggacgggctcggacccgcggag

SEQ ID NO: 5650262 - DNA, 25 bp, Homo sapien
ctccgcgggtccgagcccgtccgca

SEQ ID NO: 5650263 - DNA, 25 bp, Homo sapien
cgcggactgcggacgggctcggacc

SEQ ID NO: 5650264 - DNA, 25 bp, Homo sapien
ggtccgagcccgtccgcagtccgcg

SEQ ID NO: 5650265 - DNA, 25 bp, Homo sapien
tttagtatttacatcgaaagttcaa

SEQ ID NO: 5650266 - DNA, 25 bp, Homo sapien
ttgaactttcgatgtaaatactaaa

SEQ ID NO: 5650267 - DNA, 25 bp, Homo sapien
tcttggacttaccggaagtcagaaa

SEQ ID NO: 5650268 - DNA, 25 bp, Homo sapien
tttctgacttccggtaagtccaaga

SEQ ID NO: 5650269 - DNA, 25 bp, Homo sapien
ccatcgtgagtagagggacccgtag

SEQ ID NO: 5650270 - DNA, 25 bp, Homo sapien
ctacgggtccctctactcacgatgg

SEQ ID NO: 5650271 - DNA, 25 bp, Homo sapien
gagacacgtgggacgccccgggtcc

SEQ ID NO: 5650272 - DNA, 25 bp, Homo sapien
ggacccggggcgtcccacgtgtctc

SEQ ID NO: 5650273 - DNA, 25 bp, Homo sapien
aaaggtcacttgtggagtctccgac

SEQ ID NO: 5650274 - DNA, 25 bp, Homo sapien
gtcggagactccacaagtgaccttt

SEQ ID NO: 5650275 - DNA, 25 bp, Homo sapien
cccggcgtcgccgggctccttcgcg

SEQ ID NO: 5650276 - DNA, 25 bp, Homo sapien
cgcgaaggagcccggcgacgccggg

SEQ ID NO: 5650277 - DNA, 25 bp, Homo sapien
tcctccccggcgtcgccgggctcct

SEQ ID NO: 5650278 - DNA, 25 bp, Homo sapien
aggagcccggcgacgccggggagga

SEQ ID NO: 5650279 - DNA, 25 bp, Homo sapien
ctcctccccggcgtcgccgggctcc

SEQ ID NO: 5650280 - DNA, 25 bp, Homo sapien
ggagcccggcgacgccggggaggag

SEQ ID NO: 5650281 - DNA, 25 bp, Homo sapien
cgtcccggggaggcgcgcgctcggg

SEQ ID NO: 5650282 - DNA, 25 bp, Homo sapien
cccgagcgcgcgcctccccgggacg

SEQ ID NO: 5650283 - DNA, 25 bp, Homo sapien
aaagattttatcgtagtcatataaa

SEQ ID NO: 5650284 - DNA, 25 bp, Homo sapien
tttatatgactacgataaaatcttt

SEQ ID NO: 5650285 - DNA, 25 bp, Homo sapien
aagaatacaagtagtatactgtaac

SEQ ID NO: 5650286 - DNA, 25 bp, Homo sapien
gttacagtatactacttgtattctt

SEQ ID NO: 5650287 - DNA, 25 bp, Homo sapien
agagacagtaactggccccggtact

SEQ ID NO: 5650288 - DNA, 25 bp, Homo sapien
agtaccggggccagttactgtctct

SEQ ID NO: 5650289 - DNA, 25 bp, Homo sapien
cctaccccagagtccaacctcaggg

SEQ ID NO: 5650290 - DNA, 25 bp, Homo sapien
ccctgaggttggactctggggtagg

SEQ ID NO: 5650291 - DNA, 25 bp, Homo sapien
taatttattctcaacagaagacaaa

SEQ ID NO: 5650292 - DNA, 25 bp, Homo sapien
tttgtcttctgttgagaataaatta

SEQ ID NO: 5650293 - DNA, 25 bp, Homo sapien
tgtcgggtgttgacgacgatttacg

SEQ ID NO: 5650294 - DNA, 25 bp, Homo sapien
cgtaaatcgtcgtcaacacccgaca

SEQ ID NO: 5650295 - DNA, 25 bp, Homo sapien
aaatttagatagataatttctcact

SEQ ID NO: 5650296 - DNA, 25 bp, Homo sapien
agtgagaaattatctatctaaattt

SEQ ID NO: 5650297 - DNA, 25 bp, Homo sapien
gcccggtcgggtctgcggccggacg

SEQ ID NO: 5650298 - DNA, 25 bp, Homo sapien
cgtccggccgcagacccgaccgggc

SEQ ID NO: 5650299 - DNA, 25 bp, Homo sapien
ctgcccggtcgggtctgcggccgga

SEQ ID NO: 5650300 - DNA, 25 bp, Homo sapien
tccggccgcagacccgaccgggcag

SEQ ID NO: 5650301 - DNA, 25 bp, Homo sapien
gtcccctgcaggccgacctccaggg

SEQ ID NO: 5650302 - DNA, 25 bp, Homo sapien
ccctggaggtcggcctgcaggggac

SEQ ID NO: 5650303 - DNA, 25 bp, Homo sapien
aagagaaagtgtgtatcggaagata

SEQ ID NO: 5650304 - DNA, 25 bp, Homo sapien
tatcttccgatacacactttctctt

SEQ ID NO: 5650305 - DNA, 25 bp, Homo sapien
aggacctccggcgtcccactcggag

SEQ ID NO: 5650306 - DNA, 25 bp, Homo sapien
ctccgagtgggacgccggaggtcct

SEQ ID NO: 5650307 - DNA, 25 bp, Homo sapien
ggttcgtccctcatcgccgagtcgg

SEQ ID NO: 5650308 - DNA, 25 bp, Homo sapien
ccgactcggcgatgagggacgaacc

SEQ ID NO: 5650309 - DNA, 25 bp, Homo sapien
ttctggtccattctcaactgtacgg

SEQ ID NO: 5650310 - DNA, 25 bp, Homo sapien
ccgtacagttgagaatggaccagaa

SEQ ID NO: 5650311 - DNA, 25 bp, Homo sapien
agaagacgaggtagattgttctctt

SEQ ID NO: 5650312 - DNA, 25 bp, Homo sapien
aagagaacaatctacctcgtcttct

SEQ ID NO: 5650313 - DNA, 25 bp, Homo sapien
aggtgtagagtacgtcaaaacagac

SEQ ID NO: 5650314 - DNA, 25 bp, Homo sapien
gtctgttttgacgtactctacacct

SEQ ID NO: 5650315 - DNA, 25 bp, Homo sapien
gagcctgtcgacgtcgtaccgacgg

SEQ ID NO: 5650316 - DNA, 25 bp, Homo sapien
ccgtcggtacgacgtcgacaggctc

SEQ ID NO: 5650317 - DNA, 25 bp, Homo sapien
gacctgacggttttagccagtaact

SEQ ID NO: 5650318 - DNA, 25 bp, Homo sapien
agttactggctaaaaccgtcaggtc

SEQ ID NO: 5650319 - DNA, 25 bp, Homo sapien
caacggccgtatatccagatcgtac

SEQ ID NO: 5650320 - DNA, 25 bp, Homo sapien
gtacgatctggatatacggccgttg

SEQ ID NO: 5650321 - DNA, 25 bp, Homo sapien
cgtcgctcgcggtagacgcggctcg

SEQ ID NO: 5650322 - DNA, 25 bp, Homo sapien
cgagccgcgtctaccgcgagcgacg

SEQ ID NO: 5650323 - DNA, 25 bp, Homo sapien
acctcgtaggtagagcgtcgctcgc

SEQ ID NO: 5650324 - DNA, 25 bp, Homo sapien
gcgagcgacgctctacctacgaggt

SEQ ID NO: 5650325 - DNA, 25 bp, Homo sapien
gaagattttgaggatgataaggtag

SEQ ID NO: 5650326 - DNA, 25 bp, Homo sapien
ctaccttatcatcctcaaaatcttc

SEQ ID NO: 5650327 - DNA, 25 bp, Homo sapien
gatgacaggagtcaaagacgatgga

SEQ ID NO: 5650328 - DNA, 25 bp, Homo sapien
tccatcgtctttgactcctgtcatc

SEQ ID NO: 5650329 - DNA, 25 bp, Homo sapien
gtcggagcacacgacgtccaaacgt

SEQ ID NO: 5650330 - DNA, 25 bp, Homo sapien
acgtttggacgtcgtgtgctccgac

SEQ ID NO: 5650331 - DNA, 25 bp, Homo sapien
gacaaggacaaagactctaaattat

SEQ ID NO: 5650332 - DNA, 25 bp, Homo sapien
ataatttagagtctttgtccttgtc

SEQ ID NO: 5650333 - DNA, 25 bp, Homo sapien
gaaagaggaggttactggattccaa

SEQ ID NO: 5650334 - DNA, 25 bp, Homo sapien
ttggaatccagtaacctcctctttc

SEQ ID NO: 5650335 - DNA, 25 bp, Homo sapien
cgaactcccggccgcctcggcgtcc

SEQ ID NO: 5650336 - DNA, 25 bp, Homo sapien
ggacgccgaggcggccgggagttcg

SEQ ID NO: 5650337 - DNA, 25 bp, Homo sapien
gtccgaactcccggccgcctcggcg

SEQ ID NO: 5650338 - DNA, 25 bp, Homo sapien
cgccgaggcggccgggagttcggac

SEQ ID NO: 5650339 - DNA, 25 bp, Homo sapien
gtttcaccctccacatcttccatag

SEQ ID NO: 5650340 - DNA, 25 bp, Homo sapien
ctatggaagatgtggagggtgaaac

SEQ ID NO: 5650341 - DNA, 25 bp, Homo sapien
gtcgaccggcaaaaggatgaccttg

SEQ ID NO: 5650342 - DNA, 25 bp, Homo sapien
caaggtcatccttttgccggtcgac

SEQ ID NO: 5650343 - DNA, 25 bp, Homo sapien
ataagggtagagattcgcgtttcac

SEQ ID NO: 5650344 - DNA, 25 bp, Homo sapien
gtgaaacgcgaatctctacccttat

SEQ ID NO: 5650345 - DNA, 25 bp, Homo sapien
gtaaaaatccaacacacttagtaaa

SEQ ID NO: 5650346 - DNA, 25 bp, Homo sapien
tttactaagtgtgttggatttttac

SEQ ID NO: 5650347 - DNA, 25 bp, Homo sapien
ctcctggtattcttctcccgggact

SEQ ID NO: 5650348 - DNA, 25 bp, Homo sapien
agtcccgggagaagaataccaggag

SEQ ID NO: 5650349 - DNA, 25 bp, Homo sapien
tgtcttaacctcgaaattaagataa

SEQ ID NO: 5650350 - DNA, 25 bp, Homo sapien
ttatcttaatttcgaggttaagaca

SEQ ID NO: 5650351 - DNA, 25 bp, Homo sapien
cacctccggagcttcgggcccgcgg

SEQ ID NO: 5650352 - DNA, 25 bp, Homo sapien
ccgcgggcccgaagctccggaggtg

SEQ ID NO: 5650353 - DNA, 25 bp, Homo sapien
ccttgcgcggtggacaaggccggcg

SEQ ID NO: 5650354 - DNA, 25 bp, Homo sapien
cgccggccttgtccaccgcgcaagg

SEQ ID NO: 5650355 - DNA, 25 bp, Homo sapien
agggtccaacgtacaggacttccat

SEQ ID NO: 5650356 - DNA, 25 bp, Homo sapien
atggaagtcctgtacgttggaccct

SEQ ID NO: 5650357 - DNA, 25 bp, Homo sapien
aaggactcgtgcaatgggtgtgaaa

SEQ ID NO: 5650358 - DNA, 25 bp, Homo sapien
tttcacacccattgcacgagtcctt

SEQ ID NO: 5650359 - DNA, 25 bp, Homo sapien
gcaggggcgtccatccctcggctga

SEQ ID NO: 5650360 - DNA, 25 bp, Homo sapien
tcagccgagggatggacgcccctgc

SEQ ID NO: 5650361 - DNA, 25 bp, Homo sapien
gaaggtcgttacaggcaggtgaccc

SEQ ID NO: 5650362 - DNA, 25 bp, Homo sapien
gggtcacctgcctgtaacgaccttc

SEQ ID NO: 5650363 - DNA, 25 bp, Homo sapien
ttaaaacctagaagatcacctataa

SEQ ID NO: 5650364 - DNA, 25 bp, Homo sapien
ttataggtgatcttctaggttttaa

SEQ ID NO: 5650365 - DNA, 25 bp, Homo sapien
gtcccgacgggctctctgggtccgc

SEQ ID NO: 5650366 - DNA, 25 bp, Homo sapien
gcggacccagagagcccgtcgggac

SEQ ID NO: 5650367 - DNA, 25 bp, Homo sapien
agtgacttcgttccgtcctggagga

SEQ ID NO: 5650368 - DNA, 25 bp, Homo sapien
tcctccaggacggaacgaagtcact

SEQ ID NO: 5650369 - DNA, 25 bp, Homo sapien
attggtctgaccgttaaaagagagt

SEQ ID NO: 5650370 - DNA, 25 bp, Homo sapien
actctcttttaacggtcagaccaat

SEQ ID NO: 5650371 - DNA, 25 bp, Homo sapien
tcggctccgcgtatcggtaggagac

SEQ ID NO: 5650372 - DNA, 25 bp, Homo sapien
gtctcctaccgatacgcggagccga

SEQ ID NO: 5650373 - DNA, 25 bp, Homo sapien
ccgaccgcaacaccccgctacccgc

SEQ ID NO: 5650374 - DNA, 25 bp, Homo sapien
gcgggtagcggggtgttgcggtcgg

SEQ ID NO: 5650375 - DNA, 25 bp, Homo sapien
gccgaccgcaacaccccgctacccg

SEQ ID NO: 5650376 - DNA, 25 bp, Homo sapien
cgggtagcggggtgttgcggtcggc

SEQ ID NO: 5650377 - DNA, 25 bp, Homo sapien
gactttattactcaagctgcttagg

SEQ ID NO: 5650378 - DNA, 25 bp, Homo sapien
cctaagcagcttgagtaataaagtc

SEQ ID NO: 5650379 - DNA, 25 bp, Homo sapien
tgtgagaggattgccggtcccgaga

SEQ ID NO: 5650380 - DNA, 25 bp, Homo sapien
tctcgggaccggcaatcctctcaca

SEQ ID NO: 5650381 - DNA, 25 bp, Homo sapien
gtccgtgtaacggtggtagtaagtc

SEQ ID NO: 5650382 - DNA, 25 bp, Homo sapien
gacttactaccaccgttacacggac

SEQ ID NO: 5650383 - DNA, 25 bp, Homo sapien
gtgacaattcacgtcgaaggaagta

SEQ ID NO: 5650384 - DNA, 25 bp, Homo sapien
tacttccttcgacgtgaattgtcac

SEQ ID NO: 5650385 - DNA, 25 bp, Homo sapien
ttgttaatacggtgtaagataatat

SEQ ID NO: 5650386 - DNA, 25 bp, Homo sapien
atattatcttacaccgtattaacaa

SEQ ID NO: 5650387 - DNA, 25 bp, Homo sapien
acctgtttaactgaatgttttataa

SEQ ID NO: 5650388 - DNA, 25 bp, Homo sapien
ttataaaacattcagttaaacaggt

SEQ ID NO: 5650389 - DNA, 25 bp, Homo sapien
gcaaggaccccggtgaccaggtcga

SEQ ID NO: 5650390 - DNA, 25 bp, Homo sapien
tcgacctggtcaccggggtccttgc

SEQ ID NO: 5650391 - DNA, 25 bp, Homo sapien
ctactcgtgccacttttataggttg

SEQ ID NO: 5650392 - DNA, 25 bp, Homo sapien
caacctataaaagtggcacgagtag

SEQ ID NO: 5650393 - DNA, 25 bp, Homo sapien
agtaagactgacttttcaaatttac

SEQ ID NO: 5650394 - DNA, 25 bp, Homo sapien
gtaaatttgaaaagtcagtcttact

SEQ ID NO: 5650395 - DNA, 25 bp, Homo sapien
agtacaactacatgactggtgtcag

SEQ ID NO: 5650396 - DNA, 25 bp, Homo sapien
ctgacaccagtcatgtagttgtact

SEQ ID NO: 5650397 - DNA, 25 bp, Homo sapien
atcccgagggcgacctcactcgcgt

SEQ ID NO: 5650398 - DNA, 25 bp, Homo sapien
acgcgagtgaggtcgccctcgggat

SEQ ID NO: 5650399 - DNA, 25 bp, Homo sapien
tatcaataaaggttttttacatctt

SEQ ID NO: 5650400 - DNA, 25 bp, Homo sapien
aagatgtaaaaaacctttattgata

SEQ ID NO: 5650401 - DNA, 25 bp, Homo sapien
atatcaataaaggttttttacatct

SEQ ID NO: 5650402 - DNA, 25 bp, Homo sapien
agatgtaaaaaacctttattgatat

SEQ ID NO: 5650403 - DNA, 25 bp, Homo sapien
aacgtccacgacgatctattttgag

SEQ ID NO: 5650404 - DNA, 25 bp, Homo sapien
ctcaaaatagatcgtcgtggacgtt

SEQ ID NO: 5650405 - DNA, 25 bp, Homo sapien
taactatgttgctactcacacgact

SEQ ID NO: 5650406 - DNA, 25 bp, Homo sapien
agtcgtgtgagtagcaacatagtta

SEQ ID NO: 5650407 - DNA, 25 bp, Homo sapien
taataaattagcaaaattaccggat

SEQ ID NO: 5650408 - DNA, 25 bp, Homo sapien
atccggtaattttgctaatttatta

SEQ ID NO: 5650409 - DNA, 25 bp, Homo sapien
gacgggctttgcaggagtctagacg

SEQ ID NO: 5650410 - DNA, 25 bp, Homo sapien
cgtctagactcctgcaaagcccgtc

SEQ ID NO: 5650411 - DNA, 25 bp, Homo sapien
gatttaaacaagacgactgttatac

SEQ ID NO: 5650412 - DNA, 25 bp, Homo sapien
gtataacagtcgtcttgtttaaatc

SEQ ID NO: 5650413 - DNA, 25 bp, Homo sapien
aaccgaggagctttcagactcaacg

SEQ ID NO: 5650414 - DNA, 25 bp, Homo sapien
cgttgagtctgaaagctcctcggtt

SEQ ID NO: 5650415 - DNA, 25 bp, Homo sapien
gacgtcttcgttcatctcctagaac

SEQ ID NO: 5650416 - DNA, 25 bp, Homo sapien
gttctaggagatgaacgaagacgtc

SEQ ID NO: 5650417 - DNA, 25 bp, Homo sapien
ctccacggaatctcaggtccggtaa

SEQ ID NO: 5650418 - DNA, 25 bp, Homo sapien
ttaccggacctgagattccgtggag

SEQ ID NO: 5650419 - DNA, 25 bp, Homo sapien
ccggtagcactacgagaaacgtgac

SEQ ID NO: 5650420 - DNA, 25 bp, Homo sapien
gtcacgtttctcgtagtgctaccgg

SEQ ID NO: 5650421 - DNA, 25 bp, Homo sapien
cacgccaccctgtcctcgggtcctc

SEQ ID NO: 5650422 - DNA, 25 bp, Homo sapien
gaggacccgaggacagggtggcgtg

SEQ ID NO: 5650423 - DNA, 25 bp, Homo sapien
cccacgccaccctgtcctcgggtcc

SEQ ID NO: 5650424 - DNA, 25 bp, Homo sapien
ggacccgaggacagggtggcgtggg

SEQ ID NO: 5650425 - DNA, 25 bp, Homo sapien
atggtgtagaaaagctcgtccttac

SEQ ID NO: 5650426 - DNA, 25 bp, Homo sapien
gtaaggacgagcttttctacaccat

SEQ ID NO: 5650427 - DNA, 25 bp, Homo sapien
gtcccactggactctgtttccgaag

SEQ ID NO: 5650428 - DNA, 25 bp, Homo sapien
cttcggaaacagagtccagtgggac

SEQ ID NO: 5650429 - DNA, 25 bp, Homo sapien
aaatatatccacatatgtctctttt

SEQ ID NO: 5650430 - DNA, 25 bp, Homo sapien
aaaagagacatatgtggatatattt

SEQ ID NO: 5650431 - DNA, 25 bp, Homo sapien
aaaatatatccacatatgtctcttt

SEQ ID NO: 5650432 - DNA, 25 bp, Homo sapien
aaagagacatatgtggatatatttt

SEQ ID NO: 5650433 - DNA, 25 bp, Homo sapien
gactcctgttgggtaagaagactct

SEQ ID NO: 5650434 - DNA, 25 bp, Homo sapien
agagtcttcttacccaacaggagtc

SEQ ID NO: 5650435 - DNA, 25 bp, Homo sapien
catcccccgggcgagacgacgggac

SEQ ID NO: 5650436 - DNA, 25 bp, Homo sapien
gtcccgtcgtctcgcccgggggatg

SEQ ID NO: 5650437 - DNA, 25 bp, Homo sapien
tccccggcatcccccgggcgagacg

SEQ ID NO: 5650438 - DNA, 25 bp, Homo sapien
cgtctcgcccgggggatgccgggga

SEQ ID NO: 5650439 - DNA, 25 bp, Homo sapien
aacttgtgaaacagtttgtccaaag

SEQ ID NO: 5650440 - DNA, 25 bp, Homo sapien
ctttggacaaactgtttcacaagtt

SEQ ID NO: 5650441 - DNA, 25 bp, Homo sapien
gtaactgagtccgaacgatttctaa

SEQ ID NO: 5650442 - DNA, 25 bp, Homo sapien
ttagaaatcgttcggactcagttac

SEQ ID NO: 5650443 - DNA, 25 bp, Homo sapien
gagggacctcacacatccccttgag

SEQ ID NO: 5650444 - DNA, 25 bp, Homo sapien
ctcaaggggatgtgtgaggtccctc

SEQ ID NO: 5650445 - DNA, 25 bp, Homo sapien
tcagaggtaccgattagtgaagaag

SEQ ID NO: 5650446 - DNA, 25 bp, Homo sapien
cttcttcactaatcggtacctctga

SEQ ID NO: 5650447 - DNA, 25 bp, Homo sapien
gaaggaaagggctcctcgctgccgc

SEQ ID NO: 5650448 - DNA, 25 bp, Homo sapien
gcggcagcgaggagccctttccttc

SEQ ID NO: 5650449 - DNA, 25 bp, Homo sapien
ctaaacaaacatatacggtaggtaa

SEQ ID NO: 5650450 - DNA, 25 bp, Homo sapien
ttacctaccgtatatgtttgtttag

SEQ ID NO: 5650451 - DNA, 25 bp, Homo sapien
ggacacccggggagccgtgagcgta

SEQ ID NO: 5650452 - DNA, 25 bp, Homo sapien
tacgctcacggctccccgggtgtcc

SEQ ID NO: 5650453 - DNA, 25 bp, Homo sapien
tcagatgtggaaagactccgtgacg

SEQ ID NO: 5650454 - DNA, 25 bp, Homo sapien
cgtcacggagtctttccacatctga

SEQ ID NO: 5650455 - DNA, 25 bp, Homo sapien
tgattgtgctgattctttcttaaag

SEQ ID NO: 5650456 - DNA, 25 bp, Homo sapien
ctttaagaaagaatcagcacaatca

SEQ ID NO: 5650457 - DNA, 25 bp, Homo sapien
ttctataaaaagtaccctatatact

SEQ ID NO: 5650458 - DNA, 25 bp, Homo sapien
agtatatagggtactttttatagaa

SEQ ID NO: 5650459 - DNA, 25 bp, Homo sapien
cctaaaaactcggagctatcttact

SEQ ID NO: 5650460 - DNA, 25 bp, Homo sapien
agtaagatagctccgagtttttagg

SEQ ID NO: 5650461 - DNA, 25 bp, Homo sapien
aaagcaagacgacgccaggaaggac

SEQ ID NO: 5650462 - DNA, 25 bp, Homo sapien
gtccttcctggcgtcgtcttgcttt

SEQ ID NO: 5650463 - DNA, 25 bp, Homo sapien
ttatcttctcattatgaagagatga

SEQ ID NO: 5650464 - DNA, 25 bp, Homo sapien
tcatctcttcataatgagaagataa

SEQ ID NO: 5650465 - DNA, 25 bp, Homo sapien
agaccaagactaaactactgtgact

SEQ ID NO: 5650466 - DNA, 25 bp, Homo sapien
agtcacagtagtttagtcttggtct

SEQ ID NO: 5650467 - DNA, 25 bp, Homo sapien
acctagcccaccgttttgaacagaa

SEQ ID NO: 5650468 - DNA, 25 bp, Homo sapien
ttctgttcaaaacggtgggctaggt

SEQ ID NO: 5650469 - DNA, 25 bp, Homo sapien
agtgtgtgactccccctacactgtg

SEQ ID NO: 5650470 - DNA, 25 bp, Homo sapien
cacagtgtagggggagtcacacact

SEQ ID NO: 5650471 - DNA, 25 bp, Homo sapien
cacggccaccgcgtccgcctctgcg

SEQ ID NO: 5650472 - DNA, 25 bp, Homo sapien
cgcagaggcggacgcggtggccgtg

SEQ ID NO: 5650473 - DNA, 25 bp, Homo sapien
tcggaggtgggtacggacaacggtg

SEQ ID NO: 5650474 - DNA, 25 bp, Homo sapien
caccgttgtccgtacccacctccga

SEQ ID NO: 5650475 - DNA, 25 bp, Homo sapien
tcttactaggtgtgttaggtggtct

SEQ ID NO: 5650476 - DNA, 25 bp, Homo sapien
agaccacctaacacacctagtaaga

SEQ ID NO: 5650477 - DNA, 25 bp, Homo sapien
aatagtgtcaaaataacgaaaagta

SEQ ID NO: 5650478 - DNA, 25 bp, Homo sapien
tacttttcgttattttgacactatt

SEQ ID NO: 5650479 - DNA, 25 bp, Homo sapien
cataatagacggtgtcgatagactt

SEQ ID NO: 5650480 - DNA, 25 bp, Homo sapien
aagtctatcgacaccgtctattatg

SEQ ID NO: 5650481 - DNA, 25 bp, Homo sapien
ccctcagcctcacccgcagccacct

SEQ ID NO: 5650482 - DNA, 25 bp, Homo sapien
aggtggctgcgggtgaggctgaggg

SEQ ID NO: 5650483 - DNA, 25 bp, Homo sapien
gtccactacacataatagaataagg

SEQ ID NO: 5650484 - DNA, 25 bp, Homo sapien
ccttattctattatgtgtagtggac

SEQ ID NO: 5650485 - DNA, 25 bp, Homo sapien
cccctcactaggagcccctcggtgg

SEQ ID NO: 5650486 - DNA, 25 bp, Homo sapien
ccaccgaggggctcctagtgagggg

SEQ ID NO: 5650487 - DNA, 25 bp, Homo sapien
acgtcggtgattcaagtataagtct

SEQ ID NO: 5650488 - DNA, 25 bp, Homo sapien
agacttatacttgaatcaccgacgt

SEQ ID NO: 5650489 - DNA, 25 bp, Homo sapien
ccttgaaacggctatactctaactt

SEQ ID NO: 5650490 - DNA, 25 bp, Homo sapien
aagttagagtatagccgtttcaagg

SEQ ID NO: 5650491 - DNA, 25 bp, Homo sapien
gaagtaagaacatacgtagttgaag

SEQ ID NO: 5650492 - DNA, 25 bp, Homo sapien
cttcaactacgtatgttcttacttc

SEQ ID NO: 5650493 - DNA, 25 bp, Homo sapien
gtagagaagtaagaacatacgtagt

SEQ ID NO: 5650494 - DNA, 25 bp, Homo sapien
actacgtatgttcttacttctctac

SEQ ID NO: 5650495 - DNA, 25 bp, Homo sapien
tcctattgtgtctcgtgatagtaac

SEQ ID NO: 5650496 - DNA, 25 bp, Homo sapien
gttactatcacgagacacaatagga

SEQ ID NO: 5650497 - DNA, 25 bp, Homo sapien
aacgttctcacaattgtaaaagacc

SEQ ID NO: 5650498 - DNA, 25 bp, Homo sapien
ggtcttttacaattgtgagaacgtt

SEQ ID NO: 5650499 - DNA, 25 bp, Homo sapien
gaaacgttctcacaattgtaaaaga

SEQ ID NO: 5650500 - DNA, 25 bp, Homo sapien
tcttttacaattgtgagaacgtttc

SEQ ID NO: 5650501 - DNA, 25 bp, Homo sapien
cagtcctcccggacggggtgttcac

SEQ ID NO: 5650502 - DNA, 25 bp, Homo sapien
gtgaacaccccgtccgggaggactg

SEQ ID NO: 5650503 - DNA, 25 bp, Homo sapien
aggagtccccttgagcgtcaagagt

SEQ ID NO: 5650504 - DNA, 25 bp, Homo sapien
actcttgacgctcaaggggactcct

SEQ ID NO: 5650505 - DNA, 25 bp, Homo sapien
gtaattaacagtcttaatcgttggt

SEQ ID NO: 5650506 - DNA, 25 bp, Homo sapien
accaacgattaagactgttaattac

SEQ ID NO: 5650507 - DNA, 25 bp, Homo sapien
acgactcgtcatttgtagcccatat

SEQ ID NO: 5650508 - DNA, 25 bp, Homo sapien
atatgggctacaaatgacgagtcgt

SEQ ID NO: 5650509 - DNA, 25 bp, Homo sapien
tgtgtataggacttcttaaacatct

SEQ ID NO: 5650510 - DNA, 25 bp, Homo sapien
agatgtttaagaagtcctatacaca

SEQ ID NO: 5650511 - DNA, 25 bp, Homo sapien
agtcaaactttctcgaattagaggt

SEQ ID NO: 5650512 - DNA, 25 bp, Homo sapien
acctctaattcgagaaagtttgact

SEQ ID NO: 5650513 - DNA, 25 bp, Homo sapien
aagtgacatcccgtcgagtacacgt

SEQ ID NO: 5650514 - DNA, 25 bp, Homo sapien
acgtgtactcgacgggatgtcactt

SEQ ID NO: 5650515 - DNA, 25 bp, Homo sapien
caaactcgtaagaagtttgtctcgt

SEQ ID NO: 5650516 - DNA, 25 bp, Homo sapien
acgagacaaacttcttacgagtttg

SEQ ID NO: 5650517 - DNA, 25 bp, Homo sapien
gtgtaacaaacaggagaccacccgg

SEQ ID NO: 5650518 - DNA, 25 bp, Homo sapien
ccgggtggtctcctgtttgttacac

SEQ ID NO: 5650519 - DNA, 25 bp, Homo sapien
ggaccgagttccagactgtcaggat

SEQ ID NO: 5650520 - DNA, 25 bp, Homo sapien
atcctgacagtctggaactcggtcc

SEQ ID NO: 5650521 - DNA, 25 bp, Homo sapien
ctactactaatagtttcttatttat

SEQ ID NO: 5650522 - DNA, 25 bp, Homo sapien
ataaataagaaactattagtagtag

SEQ ID NO: 5650523 - DNA, 25 bp, Homo sapien
cgtctacgaaatgaaagggacacgt

SEQ ID NO: 5650524 - DNA, 25 bp, Homo sapien
acgtgtccctttcatttcgtagacg

SEQ ID NO: 5650525 - DNA, 25 bp, Homo sapien
ccgcgcgcgcacacggccctcgggg

SEQ ID NO: 5650526 - DNA, 25 bp, Homo sapien
ccccgagggccgtgtgcgcgcgcgg

SEQ ID NO: 5650527 - DNA, 25 bp, Homo sapien
gcgcgcgcacacggccctcggggcc

SEQ ID NO: 5650528 - DNA, 25 bp, Homo sapien
ggccccgagggccgtgtgcgcgcgc

SEQ ID NO: 5650529 - DNA, 25 bp, Homo sapien
cgcgcgcgcacacggccctcggggc

SEQ ID NO: 5650530 - DNA, 25 bp, Homo sapien
gccccgagggccgtgtgcgcgcgcg

SEQ ID NO: 5650531 - DNA, 25 bp, Homo sapien
tcgaaggggcggtgcccgtggagca

SEQ ID NO: 5650532 - DNA, 25 bp, Homo sapien
tgctccacgggcaccgccccttcga

SEQ ID NO: 5650533 - DNA, 25 bp, Homo sapien
tgatctcattaacattaatctaaat

SEQ ID NO: 5650534 - DNA, 25 bp, Homo sapien
atttagattaatgttaatgagatca

SEQ ID NO: 5650535 - DNA, 25 bp, Homo sapien
gttgatctcattaacattaatctaa

SEQ ID NO: 5650536 - DNA, 25 bp, Homo sapien
ttagattaatgttaatgagatcaac

SEQ ID NO: 5650537 - DNA, 25 bp, Homo sapien
tttaaataaatgtgttgatctcatt

SEQ ID NO: 5650538 - DNA, 25 bp, Homo sapien
aatgagatcaacacatttatttaaa

SEQ ID NO: 5650539 - DNA, 25 bp, Homo sapien
acgtgacctgtgttctactctacca

SEQ ID NO: 5650540 - DNA, 25 bp, Homo sapien
tggtagagtagaacacaggtcacgt

SEQ ID NO: 5650541 - DNA, 25 bp, Homo sapien
gagaacgaataaagatcggtgtcct

SEQ ID NO: 5650542 - DNA, 25 bp, Homo sapien
aggacaccgatctttattcgttctc

SEQ ID NO: 5650543 - DNA, 25 bp, Homo sapien
atatagtcatttatccgttatcaat

SEQ ID NO: 5650544 - DNA, 25 bp, Homo sapien
attgataacggataaatgactatat

SEQ ID NO: 5650545 - DNA, 25 bp, Homo sapien
ccgatggttaggaaaggtgacgata

SEQ ID NO: 5650546 - DNA, 25 bp, Homo sapien
tatcgtcacctttcctaaccatcgg

SEQ ID NO: 5650547 - DNA, 25 bp, Homo sapien
tcgtccgtccctcccgtgacgtcgg

SEQ ID NO: 5650548 - DNA, 25 bp, Homo sapien
ccgacgtcacgggagggacggacga

SEQ ID NO: 5650549 - DNA, 25 bp, Homo sapien
gacgcgcggggctcccgccggcgta

SEQ ID NO: 5650550 - DNA, 25 bp, Homo sapien
tacgccggcgggagccccgcgcgtc

SEQ ID NO: 5650551 - DNA, 25 bp, Homo sapien
gcgcggggctcccgccggcgtaatg

SEQ ID NO: 5650552 - DNA, 25 bp, Homo sapien
cattacgccggcgggagccccgcgc

SEQ ID NO: 5650553 - DNA, 25 bp, Homo sapien
cgcgcggggctcccgccggcgtaat

SEQ ID NO: 5650554 - DNA, 25 bp, Homo sapien
attacgccggcgggagccccgcgcg

SEQ ID NO: 5650555 - DNA, 25 bp, Homo sapien
tggacctaaaaattaatacaattat

SEQ ID NO: 5650556 - DNA, 25 bp, Homo sapien
ataattgtattaatttttaggtcca

SEQ ID NO: 5650557 - DNA, 25 bp, Homo sapien
tcgagacacatcatgtacagtcacc

SEQ ID NO: 5650558 - DNA, 25 bp, Homo sapien
ggtgactgtacatgatgtgtctcga

SEQ ID NO: 5650559 - DNA, 25 bp, Homo sapien
tatgtagacggaaaacgaggttccg

SEQ ID NO: 5650560 - DNA, 25 bp, Homo sapien
cggaacctcgttttccgtctacata

SEQ ID NO: 5650561 - DNA, 25 bp, Homo sapien
ataatagtaataattggaagacaca

SEQ ID NO: 5650562 - DNA, 25 bp, Homo sapien
tgtgtcttccaattattactattat

SEQ ID NO: 5650563 - DNA, 25 bp, Homo sapien
ttactaaggcctatcaaaaagaaag

SEQ ID NO: 5650564 - DNA, 25 bp, Homo sapien
ctttctttttgataggccttagtaa

SEQ ID NO: 5650565 - DNA, 25 bp, Homo sapien
gaactgtcacgaaaccagtattgag

SEQ ID NO: 5650566 - DNA, 25 bp, Homo sapien
ctcaatactggtttcgtgacagttc

SEQ ID NO: 5650567 - DNA, 25 bp, Homo sapien
cgtctctagatagttctgttgttgg

SEQ ID NO: 5650568 - DNA, 25 bp, Homo sapien
ccaacaacagaactatctagagacg

SEQ ID NO: 5650569 - DNA, 25 bp, Homo sapien
tgtagagatccgtggtcccgcatcg

SEQ ID NO: 5650570 - DNA, 25 bp, Homo sapien
cgatgcgggaccacggatctctaca

SEQ ID NO: 5650571 - DNA, 25 bp, Homo sapien
ggtcctacgcgtaaagggccttcac

SEQ ID NO: 5650572 - DNA, 25 bp, Homo sapien
gtgaaggccctttacgcgtaggacc

SEQ ID NO: 5650573 - DNA, 25 bp, Homo sapien
cgtcgggccgcaggcggcgtcgtgg

SEQ ID NO: 5650574 - DNA, 25 bp, Homo sapien
ccacgacgccgcctgcggcccgacg

SEQ ID NO: 5650575 - DNA, 25 bp, Homo sapien
gtcgaaactcagttgggtatactct

SEQ ID NO: 5650576 - DNA, 25 bp, Homo sapien
agagtatacccaactgagtttcgac

SEQ ID NO: 5650577 - DNA, 25 bp, Homo sapien
agggatttatactgagatgcactac

SEQ ID NO: 5650578 - DNA, 25 bp, Homo sapien
gtagtgcatctcagtataaatccct

SEQ ID NO: 5650579 - DNA, 25 bp, Homo sapien
catttcttattaaatacttaaggta

SEQ ID NO: 5650580 - DNA, 25 bp, Homo sapien
taccttaagtatttaataagaaatg

SEQ ID NO: 5650581 - DNA, 25 bp, Homo sapien
ccgaagcgaagataacagagagaat

SEQ ID NO: 5650582 - DNA, 25 bp, Homo sapien
attctctctgttatcttcgcttcgg

SEQ ID NO: 5650583 - DNA, 25 bp, Homo sapien
gacggggtcacgtaccctagaccat

SEQ ID NO: 5650584 - DNA, 25 bp, Homo sapien
atggtctagggtacgtgaccccgtc

SEQ ID NO: 5650585 - DNA, 25 bp, Homo sapien
cggccgacgccaggctcacaccccc

SEQ ID NO: 5650586 - DNA, 25 bp, Homo sapien
gggggtgtgagcctggcgtcggccg

SEQ ID NO: 5650587 - DNA, 25 bp, Homo sapien
accgtggctctcgtggaccggacca

SEQ ID NO: 5650588 - DNA, 25 bp, Homo sapien
tggtccggtccacgagagccacggt

SEQ ID NO: 5650589 - DNA, 25 bp, Homo sapien
gagggtactccctcgtcggcataag

SEQ ID NO: 5650590 - DNA, 25 bp, Homo sapien
cttatgccgacgagggagtaccctc

SEQ ID NO: 5650591 - DNA, 25 bp, Homo sapien
ctgacgggtccgtccacagtcacga

SEQ ID NO: 5650592 - DNA, 25 bp, Homo sapien
tcgtgactgtggacggacccgtcag

SEQ ID NO: 5650593 - DNA, 25 bp, Homo sapien
tggagagctcccgtgagtggttaat

SEQ ID NO: 5650594 - DNA, 25 bp, Homo sapien
catggagagctcccgtgagtggtta

SEQ ID NO: 5650595 - DNA, 25 bp, Homo sapien
taccaaatgcatggagagctcccgt

SEQ ID NO: 5650596 - DNA, 25 bp, Homo sapien
aatgcatggagagctcccgtgagtg

SEQ ID NO: 5650597 - DNA, 25 bp, Homo sapien
cggctccagcgtctcgcaatgctat

SEQ ID NO: 5650598 - DNA, 25 bp, Homo sapien
gctccagcgtctcgcaatgctatcg

SEQ ID NO: 5650599 - DNA, 25 bp, Homo sapien
tccggctccagcgtctcgcaatgct

SEQ ID NO: 5650600 - DNA, 25 bp, Homo sapien
tccagcgtctcgcaatgctatcgcg

SEQ ID NO: 5650601 - DNA, 25 bp, Homo sapien
taacacactttagtaggtatgttcg

SEQ ID NO: 5650602 - DNA, 25 bp, Homo sapien
cctgtaatattgaacgtaggtgcga

SEQ ID NO: 5650603 - DNA, 25 bp, Homo sapien
cgtaggtgcgataaataatagaatg

SEQ ID NO: 5650604 - DNA, 25 bp, Homo sapien
ggtatgttcgcctgtaatattgaac

SEQ ID NO: 5650605 - DNA, 25 bp, Homo sapien
ctgtgcagacattcaattgttatta

SEQ ID NO: 5650606 - DNA, 25 bp, Homo sapien
tgagattagtagtatgggagtggga

SEQ ID NO: 5650607 - DNA, 25 bp, Homo sapien
gtgtgtgctgggtaggatgggcggg

SEQ ID NO: 5650608 - DNA, 25 bp, Homo sapien
gatgggcgggggttgtattgatgag

SEQ ID NO: 5650609 - DNA, 25 bp, Homo sapien
ttgatgagattagtagtatgggagt

SEQ ID NO: 5650610 - DNA, 25 bp, Homo sapien
tttgaggaggtaagctacataaact

SEQ ID NO: 5650611 - DNA, 25 bp, Homo sapien
tgatgtgagcccgtctaaacatttt

SEQ ID NO: 5650612 - DNA, 25 bp, Homo sapien
atggggtgatgtgagcccgtctaaa

SEQ ID NO: 5650613 - DNA, 25 bp, Homo sapien
tgtgagcccgtctaaacattttcag

SEQ ID NO: 5650614 - DNA, 25 bp, Homo sapien
tggcacgaaattgaccaaccctggg

SEQ ID NO: 5650615 - DNA, 25 bp, Homo sapien
gatgcttgtcccttttgatcgtggt

SEQ ID NO: 5650616 - DNA, 25 bp, Homo sapien
tttacgccggcttctattgacttgg

SEQ ID NO: 5650617 - DNA, 25 bp, Homo sapien
gacttgggttaatcgtgtgaccgcg

SEQ ID NO: 5650618 - DNA, 25 bp, Homo sapien
taagtttcataagggctatcgtagt

SEQ ID NO: 5650619 - DNA, 25 bp, Homo sapien
ccttaagtttcataagggctatcgt

SEQ ID NO: 5650620 - DNA, 25 bp, Homo sapien
ataagggctatcgtagttttctggg

SEQ ID NO: 5650621 - DNA, 25 bp, Homo sapien
cataagggctatcgtagttttctgg

SEQ ID NO: 5650622 - DNA, 25 bp, Homo sapien
tcagggccctgttcaactaagcact

SEQ ID NO: 5650623 - DNA, 25 bp, Homo sapien
tgtctcctctatataaatgcgtagg

SEQ ID NO: 5650624 - DNA, 25 bp, Homo sapien
ccagtacacttaccatgttacgact

SEQ ID NO: 5650625 - DNA, 25 bp, Homo sapien
ttgaagtatacttgaggagggtgac

SEQ ID NO: 5650626 - DNA, 25 bp, Homo sapien
ctcctaagtgtaagttgggtgcttt

SEQ ID NO: 5650627 - DNA, 25 bp, Homo sapien
cgccaggtttcaatttctatcgcct

SEQ ID NO: 5650628 - DNA, 25 bp, Homo sapien
atggtttggctaaggttgtctggta

SEQ ID NO: 5650629 - DNA, 25 bp, Homo sapien
ggtgtgaggagttcagttatatgtt

SEQ ID NO: 5650630 - DNA, 25 bp, Homo sapien
tatctattgcgccaggtttcaattt

SEQ ID NO: 5650631 - DNA, 25 bp, Homo sapien
gtaccgcggccgttaaacatgtgtc

SEQ ID NO: 5650632 - DNA, 25 bp, Homo sapien
ggaacaagtgattatgctacctttg

SEQ ID NO: 5650633 - DNA, 25 bp, Homo sapien
ggccgttaaacatgtgtcactgggc

SEQ ID NO: 5650634 - DNA, 25 bp, Homo sapien
tgctacctttgcacggttagggtac

SEQ ID NO: 5650635 - DNA, 25 bp, Homo sapien
gacagctgaaccctcgtggagccat

SEQ ID NO: 5650636 - DNA, 25 bp, Homo sapien
tcttcacgggcaggtcaatttcact

SEQ ID NO: 5650637 - DNA, 25 bp, Homo sapien
tcatgcccgcctcttcacgggcagg

SEQ ID NO: 5650638 - DNA, 25 bp, Homo sapien
ccgcctcttcacgggcaggtcaatt

SEQ ID NO: 5650639 - DNA, 25 bp, Homo sapien
tcaatttcactggttaaaagtaaga

SEQ ID NO: 5650640 - DNA, 25 bp, Homo sapien
ctgtgggtttgttaggtactgtttg

SEQ ID NO: 5650641 - DNA, 25 bp, Homo sapien
ttaatgcaggtttggtagtttagga

SEQ ID NO: 5650642 - DNA, 25 bp, Homo sapien
caggtttggtagtttaggacctgtg

SEQ ID NO: 5650643 - DNA, 25 bp, Homo sapien
tgttaggtactgtttgcattaataa

SEQ ID NO: 5650644 - DNA, 25 bp, Homo sapien
tatagtagttcgctttgactggtga

SEQ ID NO: 5650645 - DNA, 25 bp, Homo sapien
tactgctcggaggttgggttctgct

SEQ ID NO: 5650646 - DNA, 25 bp, Homo sapien
taggattgcgctgttatccctaggg

SEQ ID NO: 5650647 - DNA, 25 bp, Homo sapien
actggtgaagtcttagcatgtactg

SEQ ID NO: 5650648 - DNA, 25 bp, Homo sapien
accgacctggattactccggtctga

SEQ ID NO: 5650649 - DNA, 25 bp, Homo sapien
tcttgtcctttcgtacagggaggaa

SEQ ID NO: 5650650 - DNA, 25 bp, Homo sapien
tgaagtagatagaaaccgacctgga

SEQ ID NO: 5650651 - DNA, 25 bp, Homo sapien
gaagtaggccttatttctcttgtcc

SEQ ID NO: 5650652 - DNA, 25 bp, Homo sapien
gattaccgggctctgccatcttaac

SEQ ID NO: 5650653 - DNA, 25 bp, Homo sapien
cgattaccgggctctgccatcttaa

SEQ ID NO: 5650654 - DNA, 25 bp, Homo sapien
aagaggaattgaacctctgactgta

SEQ ID NO: 5650655 - DNA, 25 bp, Homo sapien
gaattgaacctctgactgtaaagtt

SEQ ID NO: 5650656 - DNA, 25 bp, Homo sapien
gaggaattgaacctctgactgtaaa

SEQ ID NO: 5650657 - DNA, 25 bp, Homo sapien
ggaattgaacctctgactgtaaagt

SEQ ID NO: 5650658 - DNA, 25 bp, Homo sapien
ggagtaggaggttggccatgggtat

SEQ ID NO: 5650659 - DNA, 25 bp, Homo sapien
tatatagcctagaatttttcgttcg

SEQ ID NO: 5650660 - DNA, 25 bp, Homo sapien
taggaatgccattgcgattagaatg

SEQ ID NO: 5650661 - DNA, 25 bp, Homo sapien
ttcgttcggtaagcattaggaatgc

SEQ ID NO: 5650662 - DNA, 25 bp, Homo sapien
tgtagtagcccgtaggggcctacaa

SEQ ID NO: 5650663 - DNA, 25 bp, Homo sapien
gttcatagtagaagagcgatggtga

SEQ ID NO: 5650664 - DNA, 25 bp, Homo sapien
tgaagagttttatggcgtcagcgaa

SEQ ID NO: 5650665 - DNA, 25 bp, Homo sapien
agcgatggtgagagctaaggtcggg

SEQ ID NO: 5650666 - DNA, 25 bp, Homo sapien
gcctgagactagttcggactcccct

SEQ ID NO: 5650667 - DNA, 25 bp, Homo sapien
cagaggattgagtaaacggctaggc

SEQ ID NO: 5650668 - DNA, 25 bp, Homo sapien
gagtttgatgctcaccctgatcaga

SEQ ID NO: 5650669 - DNA, 25 bp, Homo sapien
ttcggttggtctctgctagtgtgga

SEQ ID NO: 5650670 - DNA, 25 bp, Homo sapien
tataataatgtttgtgtattcggct

SEQ ID NO: 5650671 - DNA, 25 bp, Homo sapien
tgtatgagttggtcgtagcggaatc

SEQ ID NO: 5650672 - DNA, 25 bp, Homo sapien
gtgtatgagttggtcgtagcggaat

SEQ ID NO: 5650673 - DNA, 25 bp, Homo sapien
tagcggaatcgggggtatgctgttc

SEQ ID NO: 5650674 - DNA, 25 bp, Homo sapien
atataagtaatgctagggtgagtgg

SEQ ID NO: 5650675 - DNA, 25 bp, Homo sapien
catataagtaatgctagggtgagtg

SEQ ID NO: 5650676 - DNA, 25 bp, Homo sapien
gggaatgctggagattgtaatgggt

SEQ ID NO: 5650677 - DNA, 25 bp, Homo sapien
gagattgtaatgggtatggagacat

SEQ ID NO: 5650678 - DNA, 25 bp, Homo sapien
tgctggagattgtaatgggtatgga

SEQ ID NO: 5650679 - DNA, 25 bp, Homo sapien
tggagattgtaatgggtatggagac

SEQ ID NO: 5650680 - DNA, 25 bp, Homo sapien
aagctcctattatttactctatcaa

SEQ ID NO: 5650681 - DNA, 25 bp, Homo sapien
tatcaaagtaactcttttatcagac

SEQ ID NO: 5650682 - DNA, 25 bp, Homo sapien
ctctatcaaagtaactcttttatca

SEQ ID NO: 5650683 - DNA, 25 bp, Homo sapien
taagctcctattatttactctatca

SEQ ID NO: 5650684 - DNA, 25 bp, Homo sapien
tgtgataggtggcacggagaatttt

SEQ ID NO: 5650685 - DNA, 25 bp, Homo sapien
gggatgggttcgattctcatagtcc

SEQ ID NO: 5650686 - DNA, 25 bp, Homo sapien
tctcagggatgggttcgattctcat

SEQ ID NO: 5650687 - DNA, 25 bp, Homo sapien
taggtggcacggagaattttggatt

SEQ ID NO: 5650688 - DNA, 25 bp, Homo sapien
ggcccgatagcttatttagctgacc

SEQ ID NO: 5650689 - DNA, 25 bp, Homo sapien
ccgatagcttatttagctgacctta

SEQ ID NO: 5650690 - DNA, 25 bp, Homo sapien
cattttcggggtatgggcccgatag

SEQ ID NO: 5650691 - DNA, 25 bp, Homo sapien
atagcttatttagctgaccttactt

SEQ ID NO: 5650692 - DNA, 25 bp, Homo sapien
taaaaaatcagtgcgagcttagcgc

SEQ ID NO: 5650693 - DNA, 25 bp, Homo sapien
cttgcgtgaggaaatacttgatggc

SEQ ID NO: 5650694 - DNA, 25 bp, Homo sapien
gcagcttctgtggaacgagggttta

SEQ ID NO: 5650695 - DNA, 25 bp, Homo sapien
agcgctgtgatgagtgtgcctgcaa

SEQ ID NO: 5650696 - DNA, 25 bp, Homo sapien
ggatggaattaagggtgttagtcat

SEQ ID NO: 5650697 - DNA, 25 bp, Homo sapien
ggagaggagggtggatggaattaag

SEQ ID NO: 5650698 - DNA, 25 bp, Homo sapien
tggatggaattaagggtgttagtca

SEQ ID NO: 5650699 - DNA, 25 bp, Homo sapien
aggagggtggatggaattaagggtg

SEQ ID NO: 5650700 - DNA, 25 bp, Homo sapien
aatggcccatttgggcaaaaagccg

SEQ ID NO: 5650701 - DNA, 25 bp, Homo sapien
ttttgtgaattcttcgataatggcc

SEQ ID NO: 5650702 - DNA, 25 bp, Homo sapien
tgatgaggctattgttttttgtgaa

SEQ ID NO: 5650703 - DNA, 25 bp, Homo sapien
tagaagtagaggttaaggagggtga

SEQ ID NO: 5650704 - DNA, 25 bp, Homo sapien
aattaagtattgcaacttactgagg

SEQ ID NO: 5650705 - DNA, 25 bp, Homo sapien
aagtattgcaacttactgagggctt

SEQ ID NO: 5650706 - DNA, 25 bp, Homo sapien
tggctgatttgcgttcagttgatgc

SEQ ID NO: 5650707 - DNA, 25 bp, Homo sapien
tttgcgttcagttgatgcagagtgg

SEQ ID NO: 5650708 - DNA, 25 bp, Homo sapien
tgatttgcgttcagttgatgcagag

SEQ ID NO: 5650709 - DNA, 25 bp, Homo sapien
aaagtggctgatttgcgttcagttg

SEQ ID NO: 5650710 - DNA, 25 bp, Homo sapien
tgtgggtttaagtcccattggtcta

SEQ ID NO: 5650711 - DNA, 25 bp, Homo sapien
tagctgttaactaagtgtttgtggg

SEQ ID NO: 5650712 - DNA, 25 bp, Homo sapien
tagggtgcttagctgttaactaagt

SEQ ID NO: 5650713 - DNA, 25 bp, Homo sapien
cagttgattagggtgcttagctgtt

SEQ ID NO: 5650714 - DNA, 25 bp, Homo sapien
aagcagcttcaaacctgccggggct

SEQ ID NO: 5650715 - DNA, 25 bp, Homo sapien
tcgaagaagcagcttcaaacctgcc

SEQ ID NO: 5650716 - DNA, 25 bp, Homo sapien
gcagcttcaaacctgccggggcttc

SEQ ID NO: 5650717 - DNA, 25 bp, Homo sapien
aaattcgaagaagcagcttcaaacc

SEQ ID NO: 5650718 - DNA, 25 bp, Homo sapien
ctccgaggtgattttcatattgaat

SEQ ID NO: 5650719 - DNA, 25 bp, Homo sapien
tccgaggtgattttcatattgaatt

SEQ ID NO: 5650720 - DNA, 25 bp, Homo sapien
ccgaggtgattttcatattgaattg

SEQ ID NO: 5650721 - DNA, 25 bp, Homo sapien
ttggactgtaaatctaaagacaggg

SEQ ID NO: 5650722 - DNA, 25 bp, Homo sapien
aatggctgagtgaagcattggactg

SEQ ID NO: 5650723 - DNA, 25 bp, Homo sapien
cattggactgtaaatctaaagacag

SEQ ID NO: 5650724 - DNA, 25 bp, Homo sapien
aaatggctgagtgaagcattggact

SEQ ID NO: 5650725 - DNA, 25 bp, Homo sapien
ggaactagtcagttgccaaagcctc

SEQ ID NO: 5650726 - DNA, 25 bp, Homo sapien
cagaagcttatgttgtttatgcggg

SEQ ID NO: 5650727 - DNA, 25 bp, Homo sapien
aggactccagctcatgcgccgaata

SEQ ID NO: 5650728 - DNA, 25 bp, Homo sapien
tggtcgttacctagaaggttgcctg

SEQ ID NO: 5650729 - DNA, 25 bp, Homo sapien
tctgttagtagtatagtgatgccag

SEQ ID NO: 5650730 - DNA, 25 bp, Homo sapien
ctgttagtagtatagtgatgccagc

SEQ ID NO: 5650731 - DNA, 25 bp, Homo sapien
tcacacgataaaccctaggaagcca

SEQ ID NO: 5650732 - DNA, 25 bp, Homo sapien
gagtgtggcgagtcagctaaatact

SEQ ID NO: 5650733 - DNA, 25 bp, Homo sapien
ggaagccaattgatatcatagctca

SEQ ID NO: 5650734 - DNA, 25 bp, Homo sapien
tgaccgaaaaatcagaataggtgtt

SEQ ID NO: 5650735 - DNA, 25 bp, Homo sapien
catagtggaagtgagctacaacgta

SEQ ID NO: 5650736 - DNA, 25 bp, Homo sapien
agtcaggccacctacggtgaaaaga

SEQ ID NO: 5650737 - DNA, 25 bp, Homo sapien
ggcattccggataggccgagaaagt

SEQ ID NO: 5650738 - DNA, 25 bp, Homo sapien
gggcatccatatagtcactccaggt

SEQ ID NO: 5650739 - DNA, 25 bp, Homo sapien
tttatgtatacgggttcttcgaatg

SEQ ID NO: 5650740 - DNA, 25 bp, Homo sapien
gattttatgtatacgggttcttcga

SEQ ID NO: 5650741 - DNA, 25 bp, Homo sapien
tatgtatacgggttcttcgaatgtg

SEQ ID NO: 5650742 - DNA, 25 bp, Homo sapien
tagattttatgtatacgggttcttc

SEQ ID NO: 5650743 - DNA, 25 bp, Homo sapien
gaggccatggggttggcttgaaacc

SEQ ID NO: 5650744 - DNA, 25 bp, Homo sapien
catggggttggcttgaaaccagctt

SEQ ID NO: 5650745 - DNA, 25 bp, Homo sapien
tgaaaaagtcatggaggccatgggg

SEQ ID NO: 5650746 - DNA, 25 bp, Homo sapien
tggggttggcttgaaaccagctttg

SEQ ID NO: 5650747 - DNA, 25 bp, Homo sapien
aagatatataggatttagcctataa

SEQ ID NO: 5650748 - DNA, 25 bp, Homo sapien
tgacaaagttatgaaatggtttttc

SEQ ID NO: 5650749 - DNA, 25 bp, Homo sapien
agcctataatttaactttgacaaag

SEQ ID NO: 5650750 - DNA, 25 bp, Homo sapien
agatatataggatttagcctataat

SEQ ID NO: 5650751 - DNA, 25 bp, Homo sapien
tagttcagacggtttctatttcctg

SEQ ID NO: 5650752 - DNA, 25 bp, Homo sapien
gatcgttgacctcgtctgttatgta

SEQ ID NO: 5650753 - DNA, 25 bp, Homo sapien
gtaggagttgaagattagtccgccg

SEQ ID NO: 5650754 - DNA, 25 bp, Homo sapien
atttcctgagcgtctgagatgttag

SEQ ID NO: 5650755 - DNA, 25 bp, Homo sapien
cgggagtactactcgattgtcaacg

SEQ ID NO: 5650756 - DNA, 25 bp, Homo sapien
tactcgattgtcaacgtcaaggagt

SEQ ID NO: 5650757 - DNA, 25 bp, Homo sapien
gagtactactcgattgtcaacgtca

SEQ ID NO: 5650758 - DNA, 25 bp, Homo sapien
tactactcgattgtcaacgtcaagg

SEQ ID NO: 5650759 - DNA, 25 bp, Homo sapien
aattaattctaggacgatgggcatg

SEQ ID NO: 5650760 - DNA, 25 bp, Homo sapien
cacagatttcagagcattgaccgta

SEQ ID NO: 5650761 - DNA, 25 bp, Homo sapien
catgaaactgtggtttgctccacag

SEQ ID NO: 5650762 - DNA, 25 bp, Homo sapien
gatttcagagcattgaccgtagtat

SEQ ID NO: 5650763 - DNA, 25 bp, Homo sapien
aaagaggtgttggttctcttaatct

SEQ ID NO: 5650764 - DNA, 25 bp, Homo sapien
tgtaaagaggtgttggttctcttaa

SEQ ID NO: 5650765 - DNA, 25 bp, Homo sapien
taaagaggtgttggttctcttaatc

SEQ ID NO: 5650766 - DNA, 25 bp, Homo sapien
attatggtgggccatacggtagtat

SEQ ID NO: 5650767 - DNA, 25 bp, Homo sapien
gtatgggggtaattatggtgggcca

SEQ ID NO: 5650768 - DNA, 25 bp, Homo sapien
atggtgggccatacggtagtattta

SEQ ID NO: 5650769 - DNA, 25 bp, Homo sapien
ggtaattatggtgggccatacggta

SEQ ID NO: 5650770 - DNA, 25 bp, Homo sapien
aatgaatgaagcgaacagattttcg

SEQ ID NO: 5650771 - DNA, 25 bp, Homo sapien
gggcaatgaatgaagcgaacagatt

SEQ ID NO: 5650772 - DNA, 25 bp, Homo sapien
aatgaagcgaacagattttcgttca

SEQ ID NO: 5650773 - DNA, 25 bp, Homo sapien
gcaatgaatgaagcgaacagatttt

SEQ ID NO: 5650774 - DNA, 25 bp, Homo sapien
ctagtataagagatcaggttcgtcc

SEQ ID NO: 5650775 - DNA, 25 bp, Homo sapien
gtgggctagggcatttttaatctta

SEQ ID NO: 5650776 - DNA, 25 bp, Homo sapien
cgaaagcctataatcactgcgcccg

SEQ ID NO: 5650777 - DNA, 25 bp, Homo sapien
tccgaggaggttagttgtggcaata

SEQ ID NO: 5650778 - DNA, 25 bp, Homo sapien
tggcgcttccaattaggtgcatgag

SEQ ID NO: 5650779 - DNA, 25 bp, Homo sapien
gattaaggcgacagcgatttctagg

SEQ ID NO: 5650780 - DNA, 25 bp, Homo sapien
gaattgtgaagatgataagtgtaga

SEQ ID NO: 5650781 - DNA, 25 bp, Homo sapien
gatagtcagtagaattagaattgtg

SEQ ID NO: 5650782 - DNA, 25 bp, Homo sapien
gctgggttttactatatgataggca

SEQ ID NO: 5650783 - DNA, 25 bp, Homo sapien
gggctgggttttactatatgatagg

SEQ ID NO: 5650784 - DNA, 25 bp, Homo sapien
ttactatatgataggcatgtgattg

SEQ ID NO: 5650785 - DNA, 25 bp, Homo sapien
ggttttactatatgataggcatgtg

SEQ ID NO: 5650786 - DNA, 25 bp, Homo sapien
taggattatcccgtatcgaaggcct

SEQ ID NO: 5650787 - DNA, 25 bp, Homo sapien
tggttagtaggcctagtatgaggag

SEQ ID NO: 5650788 - DNA, 25 bp, Homo sapien
aatcacatggctaggccggaggtca

SEQ ID NO: 5650789 - DNA, 25 bp, Homo sapien
ggccttggtatgtgctttctcgtgt

SEQ ID NO: 5650790 - DNA, 25 bp, Homo sapien
tactcctgatgcgagtaatacggat

SEQ ID NO: 5650791 - DNA, 25 bp, Homo sapien
ggtgattgatactcctgatgcgagt

SEQ ID NO: 5650792 - DNA, 25 bp, Homo sapien
ggtgagctcaggtgattgatactcc

SEQ ID NO: 5650793 - DNA, 25 bp, Homo sapien
caggtgattgatactcctgatgcga

SEQ ID NO: 5650794 - DNA, 25 bp, Homo sapien
tagagacccagtaaaattgtaataa

SEQ ID NO: 5650795 - DNA, 25 bp, Homo sapien
tgcttgaattatttggtttcggttg

SEQ ID NO: 5650796 - DNA, 25 bp, Homo sapien
agagacccagtaaaattgtaataag

SEQ ID NO: 5650797 - DNA, 25 bp, Homo sapien
aatagagacccagtaaaattgtaat

SEQ ID NO: 5650798 - DNA, 25 bp, Homo sapien
cgtcggaaatggtgaagggagactc

SEQ ID NO: 5650799 - DNA, 25 bp, Homo sapien
cggaaatggtgaagggagactcgaa

SEQ ID NO: 5650800 - DNA, 25 bp, Homo sapien
cgtagatgccgtcggaaatggtgaa

SEQ ID NO: 5650801 - DNA, 25 bp, Homo sapien
ttgagccgtagatgccgtcggaaat

SEQ ID NO: 5650802 - DNA, 25 bp, Homo sapien
gaagccaaagtgatgtttggatgta

SEQ ID NO: 5650803 - DNA, 25 bp, Homo sapien
ggcggcttcgaagccaaagtgatgt

SEQ ID NO: 5650804 - DNA, 25 bp, Homo sapien
cttcgaagccaaagtgatgtttgga

SEQ ID NO: 5650805 - DNA, 25 bp, Homo sapien
ggcttcgaagccaaagtgatgtttg

SEQ ID NO: 5650806 - DNA, 25 bp, Homo sapien
atagatggagacatacagaaatagt

SEQ ID NO: 5650807 - DNA, 25 bp, Homo sapien
gaaatagtcaaaccacatctacaaa

SEQ ID NO: 5650808 - DNA, 25 bp, Homo sapien
aatagatggagacatacagaaatag

SEQ ID NO: 5650809 - DNA, 25 bp, Homo sapien
ctcttttttgaatgttgtcaaaact

SEQ ID NO: 5650810 - DNA, 25 bp, Homo sapien
tgttgtcaaaactagttaattggaa

SEQ ID NO: 5650811 - DNA, 25 bp, Homo sapien
cttttttgaatgttgtcaaaactag

SEQ ID NO: 5650812 - DNA, 25 bp, Homo sapien
ttgaatgttgtcaaaactagttaat

SEQ ID NO: 5650813 - DNA, 25 bp, Homo sapien
taaaaggagggcaatttctagatca

SEQ ID NO: 5650814 - DNA, 25 bp, Homo sapien
tagtcactcataggccagacttagg

SEQ ID NO: 5650815 - DNA, 25 bp, Homo sapien
atatagggtcgaagccgcactcgta

SEQ ID NO: 5650816 - DNA, 25 bp, Homo sapien
gagggatgacataactattagtggc

SEQ ID NO: 5650817 - DNA, 25 bp, Homo sapien
taatttaatgagtcgaaatcattcg

SEQ ID NO: 5650818 - DNA, 25 bp, Homo sapien
tgattatcataatttaatgagtcga

SEQ ID NO: 5650819 - DNA, 25 bp, Homo sapien
taatgagtcgaaatcattcgttttg

SEQ ID NO: 5650820 - DNA, 25 bp, Homo sapien
gagtcgaaatcattcgttttgttta

SEQ ID NO: 5650821 - DNA, 25 bp, Homo sapien
tgagatggtaaatgctagtataata

SEQ ID NO: 5650822 - DNA, 25 bp, Homo sapien
tagggctaggcccaccgctgcttcg

SEQ ID NO: 5650823 - DNA, 25 bp, Homo sapien
ttcgcaggcggcaaagactagtatg

SEQ ID NO: 5650824 - DNA, 25 bp, Homo sapien
tatgagagtagctataatgaacagc

SEQ ID NO: 5650825 - DNA, 25 bp, Homo sapien
gtggtagtaatataattgttgggac

SEQ ID NO: 5650826 - DNA, 25 bp, Homo sapien
agtggtagtaatataattgttggga

SEQ ID NO: 5650827 - DNA, 25 bp, Homo sapien
aggagtcaggtagttagtattagga

SEQ ID NO: 5650828 - DNA, 25 bp, Homo sapien
gagaggtagagtttttttcgtgata

SEQ ID NO: 5650829 - DNA, 25 bp, Homo sapien
aaggagatttgtagggagattagta

SEQ ID NO: 5650830 - DNA, 25 bp, Homo sapien
ggataagtgtggtttcgaagaagat

SEQ ID NO: 5650831 - DNA, 25 bp, Homo sapien
tgtgtaagctagtcatattaagttg

SEQ ID NO: 5650832 - DNA, 25 bp, Homo sapien
ctttagggagtcataagtggagtcc

SEQ ID NO: 5650833 - DNA, 25 bp, Homo sapien
tgagtagtagaatgtttagtgagcc

SEQ ID NO: 5650834 - DNA, 25 bp, Homo sapien
taagtggagtccgtaaagaggtatc

SEQ ID NO: 5650835 - DNA, 25 bp, Homo sapien
gtgggtgagtgagccccattgtgtt

SEQ ID NO: 5650836 - DNA, 25 bp, Homo sapien
gtgagtgagccccattgtgttgtgg

SEQ ID NO: 5650837 - DNA, 25 bp, Homo sapien
ggtgggtgagtgagccccattgtgt

SEQ ID NO: 5650838 - DNA, 25 bp, Homo sapien
gggtgagtgagccccattgtgttgt

SEQ ID NO: 5650839 - DNA, 25 bp, Homo sapien
cccggtaatgatgtcggggttgagg

SEQ ID NO: 5650840 - DNA, 25 bp, Homo sapien
agaggaaaacccggtaatgatgtcg

SEQ ID NO: 5650841 - DNA, 25 bp, Homo sapien
acccggtaatgatgtcggggttgag

SEQ ID NO: 5650842 - DNA, 25 bp, Homo sapien
ggggtcgtaagcctctgttgtcaga

SEQ ID NO: 5650843 - DNA, 25 bp, Homo sapien
aataaggggtcgtaagcctctgttg

SEQ ID NO: 5650844 - DNA, 25 bp, Homo sapien
taaggggtcgtaagcctctgttgtc

SEQ ID NO: 5650845 - DNA, 25 bp, Homo sapien
ggtcgtaagcctctgttgtcagatt

SEQ ID NO: 5650846 - DNA, 25 bp, Homo sapien
agttagcagttcttgtgagctttct

SEQ ID NO: 5650847 - DNA, 25 bp, Homo sapien
gttagcagttcttgtgagctttctc

SEQ ID NO: 5650848 - DNA, 25 bp, Homo sapien
ttttggggcctaagaccaatggata

SEQ ID NO: 5650849 - DNA, 25 bp, Homo sapien
gggcctaagaccaatggatagctgt

SEQ ID NO: 5650850 - DNA, 25 bp, Homo sapien
aagaccaatggatagctgttatcct

SEQ ID NO: 5650851 - DNA, 25 bp, Homo sapien
gcctaagaccaatggatagctgtta

SEQ ID NO: 5650852 - DNA, 25 bp, Homo sapien
catgctaaggcgaggatgaaaccga

SEQ ID NO: 5650853 - DNA, 25 bp, Homo sapien
ggatataattcctacgccctctcag

SEQ ID NO: 5650854 - DNA, 25 bp, Homo sapien
tctgctcgggcgtatcatcaactga

SEQ ID NO: 5650855 - DNA, 25 bp, Homo sapien
cctctcagccgatgaacagttggaa

SEQ ID NO: 5650856 - DNA, 25 bp, Homo sapien
aaggtattcctgctaatgctaggct

SEQ ID NO: 5650857 - DNA, 25 bp, Homo sapien
aaaggtattcctgctaatgctaggc

SEQ ID NO: 5650858 - DNA, 25 bp, Homo sapien
atgcgggggaaatgttgttagtaat

SEQ ID NO: 5650859 - DNA, 25 bp, Homo sapien
tcctaggaaagtgacagcgagggct

SEQ ID NO: 5650860 - DNA, 25 bp, Homo sapien
tagggctgttagaagtcctaggaaa

SEQ ID NO: 5650861 - DNA, 25 bp, Homo sapien
ttccggctgccaggcgtttaatggg

SEQ ID NO: 5650862 - DNA, 25 bp, Homo sapien
aattatgcctttttgggttgaggtg

SEQ ID NO: 5650863 - DNA, 25 bp, Homo sapien
taggtaatagcttttctagtcaggt

SEQ ID NO: 5650864 - DNA, 25 bp, Homo sapien
gcaggttttggctcgtaagaaggcc

SEQ ID NO: 5650865 - DNA, 25 bp, Homo sapien
ggtgctgtgaaattgttttaggtaa

SEQ ID NO: 5650866 - DNA, 25 bp, Homo sapien
ggctttgtatgattatgggcgttga

SEQ ID NO: 5650867 - DNA, 25 bp, Homo sapien
tctttggatatactacagcgatggc

SEQ ID NO: 5650868 - DNA, 25 bp, Homo sapien
tgggcgttgattagtagtggttact

SEQ ID NO: 5650869 - DNA, 25 bp, Homo sapien
taaactttaatagtgtaggaagctg

SEQ ID NO: 5650870 - DNA, 25 bp, Homo sapien
tgtggtcgggtgtgttattattctg

SEQ ID NO: 5650871 - DNA, 25 bp, Homo sapien
gtgtggtcgggtgtgttattattct

SEQ ID NO: 5650872 - DNA, 25 bp, Homo sapien
ggtttagtactgattgttagcggtg

SEQ ID NO: 5650873 - DNA, 25 bp, Homo sapien
agtactgattgttagcggtgtggtc

SEQ ID NO: 5650874 - DNA, 25 bp, Homo sapien
atgtatgctttgtttctgttgagtg

SEQ ID NO: 5650875 - DNA, 25 bp, Homo sapien
gatgtatgctttgtttctgttgagt

SEQ ID NO: 5650876 - DNA, 25 bp, Homo sapien
tgatgtatgctttgtttctgttgag

SEQ ID NO: 5650877 - DNA, 25 bp, Homo sapien
ttcttgtagttgaaatacaacgatg

SEQ ID NO: 5650878 - DNA, 25 bp, Homo sapien
cgtggttgtagtccgtgcgagaata

SEQ ID NO: 5650879 - DNA, 25 bp, Homo sapien
cattggtcgtggttgtagtccgtgc

SEQ ID NO: 5650880 - DNA, 25 bp, Homo sapien
gtttttcatatcattggtcgtggtt

SEQ ID NO: 5650881 - DNA, 25 bp, Homo sapien
taagccgagggcgtctttgattgtg

SEQ ID NO: 5650882 - DNA, 25 bp, Homo sapien
tgatcccgtttcgtgcaagaatagg

SEQ ID NO: 5650883 - DNA, 25 bp, Homo sapien
tgctgctagggctgcaataatgaag

SEQ ID NO: 5650884 - DNA, 25 bp, Homo sapien
gattcattgaactaggtctgtccca

SEQ ID NO: 5650885 - DNA, 25 bp, Homo sapien
gatcggagaattgtgtaggcgaata

SEQ ID NO: 5650886 - DNA, 25 bp, Homo sapien
ttagtgggcgaaatattatgctttg

SEQ ID NO: 5650887 - DNA, 25 bp, Homo sapien
atagggcaaggacgcctcctagttt

SEQ ID NO: 5650888 - DNA, 25 bp, Homo sapien
gattattgctaggatgaggatggat

SEQ ID NO: 5650889 - DNA, 25 bp, Homo sapien
taggattgttgtgaagtatagtacg

SEQ ID NO: 5650890 - DNA, 25 bp, Homo sapien
ggtctgcggctaggagtcaataaag

SEQ ID NO: 5650891 - DNA, 25 bp, Homo sapien
gtatagtacggatgctacttgtcca

SEQ ID NO: 5650892 - DNA, 25 bp, Homo sapien
actggttgtcctccgattcaggtta

SEQ ID NO: 5650893 - DNA, 25 bp, Homo sapien
tcgtctccggtttacaagactggtg

SEQ ID NO: 5650894 - DNA, 25 bp, Homo sapien
tagctttgggtgctaatggtggagt

SEQ ID NO: 5650895 - DNA, 25 bp, Homo sapien
tgtacgaaatacatagcggttgttg

SEQ ID NO: 5650896 - DNA, 25 bp, Homo sapien
tatggtaccgtacaatattcatggt

SEQ ID NO: 5650897 - DNA, 25 bp, Homo sapien
tgagtcaatacttgggtggtaccca

SEQ ID NO: 5650898 - DNA, 25 bp, Homo sapien
catggtggctggcagtaatgtacga

SEQ ID NO: 5650899 - DNA, 25 bp, Homo sapien
tgtactatgtactgttaagggtggg

SEQ ID NO: 5650900 - DNA, 25 bp, Homo sapien
ttggagttgcagttgatgtgtgata

SEQ ID NO: 5650901 - DNA, 25 bp, Homo sapien
gacgagaagggatttgactgtaatg

SEQ ID NO: 5650902 - DNA, 25 bp, Homo sapien
gctatgtacggtaaatgactttatg

SEQ ID NO: 5650903 - DNA, 25 bp, Homo sapien
cggatacagttcactttagctaccc

SEQ ID NO: 5650904 - DNA, 25 bp, Homo sapien
agttcactttagctacccccaagtg

SEQ ID NO: 5650905 - DNA, 25 bp, Homo sapien
ggatacagttcactttagctacccc

SEQ ID NO: 5650906 - DNA, 25 bp, Homo sapien
tacagttcactttagctacccccaa

SEQ ID NO: 5650907 - DNA, 25 bp, Homo sapien
gaacgtgtgggctatttaggcttta

SEQ ID NO: 5650908 - DNA, 25 bp, Homo sapien
tgtgggctatttaggctttatggcc

SEQ ID NO: 5650909 - DNA, 25 bp, Homo sapien
cgtgtgggctatttaggctttatgg

SEQ ID NO: 5650910 - DNA, 25 bp, Homo sapien
gggctatttaggctttatggccctg

SEQ ID NO: 5650911 - DNA, 25 bp, Homo sapien
ggcgaacatacctactaaagtgtgt

SEQ ID NO: 5650912 - DNA, 25 bp, Homo sapien
acgggagctctccatgcatttggta

SEQ ID NO: 5650913 - DNA, 25 bp, Homo sapien
gccggagcaccctatgtcgcagtat

SEQ ID NO: 5650914 - DNA, 25 bp, Homo sapien
gatagcattgcgagacgctggagcc

SEQ ID NO: 5650915 - DNA, 25 bp, Homo sapien
tagagtgcttagttgaacagggccc

SEQ ID NO: 5650916 - DNA, 25 bp, Homo sapien
agacgttaggtcaaggtgtagccca

SEQ ID NO: 5650917 - DNA, 25 bp, Homo sapien
tcaaaagggacaagcatcaagcacg

SEQ ID NO: 5650918 - DNA, 25 bp, Homo sapien
taagcgcaagtacccacgtaaagac

SEQ ID NO: 5650919 - DNA, 25 bp, Homo sapien
ccaaataaagtataggcgatagaaa

SEQ ID NO: 5650920 - DNA, 25 bp, Homo sapien
taccagacaaccttagccaaaccat

SEQ ID NO: 5650921 - DNA, 25 bp, Homo sapien
cagacaaccttagccaaaccattta

SEQ ID NO: 5650922 - DNA, 25 bp, Homo sapien
gaaattgaaacctggcgcaatagat

SEQ ID NO: 5650923 - DNA, 25 bp, Homo sapien
taaatttgcccacagaaccctctaa

SEQ ID NO: 5650924 - DNA, 25 bp, Homo sapien
gatttataggtagaggcgacaaacc

SEQ ID NO: 5650925 - DNA, 25 bp, Homo sapien
taaaagagcacacccgtctatgtag

SEQ ID NO: 5650926 - DNA, 25 bp, Homo sapien
gcgacaaacctaccgagcctggtga

SEQ ID NO: 5650927 - DNA, 25 bp, Homo sapien
caagacgagaagaccctatggagct

SEQ ID NO: 5650928 - DNA, 25 bp, Homo sapien
ggacctgtatgaatggctccacgag

SEQ ID NO: 5650929 - DNA, 25 bp, Homo sapien
tgaaattgacctgcccgtgaagagg

SEQ ID NO: 5650930 - DNA, 25 bp, Homo sapien
gacacatgtttaacggccgcggtac

SEQ ID NO: 5650931 - DNA, 25 bp, Homo sapien
agcagaacccaacctccgagcagta

SEQ ID NO: 5650932 - DNA, 25 bp, Homo sapien
ttggggcgacctcggagcagaaccc

SEQ ID NO: 5650933 - DNA, 25 bp, Homo sapien
cacaggtcctaaactaccaaacctg

SEQ ID NO: 5650934 - DNA, 25 bp, Homo sapien
gtcctaaactaccaaacctgcatta

SEQ ID NO: 5650935 - DNA, 25 bp, Homo sapien
tctgagttcagaccggagtaatcca

SEQ ID NO: 5650936 - DNA, 25 bp, Homo sapien
taagatggcagagcccggtaatcgc

SEQ ID NO: 5650937 - DNA, 25 bp, Homo sapien
tatatacaactacgcaaaggcccca

SEQ ID NO: 5650938 - DNA, 25 bp, Homo sapien
tacgacctcgatgttggatcaggac

SEQ ID NO: 5650939 - DNA, 25 bp, Homo sapien
tccacactagcagagaccaaccgaa

SEQ ID NO: 5650940 - DNA, 25 bp, Homo sapien
ttatcacaacacaagaacacctctg

SEQ ID NO: 5650941 - DNA, 25 bp, Homo sapien
gagtccgaactagtctcaggcttca

SEQ ID NO: 5650942 - DNA, 25 bp, Homo sapien
atcttcctaggaacaacatatgacg

SEQ ID NO: 5650943 - DNA, 25 bp, Homo sapien
taccactcaccctagcattacttat

SEQ ID NO: 5650944 - DNA, 25 bp, Homo sapien
gattccgctacgaccaactcataca

SEQ ID NO: 5650945 - DNA, 25 bp, Homo sapien
acttatatgatatgtctccataccc

SEQ ID NO: 5650946 - DNA, 25 bp, Homo sapien
ctccctgttcttatgaattcgaaca

SEQ ID NO: 5650947 - DNA, 25 bp, Homo sapien
tatgagaatcgaacccatccctgag

SEQ ID NO: 5650948 - DNA, 25 bp, Homo sapien
tctaggactatgagaatcgaaccca

SEQ ID NO: 5650949 - DNA, 25 bp, Homo sapien
gactatgagaatcgaacccatccct

SEQ ID NO: 5650950 - DNA, 25 bp, Homo sapien
gtgccacctatcacaccccatccta

SEQ ID NO: 5650951 - DNA, 25 bp, Homo sapien
caggcagttgaggtggattaaacca

SEQ ID NO: 5650952 - DNA, 25 bp, Homo sapien
taatagcagttctaccgtacaaccc

SEQ ID NO: 5650953 - DNA, 25 bp, Homo sapien
tgagtcccagaggttacccaaggca

SEQ ID NO: 5650954 - DNA, 25 bp, Homo sapien
tcttatccatcatagcaggcagttg

SEQ ID NO: 5650955 - DNA, 25 bp, Homo sapien
ccgcattcctactactcaacttaaa

SEQ ID NO: 5650956 - DNA, 25 bp, Homo sapien
taccgcattcctactactcaactta

SEQ ID NO: 5650957 - DNA, 25 bp, Homo sapien
taactactaccgcattcctactact

SEQ ID NO: 5650958 - DNA, 25 bp, Homo sapien
gcattcctactactcaacttaaact

SEQ ID NO: 5650959 - DNA, 25 bp, Homo sapien
tttttgcccaaatgggccattatcg

SEQ ID NO: 5650960 - DNA, 25 bp, Homo sapien
ctcctctccctaggaggcctgcccc

SEQ ID NO: 5650961 - DNA, 25 bp, Homo sapien
gggccattatcgaagaattcacaaa

SEQ ID NO: 5650962 - DNA, 25 bp, Homo sapien
accatcaccctccttaacctctact

SEQ ID NO: 5650963 - DNA, 25 bp, Homo sapien
taatctactccacctcaatcacact

SEQ ID NO: 5650964 - DNA, 25 bp, Homo sapien
acgctactcctacctatctcccctt

SEQ ID NO: 5650965 - DNA, 25 bp, Homo sapien
tactccccatatctaacaacgtaaa

SEQ ID NO: 5650966 - DNA, 25 bp, Homo sapien
ggttaaatacagaccaagagccttc

SEQ ID NO: 5650967 - DNA, 25 bp, Homo sapien
tgcatcaactgaacgcaaatcagcc

SEQ ID NO: 5650968 - DNA, 25 bp, Homo sapien
ctaaggactgcaaaaccccactctg

SEQ ID NO: 5650969 - DNA, 25 bp, Homo sapien
tcaactgaacgcaaatcagccactt

SEQ ID NO: 5650970 - DNA, 25 bp, Homo sapien
cactctgcatcaactgaacgcaaat

SEQ ID NO: 5650971 - DNA, 25 bp, Homo sapien
acaaacacttagttaacagctaagc

SEQ ID NO: 5650972 - DNA, 25 bp, Homo sapien
tagaccaatgggacttaaacccaca

SEQ ID NO: 5650973 - DNA, 25 bp, Homo sapien
cacttagttaacagctaagcaccct

SEQ ID NO: 5650974 - DNA, 25 bp, Homo sapien
aacacttagttaacagctaagcacc

SEQ ID NO: 5650975 - DNA, 25 bp, Homo sapien
agccccggcaggtttgaagctgctt

SEQ ID NO: 5650976 - DNA, 25 bp, Homo sapien
gaagccccggcaggtttgaagctgc

SEQ ID NO: 5650977 - DNA, 25 bp, Homo sapien
attcaatatgaaaatcacctcggag

SEQ ID NO: 5650978 - DNA, 25 bp, Homo sapien
tgcttcttcgaatttgcaattcaat

SEQ ID NO: 5650979 - DNA, 25 bp, Homo sapien
agaggcctaacccctgtctttagat

SEQ ID NO: 5650980 - DNA, 25 bp, Homo sapien
ttacagtccaatgcttcactcagcc

SEQ ID NO: 5650981 - DNA, 25 bp, Homo sapien
tttagatttacagtccaatgcttca

SEQ ID NO: 5650982 - DNA, 25 bp, Homo sapien
gatttacagtccaatgcttcactca

SEQ ID NO: 5650983 - DNA, 25 bp, Homo sapien
cttattcgagccgagctgggccagc

SEQ ID NO: 5650984 - DNA, 25 bp, Homo sapien
tattcttatcctaccaggcttcgga

SEQ ID NO: 5650985 - DNA, 25 bp, Homo sapien
tcgcatctgctatagtggaggccgg

SEQ ID NO: 5650986 - DNA, 25 bp, Homo sapien
tattcggcgcatgagctggagtcct

SEQ ID NO: 5650987 - DNA, 25 bp, Homo sapien
cccatggcctccatgactttttcaa

SEQ ID NO: 5650988 - DNA, 25 bp, Homo sapien
taggtctacaagacgctacttcccc

SEQ ID NO: 5650989 - DNA, 25 bp, Homo sapien
tcccctatcatagaagagcttatca

SEQ ID NO: 5650990 - DNA, 25 bp, Homo sapien
atatcttaatggcacatgcagcgca

SEQ ID NO: 5650991 - DNA, 25 bp, Homo sapien
cacatgcagcgcaagtaggtctaca

SEQ ID NO: 5650992 - DNA, 25 bp, Homo sapien
catctcagacgctcaggaaatagaa

SEQ ID NO: 5650993 - DNA, 25 bp, Homo sapien
catgatcacgccctcataatcattt

SEQ ID NO: 5650994 - DNA, 25 bp, Homo sapien
tgcttcctagtcctgtatgcccttt

SEQ ID NO: 5650995 - DNA, 25 bp, Homo sapien
atagaaaccgtctgaactatcctgc

SEQ ID NO: 5650996 - DNA, 25 bp, Homo sapien
tccctacgcatcctttacataacag

SEQ ID NO: 5650997 - DNA, 25 bp, Homo sapien
gacgaggtcaacgatccctccctta

SEQ ID NO: 5650998 - DNA, 25 bp, Homo sapien
tacataacagacgaggtcaacgatc

SEQ ID NO: 5650999 - DNA, 25 bp, Homo sapien
gcatcctttacataacagacgaggt

SEQ ID NO: 5651000 - DNA, 25 bp, Homo sapien
gggtatactacggtcaatgctctga

SEQ ID NO: 5651001 - DNA, 25 bp, Homo sapien
gactacggcggactaatcttcaact

SEQ ID NO: 5651002 - DNA, 25 bp, Homo sapien
tgaacctacgagtacaccgactacg

SEQ ID NO: 5651003 - DNA, 25 bp, Homo sapien
ttattcctagaaccaggcgacctgc

SEQ ID NO: 5651004 - DNA, 25 bp, Homo sapien
atggcccaccataattacccccata

SEQ ID NO: 5651005 - DNA, 25 bp, Homo sapien
taccgtatggcccaccataattacc

SEQ ID NO: 5651006 - DNA, 25 bp, Homo sapien
gtatggcccaccataattaccccca

SEQ ID NO: 5651007 - DNA, 25 bp, Homo sapien
tatggcccaccataattacccccat

SEQ ID NO: 5651008 - DNA, 25 bp, Homo sapien
tccttacactattcctcatcaccca

SEQ ID NO: 5651009 - DNA, 25 bp, Homo sapien
ctccttacactattcctcatcaccc

SEQ ID NO: 5651010 - DNA, 25 bp, Homo sapien
tccctcaccaaagcccataaaaata

SEQ ID NO: 5651011 - DNA, 25 bp, Homo sapien
ctccctcaccaaagcccataaaaat

SEQ ID NO: 5651012 - DNA, 25 bp, Homo sapien
ctacctccctcaccaaagcccataa

SEQ ID NO: 5651013 - DNA, 25 bp, Homo sapien
tacctccctcaccaaagcccataaa

SEQ ID NO: 5651014 - DNA, 25 bp, Homo sapien
tacccgccgcagtactgatcattct

SEQ ID NO: 5651015 - DNA, 25 bp, Homo sapien
gaacgaaaatctgttcgcttcattc

SEQ ID NO: 5651016 - DNA, 25 bp, Homo sapien
atctgttcgcttcattcattgcccc

SEQ ID NO: 5651017 - DNA, 25 bp, Homo sapien
aatcctaggcctacccgccgcagta

SEQ ID NO: 5651018 - DNA, 25 bp, Homo sapien
catggccatccccttatgagcgggc

SEQ ID NO: 5651019 - DNA, 25 bp, Homo sapien
ggacgaacctgatctcttatactag

SEQ ID NO: 5651020 - DNA, 25 bp, Homo sapien
tatctataaacctagccatggccat

SEQ ID NO: 5651021 - DNA, 25 bp, Homo sapien
taaccgctaacattactgcaggcca

SEQ ID NO: 5651022 - DNA, 25 bp, Homo sapien
ccctctacacttatcatcttcacaa

SEQ ID NO: 5651023 - DNA, 25 bp, Homo sapien
tcatgcacctaattggaagcgccac

SEQ ID NO: 5651024 - DNA, 25 bp, Homo sapien
ctactcatgcacctaattggaagcg

SEQ ID NO: 5651025 - DNA, 25 bp, Homo sapien
actcatgcacctaattggaagcgcc

SEQ ID NO: 5651026 - DNA, 25 bp, Homo sapien
tatcctagaaatcgctgtcgcctta

SEQ ID NO: 5651027 - DNA, 25 bp, Homo sapien
ctactgactatcctagaaatcgctg

SEQ ID NO: 5651028 - DNA, 25 bp, Homo sapien
gactatcctagaaatcgctgtcgcc

SEQ ID NO: 5651029 - DNA, 25 bp, Homo sapien
tgactatcctagaaatcgctgtcgc

SEQ ID NO: 5651030 - DNA, 25 bp, Homo sapien
aaggccttcgatacgggataatcct

SEQ ID NO: 5651031 - DNA, 25 bp, Homo sapien
gcgcgatgtaacacgagaaagcaca

SEQ ID NO: 5651032 - DNA, 25 bp, Homo sapien
taaccatataccaatggtggcgcga

SEQ ID NO: 5651033 - DNA, 25 bp, Homo sapien
tagtaagcctctacctgcacgacaa

SEQ ID NO: 5651034 - DNA, 25 bp, Homo sapien
cactcctaaacacatccgtattact

SEQ ID NO: 5651035 - DNA, 25 bp, Homo sapien
catcaccccgctaaatcccctagaa

SEQ ID NO: 5651036 - DNA, 25 bp, Homo sapien
acatccgtattactcgcatcaggag

SEQ ID NO: 5651037 - DNA, 25 bp, Homo sapien
tactcgcatcaggagtatcaatcac

SEQ ID NO: 5651038 - DNA, 25 bp, Homo sapien
taagtctggcctatgagtgactaca

SEQ ID NO: 5651039 - DNA, 25 bp, Homo sapien
tacgagtgcggcttcgaccctatat

SEQ ID NO: 5651040 - DNA, 25 bp, Homo sapien
catttccgacggcatctacggctca

SEQ ID NO: 5651041 - DNA, 25 bp, Homo sapien
gaagccgccgcctgatactggcatt

SEQ ID NO: 5651042 - DNA, 25 bp, Homo sapien
gaatactagtatatcgctcacacct

SEQ ID NO: 5651043 - DNA, 25 bp, Homo sapien
tatcctccctactatgcctagaagg

SEQ ID NO: 5651044 - DNA, 25 bp, Homo sapien
gtgggcctagccctactagtctcaa

SEQ ID NO: 5651045 - DNA, 25 bp, Homo sapien
tctttgccgcctgcgaagcagcggt

SEQ ID NO: 5651046 - DNA, 25 bp, Homo sapien
tacataacctaaacctactccaatg

SEQ ID NO: 5651047 - DNA, 25 bp, Homo sapien
aaactaatcgtcccaacaattatat

SEQ ID NO: 5651048 - DNA, 25 bp, Homo sapien
aacaattatattactaccactgaca

SEQ ID NO: 5651049 - DNA, 25 bp, Homo sapien
ataatttgaatcaacacaaccaccc

SEQ ID NO: 5651050 - DNA, 25 bp, Homo sapien
ccaacaattatattactaccactga

SEQ ID NO: 5651051 - DNA, 25 bp, Homo sapien
accaaatcaacaacaacctatttag

SEQ ID NO: 5651052 - DNA, 25 bp, Homo sapien
caacaacctatttagctgttcccca

SEQ ID NO: 5651053 - DNA, 25 bp, Homo sapien
caacaacaacctatttagctgttcc

SEQ ID NO: 5651054 - DNA, 25 bp, Homo sapien
gcatcatccccctactattttttaa

SEQ ID NO: 5651055 - DNA, 25 bp, Homo sapien
cctacaaatctccttaattataaca

SEQ ID NO: 5651056 - DNA, 25 bp, Homo sapien
tatccagcgaaccactatcacgaaa

SEQ ID NO: 5651057 - DNA, 25 bp, Homo sapien
taatactaactacctgactcctacc

SEQ ID NO: 5651058 - DNA, 25 bp, Homo sapien
acaatcatggcaagccaacgccact

SEQ ID NO: 5651059 - DNA, 25 bp, Homo sapien
tttgatgacttctagcaagcctcgc

SEQ ID NO: 5651060 - DNA, 25 bp, Homo sapien
catcgctgggtcaatagtacttgcc

SEQ ID NO: 5651061 - DNA, 25 bp, Homo sapien
cacatagccctcgtagtaacagcca

SEQ ID NO: 5651062 - DNA, 25 bp, Homo sapien
tactcttaaaactaggcggctatgg

SEQ ID NO: 5651063 - DNA, 25 bp, Homo sapien
tgggagaactctctgtgctagtaac

SEQ ID NO: 5651064 - DNA, 25 bp, Homo sapien
cataaaaccctcattcacacgagaa

SEQ ID NO: 5651065 - DNA, 25 bp, Homo sapien
caaatatcactctcctacttacagg

SEQ ID NO: 5651066 - DNA, 25 bp, Homo sapien
gactcaacatactagtcacagccct

SEQ ID NO: 5651067 - DNA, 25 bp, Homo sapien
gcattgttcgttacatggtccatca

SEQ ID NO: 5651068 - DNA, 25 bp, Homo sapien
tgtaaaatccattgtcgcatccacc

SEQ ID NO: 5651069 - DNA, 25 bp, Homo sapien
tattatctcgaactgacactgagcc

SEQ ID NO: 5651070 - DNA, 25 bp, Homo sapien
tcatgtgcctagaccaagaagttat

SEQ ID NO: 5651071 - DNA, 25 bp, Homo sapien
atgatacgcccgagcagatgccaac

SEQ ID NO: 5651072 - DNA, 25 bp, Homo sapien
tattccaactgttcatcggctgaga

SEQ ID NO: 5651073 - DNA, 25 bp, Homo sapien
ctgagagggcgtaggaattatatcc

SEQ ID NO: 5651074 - DNA, 25 bp, Homo sapien
tccttcttgctcatcagttgatgat

SEQ ID NO: 5651075 - DNA, 25 bp, Homo sapien
tatacaaccgtatcggcgatatcgg

SEQ ID NO: 5651076 - DNA, 25 bp, Homo sapien
gatatcggtttcatcctcgccttag

SEQ ID NO: 5651077 - DNA, 25 bp, Homo sapien
ttctaaacgctaatccaagcctcac

SEQ ID NO: 5651078 - DNA, 25 bp, Homo sapien
gatttatcctacactccaactcatg

SEQ ID NO: 5651079 - DNA, 25 bp, Homo sapien
gcaaatcagcccaattaggtctcca

SEQ ID NO: 5651080 - DNA, 25 bp, Homo sapien
aacactatgcttaggcgctatcacc

SEQ ID NO: 5651081 - DNA, 25 bp, Homo sapien
tactatttatgtgctccgggtccat

SEQ ID NO: 5651082 - DNA, 25 bp, Homo sapien
tatcaccactctgttcgcagcagtc

SEQ ID NO: 5651083 - DNA, 25 bp, Homo sapien
gaccacatcatcgaaaccgcaaaca

SEQ ID NO: 5651084 - DNA, 25 bp, Homo sapien
gcattagcaggaatacctttcctca

SEQ ID NO: 5651085 - DNA, 25 bp, Homo sapien
tcgaaaccgcaaacatatcatacac

SEQ ID NO: 5651086 - DNA, 25 bp, Homo sapien
tccaaagaccacatcatcgaaaccg

SEQ ID NO: 5651087 - DNA, 25 bp, Homo sapien
gagccctatctattactctcatcgc

SEQ ID NO: 5651088 - DNA, 25 bp, Homo sapien
taacaggtcaacctcgcttccccac

SEQ ID NO: 5651089 - DNA, 25 bp, Homo sapien
ctgacaagcgcctatagcactcgaa

SEQ ID NO: 5651090 - DNA, 25 bp, Homo sapien
gcactcgaataattcttctcaccct

SEQ ID NO: 5651091 - DNA, 25 bp, Homo sapien
gacctaacctgactagaaaagctat

SEQ ID NO: 5651092 - DNA, 25 bp, Homo sapien
gaagcctattcgcaggatttctcat

SEQ ID NO: 5651093 - DNA, 25 bp, Homo sapien
ggccttcttacgagccaaaacctgc

SEQ ID NO: 5651094 - DNA, 25 bp, Homo sapien
caacatactcggattctaccctagc

SEQ ID NO: 5651095 - DNA, 25 bp, Homo sapien
gcataattaaactttacttcctctc

SEQ ID NO: 5651096 - DNA, 25 bp, Homo sapien
cataattaaactttacttcctctct

SEQ ID NO: 5651097 - DNA, 25 bp, Homo sapien
tcaacgcccataatcatacaaagcc

SEQ ID NO: 5651098 - DNA, 25 bp, Homo sapien
ccccgagcaatctcaattacaatat

SEQ ID NO: 5651099 - DNA, 25 bp, Homo sapien
taggatcctcccgaatcaaccctga

SEQ ID NO: 5651100 - DNA, 25 bp, Homo sapien
aaccactactaatcaacgcccataa

SEQ ID NO: 5651101 - DNA, 25 bp, Homo sapien
ttcataaattattcagcttcctaca

SEQ ID NO: 5651102 - DNA, 25 bp, Homo sapien
tcctacactattaaagtttaccaca

SEQ ID NO: 5651103 - DNA, 25 bp, Homo sapien
ttcagcttcctacactattaaagtt

SEQ ID NO: 5651104 - DNA, 25 bp, Homo sapien
tctccttcataaattattcagcttc

SEQ ID NO: 5651105 - DNA, 25 bp, Homo sapien
tcacccacagcaccaatcctacctc

SEQ ID NO: 5651106 - DNA, 25 bp, Homo sapien
ccatcatactctttcacccacagca

SEQ ID NO: 5651107 - DNA, 25 bp, Homo sapien
aatcctacctccatcgctaacccca

SEQ ID NO: 5651108 - DNA, 25 bp, Homo sapien
tcgctaaccccactaaaacactcac

SEQ ID NO: 5651109 - DNA, 25 bp, Homo sapien
catgcctcaggatactcctcaatag

SEQ ID NO: 5651110 - DNA, 25 bp, Homo sapien
tgacccccatgcctcaggatactcc

SEQ ID NO: 5651111 - DNA, 25 bp, Homo sapien
gctgtagtatatccaaagacaacca

SEQ ID NO: 5651112 - DNA, 25 bp, Homo sapien
ctcaatagccatcgctgtagtatat

SEQ ID NO: 5651113 - DNA, 25 bp, Homo sapien
gaccacaccgctaacaatcagtact

SEQ ID NO: 5651114 - DNA, 25 bp, Homo sapien
cattactaaacccacactcaacaga

SEQ ID NO: 5651115 - DNA, 25 bp, Homo sapien
cagaataataacacacccgaccaca

SEQ ID NO: 5651116 - DNA, 25 bp, Homo sapien
caccgctaacaatcagtactaaacc

SEQ ID NO: 5651117 - DNA, 25 bp, Homo sapien
ccatcgttgtatttcaactacaaga

SEQ ID NO: 5651118 - DNA, 25 bp, Homo sapien
cacggactacaaccacgaccaatga

SEQ ID NO: 5651119 - DNA, 25 bp, Homo sapien
cggactacaaccacgaccaatgata

SEQ ID NO: 5651120 - DNA, 25 bp, Homo sapien
tattctcgcacggactacaaccacg

SEQ ID NO: 5651121 - DNA, 25 bp, Homo sapien
attaattaaccactcattcatcgac

SEQ ID NO: 5651122 - DNA, 25 bp, Homo sapien
aaattaattaaccactcattcatcg

SEQ ID NO: 5651123 - DNA, 25 bp, Homo sapien
aaaattaattaaccactcattcatc

SEQ ID NO: 5651124 - DNA, 25 bp, Homo sapien
aattaattaaccactcattcatcga

SEQ ID NO: 5651125 - DNA, 25 bp, Homo sapien
cataggctatgtcctcccgtgaggc

SEQ ID NO: 5651126 - DNA, 25 bp, Homo sapien
tcgggcgaggcctatattacggatc

SEQ ID NO: 5651127 - DNA, 25 bp, Homo sapien
cactttattgactcctagccgcaga

SEQ ID NO: 5651128 - DNA, 25 bp, Homo sapien
tgaaacttcggctcactccttggcg

SEQ ID NO: 5651129 - DNA, 25 bp, Homo sapien
gtagcatccgtactatacttcacaa

SEQ ID NO: 5651130 - DNA, 25 bp, Homo sapien
tcggaggacaaccagtaagctaccc

SEQ ID NO: 5651131 - DNA, 25 bp, Homo sapien
taatcctaataccaactatctccct

SEQ ID NO: 5651132 - DNA, 25 bp, Homo sapien
taccatcattggacaagtagcatcc

SEQ ID NO: 5651133 - DNA, 25 bp, Homo sapien
tttaactccaccattagcacccaaa

SEQ ID NO: 5651134 - DNA, 25 bp, Homo sapien
tctttaactccaccattagcaccca

SEQ ID NO: 5651135 - DNA, 25 bp, Homo sapien
agtctttaactccaccattagcacc

SEQ ID NO: 5651136 - DNA, 25 bp, Homo sapien
aagtctttaactccaccattagcac

SEQ ID NO: 5651137 - DNA, 25 bp, Homo sapien
taaagtgaactgtatccgacatctg

SEQ ID NO: 5651138 - DNA, 25 bp, Homo sapien
tgtatttcgtacattactgccagcc

SEQ ID NO: 5651139 - DNA, 25 bp, Homo sapien
tcaatatcccgcacaagagtgctac

SEQ ID NO: 5651140 - DNA, 25 bp, Homo sapien
taaagcctaaatagcccacacgttc

SEQ ID NO: 5651141 - DNA, 25 bp, Homo sapien
gggtcgtccttgagtcgtcaggacc

SEQ ID NO: 5651142 - DNA, 25 bp, Homo sapien
ggtcctgacgactcaaggacgaccc

SEQ ID NO: 5651143 - DNA, 25 bp, Homo sapien
aaagtagagattcttcgagcttaaa

SEQ ID NO: 5651144 - DNA, 25 bp, Homo sapien
tttaagctcgaagaatctctacttt

SEQ ID NO: 5651145 - DNA, 25 bp, Homo sapien
agggcgacggagatctcgctcgcat

SEQ ID NO: 5651146 - DNA, 25 bp, Homo sapien
atgcgagcgagatctccgtcgccct

SEQ ID NO: 5651147 - DNA, 25 bp, Homo sapien
gtccggggctgcttggccggcatgt

SEQ ID NO: 5651148 - DNA, 25 bp, Homo sapien
acatgccggccaagcagccccggac

SEQ ID NO: 5651149 - DNA, 25 bp, Homo sapien
aagatcgacgactatattcttaaag

SEQ ID NO: 5651150 - DNA, 25 bp, Homo sapien
ctttaagaatatagtcgtcgatctt

SEQ ID NO: 5651151 - DNA, 25 bp, Homo sapien
agtaagacatgaataacacgtttgt

SEQ ID NO: 5651152 - DNA, 25 bp, Homo sapien
acaaacgtgttattcatgtcttact

SEQ ID NO: 5651153 - DNA, 25 bp, Homo sapien
agatgtcttacgactacgaaagcaa

SEQ ID NO: 5651154 - DNA, 25 bp, Homo sapien
ttgctttcgtagtcgtaagacatct

SEQ ID NO: 5651155 - DNA, 25 bp, Homo sapien
ttggaggggggtgcagtttcactct

SEQ ID NO: 5651156 - DNA, 25 bp, Homo sapien
agagtgaaactgcacccccctccaa

SEQ ID NO: 5651157 - DNA, 25 bp, Homo sapien
tggaggggggtgcagtttcactctt

SEQ ID NO: 5651158 - DNA, 25 bp, Homo sapien
ttggaggggggtgcagtttcactct

SEQ ID NO: 5651159 - DNA, 25 bp, Homo sapien
tggagtataactggtacaatcttgg

SEQ ID NO: 5651160 - DNA, 25 bp, Homo sapien
ggctggagtataactggtacaatct

SEQ ID NO: 5651161 - DNA, 25 bp, Homo sapien
ctggagtataactggtacaatcttg

SEQ ID NO: 5651162 - DNA, 25 bp, Homo sapien
ggagtataactggtacaatcttggc

SEQ ID NO: 5651163 - DNA, 25 bp, Homo sapien
caagattgtaccagttatactccag

SEQ ID NO: 5651164 - DNA, 25 bp, Homo sapien
gccaagattgtaccagttatactcc

SEQ ID NO: 5651165 - DNA, 25 bp, Homo sapien
gattgtaccagttatactccagcct

SEQ ID NO: 5651166 - DNA, 25 bp, Homo sapien
ccaagattgtaccagttatactcca

SEQ ID NO: 5651167 - DNA, 25 bp, Homo sapien
agagtgaaactgcacccccctccaa

SEQ ID NO: 5651168 - DNA, 25 bp, Homo sapien
agattgtaccagttatactccagcc

SEQ ID NO: 5651169 - DNA, 25 bp, Homo sapien
ctgacttaaggtgatccactccccg

SEQ ID NO: 5651170 - DNA, 25 bp, Homo sapien
aaatcctgacttaaggtgatccact

SEQ ID NO: 5651171 - DNA, 25 bp, Homo sapien
taaggtgatccactccccgcggcct

SEQ ID NO: 5651172 - DNA, 25 bp, Homo sapien
tcctgacttaaggtgatccactccc

SEQ ID NO: 5651173 - DNA, 25 bp, Homo sapien
acttaaggtgatccactccccgcgg

SEQ ID NO: 5651174 - DNA, 25 bp, Homo sapien
tgacttaaggtgatccactccccgc

SEQ ID NO: 5651175 - DNA, 25 bp, Homo sapien
gaggccgcggggagtggatcacctt

SEQ ID NO: 5651176 - DNA, 25 bp, Homo sapien
ggagtggatcaccttaagtcaggat

SEQ ID NO: 5651177 - DNA, 25 bp, Homo sapien
ccgcggggagtggatcaccttaagt

SEQ ID NO: 5651178 - DNA, 25 bp, Homo sapien
gggagtggatcaccttaagtcagga

SEQ ID NO: 5651179 - DNA, 25 bp, Homo sapien
gagtggatcaccttaagtcaggatt

SEQ ID NO: 5651180 - DNA, 25 bp, Homo sapien
cggggagtggatcaccttaagtcag

SEQ ID NO: 5651181 - DNA, 25 bp, Homo sapien
gaggtggtaagtaactcttagtgat

SEQ ID NO: 5651182 - DNA, 25 bp, Homo sapien
cactccgcagaggtggtaagtaact

SEQ ID NO: 5651183 - DNA, 25 bp, Homo sapien
ccgcagaggtggtaagtaactctta

SEQ ID NO: 5651184 - DNA, 25 bp, Homo sapien
ctccgcagaggtggtaagtaactct

SEQ ID NO: 5651185 - DNA, 25 bp, Homo sapien
tcccactccgcagaggtggtaagta

SEQ ID NO: 5651186 - DNA, 25 bp, Homo sapien
agtcccactccgcagaggtggtaag

SEQ ID NO: 5651187 - DNA, 25 bp, Homo sapien
cactaagagttacttaccacctctg

SEQ ID NO: 5651188 - DNA, 25 bp, Homo sapien
gagttacttaccacctctgcggagt

SEQ ID NO: 5651189 - DNA, 25 bp, Homo sapien
aatcactaagagttacttaccacct

SEQ ID NO: 5651190 - DNA, 25 bp, Homo sapien
cttaccacctctgcggagtgggact

SEQ ID NO: 5651191 - DNA, 25 bp, Homo sapien
taagagttacttaccacctctgcgg

SEQ ID NO: 5651192 - DNA, 25 bp, Homo sapien
tacttaccacctctgcggagtggga

SEQ ID NO: 5651193 - DNA, 25 bp, Homo sapien
tccagggttcaatcgattttcctgc

SEQ ID NO: 5651194 - DNA, 25 bp, Homo sapien
ccagggttcaatcgattttcctgcc

SEQ ID NO: 5651195 - DNA, 25 bp, Homo sapien
tgcctccagggttcaatcgattttc

SEQ ID NO: 5651196 - DNA, 25 bp, Homo sapien
cctccagggttcaatcgattttcct

SEQ ID NO: 5651197 - DNA, 25 bp, Homo sapien
agggttcaatcgattttcctgcctc

SEQ ID NO: 5651198 - DNA, 25 bp, Homo sapien
gcctccagggttcaatcgattttcc

SEQ ID NO: 5651199 - DNA, 25 bp, Homo sapien
ggcaggaaaatcgattgaaccctgg

SEQ ID NO: 5651200 - DNA, 25 bp, Homo sapien
gaggcaggaaaatcgattgaaccct

SEQ ID NO: 5651201 - DNA, 25 bp, Homo sapien
ggaaaatcgattgaaccctggaggc

SEQ ID NO: 5651202 - DNA, 25 bp, Homo sapien
gaaaatcgattgaaccctggaggca

SEQ ID NO: 5651203 - DNA, 25 bp, Homo sapien
caggaaaatcgattgaaccctggag

SEQ ID NO: 5651204 - DNA, 25 bp, Homo sapien
aggaaaatcgattgaaccctggagg

SEQ ID NO: 5651205 - DNA, 25 bp, Homo sapien
catttaaaacattattccttctgtg

SEQ ID NO: 5651206 - DNA, 25 bp, Homo sapien
tgaaccaccgtgcctggcttatttt

SEQ ID NO: 5651207 - DNA, 25 bp, Homo sapien
gtgaaccaccgtgcctggcttattt

SEQ ID NO: 5651208 - DNA, 25 bp, Homo sapien
ccgtgcctggcttatttttttcatt

SEQ ID NO: 5651209 - DNA, 25 bp, Homo sapien
ttcatttaaaacattattccttctg

SEQ ID NO: 5651210 - DNA, 25 bp, Homo sapien
tcatttaaaacattattccttctgt

SEQ ID NO: 5651211 - DNA, 25 bp, Homo sapien
aaaataagccaggcacggtggttca

SEQ ID NO: 5651212 - DNA, 25 bp, Homo sapien
cacagaaggaataatgttttaaatg

SEQ ID NO: 5651213 - DNA, 25 bp, Homo sapien
aatgaaaaaaataagccaggcacgg

SEQ ID NO: 5651214 - DNA, 25 bp, Homo sapien
aaataagccaggcacggtggttcac

SEQ ID NO: 5651215 - DNA, 25 bp, Homo sapien
acagaaggaataatgttttaaatga

SEQ ID NO: 5651216 - DNA, 25 bp, Homo sapien
cagaaggaataatgttttaaatgaa

SEQ ID NO: 5651217 - DNA, 25 bp, Homo sapien
gcagtggtgcaatcttggcttactg

SEQ ID NO: 5651218 - DNA, 25 bp, Homo sapien
gcctctgcctaccagattcaagtga

SEQ ID NO: 5651219 - DNA, 25 bp, Homo sapien
cagcctctgcctaccagattcaagt

SEQ ID NO: 5651220 - DNA, 25 bp, Homo sapien
agcctctgcctaccagattcaagtg

SEQ ID NO: 5651221 - DNA, 25 bp, Homo sapien
tcgctcttgttgcccaggttggagt

SEQ ID NO: 5651222 - DNA, 25 bp, Homo sapien
ttgttttgagatggagtttcgctct

SEQ ID NO: 5651223 - DNA, 25 bp, Homo sapien
aagagcgaaactccatctcaaaaca

SEQ ID NO: 5651224 - DNA, 25 bp, Homo sapien
cactccaacctgggcaacaagagcg

SEQ ID NO: 5651225 - DNA, 25 bp, Homo sapien
gcagtaagccaagattgcaccactg

SEQ ID NO: 5651226 - DNA, 25 bp, Homo sapien
tcacttgaatctggtaggcagaggc

SEQ ID NO: 5651227 - DNA, 25 bp, Homo sapien
agagcgaaactccatctcaaaacaa

SEQ ID NO: 5651228 - DNA, 25 bp, Homo sapien
cacttgaatctggtaggcagaggct

SEQ ID NO: 5651229 - DNA, 25 bp, Homo sapien
tgtagattggaaattattttccctc

SEQ ID NO: 5651230 - DNA, 25 bp, Homo sapien
ctcttagcttcttttcaggttgaga

SEQ ID NO: 5651231 - DNA, 25 bp, Homo sapien
caggttgagaagatttccattcctt

SEQ ID NO: 5651232 - DNA, 25 bp, Homo sapien
aactctttttctgtttctcttagct

SEQ ID NO: 5651233 - DNA, 25 bp, Homo sapien
gttgagaagatttccattcctttgt

SEQ ID NO: 5651234 - DNA, 25 bp, Homo sapien
gattggaaattattttccctcagaa

SEQ ID NO: 5651235 - DNA, 25 bp, Homo sapien
gaatggaaatcttctcaacctgaaa

SEQ ID NO: 5651236 - DNA, 25 bp, Homo sapien
agctaagagaaacagaaaaagagtt

SEQ ID NO: 5651237 - DNA, 25 bp, Homo sapien
tctcaacctgaaaagaagctaagag

SEQ ID NO: 5651238 - DNA, 25 bp, Homo sapien
caaaggaatggaaatcttctcaacc

SEQ ID NO: 5651239 - DNA, 25 bp, Homo sapien
ttctgagggaaaataatttccaatc

SEQ ID NO: 5651240 - DNA, 25 bp, Homo sapien
gagggaaaataatttccaatctaca

SEQ ID NO: 5651241 - DNA, 25 bp, Homo sapien
ggctgtgttgtagtgaaatctcact

SEQ ID NO: 5651242 - DNA, 25 bp, Homo sapien
gaagggcttcgctgtgaagttactg

SEQ ID NO: 5651243 - DNA, 25 bp, Homo sapien
tgtggctgtgttgtagtgaaatctc

SEQ ID NO: 5651244 - DNA, 25 bp, Homo sapien
gaaatctcactagtcagtatttaag

SEQ ID NO: 5651245 - DNA, 25 bp, Homo sapien
ctcactagtcagtatttaagtcttt

SEQ ID NO: 5651246 - DNA, 25 bp, Homo sapien
gttgtagtgaaatctcactagtcag

SEQ ID NO: 5651247 - DNA, 25 bp, Homo sapien
aaagacttaaatactgactagtgag

SEQ ID NO: 5651248 - DNA, 25 bp, Homo sapien
gagatttcactacaacacagccaca

SEQ ID NO: 5651249 - DNA, 25 bp, Homo sapien
cagtaacttcacagcgaagcccttc

SEQ ID NO: 5651250 - DNA, 25 bp, Homo sapien
taaatactgactagtgagatttcac

SEQ ID NO: 5651251 - DNA, 25 bp, Homo sapien
gccacatccccactcagtaacttca

SEQ ID NO: 5651252 - DNA, 25 bp, Homo sapien
tagtgagatttcactacaacacagc

SEQ ID NO: 5651253 - DNA, 25 bp, Homo sapien
aatacgtcatacctctgatttctgg

SEQ ID NO: 5651254 - DNA, 25 bp, Homo sapien
gttttggaaatacgtcatacctctg

SEQ ID NO: 5651255 - DNA, 25 bp, Homo sapien
tggaaatacgtcatacctctgattt

SEQ ID NO: 5651256 - DNA, 25 bp, Homo sapien
cagttttggaaatacgtcatacctc

SEQ ID NO: 5651257 - DNA, 25 bp, Homo sapien
tttggaaatacgtcatacctctgat

SEQ ID NO: 5651258 - DNA, 25 bp, Homo sapien
tacgtcatacctctgatttctggaa

SEQ ID NO: 5651259 - DNA, 25 bp, Homo sapien
cagaggtatgacgtatttccaaaac

SEQ ID NO: 5651260 - DNA, 25 bp, Homo sapien
gaggtatgacgtatttccaaaactg

SEQ ID NO: 5651261 - DNA, 25 bp, Homo sapien
ccagaaatcagaggtatgacgtatt

SEQ ID NO: 5651262 - DNA, 25 bp, Homo sapien
tcagaggtatgacgtatttccaaaa

SEQ ID NO: 5651263 - DNA, 25 bp, Homo sapien
ttccagaaatcagaggtatgacgta

SEQ ID NO: 5651264 - DNA, 25 bp, Homo sapien
aaatcagaggtatgacgtatttcca

SEQ ID NO: 5651265 - DNA, 25 bp, Homo sapien
ttattaatttttttgagatggagtc

SEQ ID NO: 5651266 - DNA, 25 bp, Homo sapien
gagtctcacgctgttgcccaggctg

SEQ ID NO: 5651267 - DNA, 25 bp, Homo sapien
gagtacggtgacgtgatcttggctc

SEQ ID NO: 5651268 - DNA, 25 bp, Homo sapien
agtacggtgacgtgatcttggctca

SEQ ID NO: 5651269 - DNA, 25 bp, Homo sapien
gactccatctcaaaaaaattaataa

SEQ ID NO: 5651270 - DNA, 25 bp, Homo sapien
gagccaagatcacgtcaccgtactc

SEQ ID NO: 5651271 - DNA, 25 bp, Homo sapien
tgagccaagatcacgtcaccgtact

SEQ ID NO: 5651272 - DNA, 25 bp, Homo sapien
cagcctgggcaacagcgtgagactc

SEQ ID NO: 5651273 - DNA, 25 bp, Homo sapien
ctgggattacaggctaatttttgta

SEQ ID NO: 5651274 - DNA, 25 bp, Homo sapien
tgggattacaggctaatttttgtat

SEQ ID NO: 5651275 - DNA, 25 bp, Homo sapien
atacaaaaattagcctgtaatccca

SEQ ID NO: 5651276 - DNA, 25 bp, Homo sapien
tacaaaaattagcctgtaatcccag

SEQ ID NO: 5651277 - DNA, 25 bp, Homo sapien
ttggttggctgtcattacttaagaa

SEQ ID NO: 5651278 - DNA, 25 bp, Homo sapien
tatctcatacttgttacctttcact

SEQ ID NO: 5651279 - DNA, 25 bp, Homo sapien
ctcatacttgttacctttcactatt

SEQ ID NO: 5651280 - DNA, 25 bp, Homo sapien
tagttggttggctgtcattacttaa

SEQ ID NO: 5651281 - DNA, 25 bp, Homo sapien
gttggttggctgtcattacttaaga

SEQ ID NO: 5651282 - DNA, 25 bp, Homo sapien
tctatctcatacttgttacctttca

SEQ ID NO: 5651283 - DNA, 25 bp, Homo sapien
tcttaagtaatgacagccaaccaac

SEQ ID NO: 5651284 - DNA, 25 bp, Homo sapien
aatagtgaaaggtaacaagtatgag

SEQ ID NO: 5651285 - DNA, 25 bp, Homo sapien
taagtaatgacagccaaccaactaa

SEQ ID NO: 5651286 - DNA, 25 bp, Homo sapien
ttcttaagtaatgacagccaaccaa

SEQ ID NO: 5651287 - DNA, 25 bp, Homo sapien
tgaaaggtaacaagtatgagataga

SEQ ID NO: 5651288 - DNA, 25 bp, Homo sapien
tagtgaaaggtaacaagtatgagat

SEQ ID NO: 5651289 - DNA, 25 bp, Homo sapien
attatacagagtacctatgtataat

SEQ ID NO: 5651290 - DNA, 25 bp, Homo sapien
tatacagagtacctatgtataattt

SEQ ID NO: 5651291 - DNA, 25 bp, Homo sapien
tacagagtacctatgtataattttt

SEQ ID NO: 5651292 - DNA, 25 bp, Homo sapien
ttatacagagtacctatgtataatt

SEQ ID NO: 5651293 - DNA, 25 bp, Homo sapien
atacagagtacctatgtataatttt

SEQ ID NO: 5651294 - DNA, 25 bp, Homo sapien
aaaaattatacataggtactctgta

SEQ ID NO: 5651295 - DNA, 25 bp, Homo sapien
aaattatacataggtactctgtata

SEQ ID NO: 5651296 - DNA, 25 bp, Homo sapien
aattatacataggtactctgtataa

SEQ ID NO: 5651297 - DNA, 25 bp, Homo sapien
aaaattatacataggtactctgtat

SEQ ID NO: 5651298 - DNA, 25 bp, Homo sapien
attatacataggtactctgtataat

SEQ ID NO: 5651299 - DNA, 25 bp, Homo sapien
tatacagagtacctatgtataattt

SEQ ID NO: 5651300 - DNA, 25 bp, Homo sapien
tacagagtacctatgtataattttt

SEQ ID NO: 5651301 - DNA, 25 bp, Homo sapien
ttaaattatacagagtacctatgta

SEQ ID NO: 5651302 - DNA, 25 bp, Homo sapien
acagagtacctatgtataatttttt

SEQ ID NO: 5651303 - DNA, 25 bp, Homo sapien
tgggtgggggtggatggagtctccc

SEQ ID NO: 5651304 - DNA, 25 bp, Homo sapien
taaattatacagagtacctatgtat

SEQ ID NO: 5651305 - DNA, 25 bp, Homo sapien
aaattatacataggtactctgtata

SEQ ID NO: 5651306 - DNA, 25 bp, Homo sapien
aaaaattatacataggtactctgta

SEQ ID NO: 5651307 - DNA, 25 bp, Homo sapien
tacataggtactctgtataatttaa

SEQ ID NO: 5651308 - DNA, 25 bp, Homo sapien
aaaaaattatacataggtactctgt

SEQ ID NO: 5651309 - DNA, 25 bp, Homo sapien
gggagactccatccacccccaccca

SEQ ID NO: 5651310 - DNA, 25 bp, Homo sapien
aaaattatacataggtactctgtat

SEQ ID NO: 5651311 - DNA, 25 bp, Homo sapien
gagccattgcgcctggcctagaatt

SEQ ID NO: 5651312 - DNA, 25 bp, Homo sapien
gcgcctggcctagaattttatttaa

SEQ ID NO: 5651313 - DNA, 25 bp, Homo sapien
attgcgcctggcctagaattttatt

SEQ ID NO: 5651314 - DNA, 25 bp, Homo sapien
tgcgcctggcctagaattttattta

SEQ ID NO: 5651315 - DNA, 25 bp, Homo sapien
ggtatgagccattgcgcctggccta

SEQ ID NO: 5651316 - DNA, 25 bp, Homo sapien
gccattgcgcctggcctagaatttt

SEQ ID NO: 5651317 - DNA, 25 bp, Homo sapien
ttaaataaaattctaggccaggcgc

SEQ ID NO: 5651318 - DNA, 25 bp, Homo sapien
aaataaaattctaggccaggcgcaa

SEQ ID NO: 5651319 - DNA, 25 bp, Homo sapien
taaataaaattctaggccaggcgca

SEQ ID NO: 5651320 - DNA, 25 bp, Homo sapien
aataaaattctaggccaggcgcaat

SEQ ID NO: 5651321 - DNA, 25 bp, Homo sapien
aaaattctaggccaggcgcaatggc

SEQ ID NO: 5651322 - DNA, 25 bp, Homo sapien
aattctaggccaggcgcaatggctc

SEQ ID NO: 5651323 - DNA, 25 bp, Homo sapien
aggtgcagtggcttctgcttgtaat

SEQ ID NO: 5651324 - DNA, 25 bp, Homo sapien
caggtgcagtggcttctgcttgtaa

SEQ ID NO: 5651325 - DNA, 25 bp, Homo sapien
ctaccactgtagccaggtgcagtgg

SEQ ID NO: 5651326 - DNA, 25 bp, Homo sapien
ggtgcagtggcttctgcttgtaatc

SEQ ID NO: 5651327 - DNA, 25 bp, Homo sapien
aactaccactgtagccaggtgcagt

SEQ ID NO: 5651328 - DNA, 25 bp, Homo sapien
actaccactgtagccaggtgcagtg

SEQ ID NO: 5651329 - DNA, 25 bp, Homo sapien
ccactgcacctggctacagtggtag

SEQ ID NO: 5651330 - DNA, 25 bp, Homo sapien
cactgcacctggctacagtggtagt

SEQ ID NO: 5651331 - DNA, 25 bp, Homo sapien
gattacaagcagaagccactgcacc

SEQ ID NO: 5651332 - DNA, 25 bp, Homo sapien
actgcacctggctacagtggtagtt

SEQ ID NO: 5651333 - DNA, 25 bp, Homo sapien
ttacaagcagaagccactgcacctg

SEQ ID NO: 5651334 - DNA, 25 bp, Homo sapien
attacaagcagaagccactgcacct

SEQ ID NO: 5651335 - DNA, 25 bp, Homo sapien
ccgggtgtggtggcgtgcctgtaat

SEQ ID NO: 5651336 - DNA, 25 bp, Homo sapien
cccagctactcaaggagcgtgcctg

SEQ ID NO: 5651337 - DNA, 25 bp, Homo sapien
ccagctactcaaggagcgtgcctgt

SEQ ID NO: 5651338 - DNA, 25 bp, Homo sapien
attacaggcacgccaccacacccgg

SEQ ID NO: 5651339 - DNA, 25 bp, Homo sapien
acaggcacgctccttgagtagctgg

SEQ ID NO: 5651340 - DNA, 25 bp, Homo sapien
caggcacgctccttgagtagctggg

SEQ ID NO: 5651341 - DNA, 25 bp, Homo sapien
cagctactcaaggagcgtgcctgta

SEQ ID NO: 5651342 - DNA, 25 bp, Homo sapien
agctactcaaggagcgtgcctgtaa

SEQ ID NO: 5651343 - DNA, 25 bp, Homo sapien
cccagctactcaaggagcgtgcctg

SEQ ID NO: 5651344 - DNA, 25 bp, Homo sapien
ccagctactcaaggagcgtgcctgt

SEQ ID NO: 5651345 - DNA, 25 bp, Homo sapien
tactcaaggagcgtgcctgtaatcc

SEQ ID NO: 5651346 - DNA, 25 bp, Homo sapien
gctactcaaggagcgtgcctgtaat

SEQ ID NO: 5651347 - DNA, 25 bp, Homo sapien
tacaggcacgctccttgagtagctg

SEQ ID NO: 5651348 - DNA, 25 bp, Homo sapien
acaggcacgctccttgagtagctgg

SEQ ID NO: 5651349 - DNA, 25 bp, Homo sapien
attacaggcacgctccttgagtagc

SEQ ID NO: 5651350 - DNA, 25 bp, Homo sapien
ttacaggcacgctccttgagtagct

SEQ ID NO: 5651351 - DNA, 25 bp, Homo sapien
ggattacaggcacgctccttgagta

SEQ ID NO: 5651352 - DNA, 25 bp, Homo sapien
caggcacgctccttgagtagctggg

SEQ ID NO: 5651353 - DNA, 25 bp, Homo sapien
tgtagctataaaattctgacatcac

SEQ ID NO: 5651354 - DNA, 25 bp, Homo sapien
ttacatcgagtttttgctaaagaga

SEQ ID NO: 5651355 - DNA, 25 bp, Homo sapien
gacatcacaggcattagtgtttgat

SEQ ID NO: 5651356 - DNA, 25 bp, Homo sapien
tagctataaaattctgacatcacag

SEQ ID NO: 5651357 - DNA, 25 bp, Homo sapien
gtgtttgattacatcgagtttttgc

SEQ ID NO: 5651358 - DNA, 25 bp, Homo sapien
gattacatcgagtttttgctaaaga

SEQ ID NO: 5651359 - DNA, 25 bp, Homo sapien
tagcaaaaactcgatgtaatcaaac

SEQ ID NO: 5651360 - DNA, 25 bp, Homo sapien
tctctttagcaaaaactcgatgtaa

SEQ ID NO: 5651361 - DNA, 25 bp, Homo sapien
tctttagcaaaaactcgatgtaatc

SEQ ID NO: 5651362 - DNA, 25 bp, Homo sapien
gcaaaaactcgatgtaatcaaacac

SEQ ID NO: 5651363 - DNA, 25 bp, Homo sapien
tgtgatgtcagaattttatagctac

SEQ ID NO: 5651364 - DNA, 25 bp, Homo sapien
atcaaacactaatgcctgtgatgtc

SEQ ID NO: 5651365 - DNA, 25 bp, Homo sapien
tatgctataacataaagccgtgtaa

SEQ ID NO: 5651366 - DNA, 25 bp, Homo sapien
gccgtgtaactccttaaatccgaga

SEQ ID NO: 5651367 - DNA, 25 bp, Homo sapien
ctaactgaaaacttatgctataaca

SEQ ID NO: 5651368 - DNA, 25 bp, Homo sapien
gtgtaactccttaaatccgagaaca

SEQ ID NO: 5651369 - DNA, 25 bp, Homo sapien
taacataaagccgtgtaactcctta

SEQ ID NO: 5651370 - DNA, 25 bp, Homo sapien
gagaacatcagcatgaactttttct

SEQ ID NO: 5651371 - DNA, 25 bp, Homo sapien
tctcggatttaaggagttacacggc

SEQ ID NO: 5651372 - DNA, 25 bp, Homo sapien
tgttatagcataagttttcagttag

SEQ ID NO: 5651373 - DNA, 25 bp, Homo sapien
taaggagttacacggctttatgtta

SEQ ID NO: 5651374 - DNA, 25 bp, Homo sapien
tgttctcggatttaaggagttacac

SEQ ID NO: 5651375 - DNA, 25 bp, Homo sapien
gagttacacggctttatgttatagc

SEQ ID NO: 5651376 - DNA, 25 bp, Homo sapien
agaaaaagttcatgctgatgttctc

SEQ ID NO: 5651377 - DNA, 25 bp, Homo sapien
acttttagttgaatgttatactcta

SEQ ID NO: 5651378 - DNA, 25 bp, Homo sapien
tttcctattgttctgctcactttta

SEQ ID NO: 5651379 - DNA, 25 bp, Homo sapien
ttccaggcatgtagaataggtcatt

SEQ ID NO: 5651380 - DNA, 25 bp, Homo sapien
tttccaggcatgtagaataggtcat

SEQ ID NO: 5651381 - DNA, 25 bp, Homo sapien
aatgacctattctacatgcctggaa

SEQ ID NO: 5651382 - DNA, 25 bp, Homo sapien
tagagtataacattcaactaaaagt

SEQ ID NO: 5651383 - DNA, 25 bp, Homo sapien
taaaagtgagcagaacaataggaaa

SEQ ID NO: 5651384 - DNA, 25 bp, Homo sapien
atgacctattctacatgcctggaaa

SEQ ID NO: 5651385 - DNA, 25 bp, Homo sapien
agtattttcctagcgcagaaactcc

SEQ ID NO: 5651386 - DNA, 25 bp, Homo sapien
taagtattttcctagcgcagaaact

SEQ ID NO: 5651387 - DNA, 25 bp, Homo sapien
cttaagtattttcctagcgcagaaa

SEQ ID NO: 5651388 - DNA, 25 bp, Homo sapien
tattttcctagcgcagaaactcctg

SEQ ID NO: 5651389 - DNA, 25 bp, Homo sapien
tccttaagtattttcctagcgcaga

SEQ ID NO: 5651390 - DNA, 25 bp, Homo sapien
ccttaagtattttcctagcgcagaa

SEQ ID NO: 5651391 - DNA, 25 bp, Homo sapien
gagtttctgcgctaggaaaatactt

SEQ ID NO: 5651392 - DNA, 25 bp, Homo sapien
tctgcgctaggaaaatacttaagga

SEQ ID NO: 5651393 - DNA, 25 bp, Homo sapien
ggagtttctgcgctaggaaaatact

SEQ ID NO: 5651394 - DNA, 25 bp, Homo sapien
gtttctgcgctaggaaaatacttaa

SEQ ID NO: 5651395 - DNA, 25 bp, Homo sapien
ttctgcgctaggaaaatacttaagg

SEQ ID NO: 5651396 - DNA, 25 bp, Homo sapien
caggagtttctgcgctaggaaaata

SEQ ID NO: 5651397 - DNA, 25 bp, Homo sapien
cagcctgggggacaatgcactccag

SEQ ID NO: 5651398 - DNA, 25 bp, Homo sapien
agcctgggggacaatgcactccagc

SEQ ID NO: 5651399 - DNA, 25 bp, Homo sapien
tgggggacaatgcactccagcctgg

SEQ ID NO: 5651400 - DNA, 25 bp, Homo sapien
ctgggggacaatgcactccagcctg

SEQ ID NO: 5651401 - DNA, 25 bp, Homo sapien
gcctgggggacaatgcactccagcc

SEQ ID NO: 5651402 - DNA, 25 bp, Homo sapien
cctgggggacaatgcactccagcct

SEQ ID NO: 5651403 - DNA, 25 bp, Homo sapien
aggctggagtgcattgtcccccagg

SEQ ID NO: 5651404 - DNA, 25 bp, Homo sapien
ggctggagtgcattgtcccccaggc

SEQ ID NO: 5651405 - DNA, 25 bp, Homo sapien
caggctggagtgcattgtcccccag

SEQ ID NO: 5651406 - DNA, 25 bp, Homo sapien
gctggagtgcattgtcccccaggct

SEQ ID NO: 5651407 - DNA, 25 bp, Homo sapien
ctggagtgcattgtcccccaggctg

SEQ ID NO: 5651408 - DNA, 25 bp, Homo sapien
ccaggctggagtgcattgtccccca

SEQ ID NO: 5651409 - DNA, 25 bp, Homo sapien
tttgacacaatttcatggttgttga

SEQ ID NO: 5651410 - DNA, 25 bp, Homo sapien
gtctctcattatacaatctagtaat

SEQ ID NO: 5651411 - DNA, 25 bp, Homo sapien
ttttgacacaatttcatggttgttg

SEQ ID NO: 5651412 - DNA, 25 bp, Homo sapien
ttttttgacacaatttcatggttgt

SEQ ID NO: 5651413 - DNA, 25 bp, Homo sapien
tgtctctcattatacaatctagtaa

SEQ ID NO: 5651414 - DNA, 25 bp, Homo sapien
tctctcattatacaatctagtaatg

SEQ ID NO: 5651415 - DNA, 25 bp, Homo sapien
actagattgtataatgagagacaag

SEQ ID NO: 5651416 - DNA, 25 bp, Homo sapien
caacaaccatgaaattgtgtcaaaa

SEQ ID NO: 5651417 - DNA, 25 bp, Homo sapien
tcaacaaccatgaaattgtgtcaaa

SEQ ID NO: 5651418 - DNA, 25 bp, Homo sapien
attactagattgtataatgagagac

SEQ ID NO: 5651419 - DNA, 25 bp, Homo sapien
cattactagattgtataatgagaga

SEQ ID NO: 5651420 - DNA, 25 bp, Homo sapien
ttactagattgtataatgagagaca

SEQ ID NO: 5651421 - DNA, 25 bp, Homo sapien
tttgacacaatttcatggttgttga

SEQ ID NO: 5651422 - DNA, 25 bp, Homo sapien
tgttgaaagatactaccagatgtag

SEQ ID NO: 5651423 - DNA, 25 bp, Homo sapien
gatactaccagatgtagtttgagat

SEQ ID NO: 5651424 - DNA, 25 bp, Homo sapien
tgtctctcattatacaatctagtaa

SEQ ID NO: 5651425 - DNA, 25 bp, Homo sapien
cattttgtcttgtctctcattatac

SEQ ID NO: 5651426 - DNA, 25 bp, Homo sapien
tcatggttgttgaaagatactacca

SEQ ID NO: 5651427 - DNA, 25 bp, Homo sapien
catgtgtggtggctcatgtctgtga

SEQ ID NO: 5651428 - DNA, 25 bp, Homo sapien
ggctcatgtctgtgatcccagtact

SEQ ID NO: 5651429 - DNA, 25 bp, Homo sapien
ttggccatgtgtggtggctcatgtc

SEQ ID NO: 5651430 - DNA, 25 bp, Homo sapien
ctcatgtctgtgatcccagtacttt

SEQ ID NO: 5651431 - DNA, 25 bp, Homo sapien
gcaggaggattgagtgaggccagga

SEQ ID NO: 5651432 - DNA, 25 bp, Homo sapien
tggctcatgtctgtgatcccagtac

SEQ ID NO: 5651433 - DNA, 25 bp, Homo sapien
tcctggcctcactcaatcctcctgc

SEQ ID NO: 5651434 - DNA, 25 bp, Homo sapien
gacatgagccaccacacatggccaa

SEQ ID NO: 5651435 - DNA, 25 bp, Homo sapien
aaagtactgggatcacagacatgag

SEQ ID NO: 5651436 - DNA, 25 bp, Homo sapien
tcacagacatgagccaccacacatg

SEQ ID NO: 5651437 - DNA, 25 bp, Homo sapien
agtactgggatcacagacatgagcc

SEQ ID NO: 5651438 - DNA, 25 bp, Homo sapien
gtactgggatcacagacatgagcca

SEQ ID NO: 5651439 - DNA, 25 bp, Homo sapien
aatgggactatgagatctctaaaaa

SEQ ID NO: 5651440 - DNA, 25 bp, Homo sapien
cagttattttcaatgaggatttaat

SEQ ID NO: 5651441 - DNA, 25 bp, Homo sapien
cctaaaatgggactatgagatctct

SEQ ID NO: 5651442 - DNA, 25 bp, Homo sapien
gatgacctaaaatgggactatgaga

SEQ ID NO: 5651443 - DNA, 25 bp, Homo sapien
gaattcagcatactctttgatgacc

SEQ ID NO: 5651444 - DNA, 25 bp, Homo sapien
ttcagcatactctttgatgacctaa

SEQ ID NO: 5651445 - DNA, 25 bp, Homo sapien
tcatagtcccattttaggtcatcaa

SEQ ID NO: 5651446 - DNA, 25 bp, Homo sapien
ggtcatcaaagagtatgctgaattc

SEQ ID NO: 5651447 - DNA, 25 bp, Homo sapien
ttaggtcatcaaagagtatgctgaa

SEQ ID NO: 5651448 - DNA, 25 bp, Homo sapien
attaaatcctcattgaaaataactg

SEQ ID NO: 5651449 - DNA, 25 bp, Homo sapien
agagatctcatagtcccattttagg

SEQ ID NO: 5651450 - DNA, 25 bp, Homo sapien
ttttttagagatctcatagtcccat

SEQ ID NO: 5651451 - DNA, 25 bp, Homo sapien
tggcctgtatgtcattggcattgac

SEQ ID NO: 5651452 - DNA, 25 bp, Homo sapien
ggcattgactgtactagagcttctt

SEQ ID NO: 5651453 - DNA, 25 bp, Homo sapien
cattcatggcctgtatgtcattggc

SEQ ID NO: 5651454 - DNA, 25 bp, Homo sapien
tggcattgactgtactagagcttct

SEQ ID NO: 5651455 - DNA, 25 bp, Homo sapien
tataaacattcatggcctgtatgtc

SEQ ID NO: 5651456 - DNA, 25 bp, Homo sapien
cctgtatgtcattggcattgactgt

SEQ ID NO: 5651457 - DNA, 25 bp, Homo sapien
aagaagctctagtacagtcaatgcc

SEQ ID NO: 5651458 - DNA, 25 bp, Homo sapien
tgccaatgacatacaggccatgaat

SEQ ID NO: 5651459 - DNA, 25 bp, Homo sapien
ccaatgacatacaggccatgaatgt

SEQ ID NO: 5651460 - DNA, 25 bp, Homo sapien
cagtcaatgccaatgacatacaggc

SEQ ID NO: 5651461 - DNA, 25 bp, Homo sapien
gacatacaggccatgaatgtttata

SEQ ID NO: 5651462 - DNA, 25 bp, Homo sapien
tcaatgccaatgacatacaggccat

SEQ ID NO: 5651463 - DNA, 25 bp, Homo sapien
caaccgatcacagattggatgtatt

SEQ ID NO: 5651464 - DNA, 25 bp, Homo sapien
tgtccccaaccgatcacagattgga

SEQ ID NO: 5651465 - DNA, 25 bp, Homo sapien
ctttgtccccaaccgatcacagatt

SEQ ID NO: 5651466 - DNA, 25 bp, Homo sapien
tccccaaccgatcacagattggatg

SEQ ID NO: 5651467 - DNA, 25 bp, Homo sapien
ttctttgtccccaaccgatcacaga

SEQ ID NO: 5651468 - DNA, 25 bp, Homo sapien
cccaaccgatcacagattggatgta

SEQ ID NO: 5651469 - DNA, 25 bp, Homo sapien
aatacatccaatctgtgatcggttg

SEQ ID NO: 5651470 - DNA, 25 bp, Homo sapien
atacatccaatctgtgatcggttgg

SEQ ID NO: 5651471 - DNA, 25 bp, Homo sapien
tacatccaatctgtgatcggttggg

SEQ ID NO: 5651472 - DNA, 25 bp, Homo sapien
atctgtgatcggttggggacaaaga

SEQ ID NO: 5651473 - DNA, 25 bp, Homo sapien
aatctgtgatcggttggggacaaag

SEQ ID NO: 5651474 - DNA, 25 bp, Homo sapien
tctgtgatcggttggggacaaagaa

SEQ ID NO: 5651475 - DNA, 25 bp, Homo sapien
taaatgagatatacatgaaatacag

SEQ ID NO: 5651476 - DNA, 25 bp, Homo sapien
aatacatccaatctgtgatcggttg

SEQ ID NO: 5651477 - DNA, 25 bp, Homo sapien
gaaatacagtaaaatacatccaatc

SEQ ID NO: 5651478 - DNA, 25 bp, Homo sapien
tacatccaatctgtgatcggttggg

SEQ ID NO: 5651479 - DNA, 25 bp, Homo sapien
caaagaagggtcctctactccttca

SEQ ID NO: 5651480 - DNA, 25 bp, Homo sapien
taaaatacatccaatctgtgatcgg

SEQ ID NO: 5651481 - DNA, 25 bp, Homo sapien
ccaggcaagtggatcccgtgaggcc

SEQ ID NO: 5651482 - DNA, 25 bp, Homo sapien
ggcctcacgggatccacttgcctgg

SEQ ID NO: 5651483 - DNA, 25 bp, Homo sapien
ttaaaaatgagtctgggtacagtgg

SEQ ID NO: 5651484 - DNA, 25 bp, Homo sapien
tactttaaaaatgagtctgggtaca

SEQ ID NO: 5651485 - DNA, 25 bp, Homo sapien
aaaaatgagtctgggtacagtggct

SEQ ID NO: 5651486 - DNA, 25 bp, Homo sapien
caggcaagtggatcccgtgaggcca

SEQ ID NO: 5651487 - DNA, 25 bp, Homo sapien
ctttaaaaatgagtctgggtacagt

SEQ ID NO: 5651488 - DNA, 25 bp, Homo sapien
ccaggcaagtggatcccgtgaggcc

SEQ ID NO: 5651489 - DNA, 25 bp, Homo sapien
ggcctcacgggatccacttgcctgg

SEQ ID NO: 5651490 - DNA, 25 bp, Homo sapien
tggcctcacgggatccacttgcctg

SEQ ID NO: 5651491 - DNA, 25 bp, Homo sapien
ccactgtacccagactcatttttaa

SEQ ID NO: 5651492 - DNA, 25 bp, Homo sapien
tgtacccagactcatttttaaagta

SEQ ID NO: 5651493 - DNA, 25 bp, Homo sapien
agccactgtacccagactcattttt

SEQ ID NO: 5651494 - DNA, 25 bp, Homo sapien
actgtacccagactcatttttaaag

SEQ ID NO: 5651495 - DNA, 25 bp, Homo sapien
ggcgcatgcttgtgttcgcagctac

SEQ ID NO: 5651496 - DNA, 25 bp, Homo sapien
tggcgcatgcttgtgttcgcagcta

SEQ ID NO: 5651497 - DNA, 25 bp, Homo sapien
tagctgcgaacacaagcatgcgcca

SEQ ID NO: 5651498 - DNA, 25 bp, Homo sapien
gtagctgcgaacacaagcatgcgcc

SEQ ID NO: 5651499 - DNA, 25 bp, Homo sapien
catgcttgtgttcgcagctactcag

SEQ ID NO: 5651500 - DNA, 25 bp, Homo sapien
aaaatgagacgagcgtagtggcgca

SEQ ID NO: 5651501 - DNA, 25 bp, Homo sapien
cgcatgcttgtgttcgcagctactc

SEQ ID NO: 5651502 - DNA, 25 bp, Homo sapien
tggcgcatgcttgtgttcgcagcta

SEQ ID NO: 5651503 - DNA, 25 bp, Homo sapien
aaaaaatgagacgagcgtagtggcg

SEQ ID NO: 5651504 - DNA, 25 bp, Homo sapien
ggcgcatgcttgtgttcgcagctac

SEQ ID NO: 5651505 - DNA, 25 bp, Homo sapien
tagctgcgaacacaagcatgcgcca

SEQ ID NO: 5651506 - DNA, 25 bp, Homo sapien
gagtagctgcgaacacaagcatgcg

SEQ ID NO: 5651507 - DNA, 25 bp, Homo sapien
gcgccactacgctcgtctcattttt

SEQ ID NO: 5651508 - DNA, 25 bp, Homo sapien
catgcgccactacgctcgtctcatt

SEQ ID NO: 5651509 - DNA, 25 bp, Homo sapien
gtagctgcgaacacaagcatgcgcc

SEQ ID NO: 5651510 - DNA, 25 bp, Homo sapien
ctgagtagctgcgaacacaagcatg

SEQ ID NO: 5651511 - DNA, 25 bp, Homo sapien
gtggtgagctatgctcacgccacca

SEQ ID NO: 5651512 - DNA, 25 bp, Homo sapien
tggtggcgtgagcatagctcaccac

SEQ ID NO: 5651513 - DNA, 25 bp, Homo sapien
ggtgagctatgctcacgccaccaca

SEQ ID NO: 5651514 - DNA, 25 bp, Homo sapien
tatgctcacgccaccacagtccatc

SEQ ID NO: 5651515 - DNA, 25 bp, Homo sapien
gtgagctatgctcacgccaccacag

SEQ ID NO: 5651516 - DNA, 25 bp, Homo sapien
gtggtgagctatgctcacgccacca

SEQ ID NO: 5651517 - DNA, 25 bp, Homo sapien
tgagctatgctcacgccaccacagt

SEQ ID NO: 5651518 - DNA, 25 bp, Homo sapien
acgccaccacagtccatcctgggca

SEQ ID NO: 5651519 - DNA, 25 bp, Homo sapien
tggtggcgtgagcatagctcaccac

SEQ ID NO: 5651520 - DNA, 25 bp, Homo sapien
gatggactgtggtggcgtgagcata

SEQ ID NO: 5651521 - DNA, 25 bp, Homo sapien
actgtggtggcgtgagcatagctca

SEQ ID NO: 5651522 - DNA, 25 bp, Homo sapien
tgtggtggcgtgagcatagctcacc

SEQ ID NO: 5651523 - DNA, 25 bp, Homo sapien
caggatggactgtggtggcgtgagc

SEQ ID NO: 5651524 - DNA, 25 bp, Homo sapien
tgcccaggatggactgtggtggcgt

SEQ ID NO: 5651525 - DNA, 25 bp, Homo sapien
tctcaagggtatgatccttagtgga

SEQ ID NO: 5651526 - DNA, 25 bp, Homo sapien
aagtctcaggtttcatactgtatgg

SEQ ID NO: 5651527 - DNA, 25 bp, Homo sapien
gggaagtctcaggtttcatactgta

SEQ ID NO: 5651528 - DNA, 25 bp, Homo sapien
caagggtatgatccttagtggaagg

SEQ ID NO: 5651529 - DNA, 25 bp, Homo sapien
tctcaggtttcatactgtatggctc

SEQ ID NO: 5651530 - DNA, 25 bp, Homo sapien
tggatctcaagggtatgatccttag

SEQ ID NO: 5651531 - DNA, 25 bp, Homo sapien
gagccatacagtatgaaacctgaga

SEQ ID NO: 5651532 - DNA, 25 bp, Homo sapien
agtatgaaacctgagacttcccctt

SEQ ID NO: 5651533 - DNA, 25 bp, Homo sapien
gacttccccttccactaaggatcat

SEQ ID NO: 5651534 - DNA, 25 bp, Homo sapien
ctaaggatcatacccttgagatcca

SEQ ID NO: 5651535 - DNA, 25 bp, Homo sapien
tacagtatgaaacctgagacttccc

SEQ ID NO: 5651536 - DNA, 25 bp, Homo sapien
ttccactaaggatcatacccttgag

SEQ ID NO: 5651537 - DNA, 25 bp, Homo sapien
tataacttccatgagtctgaaaaca

SEQ ID NO: 5651538 - DNA, 25 bp, Homo sapien
tatgtatagaaaacactactctttg

SEQ ID NO: 5651539 - DNA, 25 bp, Homo sapien
tagaaacatatgtatagaaaacact

SEQ ID NO: 5651540 - DNA, 25 bp, Homo sapien
gaagggtacacagggcactgtgtta

SEQ ID NO: 5651541 - DNA, 25 bp, Homo sapien
ttccatgagtctgaaaacaaataga

SEQ ID NO: 5651542 - DNA, 25 bp, Homo sapien
cagggcactgtgttatttttataac

SEQ ID NO: 5651543 - DNA, 25 bp, Homo sapien
tcagactcatggaagttataaaaat

SEQ ID NO: 5651544 - DNA, 25 bp, Homo sapien
ataatgaaaaacaaagagtagtgtt

SEQ ID NO: 5651545 - DNA, 25 bp, Homo sapien
caaagagtagtgttttctatacata

SEQ ID NO: 5651546 - DNA, 25 bp, Homo sapien
tataaaaataacacagtgccctgtg

SEQ ID NO: 5651547 - DNA, 25 bp, Homo sapien
ctatttgttttcagactcatggaag

SEQ ID NO: 5651548 - DNA, 25 bp, Homo sapien
taacacagtgccctgtgtacccttc

SEQ ID NO: 5651549 - DNA, 25 bp, Homo sapien
tattataaagctctcttaataaaaa

SEQ ID NO: 5651550 - DNA, 25 bp, Homo sapien
aaaaatttatattgcctgggtgtgg

SEQ ID NO: 5651551 - DNA, 25 bp, Homo sapien
aaaaaatttatattgcctgggtgtg

SEQ ID NO: 5651552 - DNA, 25 bp, Homo sapien
ttaagagagctttataatataaaaa

SEQ ID NO: 5651553 - DNA, 25 bp, Homo sapien
ataaaaaatttatattgcctgggtg

SEQ ID NO: 5651554 - DNA, 25 bp, Homo sapien
aaatttatattgcctgggtgtggtg

SEQ ID NO: 5651555 - DNA, 25 bp, Homo sapien
aaaatttatattgcctgggtgtggt

SEQ ID NO: 5651556 - DNA, 25 bp, Homo sapien
tttttatattataaagctctcttaa

SEQ ID NO: 5651557 - DNA, 25 bp, Homo sapien
ccacacccaggcaatataaattttt

SEQ ID NO: 5651558 - DNA, 25 bp, Homo sapien
cacccaggcaatataaattttttat

SEQ ID NO: 5651559 - DNA, 25 bp, Homo sapien
accacacccaggcaatataaatttt

SEQ ID NO: 5651560 - DNA, 25 bp, Homo sapien
cacacccaggcaatataaatttttt

SEQ ID NO: 5651561 - DNA, 25 bp, Homo sapien
tattataaagctctcttaataaaaa

SEQ ID NO: 5651562 - DNA, 25 bp, Homo sapien
cccagagtgcagtggtgcagtcata

SEQ ID NO: 5651563 - DNA, 25 bp, Homo sapien
cagccttaaactccggggctcaagt

SEQ ID NO: 5651564 - DNA, 25 bp, Homo sapien
gcccagagtgcagtggtgcagtcat

SEQ ID NO: 5651565 - DNA, 25 bp, Homo sapien
agccttaaactccggggctcaagtg

SEQ ID NO: 5651566 - DNA, 25 bp, Homo sapien
ccttaaactccggggctcaagtgat

SEQ ID NO: 5651567 - DNA, 25 bp, Homo sapien
gccttaaactccggggctcaagtga

SEQ ID NO: 5651568 - DNA, 25 bp, Homo sapien
atgactgcaccactgcactctgggc

SEQ ID NO: 5651569 - DNA, 25 bp, Homo sapien
acttgagccccggagtttaaggctg

SEQ ID NO: 5651570 - DNA, 25 bp, Homo sapien
tcacttgagccccggagtttaaggc

SEQ ID NO: 5651571 - DNA, 25 bp, Homo sapien
atcacttgagccccggagtttaagg

SEQ ID NO: 5651572 - DNA, 25 bp, Homo sapien
cacttgagccccggagtttaaggct

SEQ ID NO: 5651573 - DNA, 25 bp, Homo sapien
tatgactgcaccactgcactctggg

SEQ ID NO: 5651574 - DNA, 25 bp, Homo sapien
ttttccagacaagatcttgttatgt

SEQ ID NO: 5651575 - DNA, 25 bp, Homo sapien
tttttccagacaagatcttgttatg

SEQ ID NO: 5651576 - DNA, 25 bp, Homo sapien
atttttccagacaagatcttgttat

SEQ ID NO: 5651577 - DNA, 25 bp, Homo sapien
ataacaagatcttgtctggaaaaat

SEQ ID NO: 5651578 - DNA, 25 bp, Homo sapien
acataacaagatcttgtctggaaaa

SEQ ID NO: 5651579 - DNA, 25 bp, Homo sapien
cataacaagatcttgtctggaaaaa

SEQ ID NO: 5651580 - DNA, 25 bp, Homo sapien
ttttccagacaagatcttgttatgt

SEQ ID NO: 5651581 - DNA, 25 bp, Homo sapien
cggactgtctttattatttttccag

SEQ ID NO: 5651582 - DNA, 25 bp, Homo sapien
tcttgttatgttgcctctgctggtc

SEQ ID NO: 5651583 - DNA, 25 bp, Homo sapien
tatttttccagacaagatcttgtta

SEQ ID NO: 5651584 - DNA, 25 bp, Homo sapien
gttatgttgcctctgctggtctcga

SEQ ID NO: 5651585 - DNA, 25 bp, Homo sapien
tttttccagacaagatcttgttatg

SEQ ID NO: 5651586 - DNA, 25 bp, Homo sapien
gaccagcagaggcaacataacaaga

SEQ ID NO: 5651587 - DNA, 25 bp, Homo sapien
acataacaagatcttgtctggaaaa

SEQ ID NO: 5651588 - DNA, 25 bp, Homo sapien
caacataacaagatcttgtctggaa

SEQ ID NO: 5651589 - DNA, 25 bp, Homo sapien
ctggaaaaataataaagacagtccg

SEQ ID NO: 5651590 - DNA, 25 bp, Homo sapien
cataacaagatcttgtctggaaaaa

SEQ ID NO: 5651591 - DNA, 25 bp, Homo sapien
tcgagaccagcagaggcaacataac

SEQ ID NO: 5651592 - DNA, 25 bp, Homo sapien
aagtttcaatcggtatgattataaa

SEQ ID NO: 5651593 - DNA, 25 bp, Homo sapien
tggctatttaagtttcaatcggtat

SEQ ID NO: 5651594 - DNA, 25 bp, Homo sapien
gctatttaagtttcaatcggtatga

SEQ ID NO: 5651595 - DNA, 25 bp, Homo sapien
tatttaagtttcaatcggtatgatt

SEQ ID NO: 5651596 - DNA, 25 bp, Homo sapien
ggctatttaagtttcaatcggtatg

SEQ ID NO: 5651597 - DNA, 25 bp, Homo sapien
gtttcaatcggtatgattataaaaa

SEQ ID NO: 5651598 - DNA, 25 bp, Homo sapien
taatcataccgattgaaacttaaat

SEQ ID NO: 5651599 - DNA, 25 bp, Homo sapien
tttttataatcataccgattgaaac

SEQ ID NO: 5651600 - DNA, 25 bp, Homo sapien
tataatcataccgattgaaacttaa

SEQ ID NO: 5651601 - DNA, 25 bp, Homo sapien
atcataccgattgaaacttaaatag

SEQ ID NO: 5651602 - DNA, 25 bp, Homo sapien
cataccgattgaaacttaaatagcc

SEQ ID NO: 5651603 - DNA, 25 bp, Homo sapien
tcataccgattgaaacttaaatagc

SEQ ID NO: 5651604 - DNA, 25 bp, Homo sapien
tattgttcagtatggtagctactag

SEQ ID NO: 5651605 - DNA, 25 bp, Homo sapien
gctatttaagtttcaatcggtatga

SEQ ID NO: 5651606 - DNA, 25 bp, Homo sapien
cctgtattgttcagtatggtagcta

SEQ ID NO: 5651607 - DNA, 25 bp, Homo sapien
ggctatttaagtttcaatcggtatg

SEQ ID NO: 5651608 - DNA, 25 bp, Homo sapien
tggtagctactagccacatatggct

SEQ ID NO: 5651609 - DNA, 25 bp, Homo sapien
gtttcaatcggtatgattataaaaa

SEQ ID NO: 5651610 - DNA, 25 bp, Homo sapien
ggctagtagctaccatactgaacaa

SEQ ID NO: 5651611 - DNA, 25 bp, Homo sapien
taaatagccatatgtggctagtagc

SEQ ID NO: 5651612 - DNA, 25 bp, Homo sapien
tttttataatcataccgattgaaac

SEQ ID NO: 5651613 - DNA, 25 bp, Homo sapien
accatactgaacaatacaggaatac

SEQ ID NO: 5651614 - DNA, 25 bp, Homo sapien
tagctaccatactgaacaatacagg

SEQ ID NO: 5651615 - DNA, 25 bp, Homo sapien
cataccgattgaaacttaaatagcc

SEQ ID NO: 5651616 - DNA, 25 bp, Homo sapien
gcgttcagtacgtacatgtggctag

SEQ ID NO: 5651617 - DNA, 25 bp, Homo sapien
tttgggcgttcagtacgtacatgtg

SEQ ID NO: 5651618 - DNA, 25 bp, Homo sapien
ttcagtacgtacatgtggctagtga

SEQ ID NO: 5651619 - DNA, 25 bp, Homo sapien
ctattttgggcgttcagtacgtaca

SEQ ID NO: 5651620 - DNA, 25 bp, Homo sapien
atattggacagcacatacaaaacat

SEQ ID NO: 5651621 - DNA, 25 bp, Homo sapien
tgggcgttcagtacgtacatgtggc

SEQ ID NO: 5651622 - DNA, 25 bp, Homo sapien
cacatgtacgtactgaacgcccaaa

SEQ ID NO: 5651623 - DNA, 25 bp, Homo sapien
atgttttgtatgtgctgtccaatat

SEQ ID NO: 5651624 - DNA, 25 bp, Homo sapien
tgtacgtactgaacgcccaaaatag

SEQ ID NO: 5651625 - DNA, 25 bp, Homo sapien
actagccacatgtacgtactgaacg

SEQ ID NO: 5651626 - DNA, 25 bp, Homo sapien
tagccacatgtacgtactgaacgcc

SEQ ID NO: 5651627 - DNA, 25 bp, Homo sapien
tcactagccacatgtacgtactgaa

SEQ ID NO: 5651628 - DNA, 25 bp, Homo sapien
cgtctaaagattgacagtagttagc

SEQ ID NO: 5651629 - DNA, 25 bp, Homo sapien
gaacattattcgtctaaagattgac

SEQ ID NO: 5651630 - DNA, 25 bp, Homo sapien
tattcgtctaaagattgacagtagt

SEQ ID NO: 5651631 - DNA, 25 bp, Homo sapien
aaagattgacagtagttagcggtaa

SEQ ID NO: 5651632 - DNA, 25 bp, Homo sapien
tctaaagattgacagtagttagcgg

SEQ ID NO: 5651633 - DNA, 25 bp, Homo sapien
cattattcgtctaaagattgacagt

SEQ ID NO: 5651634 - DNA, 25 bp, Homo sapien
tagttagcggtaacaaagcatttta

SEQ ID NO: 5651635 - DNA, 25 bp, Homo sapien
agtagttagcggtaacaaagcattt

SEQ ID NO: 5651636 - DNA, 25 bp, Homo sapien
taaaatgctttgttaccgctaacta

SEQ ID NO: 5651637 - DNA, 25 bp, Homo sapien
aaatgctttgttaccgctaactact

SEQ ID NO: 5651638 - DNA, 25 bp, Homo sapien
ttaccgctaactactgtcaatcttt

SEQ ID NO: 5651639 - DNA, 25 bp, Homo sapien
gctaactactgtcaatctttagacg

SEQ ID NO: 5651640 - DNA, 25 bp, Homo sapien
actgtcaatctttagacgaataatg

SEQ ID NO: 5651641 - DNA, 25 bp, Homo sapien
taactactgtcaatctttagacgaa

SEQ ID NO: 5651642 - DNA, 25 bp, Homo sapien
tcaatctttagacgaataatgttca

SEQ ID NO: 5651643 - DNA, 25 bp, Homo sapien
ccgctaactactgtcaatctttaga

SEQ ID NO: 5651644 - DNA, 25 bp, Homo sapien
tcacagtttactagtcatcttgctt

SEQ ID NO: 5651645 - DNA, 25 bp, Homo sapien
gcacccattttgacagggaatcaca

SEQ ID NO: 5651646 - DNA, 25 bp, Homo sapien
ttttgacagggaatcacatcacagt

SEQ ID NO: 5651647 - DNA, 25 bp, Homo sapien
taaaggtatggagcacccattttga

SEQ ID NO: 5651648 - DNA, 25 bp, Homo sapien
tatggagcacccattttgacaggga

SEQ ID NO: 5651649 - DNA, 25 bp, Homo sapien
gtttactagtcatcttgctttggaa

SEQ ID NO: 5651650 - DNA, 25 bp, Homo sapien
gatgtgattccctgtcaaaatgggt

SEQ ID NO: 5651651 - DNA, 25 bp, Homo sapien
actgtgatgtgattccctgtcaaaa

SEQ ID NO: 5651652 - DNA, 25 bp, Homo sapien
aagcaagatgactagtaaactgtga

SEQ ID NO: 5651653 - DNA, 25 bp, Homo sapien
gattccctgtcaaaatgggtgctcc

SEQ ID NO: 5651654 - DNA, 25 bp, Homo sapien
tgtcaaaatgggtgctccatacctt

SEQ ID NO: 5651655 - DNA, 25 bp, Homo sapien
ttccaaagcaagatgactagtaaac

SEQ ID NO: 5651656 - DNA, 25 bp, Homo sapien
tctttgcctatgtaatttccatgcc

SEQ ID NO: 5651657 - DNA, 25 bp, Homo sapien
tttttaatgatagctaaagattatg

SEQ ID NO: 5651658 - DNA, 25 bp, Homo sapien
ctttgcctatgtaatttccatgcca

SEQ ID NO: 5651659 - DNA, 25 bp, Homo sapien
ttattctttgcctatgtaatttcca

SEQ ID NO: 5651660 - DNA, 25 bp, Homo sapien
ttctttgcctatgtaatttccatgc

SEQ ID NO: 5651661 - DNA, 25 bp, Homo sapien
attctttgcctatgtaatttccatg

SEQ ID NO: 5651662 - DNA, 25 bp, Homo sapien
ggcatggaaattacataggcaaaga

SEQ ID NO: 5651663 - DNA, 25 bp, Homo sapien
catggaaattacataggcaaagaat

SEQ ID NO: 5651664 - DNA, 25 bp, Homo sapien
cataatctttagctatcattaaaaa

SEQ ID NO: 5651665 - DNA, 25 bp, Homo sapien
tggcatggaaattacataggcaaag

SEQ ID NO: 5651666 - DNA, 25 bp, Homo sapien
tggaaattacataggcaaagaataa

SEQ ID NO: 5651667 - DNA, 25 bp, Homo sapien
gcatggaaattacataggcaaagaa

SEQ ID NO: 5651668 - DNA, 25 bp, Homo sapien
attctttgcctatgtaatttccatg

SEQ ID NO: 5651669 - DNA, 25 bp, Homo sapien
gccattttttaatgatagctaaaga

SEQ ID NO: 5651670 - DNA, 25 bp, Homo sapien
gcctatgtaatttccatgccatttt

SEQ ID NO: 5651671 - DNA, 25 bp, Homo sapien
tagctaaagattatgtaaattctcc

SEQ ID NO: 5651672 - DNA, 25 bp, Homo sapien
gattatgtaaattctcctatttcag

SEQ ID NO: 5651673 - DNA, 25 bp, Homo sapien
ctttgcctatgtaatttccatgcca

SEQ ID NO: 5651674 - DNA, 25 bp, Homo sapien
aagtagagcttagactgtttcccca

SEQ ID NO: 5651675 - DNA, 25 bp, Homo sapien
tgggacgtaagtagagcttagactg

SEQ ID NO: 5651676 - DNA, 25 bp, Homo sapien
gtagagcttagactgtttccccaag

SEQ ID NO: 5651677 - DNA, 25 bp, Homo sapien
taagtagagcttagactgtttcccc

SEQ ID NO: 5651678 - DNA, 25 bp, Homo sapien
gatttgttgggacgtaagtagagct

SEQ ID NO: 5651679 - DNA, 25 bp, Homo sapien
tgttgggacgtaagtagagcttaga

SEQ ID NO: 5651680 - DNA, 25 bp, Homo sapien
ttccttcttttagctgatgtttcct

SEQ ID NO: 5651681 - DNA, 25 bp, Homo sapien
tttccttcttttagctgatgtttcc

SEQ ID NO: 5651682 - DNA, 25 bp, Homo sapien
ggaaacatcagctaaaagaaggaaa

SEQ ID NO: 5651683 - DNA, 25 bp, Homo sapien
aggaaacatcagctaaaagaaggaa

SEQ ID NO: 5651684 - DNA, 25 bp, Homo sapien
gaaacagtctaagctctacttacgt

SEQ ID NO: 5651685 - DNA, 25 bp, Homo sapien
tctaagctctacttacgtcccaaca

SEQ ID NO: 5651686 - DNA, 25 bp, Homo sapien
cagtctaagctctacttacgtccca

SEQ ID NO: 5651687 - DNA, 25 bp, Homo sapien
taagctctacttacgtcccaacaaa

SEQ ID NO: 5651688 - DNA, 25 bp, Homo sapien
gggaaacagtctaagctctacttac

SEQ ID NO: 5651689 - DNA, 25 bp, Homo sapien
cttggggaaacagtctaagctctac

SEQ ID NO: 5651690 - DNA, 25 bp, Homo sapien
gcagaagtataacagcattatggaa

SEQ ID NO: 5651691 - DNA, 25 bp, Homo sapien
tgcccttctatgcacctcccaagta

SEQ ID NO: 5651692 - DNA, 25 bp, Homo sapien
cagcattatggaaactctctgggag

SEQ ID NO: 5651693 - DNA, 25 bp, Homo sapien
cactgttttcagaataatccaccag

SEQ ID NO: 5651694 - DNA, 25 bp, Homo sapien
aactctctgggagtttgcccttcta

SEQ ID NO: 5651695 - DNA, 25 bp, Homo sapien
caagtacctaccaacactgttttca

SEQ ID NO: 5651696 - DNA, 25 bp, Homo sapien
tagaagggcaaactcccagagagtt

SEQ ID NO: 5651697 - DNA, 25 bp, Homo sapien
tgaaaacagtgttggtaggtacttg

SEQ ID NO: 5651698 - DNA, 25 bp, Homo sapien
ttccataatgctgttatacttctgc

SEQ ID NO: 5651699 - DNA, 25 bp, Homo sapien
tacttgggaggtgcatagaagggca

SEQ ID NO: 5651700 - DNA, 25 bp, Homo sapien
tcccagagagtttccataatgctgt

SEQ ID NO: 5651701 - DNA, 25 bp, Homo sapien
ctggtggattattctgaaaacagtg

SEQ ID NO: 5651702 - DNA, 25 bp, Homo sapien
gatctccgccttcaggttaacctac

SEQ ID NO: 5651703 - DNA, 25 bp, Homo sapien
caggttaacctactcctcaactaga

SEQ ID NO: 5651704 - DNA, 25 bp, Homo sapien
ttctagagatctccgccttcaggtt

SEQ ID NO: 5651705 - DNA, 25 bp, Homo sapien
tagaaaaggtttcacttgcctggcc

SEQ ID NO: 5651706 - DNA, 25 bp, Homo sapien
agagatctccgccttcaggttaacc

SEQ ID NO: 5651707 - DNA, 25 bp, Homo sapien
catttctagagatctccgccttcag

SEQ ID NO: 5651708 - DNA, 25 bp, Homo sapien
aacctgaaggcggagatctctagaa

SEQ ID NO: 5651709 - DNA, 25 bp, Homo sapien
gaaggcggagatctctagaaatgaa

SEQ ID NO: 5651710 - DNA, 25 bp, Homo sapien
agtaggttaacctgaaggcggagat

SEQ ID NO: 5651711 - DNA, 25 bp, Homo sapien
tctagttgaggagtaggttaacctg

SEQ ID NO: 5651712 - DNA, 25 bp, Homo sapien
ggttaacctgaaggcggagatctct

SEQ ID NO: 5651713 - DNA, 25 bp, Homo sapien
ggccaggcaagtgaaaccttttcta

SEQ ID NO: 5651714 - DNA, 25 bp, Homo sapien
gccatctcaagagaagacgagggct

SEQ ID NO: 5651715 - DNA, 25 bp, Homo sapien
aagagaagacgagggctgggcatgt

SEQ ID NO: 5651716 - DNA, 25 bp, Homo sapien
gaagccatctcaagagaagacgagg

SEQ ID NO: 5651717 - DNA, 25 bp, Homo sapien
catctcaagagaagacgagggctgg

SEQ ID NO: 5651718 - DNA, 25 bp, Homo sapien
tctcaagagaagacgagggctgggc

SEQ ID NO: 5651719 - DNA, 25 bp, Homo sapien
aagccatctcaagagaagacgaggg

SEQ ID NO: 5651720 - DNA, 25 bp, Homo sapien
gccctcgtcttctcttgagatggct

SEQ ID NO: 5651721 - DNA, 25 bp, Homo sapien
tgcccagccctcgtcttctcttgag

SEQ ID NO: 5651722 - DNA, 25 bp, Homo sapien
ccagccctcgtcttctcttgagatg

SEQ ID NO: 5651723 - DNA, 25 bp, Homo sapien
agccctcgtcttctcttgagatggc

SEQ ID NO: 5651724 - DNA, 25 bp, Homo sapien
cctcgtcttctcttgagatggcttc

SEQ ID NO: 5651725 - DNA, 25 bp, Homo sapien
acatgcccagccctcgtcttctctt

SEQ ID NO: 5651726 - DNA, 25 bp, Homo sapien
cacgagagttgcttgaacctggagg

SEQ ID NO: 5651727 - DNA, 25 bp, Homo sapien
cgagagttgcttgaacctggaggtg

SEQ ID NO: 5651728 - DNA, 25 bp, Homo sapien
aagatcacaccactgtgccccagcc

SEQ ID NO: 5651729 - DNA, 25 bp, Homo sapien
tggaggtcagagtgagccaagatca

SEQ ID NO: 5651730 - DNA, 25 bp, Homo sapien
acgagagttgcttgaacctggaggt

SEQ ID NO: 5651731 - DNA, 25 bp, Homo sapien
cctggaggtggaggtcagagtgagc

SEQ ID NO: 5651732 - DNA, 25 bp, Homo sapien
cacctccaggttcaagcaactctcg

SEQ ID NO: 5651733 - DNA, 25 bp, Homo sapien
gctcactctgacctccacctccagg

SEQ ID NO: 5651734 - DNA, 25 bp, Homo sapien
tgatcttggctcactctgacctcca

SEQ ID NO: 5651735 - DNA, 25 bp, Homo sapien
cctccaggttcaagcaactctcgtg

SEQ ID NO: 5651736 - DNA, 25 bp, Homo sapien
ggctggggcacagtggtgtgatctt

SEQ ID NO: 5651737 - DNA, 25 bp, Homo sapien
acctccaggttcaagcaactctcgt

SEQ ID NO: 5651738 - DNA, 25 bp, Homo sapien
ctacttagcttgtaattatcctttt

SEQ ID NO: 5651739 - DNA, 25 bp, Homo sapien
aaaaggataattacaagctaagtag

SEQ ID NO: 5651740 - DNA, 25 bp, Homo sapien
tctcactctgttgcctaggctggag

SEQ ID NO: 5651741 - DNA, 25 bp, Homo sapien
ttttttttttggagacaggatctca

SEQ ID NO: 5651742 - DNA, 25 bp, Homo sapien
ggcagtggcatgatcgtggcccact

SEQ ID NO: 5651743 - DNA, 25 bp, Homo sapien
tttttttttggagacaggatctcac

SEQ ID NO: 5651744 - DNA, 25 bp, Homo sapien
ctacttagcttgtaattatcctttt

SEQ ID NO: 5651745 - DNA, 25 bp, Homo sapien
ttttttttggagacaggatctcact

SEQ ID NO: 5651746 - DNA, 25 bp, Homo sapien
gtgagatcctgtctccaaaaaaaaa

SEQ ID NO: 5651747 - DNA, 25 bp, Homo sapien
tgagatcctgtctccaaaaaaaaaa

SEQ ID NO: 5651748 - DNA, 25 bp, Homo sapien
aaaaggataattacaagctaagtag

SEQ ID NO: 5651749 - DNA, 25 bp, Homo sapien
agtgggccacgatcatgccactgcc

SEQ ID NO: 5651750 - DNA, 25 bp, Homo sapien
agtgagatcctgtctccaaaaaaaa

SEQ ID NO: 5651751 - DNA, 25 bp, Homo sapien
ctccagcctaggcaacagagtgaga

SEQ ID NO: 5651752 - DNA, 25 bp, Homo sapien
cccagagtgtttcccaggcatgagc

SEQ ID NO: 5651753 - DNA, 25 bp, Homo sapien
gtttcccagagtgtttcccaggcat

SEQ ID NO: 5651754 - DNA, 25 bp, Homo sapien
tgtttcccagagtgtttcccaggca

SEQ ID NO: 5651755 - DNA, 25 bp, Homo sapien
cctctgtttcccagagtgtttccca

SEQ ID NO: 5651756 - DNA, 25 bp, Homo sapien
gagtgtttcccaggcatgagccact

SEQ ID NO: 5651757 - DNA, 25 bp, Homo sapien
tctgtttcccagagtgtttcccagg

SEQ ID NO: 5651758 - DNA, 25 bp, Homo sapien
gctcatgcctgggaaacactctggg

SEQ ID NO: 5651759 - DNA, 25 bp, Homo sapien
agtggctcatgcctgggaaacactc

SEQ ID NO: 5651760 - DNA, 25 bp, Homo sapien
tgcctgggaaacactctgggaaaca

SEQ ID NO: 5651761 - DNA, 25 bp, Homo sapien
gcctgggaaacactctgggaaacag

SEQ ID NO: 5651762 - DNA, 25 bp, Homo sapien
tgggaaacactctgggaaacagagg

SEQ ID NO: 5651763 - DNA, 25 bp, Homo sapien
atgcctgggaaacactctgggaaac

SEQ ID NO: 5651764 - DNA, 25 bp, Homo sapien
cacagccggtgactcttaatagtgt

SEQ ID NO: 5651765 - DNA, 25 bp, Homo sapien
catcacttggcaacacagccggtga

SEQ ID NO: 5651766 - DNA, 25 bp, Homo sapien
ggtgactcttaatagtgtgtcttca

SEQ ID NO: 5651767 - DNA, 25 bp, Homo sapien
tctggttaggggcagcattgacatc

SEQ ID NO: 5651768 - DNA, 25 bp, Homo sapien
cttggcaacacagccggtgactctt

SEQ ID NO: 5651769 - DNA, 25 bp, Homo sapien
ttgacatcacttggcaacacagccg

SEQ ID NO: 5651770 - DNA, 25 bp, Homo sapien
tgaagacacactattaagagtcacc

SEQ ID NO: 5651771 - DNA, 25 bp, Homo sapien
gatgtcaatgctgcccctaaccaga

SEQ ID NO: 5651772 - DNA, 25 bp, Homo sapien
tcaccggctgtgttgccaagtgatg

SEQ ID NO: 5651773 - DNA, 25 bp, Homo sapien
tattaagagtcaccggctgtgttgc

SEQ ID NO: 5651774 - DNA, 25 bp, Homo sapien
ggctgtgttgccaagtgatgtcaat

SEQ ID NO: 5651775 - DNA, 25 bp, Homo sapien
gacacactattaagagtcaccggct

SEQ ID NO: 5651776 - DNA, 25 bp, Homo sapien
ctcaaaggcatttgcgcttgaaatt

SEQ ID NO: 5651777 - DNA, 25 bp, Homo sapien
tcaaaggcatttgcgcttgaaattg

SEQ ID NO: 5651778 - DNA, 25 bp, Homo sapien
ggctcaaaggcatttgcgcttgaaa

SEQ ID NO: 5651779 - DNA, 25 bp, Homo sapien
gctcaaaggcatttgcgcttgaaat

SEQ ID NO: 5651780 - DNA, 25 bp, Homo sapien
aaggcatttgcgcttgaaattgaat

SEQ ID NO: 5651781 - DNA, 25 bp, Homo sapien
ggcatttgcgcttgaaattgaatta

SEQ ID NO: 5651782 - DNA, 25 bp, Homo sapien
attcaatttcaagcgcaaatgcctt

SEQ ID NO: 5651783 - DNA, 25 bp, Homo sapien
taattcaatttcaagcgcaaatgcc

SEQ ID NO: 5651784 - DNA, 25 bp, Homo sapien
tttcaagcgcaaatgcctttgagcc

SEQ ID NO: 5651785 - DNA, 25 bp, Homo sapien
aatttcaagcgcaaatgcctttgag

SEQ ID NO: 5651786 - DNA, 25 bp, Homo sapien
caatttcaagcgcaaatgcctttga

SEQ ID NO: 5651787 - DNA, 25 bp, Homo sapien
atttcaagcgcaaatgcctttgagc

SEQ ID NO: 5651788 - DNA, 25 bp, Homo sapien
ccacttcgcccagtcttaaagacct

SEQ ID NO: 5651789 - DNA, 25 bp, Homo sapien
cacttcgcccagtcttaaagacctt

SEQ ID NO: 5651790 - DNA, 25 bp, Homo sapien
aggtctttaagactgggcgaagtgg

SEQ ID NO: 5651791 - DNA, 25 bp, Homo sapien
aaggtctttaagactgggcgaagtg

SEQ ID NO: 5651792 - DNA, 25 bp, Homo sapien
atgagccacttcgcccagtcttaaa

SEQ ID NO: 5651793 - DNA, 25 bp, Homo sapien
cacttcgcccagtcttaaagacctt

SEQ ID NO: 5651794 - DNA, 25 bp, Homo sapien
tgagccacttcgcccagtcttaaag

SEQ ID NO: 5651795 - DNA, 25 bp, Homo sapien
gcatgagccacttcgcccagtctta

SEQ ID NO: 5651796 - DNA, 25 bp, Homo sapien
catgagccacttcgcccagtcttaa

SEQ ID NO: 5651797 - DNA, 25 bp, Homo sapien
agccacttcgcccagtcttaaagac

SEQ ID NO: 5651798 - DNA, 25 bp, Homo sapien
tttaagactgggcgaagtggctcat

SEQ ID NO: 5651799 - DNA, 25 bp, Homo sapien
ttaagactgggcgaagtggctcatg

SEQ ID NO: 5651800 - DNA, 25 bp, Homo sapien
taagactgggcgaagtggctcatgc

SEQ ID NO: 5651801 - DNA, 25 bp, Homo sapien
gtctttaagactgggcgaagtggct

SEQ ID NO: 5651802 - DNA, 25 bp, Homo sapien
aaggtctttaagactgggcgaagtg

SEQ ID NO: 5651803 - DNA, 25 bp, Homo sapien
ctttaagactgggcgaagtggctca

SEQ ID NO: 5651804 - DNA, 25 bp, Homo sapien
ccgggttcaagtgactctcctgcct

SEQ ID NO: 5651805 - DNA, 25 bp, Homo sapien
ttacaggtgcctgccaccacacctg

SEQ ID NO: 5651806 - DNA, 25 bp, Homo sapien
acaggtgcctgccaccacacctggc

SEQ ID NO: 5651807 - DNA, 25 bp, Homo sapien
ggtgcctgccaccacacctggctaa

SEQ ID NO: 5651808 - DNA, 25 bp, Homo sapien
tacaggtgcctgccaccacacctgg

SEQ ID NO: 5651809 - DNA, 25 bp, Homo sapien
ctcccgggttcaagtgactctcctg

SEQ ID NO: 5651810 - DNA, 25 bp, Homo sapien
aggcaggagagtcacttgaacccgg

SEQ ID NO: 5651811 - DNA, 25 bp, Homo sapien
ttagccaggtgtggtggcaggcacc

SEQ ID NO: 5651812 - DNA, 25 bp, Homo sapien
caggtgtggtggcaggcacctgtaa

SEQ ID NO: 5651813 - DNA, 25 bp, Homo sapien
caggagagtcacttgaacccgggag

SEQ ID NO: 5651814 - DNA, 25 bp, Homo sapien
gccaggtgtggtggcaggcacctgt

SEQ ID NO: 5651815 - DNA, 25 bp, Homo sapien
ccaggtgtggtggcaggcacctgta

SEQ ID NO: 5651816 - DNA, 25 bp, Homo sapien
tcccaaagtgctgggattataggtg

SEQ ID NO: 5651817 - DNA, 25 bp, Homo sapien
cctcagcctcccaaagtgctgggat

SEQ ID NO: 5651818 - DNA, 25 bp, Homo sapien
gagatggagtcactctgtcgcccag

SEQ ID NO: 5651819 - DNA, 25 bp, Homo sapien
acctcagcctcccaaagtgctggga

SEQ ID NO: 5651820 - DNA, 25 bp, Homo sapien
tgagccactgcgcccggcctttttt

SEQ ID NO: 5651821 - DNA, 25 bp, Homo sapien
ctcagcctcccaaagtgctgggatt

SEQ ID NO: 5651822 - DNA, 25 bp, Homo sapien
cacctataatcccagcactttggga

SEQ ID NO: 5651823 - DNA, 25 bp, Homo sapien
atcccagcactttgggaggctgagg

SEQ ID NO: 5651824 - DNA, 25 bp, Homo sapien
aaaaaaggccgggcgcagtggctca

SEQ ID NO: 5651825 - DNA, 25 bp, Homo sapien
aatcccagcactttgggaggctgag

SEQ ID NO: 5651826 - DNA, 25 bp, Homo sapien
tcccagcactttgggaggctgaggt

SEQ ID NO: 5651827 - DNA, 25 bp, Homo sapien
ctgggcgacagagtgactccatctc

SEQ ID NO: 5651828 - DNA, 25 bp, Homo sapien
tgaatatgtaaaggcgcacaccacc

SEQ ID NO: 5651829 - DNA, 25 bp, Homo sapien
gcctcctgaatatgtaaaggcgcac

SEQ ID NO: 5651830 - DNA, 25 bp, Homo sapien
tcctgaatatgtaaaggcgcacacc

SEQ ID NO: 5651831 - DNA, 25 bp, Homo sapien
cagcctcctgaatatgtaaaggcgc

SEQ ID NO: 5651832 - DNA, 25 bp, Homo sapien
cctcctgaatatgtaaaggcgcaca

SEQ ID NO: 5651833 - DNA, 25 bp, Homo sapien
cctgaatatgtaaaggcgcacacca

SEQ ID NO: 5651834 - DNA, 25 bp, Homo sapien
tgtgcgcctttacatattcaggagg

SEQ ID NO: 5651835 - DNA, 25 bp, Homo sapien
gcgcctttacatattcaggaggctg

SEQ ID NO: 5651836 - DNA, 25 bp, Homo sapien
ggtgtgcgcctttacatattcagga

SEQ ID NO: 5651837 - DNA, 25 bp, Homo sapien
tgcgcctttacatattcaggaggct

SEQ ID NO: 5651838 - DNA, 25 bp, Homo sapien
ggtggtgtgcgcctttacatattca

SEQ ID NO: 5651839 - DNA, 25 bp, Homo sapien
tggtgtgcgcctttacatattcagg

SEQ ID NO: 5651840 - DNA, 25 bp, Homo sapien
tattttaaccctatagagccaagta

SEQ ID NO: 5651841 - DNA, 25 bp, Homo sapien
tagagccaagtaccaggctagaagt

SEQ ID NO: 5651842 - DNA, 25 bp, Homo sapien
ccaagtaccaggctagaagtcagga

SEQ ID NO: 5651843 - DNA, 25 bp, Homo sapien
cctatagagccaagtaccaggctag

SEQ ID NO: 5651844 - DNA, 25 bp, Homo sapien
tatagagccaagtaccaggctagaa

SEQ ID NO: 5651845 - DNA, 25 bp, Homo sapien
taaccctatagagccaagtaccagg

SEQ ID NO: 5651846 - DNA, 25 bp, Homo sapien
tctagcctggtacttggctctatag

SEQ ID NO: 5651847 - DNA, 25 bp, Homo sapien
tcctgacttctagcctggtacttgg

SEQ ID NO: 5651848 - DNA, 25 bp, Homo sapien
gacttctagcctggtacttggctct

SEQ ID NO: 5651849 - DNA, 25 bp, Homo sapien
tagcctggtacttggctctataggg

SEQ ID NO: 5651850 - DNA, 25 bp, Homo sapien
cctggtacttggctctatagggtta

SEQ ID NO: 5651851 - DNA, 25 bp, Homo sapien
tacttggctctatagggttaaaata

SEQ ID NO: 5651852 - DNA, 25 bp, Homo sapien
tctgagtgttcacaaatatatatta

SEQ ID NO: 5651853 - DNA, 25 bp, Homo sapien
gcatttaagttctgagtgttcacaa

SEQ ID NO: 5651854 - DNA, 25 bp, Homo sapien
taaatttgggacagcatttaagttc

SEQ ID NO: 5651855 - DNA, 25 bp, Homo sapien
gaaaagacattaaatttgggacagc

SEQ ID NO: 5651856 - DNA, 25 bp, Homo sapien
taggacccagaagaagaaaagacat

SEQ ID NO: 5651857 - DNA, 25 bp, Homo sapien
tatattaaaatttcatgcagcattt

SEQ ID NO: 5651858 - DNA, 25 bp, Homo sapien
tgtgaacactcagaacttaaatgct

SEQ ID NO: 5651859 - DNA, 25 bp, Homo sapien
taaatgctgcatgaaattttaatat

SEQ ID NO: 5651860 - DNA, 25 bp, Homo sapien
cactcagaacttaaatgctgtccca

SEQ ID NO: 5651861 - DNA, 25 bp, Homo sapien
taaatgctgtcccaaatttaatgtc

SEQ ID NO: 5651862 - DNA, 25 bp, Homo sapien
gctgtcccaaatttaatgtcttttc

SEQ ID NO: 5651863 - DNA, 25 bp, Homo sapien
taatatatatttgtgaacactcaga

SEQ ID NO: 5651864 - DNA, 25 bp, Homo sapien
tcgaacccctgacctcaagtgatct

SEQ ID NO: 5651865 - DNA, 25 bp, Homo sapien
taggaaagacagggtttcaccatgt

SEQ ID NO: 5651866 - DNA, 25 bp, Homo sapien
gtgatctgcccgcctgcacctccca

SEQ ID NO: 5651867 - DNA, 25 bp, Homo sapien
aggaaagacagggtttcaccatgtt

SEQ ID NO: 5651868 - DNA, 25 bp, Homo sapien
ttaggaaagacagggtttcaccatg

SEQ ID NO: 5651869 - DNA, 25 bp, Homo sapien
tctgcccgcctgcacctcccaaagt

SEQ ID NO: 5651870 - DNA, 25 bp, Homo sapien
tgggaggtgcaggcgggcagatcac

SEQ ID NO: 5651871 - DNA, 25 bp, Homo sapien
actttgggaggtgcaggcgggcaga

SEQ ID NO: 5651872 - DNA, 25 bp, Homo sapien
aacatggtgaaaccctgtctttcct

SEQ ID NO: 5651873 - DNA, 25 bp, Homo sapien
acatggtgaaaccctgtctttccta

SEQ ID NO: 5651874 - DNA, 25 bp, Homo sapien
cagatcacttgaggtcaggggttcg

SEQ ID NO: 5651875 - DNA, 25 bp, Homo sapien
catggtgaaaccctgtctttcctaa

SEQ ID NO: 5651876 - DNA, 25 bp, Homo sapien
tgtctcagccaccaaagtaactgag

SEQ ID NO: 5651877 - DNA, 25 bp, Homo sapien
tcagccaccaaagtaactgagatta

SEQ ID NO: 5651878 - DNA, 25 bp, Homo sapien
gtctcagccaccaaagtaactgaga

SEQ ID NO: 5651879 - DNA, 25 bp, Homo sapien
ctgtctcagccaccaaagtaactga

SEQ ID NO: 5651880 - DNA, 25 bp, Homo sapien
tctcagccaccaaagtaactgagat

SEQ ID NO: 5651881 - DNA, 25 bp, Homo sapien
cagccaccaaagtaactgagattac

SEQ ID NO: 5651882 - DNA, 25 bp, Homo sapien
gtaatctcagttactttggtggctg

SEQ ID NO: 5651883 - DNA, 25 bp, Homo sapien
tctcagttactttggtggctgagac

SEQ ID NO: 5651884 - DNA, 25 bp, Homo sapien
taatctcagttactttggtggctga

SEQ ID NO: 5651885 - DNA, 25 bp, Homo sapien
atctcagttactttggtggctgaga

SEQ ID NO: 5651886 - DNA, 25 bp, Homo sapien
ctcagttactttggtggctgagaca

SEQ ID NO: 5651887 - DNA, 25 bp, Homo sapien
tcagttactttggtggctgagacag

SEQ ID NO: 5651888 - DNA, 25 bp, Homo sapien
aaaatcaaattagaaataatgacat

SEQ ID NO: 5651889 - DNA, 25 bp, Homo sapien
aaaaatcaaattagaaataatgaca

SEQ ID NO: 5651890 - DNA, 25 bp, Homo sapien
aagtttgttctcacaatttctgcct

SEQ ID NO: 5651891 - DNA, 25 bp, Homo sapien
tgttctcacaatttctgccttttaa

SEQ ID NO: 5651892 - DNA, 25 bp, Homo sapien
aaaagtttgttctcacaatttctgc

SEQ ID NO: 5651893 - DNA, 25 bp, Homo sapien
tctgccttttaattagagagtttaa

SEQ ID NO: 5651894 - DNA, 25 bp, Homo sapien
gacagcatacagtggatactttaaa

SEQ ID NO: 5651895 - DNA, 25 bp, Homo sapien
attagagagtttaactcatttacct

SEQ ID NO: 5651896 - DNA, 25 bp, Homo sapien
tttaaagtatccactgtatgctgtc

SEQ ID NO: 5651897 - DNA, 25 bp, Homo sapien
aggtaaatgagttaaactctctaat

SEQ ID NO: 5651898 - DNA, 25 bp, Homo sapien
aaggcagaaattgtgagaacaaact

SEQ ID NO: 5651899 - DNA, 25 bp, Homo sapien
ttaaactctctaattaaaaggcaga

SEQ ID NO: 5651900 - DNA, 25 bp, Homo sapien
ttaaaaggcagaaattgtgagaaca

SEQ ID NO: 5651901 - DNA, 25 bp, Homo sapien
gcagaaattgtgagaacaaactttt

SEQ ID NO: 5651902 - DNA, 25 bp, Homo sapien
caggagagcaccatcatgcctgact

SEQ ID NO: 5651903 - DNA, 25 bp, Homo sapien
gagagcaccatcatgcctgactaat

SEQ ID NO: 5651904 - DNA, 25 bp, Homo sapien
taggactacaggagagcaccatcat

SEQ ID NO: 5651905 - DNA, 25 bp, Homo sapien
tacaggagagcaccatcatgcctga

SEQ ID NO: 5651906 - DNA, 25 bp, Homo sapien
actatttgtgtcttttaatctacag

SEQ ID NO: 5651907 - DNA, 25 bp, Homo sapien
aggactacaggagagcaccatcatg

SEQ ID NO: 5651908 - DNA, 25 bp, Homo sapien
tagattaaaagacacaaatagtact

SEQ ID NO: 5651909 - DNA, 25 bp, Homo sapien
tcaggcatgatggtgctctcctgta

SEQ ID NO: 5651910 - DNA, 25 bp, Homo sapien
agtcaggcatgatggtgctctcctg

SEQ ID NO: 5651911 - DNA, 25 bp, Homo sapien
ctgtagattaaaagacacaaatagt

SEQ ID NO: 5651912 - DNA, 25 bp, Homo sapien
atgatggtgctctcctgtagtccta

SEQ ID NO: 5651913 - DNA, 25 bp, Homo sapien
attagtcaggcatgatggtgctctc

SEQ ID NO: 5651914 - DNA, 25 bp, Homo sapien
agtgcattgctgcaatcgtagctca

SEQ ID NO: 5651915 - DNA, 25 bp, Homo sapien
gctggagtgcattgctgcaatcgta

SEQ ID NO: 5651916 - DNA, 25 bp, Homo sapien
cattgctgcaatcgtagctcactgt

SEQ ID NO: 5651917 - DNA, 25 bp, Homo sapien
ttgctgcaatcgtagctcactgtaa

SEQ ID NO: 5651918 - DNA, 25 bp, Homo sapien
tgctgcaatcgtagctcactgtaac

SEQ ID NO: 5651919 - DNA, 25 bp, Homo sapien
attgctgcaatcgtagctcactgta

SEQ ID NO: 5651920 - DNA, 25 bp, Homo sapien
tacagtgagctacgattgcagcaat

SEQ ID NO: 5651921 - DNA, 25 bp, Homo sapien
tgagctacgattgcagcaatgcact

SEQ ID NO: 5651922 - DNA, 25 bp, Homo sapien
acagtgagctacgattgcagcaatg

SEQ ID NO: 5651923 - DNA, 25 bp, Homo sapien
gttacagtgagctacgattgcagca

SEQ ID NO: 5651924 - DNA, 25 bp, Homo sapien
ttacagtgagctacgattgcagcaa

SEQ ID NO: 5651925 - DNA, 25 bp, Homo sapien
tacgattgcagcaatgcactccagc

SEQ ID NO: 5651926 - DNA, 25 bp, Homo sapien
ttgtatgatttcattcctcttaaat

SEQ ID NO: 5651927 - DNA, 25 bp, Homo sapien
gatcagaggagattctttgtatgat

SEQ ID NO: 5651928 - DNA, 25 bp, Homo sapien
cagaggagattctttgtatgatttc

SEQ ID NO: 5651929 - DNA, 25 bp, Homo sapien
atcagaggagattctttgtatgatt

SEQ ID NO: 5651930 - DNA, 25 bp, Homo sapien
tcagaggagattctttgtatgattt

SEQ ID NO: 5651931 - DNA, 25 bp, Homo sapien
gaggagattctttgtatgatttcat

SEQ ID NO: 5651932 - DNA, 25 bp, Homo sapien
atgaaatcatacaaagaatctcctc

SEQ ID NO: 5651933 - DNA, 25 bp, Homo sapien
atttaagaggaatgaaatcatacaa

SEQ ID NO: 5651934 - DNA, 25 bp, Homo sapien
aatcatacaaagaatctcctctgat

SEQ ID NO: 5651935 - DNA, 25 bp, Homo sapien
atcatacaaagaatctcctctgatc

SEQ ID NO: 5651936 - DNA, 25 bp, Homo sapien
gaaatcatacaaagaatctcctctg

SEQ ID NO: 5651937 - DNA, 25 bp, Homo sapien
aaatcatacaaagaatctcctctga

SEQ ID NO: 5651938 - DNA, 25 bp, Homo sapien
ttgtatgatttcattcctcttaaat

SEQ ID NO: 5651939 - DNA, 25 bp, Homo sapien
gtgttattttgtggcccaaacacag

SEQ ID NO: 5651940 - DNA, 25 bp, Homo sapien
tttattgagtgttattttgtggccc

SEQ ID NO: 5651941 - DNA, 25 bp, Homo sapien
cagaggagattctttgtatgatttc

SEQ ID NO: 5651942 - DNA, 25 bp, Homo sapien
gaggagattctttgtatgatttcat

SEQ ID NO: 5651943 - DNA, 25 bp, Homo sapien
gatttaatgtgatcagaggagattc

SEQ ID NO: 5651944 - DNA, 25 bp, Homo sapien
gggccacaaaataacactcaataaa

SEQ ID NO: 5651945 - DNA, 25 bp, Homo sapien
cattaaatcaaaaatcagtaacaga

SEQ ID NO: 5651946 - DNA, 25 bp, Homo sapien
atttaagaggaatgaaatcatacaa

SEQ ID NO: 5651947 - DNA, 25 bp, Homo sapien
gaatctcctctgatcacattaaatc

SEQ ID NO: 5651948 - DNA, 25 bp, Homo sapien
ctgtgtttgggccacaaaataacac

SEQ ID NO: 5651949 - DNA, 25 bp, Homo sapien
gaaatcatacaaagaatctcctctg

SEQ ID NO: 5651950 - DNA, 25 bp, Homo sapien
gacacattggttacttaagagtatg

SEQ ID NO: 5651951 - DNA, 25 bp, Homo sapien
cacattggttacttaagagtatgtt

SEQ ID NO: 5651952 - DNA, 25 bp, Homo sapien
tatacacctcattgcattttctaat

SEQ ID NO: 5651953 - DNA, 25 bp, Homo sapien
cattggttacttaagagtatgttaa

SEQ ID NO: 5651954 - DNA, 25 bp, Homo sapien
tgacacattggttacttaagagtat

SEQ ID NO: 5651955 - DNA, 25 bp, Homo sapien
ttgacacattggttacttaagagta

SEQ ID NO: 5651956 - DNA, 25 bp, Homo sapien
ttagaaaatgcaatgaggtgtataa

SEQ ID NO: 5651957 - DNA, 25 bp, Homo sapien
aacatactcttaagtaaccaatgtg

SEQ ID NO: 5651958 - DNA, 25 bp, Homo sapien
catactcttaagtaaccaatgtgtc

SEQ ID NO: 5651959 - DNA, 25 bp, Homo sapien
attagaaaatgcaatgaggtgtata

SEQ ID NO: 5651960 - DNA, 25 bp, Homo sapien
ttaacatactcttaagtaaccaatg

SEQ ID NO: 5651961 - DNA, 25 bp, Homo sapien
tactcttaagtaaccaatgtgtcaa

SEQ ID NO: 5651962 - DNA, 25 bp, Homo sapien
cccgcctcagcctcacagagtgctg

SEQ ID NO: 5651963 - DNA, 25 bp, Homo sapien
ccgcctcagcctcacagagtgctgg

SEQ ID NO: 5651964 - DNA, 25 bp, Homo sapien
gcctcagcctcacagagtgctggga

SEQ ID NO: 5651965 - DNA, 25 bp, Homo sapien
ctcctgccctcaggtgatccacccg

SEQ ID NO: 5651966 - DNA, 25 bp, Homo sapien
acccgcctcagcctcacagagtgct

SEQ ID NO: 5651967 - DNA, 25 bp, Homo sapien
cgcctcagcctcacagagtgctggg

SEQ ID NO: 5651968 - DNA, 25 bp, Homo sapien
tcccagcactctgtgaggctgaggc

SEQ ID NO: 5651969 - DNA, 25 bp, Homo sapien
cccagcactctgtgaggctgaggcg

SEQ ID NO: 5651970 - DNA, 25 bp, Homo sapien
cagcactctgtgaggctgaggcggg

SEQ ID NO: 5651971 - DNA, 25 bp, Homo sapien
ccagcactctgtgaggctgaggcgg

SEQ ID NO: 5651972 - DNA, 25 bp, Homo sapien
cgggtggatcacctgagggcaggag

SEQ ID NO: 5651973 - DNA, 25 bp, Homo sapien
agcactctgtgaggctgaggcgggt

SEQ ID NO: 5651974 - DNA, 25 bp, Homo sapien
tgtgcctggctacctgggtaatatt

SEQ ID NO: 5651975 - DNA, 25 bp, Homo sapien
tgcctggctacctgggtaatatttg

SEQ ID NO: 5651976 - DNA, 25 bp, Homo sapien
tgtgagccgctgtgcctggctacct

SEQ ID NO: 5651977 - DNA, 25 bp, Homo sapien
gccgctgtgcctggctacctgggta

SEQ ID NO: 5651978 - DNA, 25 bp, Homo sapien
gctgtgcctggctacctgggtaata

SEQ ID NO: 5651979 - DNA, 25 bp, Homo sapien
gtgagccgctgtgcctggctacctg

SEQ ID NO: 5651980 - DNA, 25 bp, Homo sapien
atattacccaggtagccaggcacag

SEQ ID NO: 5651981 - DNA, 25 bp, Homo sapien
aggtagccaggcacagcggctcaca

SEQ ID NO: 5651982 - DNA, 25 bp, Homo sapien
caaatattacccaggtagccaggca

SEQ ID NO: 5651983 - DNA, 25 bp, Homo sapien
aaatattacccaggtagccaggcac

SEQ ID NO: 5651984 - DNA, 25 bp, Homo sapien
attacccaggtagccaggcacagcg

SEQ ID NO: 5651985 - DNA, 25 bp, Homo sapien
aatattacccaggtagccaggcaca

SEQ ID NO: 5651986 - DNA, 25 bp, Homo sapien
gcgcatgctaccacgcctggctaat

SEQ ID NO: 5651987 - DNA, 25 bp, Homo sapien
tacaggcgcatgctaccacgcctgg

SEQ ID NO: 5651988 - DNA, 25 bp, Homo sapien
aggcgcatgctaccacgcctggcta

SEQ ID NO: 5651989 - DNA, 25 bp, Homo sapien
cgcatgctaccacgcctggctaatt

SEQ ID NO: 5651990 - DNA, 25 bp, Homo sapien
ggcgcatgctaccacgcctggctaa

SEQ ID NO: 5651991 - DNA, 25 bp, Homo sapien
gcatgctaccacgcctggctaattt

SEQ ID NO: 5651992 - DNA, 25 bp, Homo sapien
ccaggcgtggtagcatgcgcctgta

SEQ ID NO: 5651993 - DNA, 25 bp, Homo sapien
aaaaattagccaggcgtggtagcat

SEQ ID NO: 5651994 - DNA, 25 bp, Homo sapien
aattagccaggcgtggtagcatgcg

SEQ ID NO: 5651995 - DNA, 25 bp, Homo sapien
tagccaggcgtggtagcatgcgcct

SEQ ID NO: 5651996 - DNA, 25 bp, Homo sapien
ttagccaggcgtggtagcatgcgcc

SEQ ID NO: 5651997 - DNA, 25 bp, Homo sapien
attagccaggcgtggtagcatgcgc

SEQ ID NO: 5651998 - DNA, 25 bp, Homo sapien
agttagctttaggtctagtttgctt

SEQ ID NO: 5651999 - DNA, 25 bp, Homo sapien
tctgttagttagctttaggtctagt

SEQ ID NO: 5652000 - DNA, 25 bp, Homo sapien
ttagttagctttaggtctagtttgc

SEQ ID NO: 5652001 - DNA, 25 bp, Homo sapien
ccttggttctgttagttagctttag

SEQ ID NO: 5652002 - DNA, 25 bp, Homo sapien
tggttctgttagttagctttaggtc

SEQ ID NO: 5652003 - DNA, 25 bp, Homo sapien
tccttggttctgttagttagcttta

SEQ ID NO: 5652004 - DNA, 25 bp, Homo sapien
cctaaagctaactaacagaaccaag

SEQ ID NO: 5652005 - DNA, 25 bp, Homo sapien
taaagctaactaacagaaccaagga

SEQ ID NO: 5652006 - DNA, 25 bp, Homo sapien
tagacctaaagctaactaacagaac

SEQ ID NO: 5652007 - DNA, 25 bp, Homo sapien
aagcaaactagacctaaagctaact

SEQ ID NO: 5652008 - DNA, 25 bp, Homo sapien
gacctaaagctaactaacagaacca

SEQ ID NO: 5652009 - DNA, 25 bp, Homo sapien
gcaaactagacctaaagctaactaa

SEQ ID NO: 5652010 - DNA, 25 bp, Homo sapien
acttcggttatttgagtcttgtctc

SEQ ID NO: 5652011 - DNA, 25 bp, Homo sapien
catccctgacttcggttatttgagt

SEQ ID NO: 5652012 - DNA, 25 bp, Homo sapien
tccctgacttcggttatttgagtct

SEQ ID NO: 5652013 - DNA, 25 bp, Homo sapien
tcggttatttgagtcttgtctcttt

SEQ ID NO: 5652014 - DNA, 25 bp, Homo sapien
cctgacttcggttatttgagtcttg

SEQ ID NO: 5652015 - DNA, 25 bp, Homo sapien
tgtcatccctgacttcggttatttg

SEQ ID NO: 5652016 - DNA, 25 bp, Homo sapien
caaataaccgaagtcagggatgaca

SEQ ID NO: 5652017 - DNA, 25 bp, Homo sapien
aaagagacaagactcaaataaccga

SEQ ID NO: 5652018 - DNA, 25 bp, Homo sapien
tcaaataaccgaagtcagggatgac

SEQ ID NO: 5652019 - DNA, 25 bp, Homo sapien
aagactcaaataaccgaagtcaggg

SEQ ID NO: 5652020 - DNA, 25 bp, Homo sapien
actcaaataaccgaagtcagggatg

SEQ ID NO: 5652021 - DNA, 25 bp, Homo sapien
gagacaagactcaaataaccgaagt

SEQ ID NO: 5652022 - DNA, 25 bp, Homo sapien
cagatttcctgtttcttgagtcaat

SEQ ID NO: 5652023 - DNA, 25 bp, Homo sapien
tcttgagtcaattttagtagtttgg

SEQ ID NO: 5652024 - DNA, 25 bp, Homo sapien
taggtctattcagatttcctgtttc

SEQ ID NO: 5652025 - DNA, 25 bp, Homo sapien
gtctctttagttgttataggtctat

SEQ ID NO: 5652026 - DNA, 25 bp, Homo sapien
tgagtcaattttagtagtttggtct

SEQ ID NO: 5652027 - DNA, 25 bp, Homo sapien
tttggtctttctaggaatttgttca

SEQ ID NO: 5652028 - DNA, 25 bp, Homo sapien
tgaacaaattcctagaaagaccaaa

SEQ ID NO: 5652029 - DNA, 25 bp, Homo sapien
ccaaactactaaaattgactcaaga

SEQ ID NO: 5652030 - DNA, 25 bp, Homo sapien
atagacctataacaactaaagagac

SEQ ID NO: 5652031 - DNA, 25 bp, Homo sapien
ttgactcaagaaacaggaaatctga

SEQ ID NO: 5652032 - DNA, 25 bp, Homo sapien
taacaactaaagagactgaattagt

SEQ ID NO: 5652033 - DNA, 25 bp, Homo sapien
gaaacaggaaatctgaatagaccta

SEQ ID NO: 5652034 - DNA, 25 bp, Homo sapien
aagaatttgagaaggattggtgtta

SEQ ID NO: 5652035 - DNA, 25 bp, Homo sapien
tctcctttttctgggaagaatttga

SEQ ID NO: 5652036 - DNA, 25 bp, Homo sapien
ccccacaaaatgagttagaaagtat

SEQ ID NO: 5652037 - DNA, 25 bp, Homo sapien
agttagaaagtattctctcttctcc

SEQ ID NO: 5652038 - DNA, 25 bp, Homo sapien
tagtggccccacaaaatgagttaga

SEQ ID NO: 5652039 - DNA, 25 bp, Homo sapien
tattagggtaatagtggccccacaa

SEQ ID NO: 5652040 - DNA, 25 bp, Homo sapien
aaacaattaacaccaatccttctca

SEQ ID NO: 5652041 - DNA, 25 bp, Homo sapien
ggagaagagagaatactttctaact

SEQ ID NO: 5652042 - DNA, 25 bp, Homo sapien
tcaaattcttcccagaaaaaggaga

SEQ ID NO: 5652043 - DNA, 25 bp, Homo sapien
gaatactttctaactcattttgtgg

SEQ ID NO: 5652044 - DNA, 25 bp, Homo sapien
tctaactcattttgtggggccacta

SEQ ID NO: 5652045 - DNA, 25 bp, Homo sapien
ttgtggggccactattaccctaata

SEQ ID NO: 5652046 - DNA, 25 bp, Homo sapien
cttttaacgtgctattggatttggt

SEQ ID NO: 5652047 - DNA, 25 bp, Homo sapien
tatgttccttttaacgtgctattgg

SEQ ID NO: 5652048 - DNA, 25 bp, Homo sapien
tgttccttttaacgtgctattggat

SEQ ID NO: 5652049 - DNA, 25 bp, Homo sapien
cacatggtcatagtgtatgttcctt

SEQ ID NO: 5652050 - DNA, 25 bp, Homo sapien
ttcacatggtcatagtgtatgttcc

SEQ ID NO: 5652051 - DNA, 25 bp, Homo sapien
ccttttaacgtgctattggatttgg

SEQ ID NO: 5652052 - DNA, 25 bp, Homo sapien
caatagcacgttaaaaggaacatac

SEQ ID NO: 5652053 - DNA, 25 bp, Homo sapien
ggaacatacactatgaccatgtgaa

SEQ ID NO: 5652054 - DNA, 25 bp, Homo sapien
ccaaatccaatagcacgttaaaagg

SEQ ID NO: 5652055 - DNA, 25 bp, Homo sapien
accaaatccaatagcacgttaaaag

SEQ ID NO: 5652056 - DNA, 25 bp, Homo sapien
aaaggaacatacactatgaccatgt

SEQ ID NO: 5652057 - DNA, 25 bp, Homo sapien
tccaatagcacgttaaaaggaacat

SEQ ID NO: 5652058 - DNA, 25 bp, Homo sapien
cattgattgatttgatcatatgggt

SEQ ID NO: 5652059 - DNA, 25 bp, Homo sapien
ttgattgatttgatcatatgggttt

SEQ ID NO: 5652060 - DNA, 25 bp, Homo sapien
gcattgattgatttgatcatatggg

SEQ ID NO: 5652061 - DNA, 25 bp, Homo sapien
acccatatgatcaaatcaatcaatg

SEQ ID NO: 5652062 - DNA, 25 bp, Homo sapien
cccatatgatcaaatcaatcaatgc

SEQ ID NO: 5652063 - DNA, 25 bp, Homo sapien
aaacccatatgatcaaatcaatcaa

SEQ ID NO: 5652064 - DNA, 25 bp, Homo sapien
tgaaaaggtattggattttgtcaaa

SEQ ID NO: 5652065 - DNA, 25 bp, Homo sapien
tcatgaaaaggtattggattttgtc

SEQ ID NO: 5652066 - DNA, 25 bp, Homo sapien
ttgatttgatcatatgggtttttgt

SEQ ID NO: 5652067 - DNA, 25 bp, Homo sapien
cattgattgatttgatcatatgggt

SEQ ID NO: 5652068 - DNA, 25 bp, Homo sapien
ttgattgatttgatcatatgggttt

SEQ ID NO: 5652069 - DNA, 25 bp, Homo sapien
gcattgattgatttgatcatatggg

SEQ ID NO: 5652070 - DNA, 25 bp, Homo sapien
gacaaaatccaataccttttcatga

SEQ ID NO: 5652071 - DNA, 25 bp, Homo sapien
acccatatgatcaaatcaatcaatg

SEQ ID NO: 5652072 - DNA, 25 bp, Homo sapien
cccatatgatcaaatcaatcaatgc

SEQ ID NO: 5652073 - DNA, 25 bp, Homo sapien
tttgacaaaatccaataccttttca

SEQ ID NO: 5652074 - DNA, 25 bp, Homo sapien
acaaaaacccatatgatcaaatcaa

SEQ ID NO: 5652075 - DNA, 25 bp, Homo sapien
aaacccatatgatcaaatcaatcaa

SEQ ID NO: 5652076 - DNA, 25 bp, Homo sapien
aactcagtcctcaggagctggaggt

SEQ ID NO: 5652077 - DNA, 25 bp, Homo sapien
cactacaggttgggcaacagcaaga

SEQ ID NO: 5652078 - DNA, 25 bp, Homo sapien
tgcactacaggttgggcaacagcaa

SEQ ID NO: 5652079 - DNA, 25 bp, Homo sapien
ctacaggttgggcaacagcaagact

SEQ ID NO: 5652080 - DNA, 25 bp, Homo sapien
actcagtcctcaggagctggaggtt

SEQ ID NO: 5652081 - DNA, 25 bp, Homo sapien
gcactacaggttgggcaacagcaag

SEQ ID NO: 5652082 - DNA, 25 bp, Homo sapien
acctccagctcctgaggactgagtt

SEQ ID NO: 5652083 - DNA, 25 bp, Homo sapien
tcttgctgttgcccaacctgtagtg

SEQ ID NO: 5652084 - DNA, 25 bp, Homo sapien
ttgctgttgcccaacctgtagtgca

SEQ ID NO: 5652085 - DNA, 25 bp, Homo sapien
aacctccagctcctgaggactgagt

SEQ ID NO: 5652086 - DNA, 25 bp, Homo sapien
tgctgttgcccaacctgtagtgcag

SEQ ID NO: 5652087 - DNA, 25 bp, Homo sapien
cttgctgttgcccaacctgtagtgc

SEQ ID NO: 5652088 - DNA, 25 bp, Homo sapien
gtgtgtgtcttggctcggtgtctca

SEQ ID NO: 5652089 - DNA, 25 bp, Homo sapien
tgtgtgtcttggctcggtgtctcac

SEQ ID NO: 5652090 - DNA, 25 bp, Homo sapien
gtgagacaccgagccaagacacaca

SEQ ID NO: 5652091 - DNA, 25 bp, Homo sapien
tgagacaccgagccaagacacacac

SEQ ID NO: 5652092 - DNA, 25 bp, Homo sapien
gccaaggcagattacttaaggccag

SEQ ID NO: 5652093 - DNA, 25 bp, Homo sapien
tgtcttggctcggtgtctcacacct

SEQ ID NO: 5652094 - DNA, 25 bp, Homo sapien
gtgtgtcttggctcggtgtctcaca

SEQ ID NO: 5652095 - DNA, 25 bp, Homo sapien
gtcttggctcggtgtctcacacctg

SEQ ID NO: 5652096 - DNA, 25 bp, Homo sapien
tgtgtcttggctcggtgtctcacac

SEQ ID NO: 5652097 - DNA, 25 bp, Homo sapien
tgtgtgtcttggctcggtgtctcac

SEQ ID NO: 5652098 - DNA, 25 bp, Homo sapien
gtgagacaccgagccaagacacaca

SEQ ID NO: 5652099 - DNA, 25 bp, Homo sapien
tgtgagacaccgagccaagacacac

SEQ ID NO: 5652100 - DNA, 25 bp, Homo sapien
gtgtgagacaccgagccaagacaca

SEQ ID NO: 5652101 - DNA, 25 bp, Homo sapien
caggtgtgagacaccgagccaagac

SEQ ID NO: 5652102 - DNA, 25 bp, Homo sapien
ctggccttaagtaatctgccttggc

SEQ ID NO: 5652103 - DNA, 25 bp, Homo sapien
aggtgtgagacaccgagccaagaca

SEQ ID NO: 5652104 - DNA, 25 bp, Homo sapien
caactttgccaaacttattacctgt

SEQ ID NO: 5652105 - DNA, 25 bp, Homo sapien
acaggtaataagtttggcaaagttg

SEQ ID NO: 5652106 - DNA, 25 bp, Homo sapien
gtatgtataagatcatgtcatctgc

SEQ ID NO: 5652107 - DNA, 25 bp, Homo sapien
tgatcttatatcctgcaactttgcc

SEQ ID NO: 5652108 - DNA, 25 bp, Homo sapien
ttgccaaacttattacctgtaacag

SEQ ID NO: 5652109 - DNA, 25 bp, Homo sapien
caactttgccaaacttattacctgt

SEQ ID NO: 5652110 - DNA, 25 bp, Homo sapien
ggttttgtatgtataagatcatgtc

SEQ ID NO: 5652111 - DNA, 25 bp, Homo sapien
tgccaaacttattacctgtaacagg

SEQ ID NO: 5652112 - DNA, 25 bp, Homo sapien
tcttatacatacaaaaccataaaaa

SEQ ID NO: 5652113 - DNA, 25 bp, Homo sapien
ggcaaagttgcaggatataagatca

SEQ ID NO: 5652114 - DNA, 25 bp, Homo sapien
ctgttacaggtaataagtttggcaa

SEQ ID NO: 5652115 - DNA, 25 bp, Homo sapien
gcagatgacatgatcttatacatac

SEQ ID NO: 5652116 - DNA, 25 bp, Homo sapien
acaggtaataagtttggcaaagttg

SEQ ID NO: 5652117 - DNA, 25 bp, Homo sapien
cctgttacaggtaataagtttggca

SEQ ID NO: 5652118 - DNA, 25 bp, Homo sapien
atcttaatgctattctcttccaacc

SEQ ID NO: 5652119 - DNA, 25 bp, Homo sapien
catcttaatgctattctcttccaac

SEQ ID NO: 5652120 - DNA, 25 bp, Homo sapien
ggttggaagagaatagcattaagat

SEQ ID NO: 5652121 - DNA, 25 bp, Homo sapien
gttggaagagaatagcattaagatg

SEQ ID NO: 5652122 - DNA, 25 bp, Homo sapien
tctcttccaacccatgaacacagga

SEQ ID NO: 5652123 - DNA, 25 bp, Homo sapien
catcttaatgctattctcttccaac

SEQ ID NO: 5652124 - DNA, 25 bp, Homo sapien
ggatctttaacttacttcaacaatg

SEQ ID NO: 5652125 - DNA, 25 bp, Homo sapien
aatgctattctcttccaacccatga

SEQ ID NO: 5652126 - DNA, 25 bp, Homo sapien
aacaatgttttgtagctttctgtat

SEQ ID NO: 5652127 - DNA, 25 bp, Homo sapien
tatttggatctttaacttacttcaa

SEQ ID NO: 5652128 - DNA, 25 bp, Homo sapien
ggttggaagagaatagcattaagat

SEQ ID NO: 5652129 - DNA, 25 bp, Homo sapien
cattgttgaagtaagttaaagatcc

SEQ ID NO: 5652130 - DNA, 25 bp, Homo sapien
tccaaataaaaggaaagacatcctg

SEQ ID NO: 5652131 - DNA, 25 bp, Homo sapien
tcatgggttggaagagaatagcatt

SEQ ID NO: 5652132 - DNA, 25 bp, Homo sapien
atacagaaagctacaaaacattgtt

SEQ ID NO: 5652133 - DNA, 25 bp, Homo sapien
tgaagtaagttaaagatccaaataa

SEQ ID NO: 5652134 - DNA, 25 bp, Homo sapien
caggaagtgggagtctttgttcttt

SEQ ID NO: 5652135 - DNA, 25 bp, Homo sapien
aaagaacaaagactcccacttcctg

SEQ ID NO: 5652136 - DNA, 25 bp, Homo sapien
tgaaatcaggaagtgggagtctttg

SEQ ID NO: 5652137 - DNA, 25 bp, Homo sapien
gaaatcaggaagtgggagtctttgt

SEQ ID NO: 5652138 - DNA, 25 bp, Homo sapien
caggaagtgggagtctttgttcttt

SEQ ID NO: 5652139 - DNA, 25 bp, Homo sapien
gattgttttggctattcagcatccc

SEQ ID NO: 5652140 - DNA, 25 bp, Homo sapien
tgggagtctttgttctttttcagga

SEQ ID NO: 5652141 - DNA, 25 bp, Homo sapien
agtgggagtctttgttctttttcag

SEQ ID NO: 5652142 - DNA, 25 bp, Homo sapien
tcctgaaaaagaacaaagactccca

SEQ ID NO: 5652143 - DNA, 25 bp, Homo sapien
gggatgctgaatagccaaaacaatc

SEQ ID NO: 5652144 - DNA, 25 bp, Homo sapien
caaagactcccacttcctgatttca

SEQ ID NO: 5652145 - DNA, 25 bp, Homo sapien
aaagaacaaagactcccacttcctg

SEQ ID NO: 5652146 - DNA, 25 bp, Homo sapien
caatcctgaaaaagaacaaagactc

SEQ ID NO: 5652147 - DNA, 25 bp, Homo sapien
ctgaaaaagaacaaagactcccact

SEQ ID NO: 5652148 - DNA, 25 bp, Homo sapien
caccgcgcccggggttgaatacctg

SEQ ID NO: 5652149 - DNA, 25 bp, Homo sapien
caggtattcaaccccgggcgcggtg

SEQ ID NO: 5652150 - DNA, 25 bp, Homo sapien
caccgcgcccggggttgaatacctg

SEQ ID NO: 5652151 - DNA, 25 bp, Homo sapien
ttgaatacctgttttcatttgatgc

SEQ ID NO: 5652152 - DNA, 25 bp, Homo sapien
gggttgaatacctgttttcatttga

SEQ ID NO: 5652153 - DNA, 25 bp, Homo sapien
gttgaatacctgttttcatttgatg

SEQ ID NO: 5652154 - DNA, 25 bp, Homo sapien
ggttgaatacctgttttcatttgat

SEQ ID NO: 5652155 - DNA, 25 bp, Homo sapien
aagtgctgggattacaggcgtgagc

SEQ ID NO: 5652156 - DNA, 25 bp, Homo sapien
gctcacgcctgtaatcccagcactt

SEQ ID NO: 5652157 - DNA, 25 bp, Homo sapien
catcaaatgaaaacaggtattcaac

SEQ ID NO: 5652158 - DNA, 25 bp, Homo sapien
atcaaatgaaaacaggtattcaacc

SEQ ID NO: 5652159 - DNA, 25 bp, Homo sapien
caggtattcaaccccgggcgcggtg

SEQ ID NO: 5652160 - DNA, 25 bp, Homo sapien
tcaaatgaaaacaggtattcaaccc

SEQ ID NO: 5652161 - DNA, 25 bp, Homo sapien
gcatcaaatgaaaacaggtattcaa

SEQ ID NO: 5652162 - DNA, 25 bp, Homo sapien
ttatgaatagcggctctttacattt

SEQ ID NO: 5652163 - DNA, 25 bp, Homo sapien
ggctgttatgaatagcggctcttta

SEQ ID NO: 5652164 - DNA, 25 bp, Homo sapien
atgaatagcggctctttacatttct

SEQ ID NO: 5652165 - DNA, 25 bp, Homo sapien
tatgaatagcggctctttacatttc

SEQ ID NO: 5652166 - DNA, 25 bp, Homo sapien
tgaatagcggctctttacatttctg

SEQ ID NO: 5652167 - DNA, 25 bp, Homo sapien
aaatgtaaagagccgctattcataa

SEQ ID NO: 5652168 - DNA, 25 bp, Homo sapien
agaaatgtaaagagccgctattcat

SEQ ID NO: 5652169 - DNA, 25 bp, Homo sapien
gaaatgtaaagagccgctattcata

SEQ ID NO: 5652170 - DNA, 25 bp, Homo sapien
taaagagccgctattcataacagcc

SEQ ID NO: 5652171 - DNA, 25 bp, Homo sapien
cagaaatgtaaagagccgctattca

SEQ ID NO: 5652172 - DNA, 25 bp, Homo sapien
ggctgttatgaatagcggctcttta

SEQ ID NO: 5652173 - DNA, 25 bp, Homo sapien
cagcttttgtttgaacacctgtttt

SEQ ID NO: 5652174 - DNA, 25 bp, Homo sapien
tagcggctctttacatttctgtaca

SEQ ID NO: 5652175 - DNA, 25 bp, Homo sapien
gcggctctttacatttctgtacagc

SEQ ID NO: 5652176 - DNA, 25 bp, Homo sapien
tgaatagcggctctttacatttctg

SEQ ID NO: 5652177 - DNA, 25 bp, Homo sapien
tctgtacagcttttgtttgaacacc

SEQ ID NO: 5652178 - DNA, 25 bp, Homo sapien
ccatgtagcaataggtatcagtgct

SEQ ID NO: 5652179 - DNA, 25 bp, Homo sapien
ttatccatgtagcaataggtatcag

SEQ ID NO: 5652180 - DNA, 25 bp, Homo sapien
tccatgtagcaataggtatcagtgc

SEQ ID NO: 5652181 - DNA, 25 bp, Homo sapien
ggttttatccatgtagcaataggta

SEQ ID NO: 5652182 - DNA, 25 bp, Homo sapien
ttttatccatgtagcaataggtatc

SEQ ID NO: 5652183 - DNA, 25 bp, Homo sapien
tatccatgtagcaataggtatcagt

SEQ ID NO: 5652184 - DNA, 25 bp, Homo sapien
agcactgatacctattgctacatgg

SEQ ID NO: 5652185 - DNA, 25 bp, Homo sapien
gcactgatacctattgctacatgga

SEQ ID NO: 5652186 - DNA, 25 bp, Homo sapien
gatacctattgctacatggataaaa

SEQ ID NO: 5652187 - DNA, 25 bp, Homo sapien
cactgatacctattgctacatggat

SEQ ID NO: 5652188 - DNA, 25 bp, Homo sapien
ctgatacctattgctacatggataa

SEQ ID NO: 5652189 - DNA, 25 bp, Homo sapien
tacctattgctacatggataaaacc

SEQ ID NO: 5652190 - DNA, 25 bp, Homo sapien
tctggtaacctctcaccggtttctg

SEQ ID NO: 5652191 - DNA, 25 bp, Homo sapien
ctctggtaacctctcaccggtttct

SEQ ID NO: 5652192 - DNA, 25 bp, Homo sapien
cagaaaccggtgagaggttaccaga

SEQ ID NO: 5652193 - DNA, 25 bp, Homo sapien
agaaaccggtgagaggttaccagag

SEQ ID NO: 5652194 - DNA, 25 bp, Homo sapien
catagaaaaggaaactgtacccatt

SEQ ID NO: 5652195 - DNA, 25 bp, Homo sapien
attaagcagtcattccccagtcctc

SEQ ID NO: 5652196 - DNA, 25 bp, Homo sapien
ttcattacatagaaaaggaaactgt

SEQ ID NO: 5652197 - DNA, 25 bp, Homo sapien
tctggtaacctctcaccggtttctg

SEQ ID NO: 5652198 - DNA, 25 bp, Homo sapien
tacatagaaaaggaaactgtaccca

SEQ ID NO: 5652199 - DNA, 25 bp, Homo sapien
gagtattttcattacatagaaaagg

SEQ ID NO: 5652200 - DNA, 25 bp, Homo sapien
acagtttccttttctatgtaatgaa

SEQ ID NO: 5652201 - DNA, 25 bp, Homo sapien
aatgggtacagtttccttttctatg

SEQ ID NO: 5652202 - DNA, 25 bp, Homo sapien
ccttttctatgtaatgaaaatactc

SEQ ID NO: 5652203 - DNA, 25 bp, Homo sapien
cagaaaccggtgagaggttaccaga

SEQ ID NO: 5652204 - DNA, 25 bp, Homo sapien
gaggactggggaatgactgcttaat

SEQ ID NO: 5652205 - DNA, 25 bp, Homo sapien
agaaaccggtgagaggttaccagag

SEQ ID NO: 5652206 - DNA, 25 bp, Homo sapien
gtatgtaacacaagatttaccactt

SEQ ID NO: 5652207 - DNA, 25 bp, Homo sapien
tatgtaacacaagatttaccacttt

SEQ ID NO: 5652208 - DNA, 25 bp, Homo sapien
atgtaacacaagatttaccacttta

SEQ ID NO: 5652209 - DNA, 25 bp, Homo sapien
tgtaacacaagatttaccactttaa

SEQ ID NO: 5652210 - DNA, 25 bp, Homo sapien
aagtggtaaatcttgtgttacatac

SEQ ID NO: 5652211 - DNA, 25 bp, Homo sapien
ttaaagtggtaaatcttgtgttaca

SEQ ID NO: 5652212 - DNA, 25 bp, Homo sapien
taaagtggtaaatcttgtgttacat

SEQ ID NO: 5652213 - DNA, 25 bp, Homo sapien
aaagtggtaaatcttgtgttacata

SEQ ID NO: 5652214 - DNA, 25 bp, Homo sapien
acacaagatttaccactttaaccat

SEQ ID NO: 5652215 - DNA, 25 bp, Homo sapien
gtatgtaacacaagatttaccactt

SEQ ID NO: 5652216 - DNA, 25 bp, Homo sapien
tatgtaacacaagatttaccacttt

SEQ ID NO: 5652217 - DNA, 25 bp, Homo sapien
atgtaacacaagatttaccacttta

SEQ ID NO: 5652218 - DNA, 25 bp, Homo sapien
cacaagatttaccactttaaccatt

SEQ ID NO: 5652219 - DNA, 25 bp, Homo sapien
tgtaacacaagatttaccactttaa

SEQ ID NO: 5652220 - DNA, 25 bp, Homo sapien
aagtggtaaatcttgtgttacatac

SEQ ID NO: 5652221 - DNA, 25 bp, Homo sapien
atggttaaagtggtaaatcttgtgt

SEQ ID NO: 5652222 - DNA, 25 bp, Homo sapien
ttaaagtggtaaatcttgtgttaca

SEQ ID NO: 5652223 - DNA, 25 bp, Homo sapien
aatggttaaagtggtaaatcttgtg

SEQ ID NO: 5652224 - DNA, 25 bp, Homo sapien
taaagtggtaaatcttgtgttacat

SEQ ID NO: 5652225 - DNA, 25 bp, Homo sapien
aaagtggtaaatcttgtgttacata

SEQ ID NO: 5652226 - DNA, 25 bp, Homo sapien
tgcctcagacctacggagtcagaat

SEQ ID NO: 5652227 - DNA, 25 bp, Homo sapien
aaatatcttcgtacctgaggccttg

SEQ ID NO: 5652228 - DNA, 25 bp, Homo sapien
cattagaattattgcggagatttaa

SEQ ID NO: 5652229 - DNA, 25 bp, Homo sapien
taaaaaatatcttcgtacctgaggc

SEQ ID NO: 5652230 - DNA, 25 bp, Homo sapien
tatcttcgtacctgaggccttgcct

SEQ ID NO: 5652231 - DNA, 25 bp, Homo sapien
acctacggagtcagaatctctaggg

SEQ ID NO: 5652232 - DNA, 25 bp, Homo sapien
aggcaaggcctcaggtacgaagata

SEQ ID NO: 5652233 - DNA, 25 bp, Homo sapien
taaatctccgcaataattctaatgt

SEQ ID NO: 5652234 - DNA, 25 bp, Homo sapien
ccctagagattctgactccgtaggt

SEQ ID NO: 5652235 - DNA, 25 bp, Homo sapien
gcctcaggtacgaagatatttttta

SEQ ID NO: 5652236 - DNA, 25 bp, Homo sapien
caaggcctcaggtacgaagatattt

SEQ ID NO: 5652237 - DNA, 25 bp, Homo sapien
attctgactccgtaggtctgaggca

SEQ ID NO: 5652238 - DNA, 25 bp, Homo sapien
aggccctacacatagaaggctttca

SEQ ID NO: 5652239 - DNA, 25 bp, Homo sapien
gaatgagtgaaggtcaaatgcactg

SEQ ID NO: 5652240 - DNA, 25 bp, Homo sapien
tgaaagccttctatgtgtagggcct

SEQ ID NO: 5652241 - DNA, 25 bp, Homo sapien
cagtgcatttgaccttcactcattc

SEQ ID NO: 5652242 - DNA, 25 bp, Homo sapien
tcaaatgcactggaagaatttatta

SEQ ID NO: 5652243 - DNA, 25 bp, Homo sapien
tgaaggtcaaatgcactggaagaat

SEQ ID NO: 5652244 - DNA, 25 bp, Homo sapien
tattaattaaagtggaggttctcca

SEQ ID NO: 5652245 - DNA, 25 bp, Homo sapien
aggccctacacatagaaggctttca

SEQ ID NO: 5652246 - DNA, 25 bp, Homo sapien
caataaatattaatcaatgaatgag

SEQ ID NO: 5652247 - DNA, 25 bp, Homo sapien
gaatgagtgaaggtcaaatgcactg

SEQ ID NO: 5652248 - DNA, 25 bp, Homo sapien
taattaataaattcttccagtgcat

SEQ ID NO: 5652249 - DNA, 25 bp, Homo sapien
aataaattcttccagtgcatttgac

SEQ ID NO: 5652250 - DNA, 25 bp, Homo sapien
tgaaagccttctatgtgtagggcct

SEQ ID NO: 5652251 - DNA, 25 bp, Homo sapien
cagtgcatttgaccttcactcattc

SEQ ID NO: 5652252 - DNA, 25 bp, Homo sapien
tggagaacctccactttaattaata

SEQ ID NO: 5652253 - DNA, 25 bp, Homo sapien
attcttccagtgcatttgaccttca

SEQ ID NO: 5652254 - DNA, 25 bp, Homo sapien
tttctcccccagtaaaggccatgaa

SEQ ID NO: 5652255 - DNA, 25 bp, Homo sapien
ctttctcccccagtaaaggccatga

SEQ ID NO: 5652256 - DNA, 25 bp, Homo sapien
ttctcccccagtaaaggccatgaag

SEQ ID NO: 5652257 - DNA, 25 bp, Homo sapien
tctcccccagtaaaggccatgaagg

SEQ ID NO: 5652258 - DNA, 25 bp, Homo sapien
ctcccccagtaaaggccatgaagga

SEQ ID NO: 5652259 - DNA, 25 bp, Homo sapien
tctttctcccccagtaaaggccatg

SEQ ID NO: 5652260 - DNA, 25 bp, Homo sapien
tcatggcctttactgggggagaaag

SEQ ID NO: 5652261 - DNA, 25 bp, Homo sapien
catggcctttactgggggagaaaga

SEQ ID NO: 5652262 - DNA, 25 bp, Homo sapien
cttcatggcctttactgggggagaa

SEQ ID NO: 5652263 - DNA, 25 bp, Homo sapien
ttcatggcctttactgggggagaaa

SEQ ID NO: 5652264 - DNA, 25 bp, Homo sapien
tccttcatggcctttactgggggag

SEQ ID NO: 5652265 - DNA, 25 bp, Homo sapien
ccttcatggcctttactgggggaga

SEQ ID NO: 5652266 - DNA, 25 bp, Homo sapien
cattttcatctatattccctagtac

SEQ ID NO: 5652267 - DNA, 25 bp, Homo sapien
tctcccccagtaaaggccatgaagg

SEQ ID NO: 5652268 - DNA, 25 bp, Homo sapien
aaggaattgactcttcattttcatc

SEQ ID NO: 5652269 - DNA, 25 bp, Homo sapien
tctttctcccccagtaaaggccatg

SEQ ID NO: 5652270 - DNA, 25 bp, Homo sapien
cccagtaaaggccatgaaggaattg

SEQ ID NO: 5652271 - DNA, 25 bp, Homo sapien
taaaggccatgaaggaattgactct

SEQ ID NO: 5652272 - DNA, 25 bp, Homo sapien
taaggtactagggaatatagatgaa

SEQ ID NO: 5652273 - DNA, 25 bp, Homo sapien
gaagagtcaattccttcatggcctt

SEQ ID NO: 5652274 - DNA, 25 bp, Homo sapien
catggcctttactgggggagaaaga

SEQ ID NO: 5652275 - DNA, 25 bp, Homo sapien
gatgaaaatgaagagtcaattcctt

SEQ ID NO: 5652276 - DNA, 25 bp, Homo sapien
caattccttcatggcctttactggg

SEQ ID NO: 5652277 - DNA, 25 bp, Homo sapien
tactagggaatatagatgaaaatga

SEQ ID NO: 5652278 - DNA, 25 bp, Homo sapien
gcttgatttagcaacaaggggatgt

SEQ ID NO: 5652279 - DNA, 25 bp, Homo sapien
tgattagctgacacagagtgatgct

SEQ ID NO: 5652280 - DNA, 25 bp, Homo sapien
tcatattaatgattagctgacacag

SEQ ID NO: 5652281 - DNA, 25 bp, Homo sapien
ttaatgattagctgacacagagtga

SEQ ID NO: 5652282 - DNA, 25 bp, Homo sapien
tattaatgattagctgacacagagt

SEQ ID NO: 5652283 - DNA, 25 bp, Homo sapien
tagctgacacagagtgatgcttgat

SEQ ID NO: 5652284 - DNA, 25 bp, Homo sapien
ctgtgtcagctaatcattaatatga

SEQ ID NO: 5652285 - DNA, 25 bp, Homo sapien
caagcatcactctgtgtcagctaat

SEQ ID NO: 5652286 - DNA, 25 bp, Homo sapien
tcactctgtgtcagctaatcattaa

SEQ ID NO: 5652287 - DNA, 25 bp, Homo sapien
atcaagcatcactctgtgtcagcta

SEQ ID NO: 5652288 - DNA, 25 bp, Homo sapien
agcatcactctgtgtcagctaatca

SEQ ID NO: 5652289 - DNA, 25 bp, Homo sapien
acatccccttgttgctaaatcaagc

SEQ ID NO: 5652290 - DNA, 25 bp, Homo sapien
gacaaactgacactttccagtggca

SEQ ID NO: 5652291 - DNA, 25 bp, Homo sapien
ggtgacaaactgacactttccagtg

SEQ ID NO: 5652292 - DNA, 25 bp, Homo sapien
tgtattcagtaaggaggactcgcct

SEQ ID NO: 5652293 - DNA, 25 bp, Homo sapien
aaactgacactttccagtggcactg

SEQ ID NO: 5652294 - DNA, 25 bp, Homo sapien
gtattcagtaaggaggactcgcctc

SEQ ID NO: 5652295 - DNA, 25 bp, Homo sapien
ctgtgtattcagtaaggaggactcg

SEQ ID NO: 5652296 - DNA, 25 bp, Homo sapien
cactggaaagtgtcagtttgtcacc

SEQ ID NO: 5652297 - DNA, 25 bp, Homo sapien
gccactggaaagtgtcagtttgtca

SEQ ID NO: 5652298 - DNA, 25 bp, Homo sapien
cgagtcctccttactgaatacacag

SEQ ID NO: 5652299 - DNA, 25 bp, Homo sapien
ggcgagtcctccttactgaatacac

SEQ ID NO: 5652300 - DNA, 25 bp, Homo sapien
cagtgccactggaaagtgtcagttt

SEQ ID NO: 5652301 - DNA, 25 bp, Homo sapien
gaggcgagtcctccttactgaatac

SEQ ID NO: 5652302 - DNA, 25 bp, Homo sapien
cagctcactgcaatctctgcctcct

SEQ ID NO: 5652303 - DNA, 25 bp, Homo sapien
agctcactgcaatctctgcctcctg

SEQ ID NO: 5652304 - DNA, 25 bp, Homo sapien
ctggagtgcagtggcacgatctcag

SEQ ID NO: 5652305 - DNA, 25 bp, Homo sapien
tctctgcctcctgggttcaagcgat

SEQ ID NO: 5652306 - DNA, 25 bp, Homo sapien
atctctgcctcctgggttcaagcga

SEQ ID NO: 5652307 - DNA, 25 bp, Homo sapien
aatctctgcctcctgggttcaagcg

SEQ ID NO: 5652308 - DNA, 25 bp, Homo sapien
cgcttgaacccaggaggcagagatt

SEQ ID NO: 5652309 - DNA, 25 bp, Homo sapien
atcgcttgaacccaggaggcagaga

SEQ ID NO: 5652310 - DNA, 25 bp, Homo sapien
aggaggcagagattgcagtgagctg

SEQ ID NO: 5652311 - DNA, 25 bp, Homo sapien
ctgagatcgtgccactgcactccag

SEQ ID NO: 5652312 - DNA, 25 bp, Homo sapien
caggaggcagagattgcagtgagct

SEQ ID NO: 5652313 - DNA, 25 bp, Homo sapien
tcgcttgaacccaggaggcagagat

SEQ ID NO: 5652314 - DNA, 25 bp, Homo sapien
tacacagcatgctcacatacatgct

SEQ ID NO: 5652315 - DNA, 25 bp, Homo sapien
tacaatttattctttcaacaacaaa

SEQ ID NO: 5652316 - DNA, 25 bp, Homo sapien
tacacacatacaatttattctttca

SEQ ID NO: 5652317 - DNA, 25 bp, Homo sapien
tatacacagcatgctcacatacatg

SEQ ID NO: 5652318 - DNA, 25 bp, Homo sapien
acagcatgctcacatacatgctcac

SEQ ID NO: 5652319 - DNA, 25 bp, Homo sapien
gtatacacagcatgctcacatacat

SEQ ID NO: 5652320 - DNA, 25 bp, Homo sapien
gcatgtatgtgagcatgctgtgtat

SEQ ID NO: 5652321 - DNA, 25 bp, Homo sapien
gagcatgtatgtgagcatgctgtgt

SEQ ID NO: 5652322 - DNA, 25 bp, Homo sapien
tgaaagaataaattgtatgtgtgta

SEQ ID NO: 5652323 - DNA, 25 bp, Homo sapien
tgtgagcatgtatgtgagcatgctg

SEQ ID NO: 5652324 - DNA, 25 bp, Homo sapien
atgtatgtgagcatgctgtgtatac

SEQ ID NO: 5652325 - DNA, 25 bp, Homo sapien
tgttgttgaaagaataaattgtatg

SEQ ID NO: 5652326 - DNA, 25 bp, Homo sapien
ttccagaatttttcctgcatgcgtg

SEQ ID NO: 5652327 - DNA, 25 bp, Homo sapien
agaatttttcctgcatgcgtgtgtg

SEQ ID NO: 5652328 - DNA, 25 bp, Homo sapien
cagaatttttcctgcatgcgtgtgt

SEQ ID NO: 5652329 - DNA, 25 bp, Homo sapien
ccagaatttttcctgcatgcgtgtg

SEQ ID NO: 5652330 - DNA, 25 bp, Homo sapien
tccagaatttttcctgcatgcgtgt

SEQ ID NO: 5652331 - DNA, 25 bp, Homo sapien
cacacgcatgcaggaaaaattctgg

SEQ ID NO: 5652332 - DNA, 25 bp, Homo sapien
acacacgcatgcaggaaaaattctg

SEQ ID NO: 5652333 - DNA, 25 bp, Homo sapien
cacgcatgcaggaaaaattctggaa

SEQ ID NO: 5652334 - DNA, 25 bp, Homo sapien
cacacacgcatgcaggaaaaattct

SEQ ID NO: 5652335 - DNA, 25 bp, Homo sapien
acacgcatgcaggaaaaattctgga

SEQ ID NO: 5652336 - DNA, 25 bp, Homo sapien
gcaccattgcctccagcccaggcaa

SEQ ID NO: 5652337 - DNA, 25 bp, Homo sapien
aaatacagataagcaaaatgaagaa

SEQ ID NO: 5652338 - DNA, 25 bp, Homo sapien
aaaatacagataagcaaaatgaaga

SEQ ID NO: 5652339 - DNA, 25 bp, Homo sapien
aagaaaatacagataagcaaaatga

SEQ ID NO: 5652340 - DNA, 25 bp, Homo sapien
gaaaatacagataagcaaaatgaag

SEQ ID NO: 5652341 - DNA, 25 bp, Homo sapien
aaagaaaatacagataagcaaaatg

SEQ ID NO: 5652342 - DNA, 25 bp, Homo sapien
cttcattttgcttatctgtattttc

SEQ ID NO: 5652343 - DNA, 25 bp, Homo sapien
cattttgcttatctgtattttcttt

SEQ ID NO: 5652344 - DNA, 25 bp, Homo sapien
tcattttgcttatctgtattttctt

SEQ ID NO: 5652345 - DNA, 25 bp, Homo sapien
ttcttcattttgcttatctgtattt

SEQ ID NO: 5652346 - DNA, 25 bp, Homo sapien
tcttcattttgcttatctgtatttt

SEQ ID NO: 5652347 - DNA, 25 bp, Homo sapien
ttgcctgggctggaggcaatggtgc

SEQ ID NO: 5652348 - DNA, 25 bp, Homo sapien
atggtggtgggtgcctgtaatccca

SEQ ID NO: 5652349 - DNA, 25 bp, Homo sapien
catggtggtgggtgcctgtaatccc

SEQ ID NO: 5652350 - DNA, 25 bp, Homo sapien
ttgcttgaacccatgaggcggaggt

SEQ ID NO: 5652351 - DNA, 25 bp, Homo sapien
gcatggtggtgggtgcctgtaatcc

SEQ ID NO: 5652352 - DNA, 25 bp, Homo sapien
ggcatggtggtgggtgcctgtaatc

SEQ ID NO: 5652353 - DNA, 25 bp, Homo sapien
aggcatggtggtgggtgcctgtaat

SEQ ID NO: 5652354 - DNA, 25 bp, Homo sapien
tgggattacaggcacccaccaccat

SEQ ID NO: 5652355 - DNA, 25 bp, Homo sapien
gattacaggcacccaccaccatgcc

SEQ ID NO: 5652356 - DNA, 25 bp, Homo sapien
acctccgcctcatgggttcaagcaa

SEQ ID NO: 5652357 - DNA, 25 bp, Homo sapien
gggattacaggcacccaccaccatg

SEQ ID NO: 5652358 - DNA, 25 bp, Homo sapien
ggattacaggcacccaccaccatgc

SEQ ID NO: 5652359 - DNA, 25 bp, Homo sapien
attacaggcacccaccaccatgcct

SEQ ID NO: 5652360 - DNA, 25 bp, Homo sapien
tgaggcgggcgcatcacttgaagtc

SEQ ID NO: 5652361 - DNA, 25 bp, Homo sapien
gcgcatcacttgaagtcaggagttt

SEQ ID NO: 5652362 - DNA, 25 bp, Homo sapien
gacttcaagtgatgcgcccgcctca

SEQ ID NO: 5652363 - DNA, 25 bp, Homo sapien
aaactcctgacttcaagtgatgcgc

SEQ ID NO: 5652364 - DNA, 25 bp, Homo sapien
acttacacctgtaactgggcatggt

SEQ ID NO: 5652365 - DNA, 25 bp, Homo sapien
gacttacacctgtaactgggcatgg

SEQ ID NO: 5652366 - DNA, 25 bp, Homo sapien
ccatgcccagttacaggtgtaagtc

SEQ ID NO: 5652367 - DNA, 25 bp, Homo sapien
accatgcccagttacaggtgtaagt

SEQ ID NO: 5652368 - DNA, 25 bp, Homo sapien
acttacacctgtaactgggcatggt

SEQ ID NO: 5652369 - DNA, 25 bp, Homo sapien
acacctgtaactgggcatggtgact

SEQ ID NO: 5652370 - DNA, 25 bp, Homo sapien
cttacacctgtaactgggcatggtg

SEQ ID NO: 5652371 - DNA, 25 bp, Homo sapien
gacttacacctgtaactgggcatgg

SEQ ID NO: 5652372 - DNA, 25 bp, Homo sapien
ttacacctgtaactgggcatggtga

SEQ ID NO: 5652373 - DNA, 25 bp, Homo sapien
tacacctgtaactgggcatggtgac

SEQ ID NO: 5652374 - DNA, 25 bp, Homo sapien
tcaccatgcccagttacaggtgtaa

SEQ ID NO: 5652375 - DNA, 25 bp, Homo sapien
ccatgcccagttacaggtgtaagtc

SEQ ID NO: 5652376 - DNA, 25 bp, Homo sapien
gtcaccatgcccagttacaggtgta

SEQ ID NO: 5652377 - DNA, 25 bp, Homo sapien
caccatgcccagttacaggtgtaag

SEQ ID NO: 5652378 - DNA, 25 bp, Homo sapien
accatgcccagttacaggtgtaagt

SEQ ID NO: 5652379 - DNA, 25 bp, Homo sapien
agtcaccatgcccagttacaggtgt

SEQ ID NO: 5652380 - DNA, 25 bp, Homo sapien
tatatgtgcattaatttattttagc

SEQ ID NO: 5652381 - DNA, 25 bp, Homo sapien
tgtgcattaatttattttagcttag

SEQ ID NO: 5652382 - DNA, 25 bp, Homo sapien
tgcattaatttattttagcttagaa

SEQ ID NO: 5652383 - DNA, 25 bp, Homo sapien
gcattaatttattttagcttagaaa

SEQ ID NO: 5652384 - DNA, 25 bp, Homo sapien
tatgtgcattaatttattttagctt

SEQ ID NO: 5652385 - DNA, 25 bp, Homo sapien
gtgcattaatttattttagcttaga

SEQ ID NO: 5652386 - DNA, 25 bp, Homo sapien
attaatgcacatataaaacaaaaac

SEQ ID NO: 5652387 - DNA, 25 bp, Homo sapien
ttctaagctaaaataaattaatgca

SEQ ID NO: 5652388 - DNA, 25 bp, Homo sapien
gctaaaataaattaatgcacatata

SEQ ID NO: 5652389 - DNA, 25 bp, Homo sapien
tctaagctaaaataaattaatgcac

SEQ ID NO: 5652390 - DNA, 25 bp, Homo sapien
agctaaaataaattaatgcacatat

SEQ ID NO: 5652391 - DNA, 25 bp, Homo sapien
tttctaagctaaaataaattaatgc

SEQ ID NO: 5652392 - DNA, 25 bp, Homo sapien
ttgttacaggaatcacagctctcaa

SEQ ID NO: 5652393 - DNA, 25 bp, Homo sapien
ttggctgattcacttgttacaggaa

SEQ ID NO: 5652394 - DNA, 25 bp, Homo sapien
tcacttgttacaggaatcacagctc

SEQ ID NO: 5652395 - DNA, 25 bp, Homo sapien
gattcacttgttacaggaatcacag

SEQ ID NO: 5652396 - DNA, 25 bp, Homo sapien
cttgttacaggaatcacagctctca

SEQ ID NO: 5652397 - DNA, 25 bp, Homo sapien
ggctgattcacttgttacaggaatc

SEQ ID NO: 5652398 - DNA, 25 bp, Homo sapien
ttcctgtaacaagtgaatcagccaa

SEQ ID NO: 5652399 - DNA, 25 bp, Homo sapien
ttgagagctgtgattcctgtaacaa

SEQ ID NO: 5652400 - DNA, 25 bp, Homo sapien
gattcctgtaacaagtgaatcagcc

SEQ ID NO: 5652401 - DNA, 25 bp, Homo sapien
tgagagctgtgattcctgtaacaag

SEQ ID NO: 5652402 - DNA, 25 bp, Homo sapien
gagctgtgattcctgtaacaagtga

SEQ ID NO: 5652403 - DNA, 25 bp, Homo sapien
gctgtgattcctgtaacaagtgaat

SEQ ID NO: 5652404 - DNA, 25 bp, Homo sapien
tttttttcttactagttatggatgc

SEQ ID NO: 5652405 - DNA, 25 bp, Homo sapien
ttttcttactagttatggatgctat

SEQ ID NO: 5652406 - DNA, 25 bp, Homo sapien
tttttcttactagttatggatgcta

SEQ ID NO: 5652407 - DNA, 25 bp, Homo sapien
ttttttcttactagttatggatgct

SEQ ID NO: 5652408 - DNA, 25 bp, Homo sapien
tatggatgctatgtgatcaaaaaat

SEQ ID NO: 5652409 - DNA, 25 bp, Homo sapien
ttatggatgctatgtgatcaaaaaa

SEQ ID NO: 5652410 - DNA, 25 bp, Homo sapien
ttttttgatcacatagcatccataa

SEQ ID NO: 5652411 - DNA, 25 bp, Homo sapien
attttttgatcacatagcatccata

SEQ ID NO: 5652412 - DNA, 25 bp, Homo sapien
atagcatccataactagtaagaaaa

SEQ ID NO: 5652413 - DNA, 25 bp, Homo sapien
gcatccataactagtaagaaaaaaa

SEQ ID NO: 5652414 - DNA, 25 bp, Homo sapien
agcatccataactagtaagaaaaaa

SEQ ID NO: 5652415 - DNA, 25 bp, Homo sapien
tagcatccataactagtaagaaaaa

SEQ ID NO: 5652416 - DNA, 25 bp, Homo sapien
cgccattttgtacttaattgtgttt

SEQ ID NO: 5652417 - DNA, 25 bp, Homo sapien
ttttcttactagttatggatgctat

SEQ ID NO: 5652418 - DNA, 25 bp, Homo sapien
gacagagcaatgaatgatggcaaat

SEQ ID NO: 5652419 - DNA, 25 bp, Homo sapien
tggatgctatgtgatcaaaaaatac

SEQ ID NO: 5652420 - DNA, 25 bp, Homo sapien
ttcgccattttgtacttaattgtgt

SEQ ID NO: 5652421 - DNA, 25 bp, Homo sapien
ttttttcttactagttatggatgct

SEQ ID NO: 5652422 - DNA, 25 bp, Homo sapien
tatttgccatcattcattgctctgt

SEQ ID NO: 5652423 - DNA, 25 bp, Homo sapien
atagcatccataactagtaagaaaa

SEQ ID NO: 5652424 - DNA, 25 bp, Homo sapien
aaacacaattaagtacaaaatggcg

SEQ ID NO: 5652425 - DNA, 25 bp, Homo sapien
agcatccataactagtaagaaaaaa

SEQ ID NO: 5652426 - DNA, 25 bp, Homo sapien
tagcatccataactagtaagaaaaa

SEQ ID NO: 5652427 - DNA, 25 bp, Homo sapien
acacaattaagtacaaaatggcgaa

SEQ ID NO: 5652428 - DNA, 25 bp, Homo sapien
aagagacgtagaatttgcaaaggac

SEQ ID NO: 5652429 - DNA, 25 bp, Homo sapien
gagaaagagacgtagaatttgcaaa

SEQ ID NO: 5652430 - DNA, 25 bp, Homo sapien
gagacgtagaatttgcaaaggactt

SEQ ID NO: 5652431 - DNA, 25 bp, Homo sapien
agacgtagaatttgcaaaggacttc

SEQ ID NO: 5652432 - DNA, 25 bp, Homo sapien
aaaagagaaagagacgtagaatttg

SEQ ID NO: 5652433 - DNA, 25 bp, Homo sapien
gaaagagacgtagaatttgcaaagg

SEQ ID NO: 5652434 - DNA, 25 bp, Homo sapien
gaagtcctttgcaaattctacgtct

SEQ ID NO: 5652435 - DNA, 25 bp, Homo sapien
cctttgcaaattctacgtctctttc

SEQ ID NO: 5652436 - DNA, 25 bp, Homo sapien
caaattctacgtctctttctctttt

SEQ ID NO: 5652437 - DNA, 25 bp, Homo sapien
aagtcctttgcaaattctacgtctc

SEQ ID NO: 5652438 - DNA, 25 bp, Homo sapien
gtcctttgcaaattctacgtctctt

SEQ ID NO: 5652439 - DNA, 25 bp, Homo sapien
tttgcaaattctacgtctctttctc

SEQ ID NO: 5652440 - DNA, 25 bp, Homo sapien
gaagtcctttgcaaattctacgtct

SEQ ID NO: 5652441 - DNA, 25 bp, Homo sapien
agataccaatgaagtcctttgcaaa

SEQ ID NO: 5652442 - DNA, 25 bp, Homo sapien
caaattctacgtctctttctctttt

SEQ ID NO: 5652443 - DNA, 25 bp, Homo sapien
ggtatttatcattctcattcaggtt

SEQ ID NO: 5652444 - DNA, 25 bp, Homo sapien
tctcttttttcaaagtaggcactca

SEQ ID NO: 5652445 - DNA, 25 bp, Homo sapien
taggcactcaatttggtatttatca

SEQ ID NO: 5652446 - DNA, 25 bp, Homo sapien
taaaaacacaggctcatactctatg

SEQ ID NO: 5652447 - DNA, 25 bp, Homo sapien
tagagacaagggtatatgttgtaaa

SEQ ID NO: 5652448 - DNA, 25 bp, Homo sapien
aaacacaggctcatactctatgttg

SEQ ID NO: 5652449 - DNA, 25 bp, Homo sapien
cacaggctcatactctatgttgttt

SEQ ID NO: 5652450 - DNA, 25 bp, Homo sapien
catactctatgttgtttagagacaa

SEQ ID NO: 5652451 - DNA, 25 bp, Homo sapien
caggctcatactctatgttgtttag

SEQ ID NO: 5652452 - DNA, 25 bp, Homo sapien
ttgtctctaaacaacatagagtatg

SEQ ID NO: 5652453 - DNA, 25 bp, Homo sapien
tctaaacaacatagagtatgagcct

SEQ ID NO: 5652454 - DNA, 25 bp, Homo sapien
taaacaacatagagtatgagcctgt

SEQ ID NO: 5652455 - DNA, 25 bp, Homo sapien
tttacaacatatacccttgtctcta

SEQ ID NO: 5652456 - DNA, 25 bp, Homo sapien
catagagtatgagcctgtgttttta

SEQ ID NO: 5652457 - DNA, 25 bp, Homo sapien
caacatagagtatgagcctgtgttt

SEQ ID NO: 5652458 - DNA, 25 bp, Homo sapien
atggcaatagatttatttctgataa

SEQ ID NO: 5652459 - DNA, 25 bp, Homo sapien
tataatataaagtgggacataatct

SEQ ID NO: 5652460 - DNA, 25 bp, Homo sapien
catggcaatagatttatttctgata

SEQ ID NO: 5652461 - DNA, 25 bp, Homo sapien
gcatggcaatagatttatttctgat

SEQ ID NO: 5652462 - DNA, 25 bp, Homo sapien
ttatcagaaataaatctattgccat

SEQ ID NO: 5652463 - DNA, 25 bp, Homo sapien
agattatgtcccactttatattata

SEQ ID NO: 5652464 - DNA, 25 bp, Homo sapien
tatcagaaataaatctattgccatg

SEQ ID NO: 5652465 - DNA, 25 bp, Homo sapien
atcagaaataaatctattgccatgc

SEQ ID NO: 5652466 - DNA, 25 bp, Homo sapien
tataatataaagtgggacataatct

SEQ ID NO: 5652467 - DNA, 25 bp, Homo sapien
gggacataatctcccctcagaaaaa

SEQ ID NO: 5652468 - DNA, 25 bp, Homo sapien
tataaagtgggacataatctcccct

SEQ ID NO: 5652469 - DNA, 25 bp, Homo sapien
aaagtgggacataatctcccctcag

SEQ ID NO: 5652470 - DNA, 25 bp, Homo sapien
taatctcccctcagaaaaataatat

SEQ ID NO: 5652471 - DNA, 25 bp, Homo sapien
gcatggcaatagatttatttctgat

SEQ ID NO: 5652472 - DNA, 25 bp, Homo sapien
agattatgtcccactttatattata

SEQ ID NO: 5652473 - DNA, 25 bp, Homo sapien
gggagattatgtcccactttatatt

SEQ ID NO: 5652474 - DNA, 25 bp, Homo sapien
ttttatcagaaataaatctattgcc

SEQ ID NO: 5652475 - DNA, 25 bp, Homo sapien
tatcagaaataaatctattgccatg

SEQ ID NO: 5652476 - DNA, 25 bp, Homo sapien
tagctcaatattatttttctgaggg

SEQ ID NO: 5652477 - DNA, 25 bp, Homo sapien
tttttctgaggggagattatgtccc

SEQ ID NO: 5652478 - DNA, 25 bp, Homo sapien
gtgttaaagcacttgaaggaacgat

SEQ ID NO: 5652479 - DNA, 25 bp, Homo sapien
aacgatttccgcctaatagtcagca

SEQ ID NO: 5652480 - DNA, 25 bp, Homo sapien
atttccgcctaatagtcagcacgcc

SEQ ID NO: 5652481 - DNA, 25 bp, Homo sapien
ttaaagcacttgaaggaacgatttc

SEQ ID NO: 5652482 - DNA, 25 bp, Homo sapien
tccgcctaatagtcagcacgcccag

SEQ ID NO: 5652483 - DNA, 25 bp, Homo sapien
gatttccgcctaatagtcagcacgc

SEQ ID NO: 5652484 - DNA, 25 bp, Homo sapien
cgtgctgactattaggcggaaatcg

SEQ ID NO: 5652485 - DNA, 25 bp, Homo sapien
ggcgtgctgactattaggcggaaat

SEQ ID NO: 5652486 - DNA, 25 bp, Homo sapien
gaaatcgttccttcaagtgctttaa

SEQ ID NO: 5652487 - DNA, 25 bp, Homo sapien
ctgggcgtgctgactattaggcgga

SEQ ID NO: 5652488 - DNA, 25 bp, Homo sapien
tcgttccttcaagtgctttaacact

SEQ ID NO: 5652489 - DNA, 25 bp, Homo sapien
tgctgactattaggcggaaatcgtt

SEQ ID NO: 5652490 - DNA, 25 bp, Homo sapien
cgtgctgactattaggcggaaatcg

SEQ ID NO: 5652491 - DNA, 25 bp, Homo sapien
tgcagcaaaacagccctaaagtaga

SEQ ID NO: 5652492 - DNA, 25 bp, Homo sapien
aaggcagattacctgggcgtgctga

SEQ ID NO: 5652493 - DNA, 25 bp, Homo sapien
ggcggaaatcgttccttcaagtgct

SEQ ID NO: 5652494 - DNA, 25 bp, Homo sapien
aaaaggcagattacctgggcgtgct

SEQ ID NO: 5652495 - DNA, 25 bp, Homo sapien
ggcagattacctgggcgtgctgact

SEQ ID NO: 5652496 - DNA, 25 bp, Homo sapien
gaacgggaacaggtgaatctgtcac

SEQ ID NO: 5652497 - DNA, 25 bp, Homo sapien
caacacaggttatgctgatcaaatt

SEQ ID NO: 5652498 - DNA, 25 bp, Homo sapien
ccatctgtgcatggtacagcaggtg

SEQ ID NO: 5652499 - DNA, 25 bp, Homo sapien
tacagcaggtgtggattcaacacag

SEQ ID NO: 5652500 - DNA, 25 bp, Homo sapien
ggttgctgcatcaagaacgggaaca

SEQ ID NO: 5652501 - DNA, 25 bp, Homo sapien
tgtggattcaacacaggttatgctg

SEQ ID NO: 5652502 - DNA, 25 bp, Homo sapien
tgtgttgaatccacacctgctgtac

SEQ ID NO: 5652503 - DNA, 25 bp, Homo sapien
caatttgatcagcataacctgtgtt

SEQ ID NO: 5652504 - DNA, 25 bp, Homo sapien
tgttcccgttcttgatgcagcaacc

SEQ ID NO: 5652505 - DNA, 25 bp, Homo sapien
gtgacagattcacctgttcccgttc

SEQ ID NO: 5652506 - DNA, 25 bp, Homo sapien
cagcataacctgtgttgaatccaca

SEQ ID NO: 5652507 - DNA, 25 bp, Homo sapien
tgctgtaccatgcacagatggtgac

SEQ ID NO: 5652508 - DNA, 25 bp, Homo sapien
aatggcccttagaaatttgagtctc

SEQ ID NO: 5652509 - DNA, 25 bp, Homo sapien
taatggcccttagaaatttgagtct

SEQ ID NO: 5652510 - DNA, 25 bp, Homo sapien
tagcctttaaataatggcccttaga

SEQ ID NO: 5652511 - DNA, 25 bp, Homo sapien
ataatggcccttagaaatttgagtc

SEQ ID NO: 5652512 - DNA, 25 bp, Homo sapien
agactcaaatttctaagggccatta

SEQ ID NO: 5652513 - DNA, 25 bp, Homo sapien
gactcaaatttctaagggccattat

SEQ ID NO: 5652514 - DNA, 25 bp, Homo sapien
tctaagggccattatttaaaggcta

SEQ ID NO: 5652515 - DNA, 25 bp, Homo sapien
gagactcaaatttctaagggccatt

SEQ ID NO: 5652516 - DNA, 25 bp, Homo sapien
gcgttagccaccatgcctggtctta

SEQ ID NO: 5652517 - DNA, 25 bp, Homo sapien
gttagccaccatgcctggtcttaaa

SEQ ID NO: 5652518 - DNA, 25 bp, Homo sapien
aggcgttagccaccatgcctggtct

SEQ ID NO: 5652519 - DNA, 25 bp, Homo sapien
gccaccatgcctggtcttaaaatat

SEQ ID NO: 5652520 - DNA, 25 bp, Homo sapien
catgcctggtcttaaaatattttta

SEQ ID NO: 5652521 - DNA, 25 bp, Homo sapien
ggcgttagccaccatgcctggtctt

SEQ ID NO: 5652522 - DNA, 25 bp, Homo sapien
agaccaggcatggtggctaacgcct

SEQ ID NO: 5652523 - DNA, 25 bp, Homo sapien
aagaccaggcatggtggctaacgcc

SEQ ID NO: 5652524 - DNA, 25 bp, Homo sapien
tttaagaccaggcatggtggctaac

SEQ ID NO: 5652525 - DNA, 25 bp, Homo sapien
taaaaatattttaagaccaggcatg

SEQ ID NO: 5652526 - DNA, 25 bp, Homo sapien
tattttaagaccaggcatggtggct

SEQ ID NO: 5652527 - DNA, 25 bp, Homo sapien
taagaccaggcatggtggctaacgc

SEQ ID NO: 5652528 - DNA, 25 bp, Homo sapien
agctaattttgtattattagcaaag

SEQ ID NO: 5652529 - DNA, 25 bp, Homo sapien
attttgtattattagcaaagatggg

SEQ ID NO: 5652530 - DNA, 25 bp, Homo sapien
ttattagcaaagatggggtttctcc

SEQ ID NO: 5652531 - DNA, 25 bp, Homo sapien
gctaattttgtattattagcaaaga

SEQ ID NO: 5652532 - DNA, 25 bp, Homo sapien
tattattagcaaagatggggtttct

SEQ ID NO: 5652533 - DNA, 25 bp, Homo sapien
aattttgtattattagcaaagatgg

SEQ ID NO: 5652534 - DNA, 25 bp, Homo sapien
ccccatctttgctaataatacaaaa

SEQ ID NO: 5652535 - DNA, 25 bp, Homo sapien
ctttgctaataatacaaaattagct

SEQ ID NO: 5652536 - DNA, 25 bp, Homo sapien
aaccccatctttgctaataatacaa

SEQ ID NO: 5652537 - DNA, 25 bp, Homo sapien
accccatctttgctaataatacaaa

SEQ ID NO: 5652538 - DNA, 25 bp, Homo sapien
ggagaaaccccatctttgctaataa

SEQ ID NO: 5652539 - DNA, 25 bp, Homo sapien
agaaaccccatctttgctaataata

SEQ ID NO: 5652540 - DNA, 25 bp, Homo sapien
gatctcagtgcaccacaacctctgc

SEQ ID NO: 5652541 - DNA, 25 bp, Homo sapien
cttgttgcctaggctggagtgcaat

SEQ ID NO: 5652542 - DNA, 25 bp, Homo sapien
gcacgatctcagtgcaccacaacct

SEQ ID NO: 5652543 - DNA, 25 bp, Homo sapien
cgatctcagtgcaccacaacctctg

SEQ ID NO: 5652544 - DNA, 25 bp, Homo sapien
ggcacgatctcagtgcaccacaacc

SEQ ID NO: 5652545 - DNA, 25 bp, Homo sapien
ttttgttcttgttgcctaggctgga

SEQ ID NO: 5652546 - DNA, 25 bp, Homo sapien
attgcactccagcctaggcaacaag

SEQ ID NO: 5652547 - DNA, 25 bp, Homo sapien
gcagaggttgtggtgcactgagatc

SEQ ID NO: 5652548 - DNA, 25 bp, Homo sapien
tccagcctaggcaacaagaacaaaa

SEQ ID NO: 5652549 - DNA, 25 bp, Homo sapien
cagaggttgtggtgcactgagatcg

SEQ ID NO: 5652550 - DNA, 25 bp, Homo sapien
aggttgtggtgcactgagatcgtgc

SEQ ID NO: 5652551 - DNA, 25 bp, Homo sapien
ggttgtggtgcactgagatcgtgcc

SEQ ID NO: 5652552 - DNA, 25 bp, Homo sapien
gaatggatatgtcttacgtgtgtaa

SEQ ID NO: 5652553 - DNA, 25 bp, Homo sapien
taagtgtttttctagaatggatatg

SEQ ID NO: 5652554 - DNA, 25 bp, Homo sapien
aatggatatgtcttacgtgtgtaat

SEQ ID NO: 5652555 - DNA, 25 bp, Homo sapien
ttacacacgtaagacatatccattc

SEQ ID NO: 5652556 - DNA, 25 bp, Homo sapien
attacacacgtaagacatatccatt

SEQ ID NO: 5652557 - DNA, 25 bp, Homo sapien
catatccattctagaaaaacactta

SEQ ID NO: 5652558 - DNA, 25 bp, Homo sapien
ggatatgtcttacgtgtgtaattaa

SEQ ID NO: 5652559 - DNA, 25 bp, Homo sapien
gaatggatatgtcttacgtgtgtaa

SEQ ID NO: 5652560 - DNA, 25 bp, Homo sapien
gatatgtcttacgtgtgtaattaaa

SEQ ID NO: 5652561 - DNA, 25 bp, Homo sapien
taagtgtttttctagaatggatatg

SEQ ID NO: 5652562 - DNA, 25 bp, Homo sapien
tatgtcttacgtgtgtaattaaaaa

SEQ ID NO: 5652563 - DNA, 25 bp, Homo sapien
aatggatatgtcttacgtgtgtaat

SEQ ID NO: 5652564 - DNA, 25 bp, Homo sapien
ttacacacgtaagacatatccattc

SEQ ID NO: 5652565 - DNA, 25 bp, Homo sapien
ttaattacacacgtaagacatatcc

SEQ ID NO: 5652566 - DNA, 25 bp, Homo sapien
attacacacgtaagacatatccatt

SEQ ID NO: 5652567 - DNA, 25 bp, Homo sapien
catatccattctagaaaaacactta

SEQ ID NO: 5652568 - DNA, 25 bp, Homo sapien
tccattctagaaaaacacttacaaa

SEQ ID NO: 5652569 - DNA, 25 bp, Homo sapien
tttttaattacacacgtaagacata

SEQ ID NO: 5652570 - DNA, 25 bp, Homo sapien
caaaccattgctgcattccagcctg

SEQ ID NO: 5652571 - DNA, 25 bp, Homo sapien
caggctggaatgcagcaatggtttg

SEQ ID NO: 5652572 - DNA, 25 bp, Homo sapien
aagttgaggctgcattgagctgaga

SEQ ID NO: 5652573 - DNA, 25 bp, Homo sapien
attgattgagcctaggaagttgagg

SEQ ID NO: 5652574 - DNA, 25 bp, Homo sapien
gattgattgagcctaggaagttgag

SEQ ID NO: 5652575 - DNA, 25 bp, Homo sapien
ttgattgagcctaggaagttgaggc

SEQ ID NO: 5652576 - DNA, 25 bp, Homo sapien
gattgagcctaggaagttgaggctg

SEQ ID NO: 5652577 - DNA, 25 bp, Homo sapien
tgattgagcctaggaagttgaggct

SEQ ID NO: 5652578 - DNA, 25 bp, Homo sapien
gcctcaacttcctaggctcaatcaa

SEQ ID NO: 5652579 - DNA, 25 bp, Homo sapien
tctcagctcaatgcagcctcaactt

SEQ ID NO: 5652580 - DNA, 25 bp, Homo sapien
agcctcaacttcctaggctcaatca

SEQ ID NO: 5652581 - DNA, 25 bp, Homo sapien
ctcaacttcctaggctcaatcaatc

SEQ ID NO: 5652582 - DNA, 25 bp, Homo sapien
cagcctcaacttcctaggctcaatc

SEQ ID NO: 5652583 - DNA, 25 bp, Homo sapien
cctcaacttcctaggctcaatcaat

SEQ ID NO: 5652584 - DNA, 25 bp, Homo sapien
cctggtgacagagtgagactctgtc

SEQ ID NO: 5652585 - DNA, 25 bp, Homo sapien
gcctggtgacagagtgagactctgt

SEQ ID NO: 5652586 - DNA, 25 bp, Homo sapien
agcctggtgacagagtgagactctg

SEQ ID NO: 5652587 - DNA, 25 bp, Homo sapien
tgtctcagaaaaaaaaaagcaacaa

SEQ ID NO: 5652588 - DNA, 25 bp, Homo sapien
ctgtctcagaaaaaaaaaagcaaca

SEQ ID NO: 5652589 - DNA, 25 bp, Homo sapien
tctcagaaaaaaaaaagcaacaaca

SEQ ID NO: 5652590 - DNA, 25 bp, Homo sapien
acagagtctcactctgtcaccaggc

SEQ ID NO: 5652591 - DNA, 25 bp, Homo sapien
cagagtctcactctgtcaccaggct

SEQ ID NO: 5652592 - DNA, 25 bp, Homo sapien
tgttgcttttttttttctgagacag

SEQ ID NO: 5652593 - DNA, 25 bp, Homo sapien
gacagagtctcactctgtcaccagg

SEQ ID NO: 5652594 - DNA, 25 bp, Homo sapien
tgttgttgcttttttttttctgaga

SEQ ID NO: 5652595 - DNA, 25 bp, Homo sapien
ttgttgcttttttttttctgagaca

SEQ ID NO: 5652596 - DNA, 25 bp, Homo sapien
ggtgacacagtgagactccctctca

SEQ ID NO: 5652597 - DNA, 25 bp, Homo sapien
tgagagggagtctcactgtgtcacc

SEQ ID NO: 5652598 - DNA, 25 bp, Homo sapien
agattattttcatgtaccataattg

SEQ ID NO: 5652599 - DNA, 25 bp, Homo sapien
caattatggtacatgaaaataatct

SEQ ID NO: 5652600 - DNA, 25 bp, Homo sapien
gattattttcatgtaccataattga

SEQ ID NO: 5652601 - DNA, 25 bp, Homo sapien
accagattattttcatgtaccataa

SEQ ID NO: 5652602 - DNA, 25 bp, Homo sapien
accaaaatatcaaaaaccagattat

SEQ ID NO: 5652603 - DNA, 25 bp, Homo sapien
ctctatgcaccaagatattcattgt

SEQ ID NO: 5652604 - DNA, 25 bp, Homo sapien
tatgcaccaagatattcattgtagc

SEQ ID NO: 5652605 - DNA, 25 bp, Homo sapien
gcaccaagatattcattgtagcatt

SEQ ID NO: 5652606 - DNA, 25 bp, Homo sapien
gctacaatgaatatcttggtgcata

SEQ ID NO: 5652607 - DNA, 25 bp, Homo sapien
caattatggtacatgaaaataatct

SEQ ID NO: 5652608 - DNA, 25 bp, Homo sapien
acaatgaatatcttggtgcatagag

SEQ ID NO: 5652609 - DNA, 25 bp, Homo sapien
aataatctggtttttgatattttgg

SEQ ID NO: 5652610 - DNA, 25 bp, Homo sapien
aatgctacaatgaatatcttggtgc

SEQ ID NO: 5652611 - DNA, 25 bp, Homo sapien
ttaaaaaatgctacaatgaatatct

SEQ ID NO: 5652612 - DNA, 25 bp, Homo sapien
cacctgccactgcgcccggcttatt

SEQ ID NO: 5652613 - DNA, 25 bp, Homo sapien
cctgccactgcgcccggcttatttt

SEQ ID NO: 5652614 - DNA, 25 bp, Homo sapien
acctgccactgcgcccggcttattt

SEQ ID NO: 5652615 - DNA, 25 bp, Homo sapien
cactgcgcccggcttatttttttgt

SEQ ID NO: 5652616 - DNA, 25 bp, Homo sapien
gcacctgccactgcgcccggcttat

SEQ ID NO: 5652617 - DNA, 25 bp, Homo sapien
tgccactgcgcccggcttatttttt

SEQ ID NO: 5652618 - DNA, 25 bp, Homo sapien
aataagccgggcgcagtggcaggtg

SEQ ID NO: 5652619 - DNA, 25 bp, Homo sapien
ataagccgggcgcagtggcaggtgc

SEQ ID NO: 5652620 - DNA, 25 bp, Homo sapien
aaaataagccgggcgcagtggcagg

SEQ ID NO: 5652621 - DNA, 25 bp, Homo sapien
aaataagccgggcgcagtggcaggt

SEQ ID NO: 5652622 - DNA, 25 bp, Homo sapien
aaaaaataagccgggcgcagtggca

SEQ ID NO: 5652623 - DNA, 25 bp, Homo sapien
acaaaaaaataagccgggcgcagtg

SEQ ID NO: 5652624 - DNA, 25 bp, Homo sapien
tacttcagtgttagaggaagaaaag

SEQ ID NO: 5652625 - DNA, 25 bp, Homo sapien
gcacagagttctggtatgaaagtac

SEQ ID NO: 5652626 - DNA, 25 bp, Homo sapien
tagggtaatttagtaatatatctca

SEQ ID NO: 5652627 - DNA, 25 bp, Homo sapien
agggtaatttagtaatatatctcaa

SEQ ID NO: 5652628 - DNA, 25 bp, Homo sapien
agatacttcagtgttagaggaagaa

SEQ ID NO: 5652629 - DNA, 25 bp, Homo sapien
gatacttcagtgttagaggaagaaa

SEQ ID NO: 5652630 - DNA, 25 bp, Homo sapien
gagatatattactaaattaccctat

SEQ ID NO: 5652631 - DNA, 25 bp, Homo sapien
tttcttcctctaacactgaagtatc

SEQ ID NO: 5652632 - DNA, 25 bp, Homo sapien
cttttcttcctctaacactgaagta

SEQ ID NO: 5652633 - DNA, 25 bp, Homo sapien
ttcttcctctaacactgaagtatct

SEQ ID NO: 5652634 - DNA, 25 bp, Homo sapien
gtactttcataccagaactctgtgc

SEQ ID NO: 5652635 - DNA, 25 bp, Homo sapien
ttgagatatattactaaattaccct

SEQ ID NO: 5652636 - DNA, 25 bp, Homo sapien
gatggtgcacgttgttttgtggtat

SEQ ID NO: 5652637 - DNA, 25 bp, Homo sapien
ttgttttgtggtatgagagtgattg

SEQ ID NO: 5652638 - DNA, 25 bp, Homo sapien
tgttttgtggtatgagagtgattgg

SEQ ID NO: 5652639 - DNA, 25 bp, Homo sapien
tggtatgagagtgattggggtttcg

SEQ ID NO: 5652640 - DNA, 25 bp, Homo sapien
gtatgagagtgattggggtttcggt

SEQ ID NO: 5652641 - DNA, 25 bp, Homo sapien
gttttgtggtatgagagtgattggg

SEQ ID NO: 5652642 - DNA, 25 bp, Homo sapien
accgaaaccccaatcactctcatac

SEQ ID NO: 5652643 - DNA, 25 bp, Homo sapien
ccccaatcactctcataccacaaaa

SEQ ID NO: 5652644 - DNA, 25 bp, Homo sapien
caatcactctcataccacaaaacaa

SEQ ID NO: 5652645 - DNA, 25 bp, Homo sapien
gaaaccccaatcactctcataccac

SEQ ID NO: 5652646 - DNA, 25 bp, Homo sapien
ccgaaaccccaatcactctcatacc

SEQ ID NO: 5652647 - DNA, 25 bp, Homo sapien
ataccacaaaacaacgtgcaccatc

SEQ ID NO: 5652648 - DNA, 25 bp, Homo sapien
ttctttctcttgtatctgcttctga

SEQ ID NO: 5652649 - DNA, 25 bp, Homo sapien
gcttctgaaactttccttcaagtaa

SEQ ID NO: 5652650 - DNA, 25 bp, Homo sapien
ccttcaagtaaattggatggtgcac

SEQ ID NO: 5652651 - DNA, 25 bp, Homo sapien
gatggtgcacgttgttttgtggtat

SEQ ID NO: 5652652 - DNA, 25 bp, Homo sapien
ttgttttgtggtatgagagtgattg

SEQ ID NO: 5652653 - DNA, 25 bp, Homo sapien
gtatctgcttctgaaactttccttc

SEQ ID NO: 5652654 - DNA, 25 bp, Homo sapien
gaagcagatacaagagaaagaaaag

SEQ ID NO: 5652655 - DNA, 25 bp, Homo sapien
tacttgaaggaaagtttcagaagca

SEQ ID NO: 5652656 - DNA, 25 bp, Homo sapien
caatcactctcataccacaaaacaa

SEQ ID NO: 5652657 - DNA, 25 bp, Homo sapien
gtgcaccatccaatttacttgaagg

SEQ ID NO: 5652658 - DNA, 25 bp, Homo sapien
gaaggaaagtttcagaagcagatac

SEQ ID NO: 5652659 - DNA, 25 bp, Homo sapien
ataccacaaaacaacgtgcaccatc

SEQ ID NO: 5652660 - DNA, 25 bp, Homo sapien
aaagtaaccatgctctttgggtcta

SEQ ID NO: 5652661 - DNA, 25 bp, Homo sapien
ctaaaaagtaaccatgctctttggg

SEQ ID NO: 5652662 - DNA, 25 bp, Homo sapien
taattccatcttcatctccctttca

SEQ ID NO: 5652663 - DNA, 25 bp, Homo sapien
agaccctaaaaagtaaccatgctct

SEQ ID NO: 5652664 - DNA, 25 bp, Homo sapien
catgctctttgggtctatattaata

SEQ ID NO: 5652665 - DNA, 25 bp, Homo sapien
tattaataattccatcttcatctcc

SEQ ID NO: 5652666 - DNA, 25 bp, Homo sapien
ttattaatatagacccaaagagcat

SEQ ID NO: 5652667 - DNA, 25 bp, Homo sapien
agagcatggttactttttagggtct

SEQ ID NO: 5652668 - DNA, 25 bp, Homo sapien
tatagacccaaagagcatggttact

SEQ ID NO: 5652669 - DNA, 25 bp, Homo sapien
ttaatatagacccaaagagcatggt

SEQ ID NO: 5652670 - DNA, 25 bp, Homo sapien
tgaaagggagatgaagatggaatta

SEQ ID NO: 5652671 - DNA, 25 bp, Homo sapien
gatggaattattaatatagacccaa

SEQ ID NO: 5652672 - DNA, 25 bp, Homo sapien
tgggattaccacacccagcgtattt

SEQ ID NO: 5652673 - DNA, 25 bp, Homo sapien
aaatacgctgggtgtggtaatccca

SEQ ID NO: 5652674 - DNA, 25 bp, Homo sapien
tgggattaccacacccagcgtattt

SEQ ID NO: 5652675 - DNA, 25 bp, Homo sapien
gtgttgggattaccacacccagcgt

SEQ ID NO: 5652676 - DNA, 25 bp, Homo sapien
cagtgttgggattaccacacccagc

SEQ ID NO: 5652677 - DNA, 25 bp, Homo sapien
agtgttgggattaccacacccagcg

SEQ ID NO: 5652678 - DNA, 25 bp, Homo sapien
tgttgggattaccacacccagcgta

SEQ ID NO: 5652679 - DNA, 25 bp, Homo sapien
tcccacttcagtgtcacagtgttgg

SEQ ID NO: 5652680 - DNA, 25 bp, Homo sapien
ccaacactgtgacactgaagtggga

SEQ ID NO: 5652681 - DNA, 25 bp, Homo sapien
tacgctgggtgtggtaatcccaaca

SEQ ID NO: 5652682 - DNA, 25 bp, Homo sapien
acgctgggtgtggtaatcccaacac

SEQ ID NO: 5652683 - DNA, 25 bp, Homo sapien
aaatacgctgggtgtggtaatccca

SEQ ID NO: 5652684 - DNA, 25 bp, Homo sapien
gctgggtgtggtaatcccaacactg

SEQ ID NO: 5652685 - DNA, 25 bp, Homo sapien
cgctgggtgtggtaatcccaacact

SEQ ID NO: 5652686 - DNA, 25 bp, Homo sapien
gtgtgtgccactactcccagctaat

SEQ ID NO: 5652687 - DNA, 25 bp, Homo sapien
atggggtcttaccatgttggccaag

SEQ ID NO: 5652688 - DNA, 25 bp, Homo sapien
ttatgttttttgtagagatggggtc

SEQ ID NO: 5652689 - DNA, 25 bp, Homo sapien
cccaggtagctgggattacaggtgt

SEQ ID NO: 5652690 - DNA, 25 bp, Homo sapien
tgtgtgccactactcccagctaatt

SEQ ID NO: 5652691 - DNA, 25 bp, Homo sapien
tgccactactcccagctaattttta

SEQ ID NO: 5652692 - DNA, 25 bp, Homo sapien
cttggccaacatggtaagaccccat

SEQ ID NO: 5652693 - DNA, 25 bp, Homo sapien
attagctgggagtagtggcacacac

SEQ ID NO: 5652694 - DNA, 25 bp, Homo sapien
gaccccatctctacaaaaaacataa

SEQ ID NO: 5652695 - DNA, 25 bp, Homo sapien
aattagctgggagtagtggcacaca

SEQ ID NO: 5652696 - DNA, 25 bp, Homo sapien
taaaaattagctgggagtagtggca

SEQ ID NO: 5652697 - DNA, 25 bp, Homo sapien
acacctgtaatcccagctacctggg

SEQ ID NO: 5652698 - DNA, 25 bp, Homo sapien
ataggtgtccaccaccatgcccagc

SEQ ID NO: 5652699 - DNA, 25 bp, Homo sapien
ggtgtccaccaccatgcccagctaa

SEQ ID NO: 5652700 - DNA, 25 bp, Homo sapien
aggtgtccaccaccatgcccagcta

SEQ ID NO: 5652701 - DNA, 25 bp, Homo sapien
taggtgtccaccaccatgcccagct

SEQ ID NO: 5652702 - DNA, 25 bp, Homo sapien
tataggtgtccaccaccatgcccag

SEQ ID NO: 5652703 - DNA, 25 bp, Homo sapien
ctataggtgtccaccaccatgccca

SEQ ID NO: 5652704 - DNA, 25 bp, Homo sapien
tagctgggcatggtggtggacacct

SEQ ID NO: 5652705 - DNA, 25 bp, Homo sapien
agctgggcatggtggtggacaccta

SEQ ID NO: 5652706 - DNA, 25 bp, Homo sapien
ctgggcatggtggtggacacctata

SEQ ID NO: 5652707 - DNA, 25 bp, Homo sapien
ttagctgggcatggtggtggacacc

SEQ ID NO: 5652708 - DNA, 25 bp, Homo sapien
gctgggcatggtggtggacacctat

SEQ ID NO: 5652709 - DNA, 25 bp, Homo sapien
tgggcatggtggtggacacctatag

SEQ ID NO: 5652710 - DNA, 25 bp, Homo sapien
tgggccctgactgatgggttccacg

SEQ ID NO: 5652711 - DNA, 25 bp, Homo sapien
gatgggccctgactgatgggttcca

SEQ ID NO: 5652712 - DNA, 25 bp, Homo sapien
ggcgcctttgccagctggtttcttc

SEQ ID NO: 5652713 - DNA, 25 bp, Homo sapien
cggcgcctttgccagctggtttctt

SEQ ID NO: 5652714 - DNA, 25 bp, Homo sapien
atgggccctgactgatgggttccac

SEQ ID NO: 5652715 - DNA, 25 bp, Homo sapien
tgatgggttccacggcgcctttgcc

SEQ ID NO: 5652716 - DNA, 25 bp, Homo sapien
aagaaaccagctggcaaaggcgccg

SEQ ID NO: 5652717 - DNA, 25 bp, Homo sapien
ggcaaaggcgccgtggaacccatca

SEQ ID NO: 5652718 - DNA, 25 bp, Homo sapien
tggaacccatcagtcagggcccatc

SEQ ID NO: 5652719 - DNA, 25 bp, Homo sapien
gaagaaaccagctggcaaaggcgcc

SEQ ID NO: 5652720 - DNA, 25 bp, Homo sapien
gtggaacccatcagtcagggcccat

SEQ ID NO: 5652721 - DNA, 25 bp, Homo sapien
cgtggaacccatcagtcagggccca

SEQ ID NO: 5652722 - DNA, 25 bp, Homo sapien
tttggcatcaatgaagggaattcta

SEQ ID NO: 5652723 - DNA, 25 bp, Homo sapien
agggaattctaagaggtcagccagt

SEQ ID NO: 5652724 - DNA, 25 bp, Homo sapien
aagggaattctaagaggtcagccag

SEQ ID NO: 5652725 - DNA, 25 bp, Homo sapien
tggcatcaatgaagggaattctaag

SEQ ID NO: 5652726 - DNA, 25 bp, Homo sapien
tttttggcatcaatgaagggaattc

SEQ ID NO: 5652727 - DNA, 25 bp, Homo sapien
gggaattctaagaggtcagccagtt

SEQ ID NO: 5652728 - DNA, 25 bp, Homo sapien
ctggctgacctcttagaattccctt

SEQ ID NO: 5652729 - DNA, 25 bp, Homo sapien
gaattcccttcattgatgccaaaaa

SEQ ID NO: 5652730 - DNA, 25 bp, Homo sapien
cttagaattcccttcattgatgcca

SEQ ID NO: 5652731 - DNA, 25 bp, Homo sapien
aactggctgacctcttagaattccc

SEQ ID NO: 5652732 - DNA, 25 bp, Homo sapien
tagaattcccttcattgatgccaaa

SEQ ID NO: 5652733 - DNA, 25 bp, Homo sapien
ttagaattcccttcattgatgccaa

SEQ ID NO: 5652734 - DNA, 25 bp, Homo sapien
ggaaagcactggacacgtgttggac

SEQ ID NO: 5652735 - DNA, 25 bp, Homo sapien
tggacacgtgttggacagttctgct

SEQ ID NO: 5652736 - DNA, 25 bp, Homo sapien
cactggacacgtgttggacagttct

SEQ ID NO: 5652737 - DNA, 25 bp, Homo sapien
gcactggacacgtgttggacagttc

SEQ ID NO: 5652738 - DNA, 25 bp, Homo sapien
aaagcactggacacgtgttggacag

SEQ ID NO: 5652739 - DNA, 25 bp, Homo sapien
aagcactggacacgtgttggacagt

SEQ ID NO: 5652740 - DNA, 25 bp, Homo sapien
gtccaacacgtgtccagtgctttcc

SEQ ID NO: 5652741 - DNA, 25 bp, Homo sapien
agcagaactgtccaacacgtgtcca

SEQ ID NO: 5652742 - DNA, 25 bp, Homo sapien
gaactgtccaacacgtgtccagtgc

SEQ ID NO: 5652743 - DNA, 25 bp, Homo sapien
gcagaactgtccaacacgtgtccag

SEQ ID NO: 5652744 - DNA, 25 bp, Homo sapien
ctgtccaacacgtgtccagtgcttt

SEQ ID NO: 5652745 - DNA, 25 bp, Homo sapien
agaactgtccaacacgtgtccagtg

SEQ ID NO: 5652746 - DNA, 25 bp, Homo sapien
acacgcggagcaggtaggcaggtgg

SEQ ID NO: 5652747 - DNA, 25 bp, Homo sapien
acgcggagcaggtaggcaggtggcc

SEQ ID NO: 5652748 - DNA, 25 bp, Homo sapien
gcggagcaggtaggcaggtggccgg

SEQ ID NO: 5652749 - DNA, 25 bp, Homo sapien
caggtggccgggcccacgtgcttct

SEQ ID NO: 5652750 - DNA, 25 bp, Homo sapien
tacacgcggagcaggtaggcaggtg

SEQ ID NO: 5652751 - DNA, 25 bp, Homo sapien
cacgcggagcaggtaggcaggtggc

SEQ ID NO: 5652752 - DNA, 25 bp, Homo sapien
tctgccacctcgcagagctacacgc

SEQ ID NO: 5652753 - DNA, 25 bp, Homo sapien
cactctgccacctcgcagagctaca

SEQ ID NO: 5652754 - DNA, 25 bp, Homo sapien
ccacctcgcagagctacacgcggag

SEQ ID NO: 5652755 - DNA, 25 bp, Homo sapien
cgcactctgccacctcgcagagcta

SEQ ID NO: 5652756 - DNA, 25 bp, Homo sapien
tcgcactctgccacctcgcagagct

SEQ ID NO: 5652757 - DNA, 25 bp, Homo sapien
tgccacctcgcagagctacacgcgg

SEQ ID NO: 5652758 - DNA, 25 bp, Homo sapien
ccgcgtgtagctctgcgaggtggca

SEQ ID NO: 5652759 - DNA, 25 bp, Homo sapien
ctccgcgtgtagctctgcgaggtgg

SEQ ID NO: 5652760 - DNA, 25 bp, Homo sapien
tagctctgcgaggtggcagagtgcg

SEQ ID NO: 5652761 - DNA, 25 bp, Homo sapien
gcgtgtagctctgcgaggtggcaga

SEQ ID NO: 5652762 - DNA, 25 bp, Homo sapien
tgtagctctgcgaggtggcagagtg

SEQ ID NO: 5652763 - DNA, 25 bp, Homo sapien
tccgcgtgtagctctgcgaggtggc

SEQ ID NO: 5652764 - DNA, 25 bp, Homo sapien
gccacctgcctacctgctccgcgtg

SEQ ID NO: 5652765 - DNA, 25 bp, Homo sapien
ccacctgcctacctgctccgcgtgt

SEQ ID NO: 5652766 - DNA, 25 bp, Homo sapien
agaagcacgtgggcccggccacctg

SEQ ID NO: 5652767 - DNA, 25 bp, Homo sapien
cacctgcctacctgctccgcgtgta

SEQ ID NO: 5652768 - DNA, 25 bp, Homo sapien
ggccacctgcctacctgctccgcgt

SEQ ID NO: 5652769 - DNA, 25 bp, Homo sapien
cggccacctgcctacctgctccgcg

SEQ ID NO: 5652770 - DNA, 25 bp, Homo sapien
cacgtgcttctggagcaatggaggc

SEQ ID NO: 5652771 - DNA, 25 bp, Homo sapien
cgggcccacgtgcttctggagcaat

SEQ ID NO: 5652772 - DNA, 25 bp, Homo sapien
gcggagcaggtaggcaggtggccgg

SEQ ID NO: 5652773 - DNA, 25 bp, Homo sapien
ctggagcaatggaggctctaccatt

SEQ ID NO: 5652774 - DNA, 25 bp, Homo sapien
ttctggagcaatggaggctctacca

SEQ ID NO: 5652775 - DNA, 25 bp, Homo sapien
tacacgcggagcaggtaggcaggtg

SEQ ID NO: 5652776 - DNA, 25 bp, Homo sapien
aatggtagagcctccattgctccag

SEQ ID NO: 5652777 - DNA, 25 bp, Homo sapien
cacctgcctacctgctccgcgtgta

SEQ ID NO: 5652778 - DNA, 25 bp, Homo sapien
attgctccagaagcacgtgggcccg

SEQ ID NO: 5652779 - DNA, 25 bp, Homo sapien
gagcctccattgctccagaagcacg

SEQ ID NO: 5652780 - DNA, 25 bp, Homo sapien
tccattgctccagaagcacgtgggc

SEQ ID NO: 5652781 - DNA, 25 bp, Homo sapien
tggtagagcctccattgctccagaa

SEQ ID NO: 5652782 - DNA, 25 bp, Homo sapien
gaacagcctggaggcggtgaatgcg

SEQ ID NO: 5652783 - DNA, 25 bp, Homo sapien
tgttgctgagcatgaacagcctgga

SEQ ID NO: 5652784 - DNA, 25 bp, Homo sapien
ttgctgagcatgaacagcctggagg

SEQ ID NO: 5652785 - DNA, 25 bp, Homo sapien
ccagatgttgctgagcatgaacagc

SEQ ID NO: 5652786 - DNA, 25 bp, Homo sapien
gaatgcgggcgtgcagcagaacaac

SEQ ID NO: 5652787 - DNA, 25 bp, Homo sapien
tgaatgcgggcgtgcagcagaacaa

SEQ ID NO: 5652788 - DNA, 25 bp, Homo sapien
ttgttctgctgcacgcccgcattca

SEQ ID NO: 5652789 - DNA, 25 bp, Homo sapien
cgcattcaccgcctccaggctgttc

SEQ ID NO: 5652790 - DNA, 25 bp, Homo sapien
cctccaggctgttcatgctcagcaa

SEQ ID NO: 5652791 - DNA, 25 bp, Homo sapien
tccaggctgttcatgctcagcaaca

SEQ ID NO: 5652792 - DNA, 25 bp, Homo sapien
gctgttcatgctcagcaacatctgg

SEQ ID NO: 5652793 - DNA, 25 bp, Homo sapien
gttgttctgctgcacgcccgcattc

SEQ ID NO: 5652794 - DNA, 25 bp, Homo sapien
tctcgtatggctcagggttaaggcc

SEQ ID NO: 5652795 - DNA, 25 bp, Homo sapien
catctcgtatggctcagggttaagg

SEQ ID NO: 5652796 - DNA, 25 bp, Homo sapien
cacatctcgtatggctcagggttaa

SEQ ID NO: 5652797 - DNA, 25 bp, Homo sapien
ttcaggaacacatctcgtatggctc

SEQ ID NO: 5652798 - DNA, 25 bp, Homo sapien
ggaacacatctcgtatggctcaggg

SEQ ID NO: 5652799 - DNA, 25 bp, Homo sapien
tcgtatggctcagggttaaggccag

SEQ ID NO: 5652800 - DNA, 25 bp, Homo sapien
ggccttaaccctgagccatacgaga

SEQ ID NO: 5652801 - DNA, 25 bp, Homo sapien
taaccctgagccatacgagatgtgt

SEQ ID NO: 5652802 - DNA, 25 bp, Homo sapien
cctgagccatacgagatgtgttcct

SEQ ID NO: 5652803 - DNA, 25 bp, Homo sapien
ctggccttaaccctgagccatacga

SEQ ID NO: 5652804 - DNA, 25 bp, Homo sapien
ccttaaccctgagccatacgagatg

SEQ ID NO: 5652805 - DNA, 25 bp, Homo sapien
gagccatacgagatgtgttcctgaa

SEQ ID NO: 5652806 - DNA, 25 bp, Homo sapien
cagtgtttaagtccaggtccatcta

SEQ ID NO: 5652807 - DNA, 25 bp, Homo sapien
gaggcagtgtttaagtccaggtcca

SEQ ID NO: 5652808 - DNA, 25 bp, Homo sapien
cctgctggctctttcccgtgtaccc

SEQ ID NO: 5652809 - DNA, 25 bp, Homo sapien
taagtccaggtccatctaatgctaa

SEQ ID NO: 5652810 - DNA, 25 bp, Homo sapien
ggtccatctaatgctaaagccctgc

SEQ ID NO: 5652811 - DNA, 25 bp, Homo sapien
atctaatgctaaagccctgctggct

SEQ ID NO: 5652812 - DNA, 25 bp, Homo sapien
gcagggctttagcattagatggacc

SEQ ID NO: 5652813 - DNA, 25 bp, Homo sapien
tagatggacctggacttaaacactg

SEQ ID NO: 5652814 - DNA, 25 bp, Homo sapien
tggacctggacttaaacactgcctc

SEQ ID NO: 5652815 - DNA, 25 bp, Homo sapien
gggtacacgggaaagagccagcagg

SEQ ID NO: 5652816 - DNA, 25 bp, Homo sapien
agccagcagggctttagcattagat

SEQ ID NO: 5652817 - DNA, 25 bp, Homo sapien
gctttagcattagatggacctggac

SEQ ID NO: 5652818 - DNA, 25 bp, Homo sapien
attttgttgctcatgataggcatcc

SEQ ID NO: 5652819 - DNA, 25 bp, Homo sapien
gcgcagcactgtttgacatctatta

SEQ ID NO: 5652820 - DNA, 25 bp, Homo sapien
cctattacatatgtgcgcagcactg

SEQ ID NO: 5652821 - DNA, 25 bp, Homo sapien
catatgtgcgcagcactgtttgaca

SEQ ID NO: 5652822 - DNA, 25 bp, Homo sapien
gatctcctattacatatgtgcgcag

SEQ ID NO: 5652823 - DNA, 25 bp, Homo sapien
gctcatgataggcatccttttttga

SEQ ID NO: 5652824 - DNA, 25 bp, Homo sapien
tcaaaaaaggatgcctatcatgagc

SEQ ID NO: 5652825 - DNA, 25 bp, Homo sapien
ggatgcctatcatgagcaacaaaat

SEQ ID NO: 5652826 - DNA, 25 bp, Homo sapien
cacatatgtaataggagatcaaaaa

SEQ ID NO: 5652827 - DNA, 25 bp, Homo sapien
cagtgctgcgcacatatgtaatagg

SEQ ID NO: 5652828 - DNA, 25 bp, Homo sapien
tgaaataatagatgtcaaacagtgc

SEQ ID NO: 5652829 - DNA, 25 bp, Homo sapien
taatagatgtcaaacagtgctgcgc

SEQ ID NO: 5652830 - DNA, 25 bp, Homo sapien
tccccttagaagagacatgtcctat

SEQ ID NO: 5652831 - DNA, 25 bp, Homo sapien
tagcaattccccttagaagagacat

SEQ ID NO: 5652832 - DNA, 25 bp, Homo sapien
tgtcctatatttccactgtcagtgt

SEQ ID NO: 5652833 - DNA, 25 bp, Homo sapien
gagacatgtcctatatttccactgt

SEQ ID NO: 5652834 - DNA, 25 bp, Homo sapien
gaagagacatgtcctatatttccac

SEQ ID NO: 5652835 - DNA, 25 bp, Homo sapien
tatgcccttttcgtagcaattcccc

SEQ ID NO: 5652836 - DNA, 25 bp, Homo sapien
cactgacagtggaaatataggacat

SEQ ID NO: 5652837 - DNA, 25 bp, Homo sapien
atataggacatgtctcttctaaggg

SEQ ID NO: 5652838 - DNA, 25 bp, Homo sapien
aacactgacagtggaaatataggac

SEQ ID NO: 5652839 - DNA, 25 bp, Homo sapien
gaattgctacgaaaagggcataaag

SEQ ID NO: 5652840 - DNA, 25 bp, Homo sapien
gggaattgctacgaaaagggcataa

SEQ ID NO: 5652841 - DNA, 25 bp, Homo sapien
cagtggaaatataggacatgtctct

SEQ ID NO: 5652842 - DNA, 25 bp, Homo sapien
ataatgtaggagagaatgccatgaa

SEQ ID NO: 5652843 - DNA, 25 bp, Homo sapien
ttcatggcattctctcctacattat

SEQ ID NO: 5652844 - DNA, 25 bp, Homo sapien
ttaaaataaacatcttagaagcgga

SEQ ID NO: 5652845 - DNA, 25 bp, Homo sapien
aaatattatatcctctccttgccct

SEQ ID NO: 5652846 - DNA, 25 bp, Homo sapien
ttcccctcagcagtggacctttaaa

SEQ ID NO: 5652847 - DNA, 25 bp, Homo sapien
ggagagaatgccatgaaaagtaaaa

SEQ ID NO: 5652848 - DNA, 25 bp, Homo sapien
tcagcagtggacctttaaaataaac

SEQ ID NO: 5652849 - DNA, 25 bp, Homo sapien
ataatgtaggagagaatgccatgaa

SEQ ID NO: 5652850 - DNA, 25 bp, Homo sapien
tccgcttctaagatgtttattttaa

SEQ ID NO: 5652851 - DNA, 25 bp, Homo sapien
gatgtttattttaaaggtccactgc

SEQ ID NO: 5652852 - DNA, 25 bp, Homo sapien
tattttaaaggtccactgctgaggg

SEQ ID NO: 5652853 - DNA, 25 bp, Homo sapien
gaagggcaaggagaggatataatat

SEQ ID NO: 5652854 - DNA, 25 bp, Homo sapien
ttttacttttcatggcattctctcc

SEQ ID NO: 5652855 - DNA, 25 bp, Homo sapien
ttcatggcattctctcctacattat

SEQ ID NO: 5652856 - DNA, 25 bp, Homo sapien
agtaacaaatgcacatagtaagaaa

SEQ ID NO: 5652857 - DNA, 25 bp, Homo sapien
aagtaacaaatgcacatagtaagaa

SEQ ID NO: 5652858 - DNA, 25 bp, Homo sapien
aaagtaacaaatgcacatagtaaga

SEQ ID NO: 5652859 - DNA, 25 bp, Homo sapien
aaaagtaacaaatgcacatagtaag

SEQ ID NO: 5652860 - DNA, 25 bp, Homo sapien
tttcttactatgtgcatttgttact

SEQ ID NO: 5652861 - DNA, 25 bp, Homo sapien
ttcttactatgtgcatttgttactt

SEQ ID NO: 5652862 - DNA, 25 bp, Homo sapien
cttactatgtgcatttgttactttt

SEQ ID NO: 5652863 - DNA, 25 bp, Homo sapien
tcttactatgtgcatttgttacttt

SEQ ID NO: 5652864 - DNA, 25 bp, Homo sapien
agtaacaaatgcacatagtaagaaa

SEQ ID NO: 5652865 - DNA, 25 bp, Homo sapien
aagtaacaaatgcacatagtaagaa

SEQ ID NO: 5652866 - DNA, 25 bp, Homo sapien
atgcacatagtaagaaaaaaggtca

SEQ ID NO: 5652867 - DNA, 25 bp, Homo sapien
aaagtaacaaatgcacatagtaaga

SEQ ID NO: 5652868 - DNA, 25 bp, Homo sapien
aaaagtaacaaatgcacatagtaag

SEQ ID NO: 5652869 - DNA, 25 bp, Homo sapien
caaatgcacatagtaagaaaaaagg

SEQ ID NO: 5652870 - DNA, 25 bp, Homo sapien
ccttttttcttactatgtgcatttg

SEQ ID NO: 5652871 - DNA, 25 bp, Homo sapien
tttcttactatgtgcatttgttact

SEQ ID NO: 5652872 - DNA, 25 bp, Homo sapien
gaccttttttcttactatgtgcatt

SEQ ID NO: 5652873 - DNA, 25 bp, Homo sapien
ttcttactatgtgcatttgttactt

SEQ ID NO: 5652874 - DNA, 25 bp, Homo sapien
tgaccttttttcttactatgtgcat

SEQ ID NO: 5652875 - DNA, 25 bp, Homo sapien
tcttactatgtgcatttgttacttt

SEQ ID NO: 5652876 - DNA, 25 bp, Homo sapien
tagaaatttgtacacagccttctgg

SEQ ID NO: 5652877 - DNA, 25 bp, Homo sapien
ggttagaaatttgtacacagccttc

SEQ ID NO: 5652878 - DNA, 25 bp, Homo sapien
agccttctggatacaaataatcttt

SEQ ID NO: 5652879 - DNA, 25 bp, Homo sapien
cagccttctggatacaaataatctt

SEQ ID NO: 5652880 - DNA, 25 bp, Homo sapien
acagccttctggatacaaataatct

SEQ ID NO: 5652881 - DNA, 25 bp, Homo sapien
gttagaaatttgtacacagccttct

SEQ ID NO: 5652882 - DNA, 25 bp, Homo sapien
aagattatttgtatccagaaggctg

SEQ ID NO: 5652883 - DNA, 25 bp, Homo sapien
gaaggctgtgtacaaatttctaacc

SEQ ID NO: 5652884 - DNA, 25 bp, Homo sapien
cagaaggctgtgtacaaatttctaa

SEQ ID NO: 5652885 - DNA, 25 bp, Homo sapien
aaagattatttgtatccagaaggct

SEQ ID NO: 5652886 - DNA, 25 bp, Homo sapien
agattatttgtatccagaaggctgt

SEQ ID NO: 5652887 - DNA, 25 bp, Homo sapien
ccagaaggctgtgtacaaatttcta

SEQ ID NO: 5652888 - DNA, 25 bp, Homo sapien
taataacctctcgatcagagccttt

SEQ ID NO: 5652889 - DNA, 25 bp, Homo sapien
aataacctctcgatcagagcctttc

SEQ ID NO: 5652890 - DNA, 25 bp, Homo sapien
ataacctctcgatcagagcctttct

SEQ ID NO: 5652891 - DNA, 25 bp, Homo sapien
taacctctcgatcagagcctttctt

SEQ ID NO: 5652892 - DNA, 25 bp, Homo sapien
gaaaggctctgatcgagaggttatt

SEQ ID NO: 5652893 - DNA, 25 bp, Homo sapien
aaaggctctgatcgagaggttatta

SEQ ID NO: 5652894 - DNA, 25 bp, Homo sapien
aagaaaggctctgatcgagaggtta

SEQ ID NO: 5652895 - DNA, 25 bp, Homo sapien
agaaaggctctgatcgagaggttat

SEQ ID NO: 5652896 - DNA, 25 bp, Homo sapien
taggccagagagtccctaaaggatt

SEQ ID NO: 5652897 - DNA, 25 bp, Homo sapien
ttagtatttcaaaaagccagaaggc

SEQ ID NO: 5652898 - DNA, 25 bp, Homo sapien
ggtcattaggccagagagtccctaa

SEQ ID NO: 5652899 - DNA, 25 bp, Homo sapien
cagagagtccctaaaggattttttg

SEQ ID NO: 5652900 - DNA, 25 bp, Homo sapien
gggatgcagaagctatttttagtat

SEQ ID NO: 5652901 - DNA, 25 bp, Homo sapien
caaaaagccagaaggcagttgtacc

SEQ ID NO: 5652902 - DNA, 25 bp, Homo sapien
ggtacaactgccttctggctttttg

SEQ ID NO: 5652903 - DNA, 25 bp, Homo sapien
ttagggactctctggcctaatgacc

SEQ ID NO: 5652904 - DNA, 25 bp, Homo sapien
tgcatccccatttttacctccaaaa

SEQ ID NO: 5652905 - DNA, 25 bp, Homo sapien
taaaaatagcttctgcatccccatt

SEQ ID NO: 5652906 - DNA, 25 bp, Homo sapien
gccttctggctttttgaaatactaa

SEQ ID NO: 5652907 - DNA, 25 bp, Homo sapien
caaaaaatcctttagggactctctg

SEQ ID NO: 5652908 - DNA, 25 bp, Homo sapien
ctatgtaacattgccgtcttagtgc

SEQ ID NO: 5652909 - DNA, 25 bp, Homo sapien
acaacaggccgttcagtgaaaaaga

SEQ ID NO: 5652910 - DNA, 25 bp, Homo sapien
tctaagaacaacaggccgttcagtg

SEQ ID NO: 5652911 - DNA, 25 bp, Homo sapien
cattacttctaagaacaacaggccg

SEQ ID NO: 5652912 - DNA, 25 bp, Homo sapien
aacattgccgtcttagtgcctagcc

SEQ ID NO: 5652913 - DNA, 25 bp, Homo sapien
gtgcctagcctctttcattacttct

SEQ ID NO: 5652914 - DNA, 25 bp, Homo sapien
ttagaagtaatgaaagaggctaggc

SEQ ID NO: 5652915 - DNA, 25 bp, Homo sapien
ggctaggcactaagacggcaatgtt

SEQ ID NO: 5652916 - DNA, 25 bp, Homo sapien
tgaaagaggctaggcactaagacgg

SEQ ID NO: 5652917 - DNA, 25 bp, Homo sapien
gaacggcctgttgttcttagaagta

SEQ ID NO: 5652918 - DNA, 25 bp, Homo sapien
tctttttcactgaacggcctgttgt

SEQ ID NO: 5652919 - DNA, 25 bp, Homo sapien
gcactaagacggcaatgttacatag

SEQ ID NO: 5652920 - DNA, 25 bp, Homo sapien
gactagtcagtaacttccatagagg

SEQ ID NO: 5652921 - DNA, 25 bp, Homo sapien
aacttccatagagggaaccttattg

SEQ ID NO: 5652922 - DNA, 25 bp, Homo sapien
tcagtaacttccatagagggaacct

SEQ ID NO: 5652923 - DNA, 25 bp, Homo sapien
gaaccttattggcactggaacagtt

SEQ ID NO: 5652924 - DNA, 25 bp, Homo sapien
gctcatcaacctggactagtcagta

SEQ ID NO: 5652925 - DNA, 25 bp, Homo sapien
gataggaaagcagctcatcaacctg

SEQ ID NO: 5652926 - DNA, 25 bp, Homo sapien
tccctctatggaagttactgactag

SEQ ID NO: 5652927 - DNA, 25 bp, Homo sapien
caataaggttccctctatggaagtt

SEQ ID NO: 5652928 - DNA, 25 bp, Homo sapien
gaagttactgactagtccaggttga

SEQ ID NO: 5652929 - DNA, 25 bp, Homo sapien
tactgactagtccaggttgatgagc

SEQ ID NO: 5652930 - DNA, 25 bp, Homo sapien
taaactgttccagtgccaataaggt

SEQ ID NO: 5652931 - DNA, 25 bp, Homo sapien
caggttgatgagctgctttcctatc

SEQ ID NO: 5652932 - DNA, 25 bp, Homo sapien
ggaagaaatgaattctcaaatgtta

SEQ ID NO: 5652933 - DNA, 25 bp, Homo sapien
tggaagaaatgaattctcaaatgtt

SEQ ID NO: 5652934 - DNA, 25 bp, Homo sapien
gaattctcaaatgttaattgtgatg

SEQ ID NO: 5652935 - DNA, 25 bp, Homo sapien
tctcaaatgttaattgtgatgcatt

SEQ ID NO: 5652936 - DNA, 25 bp, Homo sapien
gatttgctattttgggagaaaagaa

SEQ ID NO: 5652937 - DNA, 25 bp, Homo sapien
gaaatgaattctcaaatgttaattg

SEQ ID NO: 5652938 - DNA, 25 bp, Homo sapien
aatgcatcacaattaacatttgaga

SEQ ID NO: 5652939 - DNA, 25 bp, Homo sapien
tcacaattaacatttgagaattcat

SEQ ID NO: 5652940 - DNA, 25 bp, Homo sapien
aacatttgagaattcatttcttcca

SEQ ID NO: 5652941 - DNA, 25 bp, Homo sapien
ttcttttctcccaaaatagcaaatc

SEQ ID NO: 5652942 - DNA, 25 bp, Homo sapien
taacatttgagaattcatttcttcc

SEQ ID NO: 5652943 - DNA, 25 bp, Homo sapien
ttaaaaatgcatcacaattaacatt

SEQ ID NO: 5652944 - DNA, 25 bp, Homo sapien
agacctttgtccttgcgcaaattga

SEQ ID NO: 5652945 - DNA, 25 bp, Homo sapien
ttatagacctttgtccttgcgcaaa

SEQ ID NO: 5652946 - DNA, 25 bp, Homo sapien
gtttatagacctttgtccttgcgca

SEQ ID NO: 5652947 - DNA, 25 bp, Homo sapien
tagacctttgtccttgcgcaaattg

SEQ ID NO: 5652948 - DNA, 25 bp, Homo sapien
tttatagacctttgtccttgcgcaa

SEQ ID NO: 5652949 - DNA, 25 bp, Homo sapien
tatagacctttgtccttgcgcaaat

SEQ ID NO: 5652950 - DNA, 25 bp, Homo sapien
tttgcgcaaggacaaaggtctataa

SEQ ID NO: 5652951 - DNA, 25 bp, Homo sapien
caatttgcgcaaggacaaaggtcta

SEQ ID NO: 5652952 - DNA, 25 bp, Homo sapien
tcaatttgcgcaaggacaaaggtct

SEQ ID NO: 5652953 - DNA, 25 bp, Homo sapien
atttgcgcaaggacaaaggtctata

SEQ ID NO: 5652954 - DNA, 25 bp, Homo sapien
tgcgcaaggacaaaggtctataaac

SEQ ID NO: 5652955 - DNA, 25 bp, Homo sapien
aatttgcgcaaggacaaaggtctat

SEQ ID NO: 5652956 - DNA, 25 bp, Homo sapien
tgagatacgccgctctgaatcttgc

SEQ ID NO: 5652957 - DNA, 25 bp, Homo sapien
gctatggccggagcttgagatacgc

SEQ ID NO: 5652958 - DNA, 25 bp, Homo sapien
ggagcttgagatacgccgctctgaa

SEQ ID NO: 5652959 - DNA, 25 bp, Homo sapien
gatacgccgctctgaatcttgccgc

SEQ ID NO: 5652960 - DNA, 25 bp, Homo sapien
gcactgccgcttcggtcactagtaa

SEQ ID NO: 5652961 - DNA, 25 bp, Homo sapien
tggccggagcttgagatacgccgct

SEQ ID NO: 5652962 - DNA, 25 bp, Homo sapien
tcagagcggcgtatctcaagctccg

SEQ ID NO: 5652963 - DNA, 25 bp, Homo sapien
ggcgtatctcaagctccggccatag

SEQ ID NO: 5652964 - DNA, 25 bp, Homo sapien
tactagtgaccgaagcggcagtgca

SEQ ID NO: 5652965 - DNA, 25 bp, Homo sapien
ttactagtgaccgaagcggcagtgc

SEQ ID NO: 5652966 - DNA, 25 bp, Homo sapien
gcaagattcagagcggcgtatctca

SEQ ID NO: 5652967 - DNA, 25 bp, Homo sapien
gcggcaagattcagagcggcgtatc

SEQ ID NO: 5652968 - DNA, 25 bp, Homo sapien
ccctctagggggaatgtgtcttgaa

SEQ ID NO: 5652969 - DNA, 25 bp, Homo sapien
caaatactaatggaactcccatttt

SEQ ID NO: 5652970 - DNA, 25 bp, Homo sapien
tctagggggaatgtgtcttgaagct

SEQ ID NO: 5652971 - DNA, 25 bp, Homo sapien
catttttaatttgtggactccctct

SEQ ID NO: 5652972 - DNA, 25 bp, Homo sapien
acaaatactaatggaactcccattt

SEQ ID NO: 5652973 - DNA, 25 bp, Homo sapien
tgtggactccctctagggggaatgt

SEQ ID NO: 5652974 - DNA, 25 bp, Homo sapien
aaatgggagttccattagtatttgt

SEQ ID NO: 5652975 - DNA, 25 bp, Homo sapien
agagggagtccacaaattaaaaatg

SEQ ID NO: 5652976 - DNA, 25 bp, Homo sapien
cattccccctagagggagtccacaa

SEQ ID NO: 5652977 - DNA, 25 bp, Homo sapien
ttcaagacacattccccctagaggg

SEQ ID NO: 5652978 - DNA, 25 bp, Homo sapien
agcttcaagacacattccccctaga

SEQ ID NO: 5652979 - DNA, 25 bp, Homo sapien
gacacattccccctagagggagtcc

SEQ ID NO: 5652980 - DNA, 25 bp, Homo sapien
aacttagtaaactagtaagtctcag

SEQ ID NO: 5652981 - DNA, 25 bp, Homo sapien
taaactagtaagtctcagtgtgttt

SEQ ID NO: 5652982 - DNA, 25 bp, Homo sapien
gtaaactagtaagtctcagtgtgtt

SEQ ID NO: 5652983 - DNA, 25 bp, Homo sapien
tagtaaactagtaagtctcagtgtg

SEQ ID NO: 5652984 - DNA, 25 bp, Homo sapien
agtaaactagtaagtctcagtgtgt

SEQ ID NO: 5652985 - DNA, 25 bp, Homo sapien
cttagtaaactagtaagtctcagtg

SEQ ID NO: 5652986 - DNA, 25 bp, Homo sapien
acacactgagacttactagtttact

SEQ ID NO: 5652987 - DNA, 25 bp, Homo sapien
cacactgagacttactagtttacta

SEQ ID NO: 5652988 - DNA, 25 bp, Homo sapien
cactgagacttactagtttactaag

SEQ ID NO: 5652989 - DNA, 25 bp, Homo sapien
acactgagacttactagtttactaa

SEQ ID NO: 5652990 - DNA, 25 bp, Homo sapien
aaacacactgagacttactagttta

SEQ ID NO: 5652991 - DNA, 25 bp, Homo sapien
aacacactgagacttactagtttac

SEQ ID NO: 5652992 - DNA, 25 bp, Homo sapien
aacttagtaaactagtaagtctcag

SEQ ID NO: 5652993 - DNA, 25 bp, Homo sapien
taaactagtaagtctcagtgtgttt

SEQ ID NO: 5652994 - DNA, 25 bp, Homo sapien
ctagtaagtctcagtgtgttttaac

SEQ ID NO: 5652995 - DNA, 25 bp, Homo sapien
tagtaaactagtaagtctcagtgtg

SEQ ID NO: 5652996 - DNA, 25 bp, Homo sapien
cttagtaaactagtaagtctcagtg

SEQ ID NO: 5652997 - DNA, 25 bp, Homo sapien
tctcagtgtgttttaacttgtacat

SEQ ID NO: 5652998 - DNA, 25 bp, Homo sapien
tgtacaagttaaaacacactgagac

SEQ ID NO: 5652999 - DNA, 25 bp, Homo sapien
tattaatgtacaagttaaaacacac

SEQ ID NO: 5653000 - DNA, 25 bp, Homo sapien
cacactgagacttactagtttacta

SEQ ID NO: 5653001 - DNA, 25 bp, Homo sapien
cactgagacttactagtttactaag

SEQ ID NO: 5653002 - DNA, 25 bp, Homo sapien
aacacactgagacttactagtttac

SEQ ID NO: 5653003 - DNA, 25 bp, Homo sapien
gttaaaacacactgagacttactag

SEQ ID NO: 5653004 - DNA, 25 bp, Homo sapien
tcctttctcttcttttgtcagtgtt

SEQ ID NO: 5653005 - DNA, 25 bp, Homo sapien
cctaaatgacagttttgaggctgaa

SEQ ID NO: 5653006 - DNA, 25 bp, Homo sapien
tcacgcccagcctaaatgacagttt

SEQ ID NO: 5653007 - DNA, 25 bp, Homo sapien
gcccagcctaaatgacagttttgag

SEQ ID NO: 5653008 - DNA, 25 bp, Homo sapien
taaatgacagttttgaggctgaaaa

SEQ ID NO: 5653009 - DNA, 25 bp, Homo sapien
cagttttgaggctgaaaaactcttt

SEQ ID NO: 5653010 - DNA, 25 bp, Homo sapien
aaagagtttttcagcctcaaaactg

SEQ ID NO: 5653011 - DNA, 25 bp, Homo sapien
taaacactgacaaaagaagagaaag

SEQ ID NO: 5653012 - DNA, 25 bp, Homo sapien
cactgacaaaagaagagaaaggaaa

SEQ ID NO: 5653013 - DNA, 25 bp, Homo sapien
tcaaaactgtcatttaggctgggcg

SEQ ID NO: 5653014 - DNA, 25 bp, Homo sapien
ttcagcctcaaaactgtcatttagg

SEQ ID NO: 5653015 - DNA, 25 bp, Homo sapien
aaactgtcatttaggctgggcgtga

SEQ ID NO: 5653016 - DNA, 25 bp, Homo sapien
gcaaatgagaatcagcccattggcc

SEQ ID NO: 5653017 - DNA, 25 bp, Homo sapien
tggtaggcaaacaactcggtatagg

SEQ ID NO: 5653018 - DNA, 25 bp, Homo sapien
aactcggtataggttgcaaagctcc

SEQ ID NO: 5653019 - DNA, 25 bp, Homo sapien
gaaatcgtgttcttggtaggcaaac

SEQ ID NO: 5653020 - DNA, 25 bp, Homo sapien
tataggttgcaaagctcctccctcc

SEQ ID NO: 5653021 - DNA, 25 bp, Homo sapien
gttcttgaaggaaatcgtgttcttg

SEQ ID NO: 5653022 - DNA, 25 bp, Homo sapien
ggagctttgcaacctataccgagtt

SEQ ID NO: 5653023 - DNA, 25 bp, Homo sapien
tataccgagttgtttgcctaccaag

SEQ ID NO: 5653024 - DNA, 25 bp, Homo sapien
ggccaatgggctgattctcatttgc

SEQ ID NO: 5653025 - DNA, 25 bp, Homo sapien
ggagggaggagctttgcaacctata

SEQ ID NO: 5653026 - DNA, 25 bp, Homo sapien
tttgcctaccaagaacacgatttcc

SEQ ID NO: 5653027 - DNA, 25 bp, Homo sapien
caagaacacgatttccttcaagaac

SEQ ID NO: 5653028 - DNA, 25 bp, Homo sapien
ttacaggcacgtgccaccacgccca

SEQ ID NO: 5653029 - DNA, 25 bp, Homo sapien
gcacgtgccaccacgcccagctaat

SEQ ID NO: 5653030 - DNA, 25 bp, Homo sapien
acaggcacgtgccaccacgcccagc

SEQ ID NO: 5653031 - DNA, 25 bp, Homo sapien
cacgtgccaccacgcccagctaatt

SEQ ID NO: 5653032 - DNA, 25 bp, Homo sapien
caggcacgtgccaccacgcccagct

SEQ ID NO: 5653033 - DNA, 25 bp, Homo sapien
tacaggcacgtgccaccacgcccag

SEQ ID NO: 5653034 - DNA, 25 bp, Homo sapien
agctgggcgtggtggcacgtgcctg

SEQ ID NO: 5653035 - DNA, 25 bp, Homo sapien
tgggcgtggtggcacgtgcctgtaa

SEQ ID NO: 5653036 - DNA, 25 bp, Homo sapien
gctgggcgtggtggcacgtgcctgt

SEQ ID NO: 5653037 - DNA, 25 bp, Homo sapien
attagctgggcgtggtggcacgtgc

SEQ ID NO: 5653038 - DNA, 25 bp, Homo sapien
ttagctgggcgtggtggcacgtgcc

SEQ ID NO: 5653039 - DNA, 25 bp, Homo sapien
ctgggcgtggtggcacgtgcctgta

SEQ ID NO: 5653040 - DNA, 25 bp, Homo sapien
gagttaagtgtctataacccagtta

SEQ ID NO: 5653041 - DNA, 25 bp, Homo sapien
atttgtagctaactttctacatatt

SEQ ID NO: 5653042 - DNA, 25 bp, Homo sapien
attggagttaagtgtctataaccca

SEQ ID NO: 5653043 - DNA, 25 bp, Homo sapien
tggagttaagtgtctataacccagt

SEQ ID NO: 5653044 - DNA, 25 bp, Homo sapien
ttggagttaagtgtctataacccag

SEQ ID NO: 5653045 - DNA, 25 bp, Homo sapien
tgggttatagacacttaactccaat

SEQ ID NO: 5653046 - DNA, 25 bp, Homo sapien
taactgggttatagacacttaactc

SEQ ID NO: 5653047 - DNA, 25 bp, Homo sapien
actgggttatagacacttaactcca

SEQ ID NO: 5653048 - DNA, 25 bp, Homo sapien
aatatgtagaaagttagctacaaat

SEQ ID NO: 5653049 - DNA, 25 bp, Homo sapien
ctgggttatagacacttaactccaa

SEQ ID NO: 5653050 - DNA, 25 bp, Homo sapien
tctataacccagttaaatgtaaaca

SEQ ID NO: 5653051 - DNA, 25 bp, Homo sapien
gagttaagtgtctataacccagtta

SEQ ID NO: 5653052 - DNA, 25 bp, Homo sapien
aaaactcatctaggtaaaattggag

SEQ ID NO: 5653053 - DNA, 25 bp, Homo sapien
catttaatttgtagctaactttcta

SEQ ID NO: 5653054 - DNA, 25 bp, Homo sapien
tcatctaggtaaaattggagttaag

SEQ ID NO: 5653055 - DNA, 25 bp, Homo sapien
ttggagttaagtgtctataacccag

SEQ ID NO: 5653056 - DNA, 25 bp, Homo sapien
taaaatatgtagaaagttagctaca

SEQ ID NO: 5653057 - DNA, 25 bp, Homo sapien
ttaactccaattttacctagatgag

SEQ ID NO: 5653058 - DNA, 25 bp, Homo sapien
tgggttatagacacttaactccaat

SEQ ID NO: 5653059 - DNA, 25 bp, Homo sapien
tagaaagttagctacaaattaaatg

SEQ ID NO: 5653060 - DNA, 25 bp, Homo sapien
taactgggttatagacacttaactc

SEQ ID NO: 5653061 - DNA, 25 bp, Homo sapien
ttacatttaactgggttatagacac

SEQ ID NO: 5653062 - DNA, 25 bp, Homo sapien
ttaatagcgttatttctgggtagtg

SEQ ID NO: 5653063 - DNA, 25 bp, Homo sapien
cactaaagtattaatagcgttattt

SEQ ID NO: 5653064 - DNA, 25 bp, Homo sapien
atagcgttatttctgggtagtgaga

SEQ ID NO: 5653065 - DNA, 25 bp, Homo sapien
tattaatagcgttatttctgggtag

SEQ ID NO: 5653066 - DNA, 25 bp, Homo sapien
gtattaatagcgttatttctgggta

SEQ ID NO: 5653067 - DNA, 25 bp, Homo sapien
taaagtattaatagcgttatttctg

SEQ ID NO: 5653068 - DNA, 25 bp, Homo sapien
cactacccagaaataacgctattaa

SEQ ID NO: 5653069 - DNA, 25 bp, Homo sapien
aaataacgctattaatactttagtg

SEQ ID NO: 5653070 - DNA, 25 bp, Homo sapien
tacccagaaataacgctattaatac

SEQ ID NO: 5653071 - DNA, 25 bp, Homo sapien
cagaaataacgctattaatacttta

SEQ ID NO: 5653072 - DNA, 25 bp, Homo sapien
ctacccagaaataacgctattaata

SEQ ID NO: 5653073 - DNA, 25 bp, Homo sapien
tctcactacccagaaataacgctat

SEQ ID NO: 5653074 - DNA, 25 bp, Homo sapien
tatttctgggtagtgagattgcaga

SEQ ID NO: 5653075 - DNA, 25 bp, Homo sapien
cactaaagtattaatagcgttattt

SEQ ID NO: 5653076 - DNA, 25 bp, Homo sapien
tattaatagcgttatttctgggtag

SEQ ID NO: 5653077 - DNA, 25 bp, Homo sapien
atagcgttatttctgggtagtgaga

SEQ ID NO: 5653078 - DNA, 25 bp, Homo sapien
tgggtagtgagattgcagaagattt

SEQ ID NO: 5653079 - DNA, 25 bp, Homo sapien
tgttttcttctgtaggttttctata

SEQ ID NO: 5653080 - DNA, 25 bp, Homo sapien
tacaataaatatgacagtgaaagtt

SEQ ID NO: 5653081 - DNA, 25 bp, Homo sapien
tatgacagtgaaagtttagattttg

SEQ ID NO: 5653082 - DNA, 25 bp, Homo sapien
gtttagaaatcacattttcaggccg

SEQ ID NO: 5653083 - DNA, 25 bp, Homo sapien
ggtttagaaatcacattttcaggcc

SEQ ID NO: 5653084 - DNA, 25 bp, Homo sapien
tagaaatcacattttcaggccgggc

SEQ ID NO: 5653085 - DNA, 25 bp, Homo sapien
tgacagtgaaagtttagattttggt

SEQ ID NO: 5653086 - DNA, 25 bp, Homo sapien
gcccggcctgaaaatgtgatttcta

SEQ ID NO: 5653087 - DNA, 25 bp, Homo sapien
aactttcactgtcatatttattgta

SEQ ID NO: 5653088 - DNA, 25 bp, Homo sapien
cggcctgaaaatgtgatttctaaac

SEQ ID NO: 5653089 - DNA, 25 bp, Homo sapien
tgaaaatgtgatttctaaaccaaaa

SEQ ID NO: 5653090 - DNA, 25 bp, Homo sapien
caaaatctaaactttcactgtcata

SEQ ID NO: 5653091 - DNA, 25 bp, Homo sapien
accaaaatctaaactttcactgtca

SEQ ID NO: 5653092 - DNA, 25 bp, Homo sapien
gcctggccagagctttctaacataa

SEQ ID NO: 5653093 - DNA, 25 bp, Homo sapien
actgcgcctggccagagctttctaa

SEQ ID NO: 5653094 - DNA, 25 bp, Homo sapien
tggccagagctttctaacataaaag

SEQ ID NO: 5653095 - DNA, 25 bp, Homo sapien
aaaagctatggaatacttcagaggc

SEQ ID NO: 5653096 - DNA, 25 bp, Homo sapien
gctttctaacataaaagctatggaa

SEQ ID NO: 5653097 - DNA, 25 bp, Homo sapien
tggaatacttcagaggctgaggcag

SEQ ID NO: 5653098 - DNA, 25 bp, Homo sapien
cttttatgttagaaagctctggcca

SEQ ID NO: 5653099 - DNA, 25 bp, Homo sapien
ttccatagcttttatgttagaaagc

SEQ ID NO: 5653100 - DNA, 25 bp, Homo sapien
ttagaaagctctggccaggcgcagt

SEQ ID NO: 5653101 - DNA, 25 bp, Homo sapien
tatgttagaaagctctggccaggcg

SEQ ID NO: 5653102 - DNA, 25 bp, Homo sapien
tcagcctctgaagtattccatagct

SEQ ID NO: 5653103 - DNA, 25 bp, Homo sapien
ctgcctcagcctctgaagtattcca

SEQ ID NO: 5653104 - DNA, 25 bp, Homo sapien
ctgtttctgctaaaaaaaacacaca

SEQ ID NO: 5653105 - DNA, 25 bp, Homo sapien
cgggtgtggtgatgcccgtctgtaa

SEQ ID NO: 5653106 - DNA, 25 bp, Homo sapien
gggtgtggtgatgcccgtctgtaat

SEQ ID NO: 5653107 - DNA, 25 bp, Homo sapien
gtggtgatgcccgtctgtaatccca

SEQ ID NO: 5653108 - DNA, 25 bp, Homo sapien
tgtttctgctaaaaaaaacacacac

SEQ ID NO: 5653109 - DNA, 25 bp, Homo sapien
tgtggtgatgcccgtctgtaatccc

SEQ ID NO: 5653110 - DNA, 25 bp, Homo sapien
ttacagacgggcatcaccacacccg

SEQ ID NO: 5653111 - DNA, 25 bp, Homo sapien
gtgtgtgttttttttagcagaaaca

SEQ ID NO: 5653112 - DNA, 25 bp, Homo sapien
gggattacagacgggcatcaccaca

SEQ ID NO: 5653113 - DNA, 25 bp, Homo sapien
tgtgtgttttttttagcagaaacag

SEQ ID NO: 5653114 - DNA, 25 bp, Homo sapien
tgggattacagacgggcatcaccac

SEQ ID NO: 5653115 - DNA, 25 bp, Homo sapien
attacagacgggcatcaccacaccc

SEQ ID NO: 5653116 - DNA, 25 bp, Homo sapien
tatgcatcagactcccaaatagctg

SEQ ID NO: 5653117 - DNA, 25 bp, Homo sapien
cctgggttaaagctattcttatgca

SEQ ID NO: 5653118 - DNA, 25 bp, Homo sapien
ttcttatgcatcagactcccaaata

SEQ ID NO: 5653119 - DNA, 25 bp, Homo sapien
gctattcttatgcatcagactccca

SEQ ID NO: 5653120 - DNA, 25 bp, Homo sapien
atgatctcgggtccctgctacctct

SEQ ID NO: 5653121 - DNA, 25 bp, Homo sapien
tattcttatgcatcagactcccaaa

SEQ ID NO: 5653122 - DNA, 25 bp, Homo sapien
tatttgggagtctgatgcataagaa

SEQ ID NO: 5653123 - DNA, 25 bp, Homo sapien
tttgggagtctgatgcataagaata

SEQ ID NO: 5653124 - DNA, 25 bp, Homo sapien
tgcataagaatagctttaacccagg

SEQ ID NO: 5653125 - DNA, 25 bp, Homo sapien
cagctatttgggagtctgatgcata

SEQ ID NO: 5653126 - DNA, 25 bp, Homo sapien
tgggagtctgatgcataagaatagc

SEQ ID NO: 5653127 - DNA, 25 bp, Homo sapien
agaggtagcagggacccgagatcat

SEQ ID NO: 5653128 - DNA, 25 bp, Homo sapien
gtcaggatggtcttgatctcttgac

SEQ ID NO: 5653129 - DNA, 25 bp, Homo sapien
tcaggatggtcttgatctcttgacc

SEQ ID NO: 5653130 - DNA, 25 bp, Homo sapien
ggtcaggatggtcttgatctcttga

SEQ ID NO: 5653131 - DNA, 25 bp, Homo sapien
gttggtcaggatggtcttgatctct

SEQ ID NO: 5653132 - DNA, 25 bp, Homo sapien
caggttttcaccatgttggtcagga

SEQ ID NO: 5653133 - DNA, 25 bp, Homo sapien
tggtcaggatggtcttgatctcttg

SEQ ID NO: 5653134 - DNA, 25 bp, Homo sapien
caagagatcaagaccatcctgacca

SEQ ID NO: 5653135 - DNA, 25 bp, Homo sapien
ggtcaagagatcaagaccatcctga

SEQ ID NO: 5653136 - DNA, 25 bp, Homo sapien
agagatcaagaccatcctgaccaac

SEQ ID NO: 5653137 - DNA, 25 bp, Homo sapien
tggatcacaaggtcaagagatcaag

SEQ ID NO: 5653138 - DNA, 25 bp, Homo sapien
tcctgaccaacatggtgaaaacctg

SEQ ID NO: 5653139 - DNA, 25 bp, Homo sapien
tcaagagatcaagaccatcctgacc

SEQ ID NO: 5653140 - DNA, 25 bp, Homo sapien
atttaggtctaactccatctttttg

SEQ ID NO: 5653141 - DNA, 25 bp, Homo sapien
tctcttaacttgatttatttaggtc

SEQ ID NO: 5653142 - DNA, 25 bp, Homo sapien
tcttaacttgatttatttaggtcta

SEQ ID NO: 5653143 - DNA, 25 bp, Homo sapien
ctcttaacttgatttatttaggtct

SEQ ID NO: 5653144 - DNA, 25 bp, Homo sapien
caaaaagatggagttagacctaaat

SEQ ID NO: 5653145 - DNA, 25 bp, Homo sapien
agacctaaataaatcaagttaagag

SEQ ID NO: 5653146 - DNA, 25 bp, Homo sapien
tagacctaaataaatcaagttaaga

SEQ ID NO: 5653147 - DNA, 25 bp, Homo sapien
gacctaaataaatcaagttaagaga

SEQ ID NO: 5653148 - DNA, 25 bp, Homo sapien
attcagacttttcttatttgggttg

SEQ ID NO: 5653149 - DNA, 25 bp, Homo sapien
atttaggtctaactccatctttttg

SEQ ID NO: 5653150 - DNA, 25 bp, Homo sapien
tctcttaacttgatttatttaggtc

SEQ ID NO: 5653151 - DNA, 25 bp, Homo sapien
acttctgcagaaatgttaaaattca

SEQ ID NO: 5653152 - DNA, 25 bp, Homo sapien
tcttaacttgatttatttaggtcta

SEQ ID NO: 5653153 - DNA, 25 bp, Homo sapien
ctcttaacttgatttatttaggtct

SEQ ID NO: 5653154 - DNA, 25 bp, Homo sapien
tgaattttaacatttctgcagaagt

SEQ ID NO: 5653155 - DNA, 25 bp, Homo sapien
caaaaagatggagttagacctaaat

SEQ ID NO: 5653156 - DNA, 25 bp, Homo sapien
agacctaaataaatcaagttaagag

SEQ ID NO: 5653157 - DNA, 25 bp, Homo sapien
tagacctaaataaatcaagttaaga

SEQ ID NO: 5653158 - DNA, 25 bp, Homo sapien
caacccaaataagaaaagtctgaat

SEQ ID NO: 5653159 - DNA, 25 bp, Homo sapien
gacctaaataaatcaagttaagaga

SEQ ID NO: 5653160 - DNA, 25 bp, Homo sapien
gcttatcgcactttctatgagtagt

SEQ ID NO: 5653161 - DNA, 25 bp, Homo sapien
ttaggctactgtaatccccagggtg

SEQ ID NO: 5653162 - DNA, 25 bp, Homo sapien
gggaatgcttatcgcactttctatg

SEQ ID NO: 5653163 - DNA, 25 bp, Homo sapien
cattgcaggctgttaggctactgta

SEQ ID NO: 5653164 - DNA, 25 bp, Homo sapien
cgcactttctatgagtagtttttgt

SEQ ID NO: 5653165 - DNA, 25 bp, Homo sapien
ggctgttaggctactgtaatcccca

SEQ ID NO: 5653166 - DNA, 25 bp, Homo sapien
tacagtagcctaacagcctgcaatg

SEQ ID NO: 5653167 - DNA, 25 bp, Homo sapien
tccccatttataaacaatgtcaccc

SEQ ID NO: 5653168 - DNA, 25 bp, Homo sapien
gggattacagtagcctaacagcctg

SEQ ID NO: 5653169 - DNA, 25 bp, Homo sapien
caaaaactactcatagaaagtgcga

SEQ ID NO: 5653170 - DNA, 25 bp, Homo sapien
tagaaagtgcgataagcattcccca

SEQ ID NO: 5653171 - DNA, 25 bp, Homo sapien
tactcatagaaagtgcgataagcat

SEQ ID NO: 5653172 - DNA, 25 bp, Homo sapien
tacctctcattactaagtaaccttc

SEQ ID NO: 5653173 - DNA, 25 bp, Homo sapien
ccgcactcggccccaaatactttct

SEQ ID NO: 5653174 - DNA, 25 bp, Homo sapien
tcctccatacctctcattactaagt

SEQ ID NO: 5653175 - DNA, 25 bp, Homo sapien
ccatacctctcattactaagtaacc

SEQ ID NO: 5653176 - DNA, 25 bp, Homo sapien
cctccatacctctcattactaagta

SEQ ID NO: 5653177 - DNA, 25 bp, Homo sapien
tctcattactaagtaaccttcttaa

SEQ ID NO: 5653178 - DNA, 25 bp, Homo sapien
gaaggttacttagtaatgagaggta

SEQ ID NO: 5653179 - DNA, 25 bp, Homo sapien
ggttacttagtaatgagaggtatgg

SEQ ID NO: 5653180 - DNA, 25 bp, Homo sapien
acttagtaatgagaggtatggagga

SEQ ID NO: 5653181 - DNA, 25 bp, Homo sapien
attaagaaggttacttagtaatgag

SEQ ID NO: 5653182 - DNA, 25 bp, Homo sapien
taagaaggttacttagtaatgagag

SEQ ID NO: 5653183 - DNA, 25 bp, Homo sapien
tacttagtaatgagaggtatggagg

SEQ ID NO: 5653184 - DNA, 25 bp, Homo sapien
tacctctcattactaagtaaccttc

SEQ ID NO: 5653185 - DNA, 25 bp, Homo sapien
tcctccatacctctcattactaagt

SEQ ID NO: 5653186 - DNA, 25 bp, Homo sapien
tactttctatttctttattcctcca

SEQ ID NO: 5653187 - DNA, 25 bp, Homo sapien
taatttacttgcttgcttgcttatc

SEQ ID NO: 5653188 - DNA, 25 bp, Homo sapien
gcactcggccccaaatactttctat

SEQ ID NO: 5653189 - DNA, 25 bp, Homo sapien
taaccttcttaatttacttgcttgc

SEQ ID NO: 5653190 - DNA, 25 bp, Homo sapien
ggtatggaggaataaagaaatagaa

SEQ ID NO: 5653191 - DNA, 25 bp, Homo sapien
caagcaagcaagtaaattaagaagg

SEQ ID NO: 5653192 - DNA, 25 bp, Homo sapien
taagaaggttacttagtaatgagag

SEQ ID NO: 5653193 - DNA, 25 bp, Homo sapien
tacttagtaatgagaggtatggagg

SEQ ID NO: 5653194 - DNA, 25 bp, Homo sapien
aacagataagcaagcaagcaagtaa

SEQ ID NO: 5653195 - DNA, 25 bp, Homo sapien
atagaaagtatttggggccgagtgc

SEQ ID NO: 5653196 - DNA, 25 bp, Homo sapien
tgctctgactttatccttcagtttc

SEQ ID NO: 5653197 - DNA, 25 bp, Homo sapien
cctggcccaatgaacttccctgacc

SEQ ID NO: 5653198 - DNA, 25 bp, Homo sapien
cttcactctcagcatagtgactgct

SEQ ID NO: 5653199 - DNA, 25 bp, Homo sapien
tccttcactctcagcatagtgactg

SEQ ID NO: 5653200 - DNA, 25 bp, Homo sapien
ccttcactctcagcatagtgactgc

SEQ ID NO: 5653201 - DNA, 25 bp, Homo sapien
ggcccaatgaacttccctgacctct

SEQ ID NO: 5653202 - DNA, 25 bp, Homo sapien
gaaactgaaggataaagtcagagca

SEQ ID NO: 5653203 - DNA, 25 bp, Homo sapien
agcagtcactatgctgagagtgaag

SEQ ID NO: 5653204 - DNA, 25 bp, Homo sapien
agaggtcagggaagttcattgggcc

SEQ ID NO: 5653205 - DNA, 25 bp, Homo sapien
cagtcactatgctgagagtgaagga

SEQ ID NO: 5653206 - DNA, 25 bp, Homo sapien
ggtcagggaagttcattgggccagg

SEQ ID NO: 5653207 - DNA, 25 bp, Homo sapien
gcagtcactatgctgagagtgaagg

SEQ ID NO: 5653208 - DNA, 25 bp, Homo sapien
tccctgactggtattgttcatcaca

SEQ ID NO: 5653209 - DNA, 25 bp, Homo sapien
ggtccctgactggtattgttcatca

SEQ ID NO: 5653210 - DNA, 25 bp, Homo sapien
actcttctcagactactcaatttga

SEQ ID NO: 5653211 - DNA, 25 bp, Homo sapien
taaactcttctcagactactcaatt

SEQ ID NO: 5653212 - DNA, 25 bp, Homo sapien
tctcagactactcaatttgaatgtg

SEQ ID NO: 5653213 - DNA, 25 bp, Homo sapien
ctgggtccctgactggtattgttca

SEQ ID NO: 5653214 - DNA, 25 bp, Homo sapien
tgaacaataccagtcagggacccag

SEQ ID NO: 5653215 - DNA, 25 bp, Homo sapien
tgatgaacaataccagtcagggacc

SEQ ID NO: 5653216 - DNA, 25 bp, Homo sapien
gatgaacaataccagtcagggaccc

SEQ ID NO: 5653217 - DNA, 25 bp, Homo sapien
cacattcaaattgagtagtctgaga

SEQ ID NO: 5653218 - DNA, 25 bp, Homo sapien
tgtgatgaacaataccagtcaggga

SEQ ID NO: 5653219 - DNA, 25 bp, Homo sapien
caaattgagtagtctgagaagagtt

SEQ ID NO: 5653220 - DNA, 25 bp, Homo sapien
cccaagagcctttacttaattctgt

SEQ ID NO: 5653221 - DNA, 25 bp, Homo sapien
acagaattaagtaaaggctcttggg

SEQ ID NO: 5653222 - DNA, 25 bp, Homo sapien
ggatagctttttctttggagacagg

SEQ ID NO: 5653223 - DNA, 25 bp, Homo sapien
cccaagagcctttacttaattctgt

SEQ ID NO: 5653224 - DNA, 25 bp, Homo sapien
agagcctttacttaattctgttttg

SEQ ID NO: 5653225 - DNA, 25 bp, Homo sapien
aaatggatagctttttctttggaga

SEQ ID NO: 5653226 - DNA, 25 bp, Homo sapien
tctgttttgttgaaaaatggatagc

SEQ ID NO: 5653227 - DNA, 25 bp, Homo sapien
caagagcctttacttaattctgttt

SEQ ID NO: 5653228 - DNA, 25 bp, Homo sapien
acagaattaagtaaaggctcttggg

SEQ ID NO: 5653229 - DNA, 25 bp, Homo sapien
tctccaaagaaaaagctatccattt

SEQ ID NO: 5653230 - DNA, 25 bp, Homo sapien
aacagaattaagtaaaggctcttgg

SEQ ID NO: 5653231 - DNA, 25 bp, Homo sapien
agctatccatttttcaacaaaacag

SEQ ID NO: 5653232 - DNA, 25 bp, Homo sapien
cctgtctccaaagaaaaagctatcc

SEQ ID NO: 5653233 - DNA, 25 bp, Homo sapien
caaaacagaattaagtaaaggctct

SEQ ID NO: 5653234 - DNA, 25 bp, Homo sapien
aaaatcacaaaagggtatgtggtag

SEQ ID NO: 5653235 - DNA, 25 bp, Homo sapien
tatatatgaaaaggtgtgaaggtag

SEQ ID NO: 5653236 - DNA, 25 bp, Homo sapien
ggtgtgaaggtagatgaaaatcaca

SEQ ID NO: 5653237 - DNA, 25 bp, Homo sapien
cacaaaagggtatgtggtagttaat

SEQ ID NO: 5653238 - DNA, 25 bp, Homo sapien
gaaaaggtgtgaaggtagatgaaaa

SEQ ID NO: 5653239 - DNA, 25 bp, Homo sapien
tctttatatatgaaaaggtgtgaag

SEQ ID NO: 5653240 - DNA, 25 bp, Homo sapien
cttcacaccttttcatatataaaga

SEQ ID NO: 5653241 - DNA, 25 bp, Homo sapien
taactaccacatacccttttgtgat

SEQ ID NO: 5653242 - DNA, 25 bp, Homo sapien
catacccttttgtgattttcatcta

SEQ ID NO: 5653243 - DNA, 25 bp, Homo sapien
attaactaccacatacccttttgtg

SEQ ID NO: 5653244 - DNA, 25 bp, Homo sapien
gattttcatctaccttcacaccttt

SEQ ID NO: 5653245 - DNA, 25 bp, Homo sapien
tgtgattttcatctaccttcacacc

SEQ ID NO: 5653246 - DNA, 25 bp, Homo sapien
gcagatcaggtaaacttcattttct

SEQ ID NO: 5653247 - DNA, 25 bp, Homo sapien
cagtgcagatcaggtaaacttcatt

SEQ ID NO: 5653248 - DNA, 25 bp, Homo sapien
gtgcagatcaggtaaacttcatttt

SEQ ID NO: 5653249 - DNA, 25 bp, Homo sapien
agtgcagatcaggtaaacttcattt

SEQ ID NO: 5653250 - DNA, 25 bp, Homo sapien
tgcagatcaggtaaacttcattttc

SEQ ID NO: 5653251 - DNA, 25 bp, Homo sapien
aattgaagagtcttgtccacagctg

SEQ ID NO: 5653252 - DNA, 25 bp, Homo sapien
ttaattgaagagtcttgtccacagc

SEQ ID NO: 5653253 - DNA, 25 bp, Homo sapien
actttacaagttaattgaagagtct

SEQ ID NO: 5653254 - DNA, 25 bp, Homo sapien
taattgaagagtcttgtccacagct

SEQ ID NO: 5653255 - DNA, 25 bp, Homo sapien
caagttaattgaagagtcttgtcca

SEQ ID NO: 5653256 - DNA, 25 bp, Homo sapien
agttaattgaagagtcttgtccaca

SEQ ID NO: 5653257 - DNA, 25 bp, Homo sapien
ctgtggacaagactcttcaattaac

SEQ ID NO: 5653258 - DNA, 25 bp, Homo sapien
tgtggacaagactcttcaattaact

SEQ ID NO: 5653259 - DNA, 25 bp, Homo sapien
gctgtggacaagactcttcaattaa

SEQ ID NO: 5653260 - DNA, 25 bp, Homo sapien
aagactcttcaattaacttgtaaag

SEQ ID NO: 5653261 - DNA, 25 bp, Homo sapien
cagctgtggacaagactcttcaatt

SEQ ID NO: 5653262 - DNA, 25 bp, Homo sapien
tggacaagactcttcaattaacttg

SEQ ID NO: 5653263 - DNA, 25 bp, Homo sapien
agaaaatgaagtttacctgatctgc

SEQ ID NO: 5653264 - DNA, 25 bp, Homo sapien
aaaatgaagtttacctgatctgcac

SEQ ID NO: 5653265 - DNA, 25 bp, Homo sapien
gaaaatgaagtttacctgatctgca

SEQ ID NO: 5653266 - DNA, 25 bp, Homo sapien
aaatgaagtttacctgatctgcact

SEQ ID NO: 5653267 - DNA, 25 bp, Homo sapien
aatgaagtttacctgatctgcactg

SEQ ID NO: 5653268 - DNA, 25 bp, Homo sapien
gcagatcaggtaaacttcattttct

SEQ ID NO: 5653269 - DNA, 25 bp, Homo sapien
gaagagtcttgtccacagctggcaa

SEQ ID NO: 5653270 - DNA, 25 bp, Homo sapien
cagtgcagatcaggtaaacttcatt

SEQ ID NO: 5653271 - DNA, 25 bp, Homo sapien
gtgcagatcaggtaaacttcatttt

SEQ ID NO: 5653272 - DNA, 25 bp, Homo sapien
tgcagatcaggtaaacttcattttc

SEQ ID NO: 5653273 - DNA, 25 bp, Homo sapien
cagggcccagatattacactgtcaa

SEQ ID NO: 5653274 - DNA, 25 bp, Homo sapien
gatcaaatgagattgtgtttgtgaa

SEQ ID NO: 5653275 - DNA, 25 bp, Homo sapien
tagtgttttccagtttacaaagcac

SEQ ID NO: 5653276 - DNA, 25 bp, Homo sapien
atagtatttgtatagtgttttccag

SEQ ID NO: 5653277 - DNA, 25 bp, Homo sapien
agtatgtctgcctaccttacaaggt

SEQ ID NO: 5653278 - DNA, 25 bp, Homo sapien
ccttacaaggtttgggagaagatca

SEQ ID NO: 5653279 - DNA, 25 bp, Homo sapien
caaggtttgggagaagatcaaatga

SEQ ID NO: 5653280 - DNA, 25 bp, Homo sapien
accttgtaaggtaggcagacatact

SEQ ID NO: 5653281 - DNA, 25 bp, Homo sapien
gtgctttgtaaactggaaaacacta

SEQ ID NO: 5653282 - DNA, 25 bp, Homo sapien
tactatttttcacaaacacaatctc

SEQ ID NO: 5653283 - DNA, 25 bp, Homo sapien
tgatcttctcccaaaccttgtaagg

SEQ ID NO: 5653284 - DNA, 25 bp, Homo sapien
ctggaaaacactatacaaatactat

SEQ ID NO: 5653285 - DNA, 25 bp, Homo sapien
tcatttgatcttctcccaaaccttg

SEQ ID NO: 5653286 - DNA, 25 bp, Homo sapien
taaagttggcatatatgcagtcatc

SEQ ID NO: 5653287 - DNA, 25 bp, Homo sapien
ttatccacatctaaagttggcatat

SEQ ID NO: 5653288 - DNA, 25 bp, Homo sapien
ggttatccacatctaaagttggcat

SEQ ID NO: 5653289 - DNA, 25 bp, Homo sapien
aagttggcatatatgcagtcatctt

SEQ ID NO: 5653290 - DNA, 25 bp, Homo sapien
tgggttatccacatctaaagttggc

SEQ ID NO: 5653291 - DNA, 25 bp, Homo sapien
gggttatccacatctaaagttggca

SEQ ID NO: 5653292 - DNA, 25 bp, Homo sapien
tatgccaactttagatgtggataac

SEQ ID NO: 5653293 - DNA, 25 bp, Homo sapien
atatgccaactttagatgtggataa

SEQ ID NO: 5653294 - DNA, 25 bp, Homo sapien
tgccaactttagatgtggataaccc

SEQ ID NO: 5653295 - DNA, 25 bp, Homo sapien
gatgactgcatatatgccaacttta

SEQ ID NO: 5653296 - DNA, 25 bp, Homo sapien
aagatgactgcatatatgccaactt

SEQ ID NO: 5653297 - DNA, 25 bp, Homo sapien
gccaactttagatgtggataaccca

SEQ ID NO: 5653298 - DNA, 25 bp, Homo sapien
gttcatctagtagcatcccagccag

SEQ ID NO: 5653299 - DNA, 25 bp, Homo sapien
ctcaactcctttactaactgtttga

SEQ ID NO: 5653300 - DNA, 25 bp, Homo sapien
tcatctagtagcatcccagccagac

SEQ ID NO: 5653301 - DNA, 25 bp, Homo sapien
tagtagcatcccagccagacctcaa

SEQ ID NO: 5653302 - DNA, 25 bp, Homo sapien
aatcaaaatgtatgtagagttcatc

SEQ ID NO: 5653303 - DNA, 25 bp, Homo sapien
tagagttcatctagtagcatcccag

SEQ ID NO: 5653304 - DNA, 25 bp, Homo sapien
gctgggatgctactagatgaactct

SEQ ID NO: 5653305 - DNA, 25 bp, Homo sapien
agaaatcaaacagttagtaaaggag

SEQ ID NO: 5653306 - DNA, 25 bp, Homo sapien
gatgaactctacatacattttgatt

SEQ ID NO: 5653307 - DNA, 25 bp, Homo sapien
tcaaacagttagtaaaggagttgag

SEQ ID NO: 5653308 - DNA, 25 bp, Homo sapien
tctggctgggatgctactagatgaa

SEQ ID NO: 5653309 - DNA, 25 bp, Homo sapien
ttgaggtctggctgggatgctacta

SEQ ID NO: 5653310 - DNA, 25 bp, Homo sapien
tggtctcttaactctcaccttcctg

SEQ ID NO: 5653311 - DNA, 25 bp, Homo sapien
ttaactctcaccttcctgctcatgt

SEQ ID NO: 5653312 - DNA, 25 bp, Homo sapien
gaaacagtgattctggtctcttaac

SEQ ID NO: 5653313 - DNA, 25 bp, Homo sapien
aaaaatagaaacagtgattctggtc

SEQ ID NO: 5653314 - DNA, 25 bp, Homo sapien
tcaccttcctgctcatgttgttttt

SEQ ID NO: 5653315 - DNA, 25 bp, Homo sapien
tcatgttgttttttgctgtttggaa

SEQ ID NO: 5653316 - DNA, 25 bp, Homo sapien
taagagaccagaatcactgtttcta

SEQ ID NO: 5653317 - DNA, 25 bp, Homo sapien
aaaacaacatgagcaggaaggtgag

SEQ ID NO: 5653318 - DNA, 25 bp, Homo sapien
caggaaggtgagagttaagagacca

SEQ ID NO: 5653319 - DNA, 25 bp, Homo sapien
gcaaaaaacaacatgagcaggaagg

SEQ ID NO: 5653320 - DNA, 25 bp, Homo sapien
tccaaacagcaaaaaacaacatgag

SEQ ID NO: 5653321 - DNA, 25 bp, Homo sapien
agttaagagaccagaatcactgttt

SEQ ID NO: 5653322 - DNA, 25 bp, Homo sapien
caccatggtcaagagacctacccag

SEQ ID NO: 5653323 - DNA, 25 bp, Homo sapien
gacaccatggtcaagagacctaccc

SEQ ID NO: 5653324 - DNA, 25 bp, Homo sapien
gaactgaggacaccatggtcaagag

SEQ ID NO: 5653325 - DNA, 25 bp, Homo sapien
gaggacaccatggtcaagagaccta

SEQ ID NO: 5653326 - DNA, 25 bp, Homo sapien
tgaggacaccatggtcaagagacct

SEQ ID NO: 5653327 - DNA, 25 bp, Homo sapien
catggtcaagagacctacccagtta

SEQ ID NO: 5653328 - DNA, 25 bp, Homo sapien
taggtctcttgaccatggtgtcctc

SEQ ID NO: 5653329 - DNA, 25 bp, Homo sapien
tcttgaccatggtgtcctcagttct

SEQ ID NO: 5653330 - DNA, 25 bp, Homo sapien
tgggtaggtctcttgaccatggtgt

SEQ ID NO: 5653331 - DNA, 25 bp, Homo sapien
ggtaggtctcttgaccatggtgtcc

SEQ ID NO: 5653332 - DNA, 25 bp, Homo sapien
aggtctcttgaccatggtgtcctca

SEQ ID NO: 5653333 - DNA, 25 bp, Homo sapien
taactgggtaggtctcttgaccatg

SEQ ID NO: 5653334 - DNA, 25 bp, Homo sapien
ctcgctccgtcgctcaggccagagt

SEQ ID NO: 5653335 - DNA, 25 bp, Homo sapien
gtctcgctccgtcgctcaggccaga

SEQ ID NO: 5653336 - DNA, 25 bp, Homo sapien
tcgctccgtcgctcaggccagagtg

SEQ ID NO: 5653337 - DNA, 25 bp, Homo sapien
gctccgtcgctcaggccagagtgca

SEQ ID NO: 5653338 - DNA, 25 bp, Homo sapien
cgctccgtcgctcaggccagagtgc

SEQ ID NO: 5653339 - DNA, 25 bp, Homo sapien
ctccgtcgctcaggccagagtgcag

SEQ ID NO: 5653340 - DNA, 25 bp, Homo sapien
tctggcctgagcgacggagcgagac

SEQ ID NO: 5653341 - DNA, 25 bp, Homo sapien
tgcactctggcctgagcgacggagc

SEQ ID NO: 5653342 - DNA, 25 bp, Homo sapien
cactctggcctgagcgacggagcga

SEQ ID NO: 5653343 - DNA, 25 bp, Homo sapien
gcactctggcctgagcgacggagcg

SEQ ID NO: 5653344 - DNA, 25 bp, Homo sapien
actctggcctgagcgacggagcgag

SEQ ID NO: 5653345 - DNA, 25 bp, Homo sapien
ctctggcctgagcgacggagcgaga

SEQ ID NO: 5653346 - DNA, 25 bp, Homo sapien
cagtagtgtgatcgcggctcactgc

SEQ ID NO: 5653347 - DNA, 25 bp, Homo sapien
ctcgacctctcaggctcaggtgatc

SEQ ID NO: 5653348 - DNA, 25 bp, Homo sapien
cgacctctcaggctcaggtgatcct

SEQ ID NO: 5653349 - DNA, 25 bp, Homo sapien
gcctcgacctctcaggctcaggtga

SEQ ID NO: 5653350 - DNA, 25 bp, Homo sapien
tgcagtagtgtgatcgcggctcact

SEQ ID NO: 5653351 - DNA, 25 bp, Homo sapien
gcagtagtgtgatcgcggctcactg

SEQ ID NO: 5653352 - DNA, 25 bp, Homo sapien
agtgagccgcgatcacactactgca

SEQ ID NO: 5653353 - DNA, 25 bp, Homo sapien
gcagtgagccgcgatcacactactg

SEQ ID NO: 5653354 - DNA, 25 bp, Homo sapien
gatcacctgagcctgagaggtcgag

SEQ ID NO: 5653355 - DNA, 25 bp, Homo sapien
aggatcacctgagcctgagaggtcg

SEQ ID NO: 5653356 - DNA, 25 bp, Homo sapien
tcacctgagcctgagaggtcgaggc

SEQ ID NO: 5653357 - DNA, 25 bp, Homo sapien
cagtgagccgcgatcacactactgc

SEQ ID NO: 5653358 - DNA, 25 bp, Homo sapien
ttgaatacttaactgtgtgctaagc

SEQ ID NO: 5653359 - DNA, 25 bp, Homo sapien
gcactgattgaatacttaactgtgt

SEQ ID NO: 5653360 - DNA, 25 bp, Homo sapien
tgaatacttaactgtgtgctaagca

SEQ ID NO: 5653361 - DNA, 25 bp, Homo sapien
gcttagcacacagttaagtattcaa

SEQ ID NO: 5653362 - DNA, 25 bp, Homo sapien
tgcttagcacacagttaagtattca

SEQ ID NO: 5653363 - DNA, 25 bp, Homo sapien
acacagttaagtattcaatcagtgc

SEQ ID NO: 5653364 - DNA, 25 bp, Homo sapien
taaagccaaggacgagcactgattg

SEQ ID NO: 5653365 - DNA, 25 bp, Homo sapien
gcactgattgaatacttaactgtgt

SEQ ID NO: 5653366 - DNA, 25 bp, Homo sapien
aaaaaggcataaagccaaggacgag

SEQ ID NO: 5653367 - DNA, 25 bp, Homo sapien
ccaaggacgagcactgattgaatac

SEQ ID NO: 5653368 - DNA, 25 bp, Homo sapien
tgaatacttaactgtgtgctaagca

SEQ ID NO: 5653369 - DNA, 25 bp, Homo sapien
ggcataaagccaaggacgagcactg

SEQ ID NO: 5653370 - DNA, 25 bp, Homo sapien
gcttagcacacagttaagtattcaa

SEQ ID NO: 5653371 - DNA, 25 bp, Homo sapien
tattcaatcagtgctcgtccttggc

SEQ ID NO: 5653372 - DNA, 25 bp, Homo sapien
taagtattcaatcagtgctcgtcct

SEQ ID NO: 5653373 - DNA, 25 bp, Homo sapien
tgcttagcacacagttaagtattca

SEQ ID NO: 5653374 - DNA, 25 bp, Homo sapien
acacagttaagtattcaatcagtgc

SEQ ID NO: 5653375 - DNA, 25 bp, Homo sapien
cagtgctcgtccttggctttatgcc

SEQ ID NO: 5653376 - DNA, 25 bp, Homo sapien
atgccataaaaccgggccgggcgca

SEQ ID NO: 5653377 - DNA, 25 bp, Homo sapien
tgccataaaaccgggccgggcgcag

SEQ ID NO: 5653378 - DNA, 25 bp, Homo sapien
tgcgcccggcccggttttatggcat

SEQ ID NO: 5653379 - DNA, 25 bp, Homo sapien
ctgcgcccggcccggttttatggca

SEQ ID NO: 5653380 - DNA, 25 bp, Homo sapien
cgtaataaacagtaaaaatgccata

SEQ ID NO: 5653381 - DNA, 25 bp, Homo sapien
ccgtaataaacagtaaaaatgccat

SEQ ID NO: 5653382 - DNA, 25 bp, Homo sapien
taataaacagtaaaaatgccataaa

SEQ ID NO: 5653383 - DNA, 25 bp, Homo sapien
atgccataaaaccgggccgggcgca

SEQ ID NO: 5653384 - DNA, 25 bp, Homo sapien
gtaataaacagtaaaaatgccataa

SEQ ID NO: 5653385 - DNA, 25 bp, Homo sapien
tgccataaaaccgggccgggcgcag

SEQ ID NO: 5653386 - DNA, 25 bp, Homo sapien
cactgcgcccggcccggttttatgg

SEQ ID NO: 5653387 - DNA, 25 bp, Homo sapien
tgcgcccggcccggttttatggcat

SEQ ID NO: 5653388 - DNA, 25 bp, Homo sapien
atggcatttttactgtttattacgg

SEQ ID NO: 5653389 - DNA, 25 bp, Homo sapien
tatggcatttttactgtttattacg

SEQ ID NO: 5653390 - DNA, 25 bp, Homo sapien
ctgcgcccggcccggttttatggca

SEQ ID NO: 5653391 - DNA, 25 bp, Homo sapien
ttatggcatttttactgtttattac

SEQ ID NO: 5653392 - DNA, 25 bp, Homo sapien
agtctcagatcctgtatcttcttta

SEQ ID NO: 5653393 - DNA, 25 bp, Homo sapien
ggctccagtatttattagctgagag

SEQ ID NO: 5653394 - DNA, 25 bp, Homo sapien
tttttgcaagttcatgtctggctcc

SEQ ID NO: 5653395 - DNA, 25 bp, Homo sapien
tgtctggctccagtatttattagct

SEQ ID NO: 5653396 - DNA, 25 bp, Homo sapien
tgcaagttcatgtctggctccagta

SEQ ID NO: 5653397 - DNA, 25 bp, Homo sapien
tatttattagctgagagttagagtc

SEQ ID NO: 5653398 - DNA, 25 bp, Homo sapien
tactggagccagacatgaacttgca

SEQ ID NO: 5653399 - DNA, 25 bp, Homo sapien
gactctaactctcagctaataaata

SEQ ID NO: 5653400 - DNA, 25 bp, Homo sapien
taaagaagatacaggatctgagact

SEQ ID NO: 5653401 - DNA, 25 bp, Homo sapien
cagctaataaatactggagccagac

SEQ ID NO: 5653402 - DNA, 25 bp, Homo sapien
ggagccagacatgaacttgcaaaaa

SEQ ID NO: 5653403 - DNA, 25 bp, Homo sapien
tctcagctaataaatactggagcca

SEQ ID NO: 5653404 - DNA, 25 bp, Homo sapien
gacactcgtgtccatcagatactct

SEQ ID NO: 5653405 - DNA, 25 bp, Homo sapien
gggcttggggacactcgtgtccatc

SEQ ID NO: 5653406 - DNA, 25 bp, Homo sapien
ggacactcgtgtccatcagatactc

SEQ ID NO: 5653407 - DNA, 25 bp, Homo sapien
catctgctctgtgcggaaccctggg

SEQ ID NO: 5653408 - DNA, 25 bp, Homo sapien
gggacactcgtgtccatcagatact

SEQ ID NO: 5653409 - DNA, 25 bp, Homo sapien
tgggcttggggacactcgtgtccat

SEQ ID NO: 5653410 - DNA, 25 bp, Homo sapien
atggacacgagtgtccccaagccca

SEQ ID NO: 5653411 - DNA, 25 bp, Homo sapien
tgatggacacgagtgtccccaagcc

SEQ ID NO: 5653412 - DNA, 25 bp, Homo sapien
agtatctgatggacacgagtgtccc

SEQ ID NO: 5653413 - DNA, 25 bp, Homo sapien
agagtatctgatggacacgagtgtc

SEQ ID NO: 5653414 - DNA, 25 bp, Homo sapien
cccagggttccgcacagagcagatg

SEQ ID NO: 5653415 - DNA, 25 bp, Homo sapien
tatctgatggacacgagtgtcccca

SEQ ID NO: 5653416 - DNA, 25 bp, Homo sapien
ggtccctgtccacgtagcctgggaa

SEQ ID NO: 5653417 - DNA, 25 bp, Homo sapien
ttgggagctcctcagtcccttcagc

SEQ ID NO: 5653418 - DNA, 25 bp, Homo sapien
cgtagcctgggaacctgctcccact

SEQ ID NO: 5653419 - DNA, 25 bp, Homo sapien
cactttgggagctcctcagtccctt

SEQ ID NO: 5653420 - DNA, 25 bp, Homo sapien
aagcatcgacttcccctcccatccg

SEQ ID NO: 5653421 - DNA, 25 bp, Homo sapien
tgtccacgtagcctgggaacctgct

SEQ ID NO: 5653422 - DNA, 25 bp, Homo sapien
aagggactgaggagctcccaaagtg

SEQ ID NO: 5653423 - DNA, 25 bp, Homo sapien
gagcaggttcccaggctacgtggac

SEQ ID NO: 5653424 - DNA, 25 bp, Homo sapien
ttcccaggctacgtggacagggacc

SEQ ID NO: 5653425 - DNA, 25 bp, Homo sapien
gctgaagggactgaggagctcccaa

SEQ ID NO: 5653426 - DNA, 25 bp, Homo sapien
agtgggagcaggttcccaggctacg

SEQ ID NO: 5653427 - DNA, 25 bp, Homo sapien
agcaggttcccaggctacgtggaca

SEQ ID NO: 5653428 - DNA, 25 bp, Homo sapien
aattacatgaacaagccaggcgcgc

SEQ ID NO: 5653429 - DNA, 25 bp, Homo sapien
aaattacatgaacaagccaggcgcg

SEQ ID NO: 5653430 - DNA, 25 bp, Homo sapien
tcaaattacatgaacaagccaggcg

SEQ ID NO: 5653431 - DNA, 25 bp, Homo sapien
gcttctcgggaaggcgggaggatcg

SEQ ID NO: 5653432 - DNA, 25 bp, Homo sapien
atgaacaagccaggcgcgctgcctg

SEQ ID NO: 5653433 - DNA, 25 bp, Homo sapien
ttacatgaacaagccaggcgcgctg

SEQ ID NO: 5653434 - DNA, 25 bp, Homo sapien
caggcagcgcgcctggcttgttcat

SEQ ID NO: 5653435 - DNA, 25 bp, Homo sapien
cgatcctcccgccttcccgagaagc

SEQ ID NO: 5653436 - DNA, 25 bp, Homo sapien
gcgcgcctggcttgttcatgtaatt

SEQ ID NO: 5653437 - DNA, 25 bp, Homo sapien
cgcctggcttgttcatgtaatttga

SEQ ID NO: 5653438 - DNA, 25 bp, Homo sapien
ggcagcgcgcctggcttgttcatgt

SEQ ID NO: 5653439 - DNA, 25 bp, Homo sapien
cagcgcgcctggcttgttcatgtaa

SEQ ID NO: 5653440 - DNA, 25 bp, Homo sapien
aggatacacgaccactggcaacctg

SEQ ID NO: 5653441 - DNA, 25 bp, Homo sapien
atttcacgtaaggatacacgaccac

SEQ ID NO: 5653442 - DNA, 25 bp, Homo sapien
gtaaggatacacgaccactggcaac

SEQ ID NO: 5653443 - DNA, 25 bp, Homo sapien
acgtaaggatacacgaccactggca

SEQ ID NO: 5653444 - DNA, 25 bp, Homo sapien
tcacgtaaggatacacgaccactgg

SEQ ID NO: 5653445 - DNA, 25 bp, Homo sapien
ttattaggtaggaaactgactcagc

SEQ ID NO: 5653446 - DNA, 25 bp, Homo sapien
ggttgccagtggtcgtgtatcctta

SEQ ID NO: 5653447 - DNA, 25 bp, Homo sapien
tgccagtggtcgtgtatccttacgt

SEQ ID NO: 5653448 - DNA, 25 bp, Homo sapien
agtggtcgtgtatccttacgtgaaa

SEQ ID NO: 5653449 - DNA, 25 bp, Homo sapien
caggttgccagtggtcgtgtatcct

SEQ ID NO: 5653450 - DNA, 25 bp, Homo sapien
ccagtggtcgtgtatccttacgtga

SEQ ID NO: 5653451 - DNA, 25 bp, Homo sapien
gctgagtcagtttcctacctaataa

SEQ ID NO: 5653452 - DNA, 25 bp, Homo sapien
tagccaaagttgaatggtatgtggt

SEQ ID NO: 5653453 - DNA, 25 bp, Homo sapien
agccaaagttgaatggtatgtggtt

SEQ ID NO: 5653454 - DNA, 25 bp, Homo sapien
ctttcaagggacataaagactaata

SEQ ID NO: 5653455 - DNA, 25 bp, Homo sapien
gccaaagttgaatggtatgtggttt

SEQ ID NO: 5653456 - DNA, 25 bp, Homo sapien
aaaccacataccattcaactttggc

SEQ ID NO: 5653457 - DNA, 25 bp, Homo sapien
aaccacataccattcaactttggct

SEQ ID NO: 5653458 - DNA, 25 bp, Homo sapien
accacataccattcaactttggcta

SEQ ID NO: 5653459 - DNA, 25 bp, Homo sapien
tattagtctttatgtcccttgaaag

SEQ ID NO: 5653460 - DNA, 25 bp, Homo sapien
tagccaaagttgaatggtatgtggt

SEQ ID NO: 5653461 - DNA, 25 bp, Homo sapien
caaaacaaaaggcacaaggcacagt

SEQ ID NO: 5653462 - DNA, 25 bp, Homo sapien
cagtgtgtgcatgtggatagccaaa

SEQ ID NO: 5653463 - DNA, 25 bp, Homo sapien
ctttcaagggacataaagactaata

SEQ ID NO: 5653464 - DNA, 25 bp, Homo sapien
gggacataaagactaatagggatac

SEQ ID NO: 5653465 - DNA, 25 bp, Homo sapien
tatgtggtttttctttcaagggaca

SEQ ID NO: 5653466 - DNA, 25 bp, Homo sapien
cacacactgtgccttgtgccttttg

SEQ ID NO: 5653467 - DNA, 25 bp, Homo sapien
aaaccacataccattcaactttggc

SEQ ID NO: 5653468 - DNA, 25 bp, Homo sapien
tgtcccttgaaagaaaaaccacata

SEQ ID NO: 5653469 - DNA, 25 bp, Homo sapien
tttggctatccacatgcacacactg

SEQ ID NO: 5653470 - DNA, 25 bp, Homo sapien
gtatccctattagtctttatgtccc

SEQ ID NO: 5653471 - DNA, 25 bp, Homo sapien
tattagtctttatgtcccttgaaag

SEQ ID NO: 5653472 - DNA, 25 bp, Homo sapien
catgtctaattacctactttaactg

SEQ ID NO: 5653473 - DNA, 25 bp, Homo sapien
tcatgtctaattacctactttaact

SEQ ID NO: 5653474 - DNA, 25 bp, Homo sapien
tgtctaattacctactttaactgga

SEQ ID NO: 5653475 - DNA, 25 bp, Homo sapien
atgtctaattacctactttaactgg

SEQ ID NO: 5653476 - DNA, 25 bp, Homo sapien
tgcttgagcctggcattcctgaggg

SEQ ID NO: 5653477 - DNA, 25 bp, Homo sapien
agttaaagtaggtaattagacatga

SEQ ID NO: 5653478 - DNA, 25 bp, Homo sapien
ccagttaaagtaggtaattagacat

SEQ ID NO: 5653479 - DNA, 25 bp, Homo sapien
ccctcaggaatgccaggctcaagca

SEQ ID NO: 5653480 - DNA, 25 bp, Homo sapien
tccagttaaagtaggtaattagaca

SEQ ID NO: 5653481 - DNA, 25 bp, Homo sapien
cagttaaagtaggtaattagacatg

SEQ ID NO: 5653482 - DNA, 25 bp, Homo sapien
gcttgagcctggcattcctgagggc

SEQ ID NO: 5653483 - DNA, 25 bp, Homo sapien
gccctgctcatgtctaattacctac

SEQ ID NO: 5653484 - DNA, 25 bp, Homo sapien
ttgagcctggcattcctgagggcga

SEQ ID NO: 5653485 - DNA, 25 bp, Homo sapien
agcctggcattcctgagggcgaggg

SEQ ID NO: 5653486 - DNA, 25 bp, Homo sapien
tgtctaattacctactttaactgga

SEQ ID NO: 5653487 - DNA, 25 bp, Homo sapien
cttgagcctggcattcctgagggcg

SEQ ID NO: 5653488 - DNA, 25 bp, Homo sapien
tcgccctcaggaatgccaggctcaa

SEQ ID NO: 5653489 - DNA, 25 bp, Homo sapien
aggtaattagacatgagcagggcag

SEQ ID NO: 5653490 - DNA, 25 bp, Homo sapien
gccctcaggaatgccaggctcaagc

SEQ ID NO: 5653491 - DNA, 25 bp, Homo sapien
aagtaggtaattagacatgagcagg

SEQ ID NO: 5653492 - DNA, 25 bp, Homo sapien
ccagttaaagtaggtaattagacat

SEQ ID NO: 5653493 - DNA, 25 bp, Homo sapien
tccagttaaagtaggtaattagaca

SEQ ID NO: 5653494 - DNA, 25 bp, Homo sapien
acaaaggcaatatgtttttcttctt

SEQ ID NO: 5653495 - DNA, 25 bp, Homo sapien
taacactaaacaaaggcaatatgtt

SEQ ID NO: 5653496 - DNA, 25 bp, Homo sapien
gttgaaaccagaatatattttaaca

SEQ ID NO: 5653497 - DNA, 25 bp, Homo sapien
ctaaacaaaggcaatatgtttttct

SEQ ID NO: 5653498 - DNA, 25 bp, Homo sapien
tttaacactaaacaaaggcaatatg

SEQ ID NO: 5653499 - DNA, 25 bp, Homo sapien
ttaacactaaacaaaggcaatatgt

SEQ ID NO: 5653500 - DNA, 25 bp, Homo sapien
acatattgcctttgtttagtgttaa

SEQ ID NO: 5653501 - DNA, 25 bp, Homo sapien
tgttaaaatatattctggtttcaac

SEQ ID NO: 5653502 - DNA, 25 bp, Homo sapien
aaagaagaaaaacatattgcctttg

SEQ ID NO: 5653503 - DNA, 25 bp, Homo sapien
catattgcctttgtttagtgttaaa

SEQ ID NO: 5653504 - DNA, 25 bp, Homo sapien
aacatattgcctttgtttagtgtta

SEQ ID NO: 5653505 - DNA, 25 bp, Homo sapien
agaaaaacatattgcctttgtttag

SEQ ID NO: 5653506 - DNA, 25 bp, Homo sapien
cagaaggcaagtgttatgagtatta

SEQ ID NO: 5653507 - DNA, 25 bp, Homo sapien
ctaaaattttgacgtatcagaaggc

SEQ ID NO: 5653508 - DNA, 25 bp, Homo sapien
ctgaagttaggatttgcgtttacaa

SEQ ID NO: 5653509 - DNA, 25 bp, Homo sapien
tgaagttaggatttgcgtttacaaa

SEQ ID NO: 5653510 - DNA, 25 bp, Homo sapien
ggcaagtgttatgagtattagtaaa

SEQ ID NO: 5653511 - DNA, 25 bp, Homo sapien
gacgtatcagaaggcaagtgttatg

SEQ ID NO: 5653512 - DNA, 25 bp, Homo sapien
taatactcataacacttgccttctg

SEQ ID NO: 5653513 - DNA, 25 bp, Homo sapien
cataacacttgccttctgatacgtc

SEQ ID NO: 5653514 - DNA, 25 bp, Homo sapien
tactaatactcataacacttgcctt

SEQ ID NO: 5653515 - DNA, 25 bp, Homo sapien
tttactaatactcataacacttgcc

SEQ ID NO: 5653516 - DNA, 25 bp, Homo sapien
gccttctgatacgtcaaaattttag

SEQ ID NO: 5653517 - DNA, 25 bp, Homo sapien
ttgtaaacgcaaatcctaacttcag

SEQ ID NO: 5653518 - DNA, 25 bp, Homo sapien
gacttcacaatttggctatcataac

SEQ ID NO: 5653519 - DNA, 25 bp, Homo sapien
gacaaaggccaagggacttcacaat

SEQ ID NO: 5653520 - DNA, 25 bp, Homo sapien
tgacaaaggccaagggacttcacaa

SEQ ID NO: 5653521 - DNA, 25 bp, Homo sapien
cacaatttggctatcataacaggcc

SEQ ID NO: 5653522 - DNA, 25 bp, Homo sapien
ttcacaatttggctatcataacagg

SEQ ID NO: 5653523 - DNA, 25 bp, Homo sapien
tgtgacaaaggccaagggacttcac

SEQ ID NO: 5653524 - DNA, 25 bp, Homo sapien
gttatgatagccaaattgtgaagtc

SEQ ID NO: 5653525 - DNA, 25 bp, Homo sapien
ttgtgaagtcccttggcctttgtca

SEQ ID NO: 5653526 - DNA, 25 bp, Homo sapien
attgtgaagtcccttggcctttgtc

SEQ ID NO: 5653527 - DNA, 25 bp, Homo sapien
gtgaagtcccttggcctttgtcaca

SEQ ID NO: 5653528 - DNA, 25 bp, Homo sapien
cctgttatgatagccaaattgtgaa

SEQ ID NO: 5653529 - DNA, 25 bp, Homo sapien
ggcctgttatgatagccaaattgtg

SEQ ID NO: 5653530 - DNA, 25 bp, Homo sapien
agttgagaataaggataacctgact

SEQ ID NO: 5653531 - DNA, 25 bp, Homo sapien
tgtgtgtgttgggtagaaaataact

SEQ ID NO: 5653532 - DNA, 25 bp, Homo sapien
cagtttcccttgatacacttacctt

SEQ ID NO: 5653533 - DNA, 25 bp, Homo sapien
tgtgtgttgggtagaaaataactgt

SEQ ID NO: 5653534 - DNA, 25 bp, Homo sapien
ttcagtttcccttgatacacttacc

SEQ ID NO: 5653535 - DNA, 25 bp, Homo sapien
tgttgggtagaaaataactgtagca

SEQ ID NO: 5653536 - DNA, 25 bp, Homo sapien
aaggtaagtgtatcaagggaaactg

SEQ ID NO: 5653537 - DNA, 25 bp, Homo sapien
tgctacagttattttctacccaaca

SEQ ID NO: 5653538 - DNA, 25 bp, Homo sapien
agttattttctacccaacacacaca

SEQ ID NO: 5653539 - DNA, 25 bp, Homo sapien
tacagttattttctacccaacacac

SEQ ID NO: 5653540 - DNA, 25 bp, Homo sapien
gtaagtgtatcaagggaaactgaat

SEQ ID NO: 5653541 - DNA, 25 bp, Homo sapien
agtcaggttatccttattctcaact

SEQ ID NO: 5653542 - DNA, 25 bp, Homo sapien
gaaaaaatagttgctacttagaggc

SEQ ID NO: 5653543 - DNA, 25 bp, Homo sapien
gaggcagtgtgcttaactctatctg

SEQ ID NO: 5653544 - DNA, 25 bp, Homo sapien
ggcagtgtgcttaactctatctgct

SEQ ID NO: 5653545 - DNA, 25 bp, Homo sapien
tacttagaggcagtgtgcttaactc

SEQ ID NO: 5653546 - DNA, 25 bp, Homo sapien
aaaatagttgctacttagaggcagt

SEQ ID NO: 5653547 - DNA, 25 bp, Homo sapien
tagaggcagtgtgcttaactctatc

SEQ ID NO: 5653548 - DNA, 25 bp, Homo sapien
agcagatagagttaagcacactgcc

SEQ ID NO: 5653549 - DNA, 25 bp, Homo sapien
gagttaagcacactgcctctaagta

SEQ ID NO: 5653550 - DNA, 25 bp, Homo sapien
actgcctctaagtagcaactatttt

SEQ ID NO: 5653551 - DNA, 25 bp, Homo sapien
tagagttaagcacactgcctctaag

SEQ ID NO: 5653552 - DNA, 25 bp, Homo sapien
gcctctaagtagcaactattttttc

SEQ ID NO: 5653553 - DNA, 25 bp, Homo sapien
cagatagagttaagcacactgcctc

SEQ ID NO: 5653554 - DNA, 25 bp, Homo sapien
tattccgaatccttgttgatgctca

SEQ ID NO: 5653555 - DNA, 25 bp, Homo sapien
cagattttgtattccgaatccttgt

SEQ ID NO: 5653556 - DNA, 25 bp, Homo sapien
ttgtattccgaatccttgttgatgc

SEQ ID NO: 5653557 - DNA, 25 bp, Homo sapien
cgaatccttgttgatgctcaattta

SEQ ID NO: 5653558 - DNA, 25 bp, Homo sapien
tccgaatccttgttgatgctcaatt

SEQ ID NO: 5653559 - DNA, 25 bp, Homo sapien
aagtatgattaactcagattttgta

SEQ ID NO: 5653560 - DNA, 25 bp, Homo sapien
gagcatcaacaaggattcggaatac

SEQ ID NO: 5653561 - DNA, 25 bp, Homo sapien
tacaaaatctgagttaatcatactt

SEQ ID NO: 5653562 - DNA, 25 bp, Homo sapien
aattgagcatcaacaaggattcgga

SEQ ID NO: 5653563 - DNA, 25 bp, Homo sapien
gcatcaacaaggattcggaatacaa

SEQ ID NO: 5653564 - DNA, 25 bp, Homo sapien
acaaggattcggaatacaaaatctg

SEQ ID NO: 5653565 - DNA, 25 bp, Homo sapien
taaattgagcatcaacaaggattcg

SEQ ID NO: 5653566 - DNA, 25 bp, Homo sapien
tgggtaaatagattacagttatgtt

SEQ ID NO: 5653567 - DNA, 25 bp, Homo sapien
atgggtaaatagattacagttatgt

SEQ ID NO: 5653568 - DNA, 25 bp, Homo sapien
taaatagattacagttatgtttgaa

SEQ ID NO: 5653569 - DNA, 25 bp, Homo sapien
ggtaaatagattacagttatgtttg

SEQ ID NO: 5653570 - DNA, 25 bp, Homo sapien
tatttaccttatatgggtaaataga

SEQ ID NO: 5653571 - DNA, 25 bp, Homo sapien
gtaaatagattacagttatgtttga

SEQ ID NO: 5653572 - DNA, 25 bp, Homo sapien
tctatttacccatataaggtaaata

SEQ ID NO: 5653573 - DNA, 25 bp, Homo sapien
tcaaacataactgtaatctatttac

SEQ ID NO: 5653574 - DNA, 25 bp, Homo sapien
ttcaaacataactgtaatctattta

SEQ ID NO: 5653575 - DNA, 25 bp, Homo sapien
caaacataactgtaatctatttacc

SEQ ID NO: 5653576 - DNA, 25 bp, Homo sapien
aacataactgtaatctatttaccca

SEQ ID NO: 5653577 - DNA, 25 bp, Homo sapien
acataactgtaatctatttacccat

SEQ ID NO: 5653578 - DNA, 25 bp, Homo sapien
cagaacaagactttgtcgccaaaaa

SEQ ID NO: 5653579 - DNA, 25 bp, Homo sapien
ccttatatgggtaaatagattacag

SEQ ID NO: 5653580 - DNA, 25 bp, Homo sapien
agttgaaatatttaccttatatggg

SEQ ID NO: 5653581 - DNA, 25 bp, Homo sapien
tgggtaaatagattacagttatgtt

SEQ ID NO: 5653582 - DNA, 25 bp, Homo sapien
taaatagattacagttatgtttgaa

SEQ ID NO: 5653583 - DNA, 25 bp, Homo sapien
aaaggcatagttgaaatatttacct

SEQ ID NO: 5653584 - DNA, 25 bp, Homo sapien
cccatataaggtaaatatttcaact

SEQ ID NO: 5653585 - DNA, 25 bp, Homo sapien
taaggtaaatatttcaactatgcct

SEQ ID NO: 5653586 - DNA, 25 bp, Homo sapien
tttttggcgacaaagtcttgttctg

SEQ ID NO: 5653587 - DNA, 25 bp, Homo sapien
caaacataactgtaatctatttacc

SEQ ID NO: 5653588 - DNA, 25 bp, Homo sapien
tgtaatctatttacccatataaggt

SEQ ID NO: 5653589 - DNA, 25 bp, Homo sapien
aacataactgtaatctatttaccca

SEQ ID NO: 5653590 - DNA, 25 bp, Homo sapien
tagaaagtcataattaaggctgggc

SEQ ID NO: 5653591 - DNA, 25 bp, Homo sapien
atagaaagtcataattaaggctggg

SEQ ID NO: 5653592 - DNA, 25 bp, Homo sapien
cccagccttaattatgactttctat

SEQ ID NO: 5653593 - DNA, 25 bp, Homo sapien
gcccagccttaattatgactttcta

SEQ ID NO: 5653594 - DNA, 25 bp, Homo sapien
agaaagtcataattaaggctgggcg

SEQ ID NO: 5653595 - DNA, 25 bp, Homo sapien
aaagtcataattaaggctgggcgca

SEQ ID NO: 5653596 - DNA, 25 bp, Homo sapien
taacagctatacaaaagtaaaatag

SEQ ID NO: 5653597 - DNA, 25 bp, Homo sapien
tagaaagtcataattaaggctgggc

SEQ ID NO: 5653598 - DNA, 25 bp, Homo sapien
tggtaacagctatacaaaagtaaaa

SEQ ID NO: 5653599 - DNA, 25 bp, Homo sapien
ctggtaacagctatacaaaagtaaa

SEQ ID NO: 5653600 - DNA, 25 bp, Homo sapien
tttacttttgtatagctgttaccag

SEQ ID NO: 5653601 - DNA, 25 bp, Homo sapien
tattttacttttgtatagctgttac

SEQ ID NO: 5653602 - DNA, 25 bp, Homo sapien
cgcccagccttaattatgactttct

SEQ ID NO: 5653603 - DNA, 25 bp, Homo sapien
tgcgcccagccttaattatgacttt

SEQ ID NO: 5653604 - DNA, 25 bp, Homo sapien
ttttacttttgtatagctgttacca

SEQ ID NO: 5653605 - DNA, 25 bp, Homo sapien
gcccagccttaattatgactttcta

SEQ ID NO: 5653606 - DNA, 25 bp, Homo sapien
agtcagtgttaactgagcagaaatt

SEQ ID NO: 5653607 - DNA, 25 bp, Homo sapien
tgagaagtcagtgttaactgagcag

SEQ ID NO: 5653608 - DNA, 25 bp, Homo sapien
ggctctgatcctatttagaatctta

SEQ ID NO: 5653609 - DNA, 25 bp, Homo sapien
ttaggctctgatcctatttagaatc

SEQ ID NO: 5653610 - DNA, 25 bp, Homo sapien
gggttttaggctctgatcctattta

SEQ ID NO: 5653611 - DNA, 25 bp, Homo sapien
gaagtcagtgttaactgagcagaaa

SEQ ID NO: 5653612 - DNA, 25 bp, Homo sapien
aatttctgctcagttaacactgact

SEQ ID NO: 5653613 - DNA, 25 bp, Homo sapien
taagattctaaataggatcagagcc

SEQ ID NO: 5653614 - DNA, 25 bp, Homo sapien
taaataggatcagagcctaaaaccc

SEQ ID NO: 5653615 - DNA, 25 bp, Homo sapien
ataagattctaaataggatcagagc

SEQ ID NO: 5653616 - DNA, 25 bp, Homo sapien
tctgctcagttaacactgacttctc

SEQ ID NO: 5653617 - DNA, 25 bp, Homo sapien
gattctaaataggatcagagcctaa

SEQ ID NO: 5653618 - DNA, 25 bp, Homo sapien
tatttgccacaacttagtcttttga

SEQ ID NO: 5653619 - DNA, 25 bp, Homo sapien
gcatatttgccacaacttagtcttt

SEQ ID NO: 5653620 - DNA, 25 bp, Homo sapien
catatttgccacaacttagtctttt

SEQ ID NO: 5653621 - DNA, 25 bp, Homo sapien
atatttgccacaacttagtcttttg

SEQ ID NO: 5653622 - DNA, 25 bp, Homo sapien
caaaagactaagttgtggcaaatat

SEQ ID NO: 5653623 - DNA, 25 bp, Homo sapien
tcaaaagactaagttgtggcaaata

SEQ ID NO: 5653624 - DNA, 25 bp, Homo sapien
aaagactaagttgtggcaaatatgc

SEQ ID NO: 5653625 - DNA, 25 bp, Homo sapien
aaaagactaagttgtggcaaatatg

SEQ ID NO: 5653626 - DNA, 25 bp, Homo sapien
tatttgccacaacttagtcttttga

SEQ ID NO: 5653627 - DNA, 25 bp, Homo sapien
caacttagtcttttgatttgtcaag

SEQ ID NO: 5653628 - DNA, 25 bp, Homo sapien
ggtgaacttctgcatatttgccaca

SEQ ID NO: 5653629 - DNA, 25 bp, Homo sapien
gtaagaggcagaattaacaatattt

SEQ ID NO: 5653630 - DNA, 25 bp, Homo sapien
aacaatattttggtgaacttctgca

SEQ ID NO: 5653631 - DNA, 25 bp, Homo sapien
gcagttttgaaaagtaagaggcaga

SEQ ID NO: 5653632 - DNA, 25 bp, Homo sapien
tgcagaagttcaccaaaatattgtt

SEQ ID NO: 5653633 - DNA, 25 bp, Homo sapien
tctgcctcttacttttcaaaactgc

SEQ ID NO: 5653634 - DNA, 25 bp, Homo sapien
tcaaaagactaagttgtggcaaata

SEQ ID NO: 5653635 - DNA, 25 bp, Homo sapien
tcaaaaactcttgacaaatcaaaag

SEQ ID NO: 5653636 - DNA, 25 bp, Homo sapien
aaatattgttaattctgcctcttac

SEQ ID NO: 5653637 - DNA, 25 bp, Homo sapien
tgtggcaaatatgcagaagttcacc

SEQ ID NO: 5653638 - DNA, 25 bp, Homo sapien
ggaggtgagcacgtacaagtaacaa

SEQ ID NO: 5653639 - DNA, 25 bp, Homo sapien
gggaggtgagcacgtacaagtaaca

SEQ ID NO: 5653640 - DNA, 25 bp, Homo sapien
gtgagcacgtacaagtaacaaatcc

SEQ ID NO: 5653641 - DNA, 25 bp, Homo sapien
aggtgagcacgtacaagtaacaaat

SEQ ID NO: 5653642 - DNA, 25 bp, Homo sapien
ggtgagcacgtacaagtaacaaatc

SEQ ID NO: 5653643 - DNA, 25 bp, Homo sapien
gaggtgagcacgtacaagtaacaaa

SEQ ID NO: 5653644 - DNA, 25 bp, Homo sapien
tttgttacttgtacgtgctcacctc

SEQ ID NO: 5653645 - DNA, 25 bp, Homo sapien
atttgttacttgtacgtgctcacct

SEQ ID NO: 5653646 - DNA, 25 bp, Homo sapien
ggatttgttacttgtacgtgctcac

SEQ ID NO: 5653647 - DNA, 25 bp, Homo sapien
tgttacttgtacgtgctcacctccc

SEQ ID NO: 5653648 - DNA, 25 bp, Homo sapien
gatttgttacttgtacgtgctcacc

SEQ ID NO: 5653649 - DNA, 25 bp, Homo sapien
ttgttacttgtacgtgctcacctcc

SEQ ID NO: 5653650 - DNA, 25 bp, Homo sapien
gagctataacaggtactgtaaggga

SEQ ID NO: 5653651 - DNA, 25 bp, Homo sapien
ctcagcctccacttttattattagg

SEQ ID NO: 5653652 - DNA, 25 bp, Homo sapien
ggtactcagcctccacttttattat

SEQ ID NO: 5653653 - DNA, 25 bp, Homo sapien
aagggaacaagaggtactcagcctc

SEQ ID NO: 5653654 - DNA, 25 bp, Homo sapien
caagaggtactcagcctccactttt

SEQ ID NO: 5653655 - DNA, 25 bp, Homo sapien
gaacaagaggtactcagcctccact

SEQ ID NO: 5653656 - DNA, 25 bp, Homo sapien
taaaagtggaggctgagtacctctt

SEQ ID NO: 5653657 - DNA, 25 bp, Homo sapien
cctaataataaaagtggaggctgag

SEQ ID NO: 5653658 - DNA, 25 bp, Homo sapien
gaggctgagtacctcttgttccctt

SEQ ID NO: 5653659 - DNA, 25 bp, Homo sapien
tggaggctgagtacctcttgttccc

SEQ ID NO: 5653660 - DNA, 25 bp, Homo sapien
tcccttacagtacctgttatagctc

SEQ ID NO: 5653661 - DNA, 25 bp, Homo sapien
taataaaagtggaggctgagtacct

SEQ ID NO: 5653662 - DNA, 25 bp, Homo sapien
tccattttaggtgcaatcttcccca

SEQ ID NO: 5653663 - DNA, 25 bp, Homo sapien
tacttgaagtagtctgcagagagaa

SEQ ID NO: 5653664 - DNA, 25 bp, Homo sapien
gatacttgaagtagtctgcagagag

SEQ ID NO: 5653665 - DNA, 25 bp, Homo sapien
cttgaagtagtctgcagagagaatc

SEQ ID NO: 5653666 - DNA, 25 bp, Homo sapien
cttttccattttaggtgcaatcttc

SEQ ID NO: 5653667 - DNA, 25 bp, Homo sapien
ccattttaggtgcaatcttccccat

SEQ ID NO: 5653668 - DNA, 25 bp, Homo sapien
gaagattgcacctaaaatggaaaag

SEQ ID NO: 5653669 - DNA, 25 bp, Homo sapien
tggggaagattgcacctaaaatgga

SEQ ID NO: 5653670 - DNA, 25 bp, Homo sapien
gattctctctgcagactacttcaag

SEQ ID NO: 5653671 - DNA, 25 bp, Homo sapien
tctctctgcagactacttcaagtat

SEQ ID NO: 5653672 - DNA, 25 bp, Homo sapien
tctctgcagactacttcaagtatcc

SEQ ID NO: 5653673 - DNA, 25 bp, Homo sapien
gggaagattgcacctaaaatggaaa

SEQ ID NO: 5653674 - DNA, 25 bp, Homo sapien
gacttctattaggcagtatgattta

SEQ ID NO: 5653675 - DNA, 25 bp, Homo sapien
acttctattaggcagtatgatttat

SEQ ID NO: 5653676 - DNA, 25 bp, Homo sapien
cttctattaggcagtatgatttata

SEQ ID NO: 5653677 - DNA, 25 bp, Homo sapien
taaatcatactgcctaatagaagtc

SEQ ID NO: 5653678 - DNA, 25 bp, Homo sapien
ataaatcatactgcctaatagaagt

SEQ ID NO: 5653679 - DNA, 25 bp, Homo sapien
tataaatcatactgcctaatagaag

SEQ ID NO: 5653680 - DNA, 25 bp, Homo sapien
caatggtaagaagtttttattcagt

SEQ ID NO: 5653681 - DNA, 25 bp, Homo sapien
cttctattaggcagtatgatttata

SEQ ID NO: 5653682 - DNA, 25 bp, Homo sapien
attaggcagtatgatttatagagcc

SEQ ID NO: 5653683 - DNA, 25 bp, Homo sapien
tcttgacttctattaggcagtatga

SEQ ID NO: 5653684 - DNA, 25 bp, Homo sapien
taccctattttaatcttgacttcta

SEQ ID NO: 5653685 - DNA, 25 bp, Homo sapien
tattaggcagtatgatttatagagc

SEQ ID NO: 5653686 - DNA, 25 bp, Homo sapien
tgaataaaaacttcttaccattgta

SEQ ID NO: 5653687 - DNA, 25 bp, Homo sapien
agaagtcaagattaaaatagggtag

SEQ ID NO: 5653688 - DNA, 25 bp, Homo sapien
ggctctataaatcatactgcctaat

SEQ ID NO: 5653689 - DNA, 25 bp, Homo sapien
actgaataaaaacttcttaccattg

SEQ ID NO: 5653690 - DNA, 25 bp, Homo sapien
tataaatcatactgcctaatagaag

SEQ ID NO: 5653691 - DNA, 25 bp, Homo sapien
tcatactgcctaatagaagtcaaga

SEQ ID NO: 5653692 - DNA, 25 bp, Homo sapien
agctcaagtcttatattttcattag

SEQ ID NO: 5653693 - DNA, 25 bp, Homo sapien
tgggcttaagtcacagctctgccac

SEQ ID NO: 5653694 - DNA, 25 bp, Homo sapien
caactatatgggcttaagtcacagc

SEQ ID NO: 5653695 - DNA, 25 bp, Homo sapien
tatgggcttaagtcacagctctgcc

SEQ ID NO: 5653696 - DNA, 25 bp, Homo sapien
aaggcaactatatgggcttaagtca

SEQ ID NO: 5653697 - DNA, 25 bp, Homo sapien
taatgcatggtataagctcaagtct

SEQ ID NO: 5653698 - DNA, 25 bp, Homo sapien
ctaatgaaaatataagacttgagct

SEQ ID NO: 5653699 - DNA, 25 bp, Homo sapien
agacttgagcttataccatgcatta

SEQ ID NO: 5653700 - DNA, 25 bp, Homo sapien
gcagagctgtgacttaagcccatat

SEQ ID NO: 5653701 - DNA, 25 bp, Homo sapien
tgacttaagcccatatagttgcctt

SEQ ID NO: 5653702 - DNA, 25 bp, Homo sapien
tataagacttgagcttataccatgc

SEQ ID NO: 5653703 - DNA, 25 bp, Homo sapien
gtggcagagctgtgacttaagccca

SEQ ID NO: 5653704 - DNA, 25 bp, Homo sapien
gcctgtagtattttagtcgagatat

SEQ ID NO: 5653705 - DNA, 25 bp, Homo sapien
gtattttagtcgagatatgtataag

SEQ ID NO: 5653706 - DNA, 25 bp, Homo sapien
tagtcgagatatgtataagtaggaa

SEQ ID NO: 5653707 - DNA, 25 bp, Homo sapien
tgtagtattttagtcgagatatgta

SEQ ID NO: 5653708 - DNA, 25 bp, Homo sapien
cctgtagtattttagtcgagatatg

SEQ ID NO: 5653709 - DNA, 25 bp, Homo sapien
tttagtcgagatatgtataagtagg

SEQ ID NO: 5653710 - DNA, 25 bp, Homo sapien
tacatatctcgactaaaatactaca

SEQ ID NO: 5653711 - DNA, 25 bp, Homo sapien
cttatacatatctcgactaaaatac

SEQ ID NO: 5653712 - DNA, 25 bp, Homo sapien
cctacttatacatatctcgactaaa

SEQ ID NO: 5653713 - DNA, 25 bp, Homo sapien
catatctcgactaaaatactacagg

SEQ ID NO: 5653714 - DNA, 25 bp, Homo sapien
ttcctacttatacatatctcgacta

SEQ ID NO: 5653715 - DNA, 25 bp, Homo sapien
atatctcgactaaaatactacaggc

SEQ ID NO: 5653716 - DNA, 25 bp, Homo sapien
tgtactgttctcaattttttagcca

SEQ ID NO: 5653717 - DNA, 25 bp, Homo sapien
tagacaggtagcagaatctgtcggc

SEQ ID NO: 5653718 - DNA, 25 bp, Homo sapien
aatctgtcggcttgtactgttctca

SEQ ID NO: 5653719 - DNA, 25 bp, Homo sapien
catccctacaccaaacatctttgaa

SEQ ID NO: 5653720 - DNA, 25 bp, Homo sapien
ttttagccatccctacaccaaacat

SEQ ID NO: 5653721 - DNA, 25 bp, Homo sapien
caattttttagccatccctacacca

SEQ ID NO: 5653722 - DNA, 25 bp, Homo sapien
tgagaacagtacaagccgacagatt

SEQ ID NO: 5653723 - DNA, 25 bp, Homo sapien
ttcaaagatgtttggtgtagggatg

SEQ ID NO: 5653724 - DNA, 25 bp, Homo sapien
gccgacagattctgctacctgtcta

SEQ ID NO: 5653725 - DNA, 25 bp, Homo sapien
aaaattgagaacagtacaagccgac

SEQ ID NO: 5653726 - DNA, 25 bp, Homo sapien
tagggatggctaaaaaattgagaac

SEQ ID NO: 5653727 - DNA, 25 bp, Homo sapien
tggtgtagggatggctaaaaaattg

SEQ ID NO: 5653728 - DNA, 25 bp, Homo sapien
ttaactttcttggctactggaatca

SEQ ID NO: 5653729 - DNA, 25 bp, Homo sapien
tttaactttcttggctactggaatc

SEQ ID NO: 5653730 - DNA, 25 bp, Homo sapien
tttttcagaaatagccaggaagatt

SEQ ID NO: 5653731 - DNA, 25 bp, Homo sapien
taactttcttggctactggaatcaa

SEQ ID NO: 5653732 - DNA, 25 bp, Homo sapien
atttaactttcttggctactggaat

SEQ ID NO: 5653733 - DNA, 25 bp, Homo sapien
agttttttcagaaatagccaggaag

SEQ ID NO: 5653734 - DNA, 25 bp, Homo sapien
gattccagtagccaagaaagttaaa

SEQ ID NO: 5653735 - DNA, 25 bp, Homo sapien
tgattccagtagccaagaaagttaa

SEQ ID NO: 5653736 - DNA, 25 bp, Homo sapien
ttgattccagtagccaagaaagtta

SEQ ID NO: 5653737 - DNA, 25 bp, Homo sapien
aatcttcctggctatttctgaaaaa

SEQ ID NO: 5653738 - DNA, 25 bp, Homo sapien
cttcctggctatttctgaaaaaact

SEQ ID NO: 5653739 - DNA, 25 bp, Homo sapien
attccagtagccaagaaagttaaat

SEQ ID NO: 5653740 - DNA, 25 bp, Homo sapien
aatttactcttctgttgtgtactac

SEQ ID NO: 5653741 - DNA, 25 bp, Homo sapien
gtactacttgatctagttatttgga

SEQ ID NO: 5653742 - DNA, 25 bp, Homo sapien
tgttgtgtactacttgatctagtta

SEQ ID NO: 5653743 - DNA, 25 bp, Homo sapien
aaaataagaccagataatttactct

SEQ ID NO: 5653744 - DNA, 25 bp, Homo sapien
ttctgttgtgtactacttgatctag

SEQ ID NO: 5653745 - DNA, 25 bp, Homo sapien
ctcttctgttgtgtactacttgatc

SEQ ID NO: 5653746 - DNA, 25 bp, Homo sapien
taactagatcaagtagtacacaaca

SEQ ID NO: 5653747 - DNA, 25 bp, Homo sapien
caagtagtacacaacagaagagtaa

SEQ ID NO: 5653748 - DNA, 25 bp, Homo sapien
gatcaagtagtacacaacagaagag

SEQ ID NO: 5653749 - DNA, 25 bp, Homo sapien
gaagagtaaattatctggtcttatt

SEQ ID NO: 5653750 - DNA, 25 bp, Homo sapien
tagatcaagtagtacacaacagaag

SEQ ID NO: 5653751 - DNA, 25 bp, Homo sapien
tccaaataactagatcaagtagtac

SEQ ID NO: 5653752 - DNA, 25 bp, Homo sapien
gcacagcttttcaggacccttttct

SEQ ID NO: 5653753 - DNA, 25 bp, Homo sapien
cacagcttttcaggacccttttctt

SEQ ID NO: 5653754 - DNA, 25 bp, Homo sapien
cagcttttcaggacccttttctttg

SEQ ID NO: 5653755 - DNA, 25 bp, Homo sapien
agaaaagggtcctgaaaagctgtgc

SEQ ID NO: 5653756 - DNA, 25 bp, Homo sapien
caaagaaaagggtcctgaaaagctg

SEQ ID NO: 5653757 - DNA, 25 bp, Homo sapien
aagaaaagggtcctgaaaagctgtg

SEQ ID NO: 5653758 - DNA, 25 bp, Homo sapien
taatatgcacagcttttcaggaccc

SEQ ID NO: 5653759 - DNA, 25 bp, Homo sapien
caggacccttttctttgatgaaata

SEQ ID NO: 5653760 - DNA, 25 bp, Homo sapien
ggcctctgaattcactaatatgcac

SEQ ID NO: 5653761 - DNA, 25 bp, Homo sapien
cagcacaggcctctgaattcactaa

SEQ ID NO: 5653762 - DNA, 25 bp, Homo sapien
taaaaaagggtcatttcagcacagg

SEQ ID NO: 5653763 - DNA, 25 bp, Homo sapien
gcacagcttttcaggacccttttct

SEQ ID NO: 5653764 - DNA, 25 bp, Homo sapien
agaaaagggtcctgaaaagctgtgc

SEQ ID NO: 5653765 - DNA, 25 bp, Homo sapien
caaagaaaagggtcctgaaaagctg

SEQ ID NO: 5653766 - DNA, 25 bp, Homo sapien
tatttcatcaaagaaaagggtcctg

SEQ ID NO: 5653767 - DNA, 25 bp, Homo sapien
gaggcctgtgctgaaatgacccttt

SEQ ID NO: 5653768 - DNA, 25 bp, Homo sapien
tattagtgaattcagaggcctgtgc

SEQ ID NO: 5653769 - DNA, 25 bp, Homo sapien
aaagctgtgcatattagtgaattca

SEQ ID NO: 5653770 - DNA, 25 bp, Homo sapien
tatggtttctaatttcttgtgttcc

SEQ ID NO: 5653771 - DNA, 25 bp, Homo sapien
gaattagatccttatcccagttatt

SEQ ID NO: 5653772 - DNA, 25 bp, Homo sapien
gatccttatcccagttattaatttg

SEQ ID NO: 5653773 - DNA, 25 bp, Homo sapien
agaattagatccttatcccagttat

SEQ ID NO: 5653774 - DNA, 25 bp, Homo sapien
tagaattagatccttatcccagtta

SEQ ID NO: 5653775 - DNA, 25 bp, Homo sapien
aattagatccttatcccagttatta

SEQ ID NO: 5653776 - DNA, 25 bp, Homo sapien
aggaacacaagaaattagaaaccat

SEQ ID NO: 5653777 - DNA, 25 bp, Homo sapien
taactgggataaggatctaattcta

SEQ ID NO: 5653778 - DNA, 25 bp, Homo sapien
aataactgggataaggatctaattc

SEQ ID NO: 5653779 - DNA, 25 bp, Homo sapien
acaaattaataactgggataaggat

SEQ ID NO: 5653780 - DNA, 25 bp, Homo sapien
gaacacaagaaattagaaaccatat

SEQ ID NO: 5653781 - DNA, 25 bp, Homo sapien
caaattaataactgggataaggatc

SEQ ID NO: 5653782 - DNA, 25 bp, Homo sapien
tacttcagatagtaataacagaatg

SEQ ID NO: 5653783 - DNA, 25 bp, Homo sapien
accagtcttgatcagagtttcttcc

SEQ ID NO: 5653784 - DNA, 25 bp, Homo sapien
cttcagatagtaataacagaatgtt

SEQ ID NO: 5653785 - DNA, 25 bp, Homo sapien
gcaagttttaatacttcagatagta

SEQ ID NO: 5653786 - DNA, 25 bp, Homo sapien
ttttcctgaccagtcttgatcagag

SEQ ID NO: 5653787 - DNA, 25 bp, Homo sapien
cctgaccagtcttgatcagagtttc

SEQ ID NO: 5653788 - DNA, 25 bp, Homo sapien
aagaaactctgatcaagactggtca

SEQ ID NO: 5653789 - DNA, 25 bp, Homo sapien
tactatctgaagtattaaaacttgc

SEQ ID NO: 5653790 - DNA, 25 bp, Homo sapien
ggaagaaactctgatcaagactggt

SEQ ID NO: 5653791 - DNA, 25 bp, Homo sapien
aacattctgttattactatctgaag

SEQ ID NO: 5653792 - DNA, 25 bp, Homo sapien
gaaactctgatcaagactggtcagg

SEQ ID NO: 5653793 - DNA, 25 bp, Homo sapien
tctgatcaagactggtcaggaaaaa

SEQ ID NO: 5653794 - DNA, 25 bp, Homo sapien
taccatgtcatgatcatcatagtgg

SEQ ID NO: 5653795 - DNA, 25 bp, Homo sapien
gagcagaactgccttaccatgtcat

SEQ ID NO: 5653796 - DNA, 25 bp, Homo sapien
aattcctcattagagtctgagcaga

SEQ ID NO: 5653797 - DNA, 25 bp, Homo sapien
ctcattagagtctgagcagaactgc

SEQ ID NO: 5653798 - DNA, 25 bp, Homo sapien
gcattatcatcaggtctttttaata

SEQ ID NO: 5653799 - DNA, 25 bp, Homo sapien
gaactgccttaccatgtcatgatca

SEQ ID NO: 5653800 - DNA, 25 bp, Homo sapien
tctaatgaggaattattctagaaat

SEQ ID NO: 5653801 - DNA, 25 bp, Homo sapien
catgacatggtaaggcagttctgct

SEQ ID NO: 5653802 - DNA, 25 bp, Homo sapien
tgatcatgacatggtaaggcagttc

SEQ ID NO: 5653803 - DNA, 25 bp, Homo sapien
ccactatgatgatcatgacatggta

SEQ ID NO: 5653804 - DNA, 25 bp, Homo sapien
tattaaaaagacctgatgataatgc

SEQ ID NO: 5653805 - DNA, 25 bp, Homo sapien
cagttctgctcagactctaatgagg

SEQ ID NO: 5653806 - DNA, 25 bp, Homo sapien
aagacccctcttcgatacgtagaag

SEQ ID NO: 5653807 - DNA, 25 bp, Homo sapien
ttcgatacgtagaagccaggcctgt

SEQ ID NO: 5653808 - DNA, 25 bp, Homo sapien
tcttcgatacgtagaagccaggcct

SEQ ID NO: 5653809 - DNA, 25 bp, Homo sapien
gtgccagtcaatacaaaaaagatgt

SEQ ID NO: 5653810 - DNA, 25 bp, Homo sapien
ggtgccagtcaatacaaaaaagatg

SEQ ID NO: 5653811 - DNA, 25 bp, Homo sapien
gacccctcttcgatacgtagaagcc

SEQ ID NO: 5653812 - DNA, 25 bp, Homo sapien
catcttttttgtattgactggcacc

SEQ ID NO: 5653813 - DNA, 25 bp, Homo sapien
cctggcttctacgtatcgaagaggg

SEQ ID NO: 5653814 - DNA, 25 bp, Homo sapien
ggcctggcttctacgtatcgaagag

SEQ ID NO: 5653815 - DNA, 25 bp, Homo sapien
acatcttttttgtattgactggcac

SEQ ID NO: 5653816 - DNA, 25 bp, Homo sapien
caggcctggcttctacgtatcgaag

SEQ ID NO: 5653817 - DNA, 25 bp, Homo sapien
acaggcctggcttctacgtatcgaa

SEQ ID NO: 5653818 - DNA, 25 bp, Homo sapien
gacaccagactgattcagaaaaatg

SEQ ID NO: 5653819 - DNA, 25 bp, Homo sapien
taagagcttcctttaaattctgaac

SEQ ID NO: 5653820 - DNA, 25 bp, Homo sapien
gaaaaatgccatatataatttgcaa

SEQ ID NO: 5653821 - DNA, 25 bp, Homo sapien
gcttcctttaaattctgaacctgat

SEQ ID NO: 5653822 - DNA, 25 bp, Homo sapien
atatatatgacttttaagagcttcc

SEQ ID NO: 5653823 - DNA, 25 bp, Homo sapien
accagactgattcagaaaaatgcca

SEQ ID NO: 5653824 - DNA, 25 bp, Homo sapien
catttttctgaatcagtctggtgtc

SEQ ID NO: 5653825 - DNA, 25 bp, Homo sapien
caggttcagaatttaaaggaagctc

SEQ ID NO: 5653826 - DNA, 25 bp, Homo sapien
aatcaggttcagaatttaaaggaag

SEQ ID NO: 5653827 - DNA, 25 bp, Homo sapien
taaaggaagctcttaaaagtcatat

SEQ ID NO: 5653828 - DNA, 25 bp, Homo sapien
tggcatttttctgaatcagtctggt

SEQ ID NO: 5653829 - DNA, 25 bp, Homo sapien
tatatatggcatttttctgaatcag

SEQ ID NO: 5653830 - DNA, 25 bp, Homo sapien
caaaaagtaacaaagattgaaggag

SEQ ID NO: 5653831 - DNA, 25 bp, Homo sapien
ctccttcaatctttgttactttttg

SEQ ID NO: 5653832 - DNA, 25 bp, Homo sapien
tagtttttaagacctggcaaatgaa

SEQ ID NO: 5653833 - DNA, 25 bp, Homo sapien
caaaaagtaacaaagattgaaggag

SEQ ID NO: 5653834 - DNA, 25 bp, Homo sapien
ttaagacctggcaaatgaaatttag

SEQ ID NO: 5653835 - DNA, 25 bp, Homo sapien
taagattctttttaataccacaaga

SEQ ID NO: 5653836 - DNA, 25 bp, Homo sapien
agattgaaggagaaaaatagaacct

SEQ ID NO: 5653837 - DNA, 25 bp, Homo sapien
cctggcaaatgaaatttagttcaaa

SEQ ID NO: 5653838 - DNA, 25 bp, Homo sapien
tcttgtggtattaaaaagaatctta

SEQ ID NO: 5653839 - DNA, 25 bp, Homo sapien
tttgaactaaatttcatttgccagg

SEQ ID NO: 5653840 - DNA, 25 bp, Homo sapien
tcaatctttgttactttttgaacta

SEQ ID NO: 5653841 - DNA, 25 bp, Homo sapien
ctccttcaatctttgttactttttg

SEQ ID NO: 5653842 - DNA, 25 bp, Homo sapien
tcatttgccaggtcttaaaaactaa

SEQ ID NO: 5653843 - DNA, 25 bp, Homo sapien
taaatttcatttgccaggtcttaaa

SEQ ID NO: 5653844 - DNA, 25 bp, Homo sapien
cagcttcagtgtcctccggcctgag

SEQ ID NO: 5653845 - DNA, 25 bp, Homo sapien
cttcagtgtcctccggcctgagcga

SEQ ID NO: 5653846 - DNA, 25 bp, Homo sapien
tccttgtgttccttttcgcagcagc

SEQ ID NO: 5653847 - DNA, 25 bp, Homo sapien
tgtgttccttttcgcagcagcttca

SEQ ID NO: 5653848 - DNA, 25 bp, Homo sapien
gttccttttcgcagcagcttcagtg

SEQ ID NO: 5653849 - DNA, 25 bp, Homo sapien
gaactccttgtgttccttttcgcag

SEQ ID NO: 5653850 - DNA, 25 bp, Homo sapien
tgctgcgaaaaggaacacaaggagt

SEQ ID NO: 5653851 - DNA, 25 bp, Homo sapien
tgcgaaaaggaacacaaggagttcc

SEQ ID NO: 5653852 - DNA, 25 bp, Homo sapien
gaagctgctgcgaaaaggaacacaa

SEQ ID NO: 5653853 - DNA, 25 bp, Homo sapien
tcgctcaggccggaggacactgaag

SEQ ID NO: 5653854 - DNA, 25 bp, Homo sapien
ctcaggccggaggacactgaagctg

SEQ ID NO: 5653855 - DNA, 25 bp, Homo sapien
cactgaagctgctgcgaaaaggaac

SEQ ID NO: 5653856 - DNA, 25 bp, Homo sapien
cgtttgcctgaacttaaggatcaaa

SEQ ID NO: 5653857 - DNA, 25 bp, Homo sapien
ttccacccacatgaggcctcgtttg

SEQ ID NO: 5653858 - DNA, 25 bp, Homo sapien
gaggcctcgtttgcctgaacttaag

SEQ ID NO: 5653859 - DNA, 25 bp, Homo sapien
gcctcgtttgcctgaacttaaggat

SEQ ID NO: 5653860 - DNA, 25 bp, Homo sapien
cacatgaggcctcgtttgcctgaac

SEQ ID NO: 5653861 - DNA, 25 bp, Homo sapien
tggggtttgtccctagtcgactgtc

SEQ ID NO: 5653862 - DNA, 25 bp, Homo sapien
tttgatccttaagttcaggcaaacg

SEQ ID NO: 5653863 - DNA, 25 bp, Homo sapien
gatccttaagttcaggcaaacgagg

SEQ ID NO: 5653864 - DNA, 25 bp, Homo sapien
ttaagttcaggcaaacgaggcctca

SEQ ID NO: 5653865 - DNA, 25 bp, Homo sapien
gacagtcgactagggacaaacccca

SEQ ID NO: 5653866 - DNA, 25 bp, Homo sapien
caaacgaggcctcatgtgggtggaa

SEQ ID NO: 5653867 - DNA, 25 bp, Homo sapien
tcaggcaaacgaggcctcatgtggg

SEQ ID NO: 5653868 - DNA, 25 bp, Homo sapien
tgtcgcggttgcgtacagaacaagc

SEQ ID NO: 5653869 - DNA, 25 bp, Homo sapien
catgctgtcgcggttgcgtacagaa

SEQ ID NO: 5653870 - DNA, 25 bp, Homo sapien
tgcctcccatgctgtcgcggttgcg

SEQ ID NO: 5653871 - DNA, 25 bp, Homo sapien
gttgcgtacagaacaagctccttcg

SEQ ID NO: 5653872 - DNA, 25 bp, Homo sapien
tcgcggttgcgtacagaacaagctc

SEQ ID NO: 5653873 - DNA, 25 bp, Homo sapien
gcggttgcgtacagaacaagctcct

SEQ ID NO: 5653874 - DNA, 25 bp, Homo sapien
acaagctccttcgacaacattgagc

SEQ ID NO: 5653875 - DNA, 25 bp, Homo sapien
gaacaagctccttcgacaacattga

SEQ ID NO: 5653876 - DNA, 25 bp, Homo sapien
aagctccttcgacaacattgagccc

SEQ ID NO: 5653877 - DNA, 25 bp, Homo sapien
caagctccttcgacaacattgagcc

SEQ ID NO: 5653878 - DNA, 25 bp, Homo sapien
aacaagctccttcgacaacattgag

SEQ ID NO: 5653879 - DNA, 25 bp, Homo sapien
ctcaatgttgtcgaaggagcttgtt

SEQ ID NO: 5653880 - DNA, 25 bp, Homo sapien
gggctcaatgttgtcgaaggagctt

SEQ ID NO: 5653881 - DNA, 25 bp, Homo sapien
tcaatgttgtcgaaggagcttgttc

SEQ ID NO: 5653882 - DNA, 25 bp, Homo sapien
ggctcaatgttgtcgaaggagcttg

SEQ ID NO: 5653883 - DNA, 25 bp, Homo sapien
gctcaatgttgtcgaaggagcttgt

SEQ ID NO: 5653884 - DNA, 25 bp, Homo sapien
aaggagcttgttctgtacgcaaccg

SEQ ID NO: 5653885 - DNA, 25 bp, Homo sapien
gagcttgttctgtacgcaaccgcga

SEQ ID NO: 5653886 - DNA, 25 bp, Homo sapien
gcttgttctgtacgcaaccgcgaca

SEQ ID NO: 5653887 - DNA, 25 bp, Homo sapien
ttctgtacgcaaccgcgacagcatg

SEQ ID NO: 5653888 - DNA, 25 bp, Homo sapien
gtacgcaaccgcgacagcatgggag

SEQ ID NO: 5653889 - DNA, 25 bp, Homo sapien
cgaaggagcttgttctgtacgcaac

SEQ ID NO: 5653890 - DNA, 25 bp, Homo sapien
ttccctaatattttgtgacctgaac

SEQ ID NO: 5653891 - DNA, 25 bp, Homo sapien
ctaatattttgtgacctgaacccct

SEQ ID NO: 5653892 - DNA, 25 bp, Homo sapien
tccctaatattttgtgacctgaacc

SEQ ID NO: 5653893 - DNA, 25 bp, Homo sapien
gttcaggtcacaaaatattagggaa

SEQ ID NO: 5653894 - DNA, 25 bp, Homo sapien
ggttcaggtcacaaaatattaggga

SEQ ID NO: 5653895 - DNA, 25 bp, Homo sapien
aggggttcaggtcacaaaatattag

SEQ ID NO: 5653896 - DNA, 25 bp, Homo sapien
tgggatacatttgctttattagtct

SEQ ID NO: 5653897 - DNA, 25 bp, Homo sapien
gctccctgggatacatttgctttat

SEQ ID NO: 5653898 - DNA, 25 bp, Homo sapien
tttgtgacctgaaccccttttgctc

SEQ ID NO: 5653899 - DNA, 25 bp, Homo sapien
tgaaccccttttgctccctgggata

SEQ ID NO: 5653900 - DNA, 25 bp, Homo sapien
ctaatattttgtgacctgaacccct

SEQ ID NO: 5653901 - DNA, 25 bp, Homo sapien
tccctaatattttgtgacctgaacc

SEQ ID NO: 5653902 - DNA, 25 bp, Homo sapien
gactaataaagcaaatgtatcccag

SEQ ID NO: 5653903 - DNA, 25 bp, Homo sapien
ataaagcaaatgtatcccagggagc

SEQ ID NO: 5653904 - DNA, 25 bp, Homo sapien
ggttcaggtcacaaaatattaggga

SEQ ID NO: 5653905 - DNA, 25 bp, Homo sapien
gagcaaaaggggttcaggtcacaaa

SEQ ID NO: 5653906 - DNA, 25 bp, Homo sapien
tcacaaaatattagggaagtagtaa

SEQ ID NO: 5653907 - DNA, 25 bp, Homo sapien
caaatgtatcccagggagcaaaagg

SEQ ID NO: 5653908 - DNA, 25 bp, Homo sapien
cattgctgtataccatggtggactt

SEQ ID NO: 5653909 - DNA, 25 bp, Homo sapien
ctgtataccatggtggactttagaa

SEQ ID NO: 5653910 - DNA, 25 bp, Homo sapien
gacattgctgtataccatggtggac

SEQ ID NO: 5653911 - DNA, 25 bp, Homo sapien
ggacattgctgtataccatggtgga

SEQ ID NO: 5653912 - DNA, 25 bp, Homo sapien
tgctgtataccatggtggactttag

SEQ ID NO: 5653913 - DNA, 25 bp, Homo sapien
caggacattgctgtataccatggtg

SEQ ID NO: 5653914 - DNA, 25 bp, Homo sapien
ttctaaagtccaccatggtatacag

SEQ ID NO: 5653915 - DNA, 25 bp, Homo sapien
tccaccatggtatacagcaatgtcc

SEQ ID NO: 5653916 - DNA, 25 bp, Homo sapien
caccatggtatacagcaatgtcctg

SEQ ID NO: 5653917 - DNA, 25 bp, Homo sapien
aagtccaccatggtatacagcaatg

SEQ ID NO: 5653918 - DNA, 25 bp, Homo sapien
taaagtccaccatggtatacagcaa

SEQ ID NO: 5653919 - DNA, 25 bp, Homo sapien
tctaaagtccaccatggtatacagc

SEQ ID NO: 5653920 - DNA, 25 bp, Homo sapien
cacgcccggctggaagatacatttt

SEQ ID NO: 5653921 - DNA, 25 bp, Homo sapien
accacgcccggctggaagatacatt

SEQ ID NO: 5653922 - DNA, 25 bp, Homo sapien
ccacgcccggctggaagatacattt

SEQ ID NO: 5653923 - DNA, 25 bp, Homo sapien
aatgtatcttccagccgggcgtggt

SEQ ID NO: 5653924 - DNA, 25 bp, Homo sapien
aaatgtatcttccagccgggcgtgg

SEQ ID NO: 5653925 - DNA, 25 bp, Homo sapien
aaaatgtatcttccagccgggcgtg

SEQ ID NO: 5653926 - DNA, 25 bp, Homo sapien
cacgcccggctggaagatacatttt

SEQ ID NO: 5653927 - DNA, 25 bp, Homo sapien
accacgcccggctggaagatacatt

SEQ ID NO: 5653928 - DNA, 25 bp, Homo sapien
gctggaagatacattttttaaacaa

SEQ ID NO: 5653929 - DNA, 25 bp, Homo sapien
gcccggctggaagatacatttttta

SEQ ID NO: 5653930 - DNA, 25 bp, Homo sapien
cgcccggctggaagatacatttttt

SEQ ID NO: 5653931 - DNA, 25 bp, Homo sapien
ccacgcccggctggaagatacattt

SEQ ID NO: 5653932 - DNA, 25 bp, Homo sapien
aatgtatcttccagccgggcgtggt

SEQ ID NO: 5653933 - DNA, 25 bp, Homo sapien
aaatgtatcttccagccgggcgtgg

SEQ ID NO: 5653934 - DNA, 25 bp, Homo sapien
tgtttaaaaaatgtatcttccagcc

SEQ ID NO: 5653935 - DNA, 25 bp, Homo sapien
taaaaaatgtatcttccagccgggc

SEQ ID NO: 5653936 - DNA, 25 bp, Homo sapien
aaaaaatgtatcttccagccgggcg

SEQ ID NO: 5653937 - DNA, 25 bp, Homo sapien
aaaatgtatcttccagccgggcgtg

SEQ ID NO: 5653938 - DNA, 25 bp, Homo sapien
gaattacaggcataagccacctcgg

SEQ ID NO: 5653939 - DNA, 25 bp, Homo sapien
attacaggcataagccacctcggac

SEQ ID NO: 5653940 - DNA, 25 bp, Homo sapien
ggtctccaactcttgacctcaagca

SEQ ID NO: 5653941 - DNA, 25 bp, Homo sapien
aattacaggcataagccacctcgga

SEQ ID NO: 5653942 - DNA, 25 bp, Homo sapien
tctccaactcttgacctcaagcagt

SEQ ID NO: 5653943 - DNA, 25 bp, Homo sapien
tggtctccaactcttgacctcaagc

SEQ ID NO: 5653944 - DNA, 25 bp, Homo sapien
gtccgaggtggcttatgcctgtaat

SEQ ID NO: 5653945 - DNA, 25 bp, Homo sapien
actgcttgaggtcaagagttggaga

SEQ ID NO: 5653946 - DNA, 25 bp, Homo sapien
ccgaggtggcttatgcctgtaattc

SEQ ID NO: 5653947 - DNA, 25 bp, Homo sapien
tgcttgaggtcaagagttggagacc

SEQ ID NO: 5653948 - DNA, 25 bp, Homo sapien
tccgaggtggcttatgcctgtaatt

SEQ ID NO: 5653949 - DNA, 25 bp, Homo sapien
gcttgaggtcaagagttggagacca

SEQ ID NO: 5653950 - DNA, 25 bp, Homo sapien
gcacgtcaccatgcttgactaattt

SEQ ID NO: 5653951 - DNA, 25 bp, Homo sapien
caggcgcacgtcaccatgcttgact

SEQ ID NO: 5653952 - DNA, 25 bp, Homo sapien
gcgcacgtcaccatgcttgactaat

SEQ ID NO: 5653953 - DNA, 25 bp, Homo sapien
aggcgcacgtcaccatgcttgacta

SEQ ID NO: 5653954 - DNA, 25 bp, Homo sapien
ggcgcacgtcaccatgcttgactaa

SEQ ID NO: 5653955 - DNA, 25 bp, Homo sapien
acaggcgcacgtcaccatgcttgac

SEQ ID NO: 5653956 - DNA, 25 bp, Homo sapien
ttagtcaagcatggtgacgtgcgcc

SEQ ID NO: 5653957 - DNA, 25 bp, Homo sapien
attagtcaagcatggtgacgtgcgc

SEQ ID NO: 5653958 - DNA, 25 bp, Homo sapien
aattagtcaagcatggtgacgtgcg

SEQ ID NO: 5653959 - DNA, 25 bp, Homo sapien
aaattagtcaagcatggtgacgtgc

SEQ ID NO: 5653960 - DNA, 25 bp, Homo sapien
tagtcaagcatggtgacgtgcgcct

SEQ ID NO: 5653961 - DNA, 25 bp, Homo sapien
gtgcgcctgtagtccgagatactcg

SEQ ID NO: 5653962 - DNA, 25 bp, Homo sapien
gttggccaggctagtctcaaactcc

SEQ ID NO: 5653963 - DNA, 25 bp, Homo sapien
tgacctcaggcgatgcacccacctt

SEQ ID NO: 5653964 - DNA, 25 bp, Homo sapien
gacctcaggcgatgcacccaccttg

SEQ ID NO: 5653965 - DNA, 25 bp, Homo sapien
tttagtagagatggggttttgccat

SEQ ID NO: 5653966 - DNA, 25 bp, Homo sapien
tgcccagctcatttttgtatttttt

SEQ ID NO: 5653967 - DNA, 25 bp, Homo sapien
cctcaggcgatgcacccaccttggc

SEQ ID NO: 5653968 - DNA, 25 bp, Homo sapien
tcaggagtttgagactagcctggcc

SEQ ID NO: 5653969 - DNA, 25 bp, Homo sapien
gccaaggtgggtgcatcgcctgagg

SEQ ID NO: 5653970 - DNA, 25 bp, Homo sapien
aaaaaatacaaaaatgagctgggca

SEQ ID NO: 5653971 - DNA, 25 bp, Homo sapien
ctaaaaaatacaaaaatgagctggg

SEQ ID NO: 5653972 - DNA, 25 bp, Homo sapien
aacatggcaaaaccccatctctact

SEQ ID NO: 5653973 - DNA, 25 bp, Homo sapien
taaaaaatacaaaaatgagctgggc

SEQ ID NO: 5653974 - DNA, 25 bp, Homo sapien
caagcatattaggagctgatacgtt

SEQ ID NO: 5653975 - DNA, 25 bp, Homo sapien
taggagctgatacgttaatgaggga

SEQ ID NO: 5653976 - DNA, 25 bp, Homo sapien
tgcagctcctaagaccaagcatatt

SEQ ID NO: 5653977 - DNA, 25 bp, Homo sapien
gctgatacgttaatgagggagcttt

SEQ ID NO: 5653978 - DNA, 25 bp, Homo sapien
tgtgaaactattaatattaagcagg

SEQ ID NO: 5653979 - DNA, 25 bp, Homo sapien
cgttaatgagggagcttttatgtga

SEQ ID NO: 5653980 - DNA, 25 bp, Homo sapien
aaaagctccctcattaacgtatcag

SEQ ID NO: 5653981 - DNA, 25 bp, Homo sapien
tcacataaaagctccctcattaacg

SEQ ID NO: 5653982 - DNA, 25 bp, Homo sapien
taatatgcttggtcttaggagctgc

SEQ ID NO: 5653983 - DNA, 25 bp, Homo sapien
tccctcattaacgtatcagctccta

SEQ ID NO: 5653984 - DNA, 25 bp, Homo sapien
cctgcttaatattaatagtttcaca

SEQ ID NO: 5653985 - DNA, 25 bp, Homo sapien
aacgtatcagctcctaatatgcttg

SEQ ID NO: 5653986 - DNA, 25 bp, Homo sapien
cacttggattatgtaattcctctca

SEQ ID NO: 5653987 - DNA, 25 bp, Homo sapien
gatccacttggattatgtaattcct

SEQ ID NO: 5653988 - DNA, 25 bp, Homo sapien
gattatgtaattcctctcaactgct

SEQ ID NO: 5653989 - DNA, 25 bp, Homo sapien
gaactgaccaactcttactacctgc

SEQ ID NO: 5653990 - DNA, 25 bp, Homo sapien
aactgaccaactcttactacctgca

SEQ ID NO: 5653991 - DNA, 25 bp, Homo sapien
ttatgtaattcctctcaactgcttt

SEQ ID NO: 5653992 - DNA, 25 bp, Homo sapien
gaattacataatccaagtggatcag

SEQ ID NO: 5653993 - DNA, 25 bp, Homo sapien
gagaggaattacataatccaagtgg

SEQ ID NO: 5653994 - DNA, 25 bp, Homo sapien
tgcaggtagtaagagttggtcagtt

SEQ ID NO: 5653995 - DNA, 25 bp, Homo sapien
gcaggtagtaagagttggtcagttc

SEQ ID NO: 5653996 - DNA, 25 bp, Homo sapien
cagttgagaggaattacataatcca

SEQ ID NO: 5653997 - DNA, 25 bp, Homo sapien
aaagcagttgagaggaattacataa

SEQ ID NO: 5653998 - DNA, 25 bp, Homo sapien
ctgaccatctggcatatataggtag

SEQ ID NO: 5653999 - DNA, 25 bp, Homo sapien
accatctggcatatataggtagata

SEQ ID NO: 5654000 - DNA, 25 bp, Homo sapien
tgaccatctggcatatataggtaga

SEQ ID NO: 5654001 - DNA, 25 bp, Homo sapien
gaccatctggcatatataggtagat

SEQ ID NO: 5654002 - DNA, 25 bp, Homo sapien
tctacctatatatgccagatggtca

SEQ ID NO: 5654003 - DNA, 25 bp, Homo sapien
ctacctatatatgccagatggtcag

SEQ ID NO: 5654004 - DNA, 25 bp, Homo sapien
atctacctatatatgccagatggtc

SEQ ID NO: 5654005 - DNA, 25 bp, Homo sapien
tatctacctatatatgccagatggt

SEQ ID NO: 5654006 - DNA, 25 bp, Homo sapien
tattttcctccatcagcacttactg

SEQ ID NO: 5654007 - DNA, 25 bp, Homo sapien
cctttcctgtcttattttcctccat

SEQ ID NO: 5654008 - DNA, 25 bp, Homo sapien
accatctggcatatataggtagata

SEQ ID NO: 5654009 - DNA, 25 bp, Homo sapien
cagcacttactgaccatctggcata

SEQ ID NO: 5654010 - DNA, 25 bp, Homo sapien
tgaccatctggcatatataggtaga

SEQ ID NO: 5654011 - DNA, 25 bp, Homo sapien
ggcatatataggtagataattgttg

SEQ ID NO: 5654012 - DNA, 25 bp, Homo sapien
tctacctatatatgccagatggtca

SEQ ID NO: 5654013 - DNA, 25 bp, Homo sapien
gatggaggaaaataagacaggaaag

SEQ ID NO: 5654014 - DNA, 25 bp, Homo sapien
tatgccagatggtcagtaagtgctg

SEQ ID NO: 5654015 - DNA, 25 bp, Homo sapien
cagtaagtgctgatggaggaaaata

SEQ ID NO: 5654016 - DNA, 25 bp, Homo sapien
tatctacctatatatgccagatggt

SEQ ID NO: 5654017 - DNA, 25 bp, Homo sapien
cacaacaaacaacaattatctacct

SEQ ID NO: 5654018 - DNA, 25 bp, Homo sapien
aatacatatactggacattcagtga

SEQ ID NO: 5654019 - DNA, 25 bp, Homo sapien
cctcagaccctaatacatatactgg

SEQ ID NO: 5654020 - DNA, 25 bp, Homo sapien
gaccctaatacatatactggacatt

SEQ ID NO: 5654021 - DNA, 25 bp, Homo sapien
cctaatacatatactggacattcag

SEQ ID NO: 5654022 - DNA, 25 bp, Homo sapien
tctcctcagaccctaatacatatac

SEQ ID NO: 5654023 - DNA, 25 bp, Homo sapien
cagaccctaatacatatactggaca

SEQ ID NO: 5654024 - DNA, 25 bp, Homo sapien
cactgaatgtccagtatatgtatta

SEQ ID NO: 5654025 - DNA, 25 bp, Homo sapien
tgtccagtatatgtattagggtctg

SEQ ID NO: 5654026 - DNA, 25 bp, Homo sapien
gtatatgtattagggtctgaggaga

SEQ ID NO: 5654027 - DNA, 25 bp, Homo sapien
ccagtatatgtattagggtctgagg

SEQ ID NO: 5654028 - DNA, 25 bp, Homo sapien
tgaatgtccagtatatgtattaggg

SEQ ID NO: 5654029 - DNA, 25 bp, Homo sapien
aatgtccagtatatgtattagggtc

SEQ ID NO: 5654030 - DNA, 25 bp, Homo sapien
aaataagagttctgggccaggtgtg

SEQ ID NO: 5654031 - DNA, 25 bp, Homo sapien
cagaacttctaaaggatgagttaaa

SEQ ID NO: 5654032 - DNA, 25 bp, Homo sapien
aaaataagagttctgggccaggtgt

SEQ ID NO: 5654033 - DNA, 25 bp, Homo sapien
aagaaaaataagagttctgggccag

SEQ ID NO: 5654034 - DNA, 25 bp, Homo sapien
agaaaaataagagttctgggccagg

SEQ ID NO: 5654035 - DNA, 25 bp, Homo sapien
aaaaataagagttctgggccaggtg

SEQ ID NO: 5654036 - DNA, 25 bp, Homo sapien
ctggcccagaactcttatttttctt

SEQ ID NO: 5654037 - DNA, 25 bp, Homo sapien
cacacctggcccagaactcttattt

SEQ ID NO: 5654038 - DNA, 25 bp, Homo sapien
cacctggcccagaactcttattttt

SEQ ID NO: 5654039 - DNA, 25 bp, Homo sapien
tttaactcatcctttagaagttctg

SEQ ID NO: 5654040 - DNA, 25 bp, Homo sapien
acacctggcccagaactcttatttt

SEQ ID NO: 5654041 - DNA, 25 bp, Homo sapien
cctggcccagaactcttatttttct

SEQ ID NO: 5654042 - DNA, 25 bp, Homo sapien
atctgccagcagttaagccaggaga

SEQ ID NO: 5654043 - DNA, 25 bp, Homo sapien
tctcctggcttaactgctggcagat

SEQ ID NO: 5654044 - DNA, 25 bp, Homo sapien
taagccaggagaactgggtgaattt

SEQ ID NO: 5654045 - DNA, 25 bp, Homo sapien
tgccagcagttaagccaggagaact

SEQ ID NO: 5654046 - DNA, 25 bp, Homo sapien
gattgtttatagaatgaaggagaag

SEQ ID NO: 5654047 - DNA, 25 bp, Homo sapien
tgaattttgttgctgacagtgggaa

SEQ ID NO: 5654048 - DNA, 25 bp, Homo sapien
atctgccagcagttaagccaggaga

SEQ ID NO: 5654049 - DNA, 25 bp, Homo sapien
ggagaaaagtttgaatctgccagca

SEQ ID NO: 5654050 - DNA, 25 bp, Homo sapien
tgctggcagattcaaacttttctcc

SEQ ID NO: 5654051 - DNA, 25 bp, Homo sapien
tcccactgtcagcaacaaaattcac

SEQ ID NO: 5654052 - DNA, 25 bp, Homo sapien
ccttcattctataaacaatcaccag

SEQ ID NO: 5654053 - DNA, 25 bp, Homo sapien
caaaattcacccagttctcctggct

SEQ ID NO: 5654054 - DNA, 25 bp, Homo sapien
tctcctggcttaactgctggcagat

SEQ ID NO: 5654055 - DNA, 25 bp, Homo sapien
agttctcctggcttaactgctggca

SEQ ID NO: 5654056 - DNA, 25 bp, Homo sapien
gatgtgagggtgggtcggttgggtg

SEQ ID NO: 5654057 - DNA, 25 bp, Homo sapien
tggatgtgagggtgggtcggttggg

SEQ ID NO: 5654058 - DNA, 25 bp, Homo sapien
atggatgtgagggtgggtcggttgg

SEQ ID NO: 5654059 - DNA, 25 bp, Homo sapien
atgtgagggtgggtcggttgggtga

SEQ ID NO: 5654060 - DNA, 25 bp, Homo sapien
tgtgagggtgggtcggttgggtgaa

SEQ ID NO: 5654061 - DNA, 25 bp, Homo sapien
cacccaaccgacccaccctcacatc

SEQ ID NO: 5654062 - DNA, 25 bp, Homo sapien
cccaaccgacccaccctcacatcca

SEQ ID NO: 5654063 - DNA, 25 bp, Homo sapien
ccaaccgacccaccctcacatccat

SEQ ID NO: 5654064 - DNA, 25 bp, Homo sapien
tcacccaaccgacccaccctcacat

SEQ ID NO: 5654065 - DNA, 25 bp, Homo sapien
ttcacccaaccgacccaccctcaca

SEQ ID NO: 5654066 - DNA, 25 bp, Homo sapien
tataaatccacagtatttggtgact

SEQ ID NO: 5654067 - DNA, 25 bp, Homo sapien
gaaggcatggacaaaagatgatgga

SEQ ID NO: 5654068 - DNA, 25 bp, Homo sapien
aggtgcagagaaggcatggacaaaa

SEQ ID NO: 5654069 - DNA, 25 bp, Homo sapien
tgtgagggtgggtcggttgggtgaa

SEQ ID NO: 5654070 - DNA, 25 bp, Homo sapien
gatgctttaaactataaatccacag

SEQ ID NO: 5654071 - DNA, 25 bp, Homo sapien
cacagtatttggtgactgtggaggt

SEQ ID NO: 5654072 - DNA, 25 bp, Homo sapien
acctccacagtcaccaaatactgtg

SEQ ID NO: 5654073 - DNA, 25 bp, Homo sapien
cagtcaccaaatactgtggatttat

SEQ ID NO: 5654074 - DNA, 25 bp, Homo sapien
catcatcttttgtccatgccttctc

SEQ ID NO: 5654075 - DNA, 25 bp, Homo sapien
cacatccatcatcttttgtccatgc

SEQ ID NO: 5654076 - DNA, 25 bp, Homo sapien
tactgtggatttatagtttaaagca

SEQ ID NO: 5654077 - DNA, 25 bp, Homo sapien
ttttgtccatgccttctctgcacct

SEQ ID NO: 5654078 - DNA, 25 bp, Homo sapien
agaacagcatgaactgaggtttaga

SEQ ID NO: 5654079 - DNA, 25 bp, Homo sapien
agcatgaactgaggtttagaaatgt

SEQ ID NO: 5654080 - DNA, 25 bp, Homo sapien
aacagcatgaactgaggtttagaaa

SEQ ID NO: 5654081 - DNA, 25 bp, Homo sapien
gagaacagcatgaactgaggtttag

SEQ ID NO: 5654082 - DNA, 25 bp, Homo sapien
cagcatgaactgaggtttagaaatg

SEQ ID NO: 5654083 - DNA, 25 bp, Homo sapien
gaacagcatgaactgaggtttagaa

SEQ ID NO: 5654084 - DNA, 25 bp, Homo sapien
tctaaacctcagttcatgctgttct

SEQ ID NO: 5654085 - DNA, 25 bp, Homo sapien
tttctaaacctcagttcatgctgtt

SEQ ID NO: 5654086 - DNA, 25 bp, Homo sapien
ttctaaacctcagttcatgctgttc

SEQ ID NO: 5654087 - DNA, 25 bp, Homo sapien
catttctaaacctcagttcatgctg

SEQ ID NO: 5654088 - DNA, 25 bp, Homo sapien
ctaaacctcagttcatgctgttctc

SEQ ID NO: 5654089 - DNA, 25 bp, Homo sapien
acatttctaaacctcagttcatgct

SEQ ID NO: 5654090 - DNA, 25 bp, Homo sapien
tttctaaaagctccccttctgaatc

SEQ ID NO: 5654091 - DNA, 25 bp, Homo sapien
tacactttgatctctcatcagcaga

SEQ ID NO: 5654092 - DNA, 25 bp, Homo sapien
gatctctcatcagcagaatttcaac

SEQ ID NO: 5654093 - DNA, 25 bp, Homo sapien
catttctaaacctcagttcatgctg

SEQ ID NO: 5654094 - DNA, 25 bp, Homo sapien
ctaaacctcagttcatgctgttctc

SEQ ID NO: 5654095 - DNA, 25 bp, Homo sapien
gaatttcaacatttctaaacctcag

SEQ ID NO: 5654096 - DNA, 25 bp, Homo sapien
ctcatcgctggagagtcatattttt

SEQ ID NO: 5654097 - DNA, 25 bp, Homo sapien
ttacagagaatactaccaaataggg

SEQ ID NO: 5654098 - DNA, 25 bp, Homo sapien
gagctcatcgctggagagtcatatt

SEQ ID NO: 5654099 - DNA, 25 bp, Homo sapien
gagagctcatcgctggagagtcata

SEQ ID NO: 5654100 - DNA, 25 bp, Homo sapien
cagagaatactaccaaatagggtaa

SEQ ID NO: 5654101 - DNA, 25 bp, Homo sapien
gtgttaatttcattacagagaatac

SEQ ID NO: 5654102 - DNA, 25 bp, Homo sapien
aatatgactctccagcgatgagctc

SEQ ID NO: 5654103 - DNA, 25 bp, Homo sapien
ccctatttggtagtattctctgtaa

SEQ ID NO: 5654104 - DNA, 25 bp, Homo sapien
tatgactctccagcgatgagctctc

SEQ ID NO: 5654105 - DNA, 25 bp, Homo sapien
tattctctgtaatgaaattaacact

SEQ ID NO: 5654106 - DNA, 25 bp, Homo sapien
ttaccctatttggtagtattctctg

SEQ ID NO: 5654107 - DNA, 25 bp, Homo sapien
aaaaatatgactctccagcgatgag

SEQ ID NO: 5654108 - DNA, 25 bp, Homo sapien
taaatttggattggacagctacact

SEQ ID NO: 5654109 - DNA, 25 bp, Homo sapien
ggacagctacactgtggcatcagca

SEQ ID NO: 5654110 - DNA, 25 bp, Homo sapien
gctacactgtggcatcagcacatat

SEQ ID NO: 5654111 - DNA, 25 bp, Homo sapien
tggattggacagctacactgtggca

SEQ ID NO: 5654112 - DNA, 25 bp, Homo sapien
cactgtggcatcagcacatatctct

SEQ ID NO: 5654113 - DNA, 25 bp, Homo sapien
gtggcatcagcacatatctctttaa

SEQ ID NO: 5654114 - DNA, 25 bp, Homo sapien
gctgatgccacagtgtagctgtcca

SEQ ID NO: 5654115 - DNA, 25 bp, Homo sapien
gccacagtgtagctgtccaatccaa

SEQ ID NO: 5654116 - DNA, 25 bp, Homo sapien
ttaaagagatatgtgctgatgccac

SEQ ID NO: 5654117 - DNA, 25 bp, Homo sapien
tgtgctgatgccacagtgtagctgt

SEQ ID NO: 5654118 - DNA, 25 bp, Homo sapien
gtgtagctgtccaatccaaatttat

SEQ ID NO: 5654119 - DNA, 25 bp, Homo sapien
gatatgtgctgatgccacagtgtag

SEQ ID NO: 5654120 - DNA, 25 bp, Homo sapien
aatttcttggtgtgcaatccatgcc

SEQ ID NO: 5654121 - DNA, 25 bp, Homo sapien
aggggacttaaaccattctgtgatg

SEQ ID NO: 5654122 - DNA, 25 bp, Homo sapien
tccatgccagtttgataatctggaa

SEQ ID NO: 5654123 - DNA, 25 bp, Homo sapien
tggtgtgcaatccatgccagtttga

SEQ ID NO: 5654124 - DNA, 25 bp, Homo sapien
tgtgcaatccatgccagtttgataa

SEQ ID NO: 5654125 - DNA, 25 bp, Homo sapien
gcaaatacagatccaatttcttggt

SEQ ID NO: 5654126 - DNA, 25 bp, Homo sapien
catcacagaatggtttaagtcccct

SEQ ID NO: 5654127 - DNA, 25 bp, Homo sapien
ttccagattatcaaactggcatgga

SEQ ID NO: 5654128 - DNA, 25 bp, Homo sapien
gattatcaaactggcatggattgca

SEQ ID NO: 5654129 - DNA, 25 bp, Homo sapien
accaagaaattggatctgtatttgc

SEQ ID NO: 5654130 - DNA, 25 bp, Homo sapien
catggattgcacaccaagaaattgg

SEQ ID NO: 5654131 - DNA, 25 bp, Homo sapien
tcaaactggcatggattgcacacca

SEQ ID NO: 5654132 - DNA, 25 bp, Homo sapien
atttgtagtgtgtgcgatttacaca

SEQ ID NO: 5654133 - DNA, 25 bp, Homo sapien
tagtgtgtgcgatttacacatttgt

SEQ ID NO: 5654134 - DNA, 25 bp, Homo sapien
agtgtgtgcgatttacacatttgtt

SEQ ID NO: 5654135 - DNA, 25 bp, Homo sapien
tttgtagtgtgtgcgatttacacat

SEQ ID NO: 5654136 - DNA, 25 bp, Homo sapien
tttgttttattggagctcatccctc

SEQ ID NO: 5654137 - DNA, 25 bp, Homo sapien
tgtagtgtgtgcgatttacacattt

SEQ ID NO: 5654138 - DNA, 25 bp, Homo sapien
aacaaatgtgtaaatcgcacacact

SEQ ID NO: 5654139 - DNA, 25 bp, Homo sapien
tgtgtaaatcgcacacactacaaat

SEQ ID NO: 5654140 - DNA, 25 bp, Homo sapien
aaatgtgtaaatcgcacacactaca

SEQ ID NO: 5654141 - DNA, 25 bp, Homo sapien
caaatgtgtaaatcgcacacactac

SEQ ID NO: 5654142 - DNA, 25 bp, Homo sapien
atgtgtaaatcgcacacactacaaa

SEQ ID NO: 5654143 - DNA, 25 bp, Homo sapien
gagggatgagctccaataaaacaaa

SEQ ID NO: 5654144 - DNA, 25 bp, Homo sapien
cagatactctatccttctgggaata

SEQ ID NO: 5654145 - DNA, 25 bp, Homo sapien
aacttctgtttaattggcacaaatg

SEQ ID NO: 5654146 - DNA, 25 bp, Homo sapien
tacaacttctgtttaattggcacaa

SEQ ID NO: 5654147 - DNA, 25 bp, Homo sapien
tatccttctgggaatacaacttctg

SEQ ID NO: 5654148 - DNA, 25 bp, Homo sapien
gttaaagcttataagtagctggaaa

SEQ ID NO: 5654149 - DNA, 25 bp, Homo sapien
tagctggaaattatgattatactac

SEQ ID NO: 5654150 - DNA, 25 bp, Homo sapien
taaacagaagttgtattcccagaag

SEQ ID NO: 5654151 - DNA, 25 bp, Homo sapien
aagtagtataatcataatttccagc

SEQ ID NO: 5654152 - DNA, 25 bp, Homo sapien
catttgtgccaattaaacagaagtt

SEQ ID NO: 5654153 - DNA, 25 bp, Homo sapien
tttccagctacttataagctttaac

SEQ ID NO: 5654154 - DNA, 25 bp, Homo sapien
tattcccagaaggatagagtatctg

SEQ ID NO: 5654155 - DNA, 25 bp, Homo sapien
cagaagttgtattcccagaaggata

SEQ ID NO: 5654156 - DNA, 25 bp, Homo sapien
gacaaggtcccgctctgtcgcccag

SEQ ID NO: 5654157 - DNA, 25 bp, Homo sapien
cttttgagacaaggtcccgctctgt

SEQ ID NO: 5654158 - DNA, 25 bp, Homo sapien
aaggtcccgctctgtcgcccaggct

SEQ ID NO: 5654159 - DNA, 25 bp, Homo sapien
caaggtcccgctctgtcgcccaggc

SEQ ID NO: 5654160 - DNA, 25 bp, Homo sapien
acaaggtcccgctctgtcgcccagg

SEQ ID NO: 5654161 - DNA, 25 bp, Homo sapien
ttgagacaaggtcccgctctgtcgc

SEQ ID NO: 5654162 - DNA, 25 bp, Homo sapien
agcctgggcgacagagcgggacctt

SEQ ID NO: 5654163 - DNA, 25 bp, Homo sapien
cctgggcgacagagcgggaccttgt

SEQ ID NO: 5654164 - DNA, 25 bp, Homo sapien
gcgacagagcgggaccttgtctcaa

SEQ ID NO: 5654165 - DNA, 25 bp, Homo sapien
gcctgggcgacagagcgggaccttg

SEQ ID NO: 5654166 - DNA, 25 bp, Homo sapien
ctgggcgacagagcgggaccttgtc

SEQ ID NO: 5654167 - DNA, 25 bp, Homo sapien
acagagcgggaccttgtctcaaaag

SEQ ID NO: 5654168 - DNA, 25 bp, Homo sapien
cgccgccatgcatggctaatttttg

SEQ ID NO: 5654169 - DNA, 25 bp, Homo sapien
tggagacgggtttgccatgttggcc

SEQ ID NO: 5654170 - DNA, 25 bp, Homo sapien
cacacgccgccatgcatggctaatt

SEQ ID NO: 5654171 - DNA, 25 bp, Homo sapien
cacgccgccatgcatggctaatttt

SEQ ID NO: 5654172 - DNA, 25 bp, Homo sapien
tttagtggagacgggtttgccatgt

SEQ ID NO: 5654173 - DNA, 25 bp, Homo sapien
acacgccgccatgcatggctaattt

SEQ ID NO: 5654174 - DNA, 25 bp, Homo sapien
aaattagccatgcatggcggcgtgt

SEQ ID NO: 5654175 - DNA, 25 bp, Homo sapien
aaaattagccatgcatggcggcgtg

SEQ ID NO: 5654176 - DNA, 25 bp, Homo sapien
caaaaattagccatgcatggcggcg

SEQ ID NO: 5654177 - DNA, 25 bp, Homo sapien
aacatggcaaacccgtctccactaa

SEQ ID NO: 5654178 - DNA, 25 bp, Homo sapien
ggccaacatggcaaacccgtctcca

SEQ ID NO: 5654179 - DNA, 25 bp, Homo sapien
aattagccatgcatggcggcgtgtg

SEQ ID NO: 5654180 - DNA, 25 bp, Homo sapien
tgtgcccggtatactattgtgaagt

SEQ ID NO: 5654181 - DNA, 25 bp, Homo sapien
actgtgcccggtatactattgtgaa

SEQ ID NO: 5654182 - DNA, 25 bp, Homo sapien
tctcactaatggagctaataaagct

SEQ ID NO: 5654183 - DNA, 25 bp, Homo sapien
aaatatctcactaatggagctaata

SEQ ID NO: 5654184 - DNA, 25 bp, Homo sapien
actattgtgaagtatttagatctac

SEQ ID NO: 5654185 - DNA, 25 bp, Homo sapien
gcccggtatactattgtgaagtatt

SEQ ID NO: 5654186 - DNA, 25 bp, Homo sapien
aatacttcacaatagtataccgggc

SEQ ID NO: 5654187 - DNA, 25 bp, Homo sapien
tacttcacaatagtataccgggcac

SEQ ID NO: 5654188 - DNA, 25 bp, Homo sapien
taaatacttcacaatagtataccgg

SEQ ID NO: 5654189 - DNA, 25 bp, Homo sapien
agctttattagctccattagtgaga

SEQ ID NO: 5654190 - DNA, 25 bp, Homo sapien
ttcacaatagtataccgggcacagt

SEQ ID NO: 5654191 - DNA, 25 bp, Homo sapien
gtagatctaaatacttcacaatagt

SEQ ID NO: 5654192 - DNA, 25 bp, Homo sapien
atatgtattgatcacataccataaa

SEQ ID NO: 5654193 - DNA, 25 bp, Homo sapien
atatatgtattgatcacataccata

SEQ ID NO: 5654194 - DNA, 25 bp, Homo sapien
tatatgtattgatcacataccataa

SEQ ID NO: 5654195 - DNA, 25 bp, Homo sapien
aatatatgtattgatcacataccat

SEQ ID NO: 5654196 - DNA, 25 bp, Homo sapien
atggtatgtgatcaatacatatatt

SEQ ID NO: 5654197 - DNA, 25 bp, Homo sapien
tatggtatgtgatcaatacatatat

SEQ ID NO: 5654198 - DNA, 25 bp, Homo sapien
tttatggtatgtgatcaatacatat

SEQ ID NO: 5654199 - DNA, 25 bp, Homo sapien
ttatggtatgtgatcaatacatata

SEQ ID NO: 5654200 - DNA, 25 bp, Homo sapien
tataaccaagtagactaaggataat

SEQ ID NO: 5654201 - DNA, 25 bp, Homo sapien
tgtaagctgtatcaaaatatatgta

SEQ ID NO: 5654202 - DNA, 25 bp, Homo sapien
ttgatcacataccataaaaataatc

SEQ ID NO: 5654203 - DNA, 25 bp, Homo sapien
tatatgtattgatcacataccataa

SEQ ID NO: 5654204 - DNA, 25 bp, Homo sapien
gagctagaattataaccaagtagac

SEQ ID NO: 5654205 - DNA, 25 bp, Homo sapien
aacaattcattgtaagctgtatcaa

SEQ ID NO: 5654206 - DNA, 25 bp, Homo sapien
aattatccttagtctacttggttat

SEQ ID NO: 5654207 - DNA, 25 bp, Homo sapien
tatggtatgtgatcaatacatatat

SEQ ID NO: 5654208 - DNA, 25 bp, Homo sapien
tttgatacagcttacaatgaattgt

SEQ ID NO: 5654209 - DNA, 25 bp, Homo sapien
gtctacttggttataattctagctc

SEQ ID NO: 5654210 - DNA, 25 bp, Homo sapien
tacatatattttgatacagcttaca

SEQ ID NO: 5654211 - DNA, 25 bp, Homo sapien
gattatttttatggtatgtgatcaa

SEQ ID NO: 5654212 - DNA, 25 bp, Homo sapien
tcagtgatccttccatcttaagcct

SEQ ID NO: 5654213 - DNA, 25 bp, Homo sapien
cagtgatccttccatcttaagcctc

SEQ ID NO: 5654214 - DNA, 25 bp, Homo sapien
ctcagtgatccttccatcttaagcc

SEQ ID NO: 5654215 - DNA, 25 bp, Homo sapien
ggcctcagtgatccttccatcttaa

SEQ ID NO: 5654216 - DNA, 25 bp, Homo sapien
agtgatccttccatcttaagcctcc

SEQ ID NO: 5654217 - DNA, 25 bp, Homo sapien
gcctcagtgatccttccatcttaag

SEQ ID NO: 5654218 - DNA, 25 bp, Homo sapien
gaggcttaagatggaaggatcactg

SEQ ID NO: 5654219 - DNA, 25 bp, Homo sapien
ggcttaagatggaaggatcactgag

SEQ ID NO: 5654220 - DNA, 25 bp, Homo sapien
aggcttaagatggaaggatcactga

SEQ ID NO: 5654221 - DNA, 25 bp, Homo sapien
cttaagatggaaggatcactgaggc

SEQ ID NO: 5654222 - DNA, 25 bp, Homo sapien
ttaagatggaaggatcactgaggcc

SEQ ID NO: 5654223 - DNA, 25 bp, Homo sapien
ggaggcttaagatggaaggatcact

SEQ ID NO: 5654224 - DNA, 25 bp, Homo sapien
agtgctgtttagtgcccatgtaagg

SEQ ID NO: 5654225 - DNA, 25 bp, Homo sapien
acagttctgacccatcctatagatg

SEQ ID NO: 5654226 - DNA, 25 bp, Homo sapien
cagaagtgctgtttagtgcccatgt

SEQ ID NO: 5654227 - DNA, 25 bp, Homo sapien
ttagtgcccatgtaaggtaggaagc

SEQ ID NO: 5654228 - DNA, 25 bp, Homo sapien
tgtttagtgcccatgtaaggtagga

SEQ ID NO: 5654229 - DNA, 25 bp, Homo sapien
tgcccatgtaaggtaggaagcaaca

SEQ ID NO: 5654230 - DNA, 25 bp, Homo sapien
catctataggatgggtcagaactgt

SEQ ID NO: 5654231 - DNA, 25 bp, Homo sapien
ccttacatgggcactaaacagcact

SEQ ID NO: 5654232 - DNA, 25 bp, Homo sapien
cctaccttacatgggcactaaacag

SEQ ID NO: 5654233 - DNA, 25 bp, Homo sapien
tgttgcttcctaccttacatgggca

SEQ ID NO: 5654234 - DNA, 25 bp, Homo sapien
tacatgggcactaaacagcacttct

SEQ ID NO: 5654235 - DNA, 25 bp, Homo sapien
gcttcctaccttacatgggcactaa

SEQ ID NO: 5654236 - DNA, 25 bp, Homo sapien
taaagtcacattccggccaggatcg

SEQ ID NO: 5654237 - DNA, 25 bp, Homo sapien
gtattaaagtcacattccggccagg

SEQ ID NO: 5654238 - DNA, 25 bp, Homo sapien
agtccagtattaaagtcacattccg

SEQ ID NO: 5654239 - DNA, 25 bp, Homo sapien
cagtattaaagtcacattccggcca

SEQ ID NO: 5654240 - DNA, 25 bp, Homo sapien
tcacattccggccaggatcggtggc

SEQ ID NO: 5654241 - DNA, 25 bp, Homo sapien
tattaaagtcacattccggccagga

SEQ ID NO: 5654242 - DNA, 25 bp, Homo sapien
cgatcctggccggaatgtgacttta

SEQ ID NO: 5654243 - DNA, 25 bp, Homo sapien
gccaccgatcctggccggaatgtga

SEQ ID NO: 5654244 - DNA, 25 bp, Homo sapien
ggccggaatgtgactttaatactgg

SEQ ID NO: 5654245 - DNA, 25 bp, Homo sapien
cggaatgtgactttaatactggact

SEQ ID NO: 5654246 - DNA, 25 bp, Homo sapien
cctggccggaatgtgactttaatac

SEQ ID NO: 5654247 - DNA, 25 bp, Homo sapien
gatcctggccggaatgtgactttaa

SEQ ID NO: 5654248 - DNA, 25 bp, Homo sapien
aaggcattccaatttgagatcaatt

SEQ ID NO: 5654249 - DNA, 25 bp, Homo sapien
tcaaaggcattccaatttgagatca

SEQ ID NO: 5654250 - DNA, 25 bp, Homo sapien
caaaggcattccaatttgagatcaa

SEQ ID NO: 5654251 - DNA, 25 bp, Homo sapien
ttcaaaggcattccaatttgagatc

SEQ ID NO: 5654252 - DNA, 25 bp, Homo sapien
aaaggcattccaatttgagatcaat

SEQ ID NO: 5654253 - DNA, 25 bp, Homo sapien
aattgatctcaaattggaatgcctt

SEQ ID NO: 5654254 - DNA, 25 bp, Homo sapien
ttgatctcaaattggaatgcctttg

SEQ ID NO: 5654255 - DNA, 25 bp, Homo sapien
gatctcaaattggaatgcctttgaa

SEQ ID NO: 5654256 - DNA, 25 bp, Homo sapien
attgatctcaaattggaatgccttt

SEQ ID NO: 5654257 - DNA, 25 bp, Homo sapien
tgatctcaaattggaatgcctttga

SEQ ID NO: 5654258 - DNA, 25 bp, Homo sapien
taaggcataacacatatgttaacag

SEQ ID NO: 5654259 - DNA, 25 bp, Homo sapien
caattttagaataaggcataacaca

SEQ ID NO: 5654260 - DNA, 25 bp, Homo sapien
tgttaacagaagacatacaaggtga

SEQ ID NO: 5654261 - DNA, 25 bp, Homo sapien
gcatctgtcttcaaaggcattccaa

SEQ ID NO: 5654262 - DNA, 25 bp, Homo sapien
catacaaggtgatgaaagagggatt

SEQ ID NO: 5654263 - DNA, 25 bp, Homo sapien
caaaggcattccaatttgagatcaa

SEQ ID NO: 5654264 - DNA, 25 bp, Homo sapien
catatgtgttatgccttattctaaa

SEQ ID NO: 5654265 - DNA, 25 bp, Homo sapien
gaatccctctttcatcaccttgtat

SEQ ID NO: 5654266 - DNA, 25 bp, Homo sapien
aattgatctcaaattggaatgcctt

SEQ ID NO: 5654267 - DNA, 25 bp, Homo sapien
ttggaatgcctttgaagacagatgc

SEQ ID NO: 5654268 - DNA, 25 bp, Homo sapien
tcaccttgtatgtcttctgttaaca

SEQ ID NO: 5654269 - DNA, 25 bp, Homo sapien
tgatctcaaattggaatgcctttga

SEQ ID NO: 5654270 - DNA, 25 bp, Homo sapien
caaattaaacatgaaaaaactctat

SEQ ID NO: 5654271 - DNA, 25 bp, Homo sapien
tcaaataaactaacagttcaagaaa

SEQ ID NO: 5654272 - DNA, 25 bp, Homo sapien
actaacagttcaagaaaagcctatc

SEQ ID NO: 5654273 - DNA, 25 bp, Homo sapien
tttcaaataaactaacagttcaaga

SEQ ID NO: 5654274 - DNA, 25 bp, Homo sapien
tctatttcaaataaactaacagttc

SEQ ID NO: 5654275 - DNA, 25 bp, Homo sapien
taaacatgaaaaaactctatttcaa

SEQ ID NO: 5654276 - DNA, 25 bp, Homo sapien
tgaaatagagttttttcatgtttaa

SEQ ID NO: 5654277 - DNA, 25 bp, Homo sapien
gaactgttagtttatttgaaataga

SEQ ID NO: 5654278 - DNA, 25 bp, Homo sapien
tgaactgttagtttatttgaaatag

SEQ ID NO: 5654279 - DNA, 25 bp, Homo sapien
tcatgtttaatttgtatttgaaaaa

SEQ ID NO: 5654280 - DNA, 25 bp, Homo sapien
gataggcttttcttgaactgttagt

SEQ ID NO: 5654281 - DNA, 25 bp, Homo sapien
tcttgaactgttagtttatttgaaa

SEQ ID NO: 5654282 - DNA, 25 bp, Homo sapien
atttagccgagcgtggtggtgggtg

SEQ ID NO: 5654283 - DNA, 25 bp, Homo sapien
tttagccgagcgtggtggtgggtgc

SEQ ID NO: 5654284 - DNA, 25 bp, Homo sapien
gcacccaccaccacgctcggctaaa

SEQ ID NO: 5654285 - DNA, 25 bp, Homo sapien
cacccaccaccacgctcggctaaat

SEQ ID NO: 5654286 - DNA, 25 bp, Homo sapien
actgtttaaacactaaggcccagct

SEQ ID NO: 5654287 - DNA, 25 bp, Homo sapien
agctgggccttagtgtttaaacagt

SEQ ID NO: 5654288 - DNA, 25 bp, Homo sapien
tggttagagtgttaaaagaagcttg

SEQ ID NO: 5654289 - DNA, 25 bp, Homo sapien
actgtttaaacactaaggcccagct

SEQ ID NO: 5654290 - DNA, 25 bp, Homo sapien
tgttaaaagaagcttgttcaggtga

SEQ ID NO: 5654291 - DNA, 25 bp, Homo sapien
tttaaacactaaggcccagctgatg

SEQ ID NO: 5654292 - DNA, 25 bp, Homo sapien
aggcccagctgatgaaacttaaaat

SEQ ID NO: 5654293 - DNA, 25 bp, Homo sapien
cactaaggcccagctgatgaaactt

SEQ ID NO: 5654294 - DNA, 25 bp, Homo sapien
catcagctgggccttagtgtttaaa

SEQ ID NO: 5654295 - DNA, 25 bp, Homo sapien
tcacctgaacaagcttcttttaaca

SEQ ID NO: 5654296 - DNA, 25 bp, Homo sapien
aattttaagtttcatcagctgggcc

SEQ ID NO: 5654297 - DNA, 25 bp, Homo sapien
agctgggccttagtgtttaaacagt

SEQ ID NO: 5654298 - DNA, 25 bp, Homo sapien
taagtttcatcagctgggccttagt

SEQ ID NO: 5654299 - DNA, 25 bp, Homo sapien
caagcttcttttaacactctaacca

SEQ ID NO: 5654300 - DNA, 25 bp, Homo sapien
taaagagtatatgaagcctggtgtg

SEQ ID NO: 5654301 - DNA, 25 bp, Homo sapien
aagagtatatgaagcctggtgtggt

SEQ ID NO: 5654302 - DNA, 25 bp, Homo sapien
gctgtaaagagtatatgaagcctgg

SEQ ID NO: 5654303 - DNA, 25 bp, Homo sapien
cactgtgtttggctgtaaagagtat

SEQ ID NO: 5654304 - DNA, 25 bp, Homo sapien
tttggctgtaaagagtatatgaagc

SEQ ID NO: 5654305 - DNA, 25 bp, Homo sapien
tgtaaagagtatatgaagcctggtg

SEQ ID NO: 5654306 - DNA, 25 bp, Homo sapien
catatactctttacagccaaacaca

SEQ ID NO: 5654307 - DNA, 25 bp, Homo sapien
accacaccaggcttcatatactctt

SEQ ID NO: 5654308 - DNA, 25 bp, Homo sapien
cacaccaggcttcatatactcttta

SEQ ID NO: 5654309 - DNA, 25 bp, Homo sapien
gcttcatatactctttacagccaaa

SEQ ID NO: 5654310 - DNA, 25 bp, Homo sapien
atactctttacagccaaacacagtg

SEQ ID NO: 5654311 - DNA, 25 bp, Homo sapien
accaggcttcatatactctttacag

SEQ ID NO: 5654312 - DNA, 25 bp, Homo sapien
ttagctgcgcgtgatggtacgcacc

SEQ ID NO: 5654313 - DNA, 25 bp, Homo sapien
aattagctgcgcgtgatggtacgca

SEQ ID NO: 5654314 - DNA, 25 bp, Homo sapien
attagctgcgcgtgatggtacgcac

SEQ ID NO: 5654315 - DNA, 25 bp, Homo sapien
ctgcgcgtgatggtacgcacctgta

SEQ ID NO: 5654316 - DNA, 25 bp, Homo sapien
gctgcgcgtgatggtacgcacctgt

SEQ ID NO: 5654317 - DNA, 25 bp, Homo sapien
tagctgcgcgtgatggtacgcacct

SEQ ID NO: 5654318 - DNA, 25 bp, Homo sapien
tgcgtaccatcacgcgcagctaatt

SEQ ID NO: 5654319 - DNA, 25 bp, Homo sapien
gtgcgtaccatcacgcgcagctaat

SEQ ID NO: 5654320 - DNA, 25 bp, Homo sapien
ggtgcgtaccatcacgcgcagctaa

SEQ ID NO: 5654321 - DNA, 25 bp, Homo sapien
aggtgcgtaccatcacgcgcagcta

SEQ ID NO: 5654322 - DNA, 25 bp, Homo sapien
tacaggtgcgtaccatcacgcgcag

SEQ ID NO: 5654323 - DNA, 25 bp, Homo sapien
acaggtgcgtaccatcacgcgcagc

SEQ ID NO: 5654324 - DNA, 25 bp, Homo sapien
ttagtacgatggttgaccatcagcc

SEQ ID NO: 5654325 - DNA, 25 bp, Homo sapien
tcaagaactgattttagtacgatgg

SEQ ID NO: 5654326 - DNA, 25 bp, Homo sapien
agtacgatggttgaccatcagccta

SEQ ID NO: 5654327 - DNA, 25 bp, Homo sapien
ctgattttagtacgatggttgacca

SEQ ID NO: 5654328 - DNA, 25 bp, Homo sapien
aaaagagtaaatgagggcaaataca

SEQ ID NO: 5654329 - DNA, 25 bp, Homo sapien
agtaaatgagggcaaatacatgtat

SEQ ID NO: 5654330 - DNA, 25 bp, Homo sapien
ggtcaaccatcgtactaaaatcagt

SEQ ID NO: 5654331 - DNA, 25 bp, Homo sapien
tgtatttgccctcatttactctttt

SEQ ID NO: 5654332 - DNA, 25 bp, Homo sapien
atacatgtatttgccctcatttact

SEQ ID NO: 5654333 - DNA, 25 bp, Homo sapien
ccatcgtactaaaatcagttcttga

SEQ ID NO: 5654334 - DNA, 25 bp, Homo sapien
gatggtcaaccatcgtactaaaatc

SEQ ID NO: 5654335 - DNA, 25 bp, Homo sapien
taggctgatggtcaaccatcgtact

SEQ ID NO: 5654336 - DNA, 25 bp, Homo sapien
tctctgcaatgtgagcagtaaggtc

SEQ ID NO: 5654337 - DNA, 25 bp, Homo sapien
gtgtcaaggattggtctgtcattga

SEQ ID NO: 5654338 - DNA, 25 bp, Homo sapien
agatctctgcaatgtgagcagtaag

SEQ ID NO: 5654339 - DNA, 25 bp, Homo sapien
gtcaaggattggtctgtcattgaaa

SEQ ID NO: 5654340 - DNA, 25 bp, Homo sapien
gatctctgcaatgtgagcagtaagg

SEQ ID NO: 5654341 - DNA, 25 bp, Homo sapien
tcaaggattggtctgtcattgaaaa

SEQ ID NO: 5654342 - DNA, 25 bp, Homo sapien
gaccttactgctcacattgcagaga

SEQ ID NO: 5654343 - DNA, 25 bp, Homo sapien
ccttactgctcacattgcagagatc

SEQ ID NO: 5654344 - DNA, 25 bp, Homo sapien
tcaatgacagaccaatccttgacac

SEQ ID NO: 5654345 - DNA, 25 bp, Homo sapien
cttactgctcacattgcagagatct

SEQ ID NO: 5654346 - DNA, 25 bp, Homo sapien
ttttcaatgacagaccaatccttga

SEQ ID NO: 5654347 - DNA, 25 bp, Homo sapien
tttcaatgacagaccaatccttgac

SEQ ID NO: 5654348 - DNA, 25 bp, Homo sapien
aggctgaggcaggcggatcacaagg

SEQ ID NO: 5654349 - DNA, 25 bp, Homo sapien
gctgaggcaggcggatcacaaggtc

SEQ ID NO: 5654350 - DNA, 25 bp, Homo sapien
ggaggctgaggcaggcggatcacaa

SEQ ID NO: 5654351 - DNA, 25 bp, Homo sapien
gaggctgaggcaggcggatcacaag

SEQ ID NO: 5654352 - DNA, 25 bp, Homo sapien
ggctgaggcaggcggatcacaaggt

SEQ ID NO: 5654353 - DNA, 25 bp, Homo sapien
agttcgaaactcctggccaacacgg

SEQ ID NO: 5654354 - DNA, 25 bp, Homo sapien
cttgtgatccgcctgcctcagcctc

SEQ ID NO: 5654355 - DNA, 25 bp, Homo sapien
gaccttgtgatccgcctgcctcagc

SEQ ID NO: 5654356 - DNA, 25 bp, Homo sapien
ccgtgttggccaggagtttcgaact

SEQ ID NO: 5654357 - DNA, 25 bp, Homo sapien
ttgtgatccgcctgcctcagcctcc

SEQ ID NO: 5654358 - DNA, 25 bp, Homo sapien
accttgtgatccgcctgcctcagcc

SEQ ID NO: 5654359 - DNA, 25 bp, Homo sapien
ccttgtgatccgcctgcctcagcct

SEQ ID NO: 5654360 - DNA, 25 bp, Homo sapien
gtgttccaacattaaatgcttctgg

SEQ ID NO: 5654361 - DNA, 25 bp, Homo sapien
taataaaggtggtacacagtgttcc

SEQ ID NO: 5654362 - DNA, 25 bp, Homo sapien
gcactgttagtggtgtattaataaa

SEQ ID NO: 5654363 - DNA, 25 bp, Homo sapien
tatggggaaatcagctggatagtat

SEQ ID NO: 5654364 - DNA, 25 bp, Homo sapien
taaaggtggtacacagtgttccaac

SEQ ID NO: 5654365 - DNA, 25 bp, Homo sapien
tccaacattaaatgcttctggaggc

SEQ ID NO: 5654366 - DNA, 25 bp, Homo sapien
ccagaagcatttaatgttggaacac

SEQ ID NO: 5654367 - DNA, 25 bp, Homo sapien
ggaacactgtgtaccacctttatta

SEQ ID NO: 5654368 - DNA, 25 bp, Homo sapien
tgttggaacactgtgtaccaccttt

SEQ ID NO: 5654369 - DNA, 25 bp, Homo sapien
gcctccagaagcatttaatgttgga

SEQ ID NO: 5654370 - DNA, 25 bp, Homo sapien
caatactatccagctgatttcccca

SEQ ID NO: 5654371 - DNA, 25 bp, Homo sapien
tttattaatacaccactaacagtgc

SEQ ID NO: 5654372 - DNA, 25 bp, Homo sapien
gagtcaccaagctcacatgaaatta

SEQ ID NO: 5654373 - DNA, 25 bp, Homo sapien
actatactatatttctggtcttagg

SEQ ID NO: 5654374 - DNA, 25 bp, Homo sapien
tactcagagtcaccaagctcacatg

SEQ ID NO: 5654375 - DNA, 25 bp, Homo sapien
tactatatttctggtcttaggttaa

SEQ ID NO: 5654376 - DNA, 25 bp, Homo sapien
tcagagtcaccaagctcacatgaaa

SEQ ID NO: 5654377 - DNA, 25 bp, Homo sapien
gtcaccaagctcacatgaaattaga

SEQ ID NO: 5654378 - DNA, 25 bp, Homo sapien
taatttcatgtgagcttggtgactc

SEQ ID NO: 5654379 - DNA, 25 bp, Homo sapien
cctaagaccagaaatatagtatagt

SEQ ID NO: 5654380 - DNA, 25 bp, Homo sapien
tctaatttcatgtgagcttggtgac

SEQ ID NO: 5654381 - DNA, 25 bp, Homo sapien
tttcatgtgagcttggtgactctga

SEQ ID NO: 5654382 - DNA, 25 bp, Homo sapien
aattaacctaagaccagaaatatag

SEQ ID NO: 5654383 - DNA, 25 bp, Homo sapien
catgtgagcttggtgactctgagta

SEQ ID NO: 5654384 - DNA, 25 bp, Homo sapien
tcagtgatctttaaaataagttatt

SEQ ID NO: 5654385 - DNA, 25 bp, Homo sapien
ccctggccaatcagtgatctttaaa

SEQ ID NO: 5654386 - DNA, 25 bp, Homo sapien
tattttaattcaaaggactgtgtta

SEQ ID NO: 5654387 - DNA, 25 bp, Homo sapien
agttattttaattcaaaggactgtg

SEQ ID NO: 5654388 - DNA, 25 bp, Homo sapien
cgcccctggccaatcagtgatcttt

SEQ ID NO: 5654389 - DNA, 25 bp, Homo sapien
gccaatcagtgatctttaaaataag

SEQ ID NO: 5654390 - DNA, 25 bp, Homo sapien
cacagtcctttgaattaaaataact

SEQ ID NO: 5654391 - DNA, 25 bp, Homo sapien
cttattttaaagatcactgattggc

SEQ ID NO: 5654392 - DNA, 25 bp, Homo sapien
aaataacttattttaaagatcactg

SEQ ID NO: 5654393 - DNA, 25 bp, Homo sapien
tattttaaagatcactgattggcca

SEQ ID NO: 5654394 - DNA, 25 bp, Homo sapien
taacacagtcctttgaattaaaata

SEQ ID NO: 5654395 - DNA, 25 bp, Homo sapien
tttaaagatcactgattggccaggg

SEQ ID NO: 5654396 - DNA, 25 bp, Homo sapien
gacataatcacttcccaggggcctg

SEQ ID NO: 5654397 - DNA, 25 bp, Homo sapien
caggcccctgggaagtgattatgtc

SEQ ID NO: 5654398 - DNA, 25 bp, Homo sapien
tgcaccgctttggtttccaaccaag

SEQ ID NO: 5654399 - DNA, 25 bp, Homo sapien
tgggtgcaccgctttggtttccaac

SEQ ID NO: 5654400 - DNA, 25 bp, Homo sapien
tccaaccaagtaaccacacgtggtg

SEQ ID NO: 5654401 - DNA, 25 bp, Homo sapien
gacataatcacttcccaggggcctg

SEQ ID NO: 5654402 - DNA, 25 bp, Homo sapien
ggcctgggtgcaccgctttggtttc

SEQ ID NO: 5654403 - DNA, 25 bp, Homo sapien
aaccaagtaaccacacgtggtggct

SEQ ID NO: 5654404 - DNA, 25 bp, Homo sapien
tgagccaccacgtgtggttacttgg

SEQ ID NO: 5654405 - DNA, 25 bp, Homo sapien
caccacgtgtggttacttggttgga

SEQ ID NO: 5654406 - DNA, 25 bp, Homo sapien
caggcccctgggaagtgattatgtc

SEQ ID NO: 5654407 - DNA, 25 bp, Homo sapien
cttggttggaaaccaaagcggtgca

SEQ ID NO: 5654408 - DNA, 25 bp, Homo sapien
acccaggcccctgggaagtgattat

SEQ ID NO: 5654409 - DNA, 25 bp, Homo sapien
ttggaaaccaaagcggtgcacccag

SEQ ID NO: 5654410 - DNA, 25 bp, Homo sapien
cagacatatcagttcatctgtaaac

SEQ ID NO: 5654411 - DNA, 25 bp, Homo sapien
cacaataccattatgcacaaaaaac

SEQ ID NO: 5654412 - DNA, 25 bp, Homo sapien
agacatatcagttcatctgtaaaca

SEQ ID NO: 5654413 - DNA, 25 bp, Homo sapien
acaataccattatgcacaaaaaact

SEQ ID NO: 5654414 - DNA, 25 bp, Homo sapien
agttttttgtgcataatggtattgt

SEQ ID NO: 5654415 - DNA, 25 bp, Homo sapien
gttttttgtgcataatggtattgtg

SEQ ID NO: 5654416 - DNA, 25 bp, Homo sapien
tgtttacagatgaactgatatgtct

SEQ ID NO: 5654417 - DNA, 25 bp, Homo sapien
gtttacagatgaactgatatgtctg

SEQ ID NO: 5654418 - DNA, 25 bp, Homo sapien
cagacatatcagttcatctgtaaac

SEQ ID NO: 5654419 - DNA, 25 bp, Homo sapien
tcaatatgtgtctctaaattttaaa

SEQ ID NO: 5654420 - DNA, 25 bp, Homo sapien
cattatgcacaaaaaacttaattcc

SEQ ID NO: 5654421 - DNA, 25 bp, Homo sapien
cacaataccattatgcacaaaaaac

SEQ ID NO: 5654422 - DNA, 25 bp, Homo sapien
taaaagtacaaccacaataccatta

SEQ ID NO: 5654423 - DNA, 25 bp, Homo sapien
ctgtaaacatttcaatatgtgtctc

SEQ ID NO: 5654424 - DNA, 25 bp, Homo sapien
tgcataatggtattgtggttgtact

SEQ ID NO: 5654425 - DNA, 25 bp, Homo sapien
tttaaaatttagagacacatattga

SEQ ID NO: 5654426 - DNA, 25 bp, Homo sapien
gagacacatattgaaatgtttacag

SEQ ID NO: 5654427 - DNA, 25 bp, Homo sapien
gttttttgtgcataatggtattgtg

SEQ ID NO: 5654428 - DNA, 25 bp, Homo sapien
tgtttacagatgaactgatatgtct

SEQ ID NO: 5654429 - DNA, 25 bp, Homo sapien
ggaattaagttttttgtgcataatg

SEQ ID NO: 5654430 - DNA, 25 bp, Homo sapien
gaggaggaatcagccatagggaaat

SEQ ID NO: 5654431 - DNA, 25 bp, Homo sapien
ctgaggaggaatcagccatagggaa

SEQ ID NO: 5654432 - DNA, 25 bp, Homo sapien
tgaggaggaatcagccatagggaaa

SEQ ID NO: 5654433 - DNA, 25 bp, Homo sapien
aggaggaatcagccatagggaaatt

SEQ ID NO: 5654434 - DNA, 25 bp, Homo sapien
atttccctatggctgattcctcctc

SEQ ID NO: 5654435 - DNA, 25 bp, Homo sapien
ttccctatggctgattcctcctcag

SEQ ID NO: 5654436 - DNA, 25 bp, Homo sapien
aatttccctatggctgattcctcct

SEQ ID NO: 5654437 - DNA, 25 bp, Homo sapien
tttccctatggctgattcctcctca

SEQ ID NO: 5654438 - DNA, 25 bp, Homo sapien
gaggaggaatcagccatagggaaat

SEQ ID NO: 5654439 - DNA, 25 bp, Homo sapien
aaaccctgtgtctgaggaggaatca

SEQ ID NO: 5654440 - DNA, 25 bp, Homo sapien
gaaaccctgtgtctgaggaggaatc

SEQ ID NO: 5654441 - DNA, 25 bp, Homo sapien
ctgaggaggaatcagccatagggaa

SEQ ID NO: 5654442 - DNA, 25 bp, Homo sapien
tgaggaggaatcagccatagggaaa

SEQ ID NO: 5654443 - DNA, 25 bp, Homo sapien
aggaggaatcagccatagggaaatt

SEQ ID NO: 5654444 - DNA, 25 bp, Homo sapien
atttccctatggctgattcctcctc

SEQ ID NO: 5654445 - DNA, 25 bp, Homo sapien
ttccctatggctgattcctcctcag

SEQ ID NO: 5654446 - DNA, 25 bp, Homo sapien
aatttccctatggctgattcctcct

SEQ ID NO: 5654447 - DNA, 25 bp, Homo sapien
gattcctcctcagacacagggtttc

SEQ ID NO: 5654448 - DNA, 25 bp, Homo sapien
tttccctatggctgattcctcctca

SEQ ID NO: 5654449 - DNA, 25 bp, Homo sapien
tatggctgattcctcctcagacaca

SEQ ID NO: 5654450 - DNA, 25 bp, Homo sapien
atgttaagtgaataggagatgcttt

SEQ ID NO: 5654451 - DNA, 25 bp, Homo sapien
ggtttcatgttaagtgaataggaga

SEQ ID NO: 5654452 - DNA, 25 bp, Homo sapien
ttcatgttaagtgaataggagatgc

SEQ ID NO: 5654453 - DNA, 25 bp, Homo sapien
gggtttcatgttaagtgaataggag

SEQ ID NO: 5654454 - DNA, 25 bp, Homo sapien
tcatgttaagtgaataggagatgct

SEQ ID NO: 5654455 - DNA, 25 bp, Homo sapien
catgttaagtgaataggagatgctt

SEQ ID NO: 5654456 - DNA, 25 bp, Homo sapien
gcatctcctattcacttaacatgaa

SEQ ID NO: 5654457 - DNA, 25 bp, Homo sapien
tctcctattcacttaacatgaaacc

SEQ ID NO: 5654458 - DNA, 25 bp, Homo sapien
aaagcatctcctattcacttaacat

SEQ ID NO: 5654459 - DNA, 25 bp, Homo sapien
agcatctcctattcacttaacatga

SEQ ID NO: 5654460 - DNA, 25 bp, Homo sapien
aagcatctcctattcacttaacatg

SEQ ID NO: 5654461 - DNA, 25 bp, Homo sapien
catctcctattcacttaacatgaaa

SEQ ID NO: 5654462 - DNA, 25 bp, Homo sapien
tgaatgggatgatcactctggctgc

SEQ ID NO: 5654463 - DNA, 25 bp, Homo sapien
gatttttaatgaaggagtggtgtga

SEQ ID NO: 5654464 - DNA, 25 bp, Homo sapien
taagtgaataggagatgctttaaga

SEQ ID NO: 5654465 - DNA, 25 bp, Homo sapien
tcatgttaagtgaataggagatgct

SEQ ID NO: 5654466 - DNA, 25 bp, Homo sapien
tgggatgatcactctggctgctctg

SEQ ID NO: 5654467 - DNA, 25 bp, Homo sapien
ggctgctctgtggagaacagactgt

SEQ ID NO: 5654468 - DNA, 25 bp, Homo sapien
gcatctcctattcacttaacatgaa

SEQ ID NO: 5654469 - DNA, 25 bp, Homo sapien
cattaaaaatcttaaagcatctcct

SEQ ID NO: 5654470 - DNA, 25 bp, Homo sapien
cagtctgttctccacagagcagcca

SEQ ID NO: 5654471 - DNA, 25 bp, Homo sapien
tcacaccactccttcattaaaaatc

SEQ ID NO: 5654472 - DNA, 25 bp, Homo sapien
gagcagccagagtgatcatcccatt

SEQ ID NO: 5654473 - DNA, 25 bp, Homo sapien
gagtgatcatcccattcacaccact

SEQ ID NO: 5654474 - DNA, 25 bp, Homo sapien
tgagagcaaatttggcaggtagaat

SEQ ID NO: 5654475 - DNA, 25 bp, Homo sapien
tattggtcgtactgatggattagat

SEQ ID NO: 5654476 - DNA, 25 bp, Homo sapien
gtcgtactgatggattagatgtagg

SEQ ID NO: 5654477 - DNA, 25 bp, Homo sapien
agaatttattggtcgtactgatgga

SEQ ID NO: 5654478 - DNA, 25 bp, Homo sapien
atttgagagcaaatttggcaggtag

SEQ ID NO: 5654479 - DNA, 25 bp, Homo sapien
ggcaggtagaatttattggtcgtac

SEQ ID NO: 5654480 - DNA, 25 bp, Homo sapien
tctacctgccaaatttgctctcaaa

SEQ ID NO: 5654481 - DNA, 25 bp, Homo sapien
gtacgaccaataaattctacctgcc

SEQ ID NO: 5654482 - DNA, 25 bp, Homo sapien
catctaatccatcagtacgaccaat

SEQ ID NO: 5654483 - DNA, 25 bp, Homo sapien
gaccaataaattctacctgccaaat

SEQ ID NO: 5654484 - DNA, 25 bp, Homo sapien
tccatcagtacgaccaataaattct

SEQ ID NO: 5654485 - DNA, 25 bp, Homo sapien
cctacatctaatccatcagtacgac

SEQ ID NO: 5654486 - DNA, 25 bp, Homo sapien
tcaactggtacatgctaattaggac

SEQ ID NO: 5654487 - DNA, 25 bp, Homo sapien
catgctaattaggactgagatggcc

SEQ ID NO: 5654488 - DNA, 25 bp, Homo sapien
aacaggaacttagctaaagcagaga

SEQ ID NO: 5654489 - DNA, 25 bp, Homo sapien
gcagagagatttgaggccatgagaa

SEQ ID NO: 5654490 - DNA, 25 bp, Homo sapien
gatggccataagatgcccaagagtt

SEQ ID NO: 5654491 - DNA, 25 bp, Homo sapien
gactgagatggccataagatgccca

SEQ ID NO: 5654492 - DNA, 25 bp, Homo sapien
gcatcttatggccatctcagtccta

SEQ ID NO: 5654493 - DNA, 25 bp, Homo sapien
gtcctaattagcatgtaccagttga

SEQ ID NO: 5654494 - DNA, 25 bp, Homo sapien
ggccatctcagtcctaattagcatg

SEQ ID NO: 5654495 - DNA, 25 bp, Homo sapien
aactcttgggcatcttatggccatc

SEQ ID NO: 5654496 - DNA, 25 bp, Homo sapien
tctctgctttagctaagttcctgtt

SEQ ID NO: 5654497 - DNA, 25 bp, Homo sapien
tctcatggcctcaaatctctctgct

SEQ ID NO: 5654498 - DNA, 25 bp, Homo sapien
tcactttcccctagtgaagaattat

SEQ ID NO: 5654499 - DNA, 25 bp, Homo sapien
cactttcccctagtgaagaattatg

SEQ ID NO: 5654500 - DNA, 25 bp, Homo sapien
actttcccctagtgaagaattatgc

SEQ ID NO: 5654501 - DNA, 25 bp, Homo sapien
cataattcttcactaggggaaagtg

SEQ ID NO: 5654502 - DNA, 25 bp, Homo sapien
gcataattcttcactaggggaaagt

SEQ ID NO: 5654503 - DNA, 25 bp, Homo sapien
ataattcttcactaggggaaagtga

SEQ ID NO: 5654504 - DNA, 25 bp, Homo sapien
tatgcagcccaaaatttcaatagtg

SEQ ID NO: 5654505 - DNA, 25 bp, Homo sapien
cccaaaatttcaatagtgctgaggt

SEQ ID NO: 5654506 - DNA, 25 bp, Homo sapien
tgtactgcacaggacagcctcactt

SEQ ID NO: 5654507 - DNA, 25 bp, Homo sapien
cctagtgaagaattatgcagcccaa

SEQ ID NO: 5654508 - DNA, 25 bp, Homo sapien
ctgctgaacatcctgtactgcacag

SEQ ID NO: 5654509 - DNA, 25 bp, Homo sapien
actttcccctagtgaagaattatgc

SEQ ID NO: 5654510 - DNA, 25 bp, Homo sapien
gaaagtgaggctgtcctgtgcagta

SEQ ID NO: 5654511 - DNA, 25 bp, Homo sapien
acctcagcactattgaaattttggg

SEQ ID NO: 5654512 - DNA, 25 bp, Homo sapien
aggctgtcctgtgcagtacaggatg

SEQ ID NO: 5654513 - DNA, 25 bp, Homo sapien
ctgtgcagtacaggatgttcagcag

SEQ ID NO: 5654514 - DNA, 25 bp, Homo sapien
tgggctgcataattcttcactaggg

SEQ ID NO: 5654515 - DNA, 25 bp, Homo sapien
cactattgaaattttgggctgcata

SEQ ID NO: 5654516 - DNA, 25 bp, Homo sapien
gggcaaccttgagcctcctttggtg

SEQ ID NO: 5654517 - DNA, 25 bp, Homo sapien
cctttggtgaataagggtggtgcct

SEQ ID NO: 5654518 - DNA, 25 bp, Homo sapien
catggagggatcaggctggtgatca

SEQ ID NO: 5654519 - DNA, 25 bp, Homo sapien
tcctttggtgaataagggtggtgcc

SEQ ID NO: 5654520 - DNA, 25 bp, Homo sapien
agggcaaccttgagcctcctttggt

SEQ ID NO: 5654521 - DNA, 25 bp, Homo sapien
aagggcaaccttgagcctcctttgg

SEQ ID NO: 5654522 - DNA, 25 bp, Homo sapien
ccaaaggaggctcaaggttgccctt

SEQ ID NO: 5654523 - DNA, 25 bp, Homo sapien
ggcaccacccttattcaccaaagga

SEQ ID NO: 5654524 - DNA, 25 bp, Homo sapien
caccaaaggaggctcaaggttgccc

SEQ ID NO: 5654525 - DNA, 25 bp, Homo sapien
tgatcaccagcctgatccctccatg

SEQ ID NO: 5654526 - DNA, 25 bp, Homo sapien
aggcaccacccttattcaccaaagg

SEQ ID NO: 5654527 - DNA, 25 bp, Homo sapien
accaaaggaggctcaaggttgccct

SEQ ID NO: 5654528 - DNA, 25 bp, Homo sapien
aaattgttaggaggcagcacaaggg

SEQ ID NO: 5654529 - DNA, 25 bp, Homo sapien
gtatctggcctgtaaacataagcag

SEQ ID NO: 5654530 - DNA, 25 bp, Homo sapien
agatgttactaaccccagtcgccaa

SEQ ID NO: 5654531 - DNA, 25 bp, Homo sapien
gaggtatctggcctgtaaacataag

SEQ ID NO: 5654532 - DNA, 25 bp, Homo sapien
gcctgaggtatctggcctgtaaaca

SEQ ID NO: 5654533 - DNA, 25 bp, Homo sapien
ccccagtcgccaaagcctgaggtat

SEQ ID NO: 5654534 - DNA, 25 bp, Homo sapien
ctgcttatgtttacaggccagatac

SEQ ID NO: 5654535 - DNA, 25 bp, Homo sapien
cttatgtttacaggccagatacctc

SEQ ID NO: 5654536 - DNA, 25 bp, Homo sapien
gctttggcgactggggttagtaaca

SEQ ID NO: 5654537 - DNA, 25 bp, Homo sapien
ttacaggccagatacctcaggcttt

SEQ ID NO: 5654538 - DNA, 25 bp, Homo sapien
ccttgtgctgcctcctaacaatttt

SEQ ID NO: 5654539 - DNA, 25 bp, Homo sapien
tgtttacaggccagatacctcaggc

SEQ ID NO: 5654540 - DNA, 25 bp, Homo sapien
gtggtcagaagatatactctctaag

SEQ ID NO: 5654541 - DNA, 25 bp, Homo sapien
tgggacttattttatgcgtgtggac

SEQ ID NO: 5654542 - DNA, 25 bp, Homo sapien
tcagtcttttgagattgggacttat

SEQ ID NO: 5654543 - DNA, 25 bp, Homo sapien
aattccatgtggtcagaagatatac

SEQ ID NO: 5654544 - DNA, 25 bp, Homo sapien
tgcgtgtggactatcttgacaacca

SEQ ID NO: 5654545 - DNA, 25 bp, Homo sapien
ccatgtggtcagaagatatactctc

SEQ ID NO: 5654546 - DNA, 25 bp, Homo sapien
gagtatatcttctgaccacatggaa

SEQ ID NO: 5654547 - DNA, 25 bp, Homo sapien
tagtccacacgcataaaataagtcc

SEQ ID NO: 5654548 - DNA, 25 bp, Homo sapien
tggttgtcaagatagtccacacgca

SEQ ID NO: 5654549 - DNA, 25 bp, Homo sapien
aataagtcccaatctcaaaagactg

SEQ ID NO: 5654550 - DNA, 25 bp, Homo sapien
gtcaagatagtccacacgcataaaa

SEQ ID NO: 5654551 - DNA, 25 bp, Homo sapien
cttagagagtatatcttctgaccac

SEQ ID NO: 5654552 - DNA, 25 bp, Homo sapien
atttcttatggatacatttgagatg

SEQ ID NO: 5654553 - DNA, 25 bp, Homo sapien
ttcttatggatacatttgagatgtt

SEQ ID NO: 5654554 - DNA, 25 bp, Homo sapien
tttcttatggatacatttgagatgt

SEQ ID NO: 5654555 - DNA, 25 bp, Homo sapien
aatttcttatggatacatttgagat

SEQ ID NO: 5654556 - DNA, 25 bp, Homo sapien
gaatttcttatggatacatttgaga

SEQ ID NO: 5654557 - DNA, 25 bp, Homo sapien
atctcaaatgtatccataagaaatt

SEQ ID NO: 5654558 - DNA, 25 bp, Homo sapien
acatctcaaatgtatccataagaaa

SEQ ID NO: 5654559 - DNA, 25 bp, Homo sapien
tctcaaatgtatccataagaaattc

SEQ ID NO: 5654560 - DNA, 25 bp, Homo sapien
aacatctcaaatgtatccataagaa

SEQ ID NO: 5654561 - DNA, 25 bp, Homo sapien
catctcaaatgtatccataagaaat

SEQ ID NO: 5654562 - DNA, 25 bp, Homo sapien
ttcttatggatacatttgagatgtt

SEQ ID NO: 5654563 - DNA, 25 bp, Homo sapien
ttggcctgagaattgtttgaatttc

SEQ ID NO: 5654564 - DNA, 25 bp, Homo sapien
aagggaaatctaggcagctggccca

SEQ ID NO: 5654565 - DNA, 25 bp, Homo sapien
acatttgagatgtttgtttgtaggg

SEQ ID NO: 5654566 - DNA, 25 bp, Homo sapien
gggaaatctaggcagctggcccagc

SEQ ID NO: 5654567 - DNA, 25 bp, Homo sapien
gaatttcttatggatacatttgaga

SEQ ID NO: 5654568 - DNA, 25 bp, Homo sapien
gaaattcaaacaattctcaggccaa

SEQ ID NO: 5654569 - DNA, 25 bp, Homo sapien
tgggccagctgcctagatttccctt

SEQ ID NO: 5654570 - DNA, 25 bp, Homo sapien
tctcaaatgtatccataagaaattc

SEQ ID NO: 5654571 - DNA, 25 bp, Homo sapien
tcccctacaaacaaacatctcaaat

SEQ ID NO: 5654572 - DNA, 25 bp, Homo sapien
aacatctcaaatgtatccataagaa

SEQ ID NO: 5654573 - DNA, 25 bp, Homo sapien
gctgggccagctgcctagatttccc

SEQ ID NO: 5654574 - DNA, 25 bp, Homo sapien
tcactagacaaagtatggttgagcc

SEQ ID NO: 5654575 - DNA, 25 bp, Homo sapien
gttgagcccaccagatagcaaagga

SEQ ID NO: 5654576 - DNA, 25 bp, Homo sapien
tagacaaagtatggttgagcccacc

SEQ ID NO: 5654577 - DNA, 25 bp, Homo sapien
gacaaagtatggttgagcccaccag

SEQ ID NO: 5654578 - DNA, 25 bp, Homo sapien
caaagtatggttgagcccaccagat

SEQ ID NO: 5654579 - DNA, 25 bp, Homo sapien
tatggttgagcccaccagatagcaa

SEQ ID NO: 5654580 - DNA, 25 bp, Homo sapien
tcctttgctatctggtgggctcaac

SEQ ID NO: 5654581 - DNA, 25 bp, Homo sapien
ggtgggctcaaccatactttgtcta

SEQ ID NO: 5654582 - DNA, 25 bp, Homo sapien
tctggtgggctcaaccatactttgt

SEQ ID NO: 5654583 - DNA, 25 bp, Homo sapien
ggctcaaccatactttgtctagtga

SEQ ID NO: 5654584 - DNA, 25 bp, Homo sapien
ttgctatctggtgggctcaaccata

SEQ ID NO: 5654585 - DNA, 25 bp, Homo sapien
tatctggtgggctcaaccatacttt

SEQ ID NO: 5654586 - DNA, 25 bp, Homo sapien
ttaagaactcaactgggctgggcgc

SEQ ID NO: 5654587 - DNA, 25 bp, Homo sapien
tttaagaactcaactgggctgggcg

SEQ ID NO: 5654588 - DNA, 25 bp, Homo sapien
tccttttaagaactcaactgggctg

SEQ ID NO: 5654589 - DNA, 25 bp, Homo sapien
cgtgcccagccgagtccttttcctt

SEQ ID NO: 5654590 - DNA, 25 bp, Homo sapien
ccttttaagaactcaactgggctgg

SEQ ID NO: 5654591 - DNA, 25 bp, Homo sapien
ttttaagaactcaactgggctgggc

SEQ ID NO: 5654592 - DNA, 25 bp, Homo sapien
cagcccagttgagttcttaaaagga

SEQ ID NO: 5654593 - DNA, 25 bp, Homo sapien
gcccagcccagttgagttcttaaaa

SEQ ID NO: 5654594 - DNA, 25 bp, Homo sapien
ccagcccagttgagttcttaaaagg

SEQ ID NO: 5654595 - DNA, 25 bp, Homo sapien
cgcgcccagcccagttgagttctta

SEQ ID NO: 5654596 - DNA, 25 bp, Homo sapien
gcgcccagcccagttgagttcttaa

SEQ ID NO: 5654597 - DNA, 25 bp, Homo sapien
aaggaaaaggactcggctgggcacg

SEQ ID NO: 5654598 - DNA, 25 bp, Homo sapien
tctcgttctatcatccaggtggctg

SEQ ID NO: 5654599 - DNA, 25 bp, Homo sapien
gtctcgttctatcatccaggtggct

SEQ ID NO: 5654600 - DNA, 25 bp, Homo sapien
agtctcgttctatcatccaggtggc

SEQ ID NO: 5654601 - DNA, 25 bp, Homo sapien
agccacctggatgatagaacgagac

SEQ ID NO: 5654602 - DNA, 25 bp, Homo sapien
gccacctggatgatagaacgagact

SEQ ID NO: 5654603 - DNA, 25 bp, Homo sapien
cagccacctggatgatagaacgaga

SEQ ID NO: 5654604 - DNA, 25 bp, Homo sapien
tctcgttctatcatccaggtggctg

SEQ ID NO: 5654605 - DNA, 25 bp, Homo sapien
gtctcgttctatcatccaggtggct

SEQ ID NO: 5654606 - DNA, 25 bp, Homo sapien
agtctcgttctatcatccaggtggc

SEQ ID NO: 5654607 - DNA, 25 bp, Homo sapien
ctcgttctatcatccaggtggctgg

SEQ ID NO: 5654608 - DNA, 25 bp, Homo sapien
tcgttctatcatccaggtggctgga

SEQ ID NO: 5654609 - DNA, 25 bp, Homo sapien
gttctatcatccaggtggctggagt

SEQ ID NO: 5654610 - DNA, 25 bp, Homo sapien
agccacctggatgatagaacgagac

SEQ ID NO: 5654611 - DNA, 25 bp, Homo sapien
ccagccacctggatgatagaacgag

SEQ ID NO: 5654612 - DNA, 25 bp, Homo sapien
gccacctggatgatagaacgagact

SEQ ID NO: 5654613 - DNA, 25 bp, Homo sapien
actccagccacctggatgatagaac

SEQ ID NO: 5654614 - DNA, 25 bp, Homo sapien
cagccacctggatgatagaacgaga

SEQ ID NO: 5654615 - DNA, 25 bp, Homo sapien
tccagccacctggatgatagaacga

SEQ ID NO: 5654616 - DNA, 25 bp, Homo sapien
gagcactttacttatattatctctt

SEQ ID NO: 5654617 - DNA, 25 bp, Homo sapien
gaacatctatttgtcagccactgca

SEQ ID NO: 5654618 - DNA, 25 bp, Homo sapien
tgcatagagcactttacttatatta

SEQ ID NO: 5654619 - DNA, 25 bp, Homo sapien
catagagcactttacttatattatc

SEQ ID NO: 5654620 - DNA, 25 bp, Homo sapien
catctatttgtcagccactgcatag

SEQ ID NO: 5654621 - DNA, 25 bp, Homo sapien
tgaacatctatttgtcagccactgc

SEQ ID NO: 5654622 - DNA, 25 bp, Homo sapien
ctatgcagtggctgacaaatagatg

SEQ ID NO: 5654623 - DNA, 25 bp, Homo sapien
gcagtggctgacaaatagatgttca

SEQ ID NO: 5654624 - DNA, 25 bp, Homo sapien
aagagataatataagtaaagtgctc

SEQ ID NO: 5654625 - DNA, 25 bp, Homo sapien
gataatataagtaaagtgctctatg

SEQ ID NO: 5654626 - DNA, 25 bp, Homo sapien
tgcagtggctgacaaatagatgttc

SEQ ID NO: 5654627 - DNA, 25 bp, Homo sapien
taatataagtaaagtgctctatgca

SEQ ID NO: 5654628 - DNA, 25 bp, Homo sapien
gcctcaattgtttgaataatctcag

SEQ ID NO: 5654629 - DNA, 25 bp, Homo sapien
agctgcctcaattgtttgaataatc

SEQ ID NO: 5654630 - DNA, 25 bp, Homo sapien
aattgtttgaataatctcagattgg

SEQ ID NO: 5654631 - DNA, 25 bp, Homo sapien
gatccattccggctctgcagttctc

SEQ ID NO: 5654632 - DNA, 25 bp, Homo sapien
tgcaccatagctgcctcaattgttt

SEQ ID NO: 5654633 - DNA, 25 bp, Homo sapien
caccatagctgcctcaattgtttga

SEQ ID NO: 5654634 - DNA, 25 bp, Homo sapien
tcaaacaattgaggcagctatggtg

SEQ ID NO: 5654635 - DNA, 25 bp, Homo sapien
ctgagattattcaaacaattgaggc

SEQ ID NO: 5654636 - DNA, 25 bp, Homo sapien
gagaactgcagagccggaatggatc

SEQ ID NO: 5654637 - DNA, 25 bp, Homo sapien
accaatctgagattattcaaacaat

SEQ ID NO: 5654638 - DNA, 25 bp, Homo sapien
gattattcaaacaattgaggcagct

SEQ ID NO: 5654639 - DNA, 25 bp, Homo sapien
aaacaattgaggcagctatggtgca

SEQ ID NO: 5654640 - DNA, 25 bp, Homo sapien
tgaagacatgcggtacagttcgggc

SEQ ID NO: 5654641 - DNA, 25 bp, Homo sapien
cagttcgggcaaacatgaaaggtac

SEQ ID NO: 5654642 - DNA, 25 bp, Homo sapien
tgcggtacagttcgggcaaacatga

SEQ ID NO: 5654643 - DNA, 25 bp, Homo sapien
ttatgaagacatgcggtacagttcg

SEQ ID NO: 5654644 - DNA, 25 bp, Homo sapien
gacatgcggtacagttcgggcaaac

SEQ ID NO: 5654645 - DNA, 25 bp, Homo sapien
tcgggcaaacatgaaaggtacattt

SEQ ID NO: 5654646 - DNA, 25 bp, Homo sapien
gtacctttcatgtttgcccgaactg

SEQ ID NO: 5654647 - DNA, 25 bp, Homo sapien
aaatgtacctttcatgtttgcccga

SEQ ID NO: 5654648 - DNA, 25 bp, Homo sapien
cgaactgtaccgcatgtcttcataa

SEQ ID NO: 5654649 - DNA, 25 bp, Homo sapien
tcatgtttgcccgaactgtaccgca

SEQ ID NO: 5654650 - DNA, 25 bp, Homo sapien
tgtttgcccgaactgtaccgcatgt

SEQ ID NO: 5654651 - DNA, 25 bp, Homo sapien
gcccgaactgtaccgcatgtcttca

SEQ ID NO: 5654652 - DNA, 25 bp, Homo sapien
tctctgcgtgtttgtcagctttaaa

SEQ ID NO: 5654653 - DNA, 25 bp, Homo sapien
ccagttctctgcgtgtttgtcagct

SEQ ID NO: 5654654 - DNA, 25 bp, Homo sapien
cttccagttctctgcgtgtttgtca

SEQ ID NO: 5654655 - DNA, 25 bp, Homo sapien
cacccacttccatcaattcagagtg

SEQ ID NO: 5654656 - DNA, 25 bp, Homo sapien
gcgtgtttgtcagctttaaagggaa

SEQ ID NO: 5654657 - DNA, 25 bp, Homo sapien
cacttccatcaattcagagtggatt

SEQ ID NO: 5654658 - DNA, 25 bp, Homo sapien
cactctgaattgatggaagtgggtg

SEQ ID NO: 5654659 - DNA, 25 bp, Homo sapien
taaagctgacaaacacgcagagaac

SEQ ID NO: 5654660 - DNA, 25 bp, Homo sapien
aaatccactctgaattgatggaagt

SEQ ID NO: 5654661 - DNA, 25 bp, Homo sapien
tgacaaacacgcagagaactggaag

SEQ ID NO: 5654662 - DNA, 25 bp, Homo sapien
ctttaaagctgacaaacacgcagag

SEQ ID NO: 5654663 - DNA, 25 bp, Homo sapien
ttccctttaaagctgacaaacacgc

SEQ ID NO: 5654664 - DNA, 25 bp, Homo sapien
taaaccagactagactgtttcctag

SEQ ID NO: 5654665 - DNA, 25 bp, Homo sapien
ataaaccagactagactgtttccta

SEQ ID NO: 5654666 - DNA, 25 bp, Homo sapien
taggaaacagtctagtctggtttat

SEQ ID NO: 5654667 - DNA, 25 bp, Homo sapien
ctaggaaacagtctagtctggttta

SEQ ID NO: 5654668 - DNA, 25 bp, Homo sapien
atttcaaataaaccagactagactg

SEQ ID NO: 5654669 - DNA, 25 bp, Homo sapien
gtaaattcctctgaaatttcaaata

SEQ ID NO: 5654670 - DNA, 25 bp, Homo sapien
agactagactgtttcctaggtaaat

SEQ ID NO: 5654671 - DNA, 25 bp, Homo sapien
aaaccagactagactgtttcctagg

SEQ ID NO: 5654672 - DNA, 25 bp, Homo sapien
taaaccagactagactgtttcctag

SEQ ID NO: 5654673 - DNA, 25 bp, Homo sapien
ccagactagactgtttcctaggtaa

SEQ ID NO: 5654674 - DNA, 25 bp, Homo sapien
tatttgaaatttcagaggaatttac

SEQ ID NO: 5654675 - DNA, 25 bp, Homo sapien
taggaaacagtctagtctggtttat

SEQ ID NO: 5654676 - DNA, 25 bp, Homo sapien
tttacctaggaaacagtctagtctg

SEQ ID NO: 5654677 - DNA, 25 bp, Homo sapien
tacctaggaaacagtctagtctggt

SEQ ID NO: 5654678 - DNA, 25 bp, Homo sapien
ctaggaaacagtctagtctggttta

SEQ ID NO: 5654679 - DNA, 25 bp, Homo sapien
cagtctagtctggtttatttgaaat

SEQ ID NO: 5654680 - DNA, 25 bp, Homo sapien
ctgctactacatccatgtgctactg

SEQ ID NO: 5654681 - DNA, 25 bp, Homo sapien
gctactacatccatgtgctactgtg

SEQ ID NO: 5654682 - DNA, 25 bp, Homo sapien
tgctactacatccatgtgctactgt

SEQ ID NO: 5654683 - DNA, 25 bp, Homo sapien
gctgctactacatccatgtgctact

SEQ ID NO: 5654684 - DNA, 25 bp, Homo sapien
ctactacatccatgtgctactgtgc

SEQ ID NO: 5654685 - DNA, 25 bp, Homo sapien
agtagcacatggatgtagtagcagc

SEQ ID NO: 5654686 - DNA, 25 bp, Homo sapien
acagtagcacatggatgtagtagca

SEQ ID NO: 5654687 - DNA, 25 bp, Homo sapien
gcacagtagcacatggatgtagtag

SEQ ID NO: 5654688 - DNA, 25 bp, Homo sapien
cagtagcacatggatgtagtagcag

SEQ ID NO: 5654689 - DNA, 25 bp, Homo sapien
cacagtagcacatggatgtagtagc

SEQ ID NO: 5654690 - DNA, 25 bp, Homo sapien
gctactacatccatgtgctactgtg

SEQ ID NO: 5654691 - DNA, 25 bp, Homo sapien
tacatccatgtgctactgtgcctgg

SEQ ID NO: 5654692 - DNA, 25 bp, Homo sapien
tgctactacatccatgtgctactgt

SEQ ID NO: 5654693 - DNA, 25 bp, Homo sapien
gctgctactacatccatgtgctact

SEQ ID NO: 5654694 - DNA, 25 bp, Homo sapien
ctactacatccatgtgctactgtgc

SEQ ID NO: 5654695 - DNA, 25 bp, Homo sapien
tccatgtgctactgtgcctggctga

SEQ ID NO: 5654696 - DNA, 25 bp, Homo sapien
gcacagtagcacatggatgtagtag

SEQ ID NO: 5654697 - DNA, 25 bp, Homo sapien
tcagccaggcacagtagcacatgga

SEQ ID NO: 5654698 - DNA, 25 bp, Homo sapien
ccaggcacagtagcacatggatgta

SEQ ID NO: 5654699 - DNA, 25 bp, Homo sapien
agtagcacatggatgtagtagcagc

SEQ ID NO: 5654700 - DNA, 25 bp, Homo sapien
cagtagcacatggatgtagtagcag

SEQ ID NO: 5654701 - DNA, 25 bp, Homo sapien
cacagtagcacatggatgtagtagc

SEQ ID NO: 5654702 - DNA, 25 bp, Homo sapien
ccgccttggcctctggagttttctt

SEQ ID NO: 5654703 - DNA, 25 bp, Homo sapien
agttttcttgaactgtggtttcttg

SEQ ID NO: 5654704 - DNA, 25 bp, Homo sapien
tggagttttcttgaactgtggtttc

SEQ ID NO: 5654705 - DNA, 25 bp, Homo sapien
tcttaagtgagatgtgtgcgtgtgt

SEQ ID NO: 5654706 - DNA, 25 bp, Homo sapien
tggcctctggagttttcttgaactg

SEQ ID NO: 5654707 - DNA, 25 bp, Homo sapien
ttttttcttaagtgagatgtgtgcg

SEQ ID NO: 5654708 - DNA, 25 bp, Homo sapien
gaaaccacagttcaagaaaactcca

SEQ ID NO: 5654709 - DNA, 25 bp, Homo sapien
aagaaaactccagaggccaaggcgg

SEQ ID NO: 5654710 - DNA, 25 bp, Homo sapien
acacacgcacacatctcacttaaga

SEQ ID NO: 5654711 - DNA, 25 bp, Homo sapien
caagaaaccacagttcaagaaaact

SEQ ID NO: 5654712 - DNA, 25 bp, Homo sapien
cagttcaagaaaactccagaggcca

SEQ ID NO: 5654713 - DNA, 25 bp, Homo sapien
cgcacacatctcacttaagaaaaaa

SEQ ID NO: 5654714 - DNA, 25 bp, Homo sapien
gtcaactcaggatgggttaaagatt

SEQ ID NO: 5654715 - DNA, 25 bp, Homo sapien
tacaaaagtcaactcaggatgggtt

SEQ ID NO: 5654716 - DNA, 25 bp, Homo sapien
caaaagtcaactcaggatgggttaa

SEQ ID NO: 5654717 - DNA, 25 bp, Homo sapien
aagatttaaacgaggccgggcatgg

SEQ ID NO: 5654718 - DNA, 25 bp, Homo sapien
tatacaaaagtcaactcaggatggg

SEQ ID NO: 5654719 - DNA, 25 bp, Homo sapien
ccctttctgtcaccatatacaaaag

SEQ ID NO: 5654720 - DNA, 25 bp, Homo sapien
aaatctttaacccatcctgagttga

SEQ ID NO: 5654721 - DNA, 25 bp, Homo sapien
ccatgcccggcctcgtttaaatctt

SEQ ID NO: 5654722 - DNA, 25 bp, Homo sapien
cccatcctgagttgacttttgtata

SEQ ID NO: 5654723 - DNA, 25 bp, Homo sapien
aatctttaacccatcctgagttgac

SEQ ID NO: 5654724 - DNA, 25 bp, Homo sapien
taacccatcctgagttgacttttgt

SEQ ID NO: 5654725 - DNA, 25 bp, Homo sapien
cttttgtatatggtgacagaaaggg

SEQ ID NO: 5654726 - DNA, 25 bp, Homo sapien
atacgcagaaaccccatctctacta

SEQ ID NO: 5654727 - DNA, 25 bp, Homo sapien
ccaatacgcagaaaccccatctcta

SEQ ID NO: 5654728 - DNA, 25 bp, Homo sapien
tacgcagaaaccccatctctactaa

SEQ ID NO: 5654729 - DNA, 25 bp, Homo sapien
accaatacgcagaaaccccatctct

SEQ ID NO: 5654730 - DNA, 25 bp, Homo sapien
caatacgcagaaaccccatctctac

SEQ ID NO: 5654731 - DNA, 25 bp, Homo sapien
aatacgcagaaaccccatctctact

SEQ ID NO: 5654732 - DNA, 25 bp, Homo sapien
agagatggggtttctgcgtattggt

SEQ ID NO: 5654733 - DNA, 25 bp, Homo sapien
tagtagagatggggtttctgcgtat

SEQ ID NO: 5654734 - DNA, 25 bp, Homo sapien
gtagagatggggtttctgcgtattg

SEQ ID NO: 5654735 - DNA, 25 bp, Homo sapien
ttagtagagatggggtttctgcgta

SEQ ID NO: 5654736 - DNA, 25 bp, Homo sapien
tagagatggggtttctgcgtattgg

SEQ ID NO: 5654737 - DNA, 25 bp, Homo sapien
agtagagatggggtttctgcgtatt

SEQ ID NO: 5654738 - DNA, 25 bp, Homo sapien
aataatcctattgagaaatggacaa

SEQ ID NO: 5654739 - DNA, 25 bp, Homo sapien
caaataatcctattgagaaatggac

SEQ ID NO: 5654740 - DNA, 25 bp, Homo sapien
aaataatcctattgagaaatggaca

SEQ ID NO: 5654741 - DNA, 25 bp, Homo sapien
ttgtccatttctcaataggattatt

SEQ ID NO: 5654742 - DNA, 25 bp, Homo sapien
tgtccatttctcaataggattattt

SEQ ID NO: 5654743 - DNA, 25 bp, Homo sapien
gtccatttctcaataggattatttg

SEQ ID NO: 5654744 - DNA, 25 bp, Homo sapien
ggacaaaggacatgactagatattt

SEQ ID NO: 5654745 - DNA, 25 bp, Homo sapien
tcctattgagaaatggacaaaggac

SEQ ID NO: 5654746 - DNA, 25 bp, Homo sapien
acaaaggacatgactagatatttct

SEQ ID NO: 5654747 - DNA, 25 bp, Homo sapien
aatcctattgagaaatggacaaagg

SEQ ID NO: 5654748 - DNA, 25 bp, Homo sapien
aataatcctattgagaaatggacaa

SEQ ID NO: 5654749 - DNA, 25 bp, Homo sapien
caaataatcctattgagaaatggac

SEQ ID NO: 5654750 - DNA, 25 bp, Homo sapien
agaaatatctagtcatgtcctttgt

SEQ ID NO: 5654751 - DNA, 25 bp, Homo sapien
ttgtccatttctcaataggattatt

SEQ ID NO: 5654752 - DNA, 25 bp, Homo sapien
gtcctttgtccatttctcaatagga

SEQ ID NO: 5654753 - DNA, 25 bp, Homo sapien
cctttgtccatttctcaataggatt

SEQ ID NO: 5654754 - DNA, 25 bp, Homo sapien
aaatatctagtcatgtcctttgtcc

SEQ ID NO: 5654755 - DNA, 25 bp, Homo sapien
gtccatttctcaataggattatttg

SEQ ID NO: 5654756 - DNA, 25 bp, Homo sapien
gaaaccagtatagaaaatggtatgg

SEQ ID NO: 5654757 - DNA, 25 bp, Homo sapien
accagtatagaaaatggtatggaga

SEQ ID NO: 5654758 - DNA, 25 bp, Homo sapien
ggtatggagtatagaaaccagtata

SEQ ID NO: 5654759 - DNA, 25 bp, Homo sapien
attagtatagaaaatggtatggagt

SEQ ID NO: 5654760 - DNA, 25 bp, Homo sapien
gaaaatggtatggagtatagaaacc

SEQ ID NO: 5654761 - DNA, 25 bp, Homo sapien
tggagtatagaaaccagtatagaaa

SEQ ID NO: 5654762 - DNA, 25 bp, Homo sapien
tatactggtttctatactccatacc

SEQ ID NO: 5654763 - DNA, 25 bp, Homo sapien
ggtttctatactccataccattttc

SEQ ID NO: 5654764 - DNA, 25 bp, Homo sapien
ttttctatactggtttctatactcc

SEQ ID NO: 5654765 - DNA, 25 bp, Homo sapien
tactccataccattttctatactaa

SEQ ID NO: 5654766 - DNA, 25 bp, Homo sapien
tctatactggtttctatactccata

SEQ ID NO: 5654767 - DNA, 25 bp, Homo sapien
tctccataccattttctatactggt

SEQ ID NO: 5654768 - DNA, 25 bp, Homo sapien
gtgtatttcatactaacgggaagcg

SEQ ID NO: 5654769 - DNA, 25 bp, Homo sapien
tcatactaacgggaagcgaggactt

SEQ ID NO: 5654770 - DNA, 25 bp, Homo sapien
catactaacgggaagcgaggacttg

SEQ ID NO: 5654771 - DNA, 25 bp, Homo sapien
tatttcatactaacgggaagcgagg

SEQ ID NO: 5654772 - DNA, 25 bp, Homo sapien
tactaacgggaagcgaggacttgaa

SEQ ID NO: 5654773 - DNA, 25 bp, Homo sapien
atgtttgattgcaaaatagggtgac

SEQ ID NO: 5654774 - DNA, 25 bp, Homo sapien
ccctattttgcaatcaaacatagaa

SEQ ID NO: 5654775 - DNA, 25 bp, Homo sapien
cctcgcttcccgttagtatgaaata

SEQ ID NO: 5654776 - DNA, 25 bp, Homo sapien
gtcaccctattttgcaatcaaacat

SEQ ID NO: 5654777 - DNA, 25 bp, Homo sapien
ttcaagtcctcgcttcccgttagta

SEQ ID NO: 5654778 - DNA, 25 bp, Homo sapien
aagtcctcgcttcccgttagtatga

SEQ ID NO: 5654779 - DNA, 25 bp, Homo sapien
cgcttcccgttagtatgaaatacac

SEQ ID NO: 5654780 - DNA, 25 bp, Homo sapien
tgactgatgattggcagccccttgg

SEQ ID NO: 5654781 - DNA, 25 bp, Homo sapien
gatgggatctaatcacgaaccaagg

SEQ ID NO: 5654782 - DNA, 25 bp, Homo sapien
tagctccaggatgggatctaatcac

SEQ ID NO: 5654783 - DNA, 25 bp, Homo sapien
tccaggatgggatctaatcacgaac

SEQ ID NO: 5654784 - DNA, 25 bp, Homo sapien
ggatctaatcacgaaccaaggaagg

SEQ ID NO: 5654785 - DNA, 25 bp, Homo sapien
cacgaaccaaggaaggattagaggg

SEQ ID NO: 5654786 - DNA, 25 bp, Homo sapien
caaggggctgccaatcatcagtcaa

SEQ ID NO: 5654787 - DNA, 25 bp, Homo sapien
gtgattagatcccatcctggagcta

SEQ ID NO: 5654788 - DNA, 25 bp, Homo sapien
ccttccttggttcgtgattagatcc

SEQ ID NO: 5654789 - DNA, 25 bp, Homo sapien
ccttggttcgtgattagatcccatc

SEQ ID NO: 5654790 - DNA, 25 bp, Homo sapien
cctctaatccttccttggttcgtga

SEQ ID NO: 5654791 - DNA, 25 bp, Homo sapien
ggttcgtgattagatcccatcctgg

SEQ ID NO: 5654792 - DNA, 25 bp, Homo sapien
gcccagattgtagtatcttttatag

SEQ ID NO: 5654793 - DNA, 25 bp, Homo sapien
tagtatcttttatagtaaaccagaa

SEQ ID NO: 5654794 - DNA, 25 bp, Homo sapien
ttggcctcccagtgtcgagattaca

SEQ ID NO: 5654795 - DNA, 25 bp, Homo sapien
caccatgcccagattgtagtatctt

SEQ ID NO: 5654796 - DNA, 25 bp, Homo sapien
ccatgcccagattgtagtatctttt

SEQ ID NO: 5654797 - DNA, 25 bp, Homo sapien
tgtagtatcttttatagtaaaccag

SEQ ID NO: 5654798 - DNA, 25 bp, Homo sapien
tgtaatctcgacactgggaggccaa

SEQ ID NO: 5654799 - DNA, 25 bp, Homo sapien
ctataaaagatactacaatctgggc

SEQ ID NO: 5654800 - DNA, 25 bp, Homo sapien
tctggtttactataaaagatactac

SEQ ID NO: 5654801 - DNA, 25 bp, Homo sapien
aagatactacaatctgggcatggtg

SEQ ID NO: 5654802 - DNA, 25 bp, Homo sapien
aaaagatactacaatctgggcatgg

SEQ ID NO: 5654803 - DNA, 25 bp, Homo sapien
tactataaaagatactacaatctgg

SEQ ID NO: 5654804 - DNA, 25 bp, Homo sapien
tttagtatttctaggcattggccag

SEQ ID NO: 5654805 - DNA, 25 bp, Homo sapien
ttctgtgctatattcttggtaacaa

SEQ ID NO: 5654806 - DNA, 25 bp, Homo sapien
gagataggggctagtttaaattcta

SEQ ID NO: 5654807 - DNA, 25 bp, Homo sapien
atttctaggcattggccagttgtct

SEQ ID NO: 5654808 - DNA, 25 bp, Homo sapien
tatttctaggcattggccagttgtc

SEQ ID NO: 5654809 - DNA, 25 bp, Homo sapien
tttttagtatttctaggcattggcc

SEQ ID NO: 5654810 - DNA, 25 bp, Homo sapien
agacaactggccaatgcctagaaat

SEQ ID NO: 5654811 - DNA, 25 bp, Homo sapien
tagaatttaaactagcccctatctc

SEQ ID NO: 5654812 - DNA, 25 bp, Homo sapien
ctggccaatgcctagaaatactaaa

SEQ ID NO: 5654813 - DNA, 25 bp, Homo sapien
caactggccaatgcctagaaatact

SEQ ID NO: 5654814 - DNA, 25 bp, Homo sapien
ggccaatgcctagaaatactaaaaa

SEQ ID NO: 5654815 - DNA, 25 bp, Homo sapien
tgttaccaagaatatagcacagaat

SEQ ID NO: 5654816 - DNA, 25 bp, Homo sapien
tccctagatcccaatgtaccatgca

SEQ ID NO: 5654817 - DNA, 25 bp, Homo sapien
gattccctagatcccaatgtaccat

SEQ ID NO: 5654818 - DNA, 25 bp, Homo sapien
gggattccctagatcccaatgtacc

SEQ ID NO: 5654819 - DNA, 25 bp, Homo sapien
gaaagggattccctagatcccaatg

SEQ ID NO: 5654820 - DNA, 25 bp, Homo sapien
caatgtaccatgcagaaaggatagc

SEQ ID NO: 5654821 - DNA, 25 bp, Homo sapien
ttccctagatcccaatgtaccatgc

SEQ ID NO: 5654822 - DNA, 25 bp, Homo sapien
tgcatggtacattgggatctaggga

SEQ ID NO: 5654823 - DNA, 25 bp, Homo sapien
cattgggatctagggaatccctttc

SEQ ID NO: 5654824 - DNA, 25 bp, Homo sapien
gcatggtacattgggatctagggaa

SEQ ID NO: 5654825 - DNA, 25 bp, Homo sapien
ggtacattgggatctagggaatccc

SEQ ID NO: 5654826 - DNA, 25 bp, Homo sapien
gctatcctttctgcatggtacattg

SEQ ID NO: 5654827 - DNA, 25 bp, Homo sapien
tggtacattgggatctagggaatcc

SEQ ID NO: 5654828 - DNA, 25 bp, Homo sapien
tattaagtggaagtggatgagcata

SEQ ID NO: 5654829 - DNA, 25 bp, Homo sapien
atatgtttactattatattaagtgg

SEQ ID NO: 5654830 - DNA, 25 bp, Homo sapien
ttactattatattaagtggaagtgg

SEQ ID NO: 5654831 - DNA, 25 bp, Homo sapien
tcctataataaaggaaggtagagaa

SEQ ID NO: 5654832 - DNA, 25 bp, Homo sapien
atgtttactattatattaagtggaa

SEQ ID NO: 5654833 - DNA, 25 bp, Homo sapien
tatgtttactattatattaagtgga

SEQ ID NO: 5654834 - DNA, 25 bp, Homo sapien
tccacttaatataatagtaaacata

SEQ ID NO: 5654835 - DNA, 25 bp, Homo sapien
ttccacttaatataatagtaaacat

SEQ ID NO: 5654836 - DNA, 25 bp, Homo sapien
cacttccacttaatataatagtaaa

SEQ ID NO: 5654837 - DNA, 25 bp, Homo sapien
ttatgctcatccacttccacttaat

SEQ ID NO: 5654838 - DNA, 25 bp, Homo sapien
ttctctaccttcctttattatagga

SEQ ID NO: 5654839 - DNA, 25 bp, Homo sapien
ccacttaatataatagtaaacatat

SEQ ID NO: 5654840 - DNA, 25 bp, Homo sapien
ccttcataacagttatcacctgaca

SEQ ID NO: 5654841 - DNA, 25 bp, Homo sapien
cataacagttatcacctgacattct

SEQ ID NO: 5654842 - DNA, 25 bp, Homo sapien
tcataacagttatcacctgacattc

SEQ ID NO: 5654843 - DNA, 25 bp, Homo sapien
ataacagttatcacctgacattcta

SEQ ID NO: 5654844 - DNA, 25 bp, Homo sapien
ttcataacagttatcacctgacatt

SEQ ID NO: 5654845 - DNA, 25 bp, Homo sapien
cttcataacagttatcacctgacat

SEQ ID NO: 5654846 - DNA, 25 bp, Homo sapien
tagaatgtcaggtgataactgttat

SEQ ID NO: 5654847 - DNA, 25 bp, Homo sapien
aatgtcaggtgataactgttatgaa

SEQ ID NO: 5654848 - DNA, 25 bp, Homo sapien
atgtcaggtgataactgttatgaag

SEQ ID NO: 5654849 - DNA, 25 bp, Homo sapien
tgtcaggtgataactgttatgaagg

SEQ ID NO: 5654850 - DNA, 25 bp, Homo sapien
agaatgtcaggtgataactgttatg

SEQ ID NO: 5654851 - DNA, 25 bp, Homo sapien
gaatgtcaggtgataactgttatga

SEQ ID NO: 5654852 - DNA, 25 bp, Homo sapien
tattccttctccttgcttgacttcc

SEQ ID NO: 5654853 - DNA, 25 bp, Homo sapien
tcataacagttatcacctgacattc

SEQ ID NO: 5654854 - DNA, 25 bp, Homo sapien
tgcttgacttccttcataacagtta

SEQ ID NO: 5654855 - DNA, 25 bp, Homo sapien
gctctgtgaggatagtgacatttca

SEQ ID NO: 5654856 - DNA, 25 bp, Homo sapien
cattctattatgtaagctctgtgag

SEQ ID NO: 5654857 - DNA, 25 bp, Homo sapien
gaggatagtgacatttcatttttcg

SEQ ID NO: 5654858 - DNA, 25 bp, Homo sapien
ctcacagagcttacataatagaatg

SEQ ID NO: 5654859 - DNA, 25 bp, Homo sapien
cgaaaaatgaaatgtcactatcctc

SEQ ID NO: 5654860 - DNA, 25 bp, Homo sapien
taactgttatgaaggaagtcaagca

SEQ ID NO: 5654861 - DNA, 25 bp, Homo sapien
gaagtcaagcaaggagaaggaatag

SEQ ID NO: 5654862 - DNA, 25 bp, Homo sapien
gaaatgtcactatcctcacagagct

SEQ ID NO: 5654863 - DNA, 25 bp, Homo sapien
gaatgtcaggtgataactgttatga

SEQ ID NO: 5654864 - DNA, 25 bp, Homo sapien
ctacaagtgcaagtcagcaaacaca

SEQ ID NO: 5654865 - DNA, 25 bp, Homo sapien
gctacaagtgcaagtcagcaaacac

SEQ ID NO: 5654866 - DNA, 25 bp, Homo sapien
tacaagtgcaagtcagcaaacacag

SEQ ID NO: 5654867 - DNA, 25 bp, Homo sapien
caagtgcaagtcagcaaacacagtg

SEQ ID NO: 5654868 - DNA, 25 bp, Homo sapien
acaagtgcaagtcagcaaacacagt

SEQ ID NO: 5654869 - DNA, 25 bp, Homo sapien
ctgtgtttgctgacttgcacttgta

SEQ ID NO: 5654870 - DNA, 25 bp, Homo sapien
cactgtgtttgctgacttgcacttg

SEQ ID NO: 5654871 - DNA, 25 bp, Homo sapien
tgtgtttgctgacttgcacttgtag

SEQ ID NO: 5654872 - DNA, 25 bp, Homo sapien
actgtgtttgctgacttgcacttgt

SEQ ID NO: 5654873 - DNA, 25 bp, Homo sapien
gtgtttgctgacttgcacttgtagc

SEQ ID NO: 5654874 - DNA, 25 bp, Homo sapien
tgacttgcacttgtagccacagcta

SEQ ID NO: 5654875 - DNA, 25 bp, Homo sapien
cactgtgtttgctgacttgcacttg

SEQ ID NO: 5654876 - DNA, 25 bp, Homo sapien
tgctgacttgcacttgtagccacag

SEQ ID NO: 5654877 - DNA, 25 bp, Homo sapien
gtgtttgctgacttgcacttgtagc

SEQ ID NO: 5654878 - DNA, 25 bp, Homo sapien
cacttgtagccacagctacccagga

SEQ ID NO: 5654879 - DNA, 25 bp, Homo sapien
aaattcactgtgtttgctgacttgc

SEQ ID NO: 5654880 - DNA, 25 bp, Homo sapien
agaatgggtgaactcgggaggcgga

SEQ ID NO: 5654881 - DNA, 25 bp, Homo sapien
aatgggtgaactcgggaggcggagc

SEQ ID NO: 5654882 - DNA, 25 bp, Homo sapien
ggagaatgggtgaactcgggaggcg

SEQ ID NO: 5654883 - DNA, 25 bp, Homo sapien
gaatgggtgaactcgggaggcggag

SEQ ID NO: 5654884 - DNA, 25 bp, Homo sapien
ccgcctcccgagttcacccattctc

SEQ ID NO: 5654885 - DNA, 25 bp, Homo sapien
cgcctcccgagttcacccattctcc

SEQ ID NO: 5654886 - DNA, 25 bp, Homo sapien
tccgcctcccgagttcacccattct

SEQ ID NO: 5654887 - DNA, 25 bp, Homo sapien
ctccgcctcccgagttcacccattc

SEQ ID NO: 5654888 - DNA, 25 bp, Homo sapien
ataaattgagattaagtgaaaacgc

SEQ ID NO: 5654889 - DNA, 25 bp, Homo sapien
gataaattgagattaagtgaaaacg

SEQ ID NO: 5654890 - DNA, 25 bp, Homo sapien
cttaacatttggagaatggataaaa

SEQ ID NO: 5654891 - DNA, 25 bp, Homo sapien
ttaacatttggagaatggataaaat

SEQ ID NO: 5654892 - DNA, 25 bp, Homo sapien
gtcttaacatttggagaatggataa

SEQ ID NO: 5654893 - DNA, 25 bp, Homo sapien
ggtcttaacatttggagaatggata

SEQ ID NO: 5654894 - DNA, 25 bp, Homo sapien
gcgttttcacttaatctcaatttat

SEQ ID NO: 5654895 - DNA, 25 bp, Homo sapien
tatccattctccaaatgttaagacc

SEQ ID NO: 5654896 - DNA, 25 bp, Homo sapien
attttatccattctccaaatgttaa

SEQ ID NO: 5654897 - DNA, 25 bp, Homo sapien
tttatccattctccaaatgttaaga

SEQ ID NO: 5654898 - DNA, 25 bp, Homo sapien
ttttatccattctccaaatgttaag

SEQ ID NO: 5654899 - DNA, 25 bp, Homo sapien
ttatccattctccaaatgttaagac

SEQ ID NO: 5654900 - DNA, 25 bp, Homo sapien
gcgttttcacttaatctcaatttat

SEQ ID NO: 5654901 - DNA, 25 bp, Homo sapien
tatccattctccaaatgttaagacc

SEQ ID NO: 5654902 - DNA, 25 bp, Homo sapien
ccaacctcagggaaaatgtgtctta

SEQ ID NO: 5654903 - DNA, 25 bp, Homo sapien
tcaaagcgttttcacttaatctcaa

SEQ ID NO: 5654904 - DNA, 25 bp, Homo sapien
acttccaacctcagggaaaatgtgt

SEQ ID NO: 5654905 - DNA, 25 bp, Homo sapien
ttatcatcatcacaacttccaacct

SEQ ID NO: 5654906 - DNA, 25 bp, Homo sapien
gttgtgattatggccatcagccacc

SEQ ID NO: 5654907 - DNA, 25 bp, Homo sapien
ttgtgattatggccatcagccaccg

SEQ ID NO: 5654908 - DNA, 25 bp, Homo sapien
tgtgattatggccatcagccaccgt

SEQ ID NO: 5654909 - DNA, 25 bp, Homo sapien
gtgattatggccatcagccaccgtg

SEQ ID NO: 5654910 - DNA, 25 bp, Homo sapien
cacggtggctgatggccataatcac

SEQ ID NO: 5654911 - DNA, 25 bp, Homo sapien
ggtggctgatggccataatcacaac

SEQ ID NO: 5654912 - DNA, 25 bp, Homo sapien
acggtggctgatggccataatcaca

SEQ ID NO: 5654913 - DNA, 25 bp, Homo sapien
cggtggctgatggccataatcacaa

SEQ ID NO: 5654914 - DNA, 25 bp, Homo sapien
tggccgcaaatgatgatttttccag

SEQ ID NO: 5654915 - DNA, 25 bp, Homo sapien
ggccttccagagtgttgtgattatg

SEQ ID NO: 5654916 - DNA, 25 bp, Homo sapien
cgtgcctggccgcaaatgatgattt

SEQ ID NO: 5654917 - DNA, 25 bp, Homo sapien
gtgattatggccatcagccaccgtg

SEQ ID NO: 5654918 - DNA, 25 bp, Homo sapien
tgtgattatggccatcagccaccgt

SEQ ID NO: 5654919 - DNA, 25 bp, Homo sapien
gcctggccgcaaatgatgatttttc

SEQ ID NO: 5654920 - DNA, 25 bp, Homo sapien
cataatcacaacactctggaaggcc

SEQ ID NO: 5654921 - DNA, 25 bp, Homo sapien
gaaaaatcatcatttgcggccaggc

SEQ ID NO: 5654922 - DNA, 25 bp, Homo sapien
aaatcatcatttgcggccaggcacg

SEQ ID NO: 5654923 - DNA, 25 bp, Homo sapien
cacggtggctgatggccataatcac

SEQ ID NO: 5654924 - DNA, 25 bp, Homo sapien
ctggaaaaatcatcatttgcggcca

SEQ ID NO: 5654925 - DNA, 25 bp, Homo sapien
gatggccataatcacaacactctgg

SEQ ID NO: 5654926 - DNA, 25 bp, Homo sapien
tcatacaaaaatacgggaaaagcag

SEQ ID NO: 5654927 - DNA, 25 bp, Homo sapien
catacaaaaatacgggaaaagcaga

SEQ ID NO: 5654928 - DNA, 25 bp, Homo sapien
atcatacaaaaatacgggaaaagca

SEQ ID NO: 5654929 - DNA, 25 bp, Homo sapien
tgcttttcccgtatttttgtatgat

SEQ ID NO: 5654930 - DNA, 25 bp, Homo sapien
tctgcttttcccgtatttttgtatg

SEQ ID NO: 5654931 - DNA, 25 bp, Homo sapien
ctgcttttcccgtatttttgtatga

SEQ ID NO: 5654932 - DNA, 25 bp, Homo sapien
agaaagaaatacagatcatacaaaa

SEQ ID NO: 5654933 - DNA, 25 bp, Homo sapien
gcagaatacaggtttaattctttta

SEQ ID NO: 5654934 - DNA, 25 bp, Homo sapien
aatacgggaaaagcagaatacaggt

SEQ ID NO: 5654935 - DNA, 25 bp, Homo sapien
tcatacaaaaatacgggaaaagcag

SEQ ID NO: 5654936 - DNA, 25 bp, Homo sapien
catacaaaaatacgggaaaagcaga

SEQ ID NO: 5654937 - DNA, 25 bp, Homo sapien
attttcatagtaagatgttggtggc

SEQ ID NO: 5654938 - DNA, 25 bp, Homo sapien
aacctgtattctgcttttcccgtat

SEQ ID NO: 5654939 - DNA, 25 bp, Homo sapien
tctgcttttcccgtatttttgtatg

SEQ ID NO: 5654940 - DNA, 25 bp, Homo sapien
cccgtatttttgtatgatctgtatt

SEQ ID NO: 5654941 - DNA, 25 bp, Homo sapien
taaaagaattaaacctgtattctgc

SEQ ID NO: 5654942 - DNA, 25 bp, Homo sapien
ctgcttttcccgtatttttgtatga

SEQ ID NO: 5654943 - DNA, 25 bp, Homo sapien
gccaccaacatcttactatgaaaat

SEQ ID NO: 5654944 - DNA, 25 bp, Homo sapien
cctgtctcggcctaccaaagtgctc

SEQ ID NO: 5654945 - DNA, 25 bp, Homo sapien
taccaaagtgctcggattacaggta

SEQ ID NO: 5654946 - DNA, 25 bp, Homo sapien
ctgtctcggcctaccaaagtgctcg

SEQ ID NO: 5654947 - DNA, 25 bp, Homo sapien
tctcggcctaccaaagtgctcggat

SEQ ID NO: 5654948 - DNA, 25 bp, Homo sapien
gtctcggcctaccaaagtgctcgga

SEQ ID NO: 5654949 - DNA, 25 bp, Homo sapien
tgtctcggcctaccaaagtgctcgg

SEQ ID NO: 5654950 - DNA, 25 bp, Homo sapien
ccgagcactttggtaggccgagaca

SEQ ID NO: 5654951 - DNA, 25 bp, Homo sapien
tccgagcactttggtaggccgagac

SEQ ID NO: 5654952 - DNA, 25 bp, Homo sapien
gagcactttggtaggccgagacagg

SEQ ID NO: 5654953 - DNA, 25 bp, Homo sapien
cgagcactttggtaggccgagacag

SEQ ID NO: 5654954 - DNA, 25 bp, Homo sapien
tacctgtaatccgagcactttggta

SEQ ID NO: 5654955 - DNA, 25 bp, Homo sapien
atccgagcactttggtaggccgaga

SEQ ID NO: 5654956 - DNA, 25 bp, Homo sapien
ttcagagaaatctatcctttcactg

SEQ ID NO: 5654957 - DNA, 25 bp, Homo sapien
tatattcagagaaatctatcctttc

SEQ ID NO: 5654958 - DNA, 25 bp, Homo sapien
cagagaaatctatcctttcactgtt

SEQ ID NO: 5654959 - DNA, 25 bp, Homo sapien
aatctatcctttcactgtttcatat

SEQ ID NO: 5654960 - DNA, 25 bp, Homo sapien
aaatctatcctttcactgtttcata

SEQ ID NO: 5654961 - DNA, 25 bp, Homo sapien
tattcagagaaatctatcctttcac

SEQ ID NO: 5654962 - DNA, 25 bp, Homo sapien
aatatgaaacagtgaaaggatagat

SEQ ID NO: 5654963 - DNA, 25 bp, Homo sapien
gaaaggatagatttctctgaatata

SEQ ID NO: 5654964 - DNA, 25 bp, Homo sapien
cagtgaaaggatagatttctctgaa

SEQ ID NO: 5654965 - DNA, 25 bp, Homo sapien
tatgaaacagtgaaaggatagattt

SEQ ID NO: 5654966 - DNA, 25 bp, Homo sapien
acagtgaaaggatagatttctctga

SEQ ID NO: 5654967 - DNA, 25 bp, Homo sapien
aacagtgaaaggatagatttctctg

SEQ ID NO: 5654968 - DNA, 25 bp, Homo sapien
tatattcagagaaatctatcctttc

SEQ ID NO: 5654969 - DNA, 25 bp, Homo sapien
tgtaaagattaagcaaatacatata

SEQ ID NO: 5654970 - DNA, 25 bp, Homo sapien
tatattcattcatatgtatatacac

SEQ ID NO: 5654971 - DNA, 25 bp, Homo sapien
cagagaaatctatcctttcactgtt

SEQ ID NO: 5654972 - DNA, 25 bp, Homo sapien
aaatctatcctttcactgtttcata

SEQ ID NO: 5654973 - DNA, 25 bp, Homo sapien
tattcagagaaatctatcctttcac

SEQ ID NO: 5654974 - DNA, 25 bp, Homo sapien
aatatgaaacagtgaaaggatagat

SEQ ID NO: 5654975 - DNA, 25 bp, Homo sapien
gcttaatctttacaaaatatgaaac

SEQ ID NO: 5654976 - DNA, 25 bp, Homo sapien
gaaaggatagatttctctgaatata

SEQ ID NO: 5654977 - DNA, 25 bp, Homo sapien
cagtgaaaggatagatttctctgaa

SEQ ID NO: 5654978 - DNA, 25 bp, Homo sapien
tatgaaacagtgaaaggatagattt

SEQ ID NO: 5654979 - DNA, 25 bp, Homo sapien
aacagtgaaaggatagatttctctg

SEQ ID NO: 5654980 - DNA, 25 bp, Homo sapien
atatgtttatacgtacgtgtgggtt

SEQ ID NO: 5654981 - DNA, 25 bp, Homo sapien
aacccacacgtacgtataaacatat

SEQ ID NO: 5654982 - DNA, 25 bp, Homo sapien
tatatatgtttatacgtacgtgtgg

SEQ ID NO: 5654983 - DNA, 25 bp, Homo sapien
atatatgtttatacgtacgtgtggg

SEQ ID NO: 5654984 - DNA, 25 bp, Homo sapien
tttgttttaatagatgggggtctca

SEQ ID NO: 5654985 - DNA, 25 bp, Homo sapien
tatatgtttatacgtacgtgtgggt

SEQ ID NO: 5654986 - DNA, 25 bp, Homo sapien
atatgtttatacgtacgtgtgggtt

SEQ ID NO: 5654987 - DNA, 25 bp, Homo sapien
ttgttttaatagatgggggtctcac

SEQ ID NO: 5654988 - DNA, 25 bp, Homo sapien
aacccacacgtacgtataaacatat

SEQ ID NO: 5654989 - DNA, 25 bp, Homo sapien
acccacacgtacgtataaacatata

SEQ ID NO: 5654990 - DNA, 25 bp, Homo sapien
gtgagacccccatctattaaaacaa

SEQ ID NO: 5654991 - DNA, 25 bp, Homo sapien
cacacgtacgtataaacatatatat

SEQ ID NO: 5654992 - DNA, 25 bp, Homo sapien
ccacacgtacgtataaacatatata

SEQ ID NO: 5654993 - DNA, 25 bp, Homo sapien
cccacacgtacgtataaacatatat

SEQ ID NO: 5654994 - DNA, 25 bp, Homo sapien
ccatacttgggagaagttcaatagt

SEQ ID NO: 5654995 - DNA, 25 bp, Homo sapien
tgcaaggtgtcgtgtggttaaaaag

SEQ ID NO: 5654996 - DNA, 25 bp, Homo sapien
tagtgcaaggtgtcgtgtggttaaa

SEQ ID NO: 5654997 - DNA, 25 bp, Homo sapien
gaattaagccatacttgggagaagt

SEQ ID NO: 5654998 - DNA, 25 bp, Homo sapien
tctgttggggtgttgaattaagcca

SEQ ID NO: 5654999 - DNA, 25 bp, Homo sapien
aaatcttttactccgagtactctgg

SEQ ID NO: 5655000 - DNA, 25 bp, Homo sapien
gaacttctcccaagtatggcttaat

SEQ ID NO: 5655001 - DNA, 25 bp, Homo sapien
ggcttaattcaacaccccaacagat

SEQ ID NO: 5655002 - DNA, 25 bp, Homo sapien
actattgaacttctcccaagtatgg

SEQ ID NO: 5655003 - DNA, 25 bp, Homo sapien
ttaaccacacgacaccttgcactat

SEQ ID NO: 5655004 - DNA, 25 bp, Homo sapien
ctttttaaccacacgacaccttgca

SEQ ID NO: 5655005 - DNA, 25 bp, Homo sapien
ccagagtactcggagtaaaagattt

SEQ ID NO: 5655006 - DNA, 25 bp, Homo sapien
atgtccagctctgacttgactgtca

SEQ ID NO: 5655007 - DNA, 25 bp, Homo sapien
tctgacttgactgtcaaggccttcc

SEQ ID NO: 5655008 - DNA, 25 bp, Homo sapien
gacttgactgtcaaggccttccctc

SEQ ID NO: 5655009 - DNA, 25 bp, Homo sapien
gctctgacttgactgtcaaggcctt

SEQ ID NO: 5655010 - DNA, 25 bp, Homo sapien
ccttctcactactttcccctccagg

SEQ ID NO: 5655011 - DNA, 25 bp, Homo sapien
cagctctgacttgactgtcaaggcc

SEQ ID NO: 5655012 - DNA, 25 bp, Homo sapien
tgacagtcaagtcagagctggacat

SEQ ID NO: 5655013 - DNA, 25 bp, Homo sapien
gggagggaaggccttgacagtcaag

SEQ ID NO: 5655014 - DNA, 25 bp, Homo sapien
ggccttgacagtcaagtcagagctg

SEQ ID NO: 5655015 - DNA, 25 bp, Homo sapien
aaggccttgacagtcaagtcagagc

SEQ ID NO: 5655016 - DNA, 25 bp, Homo sapien
ggaaggccttgacagtcaagtcaga

SEQ ID NO: 5655017 - DNA, 25 bp, Homo sapien
gagggaaggccttgacagtcaagtc

SEQ ID NO: 5655018 - DNA, 25 bp, Homo sapien
aagcctaatatatcgtttaagaaga

SEQ ID NO: 5655019 - DNA, 25 bp, Homo sapien
taagcctaatatatcgtttaagaag

SEQ ID NO: 5655020 - DNA, 25 bp, Homo sapien
attaagcctaatatatcgtttaaga

SEQ ID NO: 5655021 - DNA, 25 bp, Homo sapien
aattaagcctaatatatcgtttaag

SEQ ID NO: 5655022 - DNA, 25 bp, Homo sapien
ttaagcctaatatatcgtttaagaa

SEQ ID NO: 5655023 - DNA, 25 bp, Homo sapien
tcttcttaaacgatatattaggctt

SEQ ID NO: 5655024 - DNA, 25 bp, Homo sapien
cttcttaaacgatatattaggctta

SEQ ID NO: 5655025 - DNA, 25 bp, Homo sapien
ttcttaaacgatatattaggcttaa

SEQ ID NO: 5655026 - DNA, 25 bp, Homo sapien
tcttaaacgatatattaggcttaat

SEQ ID NO: 5655027 - DNA, 25 bp, Homo sapien
cttaaacgatatattaggcttaatt

SEQ ID NO: 5655028 - DNA, 25 bp, Homo sapien
aagcctaatatatcgtttaagaaga

SEQ ID NO: 5655029 - DNA, 25 bp, Homo sapien
ccccgaacagatttcttggttctag

SEQ ID NO: 5655030 - DNA, 25 bp, Homo sapien
taagcctaatatatcgtttaagaag

SEQ ID NO: 5655031 - DNA, 25 bp, Homo sapien
cgtttaagaagaatattcacttact

SEQ ID NO: 5655032 - DNA, 25 bp, Homo sapien
gcctaatatatcgtttaagaagaat

SEQ ID NO: 5655033 - DNA, 25 bp, Homo sapien
gatttcttggttctagacttaatat

SEQ ID NO: 5655034 - DNA, 25 bp, Homo sapien
tcttcttaaacgatatattaggctt

SEQ ID NO: 5655035 - DNA, 25 bp, Homo sapien
tctagaaccaagaaatctgttcggg

SEQ ID NO: 5655036 - DNA, 25 bp, Homo sapien
cttcttaaacgatatattaggctta

SEQ ID NO: 5655037 - DNA, 25 bp, Homo sapien
tattaagtctagaaccaagaaatct

SEQ ID NO: 5655038 - DNA, 25 bp, Homo sapien
gtaagtgaatattcttcttaaacga

SEQ ID NO: 5655039 - DNA, 25 bp, Homo sapien
cataaaaatattaagtctagaacca

SEQ ID NO: 5655040 - DNA, 25 bp, Homo sapien
gcatgcaccaccatgcttggctaat

SEQ ID NO: 5655041 - DNA, 25 bp, Homo sapien
cattgacctcccaggttcaagtgat

SEQ ID NO: 5655042 - DNA, 25 bp, Homo sapien
ggcatgcaccaccatgcttggctaa

SEQ ID NO: 5655043 - DNA, 25 bp, Homo sapien
gcaacattgacctcccaggttcaag

SEQ ID NO: 5655044 - DNA, 25 bp, Homo sapien
aggcatgcaccaccatgcttggcta

SEQ ID NO: 5655045 - DNA, 25 bp, Homo sapien
atgcaccaccatgcttggctaattt

SEQ ID NO: 5655046 - DNA, 25 bp, Homo sapien
tagccaagcatggtggtgcatgcct

SEQ ID NO: 5655047 - DNA, 25 bp, Homo sapien
acttgaacctgggaggtcaatgttg

SEQ ID NO: 5655048 - DNA, 25 bp, Homo sapien
ttagccaagcatggtggtgcatgcc

SEQ ID NO: 5655049 - DNA, 25 bp, Homo sapien
aaattagccaagcatggtggtgcat

SEQ ID NO: 5655050 - DNA, 25 bp, Homo sapien
atcacttgaacctgggaggtcaatg

SEQ ID NO: 5655051 - DNA, 25 bp, Homo sapien
cttgaacctgggaggtcaatgttgc

SEQ ID NO: 5655052 - DNA, 25 bp, Homo sapien
tgtcagttttatctgatggtaacct

SEQ ID NO: 5655053 - DNA, 25 bp, Homo sapien
cgcatccgaccctttgtcagtttta

SEQ ID NO: 5655054 - DNA, 25 bp, Homo sapien
tatctgatggtaaccttatgactct

SEQ ID NO: 5655055 - DNA, 25 bp, Homo sapien
tccgaccctttgtcagttttatctg

SEQ ID NO: 5655056 - DNA, 25 bp, Homo sapien
gaccctttgtcagttttatctgatg

SEQ ID NO: 5655057 - DNA, 25 bp, Homo sapien
tgatggtaaccttatgactcttttt

SEQ ID NO: 5655058 - DNA, 25 bp, Homo sapien
taaaactgacaaagggtcggatgcg

SEQ ID NO: 5655059 - DNA, 25 bp, Homo sapien
aaagggtcggatgcggtggctcatg

SEQ ID NO: 5655060 - DNA, 25 bp, Homo sapien
catcagataaaactgacaaagggtc

SEQ ID NO: 5655061 - DNA, 25 bp, Homo sapien
ggttaccatcagataaaactgacaa

SEQ ID NO: 5655062 - DNA, 25 bp, Homo sapien
cagataaaactgacaaagggtcgga

SEQ ID NO: 5655063 - DNA, 25 bp, Homo sapien
aaaagagtcataaggttaccatcag

SEQ ID NO: 5655064 - DNA, 25 bp, Homo sapien
aatttactccaaaatcagccgggtg

SEQ ID NO: 5655065 - DNA, 25 bp, Homo sapien
tttactccaaaatcagccgggtgca

SEQ ID NO: 5655066 - DNA, 25 bp, Homo sapien
tactccaaaatcagccgggtgcagt

SEQ ID NO: 5655067 - DNA, 25 bp, Homo sapien
ttactccaaaatcagccgggtgcag

SEQ ID NO: 5655068 - DNA, 25 bp, Homo sapien
atttactccaaaatcagccgggtgc

SEQ ID NO: 5655069 - DNA, 25 bp, Homo sapien
cttaatttactccaaaatcagccgg

SEQ ID NO: 5655070 - DNA, 25 bp, Homo sapien
actgcacccggctgattttggagta

SEQ ID NO: 5655071 - DNA, 25 bp, Homo sapien
gcacccggctgattttggagtaaat

SEQ ID NO: 5655072 - DNA, 25 bp, Homo sapien
tgattttggagtaaattaaggaagc

SEQ ID NO: 5655073 - DNA, 25 bp, Homo sapien
ctgcacccggctgattttggagtaa

SEQ ID NO: 5655074 - DNA, 25 bp, Homo sapien
tgcacccggctgattttggagtaaa

SEQ ID NO: 5655075 - DNA, 25 bp, Homo sapien
cacccggctgattttggagtaaatt

SEQ ID NO: 5655076 - DNA, 25 bp, Homo sapien
ctccttgccttagcctcccaggtag

SEQ ID NO: 5655077 - DNA, 25 bp, Homo sapien
tctccttgccttagcctcccaggta

SEQ ID NO: 5655078 - DNA, 25 bp, Homo sapien
tccttgccttagcctcccaggtagc

SEQ ID NO: 5655079 - DNA, 25 bp, Homo sapien
cactgcaacctccgcctcctgggtt

SEQ ID NO: 5655080 - DNA, 25 bp, Homo sapien
caagccattctccttgccttagcct

SEQ ID NO: 5655081 - DNA, 25 bp, Homo sapien
ttctccttgccttagcctcccaggt

SEQ ID NO: 5655082 - DNA, 25 bp, Homo sapien
aacccaggaggcggaggttgcagtg

SEQ ID NO: 5655083 - DNA, 25 bp, Homo sapien
tacctgggaggctaaggcaaggaga

SEQ ID NO: 5655084 - DNA, 25 bp, Homo sapien
ctacctgggaggctaaggcaaggag

SEQ ID NO: 5655085 - DNA, 25 bp, Homo sapien
acctgggaggctaaggcaaggagaa

SEQ ID NO: 5655086 - DNA, 25 bp, Homo sapien
gctacctgggaggctaaggcaagga

SEQ ID NO: 5655087 - DNA, 25 bp, Homo sapien
aggctaaggcaaggagaatggcttg

SEQ ID NO: 5655088 - DNA, 25 bp, Homo sapien
atggtgttgaatttaagctgctaga

SEQ ID NO: 5655089 - DNA, 25 bp, Homo sapien
gttgaatttaagctgctagaaaaag

SEQ ID NO: 5655090 - DNA, 25 bp, Homo sapien
ggtgttgaatttaagctgctagaaa

SEQ ID NO: 5655091 - DNA, 25 bp, Homo sapien
tggtgttgaatttaagctgctagaa

SEQ ID NO: 5655092 - DNA, 25 bp, Homo sapien
gatggtgttgaatttaagctgctag

SEQ ID NO: 5655093 - DNA, 25 bp, Homo sapien
aaagatggtgttgaatttaagctgc

SEQ ID NO: 5655094 - DNA, 25 bp, Homo sapien
ctagcagcttaaattcaacaccatc

SEQ ID NO: 5655095 - DNA, 25 bp, Homo sapien
gcagcttaaattcaacaccatcttt

SEQ ID NO: 5655096 - DNA, 25 bp, Homo sapien
ctttttctagcagcttaaattcaac

SEQ ID NO: 5655097 - DNA, 25 bp, Homo sapien
ttctagcagcttaaattcaacacca

SEQ ID NO: 5655098 - DNA, 25 bp, Homo sapien
tctagcagcttaaattcaacaccat

SEQ ID NO: 5655099 - DNA, 25 bp, Homo sapien
tttctagcagcttaaattcaacacc

SEQ ID NO: 5655100 - DNA, 25 bp, Homo sapien
tgtcacctacactcgagatagccag

SEQ ID NO: 5655101 - DNA, 25 bp, Homo sapien
catttgtcacctacactcgagatag

SEQ ID NO: 5655102 - DNA, 25 bp, Homo sapien
agcctccagtacaagaccaatgcaa

SEQ ID NO: 5655103 - DNA, 25 bp, Homo sapien
cagcctccagtacaagaccaatgca

SEQ ID NO: 5655104 - DNA, 25 bp, Homo sapien
tcacctacactcgagatagccagaa

SEQ ID NO: 5655105 - DNA, 25 bp, Homo sapien
ctacactcgagatagccagaacggg

SEQ ID NO: 5655106 - DNA, 25 bp, Homo sapien
tccccgttctggctatctcgagtgt

SEQ ID NO: 5655107 - DNA, 25 bp, Homo sapien
gctatctcgagtgtaggtgacaaat

SEQ ID NO: 5655108 - DNA, 25 bp, Homo sapien
ccgttctggctatctcgagtgtagg

SEQ ID NO: 5655109 - DNA, 25 bp, Homo sapien
tgccctgtagcttgctccccgttct

SEQ ID NO: 5655110 - DNA, 25 bp, Homo sapien
tctggctatctcgagtgtaggtgac

SEQ ID NO: 5655111 - DNA, 25 bp, Homo sapien
tgcattggtcttgtactggaggctg

SEQ ID NO: 5655112 - DNA, 25 bp, Homo sapien
gactcttgaaactgcggtgaattca

SEQ ID NO: 5655113 - DNA, 25 bp, Homo sapien
gcagagttcgccatgcctgcggaac

SEQ ID NO: 5655114 - DNA, 25 bp, Homo sapien
tgaaactgcggtgaattcattagat

SEQ ID NO: 5655115 - DNA, 25 bp, Homo sapien
ccctccatgctataagagggaaggg

SEQ ID NO: 5655116 - DNA, 25 bp, Homo sapien
cagagcagagttcgccatgcctgcg

SEQ ID NO: 5655117 - DNA, 25 bp, Homo sapien
ctccatgctataagagggaagggaa

SEQ ID NO: 5655118 - DNA, 25 bp, Homo sapien
gttccgcaggcatggcgaactctgc

SEQ ID NO: 5655119 - DNA, 25 bp, Homo sapien
ttcccttccctcttatagcatggag

SEQ ID NO: 5655120 - DNA, 25 bp, Homo sapien
tgaattcaccgcagtttcaagagtc

SEQ ID NO: 5655121 - DNA, 25 bp, Homo sapien
atctaatgaattcaccgcagtttca

SEQ ID NO: 5655122 - DNA, 25 bp, Homo sapien
caggcatggcgaactctgctctggg

SEQ ID NO: 5655123 - DNA, 25 bp, Homo sapien
gaattcaccgcagtttcaagagtct

SEQ ID NO: 5655124 - DNA, 25 bp, Homo sapien
gcacaatcaatctcagtcagcttca

SEQ ID NO: 5655125 - DNA, 25 bp, Homo sapien
catagagtgttacttgtgctcctca

SEQ ID NO: 5655126 - DNA, 25 bp, Homo sapien
taacatagagtgttacttgtgctcc

SEQ ID NO: 5655127 - DNA, 25 bp, Homo sapien
gagtgttacttgtgctcctcatttc

SEQ ID NO: 5655128 - DNA, 25 bp, Homo sapien
caatctcagtcagcttcattcttcc

SEQ ID NO: 5655129 - DNA, 25 bp, Homo sapien
gtgctcctcatttcagcagtgtcct

SEQ ID NO: 5655130 - DNA, 25 bp, Homo sapien
aggacactgctgaaatgaggagcac

SEQ ID NO: 5655131 - DNA, 25 bp, Homo sapien
ggaagaatgaagctgactgagattg

SEQ ID NO: 5655132 - DNA, 25 bp, Homo sapien
gaaatgaggagcacaagtaacactc

SEQ ID NO: 5655133 - DNA, 25 bp, Homo sapien
tgaggagcacaagtaacactctatg

SEQ ID NO: 5655134 - DNA, 25 bp, Homo sapien
tgaagctgactgagattgattgtgc

SEQ ID NO: 5655135 - DNA, 25 bp, Homo sapien
gcacaagtaacactctatgttacag

SEQ ID NO: 5655136 - DNA, 25 bp, Homo sapien
ccaaacttgcaccaagttgattatc

SEQ ID NO: 5655137 - DNA, 25 bp, Homo sapien
caaacttgcaccaagttgattatcc

SEQ ID NO: 5655138 - DNA, 25 bp, Homo sapien
aacttgcaccaagttgattatcctg

SEQ ID NO: 5655139 - DNA, 25 bp, Homo sapien
aaacttgcaccaagttgattatcct

SEQ ID NO: 5655140 - DNA, 25 bp, Homo sapien
caggataatcaacttggtgcaagtt

SEQ ID NO: 5655141 - DNA, 25 bp, Homo sapien
aggataatcaacttggtgcaagttt

SEQ ID NO: 5655142 - DNA, 25 bp, Homo sapien
gataatcaacttggtgcaagtttgg

SEQ ID NO: 5655143 - DNA, 25 bp, Homo sapien
ggataatcaacttggtgcaagtttg

SEQ ID NO: 5655144 - DNA, 25 bp, Homo sapien
gcaaaacctggccaaacttgcacca

SEQ ID NO: 5655145 - DNA, 25 bp, Homo sapien
caagttgattatcctgtgtttcata

SEQ ID NO: 5655146 - DNA, 25 bp, Homo sapien
tttgccacagccctgcaaaacctgg

SEQ ID NO: 5655147 - DNA, 25 bp, Homo sapien
ttcatattttgttgagcatctgtgc

SEQ ID NO: 5655148 - DNA, 25 bp, Homo sapien
catctgtgcattttaaagtgttggc

SEQ ID NO: 5655149 - DNA, 25 bp, Homo sapien
aacttgcaccaagttgattatcctg

SEQ ID NO: 5655150 - DNA, 25 bp, Homo sapien
gccaacactttaaaatgcacagatg

SEQ ID NO: 5655151 - DNA, 25 bp, Homo sapien
tatgaaacacaggataatcaacttg

SEQ ID NO: 5655152 - DNA, 25 bp, Homo sapien
caggataatcaacttggtgcaagtt

SEQ ID NO: 5655153 - DNA, 25 bp, Homo sapien
gcacagatgctcaacaaaatatgaa

SEQ ID NO: 5655154 - DNA, 25 bp, Homo sapien
caagtttggccaggttttgcagggc

SEQ ID NO: 5655155 - DNA, 25 bp, Homo sapien
ccaggttttgcagggctgtggcaaa

SEQ ID NO: 5655156 - DNA, 25 bp, Homo sapien
ttgccttcctgaggaatgtatgagg

SEQ ID NO: 5655157 - DNA, 25 bp, Homo sapien
ctttctcgatgttaactttttgcct

SEQ ID NO: 5655158 - DNA, 25 bp, Homo sapien
tttgttttgcaggtcacgagaagag

SEQ ID NO: 5655159 - DNA, 25 bp, Homo sapien
tgttaactttttgccttcctgagga

SEQ ID NO: 5655160 - DNA, 25 bp, Homo sapien
tatgaggaccagttaccagaatggt

SEQ ID NO: 5655161 - DNA, 25 bp, Homo sapien
ccagaatggttttgttttgcaggtc

SEQ ID NO: 5655162 - DNA, 25 bp, Homo sapien
tcctcaggaaggcaaaaagttaaca

SEQ ID NO: 5655163 - DNA, 25 bp, Homo sapien
aggcaaaaagttaacatcgagaaag

SEQ ID NO: 5655164 - DNA, 25 bp, Homo sapien
tctggtaactggtcctcatacattc

SEQ ID NO: 5655165 - DNA, 25 bp, Homo sapien
tcttctcgtgacctgcaaaacaaaa

SEQ ID NO: 5655166 - DNA, 25 bp, Homo sapien
tcatacattcctcaggaaggcaaaa

SEQ ID NO: 5655167 - DNA, 25 bp, Homo sapien
caaaaccattctggtaactggtcct

SEQ ID NO: 5655168 - DNA, 25 bp, Homo sapien
agtttgtagtgcagctacggtgtta

SEQ ID NO: 5655169 - DNA, 25 bp, Homo sapien
tgtagtgcagctacggtgttagtga

SEQ ID NO: 5655170 - DNA, 25 bp, Homo sapien
aaactagtattagtttgtagtgcag

SEQ ID NO: 5655171 - DNA, 25 bp, Homo sapien
gtgcagctacggtgttagtgataag

SEQ ID NO: 5655172 - DNA, 25 bp, Homo sapien
tttgtagtgcagctacggtgttagt

SEQ ID NO: 5655173 - DNA, 25 bp, Homo sapien
gtgataaggtcttcttatcctctaa

SEQ ID NO: 5655174 - DNA, 25 bp, Homo sapien
ttatcactaacaccgtagctgcact

SEQ ID NO: 5655175 - DNA, 25 bp, Homo sapien
cttatcactaacaccgtagctgcac

SEQ ID NO: 5655176 - DNA, 25 bp, Homo sapien
ctgcactacaaactaatactagttt

SEQ ID NO: 5655177 - DNA, 25 bp, Homo sapien
cactaacaccgtagctgcactacaa

SEQ ID NO: 5655178 - DNA, 25 bp, Homo sapien
taacaccgtagctgcactacaaact

SEQ ID NO: 5655179 - DNA, 25 bp, Homo sapien
ttagaggataagaagaccttatcac

SEQ ID NO: 5655180 - DNA, 25 bp, Homo sapien
aaaagtagtattctgggtcataggc

SEQ ID NO: 5655181 - DNA, 25 bp, Homo sapien
gatctggaataaaagtagtattctg

SEQ ID NO: 5655182 - DNA, 25 bp, Homo sapien
tctggaataaaagtagtattctggg

SEQ ID NO: 5655183 - DNA, 25 bp, Homo sapien
ggaataaaagtagtattctgggtca

SEQ ID NO: 5655184 - DNA, 25 bp, Homo sapien
tggaataaaagtagtattctgggtc

SEQ ID NO: 5655185 - DNA, 25 bp, Homo sapien
gaataaaagtagtattctgggtcat

SEQ ID NO: 5655186 - DNA, 25 bp, Homo sapien
gacccagaatactacttttattcca

SEQ ID NO: 5655187 - DNA, 25 bp, Homo sapien
tgacccagaatactacttttattcc

SEQ ID NO: 5655188 - DNA, 25 bp, Homo sapien
cagaatactacttttattccagatc

SEQ ID NO: 5655189 - DNA, 25 bp, Homo sapien
cccagaatactacttttattccaga

SEQ ID NO: 5655190 - DNA, 25 bp, Homo sapien
gcctatgacccagaatactactttt

SEQ ID NO: 5655191 - DNA, 25 bp, Homo sapien
agaatactacttttattccagatca

SEQ ID NO: 5655192 - DNA, 25 bp, Homo sapien
aaaagtagtattctgggtcataggc

SEQ ID NO: 5655193 - DNA, 25 bp, Homo sapien
ggaatgaagtgccaggattgatctg

SEQ ID NO: 5655194 - DNA, 25 bp, Homo sapien
tctggaataaaagtagtattctggg

SEQ ID NO: 5655195 - DNA, 25 bp, Homo sapien
tagtattctgggtcataggcatggg

SEQ ID NO: 5655196 - DNA, 25 bp, Homo sapien
gaagtgccaggattgatctggaata

SEQ ID NO: 5655197 - DNA, 25 bp, Homo sapien
gattggtgcaaactgaagtctatgg

SEQ ID NO: 5655198 - DNA, 25 bp, Homo sapien
tagacttcagtttgcaccaatcccc

SEQ ID NO: 5655199 - DNA, 25 bp, Homo sapien
tcattccccatagacttcagtttgc

SEQ ID NO: 5655200 - DNA, 25 bp, Homo sapien
gcctatgacccagaatactactttt

SEQ ID NO: 5655201 - DNA, 25 bp, Homo sapien
tacttttattccagatcaatcctgg

SEQ ID NO: 5655202 - DNA, 25 bp, Homo sapien
aatcctggcacttcattccccatag

SEQ ID NO: 5655203 - DNA, 25 bp, Homo sapien
tttccccatgcctatgacccagaat

SEQ ID NO: 5655204 - DNA, 25 bp, Homo sapien
gtgtcttggggggacataaccatgt

SEQ ID NO: 5655205 - DNA, 25 bp, Homo sapien
acataaccatgtgggtgactgctgg

SEQ ID NO: 5655206 - DNA, 25 bp, Homo sapien
ttaggctgtatattcttggtgagtt

SEQ ID NO: 5655207 - DNA, 25 bp, Homo sapien
gggacataaccatgtgggtgactgc

SEQ ID NO: 5655208 - DNA, 25 bp, Homo sapien
cataaccatgtgggtgactgctggg

SEQ ID NO: 5655209 - DNA, 25 bp, Homo sapien
gacataaccatgtgggtgactgctg

SEQ ID NO: 5655210 - DNA, 25 bp, Homo sapien
ccagcagtcacccacatggttatgt

SEQ ID NO: 5655211 - DNA, 25 bp, Homo sapien
aactcaccaagaatatacagcctaa

SEQ ID NO: 5655212 - DNA, 25 bp, Homo sapien
ccccagcagtcacccacatggttat

SEQ ID NO: 5655213 - DNA, 25 bp, Homo sapien
cagcagtcacccacatggttatgtc

SEQ ID NO: 5655214 - DNA, 25 bp, Homo sapien
gcagtcacccacatggttatgtccc

SEQ ID NO: 5655215 - DNA, 25 bp, Homo sapien
acatggttatgtccccccaagacac

SEQ ID NO: 5655216 - DNA, 25 bp, Homo sapien
tcctccttgcggactaaaaagccaa

SEQ ID NO: 5655217 - DNA, 25 bp, Homo sapien
aaaaccatcaactcgggcctggccg

SEQ ID NO: 5655218 - DNA, 25 bp, Homo sapien
gccaaaaccatcaactcgggcctgg

SEQ ID NO: 5655219 - DNA, 25 bp, Homo sapien
aaaccatcaactcgggcctggccga

SEQ ID NO: 5655220 - DNA, 25 bp, Homo sapien
aagccaaaaccatcaactcgggcct

SEQ ID NO: 5655221 - DNA, 25 bp, Homo sapien
ttcctccttgcggactaaaaagcca

SEQ ID NO: 5655222 - DNA, 25 bp, Homo sapien
ttggctttttagtccgcaaggagga

SEQ ID NO: 5655223 - DNA, 25 bp, Homo sapien
cggccaggcccgagttgatggtttt

SEQ ID NO: 5655224 - DNA, 25 bp, Homo sapien
tcggccaggcccgagttgatggttt

SEQ ID NO: 5655225 - DNA, 25 bp, Homo sapien
caggcccgagttgatggttttggct

SEQ ID NO: 5655226 - DNA, 25 bp, Homo sapien
tggctttttagtccgcaaggaggaa

SEQ ID NO: 5655227 - DNA, 25 bp, Homo sapien
ccaggcccgagttgatggttttggc

SEQ ID NO: 5655228 - DNA, 25 bp, Homo sapien
tctggacggagccacttgaaaacag

SEQ ID NO: 5655229 - DNA, 25 bp, Homo sapien
gatctggacggagccacttgaaaac

SEQ ID NO: 5655230 - DNA, 25 bp, Homo sapien
agccttcagggcgatgaggtggatc

SEQ ID NO: 5655231 - DNA, 25 bp, Homo sapien
tggatctggacggagccacttgaaa

SEQ ID NO: 5655232 - DNA, 25 bp, Homo sapien
ggatctggacggagccacttgaaaa

SEQ ID NO: 5655233 - DNA, 25 bp, Homo sapien
tcagggcgatgaggtggatctggac

SEQ ID NO: 5655234 - DNA, 25 bp, Homo sapien
ctgttttcaagtggctccgtccaga

SEQ ID NO: 5655235 - DNA, 25 bp, Homo sapien
gttttcaagtggctccgtccagatc

SEQ ID NO: 5655236 - DNA, 25 bp, Homo sapien
ttttcaagtggctccgtccagatcc

SEQ ID NO: 5655237 - DNA, 25 bp, Homo sapien
tttcaagtggctccgtccagatcca

SEQ ID NO: 5655238 - DNA, 25 bp, Homo sapien
gatccacctcatcgccctgaaggct

SEQ ID NO: 5655239 - DNA, 25 bp, Homo sapien
tccagatccacctcatcgccctgaa

SEQ ID NO: 5655240 - DNA, 25 bp, Homo sapien
tttcattccttcatggcatagagaa

SEQ ID NO: 5655241 - DNA, 25 bp, Homo sapien
ccagtttcattccttcatggcatag

SEQ ID NO: 5655242 - DNA, 25 bp, Homo sapien
tccagtttcattccttcatggcata

SEQ ID NO: 5655243 - DNA, 25 bp, Homo sapien
gtttcattccttcatggcatagaga

SEQ ID NO: 5655244 - DNA, 25 bp, Homo sapien
cagtttcattccttcatggcataga

SEQ ID NO: 5655245 - DNA, 25 bp, Homo sapien
agtttcattccttcatggcatagag

SEQ ID NO: 5655246 - DNA, 25 bp, Homo sapien
tatgccatgaaggaatgaaactgga

SEQ ID NO: 5655247 - DNA, 25 bp, Homo sapien
ttctctatgccatgaaggaatgaaa

SEQ ID NO: 5655248 - DNA, 25 bp, Homo sapien
tctctatgccatgaaggaatgaaac

SEQ ID NO: 5655249 - DNA, 25 bp, Homo sapien
tctatgccatgaaggaatgaaactg

SEQ ID NO: 5655250 - DNA, 25 bp, Homo sapien
ctctatgccatgaaggaatgaaact

SEQ ID NO: 5655251 - DNA, 25 bp, Homo sapien
ctatgccatgaaggaatgaaactgg

SEQ ID NO: 5655252 - DNA, 25 bp, Homo sapien
gcaccatcacgcctgcctacttttg

SEQ ID NO: 5655253 - DNA, 25 bp, Homo sapien
caaaagtaggcaggcgtgatggtgc

SEQ ID NO: 5655254 - DNA, 25 bp, Homo sapien
gcctgcctacttttgtattttagta

SEQ ID NO: 5655255 - DNA, 25 bp, Homo sapien
cgcctgcctacttttgtattttagt

SEQ ID NO: 5655256 - DNA, 25 bp, Homo sapien
gcaccatcacgcctgcctacttttg

SEQ ID NO: 5655257 - DNA, 25 bp, Homo sapien
caccatcacgcctgcctacttttgt

SEQ ID NO: 5655258 - DNA, 25 bp, Homo sapien
accatcacgcctgcctacttttgta

SEQ ID NO: 5655259 - DNA, 25 bp, Homo sapien
acgcctgcctacttttgtattttag

SEQ ID NO: 5655260 - DNA, 25 bp, Homo sapien
tactaaaatacaaaagtaggcaggc

SEQ ID NO: 5655261 - DNA, 25 bp, Homo sapien
caaaagtaggcaggcgtgatggtgc

SEQ ID NO: 5655262 - DNA, 25 bp, Homo sapien
tacaaaagtaggcaggcgtgatggt

SEQ ID NO: 5655263 - DNA, 25 bp, Homo sapien
acaaaagtaggcaggcgtgatggtg

SEQ ID NO: 5655264 - DNA, 25 bp, Homo sapien
actaaaatacaaaagtaggcaggcg

SEQ ID NO: 5655265 - DNA, 25 bp, Homo sapien
ctaaaatacaaaagtaggcaggcgt

SEQ ID NO: 5655266 - DNA, 25 bp, Homo sapien
cgtgaactgaacacatcagttcttt

SEQ ID NO: 5655267 - DNA, 25 bp, Homo sapien
ctgcgtgaactgaacacatcagttc

SEQ ID NO: 5655268 - DNA, 25 bp, Homo sapien
gcgtgaactgaacacatcagttctt

SEQ ID NO: 5655269 - DNA, 25 bp, Homo sapien
gtgaactgaacacatcagttctttt

SEQ ID NO: 5655270 - DNA, 25 bp, Homo sapien
tgcgtgaactgaacacatcagttct

SEQ ID NO: 5655271 - DNA, 25 bp, Homo sapien
gaactgaacacatcagttctttttt

SEQ ID NO: 5655272 - DNA, 25 bp, Homo sapien
aaagaactgatgtgttcagttcacg

SEQ ID NO: 5655273 - DNA, 25 bp, Homo sapien
agaactgatgtgttcagttcacgca

SEQ ID NO: 5655274 - DNA, 25 bp, Homo sapien
aaaaaagaactgatgtgttcagttc

SEQ ID NO: 5655275 - DNA, 25 bp, Homo sapien
aagaactgatgtgttcagttcacgc

SEQ ID NO: 5655276 - DNA, 25 bp, Homo sapien
aaaagaactgatgtgttcagttcac

SEQ ID NO: 5655277 - DNA, 25 bp, Homo sapien
gaactgatgtgttcagttcacgcag

SEQ ID NO: 5655278 - DNA, 25 bp, Homo sapien
aaggtgttgaccttcatttgccgaa

SEQ ID NO: 5655279 - DNA, 25 bp, Homo sapien
tgccagcctcgatgggtgctcaggt

SEQ ID NO: 5655280 - DNA, 25 bp, Homo sapien
tgttctggataggatgccagcctcg

SEQ ID NO: 5655281 - DNA, 25 bp, Homo sapien
tgagcctagaaccactcgaaggtgt

SEQ ID NO: 5655282 - DNA, 25 bp, Homo sapien
ttcatttgccgaagtaatgaagcct

SEQ ID NO: 5655283 - DNA, 25 bp, Homo sapien
tgaagcctgttctggataggatgcc

SEQ ID NO: 5655284 - DNA, 25 bp, Homo sapien
ggcatcctatccagaacaggcttca

SEQ ID NO: 5655285 - DNA, 25 bp, Homo sapien
tacttcggcaaatgaaggtcaacac

SEQ ID NO: 5655286 - DNA, 25 bp, Homo sapien
accttcgagtggttctaggctcaga

SEQ ID NO: 5655287 - DNA, 25 bp, Homo sapien
catcgaggctggcatcctatccaga

SEQ ID NO: 5655288 - DNA, 25 bp, Homo sapien
ggtcaacaccttcgagtggttctag

SEQ ID NO: 5655289 - DNA, 25 bp, Homo sapien
acctgagcacccatcgaggctggca

SEQ ID NO: 5655290 - DNA, 25 bp, Homo sapien
atctggaaagctcggtgttcattct

SEQ ID NO: 5655291 - DNA, 25 bp, Homo sapien
aagtatgaaaggctggggtgttcca

SEQ ID NO: 5655292 - DNA, 25 bp, Homo sapien
aaagctcggtgttcattcttcttgc

SEQ ID NO: 5655293 - DNA, 25 bp, Homo sapien
gaaagctcggtgttcattcttcttg

SEQ ID NO: 5655294 - DNA, 25 bp, Homo sapien
aagctcggtgttcattcttcttgcc

SEQ ID NO: 5655295 - DNA, 25 bp, Homo sapien
gaaaggctggggtgttccaggatcc

SEQ ID NO: 5655296 - DNA, 25 bp, Homo sapien
gcaagaagaatgaacaccgagcttt

SEQ ID NO: 5655297 - DNA, 25 bp, Homo sapien
caagaagaatgaacaccgagctttc

SEQ ID NO: 5655298 - DNA, 25 bp, Homo sapien
ggcaagaagaatgaacaccgagctt

SEQ ID NO: 5655299 - DNA, 25 bp, Homo sapien
agaatgaacaccgagctttccagat

SEQ ID NO: 5655300 - DNA, 25 bp, Homo sapien
ggatcctggaacaccccagcctttc

SEQ ID NO: 5655301 - DNA, 25 bp, Homo sapien
tggaacaccccagcctttcatactt

SEQ ID NO: 5655302 - DNA, 25 bp, Homo sapien
agctccactaggaaaggccgctcca

SEQ ID NO: 5655303 - DNA, 25 bp, Homo sapien
gccgctccacgtggtgccacaaatg

SEQ ID NO: 5655304 - DNA, 25 bp, Homo sapien
gaaaggccgctccacgtggtgccac

SEQ ID NO: 5655305 - DNA, 25 bp, Homo sapien
gccacaaatgctccctcctgttgga

SEQ ID NO: 5655306 - DNA, 25 bp, Homo sapien
ggtgccacaaatgctccctcctgtt

SEQ ID NO: 5655307 - DNA, 25 bp, Homo sapien
gctccacgtggtgccacaaatgctc

SEQ ID NO: 5655308 - DNA, 25 bp, Homo sapien
ttgtggcaccacgtggagcggcctt

SEQ ID NO: 5655309 - DNA, 25 bp, Homo sapien
tggagcggcctttcctagtggagct

SEQ ID NO: 5655310 - DNA, 25 bp, Homo sapien
tccaacaggagggagcatttgtggc

SEQ ID NO: 5655311 - DNA, 25 bp, Homo sapien
catttgtggcaccacgtggagcggc

SEQ ID NO: 5655312 - DNA, 25 bp, Homo sapien
gagcatttgtggcaccacgtggagc

SEQ ID NO: 5655313 - DNA, 25 bp, Homo sapien
caggagggagcatttgtggcaccac

SEQ ID NO: 5655314 - DNA, 25 bp, Homo sapien
tcctgtctgccttgtagggcgccca

SEQ ID NO: 5655315 - DNA, 25 bp, Homo sapien
tgccttgtagggcgcccagcggatc

SEQ ID NO: 5655316 - DNA, 25 bp, Homo sapien
ctgtctgccttgtagggcgcccagc

SEQ ID NO: 5655317 - DNA, 25 bp, Homo sapien
tgacctgcttcccgcttggctgccc

SEQ ID NO: 5655318 - DNA, 25 bp, Homo sapien
cctgtctgccttgtagggcgcccag

SEQ ID NO: 5655319 - DNA, 25 bp, Homo sapien
tgtctgccttgtagggcgcccagcg

SEQ ID NO: 5655320 - DNA, 25 bp, Homo sapien
cgctgggcgccctacaaggcagaca

SEQ ID NO: 5655321 - DNA, 25 bp, Homo sapien
ggatccgctgggcgccctacaaggc

SEQ ID NO: 5655322 - DNA, 25 bp, Homo sapien
gggcagccaagcgggaagcaggtca

SEQ ID NO: 5655323 - DNA, 25 bp, Homo sapien
gaagcaggtcagtggcgggggatcc

SEQ ID NO: 5655324 - DNA, 25 bp, Homo sapien
ctgggcgccctacaaggcagacagg

SEQ ID NO: 5655325 - DNA, 25 bp, Homo sapien
tgggcgccctacaaggcagacagga

SEQ ID NO: 5655326 - DNA, 25 bp, Homo sapien
gacaacaagtaagtggtgcttagcg

SEQ ID NO: 5655327 - DNA, 25 bp, Homo sapien
tgacaacaagtaagtggtgcttagc

SEQ ID NO: 5655328 - DNA, 25 bp, Homo sapien
acaacaagtaagtggtgcttagcgg

SEQ ID NO: 5655329 - DNA, 25 bp, Homo sapien
acaagtaagtggtgcttagcggtgt

SEQ ID NO: 5655330 - DNA, 25 bp, Homo sapien
caacaagtaagtggtgcttagcggt

SEQ ID NO: 5655331 - DNA, 25 bp, Homo sapien
aacaagtaagtggtgcttagcggtg

SEQ ID NO: 5655332 - DNA, 25 bp, Homo sapien
agcccacggacagtctcaacaatga

SEQ ID NO: 5655333 - DNA, 25 bp, Homo sapien
gcccacggacagtctcaacaatgac

SEQ ID NO: 5655334 - DNA, 25 bp, Homo sapien
ccacggacagtctcaacaatgacaa

SEQ ID NO: 5655335 - DNA, 25 bp, Homo sapien
cccacggacagtctcaacaatgaca

SEQ ID NO: 5655336 - DNA, 25 bp, Homo sapien
cagcccacggacagtctcaacaatg

SEQ ID NO: 5655337 - DNA, 25 bp, Homo sapien
tgtcattgttgagactgtccgtggg

SEQ ID NO: 5655338 - DNA, 25 bp, Homo sapien
ttgtcattgttgagactgtccgtgg

SEQ ID NO: 5655339 - DNA, 25 bp, Homo sapien
gtcattgttgagactgtccgtgggc

SEQ ID NO: 5655340 - DNA, 25 bp, Homo sapien
cattgttgagactgtccgtgggctg

SEQ ID NO: 5655341 - DNA, 25 bp, Homo sapien
tcattgttgagactgtccgtgggct

SEQ ID NO: 5655342 - DNA, 25 bp, Homo sapien
acaccgctaagcaccacttacttgt

SEQ ID NO: 5655343 - DNA, 25 bp, Homo sapien
gctaagcaccacttacttgttgtca

SEQ ID NO: 5655344 - DNA, 25 bp, Homo sapien
accgctaagcaccacttacttgttg

SEQ ID NO: 5655345 - DNA, 25 bp, Homo sapien
cgctaagcaccacttacttgttgtc

SEQ ID NO: 5655346 - DNA, 25 bp, Homo sapien
ccgctaagcaccacttacttgttgt

SEQ ID NO: 5655347 - DNA, 25 bp, Homo sapien
caccgctaagcaccacttacttgtt

SEQ ID NO: 5655348 - DNA, 25 bp, Homo sapien
acaccgctaagcaccacttacttgt

SEQ ID NO: 5655349 - DNA, 25 bp, Homo sapien
gctaagcaccacttacttgttgtca

SEQ ID NO: 5655350 - DNA, 25 bp, Homo sapien
accgctaagcaccacttacttgttg

SEQ ID NO: 5655351 - DNA, 25 bp, Homo sapien
ccgctaagcaccacttacttgttgt

SEQ ID NO: 5655352 - DNA, 25 bp, Homo sapien
caccgctaagcaccacttacttgtt

SEQ ID NO: 5655353 - DNA, 25 bp, Homo sapien
tcattgttgagactgtccgtgggct

SEQ ID NO: 5655354 - DNA, 25 bp, Homo sapien
gataagtgttggtttcacgagagcc

SEQ ID NO: 5655355 - DNA, 25 bp, Homo sapien
gcttggataagtgttggtttcacga

SEQ ID NO: 5655356 - DNA, 25 bp, Homo sapien
cagcatctgcatggtcaagcttgga

SEQ ID NO: 5655357 - DNA, 25 bp, Homo sapien
gttggtttcacgagagccttgtgtc

SEQ ID NO: 5655358 - DNA, 25 bp, Homo sapien
tctgcatggtcaagcttggataagt

SEQ ID NO: 5655359 - DNA, 25 bp, Homo sapien
gcatctgcatggtcaagcttggata

SEQ ID NO: 5655360 - DNA, 25 bp, Homo sapien
ggctctcgtgaaaccaacacttatc

SEQ ID NO: 5655361 - DNA, 25 bp, Homo sapien
tatccaagcttgaccatgcagatgc

SEQ ID NO: 5655362 - DNA, 25 bp, Homo sapien
tccaagcttgaccatgcagatgctg

SEQ ID NO: 5655363 - DNA, 25 bp, Homo sapien
gacacaaggctctcgtgaaaccaac

SEQ ID NO: 5655364 - DNA, 25 bp, Homo sapien
cacttatccaagcttgaccatgcag

SEQ ID NO: 5655365 - DNA, 25 bp, Homo sapien
cgtgaaaccaacacttatccaagct

SEQ ID NO: 5655366 - DNA, 25 bp, Homo sapien
gtgggaggaagagcaccttcaccat

SEQ ID NO: 5655367 - DNA, 25 bp, Homo sapien
accatctgctttgtcacaaaccaaa

SEQ ID NO: 5655368 - DNA, 25 bp, Homo sapien
tgtcacaaaccaaactcacattcct

SEQ ID NO: 5655369 - DNA, 25 bp, Homo sapien
gctttgtcacaaaccaaactcacat

SEQ ID NO: 5655370 - DNA, 25 bp, Homo sapien
ggaggaagagcaccttcaccatctg

SEQ ID NO: 5655371 - DNA, 25 bp, Homo sapien
ggaagagcaccttcaccatctgctt

SEQ ID NO: 5655372 - DNA, 25 bp, Homo sapien
tttggtttgtgacaaagcagatggt

SEQ ID NO: 5655373 - DNA, 25 bp, Homo sapien
aggaatgtgagtttggtttgtgaca

SEQ ID NO: 5655374 - DNA, 25 bp, Homo sapien
gatggtgaaggtgctcttcctccca

SEQ ID NO: 5655375 - DNA, 25 bp, Homo sapien
cagatggtgaaggtgctcttcctcc

SEQ ID NO: 5655376 - DNA, 25 bp, Homo sapien
aagcagatggtgaaggtgctcttcc

SEQ ID NO: 5655377 - DNA, 25 bp, Homo sapien
atgtgagtttggtttgtgacaaagc

SEQ ID NO: 5655378 - DNA, 25 bp, Homo sapien
ttcctgccaaacacagctgtaggaa

SEQ ID NO: 5655379 - DNA, 25 bp, Homo sapien
tttcctgccaaacacagctgtagga

SEQ ID NO: 5655380 - DNA, 25 bp, Homo sapien
tcagggtctcaaagatcttggtgtt

SEQ ID NO: 5655381 - DNA, 25 bp, Homo sapien
gtttcctgccaaacacagctgtagg

SEQ ID NO: 5655382 - DNA, 25 bp, Homo sapien
cagggtctcaaagatcttggtgttt

SEQ ID NO: 5655383 - DNA, 25 bp, Homo sapien
cctacagctgtgtttggcaggaaac

SEQ ID NO: 5655384 - DNA, 25 bp, Homo sapien
ttcctacagctgtgtttggcaggaa

SEQ ID NO: 5655385 - DNA, 25 bp, Homo sapien
aacaccaagatctttgagaccctga

SEQ ID NO: 5655386 - DNA, 25 bp, Homo sapien
tcctacagctgtgtttggcaggaaa

SEQ ID NO: 5655387 - DNA, 25 bp, Homo sapien
aaacaccaagatctttgagaccctg

SEQ ID NO: 5655388 - DNA, 25 bp, Homo sapien
ttgctttttggtagttagcggcctc

SEQ ID NO: 5655389 - DNA, 25 bp, Homo sapien
tgttgctttttggtagttagcggcc

SEQ ID NO: 5655390 - DNA, 25 bp, Homo sapien
gtagttagcggcctcttcctggtgt

SEQ ID NO: 5655391 - DNA, 25 bp, Homo sapien
ctggtgtcctctcatggctgtccca

SEQ ID NO: 5655392 - DNA, 25 bp, Homo sapien
tgctttttggtagttagcggcctct

SEQ ID NO: 5655393 - DNA, 25 bp, Homo sapien
tagttagcggcctcttcctggtgtc

SEQ ID NO: 5655394 - DNA, 25 bp, Homo sapien
tgggacagccatgagaggacaccag

SEQ ID NO: 5655395 - DNA, 25 bp, Homo sapien
gaggccgctaactaccaaaaagcaa

SEQ ID NO: 5655396 - DNA, 25 bp, Homo sapien
gacaccaggaagaggccgctaacta

SEQ ID NO: 5655397 - DNA, 25 bp, Homo sapien
agaggccgctaactaccaaaaagca

SEQ ID NO: 5655398 - DNA, 25 bp, Homo sapien
acaccaggaagaggccgctaactac

SEQ ID NO: 5655399 - DNA, 25 bp, Homo sapien
ggccgctaactaccaaaaagcaaca

SEQ ID NO: 5655400 - DNA, 25 bp, Homo sapien
gctttaggacctaggcagatcatcc

SEQ ID NO: 5655401 - DNA, 25 bp, Homo sapien
ggtcattggctttaggacctaggca

SEQ ID NO: 5655402 - DNA, 25 bp, Homo sapien
taggacctaggcagatcatccagga

SEQ ID NO: 5655403 - DNA, 25 bp, Homo sapien
tgaccgtggtcattggctttaggac

SEQ ID NO: 5655404 - DNA, 25 bp, Homo sapien
gcttctctgtcatgaccgtggtcat

SEQ ID NO: 5655405 - DNA, 25 bp, Homo sapien
tctgtcatgaccgtggtcattggct

SEQ ID NO: 5655406 - DNA, 25 bp, Homo sapien
tcctaaagccaatgaccacggtcat

SEQ ID NO: 5655407 - DNA, 25 bp, Homo sapien
atgaccacggtcatgacagagaagc

SEQ ID NO: 5655408 - DNA, 25 bp, Homo sapien
tgcctaggtcctaaagccaatgacc

SEQ ID NO: 5655409 - DNA, 25 bp, Homo sapien
tcctggatgatctgcctaggtccta

SEQ ID NO: 5655410 - DNA, 25 bp, Homo sapien
aggtcctaaagccaatgaccacggt

SEQ ID NO: 5655411 - DNA, 25 bp, Homo sapien
ggatgatctgcctaggtcctaaagc

SEQ ID NO: 5655412 - DNA, 25 bp, Homo sapien
taggagtttcctgtggttctgtgac

SEQ ID NO: 5655413 - DNA, 25 bp, Homo sapien
ggttggaaatctgaaatcaaggtgt

SEQ ID NO: 5655414 - DNA, 25 bp, Homo sapien
tcctgtggttctgtgacaaatgacc

SEQ ID NO: 5655415 - DNA, 25 bp, Homo sapien
tcacagttctagaggttggaaatct

SEQ ID NO: 5655416 - DNA, 25 bp, Homo sapien
caaatgaccaaaaacctggcggctt

SEQ ID NO: 5655417 - DNA, 25 bp, Homo sapien
tggcggcttaaaattaatttcctca

SEQ ID NO: 5655418 - DNA, 25 bp, Homo sapien
agatttccaacctctagaactgtga

SEQ ID NO: 5655419 - DNA, 25 bp, Homo sapien
aagccgccaggtttttggtcatttg

SEQ ID NO: 5655420 - DNA, 25 bp, Homo sapien
tgtcacagaaccacaggaaactcct

SEQ ID NO: 5655421 - DNA, 25 bp, Homo sapien
ttgatttcagatttccaacctctag

SEQ ID NO: 5655422 - DNA, 25 bp, Homo sapien
tgaggaaattaattttaagccgcca

SEQ ID NO: 5655423 - DNA, 25 bp, Homo sapien
ggtcatttgtcacagaaccacagga

SEQ ID NO: 5655424 - DNA, 25 bp, Homo sapien
gcaacattttagttcgtggaacaga

SEQ ID NO: 5655425 - DNA, 25 bp, Homo sapien
tcaatccactttcaaaccggcaaag

SEQ ID NO: 5655426 - DNA, 25 bp, Homo sapien
tcaaaccggcaaagtcctcaaggtg

SEQ ID NO: 5655427 - DNA, 25 bp, Homo sapien
aattatcaatccactttcaaaccgg

SEQ ID NO: 5655428 - DNA, 25 bp, Homo sapien
acagcgagaaggcaacattttagtt

SEQ ID NO: 5655429 - DNA, 25 bp, Homo sapien
ccggcaaagtcctcaaggtgggatc

SEQ ID NO: 5655430 - DNA, 25 bp, Homo sapien
tctgttccacgaactaaaatgttgc

SEQ ID NO: 5655431 - DNA, 25 bp, Homo sapien
aactaaaatgttgccttctcgctgt

SEQ ID NO: 5655432 - DNA, 25 bp, Homo sapien
caccttgaggactttgccggtttga

SEQ ID NO: 5655433 - DNA, 25 bp, Homo sapien
tgccggtttgaaagtggattgataa

SEQ ID NO: 5655434 - DNA, 25 bp, Homo sapien
acatctgttccacgaactaaaatgt

SEQ ID NO: 5655435 - DNA, 25 bp, Homo sapien
gatcccaccttgaggactttgccgg

SEQ ID NO: 5655436 - DNA, 25 bp, Homo sapien
aaacaaaatcagtggcttcgcagtg

SEQ ID NO: 5655437 - DNA, 25 bp, Homo sapien
tgcggtaaacaaaatcagtggcttc

SEQ ID NO: 5655438 - DNA, 25 bp, Homo sapien
cagtggcttcgcagtgaaagtagaa

SEQ ID NO: 5655439 - DNA, 25 bp, Homo sapien
gtagaatgtgagttttcttgggagc

SEQ ID NO: 5655440 - DNA, 25 bp, Homo sapien
gcttcgcagtgaaagtagaatgtga

SEQ ID NO: 5655441 - DNA, 25 bp, Homo sapien
gtctgtgctgcggtaaacaaaatca

SEQ ID NO: 5655442 - DNA, 25 bp, Homo sapien
tgattttgtttaccgcagcacagac

SEQ ID NO: 5655443 - DNA, 25 bp, Homo sapien
gctcccaagaaaactcacattctac

SEQ ID NO: 5655444 - DNA, 25 bp, Homo sapien
cactgcgaagccactgattttgttt

SEQ ID NO: 5655445 - DNA, 25 bp, Homo sapien
tctactttcactgcgaagccactga

SEQ ID NO: 5655446 - DNA, 25 bp, Homo sapien
tcacattctactttcactgcgaagc

SEQ ID NO: 5655447 - DNA, 25 bp, Homo sapien
gaagccactgattttgtttaccgca

SEQ ID NO: 5655448 - DNA, 25 bp, Homo sapien
gaacaccgaggaagggagggtgtga

SEQ ID NO: 5655449 - DNA, 25 bp, Homo sapien
gcaggaagaacaccgaggaagggag

SEQ ID NO: 5655450 - DNA, 25 bp, Homo sapien
agaacaccgaggaagggagggtgtg

SEQ ID NO: 5655451 - DNA, 25 bp, Homo sapien
ttttataattgcagcaagcaggaag

SEQ ID NO: 5655452 - DNA, 25 bp, Homo sapien
agcaggaagaacaccgaggaaggga

SEQ ID NO: 5655453 - DNA, 25 bp, Homo sapien
tttttataattgcagcaagcaggaa

SEQ ID NO: 5655454 - DNA, 25 bp, Homo sapien
ttcctgcttgctgcaattataaaaa

SEQ ID NO: 5655455 - DNA, 25 bp, Homo sapien
ctcccttcctcggtgttcttcctgc

SEQ ID NO: 5655456 - DNA, 25 bp, Homo sapien
cttcctgcttgctgcaattataaaa

SEQ ID NO: 5655457 - DNA, 25 bp, Homo sapien
tcacaccctcccttcctcggtgttc

SEQ ID NO: 5655458 - DNA, 25 bp, Homo sapien
cacaccctcccttcctcggtgttct

SEQ ID NO: 5655459 - DNA, 25 bp, Homo sapien
tcccttcctcggtgttcttcctgct

SEQ ID NO: 5655460 - DNA, 25 bp, Homo sapien
ttcctgcttgctgcaattataaaaa

SEQ ID NO: 5655461 - DNA, 25 bp, Homo sapien
ccttcctcggtgttcttcctgcttg

SEQ ID NO: 5655462 - DNA, 25 bp, Homo sapien
aaaaatgtaactgcacagcaaacca

SEQ ID NO: 5655463 - DNA, 25 bp, Homo sapien
cagcaaaccaaaaggctgaggaccg

SEQ ID NO: 5655464 - DNA, 25 bp, Homo sapien
tcggtgttcttcctgcttgctgcaa

SEQ ID NO: 5655465 - DNA, 25 bp, Homo sapien
tgtaactgcacagcaaaccaaaagg

SEQ ID NO: 5655466 - DNA, 25 bp, Homo sapien
caactctaatggcagacttagtttt

SEQ ID NO: 5655467 - DNA, 25 bp, Homo sapien
ccaactctaatggcagacttagttt

SEQ ID NO: 5655468 - DNA, 25 bp, Homo sapien
agccaactctaatggcagacttagt

SEQ ID NO: 5655469 - DNA, 25 bp, Homo sapien
ctaatggcagacttagtttttagtc

SEQ ID NO: 5655470 - DNA, 25 bp, Homo sapien
gccaactctaatggcagacttagtt

SEQ ID NO: 5655471 - DNA, 25 bp, Homo sapien
gaaactgcccatcgtagcctgtttt

SEQ ID NO: 5655472 - DNA, 25 bp, Homo sapien
tgcccatcgtagcctgttttcatct

SEQ ID NO: 5655473 - DNA, 25 bp, Homo sapien
ctgcccatcgtagcctgttttcatc

SEQ ID NO: 5655474 - DNA, 25 bp, Homo sapien
agaaactgcccatcgtagcctgttt

SEQ ID NO: 5655475 - DNA, 25 bp, Homo sapien
aactgcccatcgtagcctgttttca

SEQ ID NO: 5655476 - DNA, 25 bp, Homo sapien
actgcccatcgtagcctgttttcat

SEQ ID NO: 5655477 - DNA, 25 bp, Homo sapien
tgaaaacaggctacgatgggcagtt

SEQ ID NO: 5655478 - DNA, 25 bp, Homo sapien
aaacaggctacgatgggcagtttct

SEQ ID NO: 5655479 - DNA, 25 bp, Homo sapien
gatgaaaacaggctacgatgggcag

SEQ ID NO: 5655480 - DNA, 25 bp, Homo sapien
aaaacaggctacgatgggcagtttc

SEQ ID NO: 5655481 - DNA, 25 bp, Homo sapien
atgaaaacaggctacgatgggcagt

SEQ ID NO: 5655482 - DNA, 25 bp, Homo sapien
agatgaaaacaggctacgatgggca

SEQ ID NO: 5655483 - DNA, 25 bp, Homo sapien
aactaagtctgccattagagttggc

SEQ ID NO: 5655484 - DNA, 25 bp, Homo sapien
gactaaaaactaagtctgccattag

SEQ ID NO: 5655485 - DNA, 25 bp, Homo sapien
aaactaagtctgccattagagttgg

SEQ ID NO: 5655486 - DNA, 25 bp, Homo sapien
aaaactaagtctgccattagagttg

SEQ ID NO: 5655487 - DNA, 25 bp, Homo sapien
actaagtctgccattagagttggct

SEQ ID NO: 5655488 - DNA, 25 bp, Homo sapien
gaagaaactgcccatcgtagcctgt

SEQ ID NO: 5655489 - DNA, 25 bp, Homo sapien
cagacttagtttttagtccacagta

SEQ ID NO: 5655490 - DNA, 25 bp, Homo sapien
tcaaagtaagttttccagaaagcca

SEQ ID NO: 5655491 - DNA, 25 bp, Homo sapien
cagaaagccaactctaatggcagac

SEQ ID NO: 5655492 - DNA, 25 bp, Homo sapien
ctaatggcagacttagtttttagtc

SEQ ID NO: 5655493 - DNA, 25 bp, Homo sapien
gccaactctaatggcagacttagtt

SEQ ID NO: 5655494 - DNA, 25 bp, Homo sapien
aactaagtctgccattagagttggc

SEQ ID NO: 5655495 - DNA, 25 bp, Homo sapien
gactaaaaactaagtctgccattag

SEQ ID NO: 5655496 - DNA, 25 bp, Homo sapien
tactgtggactaaaaactaagtctg

SEQ ID NO: 5655497 - DNA, 25 bp, Homo sapien
gatgaaaacaggctacgatgggcag

SEQ ID NO: 5655498 - DNA, 25 bp, Homo sapien
gctttctggaaaacttactttgaga

SEQ ID NO: 5655499 - DNA, 25 bp, Homo sapien
cattagagttggctttctggaaaac

SEQ ID NO: 5655500 - DNA, 25 bp, Homo sapien
gcagttgtaagaagcctttaggtac

SEQ ID NO: 5655501 - DNA, 25 bp, Homo sapien
atgcagttgtaagaagcctttaggt

SEQ ID NO: 5655502 - DNA, 25 bp, Homo sapien
tgcagttgtaagaagcctttaggta

SEQ ID NO: 5655503 - DNA, 25 bp, Homo sapien
catgcagttgtaagaagcctttagg

SEQ ID NO: 5655504 - DNA, 25 bp, Homo sapien
gtacctaaaggcttcttacaactgc

SEQ ID NO: 5655505 - DNA, 25 bp, Homo sapien
tacctaaaggcttcttacaactgca

SEQ ID NO: 5655506 - DNA, 25 bp, Homo sapien
acctaaaggcttcttacaactgcat

SEQ ID NO: 5655507 - DNA, 25 bp, Homo sapien
cctaaaggcttcttacaactgcatg

SEQ ID NO: 5655508 - DNA, 25 bp, Homo sapien
gcagttgtaagaagcctttaggtac

SEQ ID NO: 5655509 - DNA, 25 bp, Homo sapien
tgcagttgtaagaagcctttaggta

SEQ ID NO: 5655510 - DNA, 25 bp, Homo sapien
cattaaactgcttatgttgagatca

SEQ ID NO: 5655511 - DNA, 25 bp, Homo sapien
taaactgcttatgttgagatcattg

SEQ ID NO: 5655512 - DNA, 25 bp, Homo sapien
tatgttgagatcattgtagattcac

SEQ ID NO: 5655513 - DNA, 25 bp, Homo sapien
catgcagttgtaagaagcctttagg

SEQ ID NO: 5655514 - DNA, 25 bp, Homo sapien
tgatctcaacataagcagtttaatg

SEQ ID NO: 5655515 - DNA, 25 bp, Homo sapien
tacaatgatctcaacataagcagtt

SEQ ID NO: 5655516 - DNA, 25 bp, Homo sapien
gtacctaaaggcttcttacaactgc

SEQ ID NO: 5655517 - DNA, 25 bp, Homo sapien
tacctaaaggcttcttacaactgca

SEQ ID NO: 5655518 - DNA, 25 bp, Homo sapien
gaatctacaatgatctcaacataag

SEQ ID NO: 5655519 - DNA, 25 bp, Homo sapien
cctaaaggcttcttacaactgcatg

SEQ ID NO: 5655520 - DNA, 25 bp, Homo sapien
cctctgcacggtcaggaaattacct

SEQ ID NO: 5655521 - DNA, 25 bp, Homo sapien
cctgcctctgcacggtcaggaaatt

SEQ ID NO: 5655522 - DNA, 25 bp, Homo sapien
ctctgcacggtcaggaaattacctt

SEQ ID NO: 5655523 - DNA, 25 bp, Homo sapien
tctgcacggtcaggaaattaccttt

SEQ ID NO: 5655524 - DNA, 25 bp, Homo sapien
ctcctgcctctgcacggtcaggaaa

SEQ ID NO: 5655525 - DNA, 25 bp, Homo sapien
gcctctgcacggtcaggaaattacc

SEQ ID NO: 5655526 - DNA, 25 bp, Homo sapien
aaggtaatttcctgaccgtgcagag

SEQ ID NO: 5655527 - DNA, 25 bp, Homo sapien
ggtaatttcctgaccgtgcagaggc

SEQ ID NO: 5655528 - DNA, 25 bp, Homo sapien
aaaggtaatttcctgaccgtgcaga

SEQ ID NO: 5655529 - DNA, 25 bp, Homo sapien
aggtaatttcctgaccgtgcagagg

SEQ ID NO: 5655530 - DNA, 25 bp, Homo sapien
tttcctgaccgtgcagaggcaggag

SEQ ID NO: 5655531 - DNA, 25 bp, Homo sapien
aatttcctgaccgtgcagaggcagg

SEQ ID NO: 5655532 - DNA, 25 bp, Homo sapien
gaggtagagtgcacccgggtcccca

SEQ ID NO: 5655533 - DNA, 25 bp, Homo sapien
ctgtgttgttaggagagacatgatg

SEQ ID NO: 5655534 - DNA, 25 bp, Homo sapien
gcctgtgttgttaggagagacatga

SEQ ID NO: 5655535 - DNA, 25 bp, Homo sapien
cctgtgttgttaggagagacatgat

SEQ ID NO: 5655536 - DNA, 25 bp, Homo sapien
ggagaggtagagtgcacccgggtcc

SEQ ID NO: 5655537 - DNA, 25 bp, Homo sapien
agagtgcacccgggtccccactttg

SEQ ID NO: 5655538 - DNA, 25 bp, Homo sapien
tggggacccgggtgcactctacctc

SEQ ID NO: 5655539 - DNA, 25 bp, Homo sapien
caaagtggggacccgggtgcactct

SEQ ID NO: 5655540 - DNA, 25 bp, Homo sapien
gggacccgggtgcactctacctctc

SEQ ID NO: 5655541 - DNA, 25 bp, Homo sapien
atcatgtctctcctaacaacacagg

SEQ ID NO: 5655542 - DNA, 25 bp, Homo sapien
catcatgtctctcctaacaacacag

SEQ ID NO: 5655543 - DNA, 25 bp, Homo sapien
tcatgtctctcctaacaacacaggc

SEQ ID NO: 5655544 - DNA, 25 bp, Homo sapien
gattacaggtgcttgctaccatatc

SEQ ID NO: 5655545 - DNA, 25 bp, Homo sapien
gttcacgtgattctccggcctcaac

SEQ ID NO: 5655546 - DNA, 25 bp, Homo sapien
cacgtgattctccggcctcaacctc

SEQ ID NO: 5655547 - DNA, 25 bp, Homo sapien
ttcacgtgattctccggcctcaacc

SEQ ID NO: 5655548 - DNA, 25 bp, Homo sapien
ggttcacgtgattctccggcctcaa

SEQ ID NO: 5655549 - DNA, 25 bp, Homo sapien
tcacgtgattctccggcctcaacct

SEQ ID NO: 5655550 - DNA, 25 bp, Homo sapien
gttgaggccggagaatcacgtgaac

SEQ ID NO: 5655551 - DNA, 25 bp, Homo sapien
gatatggtagcaagcacctgtaatc

SEQ ID NO: 5655552 - DNA, 25 bp, Homo sapien
gaggttgaggccggagaatcacgtg

SEQ ID NO: 5655553 - DNA, 25 bp, Homo sapien
ggttgaggccggagaatcacgtgaa

SEQ ID NO: 5655554 - DNA, 25 bp, Homo sapien
ttgaggccggagaatcacgtgaacc

SEQ ID NO: 5655555 - DNA, 25 bp, Homo sapien
aggttgaggccggagaatcacgtga

SEQ ID NO: 5655556 - DNA, 25 bp, Homo sapien
ccttagaagaggtacgagcctttgg

SEQ ID NO: 5655557 - DNA, 25 bp, Homo sapien
cttagaagaggtacgagcctttggt

SEQ ID NO: 5655558 - DNA, 25 bp, Homo sapien
ggtaatgcagaagagtccttgttga

SEQ ID NO: 5655559 - DNA, 25 bp, Homo sapien
tgcagaagagtccttgttgagtgga

SEQ ID NO: 5655560 - DNA, 25 bp, Homo sapien
ggctgcatagtcagcacgaccaaag

SEQ ID NO: 5655561 - DNA, 25 bp, Homo sapien
taaaggtaatgcagaagagtccttg

SEQ ID NO: 5655562 - DNA, 25 bp, Homo sapien
ctttggtcgtgctgactatgcagcc

SEQ ID NO: 5655563 - DNA, 25 bp, Homo sapien
ccaaaggctcgtacctcttctaagg

SEQ ID NO: 5655564 - DNA, 25 bp, Homo sapien
caaggactcttctgcattaccttta

SEQ ID NO: 5655565 - DNA, 25 bp, Homo sapien
tttggtcgtgctgactatgcagcca

SEQ ID NO: 5655566 - DNA, 25 bp, Homo sapien
tcaacaaggactcttctgcattacc

SEQ ID NO: 5655567 - DNA, 25 bp, Homo sapien
tccactcaacaaggactcttctgca

SEQ ID NO: 5655568 - DNA, 25 bp, Homo sapien
agttgtgctctgtcgaccaggctgg

SEQ ID NO: 5655569 - DNA, 25 bp, Homo sapien
ttgtgctctgtcgaccaggctggaa

SEQ ID NO: 5655570 - DNA, 25 bp, Homo sapien
agagttgtgctctgtcgaccaggct

SEQ ID NO: 5655571 - DNA, 25 bp, Homo sapien
gagttgtgctctgtcgaccaggctg

SEQ ID NO: 5655572 - DNA, 25 bp, Homo sapien
atgcagtggtgcgatttctgctcac

SEQ ID NO: 5655573 - DNA, 25 bp, Homo sapien
gttgtgctctgtcgaccaggctgga

SEQ ID NO: 5655574 - DNA, 25 bp, Homo sapien
tccagcctggtcgacagagcacaac

SEQ ID NO: 5655575 - DNA, 25 bp, Homo sapien
agcctggtcgacagagcacaactct

SEQ ID NO: 5655576 - DNA, 25 bp, Homo sapien
cagcctggtcgacagagcacaactc

SEQ ID NO: 5655577 - DNA, 25 bp, Homo sapien
gtgagcagaaatcgcaccactgcat

SEQ ID NO: 5655578 - DNA, 25 bp, Homo sapien
ttccagcctggtcgacagagcacaa

SEQ ID NO: 5655579 - DNA, 25 bp, Homo sapien
ccagcctggtcgacagagcacaact

SEQ ID NO: 5655580 - DNA, 25 bp, Homo sapien
tgcatcttacagtccttgaccaggg

SEQ ID NO: 5655581 - DNA, 25 bp, Homo sapien
caagaaggcgtggatcatgcatggt

SEQ ID NO: 5655582 - DNA, 25 bp, Homo sapien
tgaccagggaccaagtgaaagagcc

SEQ ID NO: 5655583 - DNA, 25 bp, Homo sapien
ccaagtgaaagagccctcttcaaga

SEQ ID NO: 5655584 - DNA, 25 bp, Homo sapien
ccttgaccagggaccaagtgaaaga

SEQ ID NO: 5655585 - DNA, 25 bp, Homo sapien
cctcttcaagaaggcgtggatcatg

SEQ ID NO: 5655586 - DNA, 25 bp, Homo sapien
tggtcaaggactgtaagatgcaaaa

SEQ ID NO: 5655587 - DNA, 25 bp, Homo sapien
tcttgaagagggctctttcacttgg

SEQ ID NO: 5655588 - DNA, 25 bp, Homo sapien
ccctggtcaaggactgtaagatgca

SEQ ID NO: 5655589 - DNA, 25 bp, Homo sapien
gctctttcacttggtccctggtcaa

SEQ ID NO: 5655590 - DNA, 25 bp, Homo sapien
catgatccacgccttcttgaagagg

SEQ ID NO: 5655591 - DNA, 25 bp, Homo sapien
accatgcatgatccacgccttcttg

SEQ ID NO: 5655592 - DNA, 25 bp, Homo sapien
cgagcccttcgtgttgaggtcttgg

SEQ ID NO: 5655593 - DNA, 25 bp, Homo sapien
gatgcgagcccttcgtgttgaggtc

SEQ ID NO: 5655594 - DNA, 25 bp, Homo sapien
cccttcgtgttgaggtcttggctgt

SEQ ID NO: 5655595 - DNA, 25 bp, Homo sapien
caggtgtcccctcgggatgcgagcc

SEQ ID NO: 5655596 - DNA, 25 bp, Homo sapien
tgttgaggtcttggctgttgtctac

SEQ ID NO: 5655597 - DNA, 25 bp, Homo sapien
ccctcgggatgcgagcccttcgtgt

SEQ ID NO: 5655598 - DNA, 25 bp, Homo sapien
aagacctcaacacgaagggctcgca

SEQ ID NO: 5655599 - DNA, 25 bp, Homo sapien
acagccaagacctcaacacgaaggg

SEQ ID NO: 5655600 - DNA, 25 bp, Homo sapien
ccaagacctcaacacgaagggctcg

SEQ ID NO: 5655601 - DNA, 25 bp, Homo sapien
acacgaagggctcgcatcccgaggg

SEQ ID NO: 5655602 - DNA, 25 bp, Homo sapien
gtagacaacagccaagacctcaaca

SEQ ID NO: 5655603 - DNA, 25 bp, Homo sapien
tgccctacgacctccccaagaggaa

SEQ ID NO: 5655604 - DNA, 25 bp, Homo sapien
taaatgattaatagacgccatgaga

SEQ ID NO: 5655605 - DNA, 25 bp, Homo sapien
catgagagcgaaggttgtggggtgg

SEQ ID NO: 5655606 - DNA, 25 bp, Homo sapien
atgattaatagacgccatgagagcg

SEQ ID NO: 5655607 - DNA, 25 bp, Homo sapien
aatgattaatagacgccatgagagc

SEQ ID NO: 5655608 - DNA, 25 bp, Homo sapien
ccatgagagcgaaggttgtggggtg

SEQ ID NO: 5655609 - DNA, 25 bp, Homo sapien
aaatgattaatagacgccatgagag

SEQ ID NO: 5655610 - DNA, 25 bp, Homo sapien
ctttaaggaggctatgagataaatg

SEQ ID NO: 5655611 - DNA, 25 bp, Homo sapien
aggtctttaaggaggctatgagata

SEQ ID NO: 5655612 - DNA, 25 bp, Homo sapien
tctttaaggaggctatgagataaat

SEQ ID NO: 5655613 - DNA, 25 bp, Homo sapien
taaggaggctatgagataaatgatt

SEQ ID NO: 5655614 - DNA, 25 bp, Homo sapien
ggtctttaaggaggctatgagataa

SEQ ID NO: 5655615 - DNA, 25 bp, Homo sapien
ttaaggaggctatgagataaatgat

SEQ ID NO: 5655616 - DNA, 25 bp, Homo sapien
tatctcatagcctccttaaagacct

SEQ ID NO: 5655617 - DNA, 25 bp, Homo sapien
ttatctcatagcctccttaaagacc

SEQ ID NO: 5655618 - DNA, 25 bp, Homo sapien
catttatctcatagcctccttaaag

SEQ ID NO: 5655619 - DNA, 25 bp, Homo sapien
aatcatttatctcatagcctcctta

SEQ ID NO: 5655620 - DNA, 25 bp, Homo sapien
atcatttatctcatagcctccttaa

SEQ ID NO: 5655621 - DNA, 25 bp, Homo sapien
atttatctcatagcctccttaaaga

SEQ ID NO: 5655622 - DNA, 25 bp, Homo sapien
ccaccccacaaccttcgctctcatg

SEQ ID NO: 5655623 - DNA, 25 bp, Homo sapien
caccccacaaccttcgctctcatgg

SEQ ID NO: 5655624 - DNA, 25 bp, Homo sapien
gctctcatggcgtctattaatcatt

SEQ ID NO: 5655625 - DNA, 25 bp, Homo sapien
cgctctcatggcgtctattaatcat

SEQ ID NO: 5655626 - DNA, 25 bp, Homo sapien
ctctcatggcgtctattaatcattt

SEQ ID NO: 5655627 - DNA, 25 bp, Homo sapien
tctcatggcgtctattaatcattta

SEQ ID NO: 5655628 - DNA, 25 bp, Homo sapien
tagacgccatgagagcgaaggttgt

SEQ ID NO: 5655629 - DNA, 25 bp, Homo sapien
atgattaatagacgccatgagagcg

SEQ ID NO: 5655630 - DNA, 25 bp, Homo sapien
aatgattaatagacgccatgagagc

SEQ ID NO: 5655631 - DNA, 25 bp, Homo sapien
taatagacgccatgagagcgaaggt

SEQ ID NO: 5655632 - DNA, 25 bp, Homo sapien
ggtctttaaggaggctatgagataa

SEQ ID NO: 5655633 - DNA, 25 bp, Homo sapien
taaatgattaatagacgccatgaga

SEQ ID NO: 5655634 - DNA, 25 bp, Homo sapien
caccccacaaccttcgctctcatgg

SEQ ID NO: 5655635 - DNA, 25 bp, Homo sapien
taatcatttatctcatagcctcctt

SEQ ID NO: 5655636 - DNA, 25 bp, Homo sapien
acaaccttcgctctcatggcgtcta

SEQ ID NO: 5655637 - DNA, 25 bp, Homo sapien
gctctcatggcgtctattaatcatt

SEQ ID NO: 5655638 - DNA, 25 bp, Homo sapien
taaagacctctcagagcacacacag

SEQ ID NO: 5655639 - DNA, 25 bp, Homo sapien
cgctctcatggcgtctattaatcat

SEQ ID NO: 5655640 - DNA, 25 bp, Homo sapien
cagtcagacgtcacctgccaagtct

SEQ ID NO: 5655641 - DNA, 25 bp, Homo sapien
tgccagtaagtgagaggctgcgtgc

SEQ ID NO: 5655642 - DNA, 25 bp, Homo sapien
tgcgtgctcggcaatatcaaaccct

SEQ ID NO: 5655643 - DNA, 25 bp, Homo sapien
gctcggcaatatcaaaccctctggg

SEQ ID NO: 5655644 - DNA, 25 bp, Homo sapien
gcgggttgcagtcagacgtcacctg

SEQ ID NO: 5655645 - DNA, 25 bp, Homo sapien
ggttgcagtcagacgtcacctgcca

SEQ ID NO: 5655646 - DNA, 25 bp, Homo sapien
agacttggcaggtgacgtctgactg

SEQ ID NO: 5655647 - DNA, 25 bp, Homo sapien
ccccagagggtttgatattgccgag

SEQ ID NO: 5655648 - DNA, 25 bp, Homo sapien
tgtcagtacggccccagagggtttg

SEQ ID NO: 5655649 - DNA, 25 bp, Homo sapien
gcacgcagcctctcacttactggca

SEQ ID NO: 5655650 - DNA, 25 bp, Homo sapien
gggtttgatattgccgagcacgcag

SEQ ID NO: 5655651 - DNA, 25 bp, Homo sapien
gcaggtgacgtctgactgcaacccg

SEQ ID NO: 5655652 - DNA, 25 bp, Homo sapien
aagtgtgtattgaatagagagggtg

SEQ ID NO: 5655653 - DNA, 25 bp, Homo sapien
ggagtggcacttccagatgcaactg

SEQ ID NO: 5655654 - DNA, 25 bp, Homo sapien
ctgcacacatggatatgaatgaagt

SEQ ID NO: 5655655 - DNA, 25 bp, Homo sapien
tgcacacatggatatgaatgaagtg

SEQ ID NO: 5655656 - DNA, 25 bp, Homo sapien
atgaagtgtgtattgaatagagagg

SEQ ID NO: 5655657 - DNA, 25 bp, Homo sapien
gaatgaagtgtgtattgaatagaga

SEQ ID NO: 5655658 - DNA, 25 bp, Homo sapien
cctctctattcaatacacacttcat

SEQ ID NO: 5655659 - DNA, 25 bp, Homo sapien
cacttcattcatatccatgtgtgca

SEQ ID NO: 5655660 - DNA, 25 bp, Homo sapien
cagttgcatctggaagtgccactcc

SEQ ID NO: 5655661 - DNA, 25 bp, Homo sapien
tctctattcaatacacacttcattc

SEQ ID NO: 5655662 - DNA, 25 bp, Homo sapien
acttcattcatatccatgtgtgcag

SEQ ID NO: 5655663 - DNA, 25 bp, Homo sapien
caccctctctattcaatacacactt

SEQ ID NO: 5655664 - DNA, 25 bp, Homo sapien
cacacacgaattaagttctgctact

SEQ ID NO: 5655665 - DNA, 25 bp, Homo sapien
cacgaattaagttctgctacttaag

SEQ ID NO: 5655666 - DNA, 25 bp, Homo sapien
tgtatatacaggtgtcctcgtgccc

SEQ ID NO: 5655667 - DNA, 25 bp, Homo sapien
atacaggtgtcctcgtgccctgtcc

SEQ ID NO: 5655668 - DNA, 25 bp, Homo sapien
tatatacaggtgtcctcgtgccctg

SEQ ID NO: 5655669 - DNA, 25 bp, Homo sapien
tattccacacacgaattaagttctg

SEQ ID NO: 5655670 - DNA, 25 bp, Homo sapien
cagaacttaattcgtgtgtggaata

SEQ ID NO: 5655671 - DNA, 25 bp, Homo sapien
tagcagaacttaattcgtgtgtgga

SEQ ID NO: 5655672 - DNA, 25 bp, Homo sapien
gggcacgaggacacctgtatataca

SEQ ID NO: 5655673 - DNA, 25 bp, Homo sapien
taagtagcagaacttaattcgtgtg

SEQ ID NO: 5655674 - DNA, 25 bp, Homo sapien
agaaacttaagtagcagaacttaat

SEQ ID NO: 5655675 - DNA, 25 bp, Homo sapien
ggacagggcacgaggacacctgtat

SEQ ID NO: 5655676 - DNA, 25 bp, Homo sapien
cagaagacttagtggcccttctcta

SEQ ID NO: 5655677 - DNA, 25 bp, Homo sapien
gctctcagaagacttagtggccctt

SEQ ID NO: 5655678 - DNA, 25 bp, Homo sapien
catgattcaacgtctttgaactgtg

SEQ ID NO: 5655679 - DNA, 25 bp, Homo sapien
ttctctctaatcttaaaccttctgc

SEQ ID NO: 5655680 - DNA, 25 bp, Homo sapien
cccttctctattcctctgtcatgat

SEQ ID NO: 5655681 - DNA, 25 bp, Homo sapien
cctctgtcatgattcaacgtctttg

SEQ ID NO: 5655682 - DNA, 25 bp, Homo sapien
tcacagttcaaagacgttgaatcat

SEQ ID NO: 5655683 - DNA, 25 bp, Homo sapien
gcagaaggtttaagattagagagaa

SEQ ID NO: 5655684 - DNA, 25 bp, Homo sapien
aagggccactaagtcttctgagagc

SEQ ID NO: 5655685 - DNA, 25 bp, Homo sapien
tagagaagggccactaagtcttctg

SEQ ID NO: 5655686 - DNA, 25 bp, Homo sapien
atcatgacagaggaatagagaaggg

SEQ ID NO: 5655687 - DNA, 25 bp, Homo sapien
caaagacgttgaatcatgacagagg

SEQ ID NO: 5655688 - DNA, 25 bp, Homo sapien
tttgcgccttcctgtatggatattc

SEQ ID NO: 5655689 - DNA, 25 bp, Homo sapien
gttcatcattctttgcgccttcctg

SEQ ID NO: 5655690 - DNA, 25 bp, Homo sapien
cattctttgcgccttcctgtatgga

SEQ ID NO: 5655691 - DNA, 25 bp, Homo sapien
gaattttgtcccatgaatttgagat

SEQ ID NO: 5655692 - DNA, 25 bp, Homo sapien
ttgtcccatgaatttgagatccctc

SEQ ID NO: 5655693 - DNA, 25 bp, Homo sapien
tggatattcttgtcctctgaatttt

SEQ ID NO: 5655694 - DNA, 25 bp, Homo sapien
tccatacaggaaggcgcaaagaatg

SEQ ID NO: 5655695 - DNA, 25 bp, Homo sapien
gaatatccatacaggaaggcgcaaa

SEQ ID NO: 5655696 - DNA, 25 bp, Homo sapien
ggatctcaaattcatgggacaaaat

SEQ ID NO: 5655697 - DNA, 25 bp, Homo sapien
caggaaggcgcaaagaatgatgaac

SEQ ID NO: 5655698 - DNA, 25 bp, Homo sapien
gagggatctcaaattcatgggacaa

SEQ ID NO: 5655699 - DNA, 25 bp, Homo sapien
aaaattcagaggacaagaatatcca

SEQ ID NO: 5655700 - DNA, 25 bp, Homo sapien
gccactgtggaagtgactatgctgt

SEQ ID NO: 5655701 - DNA, 25 bp, Homo sapien
gtggaagtgactatgctgttacccc

SEQ ID NO: 5655702 - DNA, 25 bp, Homo sapien
cactgtggaagtgactatgctgtta

SEQ ID NO: 5655703 - DNA, 25 bp, Homo sapien
ttagtagcttaggtagaatttcatg

SEQ ID NO: 5655704 - DNA, 25 bp, Homo sapien
tacttagtagcttaggtagaatttc

SEQ ID NO: 5655705 - DNA, 25 bp, Homo sapien
ctgtggaagtgactatgctgttacc

SEQ ID NO: 5655706 - DNA, 25 bp, Homo sapien
gaaattctacctaagctactaagta

SEQ ID NO: 5655707 - DNA, 25 bp, Homo sapien
gggtaacagcatagtcacttccaca

SEQ ID NO: 5655708 - DNA, 25 bp, Homo sapien
ggtaacagcatagtcacttccacag

SEQ ID NO: 5655709 - DNA, 25 bp, Homo sapien
catgaaattctacctaagctactaa

SEQ ID NO: 5655710 - DNA, 25 bp, Homo sapien
taacagcatagtcacttccacagtg

SEQ ID NO: 5655711 - DNA, 25 bp, Homo sapien
cagcatagtcacttccacagtggct

SEQ ID NO: 5655712 - DNA, 25 bp, Homo sapien
tctgaaaaactacgtgatcctttta

SEQ ID NO: 5655713 - DNA, 25 bp, Homo sapien
cctctgaaaaactacgtgatccttt

SEQ ID NO: 5655714 - DNA, 25 bp, Homo sapien
ctctgaaaaactacgtgatcctttt

SEQ ID NO: 5655715 - DNA, 25 bp, Homo sapien
tcctctgaaaaactacgtgatcctt

SEQ ID NO: 5655716 - DNA, 25 bp, Homo sapien
aaaaggatcacgtagtttttcagag

SEQ ID NO: 5655717 - DNA, 25 bp, Homo sapien
aaggatcacgtagtttttcagagga

SEQ ID NO: 5655718 - DNA, 25 bp, Homo sapien
taaaaggatcacgtagtttttcaga

SEQ ID NO: 5655719 - DNA, 25 bp, Homo sapien
aaaggatcacgtagtttttcagagg

SEQ ID NO: 5655720 - DNA, 25 bp, Homo sapien
tctgaaaaactacgtgatcctttta

SEQ ID NO: 5655721 - DNA, 25 bp, Homo sapien
cctctgaaaaactacgtgatccttt

SEQ ID NO: 5655722 - DNA, 25 bp, Homo sapien
gtgatccttttaattcttacctaga

SEQ ID NO: 5655723 - DNA, 25 bp, Homo sapien
atgtgactttgggttctgttttctt

SEQ ID NO: 5655724 - DNA, 25 bp, Homo sapien
gctggttttggtcaaatgtgacttt

SEQ ID NO: 5655725 - DNA, 25 bp, Homo sapien
tcctctgaaaaactacgtgatcctt

SEQ ID NO: 5655726 - DNA, 25 bp, Homo sapien
aaagtcacatttgaccaaaaccagc

SEQ ID NO: 5655727 - DNA, 25 bp, Homo sapien
aaggatcacgtagtttttcagagga

SEQ ID NO: 5655728 - DNA, 25 bp, Homo sapien
taaaaggatcacgtagtttttcaga

SEQ ID NO: 5655729 - DNA, 25 bp, Homo sapien
aagaaaacagaacccaaagtcacat

SEQ ID NO: 5655730 - DNA, 25 bp, Homo sapien
aaaggatcacgtagtttttcagagg

SEQ ID NO: 5655731 - DNA, 25 bp, Homo sapien
tctaggtaagaattaaaaggatcac

SEQ ID NO: 5655732 - DNA, 25 bp, Homo sapien
acaacctatgggttctgagatcaca

SEQ ID NO: 5655733 - DNA, 25 bp, Homo sapien
tccgtctcaaggctgtgcacccggg

SEQ ID NO: 5655734 - DNA, 25 bp, Homo sapien
taggcgcttacgtacaacctatggg

SEQ ID NO: 5655735 - DNA, 25 bp, Homo sapien
tacgtacaacctatgggttctgaga

SEQ ID NO: 5655736 - DNA, 25 bp, Homo sapien
gccctaggcgcttacgtacaaccta

SEQ ID NO: 5655737 - DNA, 25 bp, Homo sapien
gaaacaacccacagttgagctaaaa

SEQ ID NO: 5655738 - DNA, 25 bp, Homo sapien
gatctcagaacccataggttgtacg

SEQ ID NO: 5655739 - DNA, 25 bp, Homo sapien
gaacccataggttgtacgtaagcgc

SEQ ID NO: 5655740 - DNA, 25 bp, Homo sapien
taggttgtacgtaagcgcctagggc

SEQ ID NO: 5655741 - DNA, 25 bp, Homo sapien
cccgggtgcacagccttgagacgga

SEQ ID NO: 5655742 - DNA, 25 bp, Homo sapien
tgtgatctcagaacccataggttgt

SEQ ID NO: 5655743 - DNA, 25 bp, Homo sapien
cattttagctcaactgtgggttgtt

SEQ ID NO: 5655744 - DNA, 25 bp, Homo sapien
tggagtcttttagagaacagagtcc

SEQ ID NO: 5655745 - DNA, 25 bp, Homo sapien
tgttctgacggttcaccgagttgaa

SEQ ID NO: 5655746 - DNA, 25 bp, Homo sapien
tgacggttcaccgagttgaacagct

SEQ ID NO: 5655747 - DNA, 25 bp, Homo sapien
gagtcctgttctgacggttcaccga

SEQ ID NO: 5655748 - DNA, 25 bp, Homo sapien
gtcttttagagaacagagtcctgtt

SEQ ID NO: 5655749 - DNA, 25 bp, Homo sapien
gttcaccgagttgaacagcttggtg

SEQ ID NO: 5655750 - DNA, 25 bp, Homo sapien
tcggtgaaccgtcagaacaggactc

SEQ ID NO: 5655751 - DNA, 25 bp, Homo sapien
caccaagctgttcaactcggtgaac

SEQ ID NO: 5655752 - DNA, 25 bp, Homo sapien
caagctgttcaactcggtgaaccgt

SEQ ID NO: 5655753 - DNA, 25 bp, Homo sapien
ggactctgttctctaaaagactcca

SEQ ID NO: 5655754 - DNA, 25 bp, Homo sapien
aacaggactctgttctctaaaagac

SEQ ID NO: 5655755 - DNA, 25 bp, Homo sapien
tcaactcggtgaaccgtcagaacag

SEQ ID NO: 5655756 - DNA, 25 bp, Homo sapien
tggctgcttgtgagtttcctgtggt

SEQ ID NO: 5655757 - DNA, 25 bp, Homo sapien
tctgggctggcacagctagttgtag

SEQ ID NO: 5655758 - DNA, 25 bp, Homo sapien
catactctgagaacccatgcgctca

SEQ ID NO: 5655759 - DNA, 25 bp, Homo sapien
agaacccatgcgctcaggtcacagg

SEQ ID NO: 5655760 - DNA, 25 bp, Homo sapien
tgcgctcaggtcacagggcacctgg

SEQ ID NO: 5655761 - DNA, 25 bp, Homo sapien
gcacagctagttgtagccgatatcc

SEQ ID NO: 5655762 - DNA, 25 bp, Homo sapien
tgagcgcatgggttctcagagtatg

SEQ ID NO: 5655763 - DNA, 25 bp, Homo sapien
cctgtgacctgagcgcatgggttct

SEQ ID NO: 5655764 - DNA, 25 bp, Homo sapien
ccaggtgccctgtgacctgagcgca

SEQ ID NO: 5655765 - DNA, 25 bp, Homo sapien
accacaggaaactcacaagcagcca

SEQ ID NO: 5655766 - DNA, 25 bp, Homo sapien
gctacaactagctgtgccagcccag

SEQ ID NO: 5655767 - DNA, 25 bp, Homo sapien
ggatatcggctacaactagctgtgc

SEQ ID NO: 5655768 - DNA, 25 bp, Homo sapien
ttcactcttaatcagttcccagctg

SEQ ID NO: 5655769 - DNA, 25 bp, Homo sapien
gcccgtgctggcgtttctgattcag

SEQ ID NO: 5655770 - DNA, 25 bp, Homo sapien
gtttctgattcagcagatctgtggg

SEQ ID NO: 5655771 - DNA, 25 bp, Homo sapien
agctgatgttgatgccgctggttca

SEQ ID NO: 5655772 - DNA, 25 bp, Homo sapien
gggcttcttcactcttaatcagttc

SEQ ID NO: 5655773 - DNA, 25 bp, Homo sapien
cagttcccagctgatgttgatgccg

SEQ ID NO: 5655774 - DNA, 25 bp, Homo sapien
tgaaccagcggcatcaacatcagct

SEQ ID NO: 5655775 - DNA, 25 bp, Homo sapien
ctgaatcagaaacgccagcacgggc

SEQ ID NO: 5655776 - DNA, 25 bp, Homo sapien
cagctgggaactgattaagagtgaa

SEQ ID NO: 5655777 - DNA, 25 bp, Homo sapien
tgattaagagtgaagaagcccctgc

SEQ ID NO: 5655778 - DNA, 25 bp, Homo sapien
gcggcatcaacatcagctgggaact

SEQ ID NO: 5655779 - DNA, 25 bp, Homo sapien
ccccacagatctgctgaatcagaaa

SEQ ID NO: 5655780 - DNA, 25 bp, Homo sapien
tccaccagggcaggatgttttcctt

SEQ ID NO: 5655781 - DNA, 25 bp, Homo sapien
aaggaaaacatcctgccctggtgga

SEQ ID NO: 5655782 - DNA, 25 bp, Homo sapien
gaaggaagcaaagcgagtgtatgca

SEQ ID NO: 5655783 - DNA, 25 bp, Homo sapien
aggaagcaaagcgagtgtatgcact

SEQ ID NO: 5655784 - DNA, 25 bp, Homo sapien
cagggcaggatgttttccttgaagg

SEQ ID NO: 5655785 - DNA, 25 bp, Homo sapien
tccaccagggcaggatgttttcctt

SEQ ID NO: 5655786 - DNA, 25 bp, Homo sapien
accgacactgcaaaggtgggccctg

SEQ ID NO: 5655787 - DNA, 25 bp, Homo sapien
acactgcaaaggtgggccctgggct

SEQ ID NO: 5655788 - DNA, 25 bp, Homo sapien
aaggaaaacatcctgccctggtgga

SEQ ID NO: 5655789 - DNA, 25 bp, Homo sapien
ttccccttcaaggaaaacatcctgc

SEQ ID NO: 5655790 - DNA, 25 bp, Homo sapien
agtgcatacactcgctttgcttcct

SEQ ID NO: 5655791 - DNA, 25 bp, Homo sapien
gctttgcttccttccccttcaagga

SEQ ID NO: 5655792 - DNA, 25 bp, Homo sapien
cagggcccacctttgcagtgtcggt

SEQ ID NO: 5655793 - DNA, 25 bp, Homo sapien
agcccagggcccacctttgcagtgt

SEQ ID NO: 5655794 - DNA, 25 bp, Homo sapien
cagccaatggtaggcatctgataaa

SEQ ID NO: 5655795 - DNA, 25 bp, Homo sapien
caatggtaggcatctgataaaggtt

SEQ ID NO: 5655796 - DNA, 25 bp, Homo sapien
atggtaggcatctgataaaggtttt

SEQ ID NO: 5655797 - DNA, 25 bp, Homo sapien
cacagccaatggtaggcatctgata

SEQ ID NO: 5655798 - DNA, 25 bp, Homo sapien
gccacagccaatggtaggcatctga

SEQ ID NO: 5655799 - DNA, 25 bp, Homo sapien
gccaatggtaggcatctgataaagg

SEQ ID NO: 5655800 - DNA, 25 bp, Homo sapien
aaaacctttatcagatgcctaccat

SEQ ID NO: 5655801 - DNA, 25 bp, Homo sapien
tcagatgcctaccattggctgtggc

SEQ ID NO: 5655802 - DNA, 25 bp, Homo sapien
tttatcagatgcctaccattggctg

SEQ ID NO: 5655803 - DNA, 25 bp, Homo sapien
tatcagatgcctaccattggctgtg

SEQ ID NO: 5655804 - DNA, 25 bp, Homo sapien
aacctttatcagatgcctaccattg

SEQ ID NO: 5655805 - DNA, 25 bp, Homo sapien
cctttatcagatgcctaccattggc

SEQ ID NO: 5655806 - DNA, 25 bp, Homo sapien
gtgatctcatagtagcaagtcataa

SEQ ID NO: 5655807 - DNA, 25 bp, Homo sapien
tttggctagtgctttgaggaaacta

SEQ ID NO: 5655808 - DNA, 25 bp, Homo sapien
gctttgaggaaactagtattgggca

SEQ ID NO: 5655809 - DNA, 25 bp, Homo sapien
tcgagtcacttttatttgcatgtga

SEQ ID NO: 5655810 - DNA, 25 bp, Homo sapien
ctagtattgggcaaatcgagtcact

SEQ ID NO: 5655811 - DNA, 25 bp, Homo sapien
gcatgtgatctcatagtagcaagtc

SEQ ID NO: 5655812 - DNA, 25 bp, Homo sapien
ttatgacttgctactatgagatcac

SEQ ID NO: 5655813 - DNA, 25 bp, Homo sapien
tagtttcctcaaagcactagccaaa

SEQ ID NO: 5655814 - DNA, 25 bp, Homo sapien
aaaagtgactcgatttgcccaatac

SEQ ID NO: 5655815 - DNA, 25 bp, Homo sapien
gacttgctactatgagatcacatgc

SEQ ID NO: 5655816 - DNA, 25 bp, Homo sapien
tcacatgcaaataaaagtgactcga

SEQ ID NO: 5655817 - DNA, 25 bp, Homo sapien
tgcccaatactagtttcctcaaagc

SEQ ID NO: 5655818 - DNA, 25 bp, Homo sapien
gtgtgctgctgggtctgcggctgga

SEQ ID NO: 5655819 - DNA, 25 bp, Homo sapien
gcaagccctcagctaattgccatta

SEQ ID NO: 5655820 - DNA, 25 bp, Homo sapien
cctcagctaattgccattagcctca

SEQ ID NO: 5655821 - DNA, 25 bp, Homo sapien
agccctcagctaattgccattagcc

SEQ ID NO: 5655822 - DNA, 25 bp, Homo sapien
caagccctcagctaattgccattag

SEQ ID NO: 5655823 - DNA, 25 bp, Homo sapien
gagaggactggctggcaagccctca

SEQ ID NO: 5655824 - DNA, 25 bp, Homo sapien
taatggcaattagctgagggcttgc

SEQ ID NO: 5655825 - DNA, 25 bp, Homo sapien
ggctaatggcaattagctgagggct

SEQ ID NO: 5655826 - DNA, 25 bp, Homo sapien
tgaggctaatggcaattagctgagg

SEQ ID NO: 5655827 - DNA, 25 bp, Homo sapien
tccagccgcagacccagcagcacac

SEQ ID NO: 5655828 - DNA, 25 bp, Homo sapien
tgagggcttgccagccagtcctctc

SEQ ID NO: 5655829 - DNA, 25 bp, Homo sapien
ctaatggcaattagctgagggcttg

SEQ ID NO: 5655830 - DNA, 25 bp, Homo sapien
gttgggttccattatgtagatgggt

SEQ ID NO: 5655831 - DNA, 25 bp, Homo sapien
tgagttgggttccattatgtagatg

SEQ ID NO: 5655832 - DNA, 25 bp, Homo sapien
ccatgatgtgtgctttcgatgtctg

SEQ ID NO: 5655833 - DNA, 25 bp, Homo sapien
gtagatgggttatggtttagttgtc

SEQ ID NO: 5655834 - DNA, 25 bp, Homo sapien
tgatgtgtgctttcgatgtctgagt

SEQ ID NO: 5655835 - DNA, 25 bp, Homo sapien
tgtgctttcgatgtctgagttgggt

SEQ ID NO: 5655836 - DNA, 25 bp, Homo sapien
aacccaactcagacatcgaaagcac

SEQ ID NO: 5655837 - DNA, 25 bp, Homo sapien
caactcagacatcgaaagcacacat

SEQ ID NO: 5655838 - DNA, 25 bp, Homo sapien
catctacataatggaacccaactca

SEQ ID NO: 5655839 - DNA, 25 bp, Homo sapien
gacaactaaaccataacccatctac

SEQ ID NO: 5655840 - DNA, 25 bp, Homo sapien
acccatctacataatggaacccaac

SEQ ID NO: 5655841 - DNA, 25 bp, Homo sapien
cagacatcgaaagcacacatcatgg

SEQ ID NO: 5655842 - DNA, 25 bp, Homo sapien
gccgatctgtcttcggtcccttgag

SEQ ID NO: 5655843 - DNA, 25 bp, Homo sapien
tggtagctgccgatctgtcttcggt

SEQ ID NO: 5655844 - DNA, 25 bp, Homo sapien
tgagtgtcctttaccagcgcatcat

SEQ ID NO: 5655845 - DNA, 25 bp, Homo sapien
cagaccctggtagctgccgatctgt

SEQ ID NO: 5655846 - DNA, 25 bp, Homo sapien
tctgtcttcggtcccttgagtgtcc

SEQ ID NO: 5655847 - DNA, 25 bp, Homo sapien
gtcccttgagtgtcctttaccagcg

SEQ ID NO: 5655848 - DNA, 25 bp, Homo sapien
gaccgaagacagatcggcagctacc

SEQ ID NO: 5655849 - DNA, 25 bp, Homo sapien
cagatcggcagctaccagggtctgg

SEQ ID NO: 5655850 - DNA, 25 bp, Homo sapien
tcaagggaccgaagacagatcggca

SEQ ID NO: 5655851 - DNA, 25 bp, Homo sapien
atgatgcgctggtaaaggacactca

SEQ ID NO: 5655852 - DNA, 25 bp, Homo sapien
taaaggacactcaagggaccgaaga

SEQ ID NO: 5655853 - DNA, 25 bp, Homo sapien
tgcgctggtaaaggacactcaaggg

SEQ ID NO: 5655854 - DNA, 25 bp, Homo sapien
gtggttgtatcactgactttagtga

SEQ ID NO: 5655855 - DNA, 25 bp, Homo sapien
tagattgtttttagactccggcttg

SEQ ID NO: 5655856 - DNA, 25 bp, Homo sapien
tagactccggcttgttaaggtgtaa

SEQ ID NO: 5655857 - DNA, 25 bp, Homo sapien
cggcttgttaaggtgtaaattacag

SEQ ID NO: 5655858 - DNA, 25 bp, Homo sapien
tgataagctcacttgtgttagattg

SEQ ID NO: 5655859 - DNA, 25 bp, Homo sapien
tcactgactttagtgataagctcac

SEQ ID NO: 5655860 - DNA, 25 bp, Homo sapien
tcactaaagtcagtgatacaaccac

SEQ ID NO: 5655861 - DNA, 25 bp, Homo sapien
ctgtaatttacaccttaacaagccg

SEQ ID NO: 5655862 - DNA, 25 bp, Homo sapien
caatctaacacaagtgagcttatca

SEQ ID NO: 5655863 - DNA, 25 bp, Homo sapien
caagccggagtctaaaaacaatcta

SEQ ID NO: 5655864 - DNA, 25 bp, Homo sapien
caagtgagcttatcactaaagtcag

SEQ ID NO: 5655865 - DNA, 25 bp, Homo sapien
tacaccttaacaagccggagtctaa

SEQ ID NO: 5655866 - DNA, 25 bp, Homo sapien
gcagttggacagaggctatccaacc

SEQ ID NO: 5655867 - DNA, 25 bp, Homo sapien
cagaggctatccaacctgcaaagct

SEQ ID NO: 5655868 - DNA, 25 bp, Homo sapien
tggacagaggctatccaacctgcaa

SEQ ID NO: 5655869 - DNA, 25 bp, Homo sapien
gagcagttggacagaggctatccaa

SEQ ID NO: 5655870 - DNA, 25 bp, Homo sapien
gacagaggctatccaacctgcaaag

SEQ ID NO: 5655871 - DNA, 25 bp, Homo sapien
ttgagcagttggacagaggctatcc

SEQ ID NO: 5655872 - DNA, 25 bp, Homo sapien
tttgcaggttggatagcctctgtcc

SEQ ID NO: 5655873 - DNA, 25 bp, Homo sapien
ttggatagcctctgtccaactgctc

SEQ ID NO: 5655874 - DNA, 25 bp, Homo sapien
ggttggatagcctctgtccaactgc

SEQ ID NO: 5655875 - DNA, 25 bp, Homo sapien
ggatagcctctgtccaactgctcaa

SEQ ID NO: 5655876 - DNA, 25 bp, Homo sapien
tgcaggttggatagcctctgtccaa

SEQ ID NO: 5655877 - DNA, 25 bp, Homo sapien
agctttgcaggttggatagcctctg

SEQ ID NO: 5655878 - DNA, 25 bp, Homo sapien
atttgtctctaaagacgggtgattc

SEQ ID NO: 5655879 - DNA, 25 bp, Homo sapien
ctggtgggtgacatttgtctctaaa

SEQ ID NO: 5655880 - DNA, 25 bp, Homo sapien
tggtgggtgacatttgtctctaaag

SEQ ID NO: 5655881 - DNA, 25 bp, Homo sapien
tgtctctaaagacgggtgattctcc

SEQ ID NO: 5655882 - DNA, 25 bp, Homo sapien
tctctaaagacgggtgattctcccc

SEQ ID NO: 5655883 - DNA, 25 bp, Homo sapien
ggtctaccttcctggctcagaaagg

SEQ ID NO: 5655884 - DNA, 25 bp, Homo sapien
gagaatcacccgtctttagagacaa

SEQ ID NO: 5655885 - DNA, 25 bp, Homo sapien
ggagaatcacccgtctttagagaca

SEQ ID NO: 5655886 - DNA, 25 bp, Homo sapien
cctttctgagccaggaaggtagacc

SEQ ID NO: 5655887 - DNA, 25 bp, Homo sapien
ctttagagacaaatgtcacccacca

SEQ ID NO: 5655888 - DNA, 25 bp, Homo sapien
tttagagacaaatgtcacccaccag

SEQ ID NO: 5655889 - DNA, 25 bp, Homo sapien
gaatcacccgtctttagagacaaat

SEQ ID NO: 5655890 - DNA, 25 bp, Homo sapien
atttaaggtggaccatgataaagga

SEQ ID NO: 5655891 - DNA, 25 bp, Homo sapien
tttaaggtggaccatgataaaggaa

SEQ ID NO: 5655892 - DNA, 25 bp, Homo sapien
aaatttaaggtggaccatgataaag

SEQ ID NO: 5655893 - DNA, 25 bp, Homo sapien
ttaaggtggaccatgataaaggaag

SEQ ID NO: 5655894 - DNA, 25 bp, Homo sapien
aatttaaggtggaccatgataaagg

SEQ ID NO: 5655895 - DNA, 25 bp, Homo sapien
ttcctttatcatggtccaccttaaa

SEQ ID NO: 5655896 - DNA, 25 bp, Homo sapien
tcctttatcatggtccaccttaaat

SEQ ID NO: 5655897 - DNA, 25 bp, Homo sapien
cttcctttatcatggtccaccttaa

SEQ ID NO: 5655898 - DNA, 25 bp, Homo sapien
cctttatcatggtccaccttaaatt

SEQ ID NO: 5655899 - DNA, 25 bp, Homo sapien
ctttatcatggtccaccttaaattt

SEQ ID NO: 5655900 - DNA, 25 bp, Homo sapien
caggggaacatttctgttactttgt

SEQ ID NO: 5655901 - DNA, 25 bp, Homo sapien
gataaaggaagatacatttagaacc

SEQ ID NO: 5655902 - DNA, 25 bp, Homo sapien
ttaaggtggaccatgataaaggaag

SEQ ID NO: 5655903 - DNA, 25 bp, Homo sapien
tctgttactttgttttcaccttcaa

SEQ ID NO: 5655904 - DNA, 25 bp, Homo sapien
ggtggaccatgataaaggaagatac

SEQ ID NO: 5655905 - DNA, 25 bp, Homo sapien
aatttaaggtggaccatgataaagg

SEQ ID NO: 5655906 - DNA, 25 bp, Homo sapien
ggttctaaatgtatcttcctttatc

SEQ ID NO: 5655907 - DNA, 25 bp, Homo sapien
tgaaggtgaaaacaaagtaacagaa

SEQ ID NO: 5655908 - DNA, 25 bp, Homo sapien
tcctttatcatggtccaccttaaat

SEQ ID NO: 5655909 - DNA, 25 bp, Homo sapien
cttcctttatcatggtccaccttaa

SEQ ID NO: 5655910 - DNA, 25 bp, Homo sapien
tgttcccctgcagaagtcaatggcg

SEQ ID NO: 5655911 - DNA, 25 bp, Homo sapien
acaaagtaacagaaatgttcccctg

SEQ ID NO: 5655912 - DNA, 25 bp, Homo sapien
cctgttgtcgtagaaactatatttg

SEQ ID NO: 5655913 - DNA, 25 bp, Homo sapien
tttgtttgttcattaggcttcactc

SEQ ID NO: 5655914 - DNA, 25 bp, Homo sapien
cctggcctgttgtcgtagaaactat

SEQ ID NO: 5655915 - DNA, 25 bp, Homo sapien
taggcttcactctgacctggcctgt

SEQ ID NO: 5655916 - DNA, 25 bp, Homo sapien
gcttcactctgacctggcctgttgt

SEQ ID NO: 5655917 - DNA, 25 bp, Homo sapien
tgacctggcctgttgtcgtagaaac

SEQ ID NO: 5655918 - DNA, 25 bp, Homo sapien
tacacaaatatagtttctacgacaa

SEQ ID NO: 5655919 - DNA, 25 bp, Homo sapien
tagtttctacgacaacaggccaggt

SEQ ID NO: 5655920 - DNA, 25 bp, Homo sapien
caacaggccaggtcagagtgaagcc

SEQ ID NO: 5655921 - DNA, 25 bp, Homo sapien
gagtgaagcctaatgaacaaacaaa

SEQ ID NO: 5655922 - DNA, 25 bp, Homo sapien
tctacgacaacaggccaggtcagag

SEQ ID NO: 5655923 - DNA, 25 bp, Homo sapien
aatatagtttctacgacaacaggcc

SEQ ID NO: 5655924 - DNA, 25 bp, Homo sapien
gttttgcgtagagacatctcaccat

SEQ ID NO: 5655925 - DNA, 25 bp, Homo sapien
ttttgcgtagagacatctcaccatg

SEQ ID NO: 5655926 - DNA, 25 bp, Homo sapien
tgttttgcgtagagacatctcacca

SEQ ID NO: 5655927 - DNA, 25 bp, Homo sapien
gtgttttgcgtagagacatctcacc

SEQ ID NO: 5655928 - DNA, 25 bp, Homo sapien
tgtgttttgcgtagagacatctcac

SEQ ID NO: 5655929 - DNA, 25 bp, Homo sapien
tggtgagatgtctctacgcaaaaca

SEQ ID NO: 5655930 - DNA, 25 bp, Homo sapien
catggtgagatgtctctacgcaaaa

SEQ ID NO: 5655931 - DNA, 25 bp, Homo sapien
atggtgagatgtctctacgcaaaac

SEQ ID NO: 5655932 - DNA, 25 bp, Homo sapien
ggtgagatgtctctacgcaaaacac

SEQ ID NO: 5655933 - DNA, 25 bp, Homo sapien
gtgagatgtctctacgcaaaacaca

SEQ ID NO: 5655934 - DNA, 25 bp, Homo sapien
ccaggctggagcacagttcactgca

SEQ ID NO: 5655935 - DNA, 25 bp, Homo sapien
gggcccaagcgatccttccacctca

SEQ ID NO: 5655936 - DNA, 25 bp, Homo sapien
gagcacagttcactgcaccctctgt

SEQ ID NO: 5655937 - DNA, 25 bp, Homo sapien
tggagcacagttcactgcaccctct

SEQ ID NO: 5655938 - DNA, 25 bp, Homo sapien
tgtctcctgggcccaagcgatcctt

SEQ ID NO: 5655939 - DNA, 25 bp, Homo sapien
ggctggagcacagttcactgcaccc

SEQ ID NO: 5655940 - DNA, 25 bp, Homo sapien
tgcagtgaactgtgctccagcctgg

SEQ ID NO: 5655941 - DNA, 25 bp, Homo sapien
aaggatcgcttgggcccaggagaca

SEQ ID NO: 5655942 - DNA, 25 bp, Homo sapien
cagagggtgcagtgaactgtgctcc

SEQ ID NO: 5655943 - DNA, 25 bp, Homo sapien
gggtgcagtgaactgtgctccagcc

SEQ ID NO: 5655944 - DNA, 25 bp, Homo sapien
ttgggcccaggagacagagggtgca

SEQ ID NO: 5655945 - DNA, 25 bp, Homo sapien
tgaggtggaaggatcgcttgggccc

SEQ ID NO: 5655946 - DNA, 25 bp, Homo sapien
agtgtaagtgttcgctgaattttct

SEQ ID NO: 5655947 - DNA, 25 bp, Homo sapien
gagtgtaagtgttcgctgaattttc

SEQ ID NO: 5655948 - DNA, 25 bp, Homo sapien
agaaaattcagcgaacacttacact

SEQ ID NO: 5655949 - DNA, 25 bp, Homo sapien
gaaaattcagcgaacacttacactc

SEQ ID NO: 5655950 - DNA, 25 bp, Homo sapien
agaaatgatgtgtgtgagtgtaagt

SEQ ID NO: 5655951 - DNA, 25 bp, Homo sapien
tgggcacagtaatcttcagggagag

SEQ ID NO: 5655952 - DNA, 25 bp, Homo sapien
taagtgttcgctgaattttctacaa

SEQ ID NO: 5655953 - DNA, 25 bp, Homo sapien
gagtgtaagtgttcgctgaattttc

SEQ ID NO: 5655954 - DNA, 25 bp, Homo sapien
gaattttctacaaattgagggaata

SEQ ID NO: 5655955 - DNA, 25 bp, Homo sapien
tcttcagggagagaaatgatgtgtg

SEQ ID NO: 5655956 - DNA, 25 bp, Homo sapien
gaacacttacactcacacacatcat

SEQ ID NO: 5655957 - DNA, 25 bp, Homo sapien
gaaaattcagcgaacacttacactc

SEQ ID NO: 5655958 - DNA, 25 bp, Homo sapien
cacacatcatttctctccctgaaga

SEQ ID NO: 5655959 - DNA, 25 bp, Homo sapien
tattccctcaatttgtagaaaattc

SEQ ID NO: 5655960 - DNA, 25 bp, Homo sapien
tgtagaaaattcagcgaacacttac

SEQ ID NO: 5655961 - DNA, 25 bp, Homo sapien
tctccctgaagattactgtgcccag

SEQ ID NO: 5655962 - DNA, 25 bp, Homo sapien
cagagtgatgcgtagcaacagccct

SEQ ID NO: 5655963 - DNA, 25 bp, Homo sapien
cttcagcgtctgtgtgggtaaaggg

SEQ ID NO: 5655964 - DNA, 25 bp, Homo sapien
gcgcagagtgatgcgtagcaacagc

SEQ ID NO: 5655965 - DNA, 25 bp, Homo sapien
ttcagcgtctgtgtgggtaaaggga

SEQ ID NO: 5655966 - DNA, 25 bp, Homo sapien
ccttcagcgtctgtgtgggtaaagg

SEQ ID NO: 5655967 - DNA, 25 bp, Homo sapien
gcagagtgatgcgtagcaacagccc

SEQ ID NO: 5655968 - DNA, 25 bp, Homo sapien
gggctgttgctacgcatcactctgc

SEQ ID NO: 5655969 - DNA, 25 bp, Homo sapien
cctttacccacacagacgctgaagg

SEQ ID NO: 5655970 - DNA, 25 bp, Homo sapien
ccctttacccacacagacgctgaag

SEQ ID NO: 5655971 - DNA, 25 bp, Homo sapien
tccctttacccacacagacgctgaa

SEQ ID NO: 5655972 - DNA, 25 bp, Homo sapien
gctgttgctacgcatcactctgcgc

SEQ ID NO: 5655973 - DNA, 25 bp, Homo sapien
agggctgttgctacgcatcactctg

SEQ ID NO: 5655974 - DNA, 25 bp, Homo sapien
ttaagtccacatgattctgttgaag

SEQ ID NO: 5655975 - DNA, 25 bp, Homo sapien
tctgttgaagccctgcataactgtc

SEQ ID NO: 5655976 - DNA, 25 bp, Homo sapien
tcttaagtccacatgattctgttga

SEQ ID NO: 5655977 - DNA, 25 bp, Homo sapien
tgattctgttgaagccctgcataac

SEQ ID NO: 5655978 - DNA, 25 bp, Homo sapien
tgaagccctgcataactgtcactca

SEQ ID NO: 5655979 - DNA, 25 bp, Homo sapien
tgttgaagccctgcataactgtcac

SEQ ID NO: 5655980 - DNA, 25 bp, Homo sapien
gttatgcagggcttcaacagaatca

SEQ ID NO: 5655981 - DNA, 25 bp, Homo sapien
agtgacagttatgcagggcttcaac

SEQ ID NO: 5655982 - DNA, 25 bp, Homo sapien
tcaacagaatcatgtggacttaaga

SEQ ID NO: 5655983 - DNA, 25 bp, Homo sapien
cttcaacagaatcatgtggacttaa

SEQ ID NO: 5655984 - DNA, 25 bp, Homo sapien
tgagtgacagttatgcagggcttca

SEQ ID NO: 5655985 - DNA, 25 bp, Homo sapien
gacagttatgcagggcttcaacaga

SEQ ID NO: 5655986 - DNA, 25 bp, Homo sapien
gagtttatgctatttcagtttgctg

SEQ ID NO: 5655987 - DNA, 25 bp, Homo sapien
gacgctgagtttatgctatttcagt

SEQ ID NO: 5655988 - DNA, 25 bp, Homo sapien
tcgacgctgagtttatgctatttca

SEQ ID NO: 5655989 - DNA, 25 bp, Homo sapien
tttcacttgtttgcgggagaatcct

SEQ ID NO: 5655990 - DNA, 25 bp, Homo sapien
tcacttgtttgcgggagaatccttc

SEQ ID NO: 5655991 - DNA, 25 bp, Homo sapien
atttcacttgtttgcgggagaatcc

SEQ ID NO: 5655992 - DNA, 25 bp, Homo sapien
gaaggattctcccgcaaacaagtga

SEQ ID NO: 5655993 - DNA, 25 bp, Homo sapien
aaactgaaatagcataaactcagcg

SEQ ID NO: 5655994 - DNA, 25 bp, Homo sapien
tcagcaaactgaaatagcataaact

SEQ ID NO: 5655995 - DNA, 25 bp, Homo sapien
aggattctcccgcaaacaagtgaaa

SEQ ID NO: 5655996 - DNA, 25 bp, Homo sapien
ggattctcccgcaaacaagtgaaat

SEQ ID NO: 5655997 - DNA, 25 bp, Homo sapien
tgaaatagcataaactcagcgtcga

SEQ ID NO: 5655998 - DNA, 25 bp, Homo sapien
tttgtggcacacacgtttttaactg

SEQ ID NO: 5655999 - DNA, 25 bp, Homo sapien
gttggatctatcttagtttggtaac

SEQ ID NO: 5656000 - DNA, 25 bp, Homo sapien
ggcacacacgtttttaactgttgga

SEQ ID NO: 5656001 - DNA, 25 bp, Homo sapien
cacgtttttaactgttggatctatc

SEQ ID NO: 5656002 - DNA, 25 bp, Homo sapien
cgttgaatggaatactatgccaatt

SEQ ID NO: 5656003 - DNA, 25 bp, Homo sapien
aattagcatttaccaccactctctg

SEQ ID NO: 5656004 - DNA, 25 bp, Homo sapien
taccaaactaagatagatccaacag

SEQ ID NO: 5656005 - DNA, 25 bp, Homo sapien
cagttaaaaacgtgtgtgccacaaa

SEQ ID NO: 5656006 - DNA, 25 bp, Homo sapien
cagagagtggtggtaaatgctaatt

SEQ ID NO: 5656007 - DNA, 25 bp, Homo sapien
aattggcatagtattccattcaacg

SEQ ID NO: 5656008 - DNA, 25 bp, Homo sapien
gatagatccaacagttaaaaacgtg

SEQ ID NO: 5656009 - DNA, 25 bp, Homo sapien
tccaacagttaaaaacgtgtgtgcc

SEQ ID NO: 5656010 - DNA, 25 bp, Homo sapien
aagtattcagaaatgttggttggca

SEQ ID NO: 5656011 - DNA, 25 bp, Homo sapien
gttggcatggaacaagtacttctga

SEQ ID NO: 5656012 - DNA, 25 bp, Homo sapien
aacaagtacttctgagcgcataggg

SEQ ID NO: 5656013 - DNA, 25 bp, Homo sapien
ggaacaagtacttctgagcgcatag

SEQ ID NO: 5656014 - DNA, 25 bp, Homo sapien
catggaacaagtacttctgagcgca

SEQ ID NO: 5656015 - DNA, 25 bp, Homo sapien
aagtacttctgagcgcatagggtgt

SEQ ID NO: 5656016 - DNA, 25 bp, Homo sapien
tgccaaccaacatttctgaatactt

SEQ ID NO: 5656017 - DNA, 25 bp, Homo sapien
tatgcgctcagaagtacttgttcca

SEQ ID NO: 5656018 - DNA, 25 bp, Homo sapien
acaccctatgcgctcagaagtactt

SEQ ID NO: 5656019 - DNA, 25 bp, Homo sapien
tcagaagtacttgttccatgccaac

SEQ ID NO: 5656020 - DNA, 25 bp, Homo sapien
gctcagaagtacttgttccatgcca

SEQ ID NO: 5656021 - DNA, 25 bp, Homo sapien
ccctatgcgctcagaagtacttgtt

SEQ ID NO: 5656022 - DNA, 25 bp, Homo sapien
aatgtatgtccaggattaaaatgga

SEQ ID NO: 5656023 - DNA, 25 bp, Homo sapien
tgggtgtattattctgtgcagagca

SEQ ID NO: 5656024 - DNA, 25 bp, Homo sapien
cagagcacttaaagcacgggcctaa

SEQ ID NO: 5656025 - DNA, 25 bp, Homo sapien
taaagcacgggcctaagaaatgtat

SEQ ID NO: 5656026 - DNA, 25 bp, Homo sapien
cacgggcctaagaaatgtatgtcca

SEQ ID NO: 5656027 - DNA, 25 bp, Homo sapien
tgtgcagagcacttaaagcacgggc

SEQ ID NO: 5656028 - DNA, 25 bp, Homo sapien
gacatacatttcttaggcccgtgct

SEQ ID NO: 5656029 - DNA, 25 bp, Homo sapien
taggcccgtgctttaagtgctctgc

SEQ ID NO: 5656030 - DNA, 25 bp, Homo sapien
tggacatacatttcttaggcccgtg

SEQ ID NO: 5656031 - DNA, 25 bp, Homo sapien
cgtgctttaagtgctctgcacagaa

SEQ ID NO: 5656032 - DNA, 25 bp, Homo sapien
tgctctgcacagaataatacaccca

SEQ ID NO: 5656033 - DNA, 25 bp, Homo sapien
tccattttaatcctggacatacatt

SEQ ID NO: 5656034 - DNA, 25 bp, Homo sapien
tttccctctcagaaatttaataaca

SEQ ID NO: 5656035 - DNA, 25 bp, Homo sapien
aatctctgacttgtgttcgctgttc

SEQ ID NO: 5656036 - DNA, 25 bp, Homo sapien
gtcttctctggagagcaatctctga

SEQ ID NO: 5656037 - DNA, 25 bp, Homo sapien
tctggagagcaatctctgacttgtg

SEQ ID NO: 5656038 - DNA, 25 bp, Homo sapien
gacttgtgttcgctgttcttttccc

SEQ ID NO: 5656039 - DNA, 25 bp, Homo sapien
agagcaatctctgacttgtgttcgc

SEQ ID NO: 5656040 - DNA, 25 bp, Homo sapien
gagggaaaagaacagcgaacacaag

SEQ ID NO: 5656041 - DNA, 25 bp, Homo sapien
cacaagtcagagattgctctccaga

SEQ ID NO: 5656042 - DNA, 25 bp, Homo sapien
tattaaatttctgagagggaaaaga

SEQ ID NO: 5656043 - DNA, 25 bp, Homo sapien
aaagaacagcgaacacaagtcagag

SEQ ID NO: 5656044 - DNA, 25 bp, Homo sapien
tcagagattgctctccagagaagac

SEQ ID NO: 5656045 - DNA, 25 bp, Homo sapien
gcgaacacaagtcagagattgctct

SEQ ID NO: 5656046 - DNA, 25 bp, Homo sapien
gggaagaatagcaacaggggctctt

SEQ ID NO: 5656047 - DNA, 25 bp, Homo sapien
tgccttgattactctccattgaaaa

SEQ ID NO: 5656048 - DNA, 25 bp, Homo sapien
aagagcccctgttgctattcttccc

SEQ ID NO: 5656049 - DNA, 25 bp, Homo sapien
ttttcaatggagagtaatcaaggca

SEQ ID NO: 5656050 - DNA, 25 bp, Homo sapien
caccccagtgttttgagaagggaag

SEQ ID NO: 5656051 - DNA, 25 bp, Homo sapien
cacctgttttacattcttgccttga

SEQ ID NO: 5656052 - DNA, 25 bp, Homo sapien
tctccattgaaaacaccccagtgtt

SEQ ID NO: 5656053 - DNA, 25 bp, Homo sapien
gaacctgacacctgttttacattct

SEQ ID NO: 5656054 - DNA, 25 bp, Homo sapien
tgccttgattactctccattgaaaa

SEQ ID NO: 5656055 - DNA, 25 bp, Homo sapien
ttgagaagggaagaatagcaacagg

SEQ ID NO: 5656056 - DNA, 25 bp, Homo sapien
gggtgttttcaatggagagtaatca

SEQ ID NO: 5656057 - DNA, 25 bp, Homo sapien
aagagcccctgttgctattcttccc

SEQ ID NO: 5656058 - DNA, 25 bp, Homo sapien
ttttcaatggagagtaatcaaggca

SEQ ID NO: 5656059 - DNA, 25 bp, Homo sapien
aatcaaggcaagaatgtaaaacagg

SEQ ID NO: 5656060 - DNA, 25 bp, Homo sapien
tattcttcccttctcaaaacactgg

SEQ ID NO: 5656061 - DNA, 25 bp, Homo sapien
caagaatgtaaaacaggtgtcaggt

SEQ ID NO: 5656062 - DNA, 25 bp, Homo sapien
gtcaacagcgtgcacccaccagatg

SEQ ID NO: 5656063 - DNA, 25 bp, Homo sapien
aatccatgtcaacagcgtgcaccca

SEQ ID NO: 5656064 - DNA, 25 bp, Homo sapien
gacccaccagatggaaactagaccc

SEQ ID NO: 5656065 - DNA, 25 bp, Homo sapien
tgttaaatccatgtcaacagcgtgc

SEQ ID NO: 5656066 - DNA, 25 bp, Homo sapien
taaatccatgtcaacagcgtgcacc

SEQ ID NO: 5656067 - DNA, 25 bp, Homo sapien
gggtgatgttaaatccatgtcaaca

SEQ ID NO: 5656068 - DNA, 25 bp, Homo sapien
caccagatggaaactagacccacca

SEQ ID NO: 5656069 - DNA, 25 bp, Homo sapien
accagatggaaactagacccaccag

SEQ ID NO: 5656070 - DNA, 25 bp, Homo sapien
acccaccagatggaaactagaccca

SEQ ID NO: 5656071 - DNA, 25 bp, Homo sapien
ccaccagatggaaactagacccacc

SEQ ID NO: 5656072 - DNA, 25 bp, Homo sapien
tggtgggtctagtttccatctggtg

SEQ ID NO: 5656073 - DNA, 25 bp, Homo sapien
tgggtctagtttccatctggtgggt

SEQ ID NO: 5656074 - DNA, 25 bp, Homo sapien
ctggtgggtctagtttccatctggt

SEQ ID NO: 5656075 - DNA, 25 bp, Homo sapien
ggtgggtctagtttccatctggtgg

SEQ ID NO: 5656076 - DNA, 25 bp, Homo sapien
tgcacgctgttgacatggatttaac

SEQ ID NO: 5656077 - DNA, 25 bp, Homo sapien
tgggtgcacgctgttgacatggatt

SEQ ID NO: 5656078 - DNA, 25 bp, Homo sapien
gggtctagtttccatctggtgggtc

SEQ ID NO: 5656079 - DNA, 25 bp, Homo sapien
tgttgacatggatttaacatcaccc

SEQ ID NO: 5656080 - DNA, 25 bp, Homo sapien
tctggtgggtgcacgctgttgacat

SEQ ID NO: 5656081 - DNA, 25 bp, Homo sapien
catctggtgggtgcacgctgttgac

SEQ ID NO: 5656082 - DNA, 25 bp, Homo sapien
gactattttcggatcaagttgtggt

SEQ ID NO: 5656083 - DNA, 25 bp, Homo sapien
gagagcagactattttcggatcaag

SEQ ID NO: 5656084 - DNA, 25 bp, Homo sapien
ttatatgtaaacatacctccttcct

SEQ ID NO: 5656085 - DNA, 25 bp, Homo sapien
tcggatcaagttgtggtagaatctc

SEQ ID NO: 5656086 - DNA, 25 bp, Homo sapien
caagttgtggtagaatctcttttaa

SEQ ID NO: 5656087 - DNA, 25 bp, Homo sapien
cccaggagagcagactattttcgga

SEQ ID NO: 5656088 - DNA, 25 bp, Homo sapien
caacttgatccgaaaatagtctgct

SEQ ID NO: 5656089 - DNA, 25 bp, Homo sapien
gagattctaccacaacttgatccga

SEQ ID NO: 5656090 - DNA, 25 bp, Homo sapien
ttgatccgaaaatagtctgctctcc

SEQ ID NO: 5656091 - DNA, 25 bp, Homo sapien
aggaaggaggtatgtttacatataa

SEQ ID NO: 5656092 - DNA, 25 bp, Homo sapien
tccgaaaatagtctgctctcctggg

SEQ ID NO: 5656093 - DNA, 25 bp, Homo sapien
ttaaaagagattctaccacaacttg

SEQ ID NO: 5656094 - DNA, 25 bp, Homo sapien
gactccgtatctggacatccctgag

SEQ ID NO: 5656095 - DNA, 25 bp, Homo sapien
ctccgtatctggacatccctgagtg

SEQ ID NO: 5656096 - DNA, 25 bp, Homo sapien
gggacaggtgactccgtatctggac

SEQ ID NO: 5656097 - DNA, 25 bp, Homo sapien
caggtgactccgtatctggacatcc

SEQ ID NO: 5656098 - DNA, 25 bp, Homo sapien
cgagtgtggcgaggtcacacctctc

SEQ ID NO: 5656099 - DNA, 25 bp, Homo sapien
ctcagctctgccgaattctagcaag

SEQ ID NO: 5656100 - DNA, 25 bp, Homo sapien
cagggatgtccagatacggagtcac

SEQ ID NO: 5656101 - DNA, 25 bp, Homo sapien
cactcagggatgtccagatacggag

SEQ ID NO: 5656102 - DNA, 25 bp, Homo sapien
tgtccagatacggagtcacctgtcc

SEQ ID NO: 5656103 - DNA, 25 bp, Homo sapien
gagaggtgtgacctcgccacactcg

SEQ ID NO: 5656104 - DNA, 25 bp, Homo sapien
cttgctagaattcggcagagctgag

SEQ ID NO: 5656105 - DNA, 25 bp, Homo sapien
tcacctgtccccgagaggtgtgacc

SEQ ID NO: 5656106 - DNA, 25 bp, Homo sapien
caagggaacaaccccagcattactt

SEQ ID NO: 5656107 - DNA, 25 bp, Homo sapien
ttaagctctcccagggcgcacctgc

SEQ ID NO: 5656108 - DNA, 25 bp, Homo sapien
gcattacttaagctctcccagggcg

SEQ ID NO: 5656109 - DNA, 25 bp, Homo sapien
cagcattacttaagctctcccaggg

SEQ ID NO: 5656110 - DNA, 25 bp, Homo sapien
attacttaagctctcccagggcgca

SEQ ID NO: 5656111 - DNA, 25 bp, Homo sapien
ttacttaagctctcccagggcgcac

SEQ ID NO: 5656112 - DNA, 25 bp, Homo sapien
gtgcgccctgggagagcttaagtaa

SEQ ID NO: 5656113 - DNA, 25 bp, Homo sapien
ccctgggagagcttaagtaatgctg

SEQ ID NO: 5656114 - DNA, 25 bp, Homo sapien
tgcgccctgggagagcttaagtaat

SEQ ID NO: 5656115 - DNA, 25 bp, Homo sapien
gcaggtgcgccctgggagagcttaa

SEQ ID NO: 5656116 - DNA, 25 bp, Homo sapien
cgccctgggagagcttaagtaatgc

SEQ ID NO: 5656117 - DNA, 25 bp, Homo sapien
gcgccctgggagagcttaagtaatg

SEQ ID NO: 5656118 - DNA, 25 bp, Homo sapien
tgcatagctgcccgtgtgcttggga

SEQ ID NO: 5656119 - DNA, 25 bp, Homo sapien
tggctagtgtcgaggcatgcatagc

SEQ ID NO: 5656120 - DNA, 25 bp, Homo sapien
gcatgcatagctgcccgtgtgcttg

SEQ ID NO: 5656121 - DNA, 25 bp, Homo sapien
tagtgtcgaggcatgcatagctgcc

SEQ ID NO: 5656122 - DNA, 25 bp, Homo sapien
tgtcgaggcatgcatagctgcccgt

SEQ ID NO: 5656123 - DNA, 25 bp, Homo sapien
gaggcatgcatagctgcccgtgtgc

SEQ ID NO: 5656124 - DNA, 25 bp, Homo sapien
gacactagccacctcccctgtcatg

SEQ ID NO: 5656125 - DNA, 25 bp, Homo sapien
acctcccctgtcatgcagagcttca

SEQ ID NO: 5656126 - DNA, 25 bp, Homo sapien
gctatgcatgcctcgacactagcca

SEQ ID NO: 5656127 - DNA, 25 bp, Homo sapien
cacgggcagctatgcatgcctcgac

SEQ ID NO: 5656128 - DNA, 25 bp, Homo sapien
caagcacacgggcagctatgcatgc

SEQ ID NO: 5656129 - DNA, 25 bp, Homo sapien
gcagctatgcatgcctcgacactag

SEQ ID NO: 5656130 - DNA, 25 bp, Homo sapien
gagaagtacctaggtgggaagtggc

SEQ ID NO: 5656131 - DNA, 25 bp, Homo sapien
agagaagtacctaggtgggaagtgg

SEQ ID NO: 5656132 - DNA, 25 bp, Homo sapien
aagagaagtacctaggtgggaagtg

SEQ ID NO: 5656133 - DNA, 25 bp, Homo sapien
cacttcccacctaggtacttctctt

SEQ ID NO: 5656134 - DNA, 25 bp, Homo sapien
ccacttcccacctaggtacttctct

SEQ ID NO: 5656135 - DNA, 25 bp, Homo sapien
gccacttcccacctaggtacttctc

SEQ ID NO: 5656136 - DNA, 25 bp, Homo sapien
gagaagtacctaggtgggaagtggc

SEQ ID NO: 5656137 - DNA, 25 bp, Homo sapien
caggctggtgggaagaggccgtccc

SEQ ID NO: 5656138 - DNA, 25 bp, Homo sapien
ccaccttcccctaaggcccacagtg

SEQ ID NO: 5656139 - DNA, 25 bp, Homo sapien
ctaggtgggaagtggcaggctggtg

SEQ ID NO: 5656140 - DNA, 25 bp, Homo sapien
cccagtaggagaaagagaagtacct

SEQ ID NO: 5656141 - DNA, 25 bp, Homo sapien
gacccagtaggagaaagagaagtac

SEQ ID NO: 5656142 - DNA, 25 bp, Homo sapien
cacttcccacctaggtacttctctt

SEQ ID NO: 5656143 - DNA, 25 bp, Homo sapien
agcctgccacttcccacctaggtac

SEQ ID NO: 5656144 - DNA, 25 bp, Homo sapien
gggacggcctcttcccaccagcctg

SEQ ID NO: 5656145 - DNA, 25 bp, Homo sapien
gtacttctctttctcctactgggtc

SEQ ID NO: 5656146 - DNA, 25 bp, Homo sapien
aggtacttctctttctcctactggg

SEQ ID NO: 5656147 - DNA, 25 bp, Homo sapien
gccacttcccacctaggtacttctc

SEQ ID NO: 5656148 - DNA, 25 bp, Homo sapien
aaatgcaaggtttggttccacctca

SEQ ID NO: 5656149 - DNA, 25 bp, Homo sapien
atgcaaggtttggttccacctcagt

SEQ ID NO: 5656150 - DNA, 25 bp, Homo sapien
tgcaaggtttggttccacctcagtt

SEQ ID NO: 5656151 - DNA, 25 bp, Homo sapien
aatgcaaggtttggttccacctcag

SEQ ID NO: 5656152 - DNA, 25 bp, Homo sapien
aactgaggtggaaccaaaccttgca

SEQ ID NO: 5656153 - DNA, 25 bp, Homo sapien
actgaggtggaaccaaaccttgcat

SEQ ID NO: 5656154 - DNA, 25 bp, Homo sapien
ctgaggtggaaccaaaccttgcatt

SEQ ID NO: 5656155 - DNA, 25 bp, Homo sapien
tgaggtggaaccaaaccttgcattt

SEQ ID NO: 5656156 - DNA, 25 bp, Homo sapien
tttggttccacctcagtttacctgc

SEQ ID NO: 5656157 - DNA, 25 bp, Homo sapien
cagtttacctgcttgatcctgcagt

SEQ ID NO: 5656158 - DNA, 25 bp, Homo sapien
aaatgcaaggtttggttccacctca

SEQ ID NO: 5656159 - DNA, 25 bp, Homo sapien
tgcaaggtttggttccacctcagtt

SEQ ID NO: 5656160 - DNA, 25 bp, Homo sapien
gcttgatcctgcagttccctcatgt

SEQ ID NO: 5656161 - DNA, 25 bp, Homo sapien
catggaaataatcgccaaggaggag

SEQ ID NO: 5656162 - DNA, 25 bp, Homo sapien
gcaggtaaactgaggtggaaccaaa

SEQ ID NO: 5656163 - DNA, 25 bp, Homo sapien
aactgaggtggaaccaaaccttgca

SEQ ID NO: 5656164 - DNA, 25 bp, Homo sapien
actgcaggatcaagcaggtaaactg

SEQ ID NO: 5656165 - DNA, 25 bp, Homo sapien
tgaggtggaaccaaaccttgcattt

SEQ ID NO: 5656166 - DNA, 25 bp, Homo sapien
gacatgagggaactgcaggatcaag

SEQ ID NO: 5656167 - DNA, 25 bp, Homo sapien
catgagggaactgcaggatcaagca

SEQ ID NO: 5656168 - DNA, 25 bp, Homo sapien
aaataccacgcattcagagaaggtg

SEQ ID NO: 5656169 - DNA, 25 bp, Homo sapien
taaataccacgcattcagagaaggt

SEQ ID NO: 5656170 - DNA, 25 bp, Homo sapien
ttaaataccacgcattcagagaagg

SEQ ID NO: 5656171 - DNA, 25 bp, Homo sapien
ataccacgcattcagagaaggtggc

SEQ ID NO: 5656172 - DNA, 25 bp, Homo sapien
ccagttttaaataccacgcattcag

SEQ ID NO: 5656173 - DNA, 25 bp, Homo sapien
agttttaaataccacgcattcagag

SEQ ID NO: 5656174 - DNA, 25 bp, Homo sapien
caccttctctgaatgcgtggtattt

SEQ ID NO: 5656175 - DNA, 25 bp, Homo sapien
tctctgaatgcgtggtatttaaaac

SEQ ID NO: 5656176 - DNA, 25 bp, Homo sapien
gccaccttctctgaatgcgtggtat

SEQ ID NO: 5656177 - DNA, 25 bp, Homo sapien
ctgaatgcgtggtatttaaaactgg

SEQ ID NO: 5656178 - DNA, 25 bp, Homo sapien
ccttctctgaatgcgtggtatttaa

SEQ ID NO: 5656179 - DNA, 25 bp, Homo sapien
tctgaatgcgtggtatttaaaactg

SEQ ID NO: 5656180 - DNA, 25 bp, Homo sapien
tcttgaactcctggcctcaaatgat

SEQ ID NO: 5656181 - DNA, 25 bp, Homo sapien
gtcttgaactcctggcctcaaatga

SEQ ID NO: 5656182 - DNA, 25 bp, Homo sapien
caaatgatctgcctacatcggcttc

SEQ ID NO: 5656183 - DNA, 25 bp, Homo sapien
ctcaaatgatctgcctacatcggct

SEQ ID NO: 5656184 - DNA, 25 bp, Homo sapien
tcaaatgatctgcctacatcggctt

SEQ ID NO: 5656185 - DNA, 25 bp, Homo sapien
aaatgatctgcctacatcggcttcc

SEQ ID NO: 5656186 - DNA, 25 bp, Homo sapien
atcatttgaggccaggagttcaaga

SEQ ID NO: 5656187 - DNA, 25 bp, Homo sapien
agccgatgtaggcagatcatttgag

SEQ ID NO: 5656188 - DNA, 25 bp, Homo sapien
tcatttgaggccaggagttcaagac

SEQ ID NO: 5656189 - DNA, 25 bp, Homo sapien
aagccgatgtaggcagatcatttga

SEQ ID NO: 5656190 - DNA, 25 bp, Homo sapien
gaagccgatgtaggcagatcatttg

SEQ ID NO: 5656191 - DNA, 25 bp, Homo sapien
ggaagccgatgtaggcagatcattt

SEQ ID NO: 5656192 - DNA, 25 bp, Homo sapien
tgcacacgattagaaagttcaaacg

SEQ ID NO: 5656193 - DNA, 25 bp, Homo sapien
gattagaaagttcaaacgacacgaa

SEQ ID NO: 5656194 - DNA, 25 bp, Homo sapien
caaacgacacgaaaatgtatacttc

SEQ ID NO: 5656195 - DNA, 25 bp, Homo sapien
actggacatgcacacgattagaaag

SEQ ID NO: 5656196 - DNA, 25 bp, Homo sapien
gacatgcacacgattagaaagttca

SEQ ID NO: 5656197 - DNA, 25 bp, Homo sapien
taaaaactggacatgcacacgatta

SEQ ID NO: 5656198 - DNA, 25 bp, Homo sapien
cgtttgaactttctaatcgtgtgca

SEQ ID NO: 5656199 - DNA, 25 bp, Homo sapien
gaactttctaatcgtgtgcatgtcc

SEQ ID NO: 5656200 - DNA, 25 bp, Homo sapien
actttctaatcgtgtgcatgtccag

SEQ ID NO: 5656201 - DNA, 25 bp, Homo sapien
gaagtatacattttcgtgtcgtttg

SEQ ID NO: 5656202 - DNA, 25 bp, Homo sapien
taatcgtgtgcatgtccagttttta

SEQ ID NO: 5656203 - DNA, 25 bp, Homo sapien
tcgtgtcgtttgaactttctaatcg

SEQ ID NO: 5656204 - DNA, 25 bp, Homo sapien
ttttatgtatacatggtatcccatg

SEQ ID NO: 5656205 - DNA, 25 bp, Homo sapien
tatgtatacatggtatcccatggta

SEQ ID NO: 5656206 - DNA, 25 bp, Homo sapien
cattttatgtatacatggtatccca

SEQ ID NO: 5656207 - DNA, 25 bp, Homo sapien
ttatgtatacatggtatcccatggt

SEQ ID NO: 5656208 - DNA, 25 bp, Homo sapien
tttatgtatacatggtatcccatgg

SEQ ID NO: 5656209 - DNA, 25 bp, Homo sapien
tgtatacatggtatcccatggtata

SEQ ID NO: 5656210 - DNA, 25 bp, Homo sapien
accatgggataccatgtatacataa

SEQ ID NO: 5656211 - DNA, 25 bp, Homo sapien
ccatgggataccatgtatacataaa

SEQ ID NO: 5656212 - DNA, 25 bp, Homo sapien
catgggataccatgtatacataaaa

SEQ ID NO: 5656213 - DNA, 25 bp, Homo sapien
tataccatgggataccatgtataca

SEQ ID NO: 5656214 - DNA, 25 bp, Homo sapien
tgggataccatgtatacataaaatg

SEQ ID NO: 5656215 - DNA, 25 bp, Homo sapien
taccatgggataccatgtatacata

SEQ ID NO: 5656216 - DNA, 25 bp, Homo sapien
tgtatacatggtatcccatggtata

SEQ ID NO: 5656217 - DNA, 25 bp, Homo sapien
gcaaacgacatgatctcatttcatt

SEQ ID NO: 5656218 - DNA, 25 bp, Homo sapien
tatgtatacatggtatcccatggta

SEQ ID NO: 5656219 - DNA, 25 bp, Homo sapien
cattttatgtatacatggtatccca

SEQ ID NO: 5656220 - DNA, 25 bp, Homo sapien
ggtatcccatggtatatatgtacat

SEQ ID NO: 5656221 - DNA, 25 bp, Homo sapien
tttatgtatacatggtatcccatgg

SEQ ID NO: 5656222 - DNA, 25 bp, Homo sapien
aatgaaatgagatcatgtcgtttgc

SEQ ID NO: 5656223 - DNA, 25 bp, Homo sapien
catgggataccatgtatacataaaa

SEQ ID NO: 5656224 - DNA, 25 bp, Homo sapien
catatataccatgggataccatgta

SEQ ID NO: 5656225 - DNA, 25 bp, Homo sapien
tataccatgggataccatgtataca

SEQ ID NO: 5656226 - DNA, 25 bp, Homo sapien
tgggataccatgtatacataaaatg

SEQ ID NO: 5656227 - DNA, 25 bp, Homo sapien
taccatgggataccatgtatacata

SEQ ID NO: 5656228 - DNA, 25 bp, Homo sapien
ccaccacgccgggtttctctcccag

SEQ ID NO: 5656229 - DNA, 25 bp, Homo sapien
tgagccaccacgccgggtttctctc

SEQ ID NO: 5656230 - DNA, 25 bp, Homo sapien
caccacgccgggtttctctcccagt

SEQ ID NO: 5656231 - DNA, 25 bp, Homo sapien
gtgagccaccacgccgggtttctct

SEQ ID NO: 5656232 - DNA, 25 bp, Homo sapien
ctcccaaagtgctgggattacaggt

SEQ ID NO: 5656233 - DNA, 25 bp, Homo sapien
gagccaccacgccgggtttctctcc

SEQ ID NO: 5656234 - DNA, 25 bp, Homo sapien
tgggagagaaacccggcgtggtggc

SEQ ID NO: 5656235 - DNA, 25 bp, Homo sapien
ctgggagagaaacccggcgtggtgg

SEQ ID NO: 5656236 - DNA, 25 bp, Homo sapien
ggagagaaacccggcgtggtggctc

SEQ ID NO: 5656237 - DNA, 25 bp, Homo sapien
agagaaacccggcgtggtggctcac

SEQ ID NO: 5656238 - DNA, 25 bp, Homo sapien
gagagaaacccggcgtggtggctca

SEQ ID NO: 5656239 - DNA, 25 bp, Homo sapien
actgggagagaaacccggcgtggtg

SEQ ID NO: 5656240 - DNA, 25 bp, Homo sapien
cataggcactggaatggtgatccgt

SEQ ID NO: 5656241 - DNA, 25 bp, Homo sapien
tagaaggatttacataggcactgga

SEQ ID NO: 5656242 - DNA, 25 bp, Homo sapien
tggttttatgcagtgggagcgttgc

SEQ ID NO: 5656243 - DNA, 25 bp, Homo sapien
taggcactggaatggtgatccgtct

SEQ ID NO: 5656244 - DNA, 25 bp, Homo sapien
gagcgttgcagtgtgaaggcgtctt

SEQ ID NO: 5656245 - DNA, 25 bp, Homo sapien
tctagaaggatttacataggcactg

SEQ ID NO: 5656246 - DNA, 25 bp, Homo sapien
aagacgccttcacactgcaacgctc

SEQ ID NO: 5656247 - DNA, 25 bp, Homo sapien
cagtgcctatgtaaatccttctaga

SEQ ID NO: 5656248 - DNA, 25 bp, Homo sapien
gacggatcaccattccagtgcctat

SEQ ID NO: 5656249 - DNA, 25 bp, Homo sapien
tccagtgcctatgtaaatccttcta

SEQ ID NO: 5656250 - DNA, 25 bp, Homo sapien
gcaacgctcccactgcataaaacca

SEQ ID NO: 5656251 - DNA, 25 bp, Homo sapien
agacggatcaccattccagtgccta

SEQ ID NO: 5656252 - DNA, 25 bp, Homo sapien
tttctggttctcatatttaggtctc

SEQ ID NO: 5656253 - DNA, 25 bp, Homo sapien
tccgaggtcatgaagacttgccctt

SEQ ID NO: 5656254 - DNA, 25 bp, Homo sapien
ctaagaatcccttaccaaatccgag

SEQ ID NO: 5656255 - DNA, 25 bp, Homo sapien
ccgaggtcatgaagacttgccctta

SEQ ID NO: 5656256 - DNA, 25 bp, Homo sapien
ttctggttctcatatttaggtctct

SEQ ID NO: 5656257 - DNA, 25 bp, Homo sapien
tcagatctaagaatcccttaccaaa

SEQ ID NO: 5656258 - DNA, 25 bp, Homo sapien
agagacctaaatatgagaaccagaa

SEQ ID NO: 5656259 - DNA, 25 bp, Homo sapien
gagacctaaatatgagaaccagaaa

SEQ ID NO: 5656260 - DNA, 25 bp, Homo sapien
aagggcaagtcttcatgacctcgga

SEQ ID NO: 5656261 - DNA, 25 bp, Homo sapien
taagggcaagtcttcatgacctcgg

SEQ ID NO: 5656262 - DNA, 25 bp, Homo sapien
tttggtaagggattcttagatctga

SEQ ID NO: 5656263 - DNA, 25 bp, Homo sapien
ctcggatttggtaagggattcttag

SEQ ID NO: 5656264 - DNA, 25 bp, Homo sapien
gctgattttttgtactttgtgtaga

SEQ ID NO: 5656265 - DNA, 25 bp, Homo sapien
cacaggtacgcgccaccacgcttgg

SEQ ID NO: 5656266 - DNA, 25 bp, Homo sapien
ccacaggtacgcgccaccacgcttg

SEQ ID NO: 5656267 - DNA, 25 bp, Homo sapien
ctgattttttgtactttgtgtagag

SEQ ID NO: 5656268 - DNA, 25 bp, Homo sapien
ggctgattttttgtactttgtgtag

SEQ ID NO: 5656269 - DNA, 25 bp, Homo sapien
tacgcgccaccacgcttggctgatt

SEQ ID NO: 5656270 - DNA, 25 bp, Homo sapien
ctctacacaaagtacaaaaaatcag

SEQ ID NO: 5656271 - DNA, 25 bp, Homo sapien
ccaagcgtggtggcgcgtacctgtg

SEQ ID NO: 5656272 - DNA, 25 bp, Homo sapien
ctacacaaagtacaaaaaatcagcc

SEQ ID NO: 5656273 - DNA, 25 bp, Homo sapien
caagcgtggtggcgcgtacctgtgg

SEQ ID NO: 5656274 - DNA, 25 bp, Homo sapien
aatcagccaagcgtggtggcgcgta

SEQ ID NO: 5656275 - DNA, 25 bp, Homo sapien
tctacacaaagtacaaaaaatcagc

SEQ ID NO: 5656276 - DNA, 25 bp, Homo sapien
tggactctgagcagatgtatgattt

SEQ ID NO: 5656277 - DNA, 25 bp, Homo sapien
aaatcatacatctgctcagagtcca

SEQ ID NO: 5656278 - DNA, 25 bp, Homo sapien
ttctttttagtttcttgatagtgtc

SEQ ID NO: 5656279 - DNA, 25 bp, Homo sapien
gtcctttgaagcacaggatcagacg

SEQ ID NO: 5656280 - DNA, 25 bp, Homo sapien
gactctgagcagatgtatgatttgc

SEQ ID NO: 5656281 - DNA, 25 bp, Homo sapien
tagtttcttgatagtgtcctttgaa

SEQ ID NO: 5656282 - DNA, 25 bp, Homo sapien
tggactctgagcagatgtatgattt

SEQ ID NO: 5656283 - DNA, 25 bp, Homo sapien
cctttgaagcacaggatcagacgtt

SEQ ID NO: 5656284 - DNA, 25 bp, Homo sapien
gcttcaaaggacactatcaagaaac

SEQ ID NO: 5656285 - DNA, 25 bp, Homo sapien
aacgtctgatcctgtgcttcaaagg

SEQ ID NO: 5656286 - DNA, 25 bp, Homo sapien
aaatcatacatctgctcagagtcca

SEQ ID NO: 5656287 - DNA, 25 bp, Homo sapien
ttgcaaatcatacatctgctcagag

SEQ ID NO: 5656288 - DNA, 25 bp, Homo sapien
gacactatcaagaaactaaaaagaa

SEQ ID NO: 5656289 - DNA, 25 bp, Homo sapien
caaatcatacatctgctcagagtcc

SEQ ID NO: 5656290 - DNA, 25 bp, Homo sapien
cattttcttaatgaccagtgatgtt

SEQ ID NO: 5656291 - DNA, 25 bp, Homo sapien
tcttaatgaccagtgatgttgaata

SEQ ID NO: 5656292 - DNA, 25 bp, Homo sapien
gcttgttgggccatttgtatatgtt

SEQ ID NO: 5656293 - DNA, 25 bp, Homo sapien
gaccagtgatgttgaatatttgttc

SEQ ID NO: 5656294 - DNA, 25 bp, Homo sapien
tatttgttcatgtgcttgttgggcc

SEQ ID NO: 5656295 - DNA, 25 bp, Homo sapien
ttgggccatttgtatatgtttggag

SEQ ID NO: 5656296 - DNA, 25 bp, Homo sapien
ggcccaacaagcacatgaacaaata

SEQ ID NO: 5656297 - DNA, 25 bp, Homo sapien
gaacaaatattcaacatcactggtc

SEQ ID NO: 5656298 - DNA, 25 bp, Homo sapien
ctccaaacatatacaaatggcccaa

SEQ ID NO: 5656299 - DNA, 25 bp, Homo sapien
caagcacatgaacaaatattcaaca

SEQ ID NO: 5656300 - DNA, 25 bp, Homo sapien
caaacatatacaaatggcccaacaa

SEQ ID NO: 5656301 - DNA, 25 bp, Homo sapien
caacatcactggtcattaagaaaat

SEQ ID NO: 5656302 - DNA, 25 bp, Homo sapien
tagaagtgagctggcagggtcatca

SEQ ID NO: 5656303 - DNA, 25 bp, Homo sapien
aagtgagctggcagggtcatcaggt

SEQ ID NO: 5656304 - DNA, 25 bp, Homo sapien
gaagtgagctggcagggtcatcagg

SEQ ID NO: 5656305 - DNA, 25 bp, Homo sapien
tgtgtaattctagggggacatgttt

SEQ ID NO: 5656306 - DNA, 25 bp, Homo sapien
ctagaagtgagctggcagggtcatc

SEQ ID NO: 5656307 - DNA, 25 bp, Homo sapien
ttgtgtgtaattctagggggacatg

SEQ ID NO: 5656308 - DNA, 25 bp, Homo sapien
aaacatgtccccctagaattacaca

SEQ ID NO: 5656309 - DNA, 25 bp, Homo sapien
acctgatgaccctgccagctcactt

SEQ ID NO: 5656310 - DNA, 25 bp, Homo sapien
gatgaccctgccagctcacttctag

SEQ ID NO: 5656311 - DNA, 25 bp, Homo sapien
tgatgaccctgccagctcacttcta

SEQ ID NO: 5656312 - DNA, 25 bp, Homo sapien
catgtccccctagaattacacacaa

SEQ ID NO: 5656313 - DNA, 25 bp, Homo sapien
tgaaaacatgtccccctagaattac

SEQ ID NO: 5656314 - DNA, 25 bp, Homo sapien
gtggtgagctgtcatcaagccattg

SEQ ID NO: 5656315 - DNA, 25 bp, Homo sapien
gctgtggtgagctgtcatcaagcca

SEQ ID NO: 5656316 - DNA, 25 bp, Homo sapien
ggtgagctgtcatcaagccattgca

SEQ ID NO: 5656317 - DNA, 25 bp, Homo sapien
ctgtggtgagctgtcatcaagccat

SEQ ID NO: 5656318 - DNA, 25 bp, Homo sapien
tgtggtgagctgtcatcaagccatt

SEQ ID NO: 5656319 - DNA, 25 bp, Homo sapien
tggtgagctgtcatcaagccattgc

SEQ ID NO: 5656320 - DNA, 25 bp, Homo sapien
caatggcttgatgacagctcaccac

SEQ ID NO: 5656321 - DNA, 25 bp, Homo sapien
tgcaatggcttgatgacagctcacc

SEQ ID NO: 5656322 - DNA, 25 bp, Homo sapien
tggcttgatgacagctcaccacagc

SEQ ID NO: 5656323 - DNA, 25 bp, Homo sapien
atggcttgatgacagctcaccacag

SEQ ID NO: 5656324 - DNA, 25 bp, Homo sapien
gcaatggcttgatgacagctcacca

SEQ ID NO: 5656325 - DNA, 25 bp, Homo sapien
aatggcttgatgacagctcaccaca

SEQ ID NO: 5656326 - DNA, 25 bp, Homo sapien
atccttcggctgtggcctcccaaag

SEQ ID NO: 5656327 - DNA, 25 bp, Homo sapien
tcactatgttgcgtaggctagtctt

SEQ ID NO: 5656328 - DNA, 25 bp, Homo sapien
ggctcaagcgatccttcggctgtgg

SEQ ID NO: 5656329 - DNA, 25 bp, Homo sapien
tcaagcgatccttcggctgtggcct

SEQ ID NO: 5656330 - DNA, 25 bp, Homo sapien
tccttcggctgtggcctcccaaagt

SEQ ID NO: 5656331 - DNA, 25 bp, Homo sapien
ctatgttgcgtaggctagtcttgaa

SEQ ID NO: 5656332 - DNA, 25 bp, Homo sapien
ccacagccgaaggatcgcttgagcc

SEQ ID NO: 5656333 - DNA, 25 bp, Homo sapien
aggccacagccgaaggatcgcttga

SEQ ID NO: 5656334 - DNA, 25 bp, Homo sapien
aagactagcctacgcaacatagtga

SEQ ID NO: 5656335 - DNA, 25 bp, Homo sapien
ttcaagactagcctacgcaacatag

SEQ ID NO: 5656336 - DNA, 25 bp, Homo sapien
actttgggaggccacagccgaagga

SEQ ID NO: 5656337 - DNA, 25 bp, Homo sapien
ctttgggaggccacagccgaaggat

SEQ ID NO: 5656338 - DNA, 25 bp, Homo sapien
gccgagtgacttcctgtgttgaaaa

SEQ ID NO: 5656339 - DNA, 25 bp, Homo sapien
gaggccgagtgacttcctgtgttga

SEQ ID NO: 5656340 - DNA, 25 bp, Homo sapien
cacacaccacgacacctggaatccc

SEQ ID NO: 5656341 - DNA, 25 bp, Homo sapien
ggccgagtgacttcctgtgttgaaa

SEQ ID NO: 5656342 - DNA, 25 bp, Homo sapien
gcacacaccacgacacctggaatcc

SEQ ID NO: 5656343 - DNA, 25 bp, Homo sapien
aggccgagtgacttcctgtgttgaa

SEQ ID NO: 5656344 - DNA, 25 bp, Homo sapien
ggattccaggtgtcgtggtgtgtgc

SEQ ID NO: 5656345 - DNA, 25 bp, Homo sapien
ttttcaacacaggaagtcactcggc

SEQ ID NO: 5656346 - DNA, 25 bp, Homo sapien
tttcaacacaggaagtcactcggcc

SEQ ID NO: 5656347 - DNA, 25 bp, Homo sapien
tcaacacaggaagtcactcggcctc

SEQ ID NO: 5656348 - DNA, 25 bp, Homo sapien
ttcaacacaggaagtcactcggcct

SEQ ID NO: 5656349 - DNA, 25 bp, Homo sapien
gggattccaggtgtcgtggtgtgtg

SEQ ID NO: 5656350 - DNA, 25 bp, Homo sapien
tagcaattccaggtaaagatatttt

SEQ ID NO: 5656351 - DNA, 25 bp, Homo sapien
ctagcaattccaggtaaagatattt

SEQ ID NO: 5656352 - DNA, 25 bp, Homo sapien
aaaatatctttacctggaattgcta

SEQ ID NO: 5656353 - DNA, 25 bp, Homo sapien
aaatatctttacctggaattgctag

SEQ ID NO: 5656354 - DNA, 25 bp, Homo sapien
caattccaggtaaagatatttttag

SEQ ID NO: 5656355 - DNA, 25 bp, Homo sapien
cccgccctgaagttctgtaatttga

SEQ ID NO: 5656356 - DNA, 25 bp, Homo sapien
gttctgtaatttgatgctcttttaa

SEQ ID NO: 5656357 - DNA, 25 bp, Homo sapien
ctagcaattccaggtaaagatattt

SEQ ID NO: 5656358 - DNA, 25 bp, Homo sapien
acattagcctagaaagacctattgg

SEQ ID NO: 5656359 - DNA, 25 bp, Homo sapien
ggctttcccgccctgaagttctgta

SEQ ID NO: 5656360 - DNA, 25 bp, Homo sapien
taaaagagcatcaaattacagaact

SEQ ID NO: 5656361 - DNA, 25 bp, Homo sapien
taaaaatatctttacctggaattgc

SEQ ID NO: 5656362 - DNA, 25 bp, Homo sapien
ccaataggtctttctaggctaatgt

SEQ ID NO: 5656363 - DNA, 25 bp, Homo sapien
tcaaattacagaacttcagggcggg

SEQ ID NO: 5656364 - DNA, 25 bp, Homo sapien
tacagaacttcagggcgggaaagcc

SEQ ID NO: 5656365 - DNA, 25 bp, Homo sapien
aaatatctttacctggaattgctag

SEQ ID NO: 5656366 - DNA, 25 bp, Homo sapien
cctcccatgtaacagattacaggtg

SEQ ID NO: 5656367 - DNA, 25 bp, Homo sapien
ctcccatgtaacagattacaggtgc

SEQ ID NO: 5656368 - DNA, 25 bp, Homo sapien
tcccatgtaacagattacaggtgcc

SEQ ID NO: 5656369 - DNA, 25 bp, Homo sapien
tcagcctcccatgtaacagattaca

SEQ ID NO: 5656370 - DNA, 25 bp, Homo sapien
ccatgtaacagattacaggtgcctg

SEQ ID NO: 5656371 - DNA, 25 bp, Homo sapien
cccatgtaacagattacaggtgcct

SEQ ID NO: 5656372 - DNA, 25 bp, Homo sapien
gcacctgtaatctgttacatgggag

SEQ ID NO: 5656373 - DNA, 25 bp, Homo sapien
caggcacctgtaatctgttacatgg

SEQ ID NO: 5656374 - DNA, 25 bp, Homo sapien
aggcacctgtaatctgttacatggg

SEQ ID NO: 5656375 - DNA, 25 bp, Homo sapien
ggcacctgtaatctgttacatggga

SEQ ID NO: 5656376 - DNA, 25 bp, Homo sapien
cacctgtaatctgttacatgggagg

SEQ ID NO: 5656377 - DNA, 25 bp, Homo sapien
tgtaatctgttacatgggaggctga

SEQ ID NO: 5656378 - DNA, 25 bp, Homo sapien
atgcaatatgaggtcgctgaggctg

SEQ ID NO: 5656379 - DNA, 25 bp, Homo sapien
cgtcagaccctttgaaacacatagg

SEQ ID NO: 5656380 - DNA, 25 bp, Homo sapien
cctttgaaacacataggaatcacct

SEQ ID NO: 5656381 - DNA, 25 bp, Homo sapien
tccatgcaatatgaggtcgctgagg

SEQ ID NO: 5656382 - DNA, 25 bp, Homo sapien
tgaaacgtcagaccctttgaaacac

SEQ ID NO: 5656383 - DNA, 25 bp, Homo sapien
taggaatcaccttaggcaaacattt

SEQ ID NO: 5656384 - DNA, 25 bp, Homo sapien
cctcagcgacctcatattgcatgga

SEQ ID NO: 5656385 - DNA, 25 bp, Homo sapien
aaggtgattcctatgtgtttcaaag

SEQ ID NO: 5656386 - DNA, 25 bp, Homo sapien
cctatgtgtttcaaagggtctgacg

SEQ ID NO: 5656387 - DNA, 25 bp, Homo sapien
cagcctcagcgacctcatattgcat

SEQ ID NO: 5656388 - DNA, 25 bp, Homo sapien
taaatgtttgcctaaggtgattcct

SEQ ID NO: 5656389 - DNA, 25 bp, Homo sapien
tgtttcaaagggtctgacgtttcat

SEQ ID NO: 5656390 - DNA, 25 bp, Homo sapien
tatcaatctggacttacggattctt

SEQ ID NO: 5656391 - DNA, 25 bp, Homo sapien
caatctggacttacggattctttta

SEQ ID NO: 5656392 - DNA, 25 bp, Homo sapien
tatgtttatcaatctggacttacgg

SEQ ID NO: 5656393 - DNA, 25 bp, Homo sapien
ggtgtatatgtttatcaatctggac

SEQ ID NO: 5656394 - DNA, 25 bp, Homo sapien
tgtttatcaatctggacttacggat

SEQ ID NO: 5656395 - DNA, 25 bp, Homo sapien
tttatcaatctggacttacggattc

SEQ ID NO: 5656396 - DNA, 25 bp, Homo sapien
gtccagattgataaacatatacacc

SEQ ID NO: 5656397 - DNA, 25 bp, Homo sapien
cgtaagtccagattgataaacatat

SEQ ID NO: 5656398 - DNA, 25 bp, Homo sapien
taaaagaatccgtaagtccagattg

SEQ ID NO: 5656399 - DNA, 25 bp, Homo sapien
gaatccgtaagtccagattgataaa

SEQ ID NO: 5656400 - DNA, 25 bp, Homo sapien
aagaatccgtaagtccagattgata

SEQ ID NO: 5656401 - DNA, 25 bp, Homo sapien
tccgtaagtccagattgataaacat

SEQ ID NO: 5656402 - DNA, 25 bp, Homo sapien
attgaaagtttatgggaggatgtgc

SEQ ID NO: 5656403 - DNA, 25 bp, Homo sapien
cttgagtatccatggagtttggtac

SEQ ID NO: 5656404 - DNA, 25 bp, Homo sapien
tgcaagtacattttgtatcagggac

SEQ ID NO: 5656405 - DNA, 25 bp, Homo sapien
tctagagatgattgaaagtttatgg

SEQ ID NO: 5656406 - DNA, 25 bp, Homo sapien
gtacattttgtatcagggacttgag

SEQ ID NO: 5656407 - DNA, 25 bp, Homo sapien
tgtgcataggttatttgcaagtaca

SEQ ID NO: 5656408 - DNA, 25 bp, Homo sapien
gtaccaaactccatggatactcaag

SEQ ID NO: 5656409 - DNA, 25 bp, Homo sapien
gtccctgatacaaaatgtacttgca

SEQ ID NO: 5656410 - DNA, 25 bp, Homo sapien
gcacatcctcccataaactttcaat

SEQ ID NO: 5656411 - DNA, 25 bp, Homo sapien
aaatgtacttgcaaataacctatgc

SEQ ID NO: 5656412 - DNA, 25 bp, Homo sapien
tcaagtccctgatacaaaatgtact

SEQ ID NO: 5656413 - DNA, 25 bp, Homo sapien
ccataaactttcaatcatctctaga

SEQ ID NO: 5656414 - DNA, 25 bp, Homo sapien
atagtactatctaacatacattgtc

SEQ ID NO: 5656415 - DNA, 25 bp, Homo sapien
acagttatcacactcagtttaattt

SEQ ID NO: 5656416 - DNA, 25 bp, Homo sapien
tacctgaattgttccaataatatcc

SEQ ID NO: 5656417 - DNA, 25 bp, Homo sapien
taaatacctgaattgttccaataat

SEQ ID NO: 5656418 - DNA, 25 bp, Homo sapien
atacattgtccaactttaaatacct

SEQ ID NO: 5656419 - DNA, 25 bp, Homo sapien
tctaacatacattgtccaactttaa

SEQ ID NO: 5656420 - DNA, 25 bp, Homo sapien
taaagttggacaatgtatgttagat

SEQ ID NO: 5656421 - DNA, 25 bp, Homo sapien
aggtatttaaagttggacaatgtat

SEQ ID NO: 5656422 - DNA, 25 bp, Homo sapien
ggatattattggaacaattcaggta

SEQ ID NO: 5656423 - DNA, 25 bp, Homo sapien
aaattaaactgagtgtgataactgt

SEQ ID NO: 5656424 - DNA, 25 bp, Homo sapien
tattattggaacaattcaggtattt

SEQ ID NO: 5656425 - DNA, 25 bp, Homo sapien
gacaatgtatgttagatagtactat

SEQ ID NO: 5656426 - DNA, 25 bp, Homo sapien
atggagtgtgtagcacagtcctagg

SEQ ID NO: 5656427 - DNA, 25 bp, Homo sapien
gagtgtgtagcacagtcctaggttg

SEQ ID NO: 5656428 - DNA, 25 bp, Homo sapien
cctaggttgtgtagtagagagagac

SEQ ID NO: 5656429 - DNA, 25 bp, Homo sapien
tgtagtagagagagactataatgga

SEQ ID NO: 5656430 - DNA, 25 bp, Homo sapien
agtgtgtagcacagtcctaggttgt

SEQ ID NO: 5656431 - DNA, 25 bp, Homo sapien
cagtcctaggttgtgtagtagagag

SEQ ID NO: 5656432 - DNA, 25 bp, Homo sapien
tgtgtagtagagagagactataatg

SEQ ID NO: 5656433 - DNA, 25 bp, Homo sapien
cattatagtctctctctactacaca

SEQ ID NO: 5656434 - DNA, 25 bp, Homo sapien
tccattatagtctctctctactaca

SEQ ID NO: 5656435 - DNA, 25 bp, Homo sapien
tctctactacacaacctaggactgt

SEQ ID NO: 5656436 - DNA, 25 bp, Homo sapien
caacctaggactgtgctacacactc

SEQ ID NO: 5656437 - DNA, 25 bp, Homo sapien
acaacctaggactgtgctacacact

SEQ ID NO: 5656438 - DNA, 25 bp, Homo sapien
tctactacacaacctaggactgtgc

SEQ ID NO: 5656439 - DNA, 25 bp, Homo sapien
cctaggactgtgctacacactccat

SEQ ID NO: 5656440 - DNA, 25 bp, Homo sapien
ttatcaatggacgtgctgttccaca

SEQ ID NO: 5656441 - DNA, 25 bp, Homo sapien
tattatcaatggacgtgctgttcca

SEQ ID NO: 5656442 - DNA, 25 bp, Homo sapien
tccacagtgtagattggggaaaaat

SEQ ID NO: 5656443 - DNA, 25 bp, Homo sapien
tacagtattatcaatggacgtgctg

SEQ ID NO: 5656444 - DNA, 25 bp, Homo sapien
gatacagtattatcaatggacgtgc

SEQ ID NO: 5656445 - DNA, 25 bp, Homo sapien
agtattatcaatggacgtgctgttc

SEQ ID NO: 5656446 - DNA, 25 bp, Homo sapien
ttatttttccccaatctacactgtg

SEQ ID NO: 5656447 - DNA, 25 bp, Homo sapien
cagcacgtccattgataatactgta

SEQ ID NO: 5656448 - DNA, 25 bp, Homo sapien
tgtggaacagcacgtccattgataa

SEQ ID NO: 5656449 - DNA, 25 bp, Homo sapien
gaacagcacgtccattgataatact

SEQ ID NO: 5656450 - DNA, 25 bp, Homo sapien
tatttttccccaatctacactgtgg

SEQ ID NO: 5656451 - DNA, 25 bp, Homo sapien
gcacgtccattgataatactgtatc

SEQ ID NO: 5656452 - DNA, 25 bp, Homo sapien
cacccctccacggtccatgtcagcc

SEQ ID NO: 5656453 - DNA, 25 bp, Homo sapien
ccacccctccacggtccatgtcagc

SEQ ID NO: 5656454 - DNA, 25 bp, Homo sapien
gccacccctccacggtccatgtcag

SEQ ID NO: 5656455 - DNA, 25 bp, Homo sapien
ggctgcttaaacagtgccacccctc

SEQ ID NO: 5656456 - DNA, 25 bp, Homo sapien
gctgcttaaacagtgccacccctcc

SEQ ID NO: 5656457 - DNA, 25 bp, Homo sapien
gggctgcttaaacagtgccacccct

SEQ ID NO: 5656458 - DNA, 25 bp, Homo sapien
gctgacatggaccgtggaggggtgg

SEQ ID NO: 5656459 - DNA, 25 bp, Homo sapien
aggggtggcactgtttaagcagccc

SEQ ID NO: 5656460 - DNA, 25 bp, Homo sapien
ggaggggtggcactgtttaagcagc

SEQ ID NO: 5656461 - DNA, 25 bp, Homo sapien
gaggggtggcactgtttaagcagcc

SEQ ID NO: 5656462 - DNA, 25 bp, Homo sapien
ggctgacatggaccgtggaggggtg

SEQ ID NO: 5656463 - DNA, 25 bp, Homo sapien
ctgacatggaccgtggaggggtggc

SEQ ID NO: 5656464 - DNA, 25 bp, Homo sapien
gtccatgtcagcctgtggatgcccc

SEQ ID NO: 5656465 - DNA, 25 bp, Homo sapien
aaagtggtgtgctgggctgcttaaa

SEQ ID NO: 5656466 - DNA, 25 bp, Homo sapien
aggagccaccacaccagaaagtggt

SEQ ID NO: 5656467 - DNA, 25 bp, Homo sapien
ccacggtccatgtcagcctgtggat

SEQ ID NO: 5656468 - DNA, 25 bp, Homo sapien
cacaccagaaagtggtgtgctgggc

SEQ ID NO: 5656469 - DNA, 25 bp, Homo sapien
gggctgcttaaacagtgccacccct

SEQ ID NO: 5656470 - DNA, 25 bp, Homo sapien
cacaccactttctggtgtggtggct

SEQ ID NO: 5656471 - DNA, 25 bp, Homo sapien
ccacaggctgacatggaccgtggag

SEQ ID NO: 5656472 - DNA, 25 bp, Homo sapien
ggcatccacaggctgacatggaccg

SEQ ID NO: 5656473 - DNA, 25 bp, Homo sapien
ggcactgtttaagcagcccagcaca

SEQ ID NO: 5656474 - DNA, 25 bp, Homo sapien
gggtggcactgtttaagcagcccag

SEQ ID NO: 5656475 - DNA, 25 bp, Homo sapien
tttaagcagcccagcacaccacttt

SEQ ID NO: 5656476 - DNA, 25 bp, Homo sapien
tttatgttggccagtacctgtagca

SEQ ID NO: 5656477 - DNA, 25 bp, Homo sapien
tatgttggccagtacctgtagcaga

SEQ ID NO: 5656478 - DNA, 25 bp, Homo sapien
ttttatgttggccagtacctgtagc

SEQ ID NO: 5656479 - DNA, 25 bp, Homo sapien
ttatgttggccagtacctgtagcag

SEQ ID NO: 5656480 - DNA, 25 bp, Homo sapien
agatagaattgagtgtgagttttat

SEQ ID NO: 5656481 - DNA, 25 bp, Homo sapien
tgttggccagtacctgtagcagagg

SEQ ID NO: 5656482 - DNA, 25 bp, Homo sapien
ataaaactcacactcaattctatct

SEQ ID NO: 5656483 - DNA, 25 bp, Homo sapien
cctctgctacaggtactggccaaca

SEQ ID NO: 5656484 - DNA, 25 bp, Homo sapien
tgctacaggtactggccaacataaa

SEQ ID NO: 5656485 - DNA, 25 bp, Homo sapien
gctacaggtactggccaacataaaa

SEQ ID NO: 5656486 - DNA, 25 bp, Homo sapien
ctctgctacaggtactggccaacat

SEQ ID NO: 5656487 - DNA, 25 bp, Homo sapien
tctgctacaggtactggccaacata

SEQ ID NO: 5656488 - DNA, 25 bp, Homo sapien
tgcttttagtcttacactccctcct

SEQ ID NO: 5656489 - DNA, 25 bp, Homo sapien
tccacattacttaggtacttccctc

SEQ ID NO: 5656490 - DNA, 25 bp, Homo sapien
cacccctcttggcggagttgtgtcc

SEQ ID NO: 5656491 - DNA, 25 bp, Homo sapien
catttccacattacttaggtacttc

SEQ ID NO: 5656492 - DNA, 25 bp, Homo sapien
cctcatttccacattacttaggtac

SEQ ID NO: 5656493 - DNA, 25 bp, Homo sapien
tttgcttttagtcttacactccctc

SEQ ID NO: 5656494 - DNA, 25 bp, Homo sapien
gagggagtgtaagactaaaagcaaa

SEQ ID NO: 5656495 - DNA, 25 bp, Homo sapien
gacacaactccgccaagaggggtgg

SEQ ID NO: 5656496 - DNA, 25 bp, Homo sapien
gaagtacctaagtaatgtggaaatg

SEQ ID NO: 5656497 - DNA, 25 bp, Homo sapien
aggagggagtgtaagactaaaagca

SEQ ID NO: 5656498 - DNA, 25 bp, Homo sapien
gagggaagtacctaagtaatgtgga

SEQ ID NO: 5656499 - DNA, 25 bp, Homo sapien
gtacctaagtaatgtggaaatgagg

SEQ ID NO: 5656500 - DNA, 25 bp, Homo sapien
ggctcttctagacagtgacagtttc

SEQ ID NO: 5656501 - DNA, 25 bp, Homo sapien
cctcttgggctcttctagacagtga

SEQ ID NO: 5656502 - DNA, 25 bp, Homo sapien
tcttgggctcttctagacagtgaca

SEQ ID NO: 5656503 - DNA, 25 bp, Homo sapien
agtcttcacgtcctcttgggctctt

SEQ ID NO: 5656504 - DNA, 25 bp, Homo sapien
ctcttctagacagtgacagtttctc

SEQ ID NO: 5656505 - DNA, 25 bp, Homo sapien
gttttgaggagtcccggtcatgtag

SEQ ID NO: 5656506 - DNA, 25 bp, Homo sapien
ctacatgaccgggactcctcaaaac

SEQ ID NO: 5656507 - DNA, 25 bp, Homo sapien
gaaactgtcactgtctagaagagcc

SEQ ID NO: 5656508 - DNA, 25 bp, Homo sapien
tgtcactgtctagaagagcccaaga

SEQ ID NO: 5656509 - DNA, 25 bp, Homo sapien
aagagcccaagaggacgtgaagact

SEQ ID NO: 5656510 - DNA, 25 bp, Homo sapien
gagaaactgtcactgtctagaagag

SEQ ID NO: 5656511 - DNA, 25 bp, Homo sapien
tcactgtctagaagagcccaagagg

SEQ ID NO: 5656512 - DNA, 25 bp, Homo sapien
ccatttctctctttgaatctaaaat

SEQ ID NO: 5656513 - DNA, 25 bp, Homo sapien
attttagattcaaagagagaaatgg

SEQ ID NO: 5656514 - DNA, 25 bp, Homo sapien
ttgaatatagacactttggagaaca

SEQ ID NO: 5656515 - DNA, 25 bp, Homo sapien
cactttggagaacaggtaatgtttt

SEQ ID NO: 5656516 - DNA, 25 bp, Homo sapien
aaaccatttctctctttgaatctaa

SEQ ID NO: 5656517 - DNA, 25 bp, Homo sapien
tagacactttggagaacaggtaatg

SEQ ID NO: 5656518 - DNA, 25 bp, Homo sapien
ccatttctctctttgaatctaaaat

SEQ ID NO: 5656519 - DNA, 25 bp, Homo sapien
agtgattatgatttaacattctaca

SEQ ID NO: 5656520 - DNA, 25 bp, Homo sapien
tgttctccaaagtgtctatattcaa

SEQ ID NO: 5656521 - DNA, 25 bp, Homo sapien
tagattcaaagagagaaatggtttt

SEQ ID NO: 5656522 - DNA, 25 bp, Homo sapien
attttagattcaaagagagaaatgg

SEQ ID NO: 5656523 - DNA, 25 bp, Homo sapien
aaaacattacctgttctccaaagtg

SEQ ID NO: 5656524 - DNA, 25 bp, Homo sapien
cattacctgttctccaaagtgtcta

SEQ ID NO: 5656525 - DNA, 25 bp, Homo sapien
tgtagaatgttaaatcataatcact

SEQ ID NO: 5656526 - DNA, 25 bp, Homo sapien
cccagccatatttttggttttaatg

SEQ ID NO: 5656527 - DNA, 25 bp, Homo sapien
ttggttttaatgatatgaacttgac

SEQ ID NO: 5656528 - DNA, 25 bp, Homo sapien
ccatcctcctgtctcccagagtgct

SEQ ID NO: 5656529 - DNA, 25 bp, Homo sapien
gagcccagccatatttttggtttta

SEQ ID NO: 5656530 - DNA, 25 bp, Homo sapien
tgagcccagccatatttttggtttt

SEQ ID NO: 5656531 - DNA, 25 bp, Homo sapien
actgagcccagccatatttttggtt

SEQ ID NO: 5656532 - DNA, 25 bp, Homo sapien
aaccaaaaatatggctgggctcagt

SEQ ID NO: 5656533 - DNA, 25 bp, Homo sapien
agcactctgggagacaggaggatgg

SEQ ID NO: 5656534 - DNA, 25 bp, Homo sapien
gtcaagttcatatcattaaaaccaa

SEQ ID NO: 5656535 - DNA, 25 bp, Homo sapien
aaaaccaaaaatatggctgggctca

SEQ ID NO: 5656536 - DNA, 25 bp, Homo sapien
cattaaaaccaaaaatatggctggg

SEQ ID NO: 5656537 - DNA, 25 bp, Homo sapien
taaaaccaaaaatatggctgggctc

SEQ ID NO: 5656538 - DNA, 25 bp, Homo sapien
ccagcacgtggggaggccgaggggg

SEQ ID NO: 5656539 - DNA, 25 bp, Homo sapien
ccccctcggcctccccacgtgctgg

SEQ ID NO: 5656540 - DNA, 25 bp, Homo sapien
tctctcccttcccttatctcctcat

SEQ ID NO: 5656541 - DNA, 25 bp, Homo sapien
ttcctctctccttctgccctctctt

SEQ ID NO: 5656542 - DNA, 25 bp, Homo sapien
tgccctctcttctctttaccccttc

SEQ ID NO: 5656543 - DNA, 25 bp, Homo sapien
ctgccctctcttctctttacccctt

SEQ ID NO: 5656544 - DNA, 25 bp, Homo sapien
tctgccctctcttctctttacccct

SEQ ID NO: 5656545 - DNA, 25 bp, Homo sapien
tctccttctgccctctcttctcttt

SEQ ID NO: 5656546 - DNA, 25 bp, Homo sapien
aagagagggcagaaggagagaggaa

SEQ ID NO: 5656547 - DNA, 25 bp, Homo sapien
gggtaaagagaagagagggcagaag

SEQ ID NO: 5656548 - DNA, 25 bp, Homo sapien
ggtaaagagaagagagggcagaagg

SEQ ID NO: 5656549 - DNA, 25 bp, Homo sapien
agaagagagggcagaaggagagagg

SEQ ID NO: 5656550 - DNA, 25 bp, Homo sapien
atgaggagataagggaagggagaga

SEQ ID NO: 5656551 - DNA, 25 bp, Homo sapien
gaaggggtaaagagaagagagggca

SEQ ID NO: 5656552 - DNA, 25 bp, Homo sapien
ggcgggctcggggccttctgccgct

SEQ ID NO: 5656553 - DNA, 25 bp, Homo sapien
gcgggctcggggccttctgccgctc

SEQ ID NO: 5656554 - DNA, 25 bp, Homo sapien
cgggctcggggccttctgccgctcc

SEQ ID NO: 5656555 - DNA, 25 bp, Homo sapien
cggcgggctcggggccttctgccgc

SEQ ID NO: 5656556 - DNA, 25 bp, Homo sapien
gggctcggggccttctgccgctcct

SEQ ID NO: 5656557 - DNA, 25 bp, Homo sapien
gcggcagaaggccccgagcccgccg

SEQ ID NO: 5656558 - DNA, 25 bp, Homo sapien
ggagcggcagaaggccccgagcccg

SEQ ID NO: 5656559 - DNA, 25 bp, Homo sapien
agcggcagaaggccccgagcccgcc

SEQ ID NO: 5656560 - DNA, 25 bp, Homo sapien
gagcggcagaaggccccgagcccgc

SEQ ID NO: 5656561 - DNA, 25 bp, Homo sapien
aggagcggcagaaggccccgagccc

SEQ ID NO: 5656562 - DNA, 25 bp, Homo sapien
tcggggccttctgccgctcctgagg

SEQ ID NO: 5656563 - DNA, 25 bp, Homo sapien
cttctgccgctcctgaggccggccg

SEQ ID NO: 5656564 - DNA, 25 bp, Homo sapien
ttctgccgctcctgaggccggccgg

SEQ ID NO: 5656565 - DNA, 25 bp, Homo sapien
ggccttctgccgctcctgaggccgg

SEQ ID NO: 5656566 - DNA, 25 bp, Homo sapien
gggctcggggccttctgccgctcct

SEQ ID NO: 5656567 - DNA, 25 bp, Homo sapien
gctcctgaggccggccggcggaggg

SEQ ID NO: 5656568 - DNA, 25 bp, Homo sapien
ggagcggcagaaggccccgagcccg

SEQ ID NO: 5656569 - DNA, 25 bp, Homo sapien
cggccggcctcaggagcggcagaag

SEQ ID NO: 5656570 - DNA, 25 bp, Homo sapien
cctcaggagcggcagaaggccccga

SEQ ID NO: 5656571 - DNA, 25 bp, Homo sapien
gccggcctcaggagcggcagaaggc

SEQ ID NO: 5656572 - DNA, 25 bp, Homo sapien
aggagcggcagaaggccccgagccc

SEQ ID NO: 5656573 - DNA, 25 bp, Homo sapien
gccggccggcctcaggagcggcaga

SEQ ID NO: 5656574 - DNA, 25 bp, Homo sapien
cccgcaagcgcaaggtgcgcccggc

SEQ ID NO: 5656575 - DNA, 25 bp, Homo sapien
tggagcggcacggctgaggcccgca

SEQ ID NO: 5656576 - DNA, 25 bp, Homo sapien
agtgcttcgtgtggagcggcacggc

SEQ ID NO: 5656577 - DNA, 25 bp, Homo sapien
gcttcgtgtggagcggcacggctga

SEQ ID NO: 5656578 - DNA, 25 bp, Homo sapien
cagtgcttcgtgtggagcggcacgg

SEQ ID NO: 5656579 - DNA, 25 bp, Homo sapien
tgcttcgtgtggagcggcacggctg

SEQ ID NO: 5656580 - DNA, 25 bp, Homo sapien
tgtggagcggcacggctgaggcccg

SEQ ID NO: 5656581 - DNA, 25 bp, Homo sapien
gccgtgccgctccacacgaagcact

SEQ ID NO: 5656582 - DNA, 25 bp, Homo sapien
tcagccgtgccgctccacacgaagc

SEQ ID NO: 5656583 - DNA, 25 bp, Homo sapien
cgggcctcagccgtgccgctccaca

SEQ ID NO: 5656584 - DNA, 25 bp, Homo sapien
tgcgggcctcagccgtgccgctcca

SEQ ID NO: 5656585 - DNA, 25 bp, Homo sapien
ccgtgccgctccacacgaagcactg

SEQ ID NO: 5656586 - DNA, 25 bp, Homo sapien
agccgtgccgctccacacgaagcac

SEQ ID NO: 5656587 - DNA, 25 bp, Homo sapien
gccgggcgcaccttgcgcttgcggg

SEQ ID NO: 5656588 - DNA, 25 bp, Homo sapien
tggacaactggaagcagaacctgcg

SEQ ID NO: 5656589 - DNA, 25 bp, Homo sapien
cttcaaggtggacaactggaagcag

SEQ ID NO: 5656590 - DNA, 25 bp, Homo sapien
taccagtgcttcgtgtggagcggca

SEQ ID NO: 5656591 - DNA, 25 bp, Homo sapien
cccgcaagcgcaaggtgcgcccggc

SEQ ID NO: 5656592 - DNA, 25 bp, Homo sapien
acctgcgggccatctaccagtgctt

SEQ ID NO: 5656593 - DNA, 25 bp, Homo sapien
ggaagcagaacctgcgggccatcta

SEQ ID NO: 5656594 - DNA, 25 bp, Homo sapien
gccgggcgcaccttgcgcttgcggg

SEQ ID NO: 5656595 - DNA, 25 bp, Homo sapien
cacacgaagcactggtagatggccc

SEQ ID NO: 5656596 - DNA, 25 bp, Homo sapien
tctgcttccagttgtccaccttgaa

SEQ ID NO: 5656597 - DNA, 25 bp, Homo sapien
gatggcccgcaggttctgcttccag

SEQ ID NO: 5656598 - DNA, 25 bp, Homo sapien
gcactggtagatggcccgcaggttc

SEQ ID NO: 5656599 - DNA, 25 bp, Homo sapien
gtgccgctccacacgaagcactggt

SEQ ID NO: 5656600 - DNA, 25 bp, Homo sapien
cgccgagctggcggtagcgccgccg

SEQ ID NO: 5656601 - DNA, 25 bp, Homo sapien
gccgggccttgccccccatggtgtc

SEQ ID NO: 5656602 - DNA, 25 bp, Homo sapien
cggcggcgctaccgccagctcggcg

SEQ ID NO: 5656603 - DNA, 25 bp, Homo sapien
gacaccatggggggcaaggcccggc

SEQ ID NO: 5656604 - DNA, 25 bp, Homo sapien
ggccagagcccgagggcgaggccat

SEQ ID NO: 5656605 - DNA, 25 bp, Homo sapien
catggacgccgagctggcggtagcg

SEQ ID NO: 5656606 - DNA, 25 bp, Homo sapien
ggcgaggccatggacgccgagctgg

SEQ ID NO: 5656607 - DNA, 25 bp, Homo sapien
ccgccgggctgctcgcacctgggca

SEQ ID NO: 5656608 - DNA, 25 bp, Homo sapien
tggtgtcccggccagagcccgaggg

SEQ ID NO: 5656609 - DNA, 25 bp, Homo sapien
gagctggcggtagcgccgccgggct

SEQ ID NO: 5656610 - DNA, 25 bp, Homo sapien
ctcgggctctggccgggacaccatg

SEQ ID NO: 5656611 - DNA, 25 bp, Homo sapien
agcccggcggcgctaccgccagctc

SEQ ID NO: 5656612 - DNA, 25 bp, Homo sapien
atggcctcgccctcgggctctggcc

SEQ ID NO: 5656613 - DNA, 25 bp, Homo sapien
tgcccaggtgcgagcagcccggcgg

SEQ ID NO: 5656614 - DNA, 25 bp, Homo sapien
gccagctcggcgtccatggcctcgc

SEQ ID NO: 5656615 - DNA, 25 bp, Homo sapien
gctaccgccagctcggcgtccatgg

SEQ ID NO: 5656616 - DNA, 25 bp, Homo sapien
cgccgttgcattccagcccaggcga

SEQ ID NO: 5656617 - DNA, 25 bp, Homo sapien
gccgttgcattccagcccaggcgac

SEQ ID NO: 5656618 - DNA, 25 bp, Homo sapien
ccgttgcattccagcccaggcgaca

SEQ ID NO: 5656619 - DNA, 25 bp, Homo sapien
acgccgttgcattccagcccaggcg

SEQ ID NO: 5656620 - DNA, 25 bp, Homo sapien
gttgcattccagcccaggcgacaga

SEQ ID NO: 5656621 - DNA, 25 bp, Homo sapien
cgttgcattccagcccaggcgacag

SEQ ID NO: 5656622 - DNA, 25 bp, Homo sapien
tcgcctgggctggaatgcaacggcg

SEQ ID NO: 5656623 - DNA, 25 bp, Homo sapien
cgcctgggctggaatgcaacggcgt

SEQ ID NO: 5656624 - DNA, 25 bp, Homo sapien
tgtcgcctgggctggaatgcaacgg

SEQ ID NO: 5656625 - DNA, 25 bp, Homo sapien
gcctgggctggaatgcaacggcgtg

SEQ ID NO: 5656626 - DNA, 25 bp, Homo sapien
gtcgcctgggctggaatgcaacggc

SEQ ID NO: 5656627 - DNA, 25 bp, Homo sapien
ctgtcgcctgggctggaatgcaacg

SEQ ID NO: 5656628 - DNA, 25 bp, Homo sapien
agtgtgggtggtgtgtaccggtagt

SEQ ID NO: 5656629 - DNA, 25 bp, Homo sapien
ccaagtgtgggtggtgtgtaccggt

SEQ ID NO: 5656630 - DNA, 25 bp, Homo sapien
aagtgtgggtggtgtgtaccggtag

SEQ ID NO: 5656631 - DNA, 25 bp, Homo sapien
gtgtgggtggtgtgtaccggtagtc

SEQ ID NO: 5656632 - DNA, 25 bp, Homo sapien
gccaagtgtgggtggtgtgtaccgg

SEQ ID NO: 5656633 - DNA, 25 bp, Homo sapien
caagtgtgggtggtgtgtaccggta

SEQ ID NO: 5656634 - DNA, 25 bp, Homo sapien
actaccggtacacaccacccacact

SEQ ID NO: 5656635 - DNA, 25 bp, Homo sapien
taccggtacacaccacccacacttg

SEQ ID NO: 5656636 - DNA, 25 bp, Homo sapien
accggtacacaccacccacacttgg

SEQ ID NO: 5656637 - DNA, 25 bp, Homo sapien
ctaccggtacacaccacccacactt

SEQ ID NO: 5656638 - DNA, 25 bp, Homo sapien
gactaccggtacacaccacccacac

SEQ ID NO: 5656639 - DNA, 25 bp, Homo sapien
ccggtacacaccacccacacttggc

SEQ ID NO: 5656640 - DNA, 25 bp, Homo sapien
aaatgagtatagccaagtgtgggtg

SEQ ID NO: 5656641 - DNA, 25 bp, Homo sapien
ccaagtgtgggtggtgtgtaccggt

SEQ ID NO: 5656642 - DNA, 25 bp, Homo sapien
tgtgggtggtgtgtaccggtagtcc

SEQ ID NO: 5656643 - DNA, 25 bp, Homo sapien
gtgtgggtggtgtgtaccggtagtc

SEQ ID NO: 5656644 - DNA, 25 bp, Homo sapien
gccaagtgtgggtggtgtgtaccgg

SEQ ID NO: 5656645 - DNA, 25 bp, Homo sapien
caagtgtgggtggtgtgtaccggta

SEQ ID NO: 5656646 - DNA, 25 bp, Homo sapien
actaccggtacacaccacccacact

SEQ ID NO: 5656647 - DNA, 25 bp, Homo sapien
taccggtacacaccacccacacttg

SEQ ID NO: 5656648 - DNA, 25 bp, Homo sapien
caccacccacacttggctatactca

SEQ ID NO: 5656649 - DNA, 25 bp, Homo sapien
accggtacacaccacccacacttgg

SEQ ID NO: 5656650 - DNA, 25 bp, Homo sapien
ggactaccggtacacaccacccaca

SEQ ID NO: 5656651 - DNA, 25 bp, Homo sapien
cacccacacttggctatactcattt

SEQ ID NO: 5656652 - DNA, 25 bp, Homo sapien
cagttcagtgggttggctggcctca

SEQ ID NO: 5656653 - DNA, 25 bp, Homo sapien
tagccatttaatcatcatctcccac

SEQ ID NO: 5656654 - DNA, 25 bp, Homo sapien
tggctggcctcaactgaggaattct

SEQ ID NO: 5656655 - DNA, 25 bp, Homo sapien
cagtgggttggctggcctcaactga

SEQ ID NO: 5656656 - DNA, 25 bp, Homo sapien
gaaagtatagccatttaatcatcat

SEQ ID NO: 5656657 - DNA, 25 bp, Homo sapien
ggttggctggcctcaactgaggaat

SEQ ID NO: 5656658 - DNA, 25 bp, Homo sapien
gaattcctcagttgaggccagccaa

SEQ ID NO: 5656659 - DNA, 25 bp, Homo sapien
gtgggagatgatgattaaatggcta

SEQ ID NO: 5656660 - DNA, 25 bp, Homo sapien
tgatgattaaatggctatactttct

SEQ ID NO: 5656661 - DNA, 25 bp, Homo sapien
gaggccagccaacccactgaactgt

SEQ ID NO: 5656662 - DNA, 25 bp, Homo sapien
agaattcctcagttgaggccagcca

SEQ ID NO: 5656663 - DNA, 25 bp, Homo sapien
gttgaggccagccaacccactgaac

SEQ ID NO: 5656664 - DNA, 25 bp, Homo sapien
aattcagtatctcattatctaagtc

SEQ ID NO: 5656665 - DNA, 25 bp, Homo sapien
ggatctgaagcctgaactaaagaga

SEQ ID NO: 5656666 - DNA, 25 bp, Homo sapien
gtggatgaaactactcagatgtggc

SEQ ID NO: 5656667 - DNA, 25 bp, Homo sapien
caagtctgtgtgtggatgaaactac

SEQ ID NO: 5656668 - DNA, 25 bp, Homo sapien
tcattatctaagtcaagtctgtgtg

SEQ ID NO: 5656669 - DNA, 25 bp, Homo sapien
gctcctcttggatctgaagcctgaa

SEQ ID NO: 5656670 - DNA, 25 bp, Homo sapien
gccacatctgagtagtttcatccac

SEQ ID NO: 5656671 - DNA, 25 bp, Homo sapien
cacacagacttgacttagataatga

SEQ ID NO: 5656672 - DNA, 25 bp, Homo sapien
tgacttagataatgagatactgaat

SEQ ID NO: 5656673 - DNA, 25 bp, Homo sapien
tctctttagttcaggcttcagatcc

SEQ ID NO: 5656674 - DNA, 25 bp, Homo sapien
tgagtagtttcatccacacacagac

SEQ ID NO: 5656675 - DNA, 25 bp, Homo sapien
ttcaggcttcagatccaagaggagc

SEQ ID NO: 5656676 - DNA, 25 bp, Homo sapien
ttttgagagtctttgccctctagag

SEQ ID NO: 5656677 - DNA, 25 bp, Homo sapien
atagttgccttaggcaatttctcat

SEQ ID NO: 5656678 - DNA, 25 bp, Homo sapien
tttgagagtctttgccctctagaga

SEQ ID NO: 5656679 - DNA, 25 bp, Homo sapien
gatagttgccttaggcaatttctca

SEQ ID NO: 5656680 - DNA, 25 bp, Homo sapien
ttgagagtctttgccctctagagat

SEQ ID NO: 5656681 - DNA, 25 bp, Homo sapien
gagagtctttgccctctagagatcc

SEQ ID NO: 5656682 - DNA, 25 bp, Homo sapien
tctctagagggcaaagactctcaaa

SEQ ID NO: 5656683 - DNA, 25 bp, Homo sapien
ctctagagggcaaagactctcaaaa

SEQ ID NO: 5656684 - DNA, 25 bp, Homo sapien
atctctagagggcaaagactctcaa

SEQ ID NO: 5656685 - DNA, 25 bp, Homo sapien
ggatctctagagggcaaagactctc

SEQ ID NO: 5656686 - DNA, 25 bp, Homo sapien
gagaaattgcctaaggcaactatca

SEQ ID NO: 5656687 - DNA, 25 bp, Homo sapien
tgagaaattgcctaaggcaactatc

SEQ ID NO: 5656688 - DNA, 25 bp, Homo sapien
gctctcacactttatcataggcatc

SEQ ID NO: 5656689 - DNA, 25 bp, Homo sapien
tctcacactttatcataggcatctg

SEQ ID NO: 5656690 - DNA, 25 bp, Homo sapien
ttttaaccgatcttactgctctcac

SEQ ID NO: 5656691 - DNA, 25 bp, Homo sapien
tcacactttatcataggcatctgaa

SEQ ID NO: 5656692 - DNA, 25 bp, Homo sapien
tactgctctcacactttatcatagg

SEQ ID NO: 5656693 - DNA, 25 bp, Homo sapien
ttcactttttaaccgatcttactgc

SEQ ID NO: 5656694 - DNA, 25 bp, Homo sapien
cctatgataaagtgtgagagcagta

SEQ ID NO: 5656695 - DNA, 25 bp, Homo sapien
cagatgcctatgataaagtgtgaga

SEQ ID NO: 5656696 - DNA, 25 bp, Homo sapien
gatgcctatgataaagtgtgagagc

SEQ ID NO: 5656697 - DNA, 25 bp, Homo sapien
gcagtaagatcggttaaaaagtgaa

SEQ ID NO: 5656698 - DNA, 25 bp, Homo sapien
gtgagagcagtaagatcggttaaaa

SEQ ID NO: 5656699 - DNA, 25 bp, Homo sapien
ttcagatgcctatgataaagtgtga

SEQ ID NO: 5656700 - DNA, 25 bp, Homo sapien
tatttgtcctatccagttgagtcaa

SEQ ID NO: 5656701 - DNA, 25 bp, Homo sapien
aacatatttgtcctatccagttgag

SEQ ID NO: 5656702 - DNA, 25 bp, Homo sapien
tctctaacatatttgtcctatccag

SEQ ID NO: 5656703 - DNA, 25 bp, Homo sapien
catatttgtcctatccagttgagtc

SEQ ID NO: 5656704 - DNA, 25 bp, Homo sapien
ttgtcctatccagttgagtcaaaca

SEQ ID NO: 5656705 - DNA, 25 bp, Homo sapien
gtcctatccagttgagtcaaacatt

SEQ ID NO: 5656706 - DNA, 25 bp, Homo sapien
caactggataggacaaatatgttag

SEQ ID NO: 5656707 - DNA, 25 bp, Homo sapien
aatgtttgactcaactggataggac

SEQ ID NO: 5656708 - DNA, 25 bp, Homo sapien
ctggataggacaaatatgttagaga

SEQ ID NO: 5656709 - DNA, 25 bp, Homo sapien
ttgactcaactggataggacaaata

SEQ ID NO: 5656710 - DNA, 25 bp, Homo sapien
gactcaactggataggacaaatatg

SEQ ID NO: 5656711 - DNA, 25 bp, Homo sapien
tgtttgactcaactggataggacaa

SEQ ID NO: 5656712 - DNA, 25 bp, Homo sapien
tgaatagtgtgaagttatgagagac

SEQ ID NO: 5656713 - DNA, 25 bp, Homo sapien
tatttttgctataccggatccattc

SEQ ID NO: 5656714 - DNA, 25 bp, Homo sapien
ccattcaggtaataggtttgtaagg

SEQ ID NO: 5656715 - DNA, 25 bp, Homo sapien
gacttttagtaaatgagcatatttt

SEQ ID NO: 5656716 - DNA, 25 bp, Homo sapien
tttgctataccggatccattcaggt

SEQ ID NO: 5656717 - DNA, 25 bp, Homo sapien
ccggatccattcaggtaataggttt

SEQ ID NO: 5656718 - DNA, 25 bp, Homo sapien
gtctctcataacttcacactattca

SEQ ID NO: 5656719 - DNA, 25 bp, Homo sapien
gaatggatccggtatagcaaaaata

SEQ ID NO: 5656720 - DNA, 25 bp, Homo sapien
aaacctattacctgaatggatccgg

SEQ ID NO: 5656721 - DNA, 25 bp, Homo sapien
ccttacaaacctattacctgaatgg

SEQ ID NO: 5656722 - DNA, 25 bp, Homo sapien
aaaatatgctcatttactaaaagtc

SEQ ID NO: 5656723 - DNA, 25 bp, Homo sapien
tacctgaatggatccggtatagcaa

SEQ ID NO: 5656724 - DNA, 25 bp, Homo sapien
ctatcataaccaaaacaattaggtg

SEQ ID NO: 5656725 - DNA, 25 bp, Homo sapien
ttaggtgtactctgagtataatttg

SEQ ID NO: 5656726 - DNA, 25 bp, Homo sapien
aggtgtactctgagtataatttgta

SEQ ID NO: 5656727 - DNA, 25 bp, Homo sapien
atttgagtttggctatcataaccaa

SEQ ID NO: 5656728 - DNA, 25 bp, Homo sapien
attaggtgtactctgagtataattt

SEQ ID NO: 5656729 - DNA, 25 bp, Homo sapien
taggtgtactctgagtataatttgt

SEQ ID NO: 5656730 - DNA, 25 bp, Homo sapien
caaattatactcagagtacacctaa

SEQ ID NO: 5656731 - DNA, 25 bp, Homo sapien
aaattatactcagagtacacctaat

SEQ ID NO: 5656732 - DNA, 25 bp, Homo sapien
tacaaattatactcagagtacacct

SEQ ID NO: 5656733 - DNA, 25 bp, Homo sapien
ttggttatgatagccaaactcaaat

SEQ ID NO: 5656734 - DNA, 25 bp, Homo sapien
acaaattatactcagagtacaccta

SEQ ID NO: 5656735 - DNA, 25 bp, Homo sapien
cacctaattgttttggttatgatag

SEQ ID NO: 5656736 - DNA, 25 bp, Homo sapien
ctatcataaccaaaacaattaggtg

SEQ ID NO: 5656737 - DNA, 25 bp, Homo sapien
tgtgtagttattactcttatttgag

SEQ ID NO: 5656738 - DNA, 25 bp, Homo sapien
atttgagtttggctatcataaccaa

SEQ ID NO: 5656739 - DNA, 25 bp, Homo sapien
caaaacaattaggtgtactctgagt

SEQ ID NO: 5656740 - DNA, 25 bp, Homo sapien
taggtgtactctgagtataatttgt

SEQ ID NO: 5656741 - DNA, 25 bp, Homo sapien
tactcttatttgagtttggctatca

SEQ ID NO: 5656742 - DNA, 25 bp, Homo sapien
aaattttttagagagatgaagtctc

SEQ ID NO: 5656743 - DNA, 25 bp, Homo sapien
taaaattttttagagagatgaagtc

SEQ ID NO: 5656744 - DNA, 25 bp, Homo sapien
aattttttagagagatgaagtctca

SEQ ID NO: 5656745 - DNA, 25 bp, Homo sapien
aaaattttttagagagatgaagtct

SEQ ID NO: 5656746 - DNA, 25 bp, Homo sapien
tttcaaactccaggtctcaagcagt

SEQ ID NO: 5656747 - DNA, 25 bp, Homo sapien
ttcaaactccaggtctcaagcagtc

SEQ ID NO: 5656748 - DNA, 25 bp, Homo sapien
gactgcttgagacctggagtttgaa

SEQ ID NO: 5656749 - DNA, 25 bp, Homo sapien
actgcttgagacctggagtttgaaa

SEQ ID NO: 5656750 - DNA, 25 bp, Homo sapien
tgagacttcatctctctaaaaaatt

SEQ ID NO: 5656751 - DNA, 25 bp, Homo sapien
agacttcatctctctaaaaaatttt

SEQ ID NO: 5656752 - DNA, 25 bp, Homo sapien
gagacttcatctctctaaaaaattt

SEQ ID NO: 5656753 - DNA, 25 bp, Homo sapien
gacttcatctctctaaaaaatttta

SEQ ID NO: 5656754 - DNA, 25 bp, Homo sapien
tgaaactataccaatgaggtcaggg

SEQ ID NO: 5656755 - DNA, 25 bp, Homo sapien
aaactataccaatgaggtcagggtg

SEQ ID NO: 5656756 - DNA, 25 bp, Homo sapien
tattgaaactataccaatgaggtca

SEQ ID NO: 5656757 - DNA, 25 bp, Homo sapien
gaattaccttttcacaatgttgtaa

SEQ ID NO: 5656758 - DNA, 25 bp, Homo sapien
ccttttcacaatgttgtaaattgaa

SEQ ID NO: 5656759 - DNA, 25 bp, Homo sapien
actataccaatgaggtcagggtggt

SEQ ID NO: 5656760 - DNA, 25 bp, Homo sapien
tcaatttacaacattgtgaaaaggt

SEQ ID NO: 5656761 - DNA, 25 bp, Homo sapien
gacctcattggtatagtttcaataa

SEQ ID NO: 5656762 - DNA, 25 bp, Homo sapien
caccctgacctcattggtatagttt

SEQ ID NO: 5656763 - DNA, 25 bp, Homo sapien
accaccctgacctcattggtatagt

SEQ ID NO: 5656764 - DNA, 25 bp, Homo sapien
cctgacctcattggtatagtttcaa

SEQ ID NO: 5656765 - DNA, 25 bp, Homo sapien
caacattgtgaaaaggtaattcaaa

SEQ ID NO: 5656766 - DNA, 25 bp, Homo sapien
tttgaacccaggaggtggaggttgc

SEQ ID NO: 5656767 - DNA, 25 bp, Homo sapien
attgtttgaacccaggaggtggagg

SEQ ID NO: 5656768 - DNA, 25 bp, Homo sapien
gagtcgagatcataccactgcactc

SEQ ID NO: 5656769 - DNA, 25 bp, Homo sapien
agggaggagaattgtttgaacccag

SEQ ID NO: 5656770 - DNA, 25 bp, Homo sapien
cagtgagtcgagatcataccactgc

SEQ ID NO: 5656771 - DNA, 25 bp, Homo sapien
gagggaggagaattgtttgaaccca

SEQ ID NO: 5656772 - DNA, 25 bp, Homo sapien
ctgggttcaaacaattctcctccct

SEQ ID NO: 5656773 - DNA, 25 bp, Homo sapien
cctccacctcctgggttcaaacaat

SEQ ID NO: 5656774 - DNA, 25 bp, Homo sapien
gagtgcagtggtatgatctcgactc

SEQ ID NO: 5656775 - DNA, 25 bp, Homo sapien
tgggttcaaacaattctcctccctc

SEQ ID NO: 5656776 - DNA, 25 bp, Homo sapien
gcaacctccacctcctgggttcaaa

SEQ ID NO: 5656777 - DNA, 25 bp, Homo sapien
gcagtggtatgatctcgactcactg

SEQ ID NO: 5656778 - DNA, 25 bp, Homo sapien
ctaccaagttcaagcagttcttctg

SEQ ID NO: 5656779 - DNA, 25 bp, Homo sapien
cacctaccaagttcaagcagttctt

SEQ ID NO: 5656780 - DNA, 25 bp, Homo sapien
acctaccaagttcaagcagttcttc

SEQ ID NO: 5656781 - DNA, 25 bp, Homo sapien
accaagttcaagcagttcttctgtc

SEQ ID NO: 5656782 - DNA, 25 bp, Homo sapien
cctaccaagttcaagcagttcttct

SEQ ID NO: 5656783 - DNA, 25 bp, Homo sapien
taccaagttcaagcagttcttctgt

SEQ ID NO: 5656784 - DNA, 25 bp, Homo sapien
cagaagaactgcttgaacttggtag

SEQ ID NO: 5656785 - DNA, 25 bp, Homo sapien
agaagaactgcttgaacttggtagg

SEQ ID NO: 5656786 - DNA, 25 bp, Homo sapien
aagaactgcttgaacttggtaggtg

SEQ ID NO: 5656787 - DNA, 25 bp, Homo sapien
gaagaactgcttgaacttggtaggt

SEQ ID NO: 5656788 - DNA, 25 bp, Homo sapien
acagaagaactgcttgaacttggta

SEQ ID NO: 5656789 - DNA, 25 bp, Homo sapien
gacagaagaactgcttgaacttggt

SEQ ID NO: 5656790 - DNA, 25 bp, Homo sapien
attgtagagttggggttttaccatg

SEQ ID NO: 5656791 - DNA, 25 bp, Homo sapien
catggtaaaaccccaactctacaat

SEQ ID NO: 5656792 - DNA, 25 bp, Homo sapien
aatgagactcacctggtctatattt

SEQ ID NO: 5656793 - DNA, 25 bp, Homo sapien
aaaatgagactcacctggtctatat

SEQ ID NO: 5656794 - DNA, 25 bp, Homo sapien
atgagactcacctggtctatatttt

SEQ ID NO: 5656795 - DNA, 25 bp, Homo sapien
caaaatgagactcacctggtctata

SEQ ID NO: 5656796 - DNA, 25 bp, Homo sapien
aaatgagactcacctggtctatatt

SEQ ID NO: 5656797 - DNA, 25 bp, Homo sapien
atatagaccaggtgagtctcatttt

SEQ ID NO: 5656798 - DNA, 25 bp, Homo sapien
aaaatatagaccaggtgagtctcat

SEQ ID NO: 5656799 - DNA, 25 bp, Homo sapien
aaatatagaccaggtgagtctcatt

SEQ ID NO: 5656800 - DNA, 25 bp, Homo sapien
tatagaccaggtgagtctcattttg

SEQ ID NO: 5656801 - DNA, 25 bp, Homo sapien
aatatagaccaggtgagtctcattt

SEQ ID NO: 5656802 - DNA, 25 bp, Homo sapien
gactcacctggtctatatttttggt

SEQ ID NO: 5656803 - DNA, 25 bp, Homo sapien
aatgagactcacctggtctatattt

SEQ ID NO: 5656804 - DNA, 25 bp, Homo sapien
aaaatgagactcacctggtctatat

SEQ ID NO: 5656805 - DNA, 25 bp, Homo sapien
caaaatgagactcacctggtctata

SEQ ID NO: 5656806 - DNA, 25 bp, Homo sapien
gtatgccaaaatgagactcacctgg

SEQ ID NO: 5656807 - DNA, 25 bp, Homo sapien
tgagacagagttgttctgtctcacc

SEQ ID NO: 5656808 - DNA, 25 bp, Homo sapien
aaaatatagaccaggtgagtctcat

SEQ ID NO: 5656809 - DNA, 25 bp, Homo sapien
ccaggtgagtctcattttggcatac

SEQ ID NO: 5656810 - DNA, 25 bp, Homo sapien
tatagaccaggtgagtctcattttg

SEQ ID NO: 5656811 - DNA, 25 bp, Homo sapien
ccaaaaatatagaccaggtgagtct

SEQ ID NO: 5656812 - DNA, 25 bp, Homo sapien
aaaccaaaaatatagaccaggtgag

SEQ ID NO: 5656813 - DNA, 25 bp, Homo sapien
ccagcgtgggtgagacagaacaact

SEQ ID NO: 5656814 - DNA, 25 bp, Homo sapien
cacgtgaacctttgttaaaattgca

SEQ ID NO: 5656815 - DNA, 25 bp, Homo sapien
tcacgtgaacctttgttaaaattgc

SEQ ID NO: 5656816 - DNA, 25 bp, Homo sapien
gtatcagtgatacaaaatgccccac

SEQ ID NO: 5656817 - DNA, 25 bp, Homo sapien
tatcagtgatacaaaatgccccact

SEQ ID NO: 5656818 - DNA, 25 bp, Homo sapien
aaaaatatttcgtatcagtgataca

SEQ ID NO: 5656819 - DNA, 25 bp, Homo sapien
cgtatcagtgatacaaaatgcccca

SEQ ID NO: 5656820 - DNA, 25 bp, Homo sapien
tgtatcactgatacgaaatattttt

SEQ ID NO: 5656821 - DNA, 25 bp, Homo sapien
tgcaattttaacaaaggttcacgtg

SEQ ID NO: 5656822 - DNA, 25 bp, Homo sapien
agtggggcattttgtatcactgata

SEQ ID NO: 5656823 - DNA, 25 bp, Homo sapien
gcaattttaacaaaggttcacgtga

SEQ ID NO: 5656824 - DNA, 25 bp, Homo sapien
gggcattttgtatcactgatacgaa

SEQ ID NO: 5656825 - DNA, 25 bp, Homo sapien
tggggcattttgtatcactgatacg

SEQ ID NO: 5656826 - DNA, 25 bp, Homo sapien
gatcttgacaaatgagtgcattcag

SEQ ID NO: 5656827 - DNA, 25 bp, Homo sapien
ttgatcttgacaaatgagtgcattc

SEQ ID NO: 5656828 - DNA, 25 bp, Homo sapien
cactgatttgatcttgacaaatgag

SEQ ID NO: 5656829 - DNA, 25 bp, Homo sapien
tgacaaatgagtgcattcagttatc

SEQ ID NO: 5656830 - DNA, 25 bp, Homo sapien
acaaatgagtgcattcagttatcaa

SEQ ID NO: 5656831 - DNA, 25 bp, Homo sapien
tcttgacaaatgagtgcattcagtt

SEQ ID NO: 5656832 - DNA, 25 bp, Homo sapien
gaatgcactcatttgtcaagatcaa

SEQ ID NO: 5656833 - DNA, 25 bp, Homo sapien
gataactgaatgcactcatttgtca

SEQ ID NO: 5656834 - DNA, 25 bp, Homo sapien
ctgaatgcactcatttgtcaagatc

SEQ ID NO: 5656835 - DNA, 25 bp, Homo sapien
taactgaatgcactcatttgtcaag

SEQ ID NO: 5656836 - DNA, 25 bp, Homo sapien
ctcatttgtcaagatcaaatcagtg

SEQ ID NO: 5656837 - DNA, 25 bp, Homo sapien
ttgataactgaatgcactcatttgt

SEQ ID NO: 5656838 - DNA, 25 bp, Homo sapien
tattcacagtaacccatttcaagat

SEQ ID NO: 5656839 - DNA, 25 bp, Homo sapien
tactatttgatcattagggtgattt

SEQ ID NO: 5656840 - DNA, 25 bp, Homo sapien
tttattcacagtaacccatttcaag

SEQ ID NO: 5656841 - DNA, 25 bp, Homo sapien
actatttgatcattagggtgatttt

SEQ ID NO: 5656842 - DNA, 25 bp, Homo sapien
ttattcacagtaacccatttcaaga

SEQ ID NO: 5656843 - DNA, 25 bp, Homo sapien
tgatcattagggtgatttttattca

SEQ ID NO: 5656844 - DNA, 25 bp, Homo sapien
gaataaaaatcaccctaatgatcaa

SEQ ID NO: 5656845 - DNA, 25 bp, Homo sapien
tcttgaaatgggttactgtgaataa

SEQ ID NO: 5656846 - DNA, 25 bp, Homo sapien
atcttgaaatgggttactgtgaata

SEQ ID NO: 5656847 - DNA, 25 bp, Homo sapien
tgaataaaaatcaccctaatgatca

SEQ ID NO: 5656848 - DNA, 25 bp, Homo sapien
aaatcaccctaatgatcaaatagta

SEQ ID NO: 5656849 - DNA, 25 bp, Homo sapien
cttgaaatgggttactgtgaataaa

SEQ ID NO: 5656850 - DNA, 25 bp, Homo sapien
acacaacccaaaaacgatacgccat

SEQ ID NO: 5656851 - DNA, 25 bp, Homo sapien
ggtttgtaatactttatataagaga

SEQ ID NO: 5656852 - DNA, 25 bp, Homo sapien
gtcatgtctaaaggtttgtaatact

SEQ ID NO: 5656853 - DNA, 25 bp, Homo sapien
aggtttgtaatactttatataagag

SEQ ID NO: 5656854 - DNA, 25 bp, Homo sapien
catgtctaaaggtttgtaatacttt

SEQ ID NO: 5656855 - DNA, 25 bp, Homo sapien
cgatacgccatctgttctgccctgg

SEQ ID NO: 5656856 - DNA, 25 bp, Homo sapien
ccagggcagaacagatggcgtatcg

SEQ ID NO: 5656857 - DNA, 25 bp, Homo sapien
aagtattacaaacctttagacatga

SEQ ID NO: 5656858 - DNA, 25 bp, Homo sapien
tctcttatataaagtattacaaacc

SEQ ID NO: 5656859 - DNA, 25 bp, Homo sapien
ctcttatataaagtattacaaacct

SEQ ID NO: 5656860 - DNA, 25 bp, Homo sapien
agtattacaaacctttagacatgac

SEQ ID NO: 5656861 - DNA, 25 bp, Homo sapien
aaagtattacaaacctttagacatg

SEQ ID NO: 5656862 - DNA, 25 bp, Homo sapien
aacctggcgccgttggcatcgtaga

SEQ ID NO: 5656863 - DNA, 25 bp, Homo sapien
ctggcgccgttggcatcgtagagtg

SEQ ID NO: 5656864 - DNA, 25 bp, Homo sapien
aaacctggcgccgttggcatcgtag

SEQ ID NO: 5656865 - DNA, 25 bp, Homo sapien
cctggcgccgttggcatcgtagagt

SEQ ID NO: 5656866 - DNA, 25 bp, Homo sapien
acctggcgccgttggcatcgtagag

SEQ ID NO: 5656867 - DNA, 25 bp, Homo sapien
cactctacgatgccaacggcgccag

SEQ ID NO: 5656868 - DNA, 25 bp, Homo sapien
tctacgatgccaacggcgccaggtt

SEQ ID NO: 5656869 - DNA, 25 bp, Homo sapien
ctacgatgccaacggcgccaggttt

SEQ ID NO: 5656870 - DNA, 25 bp, Homo sapien
ctctacgatgccaacggcgccaggt

SEQ ID NO: 5656871 - DNA, 25 bp, Homo sapien
actctacgatgccaacggcgccagg

SEQ ID NO: 5656872 - DNA, 25 bp, Homo sapien
acaatatggttttgatttagctatt

SEQ ID NO: 5656873 - DNA, 25 bp, Homo sapien
agagcccgggtagacaggatttgct

SEQ ID NO: 5656874 - DNA, 25 bp, Homo sapien
tggcattaaacagcatctccaaacc

SEQ ID NO: 5656875 - DNA, 25 bp, Homo sapien
taattggcattaaacagcatctcca

SEQ ID NO: 5656876 - DNA, 25 bp, Homo sapien
tagagcccgggtagacaggatttgc

SEQ ID NO: 5656877 - DNA, 25 bp, Homo sapien
tgctgattaattggcattaaacagc

SEQ ID NO: 5656878 - DNA, 25 bp, Homo sapien
gctgtttaatgccaattaatcagca

SEQ ID NO: 5656879 - DNA, 25 bp, Homo sapien
ggagatgctgtttaatgccaattaa

SEQ ID NO: 5656880 - DNA, 25 bp, Homo sapien
agcaaatcctgtctacccgggctct

SEQ ID NO: 5656881 - DNA, 25 bp, Homo sapien
ggtttggagatgctgtttaatgcca

SEQ ID NO: 5656882 - DNA, 25 bp, Homo sapien
aaatcctgtctacccgggctctact

SEQ ID NO: 5656883 - DNA, 25 bp, Homo sapien
aatagctaaatcaaaaccatattgt

SEQ ID NO: 5656884 - DNA, 25 bp, Homo sapien
gtcctgagaccgaaaaatatctgga

SEQ ID NO: 5656885 - DNA, 25 bp, Homo sapien
tcctgagaccgaaaaatatctggaa

SEQ ID NO: 5656886 - DNA, 25 bp, Homo sapien
ctggaagagtgtatgggagttgaga

SEQ ID NO: 5656887 - DNA, 25 bp, Homo sapien
gagtgtatgggagttgagatcagaa

SEQ ID NO: 5656888 - DNA, 25 bp, Homo sapien
gaagatggtgtaggtcagcctcagg

SEQ ID NO: 5656889 - DNA, 25 bp, Homo sapien
agaagatggtgtaggtcagcctcag

SEQ ID NO: 5656890 - DNA, 25 bp, Homo sapien
tctgatctcaactcccatacactct

SEQ ID NO: 5656891 - DNA, 25 bp, Homo sapien
tccagatatttttcggtctcaggac

SEQ ID NO: 5656892 - DNA, 25 bp, Homo sapien
tctcaactcccatacactcttccag

SEQ ID NO: 5656893 - DNA, 25 bp, Homo sapien
acttctgatctcaactcccatacac

SEQ ID NO: 5656894 - DNA, 25 bp, Homo sapien
ctgaggctgacctacaccatcttct

SEQ ID NO: 5656895 - DNA, 25 bp, Homo sapien
ttccagatatttttcggtctcagga

SEQ ID NO: 5656896 - DNA, 25 bp, Homo sapien
gtgtactgcttttccacaaatagtg

SEQ ID NO: 5656897 - DNA, 25 bp, Homo sapien
tagtgttcgtatatactatgtagtg

SEQ ID NO: 5656898 - DNA, 25 bp, Homo sapien
tcgtaataagaccagtgttatatgt

SEQ ID NO: 5656899 - DNA, 25 bp, Homo sapien
tccacaaatagtgttcgtatatact

SEQ ID NO: 5656900 - DNA, 25 bp, Homo sapien
tcgtatatactatgtagtgttgtgt

SEQ ID NO: 5656901 - DNA, 25 bp, Homo sapien
gaccagtgttatatgtgtactgctt

SEQ ID NO: 5656902 - DNA, 25 bp, Homo sapien
tagtatatacgaacactatttgtgg

SEQ ID NO: 5656903 - DNA, 25 bp, Homo sapien
cactatttgtggaaaagcagtacac

SEQ ID NO: 5656904 - DNA, 25 bp, Homo sapien
cacaacactacatagtatatacgaa

SEQ ID NO: 5656905 - DNA, 25 bp, Homo sapien
gcagtacacatataacactggtctt

SEQ ID NO: 5656906 - DNA, 25 bp, Homo sapien
gaaaagcagtacacatataacactg

SEQ ID NO: 5656907 - DNA, 25 bp, Homo sapien
acatataacactggtcttattacga

SEQ ID NO: 5656908 - DNA, 25 bp, Homo sapien
gtctctgcctagcttgggaatcatt

SEQ ID NO: 5656909 - DNA, 25 bp, Homo sapien
tgttcggtgttatcaaaatctttga

SEQ ID NO: 5656910 - DNA, 25 bp, Homo sapien
tctgcctagcttgggaatcatttct

SEQ ID NO: 5656911 - DNA, 25 bp, Homo sapien
aaattgttcggtgttatcaaaatct

SEQ ID NO: 5656912 - DNA, 25 bp, Homo sapien
cggtgttatcaaaatctttgaatcc

SEQ ID NO: 5656913 - DNA, 25 bp, Homo sapien
tctggttctcttcgcctaaaaattg

SEQ ID NO: 5656914 - DNA, 25 bp, Homo sapien
caaagattttgataacaccgaacaa

SEQ ID NO: 5656915 - DNA, 25 bp, Homo sapien
aatgattcccaagctaggcagagac

SEQ ID NO: 5656916 - DNA, 25 bp, Homo sapien
gaaatgattcccaagctaggcagag

SEQ ID NO: 5656917 - DNA, 25 bp, Homo sapien
caatttttaggcgaagagaaccaga

SEQ ID NO: 5656918 - DNA, 25 bp, Homo sapien
agaaatgattcccaagctaggcaga

SEQ ID NO: 5656919 - DNA, 25 bp, Homo sapien
ggattcaaagattttgataacaccg

SEQ ID NO: 5656920 - DNA, 25 bp, Homo sapien
gcactgggtcgttctcaggagcagt

SEQ ID NO: 5656921 - DNA, 25 bp, Homo sapien
agcactgggtcgttctcaggagcag

SEQ ID NO: 5656922 - DNA, 25 bp, Homo sapien
actgctcctgagaacgacccagtgc

SEQ ID NO: 5656923 - DNA, 25 bp, Homo sapien
ctgctcctgagaacgacccagtgct

SEQ ID NO: 5656924 - DNA, 25 bp, Homo sapien
ccgggaagcagtagtggaaagcact

SEQ ID NO: 5656925 - DNA, 25 bp, Homo sapien
agcactgggtcgttctcaggagcag

SEQ ID NO: 5656926 - DNA, 25 bp, Homo sapien
cagtgggaccttctgttagaatatt

SEQ ID NO: 5656927 - DNA, 25 bp, Homo sapien
gaccttctgttagaatatttgctta

SEQ ID NO: 5656928 - DNA, 25 bp, Homo sapien
gcttatttagcctttttctggatgc

SEQ ID NO: 5656929 - DNA, 25 bp, Homo sapien
tgttagaatatttgcttatttagcc

SEQ ID NO: 5656930 - DNA, 25 bp, Homo sapien
taagcaaatattctaacagaaggtc

SEQ ID NO: 5656931 - DNA, 25 bp, Homo sapien
gctaaataagcaaatattctaacag

SEQ ID NO: 5656932 - DNA, 25 bp, Homo sapien
tgctcctgagaacgacccagtgctt

SEQ ID NO: 5656933 - DNA, 25 bp, Homo sapien
gcatccagaaaaaggctaaataagc

SEQ ID NO: 5656934 - DNA, 25 bp, Homo sapien
gcaaatattctaacagaaggtccca

SEQ ID NO: 5656935 - DNA, 25 bp, Homo sapien
aatattctaacagaaggtcccactg

SEQ ID NO: 5656936 - DNA, 25 bp, Homo sapien
ttttttgagcatacacatgtgtgga

SEQ ID NO: 5656937 - DNA, 25 bp, Homo sapien
taaaagtgtacctacacgagatatt

SEQ ID NO: 5656938 - DNA, 25 bp, Homo sapien
ctttaaaagtgtacctacacgagat

SEQ ID NO: 5656939 - DNA, 25 bp, Homo sapien
tttgagcatacacatgtgtggagct

SEQ ID NO: 5656940 - DNA, 25 bp, Homo sapien
catgtgtggagctttgtagtttatt

SEQ ID NO: 5656941 - DNA, 25 bp, Homo sapien
gtgtacctacacgagatattttttg

SEQ ID NO: 5656942 - DNA, 25 bp, Homo sapien
taataaactacaaagctccacacat

SEQ ID NO: 5656943 - DNA, 25 bp, Homo sapien
ccacacatgtgtatgctcaaaaaat

SEQ ID NO: 5656944 - DNA, 25 bp, Homo sapien
aataaactacaaagctccacacatg

SEQ ID NO: 5656945 - DNA, 25 bp, Homo sapien
gctccacacatgtgtatgctcaaaa

SEQ ID NO: 5656946 - DNA, 25 bp, Homo sapien
caaaaaatatctcgtgtaggtacac

SEQ ID NO: 5656947 - DNA, 25 bp, Homo sapien
atctcgtgtaggtacacttttaaag

SEQ ID NO: 5656948 - DNA, 25 bp, Homo sapien
agagtttagttttctggccgggcat

SEQ ID NO: 5656949 - DNA, 25 bp, Homo sapien
atgcccggccagaaaactaaactct

SEQ ID NO: 5656950 - DNA, 25 bp, Homo sapien
aaatgctattaagatttagtacaag

SEQ ID NO: 5656951 - DNA, 25 bp, Homo sapien
tgctattaagatttagtacaagttt

SEQ ID NO: 5656952 - DNA, 25 bp, Homo sapien
agtttagttttctggccgggcatgg

SEQ ID NO: 5656953 - DNA, 25 bp, Homo sapien
agagtttagttttctggccgggcat

SEQ ID NO: 5656954 - DNA, 25 bp, Homo sapien
gtaaactagaaaatgctattaagat

SEQ ID NO: 5656955 - DNA, 25 bp, Homo sapien
gagtttagttttctggccgggcatg

SEQ ID NO: 5656956 - DNA, 25 bp, Homo sapien
aacttgtactaaatcttaatagcat

SEQ ID NO: 5656957 - DNA, 25 bp, Homo sapien
ccatgcccggccagaaaactaaact

SEQ ID NO: 5656958 - DNA, 25 bp, Homo sapien
cttgtactaaatcttaatagcattt

SEQ ID NO: 5656959 - DNA, 25 bp, Homo sapien
atgcccggccagaaaactaaactct

SEQ ID NO: 5656960 - DNA, 25 bp, Homo sapien
catgcccggccagaaaactaaactc

SEQ ID NO: 5656961 - DNA, 25 bp, Homo sapien
aaacttgtactaaatcttaatagca

SEQ ID NO: 5656962 - DNA, 25 bp, Homo sapien
cctgaaacttatgtaccagtgggat

SEQ ID NO: 5656963 - DNA, 25 bp, Homo sapien
aaaatgttgtaaaatgcgtattgca

SEQ ID NO: 5656964 - DNA, 25 bp, Homo sapien
aaatgttgtaaaatgcgtattgcat

SEQ ID NO: 5656965 - DNA, 25 bp, Homo sapien
tgtaaaatgcgtattgcattggttt

SEQ ID NO: 5656966 - DNA, 25 bp, Homo sapien
gttgtaaaatgcgtattgcattggt

SEQ ID NO: 5656967 - DNA, 25 bp, Homo sapien
atgttgtaaaatgcgtattgcattg

SEQ ID NO: 5656968 - DNA, 25 bp, Homo sapien
caatgcaatacgcattttacaacat

SEQ ID NO: 5656969 - DNA, 25 bp, Homo sapien
atcccactggtacataagtttcagg

SEQ ID NO: 5656970 - DNA, 25 bp, Homo sapien
aaaccaatgcaatacgcattttaca

SEQ ID NO: 5656971 - DNA, 25 bp, Homo sapien
aaccaatgcaatacgcattttacaa

SEQ ID NO: 5656972 - DNA, 25 bp, Homo sapien
tgcaatacgcattttacaacatttt

SEQ ID NO: 5656973 - DNA, 25 bp, Homo sapien
accaatgcaatacgcattttacaac

SEQ ID NO: 5656974 - DNA, 25 bp, Homo sapien
caaaacatgagtacagggaagtcac

SEQ ID NO: 5656975 - DNA, 25 bp, Homo sapien
taatatagttagactagaaaacacc

SEQ ID NO: 5656976 - DNA, 25 bp, Homo sapien
atatagttagactagaaaacaccaa

SEQ ID NO: 5656977 - DNA, 25 bp, Homo sapien
accaaaacatgagtacagggaagtc

SEQ ID NO: 5656978 - DNA, 25 bp, Homo sapien
ccaaaacatgagtacagggaagtca

SEQ ID NO: 5656979 - DNA, 25 bp, Homo sapien
ggaaagcttaatatagttagactag

SEQ ID NO: 5656980 - DNA, 25 bp, Homo sapien
tagtctaactatattaagctttcca

SEQ ID NO: 5656981 - DNA, 25 bp, Homo sapien
gtgacttccctgtactcatgttttg

SEQ ID NO: 5656982 - DNA, 25 bp, Homo sapien
tgacttccctgtactcatgttttgg

SEQ ID NO: 5656983 - DNA, 25 bp, Homo sapien
ggtgttttctagtctaactatatta

SEQ ID NO: 5656984 - DNA, 25 bp, Homo sapien
tctagtctaactatattaagctttc

SEQ ID NO: 5656985 - DNA, 25 bp, Homo sapien
gacttccctgtactcatgttttggt

SEQ ID NO: 5656986 - DNA, 25 bp, Homo sapien
agatcagtttgggtcctcaagtttg

SEQ ID NO: 5656987 - DNA, 25 bp, Homo sapien
ttgtaagttgggaatttggaatgta

SEQ ID NO: 5656988 - DNA, 25 bp, Homo sapien
ctcaagtttgtaagttgggaatttg

SEQ ID NO: 5656989 - DNA, 25 bp, Homo sapien
aagatcagtttgggtcctcaagttt

SEQ ID NO: 5656990 - DNA, 25 bp, Homo sapien
tcagtttgggtcctcaagtttgtaa

SEQ ID NO: 5656991 - DNA, 25 bp, Homo sapien
cagtttgggtcctcaagtttgtaag

SEQ ID NO: 5656992 - DNA, 25 bp, Homo sapien
ttacaaacttgaggacccaaactga

SEQ ID NO: 5656993 - DNA, 25 bp, Homo sapien
cttacaaacttgaggacccaaactg

SEQ ID NO: 5656994 - DNA, 25 bp, Homo sapien
caaattcccaacttacaaacttgag

SEQ ID NO: 5656995 - DNA, 25 bp, Homo sapien
aaacttgaggacccaaactgatctt

SEQ ID NO: 5656996 - DNA, 25 bp, Homo sapien
tacattccaaattcccaacttacaa

SEQ ID NO: 5656997 - DNA, 25 bp, Homo sapien
caaacttgaggacccaaactgatct

SEQ ID NO: 5656998 - DNA, 25 bp, Homo sapien
tagaactggatagagcattaaaaat

SEQ ID NO: 5656999 - DNA, 25 bp, Homo sapien
tgtttagaactggatagagcattaa

SEQ ID NO: 5657000 - DNA, 25 bp, Homo sapien
ttaagaggtactatattgacagaca

SEQ ID NO: 5657001 - DNA, 25 bp, Homo sapien
aagaggtactatattgacagacaga

SEQ ID NO: 5657002 - DNA, 25 bp, Homo sapien
catttaaaattaagaggtactatat

SEQ ID NO: 5657003 - DNA, 25 bp, Homo sapien
gaactggatagagcattaaaaatga

SEQ ID NO: 5657004 - DNA, 25 bp, Homo sapien
agaggtactatattgacagacagac

SEQ ID NO: 5657005 - DNA, 25 bp, Homo sapien
gaccaattccattgattaggttcag

SEQ ID NO: 5657006 - DNA, 25 bp, Homo sapien
ccaattccattgattaggttcaggg

SEQ ID NO: 5657007 - DNA, 25 bp, Homo sapien
gaggtactatattgacagacagacc

SEQ ID NO: 5657008 - DNA, 25 bp, Homo sapien
aggtactatattgacagacagacca

SEQ ID NO: 5657009 - DNA, 25 bp, Homo sapien
gacagaccaattccattgattaggt

SEQ ID NO: 5657010 - DNA, 25 bp, Homo sapien
tggtctgtctgtcaatatagtacct

SEQ ID NO: 5657011 - DNA, 25 bp, Homo sapien
gtctgtctgtcaatatagtacctct

SEQ ID NO: 5657012 - DNA, 25 bp, Homo sapien
acctaatcaatggaattggtctgtc

SEQ ID NO: 5657013 - DNA, 25 bp, Homo sapien
ccctgaacctaatcaatggaattgg

SEQ ID NO: 5657014 - DNA, 25 bp, Homo sapien
cctgaacctaatcaatggaattggt

SEQ ID NO: 5657015 - DNA, 25 bp, Homo sapien
gaacctaatcaatggaattggtctg

SEQ ID NO: 5657016 - DNA, 25 bp, Homo sapien
ttaatgctctatccagttctaaaca

SEQ ID NO: 5657017 - DNA, 25 bp, Homo sapien
tctgtctgtcaatatagtacctctt

SEQ ID NO: 5657018 - DNA, 25 bp, Homo sapien
catttttaatgctctatccagttct

SEQ ID NO: 5657019 - DNA, 25 bp, Homo sapien
tcatttttaatgctctatccagttc

SEQ ID NO: 5657020 - DNA, 25 bp, Homo sapien
tgtctgtcaatatagtacctcttaa

SEQ ID NO: 5657021 - DNA, 25 bp, Homo sapien
tttaatgctctatccagttctaaac

SEQ ID NO: 5657022 - DNA, 25 bp, Homo sapien
tgttttcatcctccaggtagttctt

SEQ ID NO: 5657023 - DNA, 25 bp, Homo sapien
gtgttttcatcctccaggtagttct

SEQ ID NO: 5657024 - DNA, 25 bp, Homo sapien
gttttcatcctccaggtagttcttg

SEQ ID NO: 5657025 - DNA, 25 bp, Homo sapien
agaactacctggaggatgaaaacac

SEQ ID NO: 5657026 - DNA, 25 bp, Homo sapien
caagaactacctggaggatgaaaac

SEQ ID NO: 5657027 - DNA, 25 bp, Homo sapien
aagaactacctggaggatgaaaaca

SEQ ID NO: 5657028 - DNA, 25 bp, Homo sapien
gaggtactatattgacagacagacc

SEQ ID NO: 5657029 - DNA, 25 bp, Homo sapien
cattgattaggttcagggccacacc

SEQ ID NO: 5657030 - DNA, 25 bp, Homo sapien
aattccattgattaggttcagggcc

SEQ ID NO: 5657031 - DNA, 25 bp, Homo sapien
gtgttttcatcctccaggtagttct

SEQ ID NO: 5657032 - DNA, 25 bp, Homo sapien
gacagaccaattccattgattaggt

SEQ ID NO: 5657033 - DNA, 25 bp, Homo sapien
gttttcatcctccaggtagttcttg

SEQ ID NO: 5657034 - DNA, 25 bp, Homo sapien
agaactacctggaggatgaaaacac

SEQ ID NO: 5657035 - DNA, 25 bp, Homo sapien
gtctgtctgtcaatatagtacctct

SEQ ID NO: 5657036 - DNA, 25 bp, Homo sapien
acctaatcaatggaattggtctgtc

SEQ ID NO: 5657037 - DNA, 25 bp, Homo sapien
caagaactacctggaggatgaaaac

SEQ ID NO: 5657038 - DNA, 25 bp, Homo sapien
tgtggccctgaacctaatcaatgga

SEQ ID NO: 5657039 - DNA, 25 bp, Homo sapien
ggtgtggccctgaacctaatcaatg

SEQ ID NO: 5657040 - DNA, 25 bp, Homo sapien
gagcaaggtatagtgacgcatctct

SEQ ID NO: 5657041 - DNA, 25 bp, Homo sapien
aggtatagtgacgcatctctgtagt

SEQ ID NO: 5657042 - DNA, 25 bp, Homo sapien
gcaaggtatagtgacgcatctctgt

SEQ ID NO: 5657043 - DNA, 25 bp, Homo sapien
caaggtatagtgacgcatctctgta

SEQ ID NO: 5657044 - DNA, 25 bp, Homo sapien
agcaaggtatagtgacgcatctctg

SEQ ID NO: 5657045 - DNA, 25 bp, Homo sapien
cagagatgcgtcactataccttgct

SEQ ID NO: 5657046 - DNA, 25 bp, Homo sapien
agagatgcgtcactataccttgctc

SEQ ID NO: 5657047 - DNA, 25 bp, Homo sapien
tacagagatgcgtcactataccttg

SEQ ID NO: 5657048 - DNA, 25 bp, Homo sapien
actacagagatgcgtcactatacct

SEQ ID NO: 5657049 - DNA, 25 bp, Homo sapien
acagagatgcgtcactataccttgc

SEQ ID NO: 5657050 - DNA, 25 bp, Homo sapien
tattatggaccaaggcttgtctaca

SEQ ID NO: 5657051 - DNA, 25 bp, Homo sapien
cctccactcttaatctcaccagctg

SEQ ID NO: 5657052 - DNA, 25 bp, Homo sapien
ggaccaaggcttgtctacaattact

SEQ ID NO: 5657053 - DNA, 25 bp, Homo sapien
aaggcttgtctacaattactccagc

SEQ ID NO: 5657054 - DNA, 25 bp, Homo sapien
cagcctcttgcctcacaattttgtc

SEQ ID NO: 5657055 - DNA, 25 bp, Homo sapien
ggcatattatggaccaaggcttgtc

SEQ ID NO: 5657056 - DNA, 25 bp, Homo sapien
aggagacaaaattgtgaggcaagag

SEQ ID NO: 5657057 - DNA, 25 bp, Homo sapien
gacaaaattgtgaggcaagaggctg

SEQ ID NO: 5657058 - DNA, 25 bp, Homo sapien
cagctggtgagattaagagtggagg

SEQ ID NO: 5657059 - DNA, 25 bp, Homo sapien
agtaattgtagacaagccttggtcc

SEQ ID NO: 5657060 - DNA, 25 bp, Homo sapien
gctggagtaattgtagacaagcctt

SEQ ID NO: 5657061 - DNA, 25 bp, Homo sapien
gacaagccttggtccataatatgcc

SEQ ID NO: 5657062 - DNA, 25 bp, Homo sapien
aattgagtttataggcattcagttt

SEQ ID NO: 5657063 - DNA, 25 bp, Homo sapien
gaattgagtttataggcattcagtt

SEQ ID NO: 5657064 - DNA, 25 bp, Homo sapien
attgagtttataggcattcagttta

SEQ ID NO: 5657065 - DNA, 25 bp, Homo sapien
aactgaatgcctataaactcaattc

SEQ ID NO: 5657066 - DNA, 25 bp, Homo sapien
aaactgaatgcctataaactcaatt

SEQ ID NO: 5657067 - DNA, 25 bp, Homo sapien
taaactgaatgcctataaactcaat

SEQ ID NO: 5657068 - DNA, 25 bp, Homo sapien
tgtatttgtttcacaaatagtgagc

SEQ ID NO: 5657069 - DNA, 25 bp, Homo sapien
taaaagtgttagcaatttctagaat

SEQ ID NO: 5657070 - DNA, 25 bp, Homo sapien
tgtgttcatatttaaaagtgttagc

SEQ ID NO: 5657071 - DNA, 25 bp, Homo sapien
aggcattcagtttaaatttacaaag

SEQ ID NO: 5657072 - DNA, 25 bp, Homo sapien
gaattgagtttataggcattcagtt

SEQ ID NO: 5657073 - DNA, 25 bp, Homo sapien
cacaaatagtgagctatgtgttcat

SEQ ID NO: 5657074 - DNA, 25 bp, Homo sapien
gctaacacttttaaatatgaacaca

SEQ ID NO: 5657075 - DNA, 25 bp, Homo sapien
actcaattctagaaattgctaacac

SEQ ID NO: 5657076 - DNA, 25 bp, Homo sapien
tcactatttgtgaaacaaatacagg

SEQ ID NO: 5657077 - DNA, 25 bp, Homo sapien
tatgaacacatagctcactatttgt

SEQ ID NO: 5657078 - DNA, 25 bp, Homo sapien
taaactgaatgcctataaactcaat

SEQ ID NO: 5657079 - DNA, 25 bp, Homo sapien
ctttgtaaatttaaactgaatgcct

SEQ ID NO: 5657080 - DNA, 25 bp, Homo sapien
gcaaaaattaggccgagcacagtgg

SEQ ID NO: 5657081 - DNA, 25 bp, Homo sapien
tgcaaaaattaggccgagcacagtg

SEQ ID NO: 5657082 - DNA, 25 bp, Homo sapien
atgcaaaaattaggccgagcacagt

SEQ ID NO: 5657083 - DNA, 25 bp, Homo sapien
cactgtgctcggcctaatttttgca

SEQ ID NO: 5657084 - DNA, 25 bp, Homo sapien
actgtgctcggcctaatttttgcat

SEQ ID NO: 5657085 - DNA, 25 bp, Homo sapien
ccactgtgctcggcctaatttttgc

SEQ ID NO: 5657086 - DNA, 25 bp, Homo sapien
acagactctctggtttttgttgttt

SEQ ID NO: 5657087 - DNA, 25 bp, Homo sapien
cagactctctggtttttgttgtttt

SEQ ID NO: 5657088 - DNA, 25 bp, Homo sapien
aaaacaacaaaaaccagagagtctg

SEQ ID NO: 5657089 - DNA, 25 bp, Homo sapien
aaacaacaaaaaccagagagtctgt

SEQ ID NO: 5657090 - DNA, 25 bp, Homo sapien
gaatggacttggctgtacccagtga

SEQ ID NO: 5657091 - DNA, 25 bp, Homo sapien
cagtgaatctttaagcccagctaat

SEQ ID NO: 5657092 - DNA, 25 bp, Homo sapien
gctccccgtatacaagcggaatgga

SEQ ID NO: 5657093 - DNA, 25 bp, Homo sapien
gacttggctgtacccagtgaatctt

SEQ ID NO: 5657094 - DNA, 25 bp, Homo sapien
gtacccagtgaatctttaagcccag

SEQ ID NO: 5657095 - DNA, 25 bp, Homo sapien
cgtatacaagcggaatggacttggc

SEQ ID NO: 5657096 - DNA, 25 bp, Homo sapien
taaagattcactgggtacagccaag

SEQ ID NO: 5657097 - DNA, 25 bp, Homo sapien
aattagctgggcttaaagattcact

SEQ ID NO: 5657098 - DNA, 25 bp, Homo sapien
tagctgggcttaaagattcactggg

SEQ ID NO: 5657099 - DNA, 25 bp, Homo sapien
gattcactgggtacagccaagtcca

SEQ ID NO: 5657100 - DNA, 25 bp, Homo sapien
gccaagtccattccgcttgtatacg

SEQ ID NO: 5657101 - DNA, 25 bp, Homo sapien
tgggcttaaagattcactgggtaca

SEQ ID NO: 5657102 - DNA, 25 bp, Homo sapien
gactggagagttggacacaatggct

SEQ ID NO: 5657103 - DNA, 25 bp, Homo sapien
gtaattaaaagctaaggctatagaa

SEQ ID NO: 5657104 - DNA, 25 bp, Homo sapien
gctaaggctatagaatttgactgga

SEQ ID NO: 5657105 - DNA, 25 bp, Homo sapien
ccagcctacatagtaattaaaagct

SEQ ID NO: 5657106 - DNA, 25 bp, Homo sapien
gcccagcctacatagtaattaaaag

SEQ ID NO: 5657107 - DNA, 25 bp, Homo sapien
gaatttgactggagagttggacaca

SEQ ID NO: 5657108 - DNA, 25 bp, Homo sapien
agccattgtgtccaactctccagtc

SEQ ID NO: 5657109 - DNA, 25 bp, Homo sapien
tgtgtccaactctccagtcaaattc

SEQ ID NO: 5657110 - DNA, 25 bp, Homo sapien
tccagtcaaattctatagccttagc

SEQ ID NO: 5657111 - DNA, 25 bp, Homo sapien
cattgtgtccaactctccagtcaaa

SEQ ID NO: 5657112 - DNA, 25 bp, Homo sapien
agcttttaattactatgtaggctgg

SEQ ID NO: 5657113 - DNA, 25 bp, Homo sapien
cttttaattactatgtaggctgggc

SEQ ID NO: 5657114 - DNA, 25 bp, Homo sapien
caacctgggcaacacgagaccgttt

SEQ ID NO: 5657115 - DNA, 25 bp, Homo sapien
ttgtttgaggtcaggagcttgagac

SEQ ID NO: 5657116 - DNA, 25 bp, Homo sapien
ggattgtttgaggtcaggagcttga

SEQ ID NO: 5657117 - DNA, 25 bp, Homo sapien
gaggattgtttgaggtcaggagctt

SEQ ID NO: 5657118 - DNA, 25 bp, Homo sapien
aataaaataaattggccaggcgtga

SEQ ID NO: 5657119 - DNA, 25 bp, Homo sapien
aggattgtttgaggtcaggagcttg

SEQ ID NO: 5657120 - DNA, 25 bp, Homo sapien
aagctcctgacctcaaacaatcctc

SEQ ID NO: 5657121 - DNA, 25 bp, Homo sapien
aaacggtctcgtgttgcccaggttg

SEQ ID NO: 5657122 - DNA, 25 bp, Homo sapien
gtctcaagctcctgacctcaaacaa

SEQ ID NO: 5657123 - DNA, 25 bp, Homo sapien
tcacgcctggccaatttattttatt

SEQ ID NO: 5657124 - DNA, 25 bp, Homo sapien
tcaagctcctgacctcaaacaatcc

SEQ ID NO: 5657125 - DNA, 25 bp, Homo sapien
caagctcctgacctcaaacaatcct

SEQ ID NO: 5657126 - DNA, 25 bp, Homo sapien
catgtctgtaagctcagctacttgg

SEQ ID NO: 5657127 - DNA, 25 bp, Homo sapien
tacatgtctgtaagctcagctactt

SEQ ID NO: 5657128 - DNA, 25 bp, Homo sapien
attagtcaggtatggtggtacatgt

SEQ ID NO: 5657129 - DNA, 25 bp, Homo sapien
tggtacatgtctgtaagctcagcta

SEQ ID NO: 5657130 - DNA, 25 bp, Homo sapien
ggtacatgtctgtaagctcagctac

SEQ ID NO: 5657131 - DNA, 25 bp, Homo sapien
ttagtcaggtatggtggtacatgtc

SEQ ID NO: 5657132 - DNA, 25 bp, Homo sapien
aagtagctgagcttacagacatgta

SEQ ID NO: 5657133 - DNA, 25 bp, Homo sapien
ccaagtagctgagcttacagacatg

SEQ ID NO: 5657134 - DNA, 25 bp, Homo sapien
acatgtaccaccatacctgactaat

SEQ ID NO: 5657135 - DNA, 25 bp, Homo sapien
gtagctgagcttacagacatgtacc

SEQ ID NO: 5657136 - DNA, 25 bp, Homo sapien
gacatgtaccaccatacctgactaa

SEQ ID NO: 5657137 - DNA, 25 bp, Homo sapien
tagctgagcttacagacatgtacca

SEQ ID NO: 5657138 - DNA, 25 bp, Homo sapien
aactctgtctcaaaacataaaaaat

SEQ ID NO: 5657139 - DNA, 25 bp, Homo sapien
ttgcagtgagctgagatcgcgtcat

SEQ ID NO: 5657140 - DNA, 25 bp, Homo sapien
ctctgtctcaaaacataaaaaataa

SEQ ID NO: 5657141 - DNA, 25 bp, Homo sapien
tgcagtgagctgagatcgcgtcatt

SEQ ID NO: 5657142 - DNA, 25 bp, Homo sapien
aatgacgcgatctcagctcactgca

SEQ ID NO: 5657143 - DNA, 25 bp, Homo sapien
attttttatgttttgagacagagtt

SEQ ID NO: 5657144 - DNA, 25 bp, Homo sapien
atgacgcgatctcagctcactgcaa

SEQ ID NO: 5657145 - DNA, 25 bp, Homo sapien
ttattttttatgttttgagacagag

SEQ ID NO: 5657146 - DNA, 25 bp, Homo sapien
ataaaaagaatttggccaggcgtgg

SEQ ID NO: 5657147 - DNA, 25 bp, Homo sapien
aataaaaagaatttggccaggcgtg

SEQ ID NO: 5657148 - DNA, 25 bp, Homo sapien
ccacgcctggccaaattctttttat

SEQ ID NO: 5657149 - DNA, 25 bp, Homo sapien
cacgcctggccaaattctttttatt

SEQ ID NO: 5657150 - DNA, 25 bp, Homo sapien
aagaatttgatcagaaacttgaatg

SEQ ID NO: 5657151 - DNA, 25 bp, Homo sapien
aaatagagtatagtaaatatagagt

SEQ ID NO: 5657152 - DNA, 25 bp, Homo sapien
acaaatagagtatagtaaatataga

SEQ ID NO: 5657153 - DNA, 25 bp, Homo sapien
caaatagagtatagtaaatatagag

SEQ ID NO: 5657154 - DNA, 25 bp, Homo sapien
cattcaagtttctgatcaaattctt

SEQ ID NO: 5657155 - DNA, 25 bp, Homo sapien
ctctatatttactatactctatttg

SEQ ID NO: 5657156 - DNA, 25 bp, Homo sapien
actctatatttactatactctattt

SEQ ID NO: 5657157 - DNA, 25 bp, Homo sapien
tctatatttactatactctatttgt

SEQ ID NO: 5657158 - DNA, 25 bp, Homo sapien
aagaatttgatcagaaacttgaatg

SEQ ID NO: 5657159 - DNA, 25 bp, Homo sapien
gaatttgatcagaaacttgaatgta

SEQ ID NO: 5657160 - DNA, 25 bp, Homo sapien
caaatagagtatagtaaatatagag

SEQ ID NO: 5657161 - DNA, 25 bp, Homo sapien
cagaaacttgaatgtaacaaataga

SEQ ID NO: 5657162 - DNA, 25 bp, Homo sapien
tgaatgtaacaaatagagtatagta

SEQ ID NO: 5657163 - DNA, 25 bp, Homo sapien
tgatcagaaacttgaatgtaacaaa

SEQ ID NO: 5657164 - DNA, 25 bp, Homo sapien
tttgttacattcaagtttctgatca

SEQ ID NO: 5657165 - DNA, 25 bp, Homo sapien
cattcaagtttctgatcaaattctt

SEQ ID NO: 5657166 - DNA, 25 bp, Homo sapien
tactatactctatttgttacattca

SEQ ID NO: 5657167 - DNA, 25 bp, Homo sapien
tacattcaagtttctgatcaaattc

SEQ ID NO: 5657168 - DNA, 25 bp, Homo sapien
ctctatatttactatactctatttg

SEQ ID NO: 5657169 - DNA, 25 bp, Homo sapien
tgttacattcaagtttctgatcaaa

SEQ ID NO: 5657170 - DNA, 25 bp, Homo sapien
gacactcagactgccatattttgat

SEQ ID NO: 5657171 - DNA, 25 bp, Homo sapien
aagacactcagactgccatattttg

SEQ ID NO: 5657172 - DNA, 25 bp, Homo sapien
aaagacactcagactgccatatttt

SEQ ID NO: 5657173 - DNA, 25 bp, Homo sapien
agacactcagactgccatattttga

SEQ ID NO: 5657174 - DNA, 25 bp, Homo sapien
tcaaaatatggcagtctgagtgtct

SEQ ID NO: 5657175 - DNA, 25 bp, Homo sapien
caaaatatggcagtctgagtgtctt

SEQ ID NO: 5657176 - DNA, 25 bp, Homo sapien
aaaatatggcagtctgagtgtcttt

SEQ ID NO: 5657177 - DNA, 25 bp, Homo sapien
atcaaaatatggcagtctgagtgtc

SEQ ID NO: 5657178 - DNA, 25 bp, Homo sapien
gactgccatattttgatgttgtaaa

SEQ ID NO: 5657179 - DNA, 25 bp, Homo sapien
gggaaaaagacactcagactgccat

SEQ ID NO: 5657180 - DNA, 25 bp, Homo sapien
cattttggataactgtgattttgaa

SEQ ID NO: 5657181 - DNA, 25 bp, Homo sapien
taactgtgattttgaaataattcct

SEQ ID NO: 5657182 - DNA, 25 bp, Homo sapien
gacactcagactgccatattttgat

SEQ ID NO: 5657183 - DNA, 25 bp, Homo sapien
aataattgcattttggataactgtg

SEQ ID NO: 5657184 - DNA, 25 bp, Homo sapien
tcaaaatatggcagtctgagtgtct

SEQ ID NO: 5657185 - DNA, 25 bp, Homo sapien
taaggaattatttcaaaatcacagt

SEQ ID NO: 5657186 - DNA, 25 bp, Homo sapien
caaaatcacagttatccaaaatgca

SEQ ID NO: 5657187 - DNA, 25 bp, Homo sapien
tatttacaacatcaaaatatggcag

SEQ ID NO: 5657188 - DNA, 25 bp, Homo sapien
gcagtctgagtgtctttttccccaa

SEQ ID NO: 5657189 - DNA, 25 bp, Homo sapien
caacatcaaaatatggcagtctgag

SEQ ID NO: 5657190 - DNA, 25 bp, Homo sapien
tctttgcttctactttgggaggctg

SEQ ID NO: 5657191 - DNA, 25 bp, Homo sapien
aaaatctttgcttctactttgggag

SEQ ID NO: 5657192 - DNA, 25 bp, Homo sapien
aagaccaacttgggcaacatagcaa

SEQ ID NO: 5657193 - DNA, 25 bp, Homo sapien
aatctttgcttctactttgggaggc

SEQ ID NO: 5657194 - DNA, 25 bp, Homo sapien
atctttgcttctactttgggaggct

SEQ ID NO: 5657195 - DNA, 25 bp, Homo sapien
aaatctttgcttctactttgggagg

SEQ ID NO: 5657196 - DNA, 25 bp, Homo sapien
agcctcccaaagtagaagcaaagat

SEQ ID NO: 5657197 - DNA, 25 bp, Homo sapien
cctcccaaagtagaagcaaagattt

SEQ ID NO: 5657198 - DNA, 25 bp, Homo sapien
ctcccaaagtagaagcaaagatttt

SEQ ID NO: 5657199 - DNA, 25 bp, Homo sapien
gcctcccaaagtagaagcaaagatt

SEQ ID NO: 5657200 - DNA, 25 bp, Homo sapien
cagcctcccaaagtagaagcaaaga

SEQ ID NO: 5657201 - DNA, 25 bp, Homo sapien
ttgctatgttgcccaagttggtctt

SEQ ID NO: 5657202 - DNA, 25 bp, Homo sapien
gacccataggttacaatgacttcac

SEQ ID NO: 5657203 - DNA, 25 bp, Homo sapien
gagacaaaagtatttagagtatagg

SEQ ID NO: 5657204 - DNA, 25 bp, Homo sapien
ggtgacccataggttacaatgactt

SEQ ID NO: 5657205 - DNA, 25 bp, Homo sapien
taggtgacccataggttacaatgac

SEQ ID NO: 5657206 - DNA, 25 bp, Homo sapien
aagtatttagagtataggtgaccca

SEQ ID NO: 5657207 - DNA, 25 bp, Homo sapien
tatttagagtataggtgacccatag

SEQ ID NO: 5657208 - DNA, 25 bp, Homo sapien
tgggtcacctatactctaaatactt

SEQ ID NO: 5657209 - DNA, 25 bp, Homo sapien
gtcattgtaacctatgggtcaccta

SEQ ID NO: 5657210 - DNA, 25 bp, Homo sapien
gaagtcattgtaacctatgggtcac

SEQ ID NO: 5657211 - DNA, 25 bp, Homo sapien
tatactctaaatacttttgtctcca

SEQ ID NO: 5657212 - DNA, 25 bp, Homo sapien
gtgaagtcattgtaacctatgggtc

SEQ ID NO: 5657213 - DNA, 25 bp, Homo sapien
tatgggtcacctatactctaaatac

SEQ ID NO: 5657214 - DNA, 25 bp, Homo sapien
gatcgtgttttacgtaggctaggct

SEQ ID NO: 5657215 - DNA, 25 bp, Homo sapien
taagtgttctgatcgtgttttacgt

SEQ ID NO: 5657216 - DNA, 25 bp, Homo sapien
tgatcgtgttttacgtaggctaggc

SEQ ID NO: 5657217 - DNA, 25 bp, Homo sapien
tcgtgttttacgtaggctaggctaa

SEQ ID NO: 5657218 - DNA, 25 bp, Homo sapien
tgttctgatcgtgttttacgtaggc

SEQ ID NO: 5657219 - DNA, 25 bp, Homo sapien
tctgatcgtgttttacgtaggctag

SEQ ID NO: 5657220 - DNA, 25 bp, Homo sapien
tagcctacgtaaaacacgatcagaa

SEQ ID NO: 5657221 - DNA, 25 bp, Homo sapien
taaaacacgatcagaacacttacat

SEQ ID NO: 5657222 - DNA, 25 bp, Homo sapien
ttagcctagcctacgtaaaacacga

SEQ ID NO: 5657223 - DNA, 25 bp, Homo sapien
gcctagcctacgtaaaacacgatca

SEQ ID NO: 5657224 - DNA, 25 bp, Homo sapien
tacgtaaaacacgatcagaacactt

SEQ ID NO: 5657225 - DNA, 25 bp, Homo sapien
tagcctagcctacgtaaaacacgat

SEQ ID NO: 5657226 - DNA, 25 bp, Homo sapien
gcagttctgtagtaaagggtattaa

SEQ ID NO: 5657227 - DNA, 25 bp, Homo sapien
cttaaaagtcgtttcattggcttgg

SEQ ID NO: 5657228 - DNA, 25 bp, Homo sapien
ctgtagtaaagggtattaaggatga

SEQ ID NO: 5657229 - DNA, 25 bp, Homo sapien
cagttctgtagtaaagggtattaag

SEQ ID NO: 5657230 - DNA, 25 bp, Homo sapien
tgcagttctgtagtaaagggtatta

SEQ ID NO: 5657231 - DNA, 25 bp, Homo sapien
caacttaaaagtcgtttcattggct

SEQ ID NO: 5657232 - DNA, 25 bp, Homo sapien
cttaataccctttactacagaactg

SEQ ID NO: 5657233 - DNA, 25 bp, Homo sapien
ttaataccctttactacagaactgc

SEQ ID NO: 5657234 - DNA, 25 bp, Homo sapien
taataccctttactacagaactgca

SEQ ID NO: 5657235 - DNA, 25 bp, Homo sapien
tcatccttaataccctttactacag

SEQ ID NO: 5657236 - DNA, 25 bp, Homo sapien
ccaagccaatgaaacgacttttaag

SEQ ID NO: 5657237 - DNA, 25 bp, Homo sapien
agccaatgaaacgacttttaagttg

SEQ ID NO: 5657238 - DNA, 25 bp, Homo sapien
atagtgcacccacgtgcttttcaga

SEQ ID NO: 5657239 - DNA, 25 bp, Homo sapien
tatagtgcacccacgtgcttttcag

SEQ ID NO: 5657240 - DNA, 25 bp, Homo sapien
atgtatagtgcacccacgtgctttt

SEQ ID NO: 5657241 - DNA, 25 bp, Homo sapien
gtatagtgcacccacgtgcttttca

SEQ ID NO: 5657242 - DNA, 25 bp, Homo sapien
aaatgtatagtgcacccacgtgctt

SEQ ID NO: 5657243 - DNA, 25 bp, Homo sapien
aatgtatagtgcacccacgtgcttt

SEQ ID NO: 5657244 - DNA, 25 bp, Homo sapien
ctgaaaagcacgtgggtgcactata

SEQ ID NO: 5657245 - DNA, 25 bp, Homo sapien
aaaagcacgtgggtgcactatacat

SEQ ID NO: 5657246 - DNA, 25 bp, Homo sapien
aaagcacgtgggtgcactatacatt

SEQ ID NO: 5657247 - DNA, 25 bp, Homo sapien
tctgaaaagcacgtgggtgcactat

SEQ ID NO: 5657248 - DNA, 25 bp, Homo sapien
tgaaaagcacgtgggtgcactatac

SEQ ID NO: 5657249 - DNA, 25 bp, Homo sapien
aagcacgtgggtgcactatacattt

SEQ ID NO: 5657250 - DNA, 25 bp, Homo sapien
tttgggcaagtactcactgttgtac

SEQ ID NO: 5657251 - DNA, 25 bp, Homo sapien
ggcaagtactcactgttgtacttta

SEQ ID NO: 5657252 - DNA, 25 bp, Homo sapien
caagtactcactgttgtactttaag

SEQ ID NO: 5657253 - DNA, 25 bp, Homo sapien
tgggcaagtactcactgttgtactt

SEQ ID NO: 5657254 - DNA, 25 bp, Homo sapien
ttgggcaagtactcactgttgtact

SEQ ID NO: 5657255 - DNA, 25 bp, Homo sapien
tgttgtactttaaggcagggctctc

SEQ ID NO: 5657256 - DNA, 25 bp, Homo sapien
ttaaagtacaacagtgagtacttgc

SEQ ID NO: 5657257 - DNA, 25 bp, Homo sapien
agtacaacagtgagtacttgcccaa

SEQ ID NO: 5657258 - DNA, 25 bp, Homo sapien
gtacaacagtgagtacttgcccaaa

SEQ ID NO: 5657259 - DNA, 25 bp, Homo sapien
aagtacaacagtgagtacttgccca

SEQ ID NO: 5657260 - DNA, 25 bp, Homo sapien
taaagtacaacagtgagtacttgcc

SEQ ID NO: 5657261 - DNA, 25 bp, Homo sapien
gagagccctgccttaaagtacaaca

SEQ ID NO: 5657262 - DNA, 25 bp, Homo sapien
actccccttggcttgcattaccacc

SEQ ID NO: 5657263 - DNA, 25 bp, Homo sapien
agccactccccttggcttgcattac

SEQ ID NO: 5657264 - DNA, 25 bp, Homo sapien
gtaatgcaagccaaggggagtggct

SEQ ID NO: 5657265 - DNA, 25 bp, Homo sapien
ggtggtaatgcaagccaaggggagt

SEQ ID NO: 5657266 - DNA, 25 bp, Homo sapien
gattcttataagagcgtgaaccctg

SEQ ID NO: 5657267 - DNA, 25 bp, Homo sapien
ctgcctcctgttggcatttgattct

SEQ ID NO: 5657268 - DNA, 25 bp, Homo sapien
cccttggcttgcattaccacctgag

SEQ ID NO: 5657269 - DNA, 25 bp, Homo sapien
ctcctgttggcatttgattcttata

SEQ ID NO: 5657270 - DNA, 25 bp, Homo sapien
agctctgcctcctgttggcatttga

SEQ ID NO: 5657271 - DNA, 25 bp, Homo sapien
agccactccccttggcttgcattac

SEQ ID NO: 5657272 - DNA, 25 bp, Homo sapien
cagggttcacgctcttataagaatc

SEQ ID NO: 5657273 - DNA, 25 bp, Homo sapien
gaatcaaatgccaacaggaggcaga

SEQ ID NO: 5657274 - DNA, 25 bp, Homo sapien
ctcaggtggtaatgcaagccaaggg

SEQ ID NO: 5657275 - DNA, 25 bp, Homo sapien
tcaaatgccaacaggaggcagagct

SEQ ID NO: 5657276 - DNA, 25 bp, Homo sapien
taagaatcaaatgccaacaggaggc

SEQ ID NO: 5657277 - DNA, 25 bp, Homo sapien
tataagaatcaaatgccaacaggag

SEQ ID NO: 5657278 - DNA, 25 bp, Homo sapien
gtcattgtctcccattaccccccag

SEQ ID NO: 5657279 - DNA, 25 bp, Homo sapien
gtgtgaactgcacatgcgagtgatc

SEQ ID NO: 5657280 - DNA, 25 bp, Homo sapien
taatgccagatgatctgtcattgtc

SEQ ID NO: 5657281 - DNA, 25 bp, Homo sapien
ctcccattaccccccagatgggact

SEQ ID NO: 5657282 - DNA, 25 bp, Homo sapien
tcattgtctcccattaccccccaga

SEQ ID NO: 5657283 - DNA, 25 bp, Homo sapien
ttgtctcccattaccccccagatgg

SEQ ID NO: 5657284 - DNA, 25 bp, Homo sapien
atctggggggtaatgggagacaatg

SEQ ID NO: 5657285 - DNA, 25 bp, Homo sapien
agtcccatctggggggtaatgggag

SEQ ID NO: 5657286 - DNA, 25 bp, Homo sapien
ccatctggggggtaatgggagacaa

SEQ ID NO: 5657287 - DNA, 25 bp, Homo sapien
gatcactcgcatgtgcagttcacac

SEQ ID NO: 5657288 - DNA, 25 bp, Homo sapien
tctggggggtaatgggagacaatga

SEQ ID NO: 5657289 - DNA, 25 bp, Homo sapien
ctggggggtaatgggagacaatgac

SEQ ID NO: 5657290 - DNA, 25 bp, Homo sapien
gtgtgaactgcacatgcgagtgatc

SEQ ID NO: 5657291 - DNA, 25 bp, Homo sapien
tgaaccctggtgtgaactgcacatg

SEQ ID NO: 5657292 - DNA, 25 bp, Homo sapien
gtgaaccctggtgtgaactgcacat

SEQ ID NO: 5657293 - DNA, 25 bp, Homo sapien
cgtgaaccctggtgtgaactgcaca

SEQ ID NO: 5657294 - DNA, 25 bp, Homo sapien
gaaccctggtgtgaactgcacatgc

SEQ ID NO: 5657295 - DNA, 25 bp, Homo sapien
tggtgtgaactgcacatgcgagtga

SEQ ID NO: 5657296 - DNA, 25 bp, Homo sapien
tgtgcagttcacaccagggttcacg

SEQ ID NO: 5657297 - DNA, 25 bp, Homo sapien
gcatgtgcagttcacaccagggttc

SEQ ID NO: 5657298 - DNA, 25 bp, Homo sapien
catgtgcagttcacaccagggttca

SEQ ID NO: 5657299 - DNA, 25 bp, Homo sapien
atgtgcagttcacaccagggttcac

SEQ ID NO: 5657300 - DNA, 25 bp, Homo sapien
gatcactcgcatgtgcagttcacac

SEQ ID NO: 5657301 - DNA, 25 bp, Homo sapien
cactcgcatgtgcagttcacaccag

SEQ ID NO: 5657302 - DNA, 25 bp, Homo sapien
gctcaaagcttccattgagtctaca

SEQ ID NO: 5657303 - DNA, 25 bp, Homo sapien
ctcaaagcttccattgagtctacat

SEQ ID NO: 5657304 - DNA, 25 bp, Homo sapien
agctcaaagcttccattgagtctac

SEQ ID NO: 5657305 - DNA, 25 bp, Homo sapien
atgtagactcaatggaagctttgag

SEQ ID NO: 5657306 - DNA, 25 bp, Homo sapien
gtagactcaatggaagctttgagct

SEQ ID NO: 5657307 - DNA, 25 bp, Homo sapien
tgtagactcaatggaagctttgagc

SEQ ID NO: 5657308 - DNA, 25 bp, Homo sapien
ttccattgagtctacattatggtga

SEQ ID NO: 5657309 - DNA, 25 bp, Homo sapien
gctcaaagcttccattgagtctaca

SEQ ID NO: 5657310 - DNA, 25 bp, Homo sapien
agcttccattgagtctacattatgg

SEQ ID NO: 5657311 - DNA, 25 bp, Homo sapien
tatttcattatagattacagtgtag

SEQ ID NO: 5657312 - DNA, 25 bp, Homo sapien
gatgggactgtctagttttaggaaa

SEQ ID NO: 5657313 - DNA, 25 bp, Homo sapien
ggaaaacaagctcaaagcttccatt

SEQ ID NO: 5657314 - DNA, 25 bp, Homo sapien
tcaccataatgtagactcaatggaa

SEQ ID NO: 5657315 - DNA, 25 bp, Homo sapien
ccataatgtagactcaatggaagct

SEQ ID NO: 5657316 - DNA, 25 bp, Homo sapien
tcctaaaactagacagtcccatctg

SEQ ID NO: 5657317 - DNA, 25 bp, Homo sapien
ctacactgtaatctataatgaaata

SEQ ID NO: 5657318 - DNA, 25 bp, Homo sapien
tgtagactcaatggaagctttgagc

SEQ ID NO: 5657319 - DNA, 25 bp, Homo sapien
aatggaagctttgagcttgttttcc

SEQ ID NO: 5657320 - DNA, 25 bp, Homo sapien
cacacagtttaatcctgtgttcagg

SEQ ID NO: 5657321 - DNA, 25 bp, Homo sapien
acacagtttaatcctgtgttcaggg

SEQ ID NO: 5657322 - DNA, 25 bp, Homo sapien
ttcaagtataagtggatccacacag

SEQ ID NO: 5657323 - DNA, 25 bp, Homo sapien
tattcaagtataagtggatccacac

SEQ ID NO: 5657324 - DNA, 25 bp, Homo sapien
actatataaaacaagtgccaggaaa

SEQ ID NO: 5657325 - DNA, 25 bp, Homo sapien
caactatataaaacaagtgccagga

SEQ ID NO: 5657326 - DNA, 25 bp, Homo sapien
tttcctggcacttgttttatatagt

SEQ ID NO: 5657327 - DNA, 25 bp, Homo sapien
ctgtgtggatccacttatacttgaa

SEQ ID NO: 5657328 - DNA, 25 bp, Homo sapien
tgaacacaggattaaactgtgtgga

SEQ ID NO: 5657329 - DNA, 25 bp, Homo sapien
ccctgaacacaggattaaactgtgt

SEQ ID NO: 5657330 - DNA, 25 bp, Homo sapien
tcctggcacttgttttatatagttg

SEQ ID NO: 5657331 - DNA, 25 bp, Homo sapien
gtgtggatccacttatacttgaata

SEQ ID NO: 5657332 - DNA, 25 bp, Homo sapien
tcctaacattgtcctaacagacttc

SEQ ID NO: 5657333 - DNA, 25 bp, Homo sapien
tcctagcagtttatacagggatctc

SEQ ID NO: 5657334 - DNA, 25 bp, Homo sapien
ggatctctagatacttagtttttgt

SEQ ID NO: 5657335 - DNA, 25 bp, Homo sapien
cattgtcctaacagacttcctacaa

SEQ ID NO: 5657336 - DNA, 25 bp, Homo sapien
gcagtttatacagggatctctagat

SEQ ID NO: 5657337 - DNA, 25 bp, Homo sapien
taacattgtcctaacagacttccta

SEQ ID NO: 5657338 - DNA, 25 bp, Homo sapien
acaaaaactaagtatctagagatcc

SEQ ID NO: 5657339 - DNA, 25 bp, Homo sapien
gagatccctgtataaactgctagga

SEQ ID NO: 5657340 - DNA, 25 bp, Homo sapien
tgtaggaagtctgttaggacaatgt

SEQ ID NO: 5657341 - DNA, 25 bp, Homo sapien
gaagtctgttaggacaatgttagga

SEQ ID NO: 5657342 - DNA, 25 bp, Homo sapien
tagagatccctgtataaactgctag

SEQ ID NO: 5657343 - DNA, 25 bp, Homo sapien
atctagagatccctgtataaactgc

SEQ ID NO: 5657344 - DNA, 25 bp, Homo sapien
tgcacatgggaatacattcattcat

SEQ ID NO: 5657345 - DNA, 25 bp, Homo sapien
atgcacatgggaatacattcattca

SEQ ID NO: 5657346 - DNA, 25 bp, Homo sapien
atgaatgaatgtattcccatgtgca

SEQ ID NO: 5657347 - DNA, 25 bp, Homo sapien
tgaatgaatgtattcccatgtgcat

SEQ ID NO: 5657348 - DNA, 25 bp, Homo sapien
tgcacatgggaatacattcattcat

SEQ ID NO: 5657349 - DNA, 25 bp, Homo sapien
tgttatgcacatgggaatacattca

SEQ ID NO: 5657350 - DNA, 25 bp, Homo sapien
aaatgaaattctgctctttgttttg

SEQ ID NO: 5657351 - DNA, 25 bp, Homo sapien
taagcacattaaaatgaaattctgc

SEQ ID NO: 5657352 - DNA, 25 bp, Homo sapien
tgttttgttatgcacatgggaatac

SEQ ID NO: 5657353 - DNA, 25 bp, Homo sapien
cacatgggaatacattcattcattt

SEQ ID NO: 5657354 - DNA, 25 bp, Homo sapien
tgtattcccatgtgcataacaaaac

SEQ ID NO: 5657355 - DNA, 25 bp, Homo sapien
aaatgaatgaatgtattcccatgtg

SEQ ID NO: 5657356 - DNA, 25 bp, Homo sapien
tgtgcataacaaaacaaagagcaga

SEQ ID NO: 5657357 - DNA, 25 bp, Homo sapien
atgaatgaatgtattcccatgtgca

SEQ ID NO: 5657358 - DNA, 25 bp, Homo sapien
tgaatgaatgtattcccatgtgcat

SEQ ID NO: 5657359 - DNA, 25 bp, Homo sapien
caaaacaaagagcagaatttcattt

SEQ ID NO: 5657360 - DNA, 25 bp, Homo sapien
caacaattacagactacctactact

SEQ ID NO: 5657361 - DNA, 25 bp, Homo sapien
ttgaagctattatgtaatggaggaa

SEQ ID NO: 5657362 - DNA, 25 bp, Homo sapien
gtcatatagatcaataatacatgtt

SEQ ID NO: 5657363 - DNA, 25 bp, Homo sapien
catgtttgaagctattatgtaatgg

SEQ ID NO: 5657364 - DNA, 25 bp, Homo sapien
catatagatcaataatacatgtttg

SEQ ID NO: 5657365 - DNA, 25 bp, Homo sapien
caattacagactacctactactgtg

SEQ ID NO: 5657366 - DNA, 25 bp, Homo sapien
cacagtagtaggtagtctgtaattg

SEQ ID NO: 5657367 - DNA, 25 bp, Homo sapien
agtagtaggtagtctgtaattgttg

SEQ ID NO: 5657368 - DNA, 25 bp, Homo sapien
caaacatgtattattgatctatatg

SEQ ID NO: 5657369 - DNA, 25 bp, Homo sapien
ccattacataatagcttcaaacatg

SEQ ID NO: 5657370 - DNA, 25 bp, Homo sapien
aacatgtattattgatctatatgac

SEQ ID NO: 5657371 - DNA, 25 bp, Homo sapien
tcctccattacataatagcttcaaa

SEQ ID NO: 5657372 - DNA, 25 bp, Homo sapien
ctaactctggtttagcagtgcaaga

SEQ ID NO: 5657373 - DNA, 25 bp, Homo sapien
tcttgcactgctaaaccagagttag

SEQ ID NO: 5657374 - DNA, 25 bp, Homo sapien
ctaactctggtttagcagtgcaaga

SEQ ID NO: 5657375 - DNA, 25 bp, Homo sapien
ctctggtttagcagtgcaagaaagc

SEQ ID NO: 5657376 - DNA, 25 bp, Homo sapien
taattgctgtgagaaagccatgcac

SEQ ID NO: 5657377 - DNA, 25 bp, Homo sapien
caatacagaattgtaattgctgtga

SEQ ID NO: 5657378 - DNA, 25 bp, Homo sapien
ccatgcacatagtgctgtggaatca

SEQ ID NO: 5657379 - DNA, 25 bp, Homo sapien
tgtggaatcacagagggcagctaac

SEQ ID NO: 5657380 - DNA, 25 bp, Homo sapien
agttagctgccctctgtgattccac

SEQ ID NO: 5657381 - DNA, 25 bp, Homo sapien
cacagcaattacaattctgtattgc

SEQ ID NO: 5657382 - DNA, 25 bp, Homo sapien
tgtgcatggctttctcacagcaatt

SEQ ID NO: 5657383 - DNA, 25 bp, Homo sapien
tgattccacagcactatgtgcatgg

SEQ ID NO: 5657384 - DNA, 25 bp, Homo sapien
tcttgcactgctaaaccagagttag

SEQ ID NO: 5657385 - DNA, 25 bp, Homo sapien
gctttcttgcactgctaaaccagag

SEQ ID NO: 5657386 - DNA, 25 bp, Homo sapien
gttagccagactacaacagtaggtt

SEQ ID NO: 5657387 - DNA, 25 bp, Homo sapien
gccagactacaacagtaggtttggg

SEQ ID NO: 5657388 - DNA, 25 bp, Homo sapien
gaaggagttagccagactacaacag

SEQ ID NO: 5657389 - DNA, 25 bp, Homo sapien
ccccaaaatagaattgatctgaatc

SEQ ID NO: 5657390 - DNA, 25 bp, Homo sapien
tagccagactacaacagtaggtttg

SEQ ID NO: 5657391 - DNA, 25 bp, Homo sapien
gagttagccagactacaacagtagg

SEQ ID NO: 5657392 - DNA, 25 bp, Homo sapien
cctactgttgtagtctggctaactc

SEQ ID NO: 5657393 - DNA, 25 bp, Homo sapien
tcctatccccaaacctactgttgta

SEQ ID NO: 5657394 - DNA, 25 bp, Homo sapien
agattcagatcaattctattttggg

SEQ ID NO: 5657395 - DNA, 25 bp, Homo sapien
tccccaaacctactgttgtagtctg

SEQ ID NO: 5657396 - DNA, 25 bp, Homo sapien
ctgttgtagtctggctaactccttc

SEQ ID NO: 5657397 - DNA, 25 bp, Homo sapien
caaacctactgttgtagtctggcta

SEQ ID NO: 5657398 - DNA, 25 bp, Homo sapien
gaaaatagtctgcaatttctcttgt

SEQ ID NO: 5657399 - DNA, 25 bp, Homo sapien
tgcaatttctcttgtttcatgcaaa

SEQ ID NO: 5657400 - DNA, 25 bp, Homo sapien
taatttgtcatagaaaatagtctgc

SEQ ID NO: 5657401 - DNA, 25 bp, Homo sapien
tcgagatttcccaatttgtaatttg

SEQ ID NO: 5657402 - DNA, 25 bp, Homo sapien
agtcctcacttaacatcccttgtgg

SEQ ID NO: 5657403 - DNA, 25 bp, Homo sapien
catgcaaatatattaagtcctcact

SEQ ID NO: 5657404 - DNA, 25 bp, Homo sapien
caaattacaaattgggaaatctcga

SEQ ID NO: 5657405 - DNA, 25 bp, Homo sapien
agtgaggacttaatatatttgcatg

SEQ ID NO: 5657406 - DNA, 25 bp, Homo sapien
catgaaacaagagaaattgcagact

SEQ ID NO: 5657407 - DNA, 25 bp, Homo sapien
ccacaagggatgttaagtgaggact

SEQ ID NO: 5657408 - DNA, 25 bp, Homo sapien
ttctatgacaaattacaaattggga

SEQ ID NO: 5657409 - DNA, 25 bp, Homo sapien
aaattgcagactattttctatgaca

SEQ ID NO: 5657410 - DNA, 25 bp, Homo sapien
cctttggcaaactgacaataaagtt

SEQ ID NO: 5657411 - DNA, 25 bp, Homo sapien
tggaaactaacctttggcaaactga

SEQ ID NO: 5657412 - DNA, 25 bp, Homo sapien
caataaagttgtttcactgtaacac

SEQ ID NO: 5657413 - DNA, 25 bp, Homo sapien
tgttttcattataggttgtttcaac

SEQ ID NO: 5657414 - DNA, 25 bp, Homo sapien
tttcactgtaacactgataaggagg

SEQ ID NO: 5657415 - DNA, 25 bp, Homo sapien
gaaactaacctttggcaaactgaca

SEQ ID NO: 5657416 - DNA, 25 bp, Homo sapien
gtgttacagtgaaacaactttattg

SEQ ID NO: 5657417 - DNA, 25 bp, Homo sapien
caactttattgtcagtttgccaaag

SEQ ID NO: 5657418 - DNA, 25 bp, Homo sapien
tgaaacaacctataatgaaaacaat

SEQ ID NO: 5657419 - DNA, 25 bp, Homo sapien
tcagtttgccaaaggttagtttcca

SEQ ID NO: 5657420 - DNA, 25 bp, Homo sapien
cctccttatcagtgttacagtgaaa

SEQ ID NO: 5657421 - DNA, 25 bp, Homo sapien
tagttgaaacaacctataatgaaaa

SEQ ID NO: 5657422 - DNA, 25 bp, Homo sapien
agatttgttaaggatatgtaaggta

SEQ ID NO: 5657423 - DNA, 25 bp, Homo sapien
atttgttaaggatatgtaaggtaag

SEQ ID NO: 5657424 - DNA, 25 bp, Homo sapien
tgttaaggatatgtaaggtaagtgt

SEQ ID NO: 5657425 - DNA, 25 bp, Homo sapien
ttgttaaggatatgtaaggtaagtg

SEQ ID NO: 5657426 - DNA, 25 bp, Homo sapien
gatttgttaaggatatgtaaggtaa

SEQ ID NO: 5657427 - DNA, 25 bp, Homo sapien
cttaccttacatatccttaacaaat

SEQ ID NO: 5657428 - DNA, 25 bp, Homo sapien
acacttaccttacatatccttaaca

SEQ ID NO: 5657429 - DNA, 25 bp, Homo sapien
cacttaccttacatatccttaacaa

SEQ ID NO: 5657430 - DNA, 25 bp, Homo sapien
ttaccttacatatccttaacaaatc

SEQ ID NO: 5657431 - DNA, 25 bp, Homo sapien
taccttacatatccttaacaaatct

SEQ ID NO: 5657432 - DNA, 25 bp, Homo sapien
ctatcattgaaaattaagtgaggac

SEQ ID NO: 5657433 - DNA, 25 bp, Homo sapien
tccaagaacctatcattgaaaatta

SEQ ID NO: 5657434 - DNA, 25 bp, Homo sapien
attaagtgaggacttaaaagatttg

SEQ ID NO: 5657435 - DNA, 25 bp, Homo sapien
gatatgtaaggtaagtgttagttta

SEQ ID NO: 5657436 - DNA, 25 bp, Homo sapien
tgttaaggatatgtaaggtaagtgt

SEQ ID NO: 5657437 - DNA, 25 bp, Homo sapien
gatttgttaaggatatgtaaggtaa

SEQ ID NO: 5657438 - DNA, 25 bp, Homo sapien
acacttaccttacatatccttaaca

SEQ ID NO: 5657439 - DNA, 25 bp, Homo sapien
taattttcaatgataggttcttgga

SEQ ID NO: 5657440 - DNA, 25 bp, Homo sapien
taaactaacacttaccttacatatc

SEQ ID NO: 5657441 - DNA, 25 bp, Homo sapien
caaatcttttaagtcctcacttaat

SEQ ID NO: 5657442 - DNA, 25 bp, Homo sapien
taccttacatatccttaacaaatct

SEQ ID NO: 5657443 - DNA, 25 bp, Homo sapien
taagtcctcacttaattttcaatga

SEQ ID NO: 5657444 - DNA, 25 bp, Homo sapien
aaatatatggaagttgactaactag

SEQ ID NO: 5657445 - DNA, 25 bp, Homo sapien
caagtacttaggaagaacatcctaa

SEQ ID NO: 5657446 - DNA, 25 bp, Homo sapien
taactagtaaataggttgttcagca

SEQ ID NO: 5657447 - DNA, 25 bp, Homo sapien
tattcaagtacttaggaagaacatc

SEQ ID NO: 5657448 - DNA, 25 bp, Homo sapien
tggaagttgactaactagtaaatag

SEQ ID NO: 5657449 - DNA, 25 bp, Homo sapien
tattcaacttagtagaatgaaactt

SEQ ID NO: 5657450 - DNA, 25 bp, Homo sapien
tttatattaggatgttcttcctaag

SEQ ID NO: 5657451 - DNA, 25 bp, Homo sapien
aagtttcattctactaagttgaata

SEQ ID NO: 5657452 - DNA, 25 bp, Homo sapien
taggatgttcttcctaagtacttga

SEQ ID NO: 5657453 - DNA, 25 bp, Homo sapien
tactagttagtcaacttccatatat

SEQ ID NO: 5657454 - DNA, 25 bp, Homo sapien
tgttcttcctaagtacttgaataag

SEQ ID NO: 5657455 - DNA, 25 bp, Homo sapien
gctgaacaacctatttactagttag

SEQ ID NO: 5657456 - DNA, 25 bp, Homo sapien
gttgttgttgttttgagacagtctc

SEQ ID NO: 5657457 - DNA, 25 bp, Homo sapien
gttttgagacagtctcactgcaacc

SEQ ID NO: 5657458 - DNA, 25 bp, Homo sapien
tgttgttgttttgagacagtctcac

SEQ ID NO: 5657459 - DNA, 25 bp, Homo sapien
ttgttgttgttttgagacagtctca

SEQ ID NO: 5657460 - DNA, 25 bp, Homo sapien
ttgttgttttgagacagtctcactg

SEQ ID NO: 5657461 - DNA, 25 bp, Homo sapien
gttgttgttttgagacagtctcact

SEQ ID NO: 5657462 - DNA, 25 bp, Homo sapien
ggttgcagtgagactgtctcaaaac

SEQ ID NO: 5657463 - DNA, 25 bp, Homo sapien
tgagactgtctcaaaacaacaacaa

SEQ ID NO: 5657464 - DNA, 25 bp, Homo sapien
agtgagactgtctcaaaacaacaac

SEQ ID NO: 5657465 - DNA, 25 bp, Homo sapien
gagactgtctcaaaacaacaacaac

SEQ ID NO: 5657466 - DNA, 25 bp, Homo sapien
gtgagactgtctcaaaacaacaaca

SEQ ID NO: 5657467 - DNA, 25 bp, Homo sapien
cagtgagactgtctcaaaacaacaa

SEQ ID NO: 5657468 - DNA, 25 bp, Homo sapien
gatgagagagtatatgtcattatga

SEQ ID NO: 5657469 - DNA, 25 bp, Homo sapien
taaaagatgagagagtatatgtcat

SEQ ID NO: 5657470 - DNA, 25 bp, Homo sapien
tatatgtcattatgatattctaacc

SEQ ID NO: 5657471 - DNA, 25 bp, Homo sapien
gagagtatatgtcattatgatattc

SEQ ID NO: 5657472 - DNA, 25 bp, Homo sapien
tgagagagtatatgtcattatgata

SEQ ID NO: 5657473 - DNA, 25 bp, Homo sapien
aaagatgagagagtatatgtcatta

SEQ ID NO: 5657474 - DNA, 25 bp, Homo sapien
taatgacatatactctctcatcttt

SEQ ID NO: 5657475 - DNA, 25 bp, Homo sapien
ggttagaatatcataatgacatata

SEQ ID NO: 5657476 - DNA, 25 bp, Homo sapien
tatcataatgacatatactctctca

SEQ ID NO: 5657477 - DNA, 25 bp, Homo sapien
tagaatatcataatgacatatactc

SEQ ID NO: 5657478 - DNA, 25 bp, Homo sapien
gaatatcataatgacatatactctc

SEQ ID NO: 5657479 - DNA, 25 bp, Homo sapien
tcataatgacatatactctctcatc

SEQ ID NO: 5657480 - DNA, 25 bp, Homo sapien
gatgagagagtatatgtcattatga

SEQ ID NO: 5657481 - DNA, 25 bp, Homo sapien
cattatgatattctaaccaagaaac

SEQ ID NO: 5657482 - DNA, 25 bp, Homo sapien
taaaagatgagagagtatatgtcat

SEQ ID NO: 5657483 - DNA, 25 bp, Homo sapien
tatatgtcattatgatattctaacc

SEQ ID NO: 5657484 - DNA, 25 bp, Homo sapien
tgtcattatgatattctaaccaaga

SEQ ID NO: 5657485 - DNA, 25 bp, Homo sapien
tgatattctaaccaagaaactaacc

SEQ ID NO: 5657486 - DNA, 25 bp, Homo sapien
ggttagtttcttggttagaatatca

SEQ ID NO: 5657487 - DNA, 25 bp, Homo sapien
taaaaatcaaagtacatgataattg

SEQ ID NO: 5657488 - DNA, 25 bp, Homo sapien
tatcataatgacatatactctctca

SEQ ID NO: 5657489 - DNA, 25 bp, Homo sapien
gacatatactctctcatcttttaaa

SEQ ID NO: 5657490 - DNA, 25 bp, Homo sapien
gaatatcataatgacatatactctc

SEQ ID NO: 5657491 - DNA, 25 bp, Homo sapien
tcttggttagaatatcataatgaca

SEQ ID NO: 5657492 - DNA, 25 bp, Homo sapien
gtatatgccctactggtcttgtaga

SEQ ID NO: 5657493 - DNA, 25 bp, Homo sapien
taattttgtatatgccctactggtc

SEQ ID NO: 5657494 - DNA, 25 bp, Homo sapien
tatgccctactggtcttgtagataa

SEQ ID NO: 5657495 - DNA, 25 bp, Homo sapien
tttgtatatgccctactggtcttgt

SEQ ID NO: 5657496 - DNA, 25 bp, Homo sapien
gccctactggtcttgtagataatca

SEQ ID NO: 5657497 - DNA, 25 bp, Homo sapien
tcaggagagatgtttctaaggattt

SEQ ID NO: 5657498 - DNA, 25 bp, Homo sapien
aaatccttagaaacatctctcctga

SEQ ID NO: 5657499 - DNA, 25 bp, Homo sapien
gaccagtagggcatatacaaaatta

SEQ ID NO: 5657500 - DNA, 25 bp, Homo sapien
tgattatctacaagaccagtagggc

SEQ ID NO: 5657501 - DNA, 25 bp, Homo sapien
tacaagaccagtagggcatatacaa

SEQ ID NO: 5657502 - DNA, 25 bp, Homo sapien
gattatctacaagaccagtagggca

SEQ ID NO: 5657503 - DNA, 25 bp, Homo sapien
tctacaagaccagtagggcatatac

SEQ ID NO: 5657504 - DNA, 25 bp, Homo sapien
gtggtgtgatgtcttccacctcgcg

SEQ ID NO: 5657505 - DNA, 25 bp, Homo sapien
tgtgatgtcttccacctcgcgggtt

SEQ ID NO: 5657506 - DNA, 25 bp, Homo sapien
agtggtgtgatgtcttccacctcgc

SEQ ID NO: 5657507 - DNA, 25 bp, Homo sapien
gtgtgatgtcttccacctcgcgggt

SEQ ID NO: 5657508 - DNA, 25 bp, Homo sapien
ggtgtgatgtcttccacctcgcggg

SEQ ID NO: 5657509 - DNA, 25 bp, Homo sapien
tggtgtgatgtcttccacctcgcgg

SEQ ID NO: 5657510 - DNA, 25 bp, Homo sapien
ccgcgaggtggaagacatcacacca

SEQ ID NO: 5657511 - DNA, 25 bp, Homo sapien
gcgaggtggaagacatcacaccact

SEQ ID NO: 5657512 - DNA, 25 bp, Homo sapien
aacccgcgaggtggaagacatcaca

SEQ ID NO: 5657513 - DNA, 25 bp, Homo sapien
cgcgaggtggaagacatcacaccac

SEQ ID NO: 5657514 - DNA, 25 bp, Homo sapien
acccgcgaggtggaagacatcacac

SEQ ID NO: 5657515 - DNA, 25 bp, Homo sapien
cccgcgaggtggaagacatcacacc

SEQ ID NO: 5657516 - DNA, 25 bp, Homo sapien
tcttttggagacagtctctctctgt

SEQ ID NO: 5657517 - DNA, 25 bp, Homo sapien
tttttcttttggagacagtctctct

SEQ ID NO: 5657518 - DNA, 25 bp, Homo sapien
tgagccaccatacccggccttttat

SEQ ID NO: 5657519 - DNA, 25 bp, Homo sapien
atttttcttttggagacagtctctc

SEQ ID NO: 5657520 - DNA, 25 bp, Homo sapien
ttttcttttggagacagtctctctc

SEQ ID NO: 5657521 - DNA, 25 bp, Homo sapien
tatttttcttttggagacagtctct

SEQ ID NO: 5657522 - DNA, 25 bp, Homo sapien
gagagagactgtctccaaaagaaaa

SEQ ID NO: 5657523 - DNA, 25 bp, Homo sapien
aacagagagagactgtctccaaaag

SEQ ID NO: 5657524 - DNA, 25 bp, Homo sapien
gagagactgtctccaaaagaaaaat

SEQ ID NO: 5657525 - DNA, 25 bp, Homo sapien
agagactgtctccaaaagaaaaata

SEQ ID NO: 5657526 - DNA, 25 bp, Homo sapien
agagagactgtctccaaaagaaaaa

SEQ ID NO: 5657527 - DNA, 25 bp, Homo sapien
ataaaaggccgggtatggtggctca

SEQ ID NO: 5657528 - DNA, 25 bp, Homo sapien
gggattacaggtgcatgccgccaca

SEQ ID NO: 5657529 - DNA, 25 bp, Homo sapien
agtggctccatctcagctcactgca

SEQ ID NO: 5657530 - DNA, 25 bp, Homo sapien
cactgcaacttccacctcccgggtt

SEQ ID NO: 5657531 - DNA, 25 bp, Homo sapien
tcccgggttcaagcaattctgcctc

SEQ ID NO: 5657532 - DNA, 25 bp, Homo sapien
gtggctccatctcagctcactgcaa

SEQ ID NO: 5657533 - DNA, 25 bp, Homo sapien
agctcactgcaacttccacctcccg

SEQ ID NO: 5657534 - DNA, 25 bp, Homo sapien
tgcagtgagctgagatggagccact

SEQ ID NO: 5657535 - DNA, 25 bp, Homo sapien
aacccgggaggtggaagttgcagtg

SEQ ID NO: 5657536 - DNA, 25 bp, Homo sapien
tgtggcggcatgcacctgtaatccc

SEQ ID NO: 5657537 - DNA, 25 bp, Homo sapien
gctgaggcagaattgcttgaacccg

SEQ ID NO: 5657538 - DNA, 25 bp, Homo sapien
cgggaggtggaagttgcagtgagct

SEQ ID NO: 5657539 - DNA, 25 bp, Homo sapien
gaggcagaattgcttgaacccggga

SEQ ID NO: 5657540 - DNA, 25 bp, Homo sapien
ccttgaactactgagctcaggcaat

SEQ ID NO: 5657541 - DNA, 25 bp, Homo sapien
gccttgaactactgagctcaggcaa

SEQ ID NO: 5657542 - DNA, 25 bp, Homo sapien
gtatttcaggagagatagggtttca

SEQ ID NO: 5657543 - DNA, 25 bp, Homo sapien
tgtatttcaggagagatagggtttc

SEQ ID NO: 5657544 - DNA, 25 bp, Homo sapien
ggccttgaactactgagctcaggca

SEQ ID NO: 5657545 - DNA, 25 bp, Homo sapien
ttttgtatttcaggagagatagggt

SEQ ID NO: 5657546 - DNA, 25 bp, Homo sapien
accctatctctcctgaaatacaaaa

SEQ ID NO: 5657547 - DNA, 25 bp, Homo sapien
tgcctgagctcagtagttcaaggcc

SEQ ID NO: 5657548 - DNA, 25 bp, Homo sapien
gaaaccctatctctcctgaaataca

SEQ ID NO: 5657549 - DNA, 25 bp, Homo sapien
attgcctgagctcagtagttcaagg

SEQ ID NO: 5657550 - DNA, 25 bp, Homo sapien
tgaaaccctatctctcctgaaatac

SEQ ID NO: 5657551 - DNA, 25 bp, Homo sapien
ttgcctgagctcagtagttcaaggc

SEQ ID NO: 5657552 - DNA, 25 bp, Homo sapien
tctgcttaatcattagagtaccttt

SEQ ID NO: 5657553 - DNA, 25 bp, Homo sapien
attctgcttaatcattagagtacct

SEQ ID NO: 5657554 - DNA, 25 bp, Homo sapien
ttctgcttaatcattagagtacctt

SEQ ID NO: 5657555 - DNA, 25 bp, Homo sapien
aggtactctaatgattaagcagaat

SEQ ID NO: 5657556 - DNA, 25 bp, Homo sapien
aaaggtactctaatgattaagcaga

SEQ ID NO: 5657557 - DNA, 25 bp, Homo sapien
aaggtactctaatgattaagcagaa

SEQ ID NO: 5657558 - DNA, 25 bp, Homo sapien
gcctcacctggcctgtttctaagga

SEQ ID NO: 5657559 - DNA, 25 bp, Homo sapien
tctgcttaatcattagagtaccttt

SEQ ID NO: 5657560 - DNA, 25 bp, Homo sapien
tttctgaaagtgaaaattctgctta

SEQ ID NO: 5657561 - DNA, 25 bp, Homo sapien
ctgtttctaaggattttaaagtgtg

SEQ ID NO: 5657562 - DNA, 25 bp, Homo sapien
atgtccagcctcacctggcctgttt

SEQ ID NO: 5657563 - DNA, 25 bp, Homo sapien
tttaaagtgtgttttctgaaagtga

SEQ ID NO: 5657564 - DNA, 25 bp, Homo sapien
tccttagaaacaggccaggtgaggc

SEQ ID NO: 5657565 - DNA, 25 bp, Homo sapien
taagcagaattttcactttcagaaa

SEQ ID NO: 5657566 - DNA, 25 bp, Homo sapien
cacactttaaaatccttagaaacag

SEQ ID NO: 5657567 - DNA, 25 bp, Homo sapien
tcactttcagaaaacacactttaaa

SEQ ID NO: 5657568 - DNA, 25 bp, Homo sapien
aaacaggccaggtgaggctggacat

SEQ ID NO: 5657569 - DNA, 25 bp, Homo sapien
aaaggtactctaatgattaagcaga

SEQ ID NO: 5657570 - DNA, 25 bp, Homo sapien
cacagtctcactgccaccttagcct

SEQ ID NO: 5657571 - DNA, 25 bp, Homo sapien
ttagcctcctgaggacctgggatat

SEQ ID NO: 5657572 - DNA, 25 bp, Homo sapien
agtctcactgccaccttagcctcct

SEQ ID NO: 5657573 - DNA, 25 bp, Homo sapien
cagtctcactgccaccttagcctcc

SEQ ID NO: 5657574 - DNA, 25 bp, Homo sapien
gcacagtctcactgccaccttagcc

SEQ ID NO: 5657575 - DNA, 25 bp, Homo sapien
cttagcctcctgaggacctgggata

SEQ ID NO: 5657576 - DNA, 25 bp, Homo sapien
tatcccaggtcctcaggaggctaag

SEQ ID NO: 5657577 - DNA, 25 bp, Homo sapien
aggaggctaaggtggcagtgagact

SEQ ID NO: 5657578 - DNA, 25 bp, Homo sapien
atatcccaggtcctcaggaggctaa

SEQ ID NO: 5657579 - DNA, 25 bp, Homo sapien
ggaggctaaggtggcagtgagactg

SEQ ID NO: 5657580 - DNA, 25 bp, Homo sapien
ggctaaggtggcagtgagactgtgc

SEQ ID NO: 5657581 - DNA, 25 bp, Homo sapien
aggctaaggtggcagtgagactgtg

SEQ ID NO: 5657582 - DNA, 25 bp, Homo sapien
gcctgcaccaccatgcctagctaat

SEQ ID NO: 5657583 - DNA, 25 bp, Homo sapien
tggtctcaaaactcctgggttcaag

SEQ ID NO: 5657584 - DNA, 25 bp, Homo sapien
ggtctcaaaactcctgggttcaagc

SEQ ID NO: 5657585 - DNA, 25 bp, Homo sapien
ctggtctcaaaactcctgggttcaa

SEQ ID NO: 5657586 - DNA, 25 bp, Homo sapien
aggcctgcaccaccatgcctagcta

SEQ ID NO: 5657587 - DNA, 25 bp, Homo sapien
ggcctgcaccaccatgcctagctaa

SEQ ID NO: 5657588 - DNA, 25 bp, Homo sapien
tagctaggcatggtggtgcaggcct

SEQ ID NO: 5657589 - DNA, 25 bp, Homo sapien
ttgaacccaggagttttgagaccag

SEQ ID NO: 5657590 - DNA, 25 bp, Homo sapien
attagctaggcatggtggtgcaggc

SEQ ID NO: 5657591 - DNA, 25 bp, Homo sapien
cttgaacccaggagttttgagacca

SEQ ID NO: 5657592 - DNA, 25 bp, Homo sapien
ttagctaggcatggtggtgcaggcc

SEQ ID NO: 5657593 - DNA, 25 bp, Homo sapien
gcttgaacccaggagttttgagacc

SEQ ID NO: 5657594 - DNA, 25 bp, Homo sapien
tttcagttgtttcctaagtgatctc

SEQ ID NO: 5657595 - DNA, 25 bp, Homo sapien
ttcagttgtttcctaagtgatctct

SEQ ID NO: 5657596 - DNA, 25 bp, Homo sapien
tttttcagttgtttcctaagtgatc

SEQ ID NO: 5657597 - DNA, 25 bp, Homo sapien
ttttcagttgtttcctaagtgatct

SEQ ID NO: 5657598 - DNA, 25 bp, Homo sapien
agagatcacttaggaaacaactgaa

SEQ ID NO: 5657599 - DNA, 25 bp, Homo sapien
gagatcacttaggaaacaactgaaa

SEQ ID NO: 5657600 - DNA, 25 bp, Homo sapien
gatcacttaggaaacaactgaaaaa

SEQ ID NO: 5657601 - DNA, 25 bp, Homo sapien
agatcacttaggaaacaactgaaaa

SEQ ID NO: 5657602 - DNA, 25 bp, Homo sapien
ccaaagtaatacaatgtgcaaaaca

SEQ ID NO: 5657603 - DNA, 25 bp, Homo sapien
tgtgtgactactgtttactccaaag

SEQ ID NO: 5657604 - DNA, 25 bp, Homo sapien
tattatgaatttatgtgtgactact

SEQ ID NO: 5657605 - DNA, 25 bp, Homo sapien
tttcagttgtttcctaagtgatctc

SEQ ID NO: 5657606 - DNA, 25 bp, Homo sapien
cagttgtttcctaagtgatctcttt

SEQ ID NO: 5657607 - DNA, 25 bp, Homo sapien
tactccaaagtaatacaatgtgcaa

SEQ ID NO: 5657608 - DNA, 25 bp, Homo sapien
gagatcacttaggaaacaactgaaa

SEQ ID NO: 5657609 - DNA, 25 bp, Homo sapien
ctttggagtaaacagtagtcacaca

SEQ ID NO: 5657610 - DNA, 25 bp, Homo sapien
cagtagtcacacataaattcataat

SEQ ID NO: 5657611 - DNA, 25 bp, Homo sapien
tgttttgcacattgtattactttgg

SEQ ID NO: 5657612 - DNA, 25 bp, Homo sapien
cacattgtattactttggagtaaac

SEQ ID NO: 5657613 - DNA, 25 bp, Homo sapien
tataaaaagagatcacttaggaaac

SEQ ID NO: 5657614 - DNA, 25 bp, Homo sapien
gatatattctgggtgaagggtgatg

SEQ ID NO: 5657615 - DNA, 25 bp, Homo sapien
agatatattctgggtgaagggtgat

SEQ ID NO: 5657616 - DNA, 25 bp, Homo sapien
aagggaacaaggagatatattctgg

SEQ ID NO: 5657617 - DNA, 25 bp, Homo sapien
atatattctgggtgaagggtgatgc

SEQ ID NO: 5657618 - DNA, 25 bp, Homo sapien
gagatatattctgggtgaagggtga

SEQ ID NO: 5657619 - DNA, 25 bp, Homo sapien
atcacccttcacccagaatatatct

SEQ ID NO: 5657620 - DNA, 25 bp, Homo sapien
tcacccttcacccagaatatatctc

SEQ ID NO: 5657621 - DNA, 25 bp, Homo sapien
catcacccttcacccagaatatatc

SEQ ID NO: 5657622 - DNA, 25 bp, Homo sapien
gcatcacccttcacccagaatatat

SEQ ID NO: 5657623 - DNA, 25 bp, Homo sapien
ccagaatatatctccttgttccctt

SEQ ID NO: 5657624 - DNA, 25 bp, Homo sapien
attctgggtgaagggtgatgctggc

SEQ ID NO: 5657625 - DNA, 25 bp, Homo sapien
aagggaacaaggagatatattctgg

SEQ ID NO: 5657626 - DNA, 25 bp, Homo sapien
gctggctgcagatggtgagccctca

SEQ ID NO: 5657627 - DNA, 25 bp, Homo sapien
tgcagatggtgagccctcagactca

SEQ ID NO: 5657628 - DNA, 25 bp, Homo sapien
tcccaaagtgtgtgaagggaacaag

SEQ ID NO: 5657629 - DNA, 25 bp, Homo sapien
atatattctgggtgaagggtgatgc

SEQ ID NO: 5657630 - DNA, 25 bp, Homo sapien
cttgttcccttcacacactttggga

SEQ ID NO: 5657631 - DNA, 25 bp, Homo sapien
tgagtctgagggctcaccatctgca

SEQ ID NO: 5657632 - DNA, 25 bp, Homo sapien
gcatcacccttcacccagaatatat

SEQ ID NO: 5657633 - DNA, 25 bp, Homo sapien
agggctcaccatctgcagccagcat

SEQ ID NO: 5657634 - DNA, 25 bp, Homo sapien
gagtctgagggctcaccatctgcag

SEQ ID NO: 5657635 - DNA, 25 bp, Homo sapien
ccagaatatatctccttgttccctt

SEQ ID NO: 5657636 - DNA, 25 bp, Homo sapien
gcgcgatctcagctactgcaagctc

SEQ ID NO: 5657637 - DNA, 25 bp, Homo sapien
gagaagctgggactgtaggtgcccg

SEQ ID NO: 5657638 - DNA, 25 bp, Homo sapien
gaagctgggactgtaggtgcccgcc

SEQ ID NO: 5657639 - DNA, 25 bp, Homo sapien
cgagaagctgggactgtaggtgccc

SEQ ID NO: 5657640 - DNA, 25 bp, Homo sapien
ggcgcgatctcagctactgcaagct

SEQ ID NO: 5657641 - DNA, 25 bp, Homo sapien
agaagctgggactgtaggtgcccgc

SEQ ID NO: 5657642 - DNA, 25 bp, Homo sapien
gcgggcacctacagtcccagcttct

SEQ ID NO: 5657643 - DNA, 25 bp, Homo sapien
gggcacctacagtcccagcttctcg

SEQ ID NO: 5657644 - DNA, 25 bp, Homo sapien
cgggcacctacagtcccagcttctc

SEQ ID NO: 5657645 - DNA, 25 bp, Homo sapien
agcttgcagtagctgagatcgcgcc

SEQ ID NO: 5657646 - DNA, 25 bp, Homo sapien
gagcttgcagtagctgagatcgcgc

SEQ ID NO: 5657647 - DNA, 25 bp, Homo sapien
ggcgggcacctacagtcccagcttc

SEQ ID NO: 5657648 - DNA, 25 bp, Homo sapien
agcaggggaggaatagtctagatag

SEQ ID NO: 5657649 - DNA, 25 bp, Homo sapien
cagcaggggaggaatagtctagata

SEQ ID NO: 5657650 - DNA, 25 bp, Homo sapien
caggggaggaatagtctagatagtc

SEQ ID NO: 5657651 - DNA, 25 bp, Homo sapien
tcagcaggggaggaatagtctagat

SEQ ID NO: 5657652 - DNA, 25 bp, Homo sapien
ttcagcaggggaggaatagtctaga

SEQ ID NO: 5657653 - DNA, 25 bp, Homo sapien
gggaggaatagtctagatagtctag

SEQ ID NO: 5657654 - DNA, 25 bp, Homo sapien
ctagactatctagactattcctccc

SEQ ID NO: 5657655 - DNA, 25 bp, Homo sapien
atctagactattcctcccctgctga

SEQ ID NO: 5657656 - DNA, 25 bp, Homo sapien
gactatctagactattcctcccctg

SEQ ID NO: 5657657 - DNA, 25 bp, Homo sapien
tagactatctagactattcctcccc

SEQ ID NO: 5657658 - DNA, 25 bp, Homo sapien
tctagactattcctcccctgctgaa

SEQ ID NO: 5657659 - DNA, 25 bp, Homo sapien
tatctagactattcctcccctgctg

SEQ ID NO: 5657660 - DNA, 25 bp, Homo sapien
ggacttggtggtattcaggtcatga

SEQ ID NO: 5657661 - DNA, 25 bp, Homo sapien
aaggacttggtggtattcaggtcat

SEQ ID NO: 5657662 - DNA, 25 bp, Homo sapien
aggacttggtggtattcaggtcatg

SEQ ID NO: 5657663 - DNA, 25 bp, Homo sapien
aggaaagaacttacagaagaacata

SEQ ID NO: 5657664 - DNA, 25 bp, Homo sapien
gcctcagagcgtgggaagcagaggg

SEQ ID NO: 5657665 - DNA, 25 bp, Homo sapien
agcctcagagcgtgggaagcagagg

SEQ ID NO: 5657666 - DNA, 25 bp, Homo sapien
tatgttcttctgtaagttctttcct

SEQ ID NO: 5657667 - DNA, 25 bp, Homo sapien
atgacctgaataccaccaagtcctt

SEQ ID NO: 5657668 - DNA, 25 bp, Homo sapien
ccctctgcttcccacgctctgaggc

SEQ ID NO: 5657669 - DNA, 25 bp, Homo sapien
tcatgacctgaataccaccaagtcc

SEQ ID NO: 5657670 - DNA, 25 bp, Homo sapien
catgacctgaataccaccaagtcct

SEQ ID NO: 5657671 - DNA, 25 bp, Homo sapien
cctctgcttcccacgctctgaggct

SEQ ID NO: 5657672 - DNA, 25 bp, Homo sapien
tcatgttgttcccaggccttgaatg

SEQ ID NO: 5657673 - DNA, 25 bp, Homo sapien
catgttgttcccaggccttgaatgg

SEQ ID NO: 5657674 - DNA, 25 bp, Homo sapien
ttgttcccaggccttgaatgggtgc

SEQ ID NO: 5657675 - DNA, 25 bp, Homo sapien
atgttgttcccaggccttgaatggg

SEQ ID NO: 5657676 - DNA, 25 bp, Homo sapien
atcatcatgttgttcccaggccttg

SEQ ID NO: 5657677 - DNA, 25 bp, Homo sapien
catcatgttgttcccaggccttgaa

SEQ ID NO: 5657678 - DNA, 25 bp, Homo sapien
gcacccattcaaggcctgggaacaa

SEQ ID NO: 5657679 - DNA, 25 bp, Homo sapien
ccattcaaggcctgggaacaacatg

SEQ ID NO: 5657680 - DNA, 25 bp, Homo sapien
cattcaaggcctgggaacaacatga

SEQ ID NO: 5657681 - DNA, 25 bp, Homo sapien
ttcaaggcctgggaacaacatgatg

SEQ ID NO: 5657682 - DNA, 25 bp, Homo sapien
cccattcaaggcctgggaacaacat

SEQ ID NO: 5657683 - DNA, 25 bp, Homo sapien
caaggcctgggaacaacatgatgat

SEQ ID NO: 5657684 - DNA, 25 bp, Homo sapien
gccaagagcatatctggtctgcttc

SEQ ID NO: 5657685 - DNA, 25 bp, Homo sapien
tcgtgaaccgaagctgggctgtgtt

SEQ ID NO: 5657686 - DNA, 25 bp, Homo sapien
catatctggtctgcttcgtgaaccg

SEQ ID NO: 5657687 - DNA, 25 bp, Homo sapien
gagcatatctggtctgcttcgtgaa

SEQ ID NO: 5657688 - DNA, 25 bp, Homo sapien
tctgcttcgtgaaccgaagctgggc

SEQ ID NO: 5657689 - DNA, 25 bp, Homo sapien
tatctggtctgcttcgtgaaccgaa

SEQ ID NO: 5657690 - DNA, 25 bp, Homo sapien
ggttcacgaagcagaccagatatgc

SEQ ID NO: 5657691 - DNA, 25 bp, Homo sapien
cacagcccagcttcggttcacgaag

SEQ ID NO: 5657692 - DNA, 25 bp, Homo sapien
ttcggttcacgaagcagaccagata

SEQ ID NO: 5657693 - DNA, 25 bp, Homo sapien
aacacagcccagcttcggttcacga

SEQ ID NO: 5657694 - DNA, 25 bp, Homo sapien
gaagcagaccagatatgctcttggc

SEQ ID NO: 5657695 - DNA, 25 bp, Homo sapien
cagcttcggttcacgaagcagacca

SEQ ID NO: 5657696 - DNA, 25 bp, Homo sapien
acagagtcgcactccgttgtctagg

SEQ ID NO: 5657697 - DNA, 25 bp, Homo sapien
cagagtcgcactccgttgtctaggc

SEQ ID NO: 5657698 - DNA, 25 bp, Homo sapien
gagtcgcactccgttgtctaggctg

SEQ ID NO: 5657699 - DNA, 25 bp, Homo sapien
gacagagtcgcactccgttgtctag

SEQ ID NO: 5657700 - DNA, 25 bp, Homo sapien
agagtcgcactccgttgtctaggct

SEQ ID NO: 5657701 - DNA, 25 bp, Homo sapien
ctagacaacggagtgcgactctgtc

SEQ ID NO: 5657702 - DNA, 25 bp, Homo sapien
gcctagacaacggagtgcgactctg

SEQ ID NO: 5657703 - DNA, 25 bp, Homo sapien
cctagacaacggagtgcgactctgt

SEQ ID NO: 5657704 - DNA, 25 bp, Homo sapien
agcctagacaacggagtgcgactct

SEQ ID NO: 5657705 - DNA, 25 bp, Homo sapien
cagcctagacaacggagtgcgactc

SEQ ID NO: 5657706 - DNA, 25 bp, Homo sapien
ctcagtctcagcagctatatcctct

SEQ ID NO: 5657707 - DNA, 25 bp, Homo sapien
gaggaagagtagagtcctagctcca

SEQ ID NO: 5657708 - DNA, 25 bp, Homo sapien
taagttcaggctaggcctcagtctc

SEQ ID NO: 5657709 - DNA, 25 bp, Homo sapien
cacctttccgttccataagttcagg

SEQ ID NO: 5657710 - DNA, 25 bp, Homo sapien
gctatatcctctggccagctacctt

SEQ ID NO: 5657711 - DNA, 25 bp, Homo sapien
gtagagtcctagctccacctttccg

SEQ ID NO: 5657712 - DNA, 25 bp, Homo sapien
cggaaaggtggagctaggactctac

SEQ ID NO: 5657713 - DNA, 25 bp, Homo sapien
aaggtagctggccagaggatatagc

SEQ ID NO: 5657714 - DNA, 25 bp, Homo sapien
ggagctaggactctactcttcctct

SEQ ID NO: 5657715 - DNA, 25 bp, Homo sapien
cctgaacttatggaacggaaaggtg

SEQ ID NO: 5657716 - DNA, 25 bp, Homo sapien
gagactgaggcctagcctgaactta

SEQ ID NO: 5657717 - DNA, 25 bp, Homo sapien
agaggatatagctgctgagactgag

SEQ ID NO: 5657718 - DNA, 25 bp, Homo sapien
catctaggattcagatccagagcct

SEQ ID NO: 5657719 - DNA, 25 bp, Homo sapien
actgccacatctaggattcagatcc

SEQ ID NO: 5657720 - DNA, 25 bp, Homo sapien
cacatctaggattcagatccagagc

SEQ ID NO: 5657721 - DNA, 25 bp, Homo sapien
gccacatctaggattcagatccaga

SEQ ID NO: 5657722 - DNA, 25 bp, Homo sapien
tgccacatctaggattcagatccag

SEQ ID NO: 5657723 - DNA, 25 bp, Homo sapien
ccacatctaggattcagatccagag

SEQ ID NO: 5657724 - DNA, 25 bp, Homo sapien
ggatctgaatcctagatgtggcagt

SEQ ID NO: 5657725 - DNA, 25 bp, Homo sapien
ctggatctgaatcctagatgtggca

SEQ ID NO: 5657726 - DNA, 25 bp, Homo sapien
aggctctggatctgaatcctagatg

SEQ ID NO: 5657727 - DNA, 25 bp, Homo sapien
tctggatctgaatcctagatgtggc

SEQ ID NO: 5657728 - DNA, 25 bp, Homo sapien
tggatctgaatcctagatgtggcag

SEQ ID NO: 5657729 - DNA, 25 bp, Homo sapien
gctctggatctgaatcctagatgtg

SEQ ID NO: 5657730 - DNA, 25 bp, Homo sapien
tccgtgctctgcatgttactctgtg

SEQ ID NO: 5657731 - DNA, 25 bp, Homo sapien
ctccgtgctctgcatgttactctgt

SEQ ID NO: 5657732 - DNA, 25 bp, Homo sapien
ccgtgctctgcatgttactctgtgt

SEQ ID NO: 5657733 - DNA, 25 bp, Homo sapien
gtgctctgcatgttactctgtgtgt

SEQ ID NO: 5657734 - DNA, 25 bp, Homo sapien
cgtgctctgcatgttactctgtgtg

SEQ ID NO: 5657735 - DNA, 25 bp, Homo sapien
gctccgtgctctgcatgttactctg

SEQ ID NO: 5657736 - DNA, 25 bp, Homo sapien
cacacagagtaacatgcagagcacg

SEQ ID NO: 5657737 - DNA, 25 bp, Homo sapien
cagagtaacatgcagagcacggagc

SEQ ID NO: 5657738 - DNA, 25 bp, Homo sapien
acacacagagtaacatgcagagcac

SEQ ID NO: 5657739 - DNA, 25 bp, Homo sapien
acacagagtaacatgcagagcacgg

SEQ ID NO: 5657740 - DNA, 25 bp, Homo sapien
acagagtaacatgcagagcacggag

SEQ ID NO: 5657741 - DNA, 25 bp, Homo sapien
cacagagtaacatgcagagcacgga

SEQ ID NO: 5657742 - DNA, 25 bp, Homo sapien
gatataaccctggaatctgtgtatt

SEQ ID NO: 5657743 - DNA, 25 bp, Homo sapien
tggatataaccctggaatctgtgta

SEQ ID NO: 5657744 - DNA, 25 bp, Homo sapien
tatttgtcaagcagcgtggtggtcc

SEQ ID NO: 5657745 - DNA, 25 bp, Homo sapien
ctgtgtatttgtcaagcagcgtggt

SEQ ID NO: 5657746 - DNA, 25 bp, Homo sapien
tcttggatataaccctggaatctgt

SEQ ID NO: 5657747 - DNA, 25 bp, Homo sapien
atttgtcaagcagcgtggtggtcct

SEQ ID NO: 5657748 - DNA, 25 bp, Homo sapien
acagattccagggttatatccaaga

SEQ ID NO: 5657749 - DNA, 25 bp, Homo sapien
ggaccaccacgctgcttgacaaata

SEQ ID NO: 5657750 - DNA, 25 bp, Homo sapien
accacgctgcttgacaaatacacag

SEQ ID NO: 5657751 - DNA, 25 bp, Homo sapien
aaatacacagattccagggttatat

SEQ ID NO: 5657752 - DNA, 25 bp, Homo sapien
aggaccaccacgctgcttgacaaat

SEQ ID NO: 5657753 - DNA, 25 bp, Homo sapien
tacacagattccagggttatatcca

SEQ ID NO: 5657754 - DNA, 25 bp, Homo sapien
gaaagccaggtctgcctatctccag

SEQ ID NO: 5657755 - DNA, 25 bp, Homo sapien
ggtctgcctatctccagatagctca

SEQ ID NO: 5657756 - DNA, 25 bp, Homo sapien
tctgcctatctccagatagctcagt

SEQ ID NO: 5657757 - DNA, 25 bp, Homo sapien
gccaggtctgcctatctccagatag

SEQ ID NO: 5657758 - DNA, 25 bp, Homo sapien
tgttcaaatgcctagtccagggtga

SEQ ID NO: 5657759 - DNA, 25 bp, Homo sapien
aaatgttcaaatgcctagtccaggg

SEQ ID NO: 5657760 - DNA, 25 bp, Homo sapien
actgagctatctggagataggcaga

SEQ ID NO: 5657761 - DNA, 25 bp, Homo sapien
tcaccctggactaggcatttgaaca

SEQ ID NO: 5657762 - DNA, 25 bp, Homo sapien
tgagctatctggagataggcagacc

SEQ ID NO: 5657763 - DNA, 25 bp, Homo sapien
tggagataggcagacctggctttca

SEQ ID NO: 5657764 - DNA, 25 bp, Homo sapien
tatctggagataggcagacctggct

SEQ ID NO: 5657765 - DNA, 25 bp, Homo sapien
ccctggactaggcatttgaacattt

SEQ ID NO: 5657766 - DNA, 25 bp, Homo sapien
ggagttccaagctggagggggctat

SEQ ID NO: 5657767 - DNA, 25 bp, Homo sapien
gagttccaagctggagggggctatg

SEQ ID NO: 5657768 - DNA, 25 bp, Homo sapien
aggagttccaagctggagggggcta

SEQ ID NO: 5657769 - DNA, 25 bp, Homo sapien
tagccccctccagcttggaactcct

SEQ ID NO: 5657770 - DNA, 25 bp, Homo sapien
atagccccctccagcttggaactcc

SEQ ID NO: 5657771 - DNA, 25 bp, Homo sapien
catagccccctccagcttggaactc

SEQ ID NO: 5657772 - DNA, 25 bp, Homo sapien
ggagttccaagctggagggggctat

SEQ ID NO: 5657773 - DNA, 25 bp, Homo sapien
gagttccaagctggagggggctatg

SEQ ID NO: 5657774 - DNA, 25 bp, Homo sapien
ttccaagctggagggggctatgata

SEQ ID NO: 5657775 - DNA, 25 bp, Homo sapien
aggagttccaagctggagggggcta

SEQ ID NO: 5657776 - DNA, 25 bp, Homo sapien
tggagggggctatgatagcgcttat

SEQ ID NO: 5657777 - DNA, 25 bp, Homo sapien
agctggagggggctatgatagcgct

SEQ ID NO: 5657778 - DNA, 25 bp, Homo sapien
taagcgctatcatagccccctccag

SEQ ID NO: 5657779 - DNA, 25 bp, Homo sapien
tagccccctccagcttggaactcct

SEQ ID NO: 5657780 - DNA, 25 bp, Homo sapien
atagccccctccagcttggaactcc

SEQ ID NO: 5657781 - DNA, 25 bp, Homo sapien
tatcatagccccctccagcttggaa

SEQ ID NO: 5657782 - DNA, 25 bp, Homo sapien
catagccccctccagcttggaactc

SEQ ID NO: 5657783 - DNA, 25 bp, Homo sapien
ataagcgctatcatagccccctcca

SEQ ID NO: 5657784 - DNA, 25 bp, Homo sapien
tcttcctagctcattgaaaccctct

SEQ ID NO: 5657785 - DNA, 25 bp, Homo sapien
tgagaattctggtaattcctagttt

SEQ ID NO: 5657786 - DNA, 25 bp, Homo sapien
cctctggtggccctacgaattgaga

SEQ ID NO: 5657787 - DNA, 25 bp, Homo sapien
ctagctcattgaaaccctctggtgg

SEQ ID NO: 5657788 - DNA, 25 bp, Homo sapien
ggtggccctacgaattgagaattct

SEQ ID NO: 5657789 - DNA, 25 bp, Homo sapien
ccacatgtctacttagtgctttatg

SEQ ID NO: 5657790 - DNA, 25 bp, Homo sapien
aaactaggaattaccagaattctca

SEQ ID NO: 5657791 - DNA, 25 bp, Homo sapien
cataaagcactaagtagacatgtgg

SEQ ID NO: 5657792 - DNA, 25 bp, Homo sapien
ccaccagagggtttcaatgagctag

SEQ ID NO: 5657793 - DNA, 25 bp, Homo sapien
tctcaattcgtagggccaccagagg

SEQ ID NO: 5657794 - DNA, 25 bp, Homo sapien
cagagggtttcaatgagctaggaag

SEQ ID NO: 5657795 - DNA, 25 bp, Homo sapien
gaattctcaattcgtagggccacca

SEQ ID NO: 5657796 - DNA, 25 bp, Homo sapien
ccatggtctctaaaggcctttcctc

SEQ ID NO: 5657797 - DNA, 25 bp, Homo sapien
tcctcactcataactactgggactt

SEQ ID NO: 5657798 - DNA, 25 bp, Homo sapien
gcctcagctcccatggtctctaaag

SEQ ID NO: 5657799 - DNA, 25 bp, Homo sapien
tcagctcccatggtctctaaaggcc

SEQ ID NO: 5657800 - DNA, 25 bp, Homo sapien
tcccatggtctctaaaggcctttcc

SEQ ID NO: 5657801 - DNA, 25 bp, Homo sapien
gctcccatggtctctaaaggccttt

SEQ ID NO: 5657802 - DNA, 25 bp, Homo sapien
aaaggcctttagagaccatgggagc

SEQ ID NO: 5657803 - DNA, 25 bp, Homo sapien
gaggaaaggcctttagagaccatgg

SEQ ID NO: 5657804 - DNA, 25 bp, Homo sapien
tttagagaccatgggagctgaggct

SEQ ID NO: 5657805 - DNA, 25 bp, Homo sapien
aagtcccagtagttatgagtgagga

SEQ ID NO: 5657806 - DNA, 25 bp, Homo sapien
ggaaaggcctttagagaccatggga

SEQ ID NO: 5657807 - DNA, 25 bp, Homo sapien
gcctttagagaccatgggagctgag

SEQ ID NO: 5657808 - DNA, 25 bp, Homo sapien
cccttgcaaacgaactgagattatt

SEQ ID NO: 5657809 - DNA, 25 bp, Homo sapien
tttccccttgcaaacgaactgagat

SEQ ID NO: 5657810 - DNA, 25 bp, Homo sapien
acgaactgagattattcagtcagaa

SEQ ID NO: 5657811 - DNA, 25 bp, Homo sapien
gcattggggagtcagatgcatcagc

SEQ ID NO: 5657812 - DNA, 25 bp, Homo sapien
ttcagtcagaatggcttggggtttg

SEQ ID NO: 5657813 - DNA, 25 bp, Homo sapien
gcaaacgaactgagattattcagtc

SEQ ID NO: 5657814 - DNA, 25 bp, Homo sapien
gatgcatctgactccccaatgcaga

SEQ ID NO: 5657815 - DNA, 25 bp, Homo sapien
caaaccccaagccattctgactgaa

SEQ ID NO: 5657816 - DNA, 25 bp, Homo sapien
ttctgactgaataatctcagttcgt

SEQ ID NO: 5657817 - DNA, 25 bp, Homo sapien
gactgaataatctcagttcgtttgc

SEQ ID NO: 5657818 - DNA, 25 bp, Homo sapien
aataatctcagttcgtttgcaaggg

SEQ ID NO: 5657819 - DNA, 25 bp, Homo sapien
gctgatgcatctgactccccaatgc

SEQ ID NO: 5657820 - DNA, 25 bp, Homo sapien
gcgatgtttagacctcgtgccgggc

SEQ ID NO: 5657821 - DNA, 25 bp, Homo sapien
gcatgcaacccctgcaacggtatcg

SEQ ID NO: 5657822 - DNA, 25 bp, Homo sapien
cgatgtttagacctcgtgccgggcc

SEQ ID NO: 5657823 - DNA, 25 bp, Homo sapien
acggtatcgcccgcgccgtgcagtt

SEQ ID NO: 5657824 - DNA, 25 bp, Homo sapien
gatgtttagacctcgtgccgggccc

SEQ ID NO: 5657825 - DNA, 25 bp, Homo sapien
cgtggcatgcaacccctgcaacggt

SEQ ID NO: 5657826 - DNA, 25 bp, Homo sapien
ggcccggcacgaggtctaaacatcg

SEQ ID NO: 5657827 - DNA, 25 bp, Homo sapien
acggcgcgggcgataccgttgcagg

SEQ ID NO: 5657828 - DNA, 25 bp, Homo sapien
accgttgcaggggttgcatgccacg

SEQ ID NO: 5657829 - DNA, 25 bp, Homo sapien
gcccggcacgaggtctaaacatcgc

SEQ ID NO: 5657830 - DNA, 25 bp, Homo sapien
gggcccggcacgaggtctaaacatc

SEQ ID NO: 5657831 - DNA, 25 bp, Homo sapien
aactgcacggcgcgggcgataccgt

SEQ ID NO: 5657832 - DNA, 25 bp, Homo sapien
gggacatccgttgtgcgggtgaagc

SEQ ID NO: 5657833 - DNA, 25 bp, Homo sapien
cgcgggactgggacatccgttgtgc

SEQ ID NO: 5657834 - DNA, 25 bp, Homo sapien
gtagcggccggcgacgcctgcgggc

SEQ ID NO: 5657835 - DNA, 25 bp, Homo sapien
cgggtgaagcgcgagctgcgctcgc

SEQ ID NO: 5657836 - DNA, 25 bp, Homo sapien
tgtgcgggtgaagcgcgagctgcgc

SEQ ID NO: 5657837 - DNA, 25 bp, Homo sapien
gagccgcgggactgggacatccgtt

SEQ ID NO: 5657838 - DNA, 25 bp, Homo sapien
gcccgcaggcgtcgccggccgctac

SEQ ID NO: 5657839 - DNA, 25 bp, Homo sapien
accggagatccccgcggcgagcgca

SEQ ID NO: 5657840 - DNA, 25 bp, Homo sapien
tcacccgcacaacggatgtcccagt

SEQ ID NO: 5657841 - DNA, 25 bp, Homo sapien
gcgagcgcagctcgcgcttcacccg

SEQ ID NO: 5657842 - DNA, 25 bp, Homo sapien
gcttcacccgcacaacggatgtccc

SEQ ID NO: 5657843 - DNA, 25 bp, Homo sapien
ggatgtcccagtcccgcggctcggg

SEQ ID NO: 5657844 - DNA, 25 bp, Homo sapien
ctgacgcctacgctgtccgcgatgt

SEQ ID NO: 5657845 - DNA, 25 bp, Homo sapien
tgacgcctacgctgtccgcgatgta

SEQ ID NO: 5657846 - DNA, 25 bp, Homo sapien
gggctgacgcctacgctgtccgcga

SEQ ID NO: 5657847 - DNA, 25 bp, Homo sapien
gacgcctacgctgtccgcgatgtaa

SEQ ID NO: 5657848 - DNA, 25 bp, Homo sapien
ggctgacgcctacgctgtccgcgat

SEQ ID NO: 5657849 - DNA, 25 bp, Homo sapien
acgcctacgctgtccgcgatgtaaa

SEQ ID NO: 5657850 - DNA, 25 bp, Homo sapien
tttacatcgcggacagcgtaggcgt

SEQ ID NO: 5657851 - DNA, 25 bp, Homo sapien
atcgcggacagcgtaggcgtcagcc

SEQ ID NO: 5657852 - DNA, 25 bp, Homo sapien
ttacatcgcggacagcgtaggcgtc

SEQ ID NO: 5657853 - DNA, 25 bp, Homo sapien
tacatcgcggacagcgtaggcgtca

SEQ ID NO: 5657854 - DNA, 25 bp, Homo sapien
acatcgcggacagcgtaggcgtcag

SEQ ID NO: 5657855 - DNA, 25 bp, Homo sapien
gacagcgtaggcgtcagccccgtgc

SEQ ID NO: 5657856 - DNA, 25 bp, Homo sapien
gaactgaagcgcatcgtcgagggca

SEQ ID NO: 5657857 - DNA, 25 bp, Homo sapien
cgaactgaagcgcatcgtcgagggc

SEQ ID NO: 5657858 - DNA, 25 bp, Homo sapien
tgccctcgacgatgcgcttcagttc

SEQ ID NO: 5657859 - DNA, 25 bp, Homo sapien
gccctcgacgatgcgcttcagttcg

SEQ ID NO: 5657860 - DNA, 25 bp, Homo sapien
ttttgttgaaggttatagtgattaa

SEQ ID NO: 5657861 - DNA, 25 bp, Homo sapien
tgttgaaggttatagtgattaaaaa

SEQ ID NO: 5657862 - DNA, 25 bp, Homo sapien
tgtcacaatgtagttcacgttttgt

SEQ ID NO: 5657863 - DNA, 25 bp, Homo sapien
tttttaatcactataaccttcaaca

SEQ ID NO: 5657864 - DNA, 25 bp, Homo sapien
acaaaacgtgaactacattgtgaca

SEQ ID NO: 5657865 - DNA, 25 bp, Homo sapien
ttaatcactataaccttcaacaaaa

SEQ ID NO: 5657866 - DNA, 25 bp, Homo sapien
gggttgtcacaatgtagttcacgtt

SEQ ID NO: 5657867 - DNA, 25 bp, Homo sapien
caatgtagttcacgttttgttgaag

SEQ ID NO: 5657868 - DNA, 25 bp, Homo sapien
tgttgaaggttatagtgattaaaaa

SEQ ID NO: 5657869 - DNA, 25 bp, Homo sapien
tgagggttgtcacaatgtagttcac

SEQ ID NO: 5657870 - DNA, 25 bp, Homo sapien
cacgttttgttgaaggttatagtga

SEQ ID NO: 5657871 - DNA, 25 bp, Homo sapien
tgtcacaatgtagttcacgttttgt

SEQ ID NO: 5657872 - DNA, 25 bp, Homo sapien
tttttaatcactataaccttcaaca

SEQ ID NO: 5657873 - DNA, 25 bp, Homo sapien
acaaaacgtgaactacattgtgaca

SEQ ID NO: 5657874 - DNA, 25 bp, Homo sapien
cactataaccttcaacaaaacgtga

SEQ ID NO: 5657875 - DNA, 25 bp, Homo sapien
gtgaactacattgtgacaaccctca

SEQ ID NO: 5657876 - DNA, 25 bp, Homo sapien
aatcactataaccttcaacaaaacg

SEQ ID NO: 5657877 - DNA, 25 bp, Homo sapien
cttcaacaaaacgtgaactacattg

SEQ ID NO: 5657878 - DNA, 25 bp, Homo sapien
gctgcacttagtggtagacaaggta

SEQ ID NO: 5657879 - DNA, 25 bp, Homo sapien
caagaggctgcacttagtggtagac

SEQ ID NO: 5657880 - DNA, 25 bp, Homo sapien
gaattattaacctgcaagaggctgc

SEQ ID NO: 5657881 - DNA, 25 bp, Homo sapien
ctgcaagaggctgcacttagtggta

SEQ ID NO: 5657882 - DNA, 25 bp, Homo sapien
gtagacaaggtagactttgatttga

SEQ ID NO: 5657883 - DNA, 25 bp, Homo sapien
tatgaattattaacctgcaagaggc

SEQ ID NO: 5657884 - DNA, 25 bp, Homo sapien
gcagcctcttgcaggttaataattc

SEQ ID NO: 5657885 - DNA, 25 bp, Homo sapien
taccttgtctaccactaagtgcagc

SEQ ID NO: 5657886 - DNA, 25 bp, Homo sapien
gtctaccactaagtgcagcctcttg

SEQ ID NO: 5657887 - DNA, 25 bp, Homo sapien
taccactaagtgcagcctcttgcag

SEQ ID NO: 5657888 - DNA, 25 bp, Homo sapien
gcctcttgcaggttaataattcata

SEQ ID NO: 5657889 - DNA, 25 bp, Homo sapien
tcaaatcaaagtctaccttgtctac

SEQ ID NO: 5657890 - DNA, 25 bp, Homo sapien
ctgcagggcttcctatctcaggtgc

SEQ ID NO: 5657891 - DNA, 25 bp, Homo sapien
tcctatagtgttgcttgtgtctttg

SEQ ID NO: 5657892 - DNA, 25 bp, Homo sapien
tcaggtgcctcagtatggattacag

SEQ ID NO: 5657893 - DNA, 25 bp, Homo sapien
tgaatgaatttcctatagtgttgct

SEQ ID NO: 5657894 - DNA, 25 bp, Homo sapien
tatgctgcagggcttcctatctcag

SEQ ID NO: 5657895 - DNA, 25 bp, Homo sapien
gtgtctttgtaactatgctgcaggg

SEQ ID NO: 5657896 - DNA, 25 bp, Homo sapien
tgtaatccatactgaggcacctgag

SEQ ID NO: 5657897 - DNA, 25 bp, Homo sapien
caaagacacaagcaacactatagga

SEQ ID NO: 5657898 - DNA, 25 bp, Homo sapien
gcaacactataggaaattcattcaa

SEQ ID NO: 5657899 - DNA, 25 bp, Homo sapien
cctgcagcatagttacaaagacaca

SEQ ID NO: 5657900 - DNA, 25 bp, Homo sapien
gcacctgagataggaagccctgcag

SEQ ID NO: 5657901 - DNA, 25 bp, Homo sapien
cctgagataggaagccctgcagcat

SEQ ID NO: 5657902 - DNA, 25 bp, Homo sapien
ctggcttcagccatcactttaattt

SEQ ID NO: 5657903 - DNA, 25 bp, Homo sapien
tggagagtggtaatttgttggtggt

SEQ ID NO: 5657904 - DNA, 25 bp, Homo sapien
tggcttcagccatcactttaattta

SEQ ID NO: 5657905 - DNA, 25 bp, Homo sapien
ggagagtggtaatttgttggtggta

SEQ ID NO: 5657906 - DNA, 25 bp, Homo sapien
gcttcagccatcactttaatttaaa

SEQ ID NO: 5657907 - DNA, 25 bp, Homo sapien
ggcttcagccatcactttaatttaa

SEQ ID NO: 5657908 - DNA, 25 bp, Homo sapien
tttaaattaaagtgatggctgaagc

SEQ ID NO: 5657909 - DNA, 25 bp, Homo sapien
accaccaacaaattaccactctcca

SEQ ID NO: 5657910 - DNA, 25 bp, Homo sapien
ttaaattaaagtgatggctgaagcc

SEQ ID NO: 5657911 - DNA, 25 bp, Homo sapien
aaattaaagtgatggctgaagccag

SEQ ID NO: 5657912 - DNA, 25 bp, Homo sapien
taaattaaagtgatggctgaagcca

SEQ ID NO: 5657913 - DNA, 25 bp, Homo sapien
taccaccaacaaattaccactctcc

SEQ ID NO: 5657914 - DNA, 25 bp, Homo sapien
gtggtatttctatagcctttgagcc

SEQ ID NO: 5657915 - DNA, 25 bp, Homo sapien
ttttctatcacctggcttcagccat

SEQ ID NO: 5657916 - DNA, 25 bp, Homo sapien
tgaaaaagtggagagtggtaatttg

SEQ ID NO: 5657917 - DNA, 25 bp, Homo sapien
tggcttcagccatcactttaattta

SEQ ID NO: 5657918 - DNA, 25 bp, Homo sapien
gcttcagccatcactttaatttaaa

SEQ ID NO: 5657919 - DNA, 25 bp, Homo sapien
tttgttggtggtatttctatagcct

SEQ ID NO: 5657920 - DNA, 25 bp, Homo sapien
ttagtctaatagtctttatttgccc

SEQ ID NO: 5657921 - DNA, 25 bp, Homo sapien
cttcagagcatttagtctaatagtc

SEQ ID NO: 5657922 - DNA, 25 bp, Homo sapien
tcagagcatttagtctaatagtctt

SEQ ID NO: 5657923 - DNA, 25 bp, Homo sapien
gagcatttagtctaatagtctttat

SEQ ID NO: 5657924 - DNA, 25 bp, Homo sapien
ttcagagcatttagtctaatagtct

SEQ ID NO: 5657925 - DNA, 25 bp, Homo sapien
cagagcatttagtctaatagtcttt

SEQ ID NO: 5657926 - DNA, 25 bp, Homo sapien
taaagactattagactaaatgctct

SEQ ID NO: 5657927 - DNA, 25 bp, Homo sapien
gggcaaataaagactattagactaa

SEQ ID NO: 5657928 - DNA, 25 bp, Homo sapien
gactattagactaaatgctctgaag

SEQ ID NO: 5657929 - DNA, 25 bp, Homo sapien
aaagactattagactaaatgctctg

SEQ ID NO: 5657930 - DNA, 25 bp, Homo sapien
aagactattagactaaatgctctga

SEQ ID NO: 5657931 - DNA, 25 bp, Homo sapien
aaataaagactattagactaaatgc

SEQ ID NO: 5657932 - DNA, 25 bp, Homo sapien
ttagtctaatagtctttatttgccc

SEQ ID NO: 5657933 - DNA, 25 bp, Homo sapien
cttcagagcatttagtctaatagtc

SEQ ID NO: 5657934 - DNA, 25 bp, Homo sapien
tatgaaacaaagtgataaccttctg

SEQ ID NO: 5657935 - DNA, 25 bp, Homo sapien
tctttatttgccctttccctagcaa

SEQ ID NO: 5657936 - DNA, 25 bp, Homo sapien
gtgataaccttctgcaaaagtagct

SEQ ID NO: 5657937 - DNA, 25 bp, Homo sapien
tctgcaaaagtagcttcagagcatt

SEQ ID NO: 5657938 - DNA, 25 bp, Homo sapien
gatcttatatctgaggtacttcaga

SEQ ID NO: 5657939 - DNA, 25 bp, Homo sapien
tcttatatctgaggtacttcagaac

SEQ ID NO: 5657940 - DNA, 25 bp, Homo sapien
ttatatctgaggtacttcagaacac

SEQ ID NO: 5657941 - DNA, 25 bp, Homo sapien
cttatatctgaggtacttcagaaca

SEQ ID NO: 5657942 - DNA, 25 bp, Homo sapien
tatatctgaggtacttcagaacact

SEQ ID NO: 5657943 - DNA, 25 bp, Homo sapien
atatctgaggtacttcagaacactt

SEQ ID NO: 5657944 - DNA, 25 bp, Homo sapien
tctgaagtacctcagatataagatc

SEQ ID NO: 5657945 - DNA, 25 bp, Homo sapien
aagtgttctgaagtacctcagatat

SEQ ID NO: 5657946 - DNA, 25 bp, Homo sapien
tgttctgaagtacctcagatataag

SEQ ID NO: 5657947 - DNA, 25 bp, Homo sapien
agtgttctgaagtacctcagatata

SEQ ID NO: 5657948 - DNA, 25 bp, Homo sapien
gttctgaagtacctcagatataaga

SEQ ID NO: 5657949 - DNA, 25 bp, Homo sapien
gtgttctgaagtacctcagatataa

SEQ ID NO: 5657950 - DNA, 25 bp, Homo sapien
tttatgatcttactacagaacactc

SEQ ID NO: 5657951 - DNA, 25 bp, Homo sapien
tttttatgatcttactacagaacac

SEQ ID NO: 5657952 - DNA, 25 bp, Homo sapien
ttttatgatcttactacagaacact

SEQ ID NO: 5657953 - DNA, 25 bp, Homo sapien
tatgatcttactacagaacactcaa

SEQ ID NO: 5657954 - DNA, 25 bp, Homo sapien
ttatgatcttactacagaacactca

SEQ ID NO: 5657955 - DNA, 25 bp, Homo sapien
ttttttatgatcttactacagaaca

SEQ ID NO: 5657956 - DNA, 25 bp, Homo sapien
gtgttctgtagtaagatcataaaaa

SEQ ID NO: 5657957 - DNA, 25 bp, Homo sapien
tgttctgtagtaagatcataaaaaa

SEQ ID NO: 5657958 - DNA, 25 bp, Homo sapien
gagtgttctgtagtaagatcataaa

SEQ ID NO: 5657959 - DNA, 25 bp, Homo sapien
agtgttctgtagtaagatcataaaa

SEQ ID NO: 5657960 - DNA, 25 bp, Homo sapien
tgagtgttctgtagtaagatcataa

SEQ ID NO: 5657961 - DNA, 25 bp, Homo sapien
ttgagtgttctgtagtaagatcata

SEQ ID NO: 5657962 - DNA, 25 bp, Homo sapien
tttatgatcttactacagaacactc

SEQ ID NO: 5657963 - DNA, 25 bp, Homo sapien
tttttatgatcttactacagaacac

SEQ ID NO: 5657964 - DNA, 25 bp, Homo sapien
ttatgatcttactacagaacactca

SEQ ID NO: 5657965 - DNA, 25 bp, Homo sapien
tatgatcttactacagaacactcaa

SEQ ID NO: 5657966 - DNA, 25 bp, Homo sapien
gatcttactacagaacactcaaacc

SEQ ID NO: 5657967 - DNA, 25 bp, Homo sapien
atcttactacagaacactcaaacca

SEQ ID NO: 5657968 - DNA, 25 bp, Homo sapien
tgttctgtagtaagatcataaaaaa

SEQ ID NO: 5657969 - DNA, 25 bp, Homo sapien
gagtgttctgtagtaagatcataaa

SEQ ID NO: 5657970 - DNA, 25 bp, Homo sapien
ggtttgagtgttctgtagtaagatc

SEQ ID NO: 5657971 - DNA, 25 bp, Homo sapien
taataataattagaagaaaattagc

SEQ ID NO: 5657972 - DNA, 25 bp, Homo sapien
tgagtgttctgtagtaagatcataa

SEQ ID NO: 5657973 - DNA, 25 bp, Homo sapien
ttgagtgttctgtagtaagatcata

SEQ ID NO: 5657974 - DNA, 25 bp, Homo sapien
caaagccctgtgataattaatgaag

SEQ ID NO: 5657975 - DNA, 25 bp, Homo sapien
ttttataccattgcaaagccctgtg

SEQ ID NO: 5657976 - DNA, 25 bp, Homo sapien
tttataccattgcaaagccctgtga

SEQ ID NO: 5657977 - DNA, 25 bp, Homo sapien
aaatgtctggcactgctagacatgt

SEQ ID NO: 5657978 - DNA, 25 bp, Homo sapien
tctggcactgctagacatgttattt

SEQ ID NO: 5657979 - DNA, 25 bp, Homo sapien
ggcactgctagacatgttattttgt

SEQ ID NO: 5657980 - DNA, 25 bp, Homo sapien
taacatgtctagcagtgccagacat

SEQ ID NO: 5657981 - DNA, 25 bp, Homo sapien
cacagggctttgcaatggtataaaa

SEQ ID NO: 5657982 - DNA, 25 bp, Homo sapien
acaaaataacatgtctagcagtgcc

SEQ ID NO: 5657983 - DNA, 25 bp, Homo sapien
cttcattaattatcacagggctttg

SEQ ID NO: 5657984 - DNA, 25 bp, Homo sapien
aaaataacatgtctagcagtgccag

SEQ ID NO: 5657985 - DNA, 25 bp, Homo sapien
aattttgacaaaataacatgtctag

SEQ ID NO: 5657986 - DNA, 25 bp, Homo sapien
tctcagttccctccaaagattgctt

SEQ ID NO: 5657987 - DNA, 25 bp, Homo sapien
gagcttctctcgcttcccctctcag

SEQ ID NO: 5657988 - DNA, 25 bp, Homo sapien
gcttctctcgcttcccctctcagtt

SEQ ID NO: 5657989 - DNA, 25 bp, Homo sapien
tgtgagcttctctcgcttcccctct

SEQ ID NO: 5657990 - DNA, 25 bp, Homo sapien
gtgagcttctctcgcttcccctctc

SEQ ID NO: 5657991 - DNA, 25 bp, Homo sapien
tctgtgagcttctctcgcttcccct

SEQ ID NO: 5657992 - DNA, 25 bp, Homo sapien
gaggggaagcgagagaagctcacag

SEQ ID NO: 5657993 - DNA, 25 bp, Homo sapien
aagcaatctttggagggaactgaga

SEQ ID NO: 5657994 - DNA, 25 bp, Homo sapien
aggggaagcgagagaagctcacaga

SEQ ID NO: 5657995 - DNA, 25 bp, Homo sapien
aactgagaggggaagcgagagaagc

SEQ ID NO: 5657996 - DNA, 25 bp, Homo sapien
ctgagaggggaagcgagagaagctc

SEQ ID NO: 5657997 - DNA, 25 bp, Homo sapien
gagaggggaagcgagagaagctcac

SEQ ID NO: 5657998 - DNA, 25 bp, Homo sapien
tctcagttccctccaaagattgctt

SEQ ID NO: 5657999 - DNA, 25 bp, Homo sapien
gacttgtttctgtgagcttctctcg

SEQ ID NO: 5658000 - DNA, 25 bp, Homo sapien
gcttctctcgcttcccctctcagtt

SEQ ID NO: 5658001 - DNA, 25 bp, Homo sapien
ttcatatagacttgtttctgtgagc

SEQ ID NO: 5658002 - DNA, 25 bp, Homo sapien
aaattctgccgtattctttgctgga

SEQ ID NO: 5658003 - DNA, 25 bp, Homo sapien
gccgtattctttgctggaaagtaaa

SEQ ID NO: 5658004 - DNA, 25 bp, Homo sapien
gaaacaagtctatatgaaaatttac

SEQ ID NO: 5658005 - DNA, 25 bp, Homo sapien
tactttccagcaaagaatacggcag

SEQ ID NO: 5658006 - DNA, 25 bp, Homo sapien
aagcaatctttggagggaactgaga

SEQ ID NO: 5658007 - DNA, 25 bp, Homo sapien
gggaagcgagagaagctcacagaaa

SEQ ID NO: 5658008 - DNA, 25 bp, Homo sapien
cgagagaagctcacagaaacaagtc

SEQ ID NO: 5658009 - DNA, 25 bp, Homo sapien
tccagcaaagaatacggcagaattt

SEQ ID NO: 5658010 - DNA, 25 bp, Homo sapien
ccatcatttgaggtccttaatgtta

SEQ ID NO: 5658011 - DNA, 25 bp, Homo sapien
taaaaaaggctagaaccatcatttg

SEQ ID NO: 5658012 - DNA, 25 bp, Homo sapien
aggtccttaatgttaagccacagtc

SEQ ID NO: 5658013 - DNA, 25 bp, Homo sapien
tgaggtccttaatgttaagccacag

SEQ ID NO: 5658014 - DNA, 25 bp, Homo sapien
ctactgaaacatcgtttgtttttct

SEQ ID NO: 5658015 - DNA, 25 bp, Homo sapien
gaggtccttaatgttaagccacagt

SEQ ID NO: 5658016 - DNA, 25 bp, Homo sapien
taacattaaggacctcaaatgatgg

SEQ ID NO: 5658017 - DNA, 25 bp, Homo sapien
caaatgatggttctagcctttttta

SEQ ID NO: 5658018 - DNA, 25 bp, Homo sapien
ttaacattaaggacctcaaatgatg

SEQ ID NO: 5658019 - DNA, 25 bp, Homo sapien
agaaaaacaaacgatgtttcagtag

SEQ ID NO: 5658020 - DNA, 25 bp, Homo sapien
tgtggcttaacattaaggacctcaa

SEQ ID NO: 5658021 - DNA, 25 bp, Homo sapien
gactgtggcttaacattaaggacct

SEQ ID NO: 5658022 - DNA, 25 bp, Homo sapien
ttttacagtgggttgactcttgtga

SEQ ID NO: 5658023 - DNA, 25 bp, Homo sapien
acttaatcttataattgggaaactg

SEQ ID NO: 5658024 - DNA, 25 bp, Homo sapien
cgtcaatgcctatgatttgtttgag

SEQ ID NO: 5658025 - DNA, 25 bp, Homo sapien
cttcattttacagtgggttgactct

SEQ ID NO: 5658026 - DNA, 25 bp, Homo sapien
gggaaactgttcgtcaatgcctatg

SEQ ID NO: 5658027 - DNA, 25 bp, Homo sapien
gaaactgttcgtcaatgcctatgat

SEQ ID NO: 5658028 - DNA, 25 bp, Homo sapien
ctcaaacaaatcataggcattgacg

SEQ ID NO: 5658029 - DNA, 25 bp, Homo sapien
agagtcaacccactgtaaaatgaag

SEQ ID NO: 5658030 - DNA, 25 bp, Homo sapien
caaatcataggcattgacgaacagt

SEQ ID NO: 5658031 - DNA, 25 bp, Homo sapien
cagtttcccaattataagattaagt

SEQ ID NO: 5658032 - DNA, 25 bp, Homo sapien
tcacaagagtcaacccactgtaaaa

SEQ ID NO: 5658033 - DNA, 25 bp, Homo sapien
cataggcattgacgaacagtttccc

SEQ ID NO: 5658034 - DNA, 25 bp, Homo sapien
ttctttgggaagaaaaatgtccatc

SEQ ID NO: 5658035 - DNA, 25 bp, Homo sapien
ctttaacagcttgcacatggagcac

SEQ ID NO: 5658036 - DNA, 25 bp, Homo sapien
aaatgtccatctgttctttaacagc

SEQ ID NO: 5658037 - DNA, 25 bp, Homo sapien
taatgttgaggttgcatgatttaaa

SEQ ID NO: 5658038 - DNA, 25 bp, Homo sapien
tgaggttgcatgatttaaatatggg

SEQ ID NO: 5658039 - DNA, 25 bp, Homo sapien
gcacatggagcacaaagaatttaat

SEQ ID NO: 5658040 - DNA, 25 bp, Homo sapien
gatggacatttttcttcccaaagaa

SEQ ID NO: 5658041 - DNA, 25 bp, Homo sapien
taaattctttgtgctccatgtgcaa

SEQ ID NO: 5658042 - DNA, 25 bp, Homo sapien
taaatcatgcaacctcaacattaaa

SEQ ID NO: 5658043 - DNA, 25 bp, Homo sapien
cccatatttaaatcatgcaacctca

SEQ ID NO: 5658044 - DNA, 25 bp, Homo sapien
tccatgtgcaagctgttaaagaaca

SEQ ID NO: 5658045 - DNA, 25 bp, Homo sapien
catatttaaatcatgcaacctcaac

SEQ ID NO: 5658046 - DNA, 25 bp, Homo sapien
tcttaattatgtgtggactccttag

SEQ ID NO: 5658047 - DNA, 25 bp, Homo sapien
taaatcttaattatgtgtggactcc

SEQ ID NO: 5658048 - DNA, 25 bp, Homo sapien
agtttattgtttgatcacaggtcac

SEQ ID NO: 5658049 - DNA, 25 bp, Homo sapien
ttaattatgtgtggactccttagga

SEQ ID NO: 5658050 - DNA, 25 bp, Homo sapien
atcacaggtcacaatatgaaggtac

SEQ ID NO: 5658051 - DNA, 25 bp, Homo sapien
tgatcacaggtcacaatatgaaggt

SEQ ID NO: 5658052 - DNA, 25 bp, Homo sapien
ggagtccacacataattaagattta

SEQ ID NO: 5658053 - DNA, 25 bp, Homo sapien
tcctaaggagtccacacataattaa

SEQ ID NO: 5658054 - DNA, 25 bp, Homo sapien
gtaccttcatattgtgacctgtgat

SEQ ID NO: 5658055 - DNA, 25 bp, Homo sapien
taaggagtccacacataattaagat

SEQ ID NO: 5658056 - DNA, 25 bp, Homo sapien
gtgacctgtgatcaaacaataaact

SEQ ID NO: 5658057 - DNA, 25 bp, Homo sapien
accttcatattgtgacctgtgatca

SEQ ID NO: 5658058 - DNA, 25 bp, Homo sapien
cttattccactaacagttaagatta

SEQ ID NO: 5658059 - DNA, 25 bp, Homo sapien
caaactaggaggagagtgtgattct

SEQ ID NO: 5658060 - DNA, 25 bp, Homo sapien
gccactacaggtcaaactaggagga

SEQ ID NO: 5658061 - DNA, 25 bp, Homo sapien
tacaggtcaaactaggaggagagtg

SEQ ID NO: 5658062 - DNA, 25 bp, Homo sapien
tagtgaaccgccactacaggtcaaa

SEQ ID NO: 5658063 - DNA, 25 bp, Homo sapien
gaaccgccactacaggtcaaactag

SEQ ID NO: 5658064 - DNA, 25 bp, Homo sapien
tcctcctagtttgacctgtagtggc

SEQ ID NO: 5658065 - DNA, 25 bp, Homo sapien
tcctagtttgacctgtagtggcggt

SEQ ID NO: 5658066 - DNA, 25 bp, Homo sapien
cactctcctcctagtttgacctgta

SEQ ID NO: 5658067 - DNA, 25 bp, Homo sapien
gaatcacactctcctcctagtttga

SEQ ID NO: 5658068 - DNA, 25 bp, Homo sapien
taatcttaactgttagtggaataag

SEQ ID NO: 5658069 - DNA, 25 bp, Homo sapien
ttgacctgtagtggcggttcactac

SEQ ID NO: 5658070 - DNA, 25 bp, Homo sapien
attaaggtctggtttggctttctag

SEQ ID NO: 5658071 - DNA, 25 bp, Homo sapien
taaggtctggtttggctttctagaa

SEQ ID NO: 5658072 - DNA, 25 bp, Homo sapien
ttaaggtctggtttggctttctaga

SEQ ID NO: 5658073 - DNA, 25 bp, Homo sapien
ctcaggtagaaattaaggtctggtt

SEQ ID NO: 5658074 - DNA, 25 bp, Homo sapien
caggtagaaattaaggtctggtttg

SEQ ID NO: 5658075 - DNA, 25 bp, Homo sapien
caaaccagaccttaatttctacctg

SEQ ID NO: 5658076 - DNA, 25 bp, Homo sapien
tctagaaagccaaaccagaccttaa

SEQ ID NO: 5658077 - DNA, 25 bp, Homo sapien
aaccagaccttaatttctacctgag

SEQ ID NO: 5658078 - DNA, 25 bp, Homo sapien
ctagaaagccaaaccagaccttaat

SEQ ID NO: 5658079 - DNA, 25 bp, Homo sapien
ttctagaaagccaaaccagacctta

SEQ ID NO: 5658080 - DNA, 25 bp, Homo sapien
ctgcttcagagcaaggtataaattt

SEQ ID NO: 5658081 - DNA, 25 bp, Homo sapien
cagagcaaggtataaattttattct

SEQ ID NO: 5658082 - DNA, 25 bp, Homo sapien
gcttcagagcaaggtataaatttta

SEQ ID NO: 5658083 - DNA, 25 bp, Homo sapien
cttcagagcaaggtataaattttat

SEQ ID NO: 5658084 - DNA, 25 bp, Homo sapien
tgcttcagagcaaggtataaatttt

SEQ ID NO: 5658085 - DNA, 25 bp, Homo sapien
tcagagcaaggtataaattttattc

SEQ ID NO: 5658086 - DNA, 25 bp, Homo sapien
aaatttataccttgctctgaagcag

SEQ ID NO: 5658087 - DNA, 25 bp, Homo sapien
ataaaatttataccttgctctgaag

SEQ ID NO: 5658088 - DNA, 25 bp, Homo sapien
aaaatttataccttgctctgaagca

SEQ ID NO: 5658089 - DNA, 25 bp, Homo sapien
taaaatttataccttgctctgaagc

SEQ ID NO: 5658090 - DNA, 25 bp, Homo sapien
gaataaaatttataccttgctctga

SEQ ID NO: 5658091 - DNA, 25 bp, Homo sapien
agaataaaatttataccttgctctg

SEQ ID NO: 5658092 - DNA, 25 bp, Homo sapien
gaatggagttactttggagacttcg

SEQ ID NO: 5658093 - DNA, 25 bp, Homo sapien
aatggagttactttggagacttcgc

SEQ ID NO: 5658094 - DNA, 25 bp, Homo sapien
gaaacagaatggagttactttggag

SEQ ID NO: 5658095 - DNA, 25 bp, Homo sapien
gagttactttggagacttcgctgct

SEQ ID NO: 5658096 - DNA, 25 bp, Homo sapien
tggagttactttggagacttcgctg

SEQ ID NO: 5658097 - DNA, 25 bp, Homo sapien
ggagttactttggagacttcgctgc

SEQ ID NO: 5658098 - DNA, 25 bp, Homo sapien
ctccaaagtaactccattctgtttc

SEQ ID NO: 5658099 - DNA, 25 bp, Homo sapien
gcgaagtctccaaagtaactccatt

SEQ ID NO: 5658100 - DNA, 25 bp, Homo sapien
gcagcgaagtctccaaagtaactcc

SEQ ID NO: 5658101 - DNA, 25 bp, Homo sapien
agcagcgaagtctccaaagtaactc

SEQ ID NO: 5658102 - DNA, 25 bp, Homo sapien
cagcgaagtctccaaagtaactcca

SEQ ID NO: 5658103 - DNA, 25 bp, Homo sapien
gaagtctccaaagtaactccattct

SEQ ID NO: 5658104 - DNA, 25 bp, Homo sapien
gaagcataacgttcaagtctgtagc

SEQ ID NO: 5658105 - DNA, 25 bp, Homo sapien
tactagatggaagcataacgttcaa

SEQ ID NO: 5658106 - DNA, 25 bp, Homo sapien
taacgttcaagtctgtagcaatgcc

SEQ ID NO: 5658107 - DNA, 25 bp, Homo sapien
acgttcaagtctgtagcaatgcctt

SEQ ID NO: 5658108 - DNA, 25 bp, Homo sapien
gatggaagcataacgttcaagtctg

SEQ ID NO: 5658109 - DNA, 25 bp, Homo sapien
caaaacatgcctaagattagcaaca

SEQ ID NO: 5658110 - DNA, 25 bp, Homo sapien
tacagacttgaacgttatgcttcca

SEQ ID NO: 5658111 - DNA, 25 bp, Homo sapien
tgctacagacttgaacgttatgctt

SEQ ID NO: 5658112 - DNA, 25 bp, Homo sapien
aaggcattgctacagacttgaacgt

SEQ ID NO: 5658113 - DNA, 25 bp, Homo sapien
ttgaacgttatgcttccatctagta

SEQ ID NO: 5658114 - DNA, 25 bp, Homo sapien
ggcattgctacagacttgaacgtta

SEQ ID NO: 5658115 - DNA, 25 bp, Homo sapien
tgttgctaatcttaggcatgttttg

SEQ ID NO: 5658116 - DNA, 25 bp, Homo sapien
cgattatcagtagttacatcttagc

SEQ ID NO: 5658117 - DNA, 25 bp, Homo sapien
tatgaagtagaagtaactgatttgc

SEQ ID NO: 5658118 - DNA, 25 bp, Homo sapien
gattatcagtagttacatcttagct

SEQ ID NO: 5658119 - DNA, 25 bp, Homo sapien
gaagtagaagtaactgatttgcata

SEQ ID NO: 5658120 - DNA, 25 bp, Homo sapien
agtagaagtaactgatttgcatata

SEQ ID NO: 5658121 - DNA, 25 bp, Homo sapien
cttgcattttgggatttcaaatcct

SEQ ID NO: 5658122 - DNA, 25 bp, Homo sapien
tatatgcaaatcagttacttctact

SEQ ID NO: 5658123 - DNA, 25 bp, Homo sapien
gctaagatgtaactactgataatcg

SEQ ID NO: 5658124 - DNA, 25 bp, Homo sapien
aggatttgaaatcccaaaatgcaag

SEQ ID NO: 5658125 - DNA, 25 bp, Homo sapien
gcaaatcagttacttctacttcata

SEQ ID NO: 5658126 - DNA, 25 bp, Homo sapien
aagctaagatgtaactactgataat

SEQ ID NO: 5658127 - DNA, 25 bp, Homo sapien
tatgcaaatcagttacttctacttc

SEQ ID NO: 5658128 - DNA, 25 bp, Homo sapien
tggtattactgtttatgtaattctg

SEQ ID NO: 5658129 - DNA, 25 bp, Homo sapien
ccttaggagtgtgtggtgaattttt

SEQ ID NO: 5658130 - DNA, 25 bp, Homo sapien
tgtggtgaatttttggtattactgt

SEQ ID NO: 5658131 - DNA, 25 bp, Homo sapien
taattattgccttaggagtgtgtgg

SEQ ID NO: 5658132 - DNA, 25 bp, Homo sapien
ttgcctttttctgttaattattgcc

SEQ ID NO: 5658133 - DNA, 25 bp, Homo sapien
tgccttaggagtgtgtggtgaattt

SEQ ID NO: 5658134 - DNA, 25 bp, Homo sapien
cactcctaaggcaataattaacaga

SEQ ID NO: 5658135 - DNA, 25 bp, Homo sapien
acagtaataccaaaaattcaccaca

SEQ ID NO: 5658136 - DNA, 25 bp, Homo sapien
aaattcaccacacactcctaaggca

SEQ ID NO: 5658137 - DNA, 25 bp, Homo sapien
aaaaattcaccacacactcctaagg

SEQ ID NO: 5658138 - DNA, 25 bp, Homo sapien
cagaattacataaacagtaatacca

SEQ ID NO: 5658139 - DNA, 25 bp, Homo sapien
ggcaataattaacagaaaaaggcaa

SEQ ID NO: 5658140 - DNA, 25 bp, Homo sapien
tgcccgtttaataaaagaatatgga

SEQ ID NO: 5658141 - DNA, 25 bp, Homo sapien
aaactgaacagccagaagaaacctt

SEQ ID NO: 5658142 - DNA, 25 bp, Homo sapien
tgaatttggtgagaagaaattttag

SEQ ID NO: 5658143 - DNA, 25 bp, Homo sapien
aatggtgaatttggtgagaagaaat

SEQ ID NO: 5658144 - DNA, 25 bp, Homo sapien
taaaagaatatggaaactgaacagc

SEQ ID NO: 5658145 - DNA, 25 bp, Homo sapien
ccttccctaacactgaaaccaatgg

SEQ ID NO: 5658146 - DNA, 25 bp, Homo sapien
ggaaggtttcttctggctgttcagt

SEQ ID NO: 5658147 - DNA, 25 bp, Homo sapien
tccatattcttttattaaacgggca

SEQ ID NO: 5658148 - DNA, 25 bp, Homo sapien
cattggtttcagtgttagggaaggt

SEQ ID NO: 5658149 - DNA, 25 bp, Homo sapien
ctaaaatttcttctcaccaaattca

SEQ ID NO: 5658150 - DNA, 25 bp, Homo sapien
taaaatttcttctcaccaaattcac

SEQ ID NO: 5658151 - DNA, 25 bp, Homo sapien
aaatttcttctcaccaaattcacca

SEQ ID NO: 5658152 - DNA, 25 bp, Homo sapien
tgccgtataaaacaattcattgctg

SEQ ID NO: 5658153 - DNA, 25 bp, Homo sapien
tcttttcagggttttgggaatgtgc

SEQ ID NO: 5658154 - DNA, 25 bp, Homo sapien
cattgctgtggtgggacttaatcca

SEQ ID NO: 5658155 - DNA, 25 bp, Homo sapien
caattcattgctgtggtgggactta

SEQ ID NO: 5658156 - DNA, 25 bp, Homo sapien
cagggttttgggaatgtgccgtata

SEQ ID NO: 5658157 - DNA, 25 bp, Homo sapien
aaacaattcattgctgtggtgggac

SEQ ID NO: 5658158 - DNA, 25 bp, Homo sapien
cagcaatgaattgttttatacggca

SEQ ID NO: 5658159 - DNA, 25 bp, Homo sapien
tatacggcacattcccaaaaccctg

SEQ ID NO: 5658160 - DNA, 25 bp, Homo sapien
gcacattcccaaaaccctgaaaaga

SEQ ID NO: 5658161 - DNA, 25 bp, Homo sapien
taagtcccaccacagcaatgaattg

SEQ ID NO: 5658162 - DNA, 25 bp, Homo sapien
tggattaagtcccaccacagcaatg

SEQ ID NO: 5658163 - DNA, 25 bp, Homo sapien
gattaagtcccaccacagcaatgaa

SEQ ID NO: 5658164 - DNA, 25 bp, Homo sapien
tttcccagtgaataagatgcattgt

SEQ ID NO: 5658165 - DNA, 25 bp, Homo sapien
gcatgagtcgaaagaaataggaaag

SEQ ID NO: 5658166 - DNA, 25 bp, Homo sapien
gaaagcaattggaagttttaatata

SEQ ID NO: 5658167 - DNA, 25 bp, Homo sapien
cccagtgaataagatgcattgtaac

SEQ ID NO: 5658168 - DNA, 25 bp, Homo sapien
caagcatgagtcgaaagaaatagga

SEQ ID NO: 5658169 - DNA, 25 bp, Homo sapien
cagtgaataagatgcattgtaactt

SEQ ID NO: 5658170 - DNA, 25 bp, Homo sapien
tatattaaaacttccaattgctttc

SEQ ID NO: 5658171 - DNA, 25 bp, Homo sapien
aaagttacaatgcatcttattcact

SEQ ID NO: 5658172 - DNA, 25 bp, Homo sapien
gttacaatgcatcttattcactggg

SEQ ID NO: 5658173 - DNA, 25 bp, Homo sapien
tcctatttctttcgactcatgcttg

SEQ ID NO: 5658174 - DNA, 25 bp, Homo sapien
ctttcctatttctttcgactcatgc

SEQ ID NO: 5658175 - DNA, 25 bp, Homo sapien
acaatgcatcttattcactgggaaa

SEQ ID NO: 5658176 - DNA, 25 bp, Homo sapien
tatttgtaaactttagagatgtcac

SEQ ID NO: 5658177 - DNA, 25 bp, Homo sapien
atttgtaaactttagagatgtcaca

SEQ ID NO: 5658178 - DNA, 25 bp, Homo sapien
tgttggatgtgttcgcaattgccgt

SEQ ID NO: 5658179 - DNA, 25 bp, Homo sapien
tatccctccggtagattgttctggt

SEQ ID NO: 5658180 - DNA, 25 bp, Homo sapien
gtgttcgcaattgccgttgtatttg

SEQ ID NO: 5658181 - DNA, 25 bp, Homo sapien
ttggatttatccctccggtagattg

SEQ ID NO: 5658182 - DNA, 25 bp, Homo sapien
ggatgtgttcgcaattgccgttgta

SEQ ID NO: 5658183 - DNA, 25 bp, Homo sapien
tctggttgttggatgtgttcgcaat

SEQ ID NO: 5658184 - DNA, 25 bp, Homo sapien
attgcgaacacatccaacaaccaga

SEQ ID NO: 5658185 - DNA, 25 bp, Homo sapien
caaatacaacggcaattgcgaacac

SEQ ID NO: 5658186 - DNA, 25 bp, Homo sapien
tacaacggcaattgcgaacacatcc

SEQ ID NO: 5658187 - DNA, 25 bp, Homo sapien
cagaacaatctaccggagggataaa

SEQ ID NO: 5658188 - DNA, 25 bp, Homo sapien
caatctaccggagggataaatccaa

SEQ ID NO: 5658189 - DNA, 25 bp, Homo sapien
accagaacaatctaccggagggata

SEQ ID NO: 5658190 - DNA, 25 bp, Homo sapien
tgtgacatctctaaagtttacaaat

SEQ ID NO: 5658191 - DNA, 25 bp, Homo sapien
gtgacatctctaaagtttacaaata

SEQ ID NO: 5658192 - DNA, 25 bp, Homo sapien
tgttagttttcaagggctccatttg

SEQ ID NO: 5658193 - DNA, 25 bp, Homo sapien
tagtttgggtctggtcctatattag

SEQ ID NO: 5658194 - DNA, 25 bp, Homo sapien
taataatagactggtattgtggtag

SEQ ID NO: 5658195 - DNA, 25 bp, Homo sapien
ggctccatttgtttcgctgattaat

SEQ ID NO: 5658196 - DNA, 25 bp, Homo sapien
tattgtggtagtttgggtctggtcc

SEQ ID NO: 5658197 - DNA, 25 bp, Homo sapien
aaataatccgctagtgactgttagt

SEQ ID NO: 5658198 - DNA, 25 bp, Homo sapien
caaatggagcccttgaaaactaaca

SEQ ID NO: 5658199 - DNA, 25 bp, Homo sapien
taatataggaccagacccaaactac

SEQ ID NO: 5658200 - DNA, 25 bp, Homo sapien
agacccaaactaccacaataccagt

SEQ ID NO: 5658201 - DNA, 25 bp, Homo sapien
gaaaactaacagtcactagcggatt

SEQ ID NO: 5658202 - DNA, 25 bp, Homo sapien
cagtctattattaatcagcgaaaca

SEQ ID NO: 5658203 - DNA, 25 bp, Homo sapien
tattaatcagcgaaacaaatggagc

SEQ ID NO: 5658204 - DNA, 25 bp, Homo sapien
ccgcttgagggaggcgtcctgggag

SEQ ID NO: 5658205 - DNA, 25 bp, Homo sapien
tttccgcttgagggaggcgtcctgg

SEQ ID NO: 5658206 - DNA, 25 bp, Homo sapien
tccgcttgagggaggcgtcctggga

SEQ ID NO: 5658207 - DNA, 25 bp, Homo sapien
ttttccgcttgagggaggcgtcctg

SEQ ID NO: 5658208 - DNA, 25 bp, Homo sapien
ttccgcttgagggaggcgtcctggg

SEQ ID NO: 5658209 - DNA, 25 bp, Homo sapien
ctccacgagccgctcccccaacccg

SEQ ID NO: 5658210 - DNA, 25 bp, Homo sapien
tcccaggacgcctccctcaagcgga

SEQ ID NO: 5658211 - DNA, 25 bp, Homo sapien
caggacgcctccctcaagcggaaaa

SEQ ID NO: 5658212 - DNA, 25 bp, Homo sapien
cccaggacgcctccctcaagcggaa

SEQ ID NO: 5658213 - DNA, 25 bp, Homo sapien
ctcccaggacgcctccctcaagcgg

SEQ ID NO: 5658214 - DNA, 25 bp, Homo sapien
ccaggacgcctccctcaagcggaaa

SEQ ID NO: 5658215 - DNA, 25 bp, Homo sapien
ctcgtggaggtgagggtcggagccc

SEQ ID NO: 5658216 - DNA, 25 bp, Homo sapien
gagcccagtttttccgcttgaggga

SEQ ID NO: 5658217 - DNA, 25 bp, Homo sapien
tccgcttgagggaggcgtcctggga

SEQ ID NO: 5658218 - DNA, 25 bp, Homo sapien
gtcggagcccagtttttccgcttga

SEQ ID NO: 5658219 - DNA, 25 bp, Homo sapien
ttttccgcttgagggaggcgtcctg

SEQ ID NO: 5658220 - DNA, 25 bp, Homo sapien
gaggcgtcctgggagccgctttggt

SEQ ID NO: 5658221 - DNA, 25 bp, Homo sapien
cctcaagcggaaaaactgggctccg

SEQ ID NO: 5658222 - DNA, 25 bp, Homo sapien
caggacgcctccctcaagcggaaaa

SEQ ID NO: 5658223 - DNA, 25 bp, Homo sapien
cgcctccctcaagcggaaaaactgg

SEQ ID NO: 5658224 - DNA, 25 bp, Homo sapien
accaaagcggctcccaggacgcctc

SEQ ID NO: 5658225 - DNA, 25 bp, Homo sapien
tcaagcggaaaaactgggctccgac

SEQ ID NO: 5658226 - DNA, 25 bp, Homo sapien
tccctcaagcggaaaaactgggctc

SEQ ID NO: 5658227 - DNA, 25 bp, Homo sapien
gcttctcaactttaaaatatgtgtt

SEQ ID NO: 5658228 - DNA, 25 bp, Homo sapien
aaaaaattatacatgcttctcaact

SEQ ID NO: 5658229 - DNA, 25 bp, Homo sapien
tacatgcttctcaactttaaaatat

SEQ ID NO: 5658230 - DNA, 25 bp, Homo sapien
atgcttctcaactttaaaatatgtg

SEQ ID NO: 5658231 - DNA, 25 bp, Homo sapien
tatacatgcttctcaactttaaaat

SEQ ID NO: 5658232 - DNA, 25 bp, Homo sapien
tctcaactttaaaatatgtgttttg

SEQ ID NO: 5658233 - DNA, 25 bp, Homo sapien
cacatattttaaagttgagaagcat

SEQ ID NO: 5658234 - DNA, 25 bp, Homo sapien
taaagttgagaagcatgtataattt

SEQ ID NO: 5658235 - DNA, 25 bp, Homo sapien
catattttaaagttgagaagcatgt

SEQ ID NO: 5658236 - DNA, 25 bp, Homo sapien
aacacatattttaaagttgagaagc

SEQ ID NO: 5658237 - DNA, 25 bp, Homo sapien
attttaaagttgagaagcatgtata

SEQ ID NO: 5658238 - DNA, 25 bp, Homo sapien
caaaacacatattttaaagttgaga

SEQ ID NO: 5658239 - DNA, 25 bp, Homo sapien
tacatgattctgagccgggcgcagt

SEQ ID NO: 5658240 - DNA, 25 bp, Homo sapien
acatgattctgagccgggcgcagtg

SEQ ID NO: 5658241 - DNA, 25 bp, Homo sapien
catgattctgagccgggcgcagtgg

SEQ ID NO: 5658242 - DNA, 25 bp, Homo sapien
gtacatgattctgagccgggcgcag

SEQ ID NO: 5658243 - DNA, 25 bp, Homo sapien
actgcgcccggctcagaatcatgta

SEQ ID NO: 5658244 - DNA, 25 bp, Homo sapien
ctgcgcccggctcagaatcatgtac

SEQ ID NO: 5658245 - DNA, 25 bp, Homo sapien
cactgcgcccggctcagaatcatgt

SEQ ID NO: 5658246 - DNA, 25 bp, Homo sapien
ccactgcgcccggctcagaatcatg

SEQ ID NO: 5658247 - DNA, 25 bp, Homo sapien
catataccattagttgatagtgcat

SEQ ID NO: 5658248 - DNA, 25 bp, Homo sapien
taccattagttgatagtgcatagct

SEQ ID NO: 5658249 - DNA, 25 bp, Homo sapien
ccattagttgatagtgcatagcttt

SEQ ID NO: 5658250 - DNA, 25 bp, Homo sapien
tatggacagtccagaataatactta

SEQ ID NO: 5658251 - DNA, 25 bp, Homo sapien
tagagttgtgaaccaaacaaaagaa

SEQ ID NO: 5658252 - DNA, 25 bp, Homo sapien
tagtgcatagctttatggacagtcc

SEQ ID NO: 5658253 - DNA, 25 bp, Homo sapien
ttcttttgtttggttcacaactcta

SEQ ID NO: 5658254 - DNA, 25 bp, Homo sapien
gctatgcactatcaactaatggtat

SEQ ID NO: 5658255 - DNA, 25 bp, Homo sapien
aaagctatgcactatcaactaatgg

SEQ ID NO: 5658256 - DNA, 25 bp, Homo sapien
ggactgtccataaagctatgcacta

SEQ ID NO: 5658257 - DNA, 25 bp, Homo sapien
tggactgtccataaagctatgcact

SEQ ID NO: 5658258 - DNA, 25 bp, Homo sapien
taagtattattctggactgtccata

SEQ ID NO: 5658259 - DNA, 25 bp, Homo sapien
gatagagcaacacttttgtctcaaa

SEQ ID NO: 5658260 - DNA, 25 bp, Homo sapien
gggtgatagagcaacacttttgtct

SEQ ID NO: 5658261 - DNA, 25 bp, Homo sapien
tgggtgatagagcaacacttttgtc

SEQ ID NO: 5658262 - DNA, 25 bp, Homo sapien
gtgatagagcaacacttttgtctca

SEQ ID NO: 5658263 - DNA, 25 bp, Homo sapien
agagcaacacttttgtctcaaaaaa

SEQ ID NO: 5658264 - DNA, 25 bp, Homo sapien
ggtgatagagcaacacttttgtctc

SEQ ID NO: 5658265 - DNA, 25 bp, Homo sapien
gacaaaagtgttgctctatcaccca

SEQ ID NO: 5658266 - DNA, 25 bp, Homo sapien
ttttttgagacaaaagtgttgctct

SEQ ID NO: 5658267 - DNA, 25 bp, Homo sapien
tgagacaaaagtgttgctctatcac

SEQ ID NO: 5658268 - DNA, 25 bp, Homo sapien
gagacaaaagtgttgctctatcacc

SEQ ID NO: 5658269 - DNA, 25 bp, Homo sapien
agacaaaagtgttgctctatcaccc

SEQ ID NO: 5658270 - DNA, 25 bp, Homo sapien
tttgagacaaaagtgttgctctatc

SEQ ID NO: 5658271 - DNA, 25 bp, Homo sapien
atttctaacttcaatcctgtatctt

SEQ ID NO: 5658272 - DNA, 25 bp, Homo sapien
ctttaaaatagactctggcctggta

SEQ ID NO: 5658273 - DNA, 25 bp, Homo sapien
tttaaaatagactctggcctggtac

SEQ ID NO: 5658274 - DNA, 25 bp, Homo sapien
tatttctaacttcaatcctgtatct

SEQ ID NO: 5658275 - DNA, 25 bp, Homo sapien
tctttaaaatagactctggcctggt

SEQ ID NO: 5658276 - DNA, 25 bp, Homo sapien
agatacaggattgaagttagaaata

SEQ ID NO: 5658277 - DNA, 25 bp, Homo sapien
gtaccaggccagagtctattttaaa

SEQ ID NO: 5658278 - DNA, 25 bp, Homo sapien
aagatacaggattgaagttagaaat

SEQ ID NO: 5658279 - DNA, 25 bp, Homo sapien
taccaggccagagtctattttaaag

SEQ ID NO: 5658280 - DNA, 25 bp, Homo sapien
accaggccagagtctattttaaaga

SEQ ID NO: 5658281 - DNA, 25 bp, Homo sapien
caccatcgtgtctggcttatttttg

SEQ ID NO: 5658282 - DNA, 25 bp, Homo sapien
accatcgtgtctggcttatttttgt

SEQ ID NO: 5658283 - DNA, 25 bp, Homo sapien
gcgcaccatcgtgtctggcttattt

SEQ ID NO: 5658284 - DNA, 25 bp, Homo sapien
tgcgcaccatcgtgtctggcttatt

SEQ ID NO: 5658285 - DNA, 25 bp, Homo sapien
gttgcgcaccatcgtgtctggctta

SEQ ID NO: 5658286 - DNA, 25 bp, Homo sapien
cgcaccatcgtgtctggcttatttt

SEQ ID NO: 5658287 - DNA, 25 bp, Homo sapien
acaaaaataagccagacacgatggt

SEQ ID NO: 5658288 - DNA, 25 bp, Homo sapien
aaaataagccagacacgatggtgcg

SEQ ID NO: 5658289 - DNA, 25 bp, Homo sapien
caaaaataagccagacacgatggtg

SEQ ID NO: 5658290 - DNA, 25 bp, Homo sapien
aataagccagacacgatggtgcgca

SEQ ID NO: 5658291 - DNA, 25 bp, Homo sapien
taagccagacacgatggtgcgcaac

SEQ ID NO: 5658292 - DNA, 25 bp, Homo sapien
aaaatacaaaaataagccagacacg

SEQ ID NO: 5658293 - DNA, 25 bp, Homo sapien
tatctactgtagcactcaatattca

SEQ ID NO: 5658294 - DNA, 25 bp, Homo sapien
tgtagcactcaatattcattgtctg

SEQ ID NO: 5658295 - DNA, 25 bp, Homo sapien
gcactcaatattcattgtctgtgaa

SEQ ID NO: 5658296 - DNA, 25 bp, Homo sapien
gcccttggttatctactgtagcact

SEQ ID NO: 5658297 - DNA, 25 bp, Homo sapien
tgaagatccatgagtggtaaacagg

SEQ ID NO: 5658298 - DNA, 25 bp, Homo sapien
aagcccttggttatctactgtagca

SEQ ID NO: 5658299 - DNA, 25 bp, Homo sapien
tgctacagtagataaccaagggctt

SEQ ID NO: 5658300 - DNA, 25 bp, Homo sapien
gaatattgagtgctacagtagataa

SEQ ID NO: 5658301 - DNA, 25 bp, Homo sapien
cagacaatgaatattgagtgctaca

SEQ ID NO: 5658302 - DNA, 25 bp, Homo sapien
ttcacagacaatgaatattgagtgc

SEQ ID NO: 5658303 - DNA, 25 bp, Homo sapien
cctgtttaccactcatggatcttca

SEQ ID NO: 5658304 - DNA, 25 bp, Homo sapien
gagtgctacagtagataaccaaggg

SEQ ID NO: 5658305 - DNA, 25 bp, Homo sapien
aaactcttgataagctcaaaccaat

SEQ ID NO: 5658306 - DNA, 25 bp, Homo sapien
cttgataagctcaaaccaatatttt

SEQ ID NO: 5658307 - DNA, 25 bp, Homo sapien
aactcttgataagctcaaaccaata

SEQ ID NO: 5658308 - DNA, 25 bp, Homo sapien
tgtaagaagacttaggattgtttct

SEQ ID NO: 5658309 - DNA, 25 bp, Homo sapien
ctcttgataagctcaaaccaatatt

SEQ ID NO: 5658310 - DNA, 25 bp, Homo sapien
gataagctcaaaccaatatttttag

SEQ ID NO: 5658311 - DNA, 25 bp, Homo sapien
tattggtttgagcttatcaagagtt

SEQ ID NO: 5658312 - DNA, 25 bp, Homo sapien
gaaacaatcctaagtcttcttacat

SEQ ID NO: 5658313 - DNA, 25 bp, Homo sapien
agaaacaatcctaagtcttcttaca

SEQ ID NO: 5658314 - DNA, 25 bp, Homo sapien
ctaaaaatattggtttgagcttatc

SEQ ID NO: 5658315 - DNA, 25 bp, Homo sapien
aatattggtttgagcttatcaagag

SEQ ID NO: 5658316 - DNA, 25 bp, Homo sapien
aaaatattggtttgagcttatcaag

SEQ ID NO: 5658317 - DNA, 25 bp, Homo sapien
gagcatctttgtgttgacctacgtt

SEQ ID NO: 5658318 - DNA, 25 bp, Homo sapien
tgtgttgacctacgttttgtatttg

SEQ ID NO: 5658319 - DNA, 25 bp, Homo sapien
gcatctttgtgttgacctacgtttt

SEQ ID NO: 5658320 - DNA, 25 bp, Homo sapien
tctttgtgttgacctacgttttgta

SEQ ID NO: 5658321 - DNA, 25 bp, Homo sapien
atgagcatctttgtgttgacctacg

SEQ ID NO: 5658322 - DNA, 25 bp, Homo sapien
tgagcatctttgtgttgacctacgt

SEQ ID NO: 5658323 - DNA, 25 bp, Homo sapien
caaaacgtaggtcaacacaaagatg

SEQ ID NO: 5658324 - DNA, 25 bp, Homo sapien
cgtaggtcaacacaaagatgctcat

SEQ ID NO: 5658325 - DNA, 25 bp, Homo sapien
caaatacaaaacgtaggtcaacaca

SEQ ID NO: 5658326 - DNA, 25 bp, Homo sapien
tacaaaacgtaggtcaacacaaaga

SEQ ID NO: 5658327 - DNA, 25 bp, Homo sapien
aaacgtaggtcaacacaaagatgct

SEQ ID NO: 5658328 - DNA, 25 bp, Homo sapien
acgtaggtcaacacaaagatgctca

SEQ ID NO: 5658329 - DNA, 25 bp, Homo sapien
gaaaatttgggatcttcctatagtg

SEQ ID NO: 5658330 - DNA, 25 bp, Homo sapien
acaggtctttgggaaaagacagcag

SEQ ID NO: 5658331 - DNA, 25 bp, Homo sapien
ttgggatcttcctatagtgcgagaa

SEQ ID NO: 5658332 - DNA, 25 bp, Homo sapien
tcttcctatagtgcgagaagggaga

SEQ ID NO: 5658333 - DNA, 25 bp, Homo sapien
tcctatagtgcgagaagggagaaat

SEQ ID NO: 5658334 - DNA, 25 bp, Homo sapien
aatgacaggtctttgggaaaagaca

SEQ ID NO: 5658335 - DNA, 25 bp, Homo sapien
tgtcttttcccaaagacctgtcatt

SEQ ID NO: 5658336 - DNA, 25 bp, Homo sapien
tctcccttctcgcactataggaaga

SEQ ID NO: 5658337 - DNA, 25 bp, Homo sapien
ttctcgcactataggaagatcccaa

SEQ ID NO: 5658338 - DNA, 25 bp, Homo sapien
cactataggaagatcccaaattttc

SEQ ID NO: 5658339 - DNA, 25 bp, Homo sapien
atttctcccttctcgcactatagga

SEQ ID NO: 5658340 - DNA, 25 bp, Homo sapien
ctgctgtcttttcccaaagacctgt

SEQ ID NO: 5658341 - DNA, 25 bp, Homo sapien
aagtggttggtcatttaacagatat

SEQ ID NO: 5658342 - DNA, 25 bp, Homo sapien
gctaagtggttggtcatttaacaga

SEQ ID NO: 5658343 - DNA, 25 bp, Homo sapien
aggatccagctaagtggttggtcat

SEQ ID NO: 5658344 - DNA, 25 bp, Homo sapien
cagctaagtggttggtcatttaaca

SEQ ID NO: 5658345 - DNA, 25 bp, Homo sapien
gatccagctaagtggttggtcattt

SEQ ID NO: 5658346 - DNA, 25 bp, Homo sapien
tccagctaagtggttggtcatttaa

SEQ ID NO: 5658347 - DNA, 25 bp, Homo sapien
atatctgttaaatgaccaaccactt

SEQ ID NO: 5658348 - DNA, 25 bp, Homo sapien
tctgttaaatgaccaaccacttagc

SEQ ID NO: 5658349 - DNA, 25 bp, Homo sapien
gttaaatgaccaaccacttagctgg

SEQ ID NO: 5658350 - DNA, 25 bp, Homo sapien
tgttaaatgaccaaccacttagctg

SEQ ID NO: 5658351 - DNA, 25 bp, Homo sapien
aatgaccaaccacttagctggatcc

SEQ ID NO: 5658352 - DNA, 25 bp, Homo sapien
ttaaatgaccaaccacttagctgga

SEQ ID NO: 5658353 - DNA, 25 bp, Homo sapien
cagttaggtgttttcagactgcttc

SEQ ID NO: 5658354 - DNA, 25 bp, Homo sapien
agttaggtgttttcagactgcttca

SEQ ID NO: 5658355 - DNA, 25 bp, Homo sapien
ctggtgttagaattccagttaggtg

SEQ ID NO: 5658356 - DNA, 25 bp, Homo sapien
tggtgttagaattccagttaggtgt

SEQ ID NO: 5658357 - DNA, 25 bp, Homo sapien
gaattccagttaggtgttttcagac

SEQ ID NO: 5658358 - DNA, 25 bp, Homo sapien
aattccagttaggtgttttcagact

SEQ ID NO: 5658359 - DNA, 25 bp, Homo sapien
cacctaactggaattctaacaccag

SEQ ID NO: 5658360 - DNA, 25 bp, Homo sapien
gaagcagtctgaaaacacctaactg

SEQ ID NO: 5658361 - DNA, 25 bp, Homo sapien
agtctgaaaacacctaactggaatt

SEQ ID NO: 5658362 - DNA, 25 bp, Homo sapien
tgaagcagtctgaaaacacctaact

SEQ ID NO: 5658363 - DNA, 25 bp, Homo sapien
tctgaaaacacctaactggaattct

SEQ ID NO: 5658364 - DNA, 25 bp, Homo sapien
acacctaactggaattctaacacca

SEQ ID NO: 5658365 - DNA, 25 bp, Homo sapien
ggcagaccgtttttccaaagcagct

SEQ ID NO: 5658366 - DNA, 25 bp, Homo sapien
gaggaattggcagaccgtttttcca

SEQ ID NO: 5658367 - DNA, 25 bp, Homo sapien
ttggcagaccgtttttccaaagcag

SEQ ID NO: 5658368 - DNA, 25 bp, Homo sapien
tggcagaccgtttttccaaagcagc

SEQ ID NO: 5658369 - DNA, 25 bp, Homo sapien
attggcagaccgtttttccaaagca

SEQ ID NO: 5658370 - DNA, 25 bp, Homo sapien
tgaggaattggcagaccgtttttcc

SEQ ID NO: 5658371 - DNA, 25 bp, Homo sapien
gctgctttggaaaaacggtctgcca

SEQ ID NO: 5658372 - DNA, 25 bp, Homo sapien
agctgctttggaaaaacggtctgcc

SEQ ID NO: 5658373 - DNA, 25 bp, Homo sapien
tgctttggaaaaacggtctgccaat

SEQ ID NO: 5658374 - DNA, 25 bp, Homo sapien
ggaaaaacggtctgccaattcctca

SEQ ID NO: 5658375 - DNA, 25 bp, Homo sapien
tggaaaaacggtctgccaattcctc

SEQ ID NO: 5658376 - DNA, 25 bp, Homo sapien
ctgctttggaaaaacggtctgccaa

SEQ ID NO: 5658377 - DNA, 25 bp, Homo sapien
ttttgtaaggatgaggcttcactat

SEQ ID NO: 5658378 - DNA, 25 bp, Homo sapien
atagtgaagcctcatccttacaaaa

SEQ ID NO: 5658379 - DNA, 25 bp, Homo sapien
ttttgtaaggatgaggcttcactat

SEQ ID NO: 5658380 - DNA, 25 bp, Homo sapien
aggatgaggcttcactatgttgccc

SEQ ID NO: 5658381 - DNA, 25 bp, Homo sapien
tttgtaaggatgaggcttcactatg

SEQ ID NO: 5658382 - DNA, 25 bp, Homo sapien
aaggatgaggcttcactatgttgcc

SEQ ID NO: 5658383 - DNA, 25 bp, Homo sapien
gtaaggatgaggcttcactatgttg

SEQ ID NO: 5658384 - DNA, 25 bp, Homo sapien
ttgtaaggatgaggcttcactatgt

SEQ ID NO: 5658385 - DNA, 25 bp, Homo sapien
atagtgaagcctcatccttacaaaa

SEQ ID NO: 5658386 - DNA, 25 bp, Homo sapien
acatagtgaagcctcatccttacaa

SEQ ID NO: 5658387 - DNA, 25 bp, Homo sapien
catagtgaagcctcatccttacaaa

SEQ ID NO: 5658388 - DNA, 25 bp, Homo sapien
gggcaacatagtgaagcctcatcct

SEQ ID NO: 5658389 - DNA, 25 bp, Homo sapien
ggcaacatagtgaagcctcatcctt

SEQ ID NO: 5658390 - DNA, 25 bp, Homo sapien
caacatagtgaagcctcatccttac

SEQ ID NO: 5658391 - DNA, 25 bp, Homo sapien
tatggtaaaaaatacagcgtggaag

SEQ ID NO: 5658392 - DNA, 25 bp, Homo sapien
gcatggaagattttttaaatagtac

SEQ ID NO: 5658393 - DNA, 25 bp, Homo sapien
tggtaaaaaatacagcgtggaagac

SEQ ID NO: 5658394 - DNA, 25 bp, Homo sapien
atggtaaaaaatacagcgtggaaga

SEQ ID NO: 5658395 - DNA, 25 bp, Homo sapien
tctaaacatataaaagatatggtaa

SEQ ID NO: 5658396 - DNA, 25 bp, Homo sapien
gcatctaaacatataaaagatatgg

SEQ ID NO: 5658397 - DNA, 25 bp, Homo sapien
ccacgctgtattttttaccatatct

SEQ ID NO: 5658398 - DNA, 25 bp, Homo sapien
gtactatttaaaaaatcttccatgc

SEQ ID NO: 5658399 - DNA, 25 bp, Homo sapien
tcttccacgctgtattttttaccat

SEQ ID NO: 5658400 - DNA, 25 bp, Homo sapien
ccatatcttttatatgtttagatgc

SEQ ID NO: 5658401 - DNA, 25 bp, Homo sapien
cttccacgctgtattttttaccata

SEQ ID NO: 5658402 - DNA, 25 bp, Homo sapien
gtcttccacgctgtattttttacca

SEQ ID NO: 5658403 - DNA, 25 bp, Homo sapien
tcttagaaccttgttgctattactt

SEQ ID NO: 5658404 - DNA, 25 bp, Homo sapien
ttccctcatcgtcctattccatctt

SEQ ID NO: 5658405 - DNA, 25 bp, Homo sapien
gtcctattccatcttcccctctcca

SEQ ID NO: 5658406 - DNA, 25 bp, Homo sapien
cacacttaagccaagtttctcttcc

SEQ ID NO: 5658407 - DNA, 25 bp, Homo sapien
acacttcttagaaccttgttgctat

SEQ ID NO: 5658408 - DNA, 25 bp, Homo sapien
tctccacacacttaagccaagtttc

SEQ ID NO: 5658409 - DNA, 25 bp, Homo sapien
gaaacttggcttaagtgtgtggaga

SEQ ID NO: 5658410 - DNA, 25 bp, Homo sapien
gaagatggaataggacgatgaggga

SEQ ID NO: 5658411 - DNA, 25 bp, Homo sapien
atagcaacaaggttctaagaagtgt

SEQ ID NO: 5658412 - DNA, 25 bp, Homo sapien
taatagcaacaaggttctaagaagt

SEQ ID NO: 5658413 - DNA, 25 bp, Homo sapien
aagtaatagcaacaaggttctaaga

SEQ ID NO: 5658414 - DNA, 25 bp, Homo sapien
ggaagagaaacttggcttaagtgtg

SEQ ID NO: 5658415 - DNA, 25 bp, Homo sapien
tttggcccagttgaggtctttgctg

SEQ ID NO: 5658416 - DNA, 25 bp, Homo sapien
tgtcattttatagaggtagagtctg

SEQ ID NO: 5658417 - DNA, 25 bp, Homo sapien
tgctttggcccagttgaggtctttg

SEQ ID NO: 5658418 - DNA, 25 bp, Homo sapien
ctttggcccagttgaggtctttgct

SEQ ID NO: 5658419 - DNA, 25 bp, Homo sapien
gctttggcccagttgaggtctttgc

SEQ ID NO: 5658420 - DNA, 25 bp, Homo sapien
tctgctttggcccagttgaggtctt

SEQ ID NO: 5658421 - DNA, 25 bp, Homo sapien
agcaaagacctcaactgggccaaag

SEQ ID NO: 5658422 - DNA, 25 bp, Homo sapien
caaagacctcaactgggccaaagca

SEQ ID NO: 5658423 - DNA, 25 bp, Homo sapien
aagacctcaactgggccaaagcaga

SEQ ID NO: 5658424 - DNA, 25 bp, Homo sapien
cagcaaagacctcaactgggccaaa

SEQ ID NO: 5658425 - DNA, 25 bp, Homo sapien
gcaaagacctcaactgggccaaagc

SEQ ID NO: 5658426 - DNA, 25 bp, Homo sapien
cagactctacctctataaaatgaca

SEQ ID NO: 5658427 - DNA, 25 bp, Homo sapien
ctcaggaaaatgatattgaataaaa

SEQ ID NO: 5658428 - DNA, 25 bp, Homo sapien
tgaataaaatgggtaaaagcaaata

SEQ ID NO: 5658429 - DNA, 25 bp, Homo sapien
taatgtttaatatttctcaggaaaa

SEQ ID NO: 5658430 - DNA, 25 bp, Homo sapien
taaaatgggtaaaagcaaatatgat

SEQ ID NO: 5658431 - DNA, 25 bp, Homo sapien
cattccaagttttaatgtttaatat

SEQ ID NO: 5658432 - DNA, 25 bp, Homo sapien
tgggtaaaagcaaatatgatttctt

SEQ ID NO: 5658433 - DNA, 25 bp, Homo sapien
gaaatcatatttgcttttacccatt

SEQ ID NO: 5658434 - DNA, 25 bp, Homo sapien
atattaaacattaaaacttggaatg

SEQ ID NO: 5658435 - DNA, 25 bp, Homo sapien
ttttattcaatatcattttcctgag

SEQ ID NO: 5658436 - DNA, 25 bp, Homo sapien
aagaaatcatatttgcttttaccca

SEQ ID NO: 5658437 - DNA, 25 bp, Homo sapien
tatttgcttttacccattttattca

SEQ ID NO: 5658438 - DNA, 25 bp, Homo sapien
cattttcctgagaaatattaaacat

SEQ ID NO: 5658439 - DNA, 25 bp, Homo sapien
aaggtaagaatgatttatgatgcaa

SEQ ID NO: 5658440 - DNA, 25 bp, Homo sapien
gaatggctgcgaagtgaattagaaa

SEQ ID NO: 5658441 - DNA, 25 bp, Homo sapien
tgaatggctgcgaagtgaattagaa

SEQ ID NO: 5658442 - DNA, 25 bp, Homo sapien
ctttgaatggctgcgaagtgaatta

SEQ ID NO: 5658443 - DNA, 25 bp, Homo sapien
ggctgcgaagtgaattagaaagaga

SEQ ID NO: 5658444 - DNA, 25 bp, Homo sapien
gaatctactgttagaagaagataca

SEQ ID NO: 5658445 - DNA, 25 bp, Homo sapien
aatggctgcgaagtgaattagaaag

SEQ ID NO: 5658446 - DNA, 25 bp, Homo sapien
tctaattcacttcgcagccattcaa

SEQ ID NO: 5658447 - DNA, 25 bp, Homo sapien
tctctttctaattcacttcgcagcc

SEQ ID NO: 5658448 - DNA, 25 bp, Homo sapien
tctttctaattcacttcgcagccat

SEQ ID NO: 5658449 - DNA, 25 bp, Homo sapien
taattcacttcgcagccattcaaag

SEQ ID NO: 5658450 - DNA, 25 bp, Homo sapien
tttctaattcacttcgcagccattc

SEQ ID NO: 5658451 - DNA, 25 bp, Homo sapien
tgtatcttcttctaacagtagattc

SEQ ID NO: 5658452 - DNA, 25 bp, Homo sapien
ttgcatcataaatcattcttacctt

SEQ ID NO: 5658453 - DNA, 25 bp, Homo sapien
aaggtaagaatgatttatgatgcaa

SEQ ID NO: 5658454 - DNA, 25 bp, Homo sapien
ctttgaatggctgcgaagtgaatta

SEQ ID NO: 5658455 - DNA, 25 bp, Homo sapien
aagagagagcaaggtaagaatgatt

SEQ ID NO: 5658456 - DNA, 25 bp, Homo sapien
gaatctactgttagaagaagataca

SEQ ID NO: 5658457 - DNA, 25 bp, Homo sapien
gaatgatttatgatgcaactttaaa

SEQ ID NO: 5658458 - DNA, 25 bp, Homo sapien
gagagcaaggtaagaatgatttatg

SEQ ID NO: 5658459 - DNA, 25 bp, Homo sapien
tgtgcttcaatttaggactaacttt

SEQ ID NO: 5658460 - DNA, 25 bp, Homo sapien
aatgtgcttcaatttaggactaact

SEQ ID NO: 5658461 - DNA, 25 bp, Homo sapien
ccttaatgtgcttcaatttaggact

SEQ ID NO: 5658462 - DNA, 25 bp, Homo sapien
taatgtgcttcaatttaggactaac

SEQ ID NO: 5658463 - DNA, 25 bp, Homo sapien
tttttgtttcagacaaatcttccta

SEQ ID NO: 5658464 - DNA, 25 bp, Homo sapien
acaaatcttcctattttcaagctga

SEQ ID NO: 5658465 - DNA, 25 bp, Homo sapien
tagtcctaaattgaagcacattaag

SEQ ID NO: 5658466 - DNA, 25 bp, Homo sapien
taggaagatttgtctgaaacaaaaa

SEQ ID NO: 5658467 - DNA, 25 bp, Homo sapien
gttagtcctaaattgaagcacatta

SEQ ID NO: 5658468 - DNA, 25 bp, Homo sapien
gaagcacattaaggaaacttcaaaa

SEQ ID NO: 5658469 - DNA, 25 bp, Homo sapien
aaagttagtcctaaattgaagcaca

SEQ ID NO: 5658470 - DNA, 25 bp, Homo sapien
tcagcttgaaaataggaagatttgt

SEQ ID NO: 5658471 - DNA, 25 bp, Homo sapien
aagaaagtcatgatttcttttgttt

SEQ ID NO: 5658472 - DNA, 25 bp, Homo sapien
ctaggcaacaaagggagattctgtc

SEQ ID NO: 5658473 - DNA, 25 bp, Homo sapien
gcctaggcaacaaagggagattctg

SEQ ID NO: 5658474 - DNA, 25 bp, Homo sapien
agaaaaagaaagtcatgatttcttt

SEQ ID NO: 5658475 - DNA, 25 bp, Homo sapien
aggcaacaaagggagattctgtctc

SEQ ID NO: 5658476 - DNA, 25 bp, Homo sapien
aaagaaaaagaaagtcatgatttct

SEQ ID NO: 5658477 - DNA, 25 bp, Homo sapien
cagaatctccctttgttgcctaggc

SEQ ID NO: 5658478 - DNA, 25 bp, Homo sapien
aaacaaaagaaatcatgactttctt

SEQ ID NO: 5658479 - DNA, 25 bp, Homo sapien
gagacagaatctccctttgttgcct

SEQ ID NO: 5658480 - DNA, 25 bp, Homo sapien
acagaatctccctttgttgcctagg

SEQ ID NO: 5658481 - DNA, 25 bp, Homo sapien
aaagaaatcatgactttctttttct

SEQ ID NO: 5658482 - DNA, 25 bp, Homo sapien
gacagaatctccctttgttgcctag

SEQ ID NO: 5658483 - DNA, 25 bp, Homo sapien
agtcatgatttcttttgttttgcca

SEQ ID NO: 5658484 - DNA, 25 bp, Homo sapien
agaaaaagaaagtcatgatttcttt

SEQ ID NO: 5658485 - DNA, 25 bp, Homo sapien
aagaaaaagaaagtcatgatttctt

SEQ ID NO: 5658486 - DNA, 25 bp, Homo sapien
tgatttcttttgttttgccataccc

SEQ ID NO: 5658487 - DNA, 25 bp, Homo sapien
gtcatgatttcttttgttttgccat

SEQ ID NO: 5658488 - DNA, 25 bp, Homo sapien
aaagaaaaagaaagtcatgatttct

SEQ ID NO: 5658489 - DNA, 25 bp, Homo sapien
tggcaaaacaaaagaaatcatgact

SEQ ID NO: 5658490 - DNA, 25 bp, Homo sapien
aaacaaaagaaatcatgactttctt

SEQ ID NO: 5658491 - DNA, 25 bp, Homo sapien
gggtatggcaaaacaaaagaaatca

SEQ ID NO: 5658492 - DNA, 25 bp, Homo sapien
atggcaaaacaaaagaaatcatgac

SEQ ID NO: 5658493 - DNA, 25 bp, Homo sapien
aaagaaatcatgactttctttttct

SEQ ID NO: 5658494 - DNA, 25 bp, Homo sapien
aacaaaagaaatcatgactttcttt

SEQ ID NO: 5658495 - DNA, 25 bp, Homo sapien
gggcatgatggtgggtgcctgtaat

SEQ ID NO: 5658496 - DNA, 25 bp, Homo sapien
gaggcggaaaaatcatttgaacctg

SEQ ID NO: 5658497 - DNA, 25 bp, Homo sapien
ctgggcatgatggtgggtgcctgta

SEQ ID NO: 5658498 - DNA, 25 bp, Homo sapien
agctgggcatgatggtgggtgcctg

SEQ ID NO: 5658499 - DNA, 25 bp, Homo sapien
gctgggcatgatggtgggtgcctgt

SEQ ID NO: 5658500 - DNA, 25 bp, Homo sapien
tgggcatgatggtgggtgcctgtaa

SEQ ID NO: 5658501 - DNA, 25 bp, Homo sapien
caggcacccaccatcatgcccagct

SEQ ID NO: 5658502 - DNA, 25 bp, Homo sapien
attacaggcacccaccatcatgccc

SEQ ID NO: 5658503 - DNA, 25 bp, Homo sapien
caggttcaaatgatttttccgcctc

SEQ ID NO: 5658504 - DNA, 25 bp, Homo sapien
tacaggcacccaccatcatgcccag

SEQ ID NO: 5658505 - DNA, 25 bp, Homo sapien
acaggcacccaccatcatgcccagc

SEQ ID NO: 5658506 - DNA, 25 bp, Homo sapien
ttacaggcacccaccatcatgccca

SEQ ID NO: 5658507 - DNA, 25 bp, Homo sapien
actgcctgggcgacagtgagattct

SEQ ID NO: 5658508 - DNA, 25 bp, Homo sapien
ctagcaaagttttattttgttatgg

SEQ ID NO: 5658509 - DNA, 25 bp, Homo sapien
tcactgcctgggcgacagtgagatt

SEQ ID NO: 5658510 - DNA, 25 bp, Homo sapien
cactgcctgggcgacagtgagattc

SEQ ID NO: 5658511 - DNA, 25 bp, Homo sapien
atcactgcctgggcgacagtgagat

SEQ ID NO: 5658512 - DNA, 25 bp, Homo sapien
catcactgcctgggcgacagtgaga

SEQ ID NO: 5658513 - DNA, 25 bp, Homo sapien
atctcactgtcgcccaggcagtgat

SEQ ID NO: 5658514 - DNA, 25 bp, Homo sapien
tctcactgtcgcccaggcagtgatg

SEQ ID NO: 5658515 - DNA, 25 bp, Homo sapien
ccataacaaaataaaactttgctag

SEQ ID NO: 5658516 - DNA, 25 bp, Homo sapien
aatctcactgtcgcccaggcagtga

SEQ ID NO: 5658517 - DNA, 25 bp, Homo sapien
cataacaaaataaaactttgctagt

SEQ ID NO: 5658518 - DNA, 25 bp, Homo sapien
gaatctcactgtcgcccaggcagtg

SEQ ID NO: 5658519 - DNA, 25 bp, Homo sapien
aaatacaagaaaattagccaggcct

SEQ ID NO: 5658520 - DNA, 25 bp, Homo sapien
caggcctggtggcgagtgcctgtaa

SEQ ID NO: 5658521 - DNA, 25 bp, Homo sapien
aggcctggtggcgagtgcctgtaat

SEQ ID NO: 5658522 - DNA, 25 bp, Homo sapien
ttacaggcactcgccaccaggcctg

SEQ ID NO: 5658523 - DNA, 25 bp, Homo sapien
aggcctggctaattttcttgtattt

SEQ ID NO: 5658524 - DNA, 25 bp, Homo sapien
attacaggcactcgccaccaggcct

SEQ ID NO: 5658525 - DNA, 25 bp, Homo sapien
caggcctgtaagcgtagcattttgg

SEQ ID NO: 5658526 - DNA, 25 bp, Homo sapien
ccaaaatgctacgcttacaggcctg

SEQ ID NO: 5658527 - DNA, 25 bp, Homo sapien
ttaaagaactagtgggccaggcagt

SEQ ID NO: 5658528 - DNA, 25 bp, Homo sapien
caggcctgtaagcgtagcattttgg

SEQ ID NO: 5658529 - DNA, 25 bp, Homo sapien
ttttaaagaactagtgggccaggca

SEQ ID NO: 5658530 - DNA, 25 bp, Homo sapien
tttaaagaactagtgggccaggcag

SEQ ID NO: 5658531 - DNA, 25 bp, Homo sapien
taaagaactagtgggccaggcagtg

SEQ ID NO: 5658532 - DNA, 25 bp, Homo sapien
gctcaggcctgtaagcgtagcattt

SEQ ID NO: 5658533 - DNA, 25 bp, Homo sapien
cactgcctggcccactagttcttta

SEQ ID NO: 5658534 - DNA, 25 bp, Homo sapien
aaatgctacgcttacaggcctgagc

SEQ ID NO: 5658535 - DNA, 25 bp, Homo sapien
actgcctggcccactagttctttaa

SEQ ID NO: 5658536 - DNA, 25 bp, Homo sapien
ctgcctggcccactagttctttaaa

SEQ ID NO: 5658537 - DNA, 25 bp, Homo sapien
ccaaaatgctacgcttacaggcctg

SEQ ID NO: 5658538 - DNA, 25 bp, Homo sapien
tgcctggcccactagttctttaaaa

SEQ ID NO: 5658539 - DNA, 25 bp, Homo sapien
aggcggcggagatctcagtgagccg

SEQ ID NO: 5658540 - DNA, 25 bp, Homo sapien
cggcggagatctcagtgagccgaga

SEQ ID NO: 5658541 - DNA, 25 bp, Homo sapien
acccaggcggcggagatctcagtga

SEQ ID NO: 5658542 - DNA, 25 bp, Homo sapien
ggcggcggagatctcagtgagccga

SEQ ID NO: 5658543 - DNA, 25 bp, Homo sapien
cccaggcggcggagatctcagtgag

SEQ ID NO: 5658544 - DNA, 25 bp, Homo sapien
gcggcggagatctcagtgagccgag

SEQ ID NO: 5658545 - DNA, 25 bp, Homo sapien
cggctcactgagatctccgccgcct

SEQ ID NO: 5658546 - DNA, 25 bp, Homo sapien
tctcggctcactgagatctccgccg

SEQ ID NO: 5658547 - DNA, 25 bp, Homo sapien
ctcactgagatctccgccgcctggg

SEQ ID NO: 5658548 - DNA, 25 bp, Homo sapien
tcggctcactgagatctccgccgcc

SEQ ID NO: 5658549 - DNA, 25 bp, Homo sapien
ctcggctcactgagatctccgccgc

SEQ ID NO: 5658550 - DNA, 25 bp, Homo sapien
tcactgagatctccgccgcctgggt

SEQ ID NO: 5658551 - DNA, 25 bp, Homo sapien
gactgaagtggcaacaagtagcctt

SEQ ID NO: 5658552 - DNA, 25 bp, Homo sapien
gaagtggcaacaagtagcctttgca

SEQ ID NO: 5658553 - DNA, 25 bp, Homo sapien
aagtggcaacaagtagcctttgcaa

SEQ ID NO: 5658554 - DNA, 25 bp, Homo sapien
caacaagtagcctttgcaatcttaa

SEQ ID NO: 5658555 - DNA, 25 bp, Homo sapien
gcaacaagtagcctttgcaatctta

SEQ ID NO: 5658556 - DNA, 25 bp, Homo sapien
ctgaagtggcaacaagtagcctttg

SEQ ID NO: 5658557 - DNA, 25 bp, Homo sapien
ttgcaaaggctacttgttgccactt

SEQ ID NO: 5658558 - DNA, 25 bp, Homo sapien
ttaagattgcaaaggctacttgttg

SEQ ID NO: 5658559 - DNA, 25 bp, Homo sapien
taagattgcaaaggctacttgttgc

SEQ ID NO: 5658560 - DNA, 25 bp, Homo sapien
gcaaaggctacttgttgccacttca

SEQ ID NO: 5658561 - DNA, 25 bp, Homo sapien
caaaggctacttgttgccacttcag

SEQ ID NO: 5658562 - DNA, 25 bp, Homo sapien
aaggctacttgttgccacttcagtc

SEQ ID NO: 5658563 - DNA, 25 bp, Homo sapien
agccaggctgatctcctgcccaggc

SEQ ID NO: 5658564 - DNA, 25 bp, Homo sapien
tagccaggctgatctcctgcccagg

SEQ ID NO: 5658565 - DNA, 25 bp, Homo sapien
gccaggctgatctcctgcccaggct

SEQ ID NO: 5658566 - DNA, 25 bp, Homo sapien
ggctgatctcctgcccaggctggtc

SEQ ID NO: 5658567 - DNA, 25 bp, Homo sapien
aggctgatctcctgcccaggctggt

SEQ ID NO: 5658568 - DNA, 25 bp, Homo sapien
caggctgatctcctgcccaggctgg

SEQ ID NO: 5658569 - DNA, 25 bp, Homo sapien
cctgggcaggagatcagcctggcta

SEQ ID NO: 5658570 - DNA, 25 bp, Homo sapien
gaccagcctgggcaggagatcagcc

SEQ ID NO: 5658571 - DNA, 25 bp, Homo sapien
accagcctgggcaggagatcagcct

SEQ ID NO: 5658572 - DNA, 25 bp, Homo sapien
ccagcctgggcaggagatcagcctg

SEQ ID NO: 5658573 - DNA, 25 bp, Homo sapien
agcctgggcaggagatcagcctggc

SEQ ID NO: 5658574 - DNA, 25 bp, Homo sapien
gcctgggcaggagatcagcctggct

SEQ ID NO: 5658575 - DNA, 25 bp, Homo sapien
aactcctgactcctgggctcaagag

SEQ ID NO: 5658576 - DNA, 25 bp, Homo sapien
actcctgactcctgggctcaagaga

SEQ ID NO: 5658577 - DNA, 25 bp, Homo sapien
caagtagttaggactacaggcacat

SEQ ID NO: 5658578 - DNA, 25 bp, Homo sapien
ctcctgactcctgggctcaagagat

SEQ ID NO: 5658579 - DNA, 25 bp, Homo sapien
tcctgactcctgggctcaagagatc

SEQ ID NO: 5658580 - DNA, 25 bp, Homo sapien
tgccaccatacccagtaaatttatt

SEQ ID NO: 5658581 - DNA, 25 bp, Homo sapien
tctcttgagcccaggagtcaggagt

SEQ ID NO: 5658582 - DNA, 25 bp, Homo sapien
atctcttgagcccaggagtcaggag

SEQ ID NO: 5658583 - DNA, 25 bp, Homo sapien
atgtgcctgtagtcctaactacttg

SEQ ID NO: 5658584 - DNA, 25 bp, Homo sapien
gatctcttgagcccaggagtcagga

SEQ ID NO: 5658585 - DNA, 25 bp, Homo sapien
aataaatttactgggtatggtggca

SEQ ID NO: 5658586 - DNA, 25 bp, Homo sapien
ctcttgagcccaggagtcaggagtt

SEQ ID NO: 5658587 - DNA, 25 bp, Homo sapien
ttctgtctcctacaaactttgtgat

SEQ ID NO: 5658588 - DNA, 25 bp, Homo sapien
attatgttaagtcatttctgtctcc

SEQ ID NO: 5658589 - DNA, 25 bp, Homo sapien
gtatttttggtagggtatggcatta

SEQ ID NO: 5658590 - DNA, 25 bp, Homo sapien
tagggtatggcattagttattatgt

SEQ ID NO: 5658591 - DNA, 25 bp, Homo sapien
tgtctcctacaaactttgtgataat

SEQ ID NO: 5658592 - DNA, 25 bp, Homo sapien
tctaagagaatatatagtgttgagt

SEQ ID NO: 5658593 - DNA, 25 bp, Homo sapien
ttaacataataactaatgccatacc

SEQ ID NO: 5658594 - DNA, 25 bp, Homo sapien
taatgccataccctaccaaaaatac

SEQ ID NO: 5658595 - DNA, 25 bp, Homo sapien
cataataactaatgccataccctac

SEQ ID NO: 5658596 - DNA, 25 bp, Homo sapien
tactcaacactatatattctcttag

SEQ ID NO: 5658597 - DNA, 25 bp, Homo sapien
tatcacaaagtttgtaggagacaga

SEQ ID NO: 5658598 - DNA, 25 bp, Homo sapien
ggagacagaaatgacttaacataat

SEQ ID NO: 5658599 - DNA, 25 bp, Homo sapien
aagagtcttgttaggtgcaattttt

SEQ ID NO: 5658600 - DNA, 25 bp, Homo sapien
aggtgcaattttttccttagtcatt

SEQ ID NO: 5658601 - DNA, 25 bp, Homo sapien
gtgcaattttttccttagtcattta

SEQ ID NO: 5658602 - DNA, 25 bp, Homo sapien
gcaattttttccttagtcatttata

SEQ ID NO: 5658603 - DNA, 25 bp, Homo sapien
taggtgcaattttttccttagtcat

SEQ ID NO: 5658604 - DNA, 25 bp, Homo sapien
taagagtcttgttaggtgcaatttt

SEQ ID NO: 5658605 - DNA, 25 bp, Homo sapien
aaaaattgcacctaacaagactctt

SEQ ID NO: 5658606 - DNA, 25 bp, Homo sapien
tataaatgactaaggaaaaaattgc

SEQ ID NO: 5658607 - DNA, 25 bp, Homo sapien
aaaattgcacctaacaagactctta

SEQ ID NO: 5658608 - DNA, 25 bp, Homo sapien
aatgactaaggaaaaaattgcacct

SEQ ID NO: 5658609 - DNA, 25 bp, Homo sapien
taaatgactaaggaaaaaattgcac

SEQ ID NO: 5658610 - DNA, 25 bp, Homo sapien
atgactaaggaaaaaattgcaccta

SEQ ID NO: 5658611 - DNA, 25 bp, Homo sapien
gcaattttttccttagtcatttata

SEQ ID NO: 5658612 - DNA, 25 bp, Homo sapien
taagagtcttgttaggtgcaatttt

SEQ ID NO: 5658613 - DNA, 25 bp, Homo sapien
gcttgacttttagtataataagagt

SEQ ID NO: 5658614 - DNA, 25 bp, Homo sapien
catttatacaatgaacaaatgttgt

SEQ ID NO: 5658615 - DNA, 25 bp, Homo sapien
taggtgcaattttttccttagtcat

SEQ ID NO: 5658616 - DNA, 25 bp, Homo sapien
caagccagcatctttaaatataagc

SEQ ID NO: 5658617 - DNA, 25 bp, Homo sapien
aaacccacattttgcacttagttat

SEQ ID NO: 5658618 - DNA, 25 bp, Homo sapien
aaatccttgtaatgatgaggaagac

SEQ ID NO: 5658619 - DNA, 25 bp, Homo sapien
gttacattgaattacaaatccttgt

SEQ ID NO: 5658620 - DNA, 25 bp, Homo sapien
cacttagttattttaatcagttaca

SEQ ID NO: 5658621 - DNA, 25 bp, Homo sapien
tacaaatccttgtaatgatgaggaa

SEQ ID NO: 5658622 - DNA, 25 bp, Homo sapien
tcagttacattgaattacaaatcct

SEQ ID NO: 5658623 - DNA, 25 bp, Homo sapien
tcttcctcatcattacaaggatttg

SEQ ID NO: 5658624 - DNA, 25 bp, Homo sapien
ggatttgtaattcaatgtaactgat

SEQ ID NO: 5658625 - DNA, 25 bp, Homo sapien
taactgattaaaataactaagtgca

SEQ ID NO: 5658626 - DNA, 25 bp, Homo sapien
aataactaagtgcaaaatgtgggtt

SEQ ID NO: 5658627 - DNA, 25 bp, Homo sapien
acaaggatttgtaattcaatgtaac

SEQ ID NO: 5658628 - DNA, 25 bp, Homo sapien
aaaataactaagtgcaaaatgtggg

SEQ ID NO: 5658629 - DNA, 25 bp, Homo sapien
accatggaaattcaactttttatat

SEQ ID NO: 5658630 - DNA, 25 bp, Homo sapien
ccagtttgtagtatttttaaccatg

SEQ ID NO: 5658631 - DNA, 25 bp, Homo sapien
atgcccagccagtttgtagtatttt

SEQ ID NO: 5658632 - DNA, 25 bp, Homo sapien
cagtttgtagtatttttaaccatgg

SEQ ID NO: 5658633 - DNA, 25 bp, Homo sapien
gcccagccagtttgtagtattttta

SEQ ID NO: 5658634 - DNA, 25 bp, Homo sapien
tagtatttttaaccatggaaattca

SEQ ID NO: 5658635 - DNA, 25 bp, Homo sapien
taaaaatactacaaactggctgggc

SEQ ID NO: 5658636 - DNA, 25 bp, Homo sapien
atataaaaagttgaatttccatggt

SEQ ID NO: 5658637 - DNA, 25 bp, Homo sapien
tgaatttccatggttaaaaatacta

SEQ ID NO: 5658638 - DNA, 25 bp, Homo sapien
ccatggttaaaaatactacaaactg

SEQ ID NO: 5658639 - DNA, 25 bp, Homo sapien
catggttaaaaatactacaaactgg

SEQ ID NO: 5658640 - DNA, 25 bp, Homo sapien
aaaatactacaaactggctgggcat

SEQ ID NO: 5658641 - DNA, 25 bp, Homo sapien
aagcagttctgcctcagcatcccga

SEQ ID NO: 5658642 - DNA, 25 bp, Homo sapien
ttcactgcagtctccgcttcccggg

SEQ ID NO: 5658643 - DNA, 25 bp, Homo sapien
cttggttcactgcagtctccgcttc

SEQ ID NO: 5658644 - DNA, 25 bp, Homo sapien
tggttcactgcagtctccgcttccc

SEQ ID NO: 5658645 - DNA, 25 bp, Homo sapien
ttggttcactgcagtctccgcttcc

SEQ ID NO: 5658646 - DNA, 25 bp, Homo sapien
agcagttctgcctcagcatcccgag

SEQ ID NO: 5658647 - DNA, 25 bp, Homo sapien
ggaagcggagactgcagtgaaccaa

SEQ ID NO: 5658648 - DNA, 25 bp, Homo sapien
gaagcggagactgcagtgaaccaag

SEQ ID NO: 5658649 - DNA, 25 bp, Homo sapien
ctcgggatgctgaggcagaactgct

SEQ ID NO: 5658650 - DNA, 25 bp, Homo sapien
cccgggaagcggagactgcagtgaa

SEQ ID NO: 5658651 - DNA, 25 bp, Homo sapien
gggaagcggagactgcagtgaacca

SEQ ID NO: 5658652 - DNA, 25 bp, Homo sapien
tcgggatgctgaggcagaactgctt

SEQ ID NO: 5658653 - DNA, 25 bp, Homo sapien
gtggaaatatttgtaggattaattc

SEQ ID NO: 5658654 - DNA, 25 bp, Homo sapien
atgtgtggaaatatttgtaggatta

SEQ ID NO: 5658655 - DNA, 25 bp, Homo sapien
tgtgtggaaatatttgtaggattaa

SEQ ID NO: 5658656 - DNA, 25 bp, Homo sapien
tgtggaaatatttgtaggattaatt

SEQ ID NO: 5658657 - DNA, 25 bp, Homo sapien
gtgtggaaatatttgtaggattaat

SEQ ID NO: 5658658 - DNA, 25 bp, Homo sapien
attaatcctacaaatatttccacac

SEQ ID NO: 5658659 - DNA, 25 bp, Homo sapien
taatcctacaaatatttccacacat

SEQ ID NO: 5658660 - DNA, 25 bp, Homo sapien
ttaatcctacaaatatttccacaca

SEQ ID NO: 5658661 - DNA, 25 bp, Homo sapien
gaattaatcctacaaatatttccac

SEQ ID NO: 5658662 - DNA, 25 bp, Homo sapien
aattaatcctacaaatatttccaca

SEQ ID NO: 5658663 - DNA, 25 bp, Homo sapien
tgtgtctattacaatgctaaaatat

SEQ ID NO: 5658664 - DNA, 25 bp, Homo sapien
ctattacaatgctaaaatatttttg

SEQ ID NO: 5658665 - DNA, 25 bp, Homo sapien
gtggaaatatttgtaggattaattc

SEQ ID NO: 5658666 - DNA, 25 bp, Homo sapien
atatttgtaggattaattcccattg

SEQ ID NO: 5658667 - DNA, 25 bp, Homo sapien
gaaatatttgtaggattaattccca

SEQ ID NO: 5658668 - DNA, 25 bp, Homo sapien
tgtgtggaaatatttgtaggattaa

SEQ ID NO: 5658669 - DNA, 25 bp, Homo sapien
caatgggaattaatcctacaaatat

SEQ ID NO: 5658670 - DNA, 25 bp, Homo sapien
taatcctacaaatatttccacacat

SEQ ID NO: 5658671 - DNA, 25 bp, Homo sapien
tgggaattaatcctacaaatatttc

SEQ ID NO: 5658672 - DNA, 25 bp, Homo sapien
ttaatcctacaaatatttccacaca

SEQ ID NO: 5658673 - DNA, 25 bp, Homo sapien
aatattttagcattgtaatagacac

SEQ ID NO: 5658674 - DNA, 25 bp, Homo sapien
gaattaatcctacaaatatttccac

SEQ ID NO: 5658675 - DNA, 25 bp, Homo sapien
gaattacaggctcgtgccacctcac

SEQ ID NO: 5658676 - DNA, 25 bp, Homo sapien
cggagtagcaggaattacaggctcg

SEQ ID NO: 5658677 - DNA, 25 bp, Homo sapien
catagcctccggagtagcaggaatt

SEQ ID NO: 5658678 - DNA, 25 bp, Homo sapien
ccatagcctccggagtagcaggaat

SEQ ID NO: 5658679 - DNA, 25 bp, Homo sapien
agcgattatcctgccatagcctccg

SEQ ID NO: 5658680 - DNA, 25 bp, Homo sapien
ggagtagcaggaattacaggctcgt

SEQ ID NO: 5658681 - DNA, 25 bp, Homo sapien
aattcctgctactccggaggctatg

SEQ ID NO: 5658682 - DNA, 25 bp, Homo sapien
acgagcctgtaattcctgctactcc

SEQ ID NO: 5658683 - DNA, 25 bp, Homo sapien
gtgaggtggcacgagcctgtaattc

SEQ ID NO: 5658684 - DNA, 25 bp, Homo sapien
taattcctgctactccggaggctat

SEQ ID NO: 5658685 - DNA, 25 bp, Homo sapien
cggaggctatggcaggataatcgct

SEQ ID NO: 5658686 - DNA, 25 bp, Homo sapien
cgagcctgtaattcctgctactccg

SEQ ID NO: 5658687 - DNA, 25 bp, Homo sapien
gaggtggaaggatcccttgagccca

SEQ ID NO: 5658688 - DNA, 25 bp, Homo sapien
ccagcctgagcaacttagggagacc

SEQ ID NO: 5658689 - DNA, 25 bp, Homo sapien
gcctgagcaacttagggagaccctg

SEQ ID NO: 5658690 - DNA, 25 bp, Homo sapien
cagcctgagcaacttagggagaccc

SEQ ID NO: 5658691 - DNA, 25 bp, Homo sapien
cacacctcatattccagcactttgg

SEQ ID NO: 5658692 - DNA, 25 bp, Homo sapien
agcctgagcaacttagggagaccct

SEQ ID NO: 5658693 - DNA, 25 bp, Homo sapien
gggtctccctaagttgctcaggctg

SEQ ID NO: 5658694 - DNA, 25 bp, Homo sapien
agggtctccctaagttgctcaggct

SEQ ID NO: 5658695 - DNA, 25 bp, Homo sapien
ggtctccctaagttgctcaggctgg

SEQ ID NO: 5658696 - DNA, 25 bp, Homo sapien
tgggctcaagggatccttccacctc

SEQ ID NO: 5658697 - DNA, 25 bp, Homo sapien
cagggtctccctaagttgctcaggc

SEQ ID NO: 5658698 - DNA, 25 bp, Homo sapien
ccaaagtgctggaatatgaggtgtg

SEQ ID NO: 5658699 - DNA, 25 bp, Homo sapien
atctagagcatttaaagtggcatcc

SEQ ID NO: 5658700 - DNA, 25 bp, Homo sapien
aatctagagcatttaaagtggcatc

SEQ ID NO: 5658701 - DNA, 25 bp, Homo sapien
aaatctagagcatttaaagtggcat

SEQ ID NO: 5658702 - DNA, 25 bp, Homo sapien
tctagagcatttaaagtggcatcca

SEQ ID NO: 5658703 - DNA, 25 bp, Homo sapien
taaatctagagcatttaaagtggca

SEQ ID NO: 5658704 - DNA, 25 bp, Homo sapien
gggtaaatctagagcatttaaagtg

SEQ ID NO: 5658705 - DNA, 25 bp, Homo sapien
gatgccactttaaatgctctagatt

SEQ ID NO: 5658706 - DNA, 25 bp, Homo sapien
tggatgccactttaaatgctctaga

SEQ ID NO: 5658707 - DNA, 25 bp, Homo sapien
ggatgccactttaaatgctctagat

SEQ ID NO: 5658708 - DNA, 25 bp, Homo sapien
tgccactttaaatgctctagattta

SEQ ID NO: 5658709 - DNA, 25 bp, Homo sapien
gccactttaaatgctctagatttac

SEQ ID NO: 5658710 - DNA, 25 bp, Homo sapien
cactttaaatgctctagatttaccc

SEQ ID NO: 5658711 - DNA, 25 bp, Homo sapien
gaaagaatgctgaattctgaaatta

SEQ ID NO: 5658712 - DNA, 25 bp, Homo sapien
aaatgctctagatttacccagaaag

SEQ ID NO: 5658713 - DNA, 25 bp, Homo sapien
tggatgccactttaaatgctctaga

SEQ ID NO: 5658714 - DNA, 25 bp, Homo sapien
tgaggcaaattacagcaaaaatccc

SEQ ID NO: 5658715 - DNA, 25 bp, Homo sapien
taaaggttttatcttggatgccact

SEQ ID NO: 5658716 - DNA, 25 bp, Homo sapien
ctagatttacccagaaagaatgctg

SEQ ID NO: 5658717 - DNA, 25 bp, Homo sapien
tagagtgagagaatactaaatcttg

SEQ ID NO: 5658718 - DNA, 25 bp, Homo sapien
gagtgagagaatactaaatcttgct

SEQ ID NO: 5658719 - DNA, 25 bp, Homo sapien
agagtgagagaatactaaatcttgc

SEQ ID NO: 5658720 - DNA, 25 bp, Homo sapien
gtgagagaatactaaatcttgctgt

SEQ ID NO: 5658721 - DNA, 25 bp, Homo sapien
taacaatatttaagcctgatttaca

SEQ ID NO: 5658722 - DNA, 25 bp, Homo sapien
catcttaaagtaagttaacaatatt

SEQ ID NO: 5658723 - DNA, 25 bp, Homo sapien
cagcaagatttagtattctctcact

SEQ ID NO: 5658724 - DNA, 25 bp, Homo sapien
aatattgttaacttactttaagatg

SEQ ID NO: 5658725 - DNA, 25 bp, Homo sapien
tgtaaatcaggcttaaatattgtta

SEQ ID NO: 5658726 - DNA, 25 bp, Homo sapien
caagatttagtattctctcactcta

SEQ ID NO: 5658727 - DNA, 25 bp, Homo sapien
gcaagatttagtattctctcactct

SEQ ID NO: 5658728 - DNA, 25 bp, Homo sapien
acagcaagatttagtattctctcac

SEQ ID NO: 5658729 - DNA, 25 bp, Homo sapien
gcctgatactaagcaacttctctta

SEQ ID NO: 5658730 - DNA, 25 bp, Homo sapien
gaaaattgtggcttccactttatac

SEQ ID NO: 5658731 - DNA, 25 bp, Homo sapien
tcagcctgatactaagcaacttctc

SEQ ID NO: 5658732 - DNA, 25 bp, Homo sapien
gcttccactttatactcagcctgat

SEQ ID NO: 5658733 - DNA, 25 bp, Homo sapien
tactcagcctgatactaagcaactt

SEQ ID NO: 5658734 - DNA, 25 bp, Homo sapien
ttgtggcttccactttatactcagc

SEQ ID NO: 5658735 - DNA, 25 bp, Homo sapien
tataaagtggaagccacaattttct

SEQ ID NO: 5658736 - DNA, 25 bp, Homo sapien
gtatcaggctgagtataaagtggaa

SEQ ID NO: 5658737 - DNA, 25 bp, Homo sapien
gctgagtataaagtggaagccacaa

SEQ ID NO: 5658738 - DNA, 25 bp, Homo sapien
tcaggctgagtataaagtggaagcc

SEQ ID NO: 5658739 - DNA, 25 bp, Homo sapien
taagagaagttgcttagtatcaggc

SEQ ID NO: 5658740 - DNA, 25 bp, Homo sapien
gagaagttgcttagtatcaggctga

SEQ ID NO: 5658741 - DNA, 25 bp, Homo sapien
catcggctgatctattgttatttcc

SEQ ID NO: 5658742 - DNA, 25 bp, Homo sapien
tatttcccacaaataacatatttct

SEQ ID NO: 5658743 - DNA, 25 bp, Homo sapien
cacatcggctgatctattgttattt

SEQ ID NO: 5658744 - DNA, 25 bp, Homo sapien
cccacatcggctgatctattgttat

SEQ ID NO: 5658745 - DNA, 25 bp, Homo sapien
ccacatcggctgatctattgttatt

SEQ ID NO: 5658746 - DNA, 25 bp, Homo sapien
acatcggctgatctattgttatttc

SEQ ID NO: 5658747 - DNA, 25 bp, Homo sapien
aataacaatagatcagccgatgtgg

SEQ ID NO: 5658748 - DNA, 25 bp, Homo sapien
ataacaatagatcagccgatgtggg

SEQ ID NO: 5658749 - DNA, 25 bp, Homo sapien
aatatttgtaggaaatacaagaaat

SEQ ID NO: 5658750 - DNA, 25 bp, Homo sapien
gaaatatgttatttgtgggaaataa

SEQ ID NO: 5658751 - DNA, 25 bp, Homo sapien
gaaataacaatagatcagccgatgt

SEQ ID NO: 5658752 - DNA, 25 bp, Homo sapien
ggaaataacaatagatcagccgatg

SEQ ID NO: 5658753 - DNA, 25 bp, Homo sapien
tattggaggaatctgacctctcctt

SEQ ID NO: 5658754 - DNA, 25 bp, Homo sapien
ttggaggaatctgacctctccttac

SEQ ID NO: 5658755 - DNA, 25 bp, Homo sapien
actattggaggaatctgacctctcc

SEQ ID NO: 5658756 - DNA, 25 bp, Homo sapien
taactattggaggaatctgacctct

SEQ ID NO: 5658757 - DNA, 25 bp, Homo sapien
agataactattggaggaatctgacc

SEQ ID NO: 5658758 - DNA, 25 bp, Homo sapien
gataactattggaggaatctgacct

SEQ ID NO: 5658759 - DNA, 25 bp, Homo sapien
ggtcagattcctccaatagttatct

SEQ ID NO: 5658760 - DNA, 25 bp, Homo sapien
taaggagaggtcagattcctccaat

SEQ ID NO: 5658761 - DNA, 25 bp, Homo sapien
gagaggtcagattcctccaatagtt

SEQ ID NO: 5658762 - DNA, 25 bp, Homo sapien
gaggtcagattcctccaatagttat

SEQ ID NO: 5658763 - DNA, 25 bp, Homo sapien
gtaaggagaggtcagattcctccaa

SEQ ID NO: 5658764 - DNA, 25 bp, Homo sapien
ggagaggtcagattcctccaatagt

SEQ ID NO: 5658765 - DNA, 25 bp, Homo sapien
tccagattgggtaaaacaggtatca

SEQ ID NO: 5658766 - DNA, 25 bp, Homo sapien
gccttattaagagttcatctaggtt

SEQ ID NO: 5658767 - DNA, 25 bp, Homo sapien
tattcatgctgttccagattgggta

SEQ ID NO: 5658768 - DNA, 25 bp, Homo sapien
cagattgggtaaaacaggtatcaaa

SEQ ID NO: 5658769 - DNA, 25 bp, Homo sapien
taaaccatatctccagttattcatg

SEQ ID NO: 5658770 - DNA, 25 bp, Homo sapien
tctccagttattcatgctgttccag

SEQ ID NO: 5658771 - DNA, 25 bp, Homo sapien
taacctagatgaactcttaataagg

SEQ ID NO: 5658772 - DNA, 25 bp, Homo sapien
tctggaacagcatgaataactggag

SEQ ID NO: 5658773 - DNA, 25 bp, Homo sapien
tacccaatctggaacagcatgaata

SEQ ID NO: 5658774 - DNA, 25 bp, Homo sapien
gatacctgttttacccaatctggaa

SEQ ID NO: 5658775 - DNA, 25 bp, Homo sapien
tttgatacctgttttacccaatctg

SEQ ID NO: 5658776 - DNA, 25 bp, Homo sapien
catgaataactggagatatggttta

SEQ ID NO: 5658777 - DNA, 25 bp, Homo sapien
ttggaagagtattccgctctcccct

SEQ ID NO: 5658778 - DNA, 25 bp, Homo sapien
tggaagagtattccgctctcccctc

SEQ ID NO: 5658779 - DNA, 25 bp, Homo sapien
gctacatgtaatgaatcttggaaga

SEQ ID NO: 5658780 - DNA, 25 bp, Homo sapien
tcttccaagattcattacatgtagc

SEQ ID NO: 5658781 - DNA, 25 bp, Homo sapien
gaggggagagcggaatactcttcca

SEQ ID NO: 5658782 - DNA, 25 bp, Homo sapien
aggggagagcggaatactcttccaa

SEQ ID NO: 5658783 - DNA, 25 bp, Homo sapien
tcttccaagattcattacatgtagc

SEQ ID NO: 5658784 - DNA, 25 bp, Homo sapien
gaggggagagcggaatactcttcca

SEQ ID NO: 5658785 - DNA, 25 bp, Homo sapien
ctcctcaagggttatatttacatta

SEQ ID NO: 5658786 - DNA, 25 bp, Homo sapien
gggagagcggaatactcttccaaga

SEQ ID NO: 5658787 - DNA, 25 bp, Homo sapien
cattatatttacagtgtaaagaggg

SEQ ID NO: 5658788 - DNA, 25 bp, Homo sapien
ggagagcggaatactcttccaagat

SEQ ID NO: 5658789 - DNA, 25 bp, Homo sapien
gggatatcagatggagatgtagatc

SEQ ID NO: 5658790 - DNA, 25 bp, Homo sapien
gataactcggtcatatggctggctg

SEQ ID NO: 5658791 - DNA, 25 bp, Homo sapien
ttttgagataactcggtcatatggc

SEQ ID NO: 5658792 - DNA, 25 bp, Homo sapien
gatgtagatcaggtcctcagttctc

SEQ ID NO: 5658793 - DNA, 25 bp, Homo sapien
aactcggtcatatggctggctgcca

SEQ ID NO: 5658794 - DNA, 25 bp, Homo sapien
tcagatggagatgtagatcaggtcc

SEQ ID NO: 5658795 - DNA, 25 bp, Homo sapien
gatctacatctccatctgatatccc

SEQ ID NO: 5658796 - DNA, 25 bp, Homo sapien
gccatatgaccgagttatctcaaaa

SEQ ID NO: 5658797 - DNA, 25 bp, Homo sapien
ggacctgatctacatctccatctga

SEQ ID NO: 5658798 - DNA, 25 bp, Homo sapien
gagaactgaggacctgatctacatc

SEQ ID NO: 5658799 - DNA, 25 bp, Homo sapien
tggcagccagccatatgaccgagtt

SEQ ID NO: 5658800 - DNA, 25 bp, Homo sapien
gcagccagccatatgaccgagttat

SEQ ID NO: 5658801 - DNA, 25 bp, Homo sapien
tcactcttgtccctcaggctggagt

SEQ ID NO: 5658802 - DNA, 25 bp, Homo sapien
agtctcactcttgtccctcaggctg

SEQ ID NO: 5658803 - DNA, 25 bp, Homo sapien
gtctcactcttgtccctcaggctgg

SEQ ID NO: 5658804 - DNA, 25 bp, Homo sapien
agtgccacgatctcagctcactgca

SEQ ID NO: 5658805 - DNA, 25 bp, Homo sapien
tctcactcttgtccctcaggctgga

SEQ ID NO: 5658806 - DNA, 25 bp, Homo sapien
atctccgcctccctggttcacgtga

SEQ ID NO: 5658807 - DNA, 25 bp, Homo sapien
tccagcctgagggacaagagtgaga

SEQ ID NO: 5658808 - DNA, 25 bp, Homo sapien
ccagcctgagggacaagagtgagac

SEQ ID NO: 5658809 - DNA, 25 bp, Homo sapien
actccagcctgagggacaagagtga

SEQ ID NO: 5658810 - DNA, 25 bp, Homo sapien
tgcagtgagctgagatcgtggcact

SEQ ID NO: 5658811 - DNA, 25 bp, Homo sapien
cagcctgagggacaagagtgagact

SEQ ID NO: 5658812 - DNA, 25 bp, Homo sapien
tcacgtgaaccagggaggcggagat

SEQ ID NO: 5658813 - DNA, 25 bp, Homo sapien
tacttaattattaaggtaagtgaca

SEQ ID NO: 5658814 - DNA, 25 bp, Homo sapien
aattattaaggtaagtgacagtatt

SEQ ID NO: 5658815 - DNA, 25 bp, Homo sapien
taattattaaggtaagtgacagtat

SEQ ID NO: 5658816 - DNA, 25 bp, Homo sapien
acttaattattaaggtaagtgacag

SEQ ID NO: 5658817 - DNA, 25 bp, Homo sapien
ttaattattaaggtaagtgacagta

SEQ ID NO: 5658818 - DNA, 25 bp, Homo sapien
cttaattattaaggtaagtgacagt

SEQ ID NO: 5658819 - DNA, 25 bp, Homo sapien
aatactgtcacttaccttaataatt

SEQ ID NO: 5658820 - DNA, 25 bp, Homo sapien
tcacttaccttaataattaagtaga

SEQ ID NO: 5658821 - DNA, 25 bp, Homo sapien
ctgtcacttaccttaataattaagt

SEQ ID NO: 5658822 - DNA, 25 bp, Homo sapien
actgtcacttaccttaataattaag

SEQ ID NO: 5658823 - DNA, 25 bp, Homo sapien
tgtcacttaccttaataattaagta

SEQ ID NO: 5658824 - DNA, 25 bp, Homo sapien
tactgtcacttaccttaataattaa

SEQ ID NO: 5658825 - DNA, 25 bp, Homo sapien
aattattaaggtaagtgacagtatt

SEQ ID NO: 5658826 - DNA, 25 bp, Homo sapien
aggtaagtgacagtattttctttct

SEQ ID NO: 5658827 - DNA, 25 bp, Homo sapien
taattattaaggtaagtgacagtat

SEQ ID NO: 5658828 - DNA, 25 bp, Homo sapien
acttaattattaaggtaagtgacag

SEQ ID NO: 5658829 - DNA, 25 bp, Homo sapien
tattaaggtaagtgacagtattttc

SEQ ID NO: 5658830 - DNA, 25 bp, Homo sapien
cttaattattaaggtaagtgacagt

SEQ ID NO: 5658831 - DNA, 25 bp, Homo sapien
agaaagaaaatactgtcacttacct

SEQ ID NO: 5658832 - DNA, 25 bp, Homo sapien
aatactgtcacttaccttaataatt

SEQ ID NO: 5658833 - DNA, 25 bp, Homo sapien
actgtcacttaccttaataattaag

SEQ ID NO: 5658834 - DNA, 25 bp, Homo sapien
tactgtcacttaccttaataattaa

SEQ ID NO: 5658835 - DNA, 25 bp, Homo sapien
agaaaatactgtcacttaccttaat

SEQ ID NO: 5658836 - DNA, 25 bp, Homo sapien
gaaaatactgtcacttaccttaata

SEQ ID NO: 5658837 - DNA, 25 bp, Homo sapien
taaatgtgacttaaggcataatatt

SEQ ID NO: 5658838 - DNA, 25 bp, Homo sapien
tttgccctacattaagtattcagta

SEQ ID NO: 5658839 - DNA, 25 bp, Homo sapien
tatttgccctacattaagtattcag

SEQ ID NO: 5658840 - DNA, 25 bp, Homo sapien
aaaacttcagaggagtaaatgtgac

SEQ ID NO: 5658841 - DNA, 25 bp, Homo sapien
gagtaaatgtgacttaaggcataat

SEQ ID NO: 5658842 - DNA, 25 bp, Homo sapien
ggagtaaatgtgacttaaggcataa

SEQ ID NO: 5658843 - DNA, 25 bp, Homo sapien
ttatgccttaagtcacatttactcc

SEQ ID NO: 5658844 - DNA, 25 bp, Homo sapien
gtcacatttactcctctgaagtttt

SEQ ID NO: 5658845 - DNA, 25 bp, Homo sapien
tactgaatacttaatgtagggcaaa

SEQ ID NO: 5658846 - DNA, 25 bp, Homo sapien
ctgaatacttaatgtagggcaaata

SEQ ID NO: 5658847 - DNA, 25 bp, Homo sapien
aatattatgccttaagtcacattta

SEQ ID NO: 5658848 - DNA, 25 bp, Homo sapien
tattatgccttaagtcacatttact

SEQ ID NO: 5658849 - DNA, 25 bp, Homo sapien
gaagttgaacgtgtgtaagaatcct

SEQ ID NO: 5658850 - DNA, 25 bp, Homo sapien
tataaccatagtgtgactttagagc

SEQ ID NO: 5658851 - DNA, 25 bp, Homo sapien
gcatggactttgaagttgaacgtgt

SEQ ID NO: 5658852 - DNA, 25 bp, Homo sapien
catagtgtgactttagagcatggac

SEQ ID NO: 5658853 - DNA, 25 bp, Homo sapien
tgtgactttagagcatggactttga

SEQ ID NO: 5658854 - DNA, 25 bp, Homo sapien
ggtcaagtactataaccatagtgtg

SEQ ID NO: 5658855 - DNA, 25 bp, Homo sapien
catgctctaaagtcacactatggtt

SEQ ID NO: 5658856 - DNA, 25 bp, Homo sapien
cacactatggttatagtacttgacc

SEQ ID NO: 5658857 - DNA, 25 bp, Homo sapien
tcaaagtccatgctctaaagtcaca

SEQ ID NO: 5658858 - DNA, 25 bp, Homo sapien
ggattcttacacacgttcaacttca

SEQ ID NO: 5658859 - DNA, 25 bp, Homo sapien
gtccatgctctaaagtcacactatg

SEQ ID NO: 5658860 - DNA, 25 bp, Homo sapien
cacacgttcaacttcaaagtccatg

SEQ ID NO: 5658861 - DNA, 25 bp, Homo sapien
cattaaatgctcatttagtagagtt

SEQ ID NO: 5658862 - DNA, 25 bp, Homo sapien
catagtagttgttgagatattcatt

SEQ ID NO: 5658863 - DNA, 25 bp, Homo sapien
caggccccttgaacatagtagttgt

SEQ ID NO: 5658864 - DNA, 25 bp, Homo sapien
cccttgaacatagtagttgttgaga

SEQ ID NO: 5658865 - DNA, 25 bp, Homo sapien
tgctcatttagtagagttttaaagg

SEQ ID NO: 5658866 - DNA, 25 bp, Homo sapien
tttccaggccccttgaacatagtag

SEQ ID NO: 5658867 - DNA, 25 bp, Homo sapien
tctcaacaactactatgttcaaggg

SEQ ID NO: 5658868 - DNA, 25 bp, Homo sapien
ttaatgaatatctcaacaactacta

SEQ ID NO: 5658869 - DNA, 25 bp, Homo sapien
actactatgttcaaggggcctggaa

SEQ ID NO: 5658870 - DNA, 25 bp, Homo sapien
gaatatctcaacaactactatgttc

SEQ ID NO: 5658871 - DNA, 25 bp, Homo sapien
aactctactaaatgagcatttaatg

SEQ ID NO: 5658872 - DNA, 25 bp, Homo sapien
cctttaaaactctactaaatgagca

SEQ ID NO: 5658873 - DNA, 25 bp, Homo sapien
tactcttaatttataggtgctcaga

SEQ ID NO: 5658874 - DNA, 25 bp, Homo sapien
ttttactcttaatttataggtgctc

SEQ ID NO: 5658875 - DNA, 25 bp, Homo sapien
cttttactcttaatttataggtgct

SEQ ID NO: 5658876 - DNA, 25 bp, Homo sapien
tttactcttaatttataggtgctca

SEQ ID NO: 5658877 - DNA, 25 bp, Homo sapien
actcttaatttataggtgctcagaa

SEQ ID NO: 5658878 - DNA, 25 bp, Homo sapien
ttactcttaatttataggtgctcag

SEQ ID NO: 5658879 - DNA, 25 bp, Homo sapien
ctgagcacctataaattaagagtaa

SEQ ID NO: 5658880 - DNA, 25 bp, Homo sapien
agcacctataaattaagagtaaaag

SEQ ID NO: 5658881 - DNA, 25 bp, Homo sapien
ttctgagcacctataaattaagagt

SEQ ID NO: 5658882 - DNA, 25 bp, Homo sapien
gagcacctataaattaagagtaaaa

SEQ ID NO: 5658883 - DNA, 25 bp, Homo sapien
tctgagcacctataaattaagagta

SEQ ID NO: 5658884 - DNA, 25 bp, Homo sapien
tgagcacctataaattaagagtaaa

SEQ ID NO: 5658885 - DNA, 25 bp, Homo sapien
cacattattatgcttttactcttaa

SEQ ID NO: 5658886 - DNA, 25 bp, Homo sapien
tactcttaatttataggtgctcaga

SEQ ID NO: 5658887 - DNA, 25 bp, Homo sapien
tctcatatttttaagagaaatggtc

SEQ ID NO: 5658888 - DNA, 25 bp, Homo sapien
tatgtttttcttcacattattatgc

SEQ ID NO: 5658889 - DNA, 25 bp, Homo sapien
gagaaatggtcttattcatattatg

SEQ ID NO: 5658890 - DNA, 25 bp, Homo sapien
actcttaatttataggtgctcagaa

SEQ ID NO: 5658891 - DNA, 25 bp, Homo sapien
tctcttaaaaatatgagaacctaaa

SEQ ID NO: 5658892 - DNA, 25 bp, Homo sapien
taagagtaaaagcataataatgtga

SEQ ID NO: 5658893 - DNA, 25 bp, Homo sapien
gcataataatgtgaagaaaaacata

SEQ ID NO: 5658894 - DNA, 25 bp, Homo sapien
ttctgagcacctataaattaagagt

SEQ ID NO: 5658895 - DNA, 25 bp, Homo sapien
tgagcacctataaattaagagtaaa

SEQ ID NO: 5658896 - DNA, 25 bp, Homo sapien
cataatatgaataagaccatttctc

SEQ ID NO: 5658897 - DNA, 25 bp, Homo sapien
ggagagacgctctgttgagctcact

SEQ ID NO: 5658898 - DNA, 25 bp, Homo sapien
gaattttggagagacgctctgttga

SEQ ID NO: 5658899 - DNA, 25 bp, Homo sapien
gacgctctgttgagctcactctact

SEQ ID NO: 5658900 - DNA, 25 bp, Homo sapien
agttctgatatagtggtttgacatg

SEQ ID NO: 5658901 - DNA, 25 bp, Homo sapien
gatatagtggtttgacatgtttgtc

SEQ ID NO: 5658902 - DNA, 25 bp, Homo sapien
gagctcactctactattccagcagt

SEQ ID NO: 5658903 - DNA, 25 bp, Homo sapien
tagacaaacatgtcaaaccactata

SEQ ID NO: 5658904 - DNA, 25 bp, Homo sapien
catgtcaaaccactatatcagaact

SEQ ID NO: 5658905 - DNA, 25 bp, Homo sapien
tagagtgagctcaacagagcgtctc

SEQ ID NO: 5658906 - DNA, 25 bp, Homo sapien
gctcaacagagcgtctctccaaaat

SEQ ID NO: 5658907 - DNA, 25 bp, Homo sapien
gctggaatagtagagtgagctcaac

SEQ ID NO: 5658908 - DNA, 25 bp, Homo sapien
gaactgctggaatagtagagtgagc

SEQ ID NO: 5658909 - DNA, 25 bp, Homo sapien
caccgtgttggccagggtggtctcg

SEQ ID NO: 5658910 - DNA, 25 bp, Homo sapien
cgtgttggccagggtggtctcgaac

SEQ ID NO: 5658911 - DNA, 25 bp, Homo sapien
gtagagacagggtttcaccgtgttg

SEQ ID NO: 5658912 - DNA, 25 bp, Homo sapien
accgtgttggccagggtggtctcga

SEQ ID NO: 5658913 - DNA, 25 bp, Homo sapien
gtgttggccagggtggtctcgaact

SEQ ID NO: 5658914 - DNA, 25 bp, Homo sapien
ccgtgttggccagggtggtctcgaa

SEQ ID NO: 5658915 - DNA, 25 bp, Homo sapien
gttcgagaccaccctggccaacacg

SEQ ID NO: 5658916 - DNA, 25 bp, Homo sapien
ttcgagaccaccctggccaacacgg

SEQ ID NO: 5658917 - DNA, 25 bp, Homo sapien
agttcgagaccaccctggccaacac

SEQ ID NO: 5658918 - DNA, 25 bp, Homo sapien
tcgagaccaccctggccaacacggt

SEQ ID NO: 5658919 - DNA, 25 bp, Homo sapien
caacacggtgaaaccctgtctctac

SEQ ID NO: 5658920 - DNA, 25 bp, Homo sapien
cgagaccaccctggccaacacggtg

SEQ ID NO: 5658921 - DNA, 25 bp, Homo sapien
gcatgtacccctatgcccagctaat

SEQ ID NO: 5658922 - DNA, 25 bp, Homo sapien
tgattctcttgtctcagactcccaa

SEQ ID NO: 5658923 - DNA, 25 bp, Homo sapien
ggcatgtacccctatgcccagctaa

SEQ ID NO: 5658924 - DNA, 25 bp, Homo sapien
gtgattctcttgtctcagactccca

SEQ ID NO: 5658925 - DNA, 25 bp, Homo sapien
ttacaggcatgtacccctatgccca

SEQ ID NO: 5658926 - DNA, 25 bp, Homo sapien
tacaggcatgtacccctatgcccag

SEQ ID NO: 5658927 - DNA, 25 bp, Homo sapien
tgggagtctgagacaagagaatcac

SEQ ID NO: 5658928 - DNA, 25 bp, Homo sapien
tagctgggcataggggtacatgcct

SEQ ID NO: 5658929 - DNA, 25 bp, Homo sapien
ttgggagtctgagacaagagaatca

SEQ ID NO: 5658930 - DNA, 25 bp, Homo sapien
attagctgggcataggggtacatgc

SEQ ID NO: 5658931 - DNA, 25 bp, Homo sapien
tgggcataggggtacatgcctgtaa

SEQ ID NO: 5658932 - DNA, 25 bp, Homo sapien
ctgggcataggggtacatgcctgta

SEQ ID NO: 5658933 - DNA, 25 bp, Homo sapien
cagtggcgcgcaatcgtggttcact

SEQ ID NO: 5658934 - DNA, 25 bp, Homo sapien
agtggcgcgcaatcgtggttcactg

SEQ ID NO: 5658935 - DNA, 25 bp, Homo sapien
gtggcgcgcaatcgtggttcactgc

SEQ ID NO: 5658936 - DNA, 25 bp, Homo sapien
gcagtggcgcgcaatcgtggttcac

SEQ ID NO: 5658937 - DNA, 25 bp, Homo sapien
tgcagtggcgcgcaatcgtggttca

SEQ ID NO: 5658938 - DNA, 25 bp, Homo sapien
tgaaccacgattgcgcgccactgca

SEQ ID NO: 5658939 - DNA, 25 bp, Homo sapien
gcagtgaaccacgattgcgcgccac

SEQ ID NO: 5658940 - DNA, 25 bp, Homo sapien
agtgaaccacgattgcgcgccactg

SEQ ID NO: 5658941 - DNA, 25 bp, Homo sapien
gtgaaccacgattgcgcgccactgc

SEQ ID NO: 5658942 - DNA, 25 bp, Homo sapien
cagtgaaccacgattgcgcgccact

SEQ ID NO: 5658943 - DNA, 25 bp, Homo sapien
gtgaaccacgattgcgcgccactgc

SEQ ID NO: 5658944 - DNA, 25 bp, Homo sapien
tgcagtgaaccacgattgcgcgcca

SEQ ID NO: 5658945 - DNA, 25 bp, Homo sapien
tgaaccacgattgcgcgccactgca

SEQ ID NO: 5658946 - DNA, 25 bp, Homo sapien
gcagtgaaccacgattgcgcgccac

SEQ ID NO: 5658947 - DNA, 25 bp, Homo sapien
agtgaaccacgattgcgcgccactg

SEQ ID NO: 5658948 - DNA, 25 bp, Homo sapien
cagtgaaccacgattgcgcgccact

SEQ ID NO: 5658949 - DNA, 25 bp, Homo sapien
aaaggtctcattcagccatggatgt

SEQ ID NO: 5658950 - DNA, 25 bp, Homo sapien
gataactagggttctctccagctga

SEQ ID NO: 5658951 - DNA, 25 bp, Homo sapien
tctcccttgtctgtgaaaggtctca

SEQ ID NO: 5658952 - DNA, 25 bp, Homo sapien
ccttgtctgtgaaaggtctcattca

SEQ ID NO: 5658953 - DNA, 25 bp, Homo sapien
cagccatggatgtttagataactag

SEQ ID NO: 5658954 - DNA, 25 bp, Homo sapien
tgtttagataactagggttctctcc

SEQ ID NO: 5658955 - DNA, 25 bp, Homo sapien
tgaatgagacctttcacagacaagg

SEQ ID NO: 5658956 - DNA, 25 bp, Homo sapien
aaacatccatggctgaatgagacct

SEQ ID NO: 5658957 - DNA, 25 bp, Homo sapien
tagttatctaaacatccatggctga

SEQ ID NO: 5658958 - DNA, 25 bp, Homo sapien
tgagacctttcacagacaagggaga

SEQ ID NO: 5658959 - DNA, 25 bp, Homo sapien
tcagctggagagaaccctagttatc

SEQ ID NO: 5658960 - DNA, 25 bp, Homo sapien
ggagagaaccctagttatctaaaca

SEQ ID NO: 5658961 - DNA, 25 bp, Homo sapien
gcagtttacaagttcgccccagctt

SEQ ID NO: 5658962 - DNA, 25 bp, Homo sapien
caggcagtttacaagttcgccccag

SEQ ID NO: 5658963 - DNA, 25 bp, Homo sapien
aggcagtttacaagttcgccccagc

SEQ ID NO: 5658964 - DNA, 25 bp, Homo sapien
ggcagtttacaagttcgccccagct

SEQ ID NO: 5658965 - DNA, 25 bp, Homo sapien
cagtttacaagttcgccccagcttt

SEQ ID NO: 5658966 - DNA, 25 bp, Homo sapien
tgcaggttggggaacaagtcaaagt

SEQ ID NO: 5658967 - DNA, 25 bp, Homo sapien
agctggggcgaacttgtaaactgcc

SEQ ID NO: 5658968 - DNA, 25 bp, Homo sapien
aagctggggcgaacttgtaaactgc

SEQ ID NO: 5658969 - DNA, 25 bp, Homo sapien
aaagctggggcgaacttgtaaactg

SEQ ID NO: 5658970 - DNA, 25 bp, Homo sapien
ctggggcgaacttgtaaactgcctg

SEQ ID NO: 5658971 - DNA, 25 bp, Homo sapien
actttgacttgttccccaacctgca

SEQ ID NO: 5658972 - DNA, 25 bp, Homo sapien
gctggggcgaacttgtaaactgcct

SEQ ID NO: 5658973 - DNA, 25 bp, Homo sapien
gagaagacggcacgaagtaaaagct

SEQ ID NO: 5658974 - DNA, 25 bp, Homo sapien
gcctgaactttgacttgttccccaa

SEQ ID NO: 5658975 - DNA, 25 bp, Homo sapien
ccaacctgcactggcaaaaagcaga

SEQ ID NO: 5658976 - DNA, 25 bp, Homo sapien
actttgacttgttccccaacctgca

SEQ ID NO: 5658977 - DNA, 25 bp, Homo sapien
cactggcaaaaagcagaagctggtc

SEQ ID NO: 5658978 - DNA, 25 bp, Homo sapien
ggcgaacttgtaaactgcctgaact

SEQ ID NO: 5658979 - DNA, 25 bp, Homo sapien
actttttatcctcctgtctatggct

SEQ ID NO: 5658980 - DNA, 25 bp, Homo sapien
ttttatcctcctgtctatggctcac

SEQ ID NO: 5658981 - DNA, 25 bp, Homo sapien
tctgactttttatcctcctgtctat

SEQ ID NO: 5658982 - DNA, 25 bp, Homo sapien
ttctgactttttatcctcctgtcta

SEQ ID NO: 5658983 - DNA, 25 bp, Homo sapien
gactttttatcctcctgtctatggc

SEQ ID NO: 5658984 - DNA, 25 bp, Homo sapien
tgactttttatcctcctgtctatgg

SEQ ID NO: 5658985 - DNA, 25 bp, Homo sapien
agccatagacaggaggataaaaagt

SEQ ID NO: 5658986 - DNA, 25 bp, Homo sapien
gtgagccatagacaggaggataaaa

SEQ ID NO: 5658987 - DNA, 25 bp, Homo sapien
gccatagacaggaggataaaaagtc

SEQ ID NO: 5658988 - DNA, 25 bp, Homo sapien
catagacaggaggataaaaagtcag

SEQ ID NO: 5658989 - DNA, 25 bp, Homo sapien
ccatagacaggaggataaaaagtca

SEQ ID NO: 5658990 - DNA, 25 bp, Homo sapien
tagacaggaggataaaaagtcagaa

SEQ ID NO: 5658991 - DNA, 25 bp, Homo sapien
ttttatcctcctgtctatggctcac

SEQ ID NO: 5658992 - DNA, 25 bp, Homo sapien
tgtctatggctcacactttccagtt

SEQ ID NO: 5658993 - DNA, 25 bp, Homo sapien
tccagtttctttgcatgtctcataa

SEQ ID NO: 5658994 - DNA, 25 bp, Homo sapien
ggacagctgaacagctgaaccaccc

SEQ ID NO: 5658995 - DNA, 25 bp, Homo sapien
gaaccaccccagagacattttctga

SEQ ID NO: 5658996 - DNA, 25 bp, Homo sapien
gactttttatcctcctgtctatggc

SEQ ID NO: 5658997 - DNA, 25 bp, Homo sapien
tgatgcttttgtctgccagtttgaa

SEQ ID NO: 5658998 - DNA, 25 bp, Homo sapien
tgaatccactgttgatccccttcag

SEQ ID NO: 5658999 - DNA, 25 bp, Homo sapien
tgcttttgtctgccagtttgaatcc

SEQ ID NO: 5659000 - DNA, 25 bp, Homo sapien
gatgcttttgtctgccagtttgaat

SEQ ID NO: 5659001 - DNA, 25 bp, Homo sapien
atgcttttgtctgccagtttgaatc

SEQ ID NO: 5659002 - DNA, 25 bp, Homo sapien
ctgatgcttttgtctgccagtttga

SEQ ID NO: 5659003 - DNA, 25 bp, Homo sapien
gattcaaactggcagacaaaagcat

SEQ ID NO: 5659004 - DNA, 25 bp, Homo sapien
ggattcaaactggcagacaaaagca

SEQ ID NO: 5659005 - DNA, 25 bp, Homo sapien
ttcaaactggcagacaaaagcatca

SEQ ID NO: 5659006 - DNA, 25 bp, Homo sapien
ctgaaggggatcaacagtggattca

SEQ ID NO: 5659007 - DNA, 25 bp, Homo sapien
tcaaactggcagacaaaagcatcag

SEQ ID NO: 5659008 - DNA, 25 bp, Homo sapien
attcaaactggcagacaaaagcatc

SEQ ID NO: 5659009 - DNA, 25 bp, Homo sapien
tgccactgtattcaagattttgctt

SEQ ID NO: 5659010 - DNA, 25 bp, Homo sapien
gagtagatttctcttgccactgtat

SEQ ID NO: 5659011 - DNA, 25 bp, Homo sapien
gggtgggaatctctttgtgtttatc

SEQ ID NO: 5659012 - DNA, 25 bp, Homo sapien
tactgtgatgtttattgggtgggaa

SEQ ID NO: 5659013 - DNA, 25 bp, Homo sapien
gcttttctttggctttttactgtga

SEQ ID NO: 5659014 - DNA, 25 bp, Homo sapien
agtgatgagtagatttctcttgcca

SEQ ID NO: 5659015 - DNA, 25 bp, Homo sapien
taaacatcacagtaaaaagccaaag

SEQ ID NO: 5659016 - DNA, 25 bp, Homo sapien
tacagtggcaagagaaatctactca

SEQ ID NO: 5659017 - DNA, 25 bp, Homo sapien
gattcccacccaataaacatcacag

SEQ ID NO: 5659018 - DNA, 25 bp, Homo sapien
gataaacacaaagagattcccaccc

SEQ ID NO: 5659019 - DNA, 25 bp, Homo sapien
tcacagtaaaaagccaaagaaaagc

SEQ ID NO: 5659020 - DNA, 25 bp, Homo sapien
aagcaaaatcttgaatacagtggca

SEQ ID NO: 5659021 - DNA, 25 bp, Homo sapien
cctcactcacattctaggggaggtg

SEQ ID NO: 5659022 - DNA, 25 bp, Homo sapien
gccatgtaatgtaacctaattatgg

SEQ ID NO: 5659023 - DNA, 25 bp, Homo sapien
aattatggaagtgacatccattgca

SEQ ID NO: 5659024 - DNA, 25 bp, Homo sapien
taatgtaacctaattatggaagtga

SEQ ID NO: 5659025 - DNA, 25 bp, Homo sapien
catgtaatgtaacctaattatggaa

SEQ ID NO: 5659026 - DNA, 25 bp, Homo sapien
tgtaatgtaacctaattatggaagt

SEQ ID NO: 5659027 - DNA, 25 bp, Homo sapien
tcacttccataattaggttacatta

SEQ ID NO: 5659028 - DNA, 25 bp, Homo sapien
ccataattaggttacattacatggc

SEQ ID NO: 5659029 - DNA, 25 bp, Homo sapien
tgcaatggatgtcacttccataatt

SEQ ID NO: 5659030 - DNA, 25 bp, Homo sapien
tccataattaggttacattacatgg

SEQ ID NO: 5659031 - DNA, 25 bp, Homo sapien
cacctcccctagaatgtgagtgagg

SEQ ID NO: 5659032 - DNA, 25 bp, Homo sapien
cacttccataattaggttacattac

SEQ ID NO: 5659033 - DNA, 25 bp, Homo sapien
caattgcctacaatcaaggaggttg

SEQ ID NO: 5659034 - DNA, 25 bp, Homo sapien
tctgaggcccgggagttctcttcca

SEQ ID NO: 5659035 - DNA, 25 bp, Homo sapien
ctcttccaggcttacatagttgtgg

SEQ ID NO: 5659036 - DNA, 25 bp, Homo sapien
gagttctcttccaggcttacatagt

SEQ ID NO: 5659037 - DNA, 25 bp, Homo sapien
ggtttcatctgaggcccgggagttc

SEQ ID NO: 5659038 - DNA, 25 bp, Homo sapien
attgcctacaatcaaggaggttggt

SEQ ID NO: 5659039 - DNA, 25 bp, Homo sapien
accaacctccttgattgtaggcaat

SEQ ID NO: 5659040 - DNA, 25 bp, Homo sapien
ccacaactatgtaagcctggaagag

SEQ ID NO: 5659041 - DNA, 25 bp, Homo sapien
tggaagagaactcccgggcctcaga

SEQ ID NO: 5659042 - DNA, 25 bp, Homo sapien
caacctccttgattgtaggcaattg

SEQ ID NO: 5659043 - DNA, 25 bp, Homo sapien
actatgtaagcctggaagagaactc

SEQ ID NO: 5659044 - DNA, 25 bp, Homo sapien
aactcccgggcctcagatgaaacca

SEQ ID NO: 5659045 - DNA, 25 bp, Homo sapien
gtttgaggcagctgcagtgtgctgt

SEQ ID NO: 5659046 - DNA, 25 bp, Homo sapien
gtctcatctacacaggaggctaaga

SEQ ID NO: 5659047 - DNA, 25 bp, Homo sapien
gtgcctatagtctcatctacacagg

SEQ ID NO: 5659048 - DNA, 25 bp, Homo sapien
atagtctcatctacacaggaggcta

SEQ ID NO: 5659049 - DNA, 25 bp, Homo sapien
ctcatctacacaggaggctaagaca

SEQ ID NO: 5659050 - DNA, 25 bp, Homo sapien
gtgcagtggtttgtgcctatagtct

SEQ ID NO: 5659051 - DNA, 25 bp, Homo sapien
tgtcttagcctcctgtgtagatgag

SEQ ID NO: 5659052 - DNA, 25 bp, Homo sapien
acagcacactgcagctgcctcaaac

SEQ ID NO: 5659053 - DNA, 25 bp, Homo sapien
tcttagcctcctgtgtagatgagac

SEQ ID NO: 5659054 - DNA, 25 bp, Homo sapien
agactataggcacaaaccactgcac

SEQ ID NO: 5659055 - DNA, 25 bp, Homo sapien
tagcctcctgtgtagatgagactat

SEQ ID NO: 5659056 - DNA, 25 bp, Homo sapien
cctgtgtagatgagactataggcac

SEQ ID NO: 5659057 - DNA, 25 bp, Homo sapien
accaagcctggctcttcatgtggat

SEQ ID NO: 5659058 - DNA, 25 bp, Homo sapien
caccaagcctggctcttcatgtgga

SEQ ID NO: 5659059 - DNA, 25 bp, Homo sapien
tccacatgaagagccaggcttggtg

SEQ ID NO: 5659060 - DNA, 25 bp, Homo sapien
atccacatgaagagccaggcttggt

SEQ ID NO: 5659061 - DNA, 25 bp, Homo sapien
tcaggtgatccaccccgccctcggc

SEQ ID NO: 5659062 - DNA, 25 bp, Homo sapien
gccctcggcttcctaaaatgctggg

SEQ ID NO: 5659063 - DNA, 25 bp, Homo sapien
cgccctcggcttcctaaaatgctgg

SEQ ID NO: 5659064 - DNA, 25 bp, Homo sapien
accaagcctggctcttcatgtggat

SEQ ID NO: 5659065 - DNA, 25 bp, Homo sapien
caccaagcctggctcttcatgtgga

SEQ ID NO: 5659066 - DNA, 25 bp, Homo sapien
ccctcggcttcctaaaatgctggga

SEQ ID NO: 5659067 - DNA, 25 bp, Homo sapien
gccgagggcggggtggatcacctga

SEQ ID NO: 5659068 - DNA, 25 bp, Homo sapien
tccacatgaagagccaggcttggtg

SEQ ID NO: 5659069 - DNA, 25 bp, Homo sapien
ccagcattttaggaagccgagggcg

SEQ ID NO: 5659070 - DNA, 25 bp, Homo sapien
cccagcattttaggaagccgagggc

SEQ ID NO: 5659071 - DNA, 25 bp, Homo sapien
tcccagcattttaggaagccgaggg

SEQ ID NO: 5659072 - DNA, 25 bp, Homo sapien
atccacatgaagagccaggcttggt

SEQ ID NO: 5659073 - DNA, 25 bp, Homo sapien
tacccaggctgggatgcagtggcat

SEQ ID NO: 5659074 - DNA, 25 bp, Homo sapien
cttacccaggctgggatgcagtggc

SEQ ID NO: 5659075 - DNA, 25 bp, Homo sapien
tcttacccaggctgggatgcagtgg

SEQ ID NO: 5659076 - DNA, 25 bp, Homo sapien
atgccactgcatcccagcctgggta

SEQ ID NO: 5659077 - DNA, 25 bp, Homo sapien
ccactgcatcccagcctgggtaaga

SEQ ID NO: 5659078 - DNA, 25 bp, Homo sapien
gccactgcatcccagcctgggtaag

SEQ ID NO: 5659079 - DNA, 25 bp, Homo sapien
tcagttcttagtcatctattgtgtt

SEQ ID NO: 5659080 - DNA, 25 bp, Homo sapien
tgttttacagtctactttatctgat

SEQ ID NO: 5659081 - DNA, 25 bp, Homo sapien
tctcagttcttagtcatctattgtg

SEQ ID NO: 5659082 - DNA, 25 bp, Homo sapien
ctgatactaatatagccagtccagt

SEQ ID NO: 5659083 - DNA, 25 bp, Homo sapien
tctgatactaatatagccagtccag

SEQ ID NO: 5659084 - DNA, 25 bp, Homo sapien
gaactctcagttcttagtcatctat

SEQ ID NO: 5659085 - DNA, 25 bp, Homo sapien
atcagataaagtagactgtaaaaca

SEQ ID NO: 5659086 - DNA, 25 bp, Homo sapien
atagatgactaagaactgagagttc

SEQ ID NO: 5659087 - DNA, 25 bp, Homo sapien
actggactggctatattagtatcag

SEQ ID NO: 5659088 - DNA, 25 bp, Homo sapien
aacacaatagatgactaagaactga

SEQ ID NO: 5659089 - DNA, 25 bp, Homo sapien
tggactggctatattagtatcagat

SEQ ID NO: 5659090 - DNA, 25 bp, Homo sapien
cacaatagatgactaagaactgaga

SEQ ID NO: 5659091 - DNA, 25 bp, Homo sapien
cagtaggccaggattgcactgctgc

SEQ ID NO: 5659092 - DNA, 25 bp, Homo sapien
gtaggccaggattgcactgctgcac

SEQ ID NO: 5659093 - DNA, 25 bp, Homo sapien
agtaggccaggattgcactgctgca

SEQ ID NO: 5659094 - DNA, 25 bp, Homo sapien
gcagtaggccaggattgcactgctg

SEQ ID NO: 5659095 - DNA, 25 bp, Homo sapien
ttgcagtaggccaggattgcactgc

SEQ ID NO: 5659096 - DNA, 25 bp, Homo sapien
tgcagtaggccaggattgcactgct

SEQ ID NO: 5659097 - DNA, 25 bp, Homo sapien
cagcagtgcaatcctggcctactgc

SEQ ID NO: 5659098 - DNA, 25 bp, Homo sapien
tgcagcagtgcaatcctggcctact

SEQ ID NO: 5659099 - DNA, 25 bp, Homo sapien
gcagcagtgcaatcctggcctactg

SEQ ID NO: 5659100 - DNA, 25 bp, Homo sapien
gcagtgcaatcctggcctactgcaa

SEQ ID NO: 5659101 - DNA, 25 bp, Homo sapien
gtgcagcagtgcaatcctggcctac

SEQ ID NO: 5659102 - DNA, 25 bp, Homo sapien
agcagtgcaatcctggcctactgca

SEQ ID NO: 5659103 - DNA, 25 bp, Homo sapien
tacagtggctatctcctgtaatgcc

SEQ ID NO: 5659104 - DNA, 25 bp, Homo sapien
tgaggtcaagagttaaaaaccagtc

SEQ ID NO: 5659105 - DNA, 25 bp, Homo sapien
caggtacagtggctatctcctgtaa

SEQ ID NO: 5659106 - DNA, 25 bp, Homo sapien
agtggctatctcctgtaatgccagc

SEQ ID NO: 5659107 - DNA, 25 bp, Homo sapien
aggtcaagagttaaaaaccagtctg

SEQ ID NO: 5659108 - DNA, 25 bp, Homo sapien
gtggctatctcctgtaatgccagca

SEQ ID NO: 5659109 - DNA, 25 bp, Homo sapien
tgctggcattacaggagatagccac

SEQ ID NO: 5659110 - DNA, 25 bp, Homo sapien
gcattacaggagatagccactgtac

SEQ ID NO: 5659111 - DNA, 25 bp, Homo sapien
gctggcattacaggagatagccact

SEQ ID NO: 5659112 - DNA, 25 bp, Homo sapien
ttacaggagatagccactgtacctg

SEQ ID NO: 5659113 - DNA, 25 bp, Homo sapien
gactggtttttaactcttgacctca

SEQ ID NO: 5659114 - DNA, 25 bp, Homo sapien
ggcattacaggagatagccactgta

SEQ ID NO: 5659115 - DNA, 25 bp, Homo sapien
tgcataacaatatggatttacttaa

SEQ ID NO: 5659116 - DNA, 25 bp, Homo sapien
ttgcataacaatatggatttactta

SEQ ID NO: 5659117 - DNA, 25 bp, Homo sapien
gcataacaatatggatttacttaat

SEQ ID NO: 5659118 - DNA, 25 bp, Homo sapien
ttaagtaaatccatattgttatgca

SEQ ID NO: 5659119 - DNA, 25 bp, Homo sapien
taagtaaatccatattgttatgcaa

SEQ ID NO: 5659120 - DNA, 25 bp, Homo sapien
attaagtaaatccatattgttatgc

SEQ ID NO: 5659121 - DNA, 25 bp, Homo sapien
tacttaatgccacagaactctgtac

SEQ ID NO: 5659122 - DNA, 25 bp, Homo sapien
tattccagagattgatggtggtgat

SEQ ID NO: 5659123 - DNA, 25 bp, Homo sapien
caatatggatttacttaatgccaca

SEQ ID NO: 5659124 - DNA, 25 bp, Homo sapien
tgatggtggtgatgtttgcataaca

SEQ ID NO: 5659125 - DNA, 25 bp, Homo sapien
gcataacaatatggatttacttaat

SEQ ID NO: 5659126 - DNA, 25 bp, Homo sapien
aatgtggttattccagagattgatg

SEQ ID NO: 5659127 - DNA, 25 bp, Homo sapien
taagtaaatccatattgttatgcaa

SEQ ID NO: 5659128 - DNA, 25 bp, Homo sapien
tacagagttctgtggcattaagtaa

SEQ ID NO: 5659129 - DNA, 25 bp, Homo sapien
tcaccaccatcaatctctggaataa

SEQ ID NO: 5659130 - DNA, 25 bp, Homo sapien
ggcattaagtaaatccatattgtta

SEQ ID NO: 5659131 - DNA, 25 bp, Homo sapien
ccatcaatctctggaataaccacat

SEQ ID NO: 5659132 - DNA, 25 bp, Homo sapien
tgttatgcaaacatcaccaccatca

SEQ ID NO: 5659133 - DNA, 25 bp, Homo sapien
tggatgaaactggaaactatcatcc

SEQ ID NO: 5659134 - DNA, 25 bp, Homo sapien
atggatgaaactggaaactatcatc

SEQ ID NO: 5659135 - DNA, 25 bp, Homo sapien
tgaaactggaaactatcatcctcag

SEQ ID NO: 5659136 - DNA, 25 bp, Homo sapien
atgaaactggaaactatcatcctca

SEQ ID NO: 5659137 - DNA, 25 bp, Homo sapien
gatgaaactggaaactatcatcctc

SEQ ID NO: 5659138 - DNA, 25 bp, Homo sapien
ggatgatagtttccagtttcatcca

SEQ ID NO: 5659139 - DNA, 25 bp, Homo sapien
tgaggatgatagtttccagtttcat

SEQ ID NO: 5659140 - DNA, 25 bp, Homo sapien
ctgaggatgatagtttccagtttca

SEQ ID NO: 5659141 - DNA, 25 bp, Homo sapien
gaggatgatagtttccagtttcatc

SEQ ID NO: 5659142 - DNA, 25 bp, Homo sapien
gatgatagtttccagtttcatccat

SEQ ID NO: 5659143 - DNA, 25 bp, Homo sapien
gccagttagaatggcagtcgttaaa

SEQ ID NO: 5659144 - DNA, 25 bp, Homo sapien
tttaacgactgccattctaactggc

SEQ ID NO: 5659145 - DNA, 25 bp, Homo sapien
aaacctagcaaaaaacaagcagtag

SEQ ID NO: 5659146 - DNA, 25 bp, Homo sapien
catctgatcctcgacaaacctagca

SEQ ID NO: 5659147 - DNA, 25 bp, Homo sapien
tgatcctcgacaaacctagcaaaaa

SEQ ID NO: 5659148 - DNA, 25 bp, Homo sapien
tcctcgacaaacctagcaaaaaaca

SEQ ID NO: 5659149 - DNA, 25 bp, Homo sapien
tcgacaaacctagcaaaaaacaagc

SEQ ID NO: 5659150 - DNA, 25 bp, Homo sapien
tagcaaaaaacaagcagtagggaaa

SEQ ID NO: 5659151 - DNA, 25 bp, Homo sapien
ctaggtttgtcgaggatcagatggt

SEQ ID NO: 5659152 - DNA, 25 bp, Homo sapien
tgttttttgctaggtttgtcgagga

SEQ ID NO: 5659153 - DNA, 25 bp, Homo sapien
tccctactgcttgttttttgctagg

SEQ ID NO: 5659154 - DNA, 25 bp, Homo sapien
gcttgttttttgctaggtttgtcga

SEQ ID NO: 5659155 - DNA, 25 bp, Homo sapien
ttttgctaggtttgtcgaggatcag

SEQ ID NO: 5659156 - DNA, 25 bp, Homo sapien
tgctaggtttgtcgaggatcagatg

SEQ ID NO: 5659157 - DNA, 25 bp, Homo sapien
gtttattctactgcattttcttaca

SEQ ID NO: 5659158 - DNA, 25 bp, Homo sapien
caaactgtaattactcttatttcca

SEQ ID NO: 5659159 - DNA, 25 bp, Homo sapien
tggaaataagagtaattacagtttg

SEQ ID NO: 5659160 - DNA, 25 bp, Homo sapien
tgtaagaaaatgcagtagaataaac

SEQ ID NO: 5659161 - DNA, 25 bp, Homo sapien
gtttattctactgcattttcttaca

SEQ ID NO: 5659162 - DNA, 25 bp, Homo sapien
cactctgtgttttctctgatatagt

SEQ ID NO: 5659163 - DNA, 25 bp, Homo sapien
tccagttaaaacaaatgataggctg

SEQ ID NO: 5659164 - DNA, 25 bp, Homo sapien
tactgcattttcttacaaactgtaa

SEQ ID NO: 5659165 - DNA, 25 bp, Homo sapien
gcactttcactctgtgttttctctg

SEQ ID NO: 5659166 - DNA, 25 bp, Homo sapien
caaactgtaattactcttatttcca

SEQ ID NO: 5659167 - DNA, 25 bp, Homo sapien
cagagaaaacacagagtgaaagtgc

SEQ ID NO: 5659168 - DNA, 25 bp, Homo sapien
cagcctatcatttgttttaactgga

SEQ ID NO: 5659169 - DNA, 25 bp, Homo sapien
tacagtttgtaagaaaatgcagtag

SEQ ID NO: 5659170 - DNA, 25 bp, Homo sapien
tggaaataagagtaattacagtttg

SEQ ID NO: 5659171 - DNA, 25 bp, Homo sapien
gaataaactatatcagagaaaacac

SEQ ID NO: 5659172 - DNA, 25 bp, Homo sapien
tgtaagaaaatgcagtagaataaac

SEQ ID NO: 5659173 - DNA, 25 bp, Homo sapien
aatttgttttaagcatcgatgttca

SEQ ID NO: 5659174 - DNA, 25 bp, Homo sapien
gcatcgatgttcaggcggtatggta

SEQ ID NO: 5659175 - DNA, 25 bp, Homo sapien
tttaagcatcgatgttcaggcggta

SEQ ID NO: 5659176 - DNA, 25 bp, Homo sapien
ttttaagcatcgatgttcaggcggt

SEQ ID NO: 5659177 - DNA, 25 bp, Homo sapien
tgttttaagcatcgatgttcaggcg

SEQ ID NO: 5659178 - DNA, 25 bp, Homo sapien
taagcatcgatgttcaggcggtatg

SEQ ID NO: 5659179 - DNA, 25 bp, Homo sapien
ccgcctgaacatcgatgcttaaaac

SEQ ID NO: 5659180 - DNA, 25 bp, Homo sapien
gcctgaacatcgatgcttaaaacaa

SEQ ID NO: 5659181 - DNA, 25 bp, Homo sapien
taccataccgcctgaacatcgatgc

SEQ ID NO: 5659182 - DNA, 25 bp, Homo sapien
taccgcctgaacatcgatgcttaaa

SEQ ID NO: 5659183 - DNA, 25 bp, Homo sapien
cataccgcctgaacatcgatgctta

SEQ ID NO: 5659184 - DNA, 25 bp, Homo sapien
tgaacatcgatgcttaaaacaaatt

SEQ ID NO: 5659185 - DNA, 25 bp, Homo sapien
ttaataaatagtgacagggtcttgc

SEQ ID NO: 5659186 - DNA, 25 bp, Homo sapien
tttaataaatagtgacagggtcttg

SEQ ID NO: 5659187 - DNA, 25 bp, Homo sapien
aataaatagtgacagggtcttgctg

SEQ ID NO: 5659188 - DNA, 25 bp, Homo sapien
taataaatagtgacagggtcttgct

SEQ ID NO: 5659189 - DNA, 25 bp, Homo sapien
caagaccctgtcactatttattaaa

SEQ ID NO: 5659190 - DNA, 25 bp, Homo sapien
agcaagaccctgtcactatttatta

SEQ ID NO: 5659191 - DNA, 25 bp, Homo sapien
cagcaagaccctgtcactatttatt

SEQ ID NO: 5659192 - DNA, 25 bp, Homo sapien
gcaagaccctgtcactatttattaa

SEQ ID NO: 5659193 - DNA, 25 bp, Homo sapien
taatactggagtgattccttgttac

SEQ ID NO: 5659194 - DNA, 25 bp, Homo sapien
attccttgttactctctgacacaaa

SEQ ID NO: 5659195 - DNA, 25 bp, Homo sapien
aatactggagtgattccttgttact

SEQ ID NO: 5659196 - DNA, 25 bp, Homo sapien
aataatactggagtgattccttgtt

SEQ ID NO: 5659197 - DNA, 25 bp, Homo sapien
ttccttgttactctctgacacaaac

SEQ ID NO: 5659198 - DNA, 25 bp, Homo sapien
atactggagtgattccttgttactc

SEQ ID NO: 5659199 - DNA, 25 bp, Homo sapien
gtaacaaggaatcactccagtatta

SEQ ID NO: 5659200 - DNA, 25 bp, Homo sapien
agtaacaaggaatcactccagtatt

SEQ ID NO: 5659201 - DNA, 25 bp, Homo sapien
gtttgtgtcagagagtaacaaggaa

SEQ ID NO: 5659202 - DNA, 25 bp, Homo sapien
gagtaacaaggaatcactccagtat

SEQ ID NO: 5659203 - DNA, 25 bp, Homo sapien
taacaaggaatcactccagtattat

SEQ ID NO: 5659204 - DNA, 25 bp, Homo sapien
tttgtgtcagagagtaacaaggaat

SEQ ID NO: 5659205 - DNA, 25 bp, Homo sapien
tctagctagggggagcacctgtctc

SEQ ID NO: 5659206 - DNA, 25 bp, Homo sapien
aaagtgagccagtagtctagctagg

SEQ ID NO: 5659207 - DNA, 25 bp, Homo sapien
ccagtagtctagctagggggagcac

SEQ ID NO: 5659208 - DNA, 25 bp, Homo sapien
cagaaagtgagccagtagtctagct

SEQ ID NO: 5659209 - DNA, 25 bp, Homo sapien
aagtgagccagtagtctagctaggg

SEQ ID NO: 5659210 - DNA, 25 bp, Homo sapien
gaaagtgagccagtagtctagctag

SEQ ID NO: 5659211 - DNA, 25 bp, Homo sapien
cctagctagactactggctcacttt

SEQ ID NO: 5659212 - DNA, 25 bp, Homo sapien
gagacaggtgctccccctagctaga

SEQ ID NO: 5659213 - DNA, 25 bp, Homo sapien
tagctagactactggctcactttct

SEQ ID NO: 5659214 - DNA, 25 bp, Homo sapien
agctagactactggctcactttctg

SEQ ID NO: 5659215 - DNA, 25 bp, Homo sapien
ccctagctagactactggctcactt

SEQ ID NO: 5659216 - DNA, 25 bp, Homo sapien
ggtgctccccctagctagactactg

SEQ ID NO: 5659217 - DNA, 25 bp, Homo sapien
tgtttagacctcagcatgattctta

SEQ ID NO: 5659218 - DNA, 25 bp, Homo sapien
cgtttttgtttagacctcagcatga

SEQ ID NO: 5659219 - DNA, 25 bp, Homo sapien
cagcatgattcttatctataattga

SEQ ID NO: 5659220 - DNA, 25 bp, Homo sapien
tccctcaaaacatccgatcaattgt

SEQ ID NO: 5659221 - DNA, 25 bp, Homo sapien
tttcttccctcaaaacatccgatca

SEQ ID NO: 5659222 - DNA, 25 bp, Homo sapien
ttttgtttagacctcagcatgattc

SEQ ID NO: 5659223 - DNA, 25 bp, Homo sapien
taagaatcatgctgaggtctaaaca

SEQ ID NO: 5659224 - DNA, 25 bp, Homo sapien
tcatgctgaggtctaaacaaaaacg

SEQ ID NO: 5659225 - DNA, 25 bp, Homo sapien
acaattgatcggatgttttgaggga

SEQ ID NO: 5659226 - DNA, 25 bp, Homo sapien
gaatcatgctgaggtctaaacaaaa

SEQ ID NO: 5659227 - DNA, 25 bp, Homo sapien
tcaattatagataagaatcatgctg

SEQ ID NO: 5659228 - DNA, 25 bp, Homo sapien
tgatcggatgttttgagggaagaaa

SEQ ID NO: 5659229 - DNA, 25 bp, Homo sapien
ctgtgataccagctctaaatgggac

SEQ ID NO: 5659230 - DNA, 25 bp, Homo sapien
tgataccagctctaaatgggacaac

SEQ ID NO: 5659231 - DNA, 25 bp, Homo sapien
gagaaactgtgataccagctctaaa

SEQ ID NO: 5659232 - DNA, 25 bp, Homo sapien
aactgtgataccagctctaaatggg

SEQ ID NO: 5659233 - DNA, 25 bp, Homo sapien
aattgagaaactgtgataccagctc

SEQ ID NO: 5659234 - DNA, 25 bp, Homo sapien
gaaactgtgataccagctctaaatg

SEQ ID NO: 5659235 - DNA, 25 bp, Homo sapien
catttagagctggtatcacagtttc

SEQ ID NO: 5659236 - DNA, 25 bp, Homo sapien
gtcccatttagagctggtatcacag

SEQ ID NO: 5659237 - DNA, 25 bp, Homo sapien
cccatttagagctggtatcacagtt

SEQ ID NO: 5659238 - DNA, 25 bp, Homo sapien
tttagagctggtatcacagtttctc

SEQ ID NO: 5659239 - DNA, 25 bp, Homo sapien
gttgtcccatttagagctggtatca

SEQ ID NO: 5659240 - DNA, 25 bp, Homo sapien
gagctggtatcacagtttctcaatt

SEQ ID NO: 5659241 - DNA, 25 bp, Homo sapien
atttgagccaaggaggttaaggctg

SEQ ID NO: 5659242 - DNA, 25 bp, Homo sapien
atcatttgagccaaggaggttaagg

SEQ ID NO: 5659243 - DNA, 25 bp, Homo sapien
gaatcatttgagccaaggaggttaa

SEQ ID NO: 5659244 - DNA, 25 bp, Homo sapien
aatcatttgagccaaggaggttaag

SEQ ID NO: 5659245 - DNA, 25 bp, Homo sapien
agaatcatttgagccaaggaggtta

SEQ ID NO: 5659246 - DNA, 25 bp, Homo sapien
tcatttgagccaaggaggttaaggc

SEQ ID NO: 5659247 - DNA, 25 bp, Homo sapien
taacctccttggctcaaatgattct

SEQ ID NO: 5659248 - DNA, 25 bp, Homo sapien
gccttaacctccttggctcaaatga

SEQ ID NO: 5659249 - DNA, 25 bp, Homo sapien
cagccttaacctccttggctcaaat

SEQ ID NO: 5659250 - DNA, 25 bp, Homo sapien
cttaacctccttggctcaaatgatt

SEQ ID NO: 5659251 - DNA, 25 bp, Homo sapien
ccttaacctccttggctcaaatgat

SEQ ID NO: 5659252 - DNA, 25 bp, Homo sapien
ttaacctccttggctcaaatgattc

SEQ ID NO: 5659253 - DNA, 25 bp, Homo sapien
attcttacatgttaaccccctatgt

SEQ ID NO: 5659254 - DNA, 25 bp, Homo sapien
tggcaatgtgcagttgtataaataa

SEQ ID NO: 5659255 - DNA, 25 bp, Homo sapien
gtattggttgaactattaacatagg

SEQ ID NO: 5659256 - DNA, 25 bp, Homo sapien
cccctatgtaatatggcaatgtgca

SEQ ID NO: 5659257 - DNA, 25 bp, Homo sapien
gttggtattggttgaactattaaca

SEQ ID NO: 5659258 - DNA, 25 bp, Homo sapien
taatatttaagttggtattggttga

SEQ ID NO: 5659259 - DNA, 25 bp, Homo sapien
ttatttatacaactgcacattgcca

SEQ ID NO: 5659260 - DNA, 25 bp, Homo sapien
taatagttcaaccaataccaactta

SEQ ID NO: 5659261 - DNA, 25 bp, Homo sapien
tgttaatagttcaaccaataccaac

SEQ ID NO: 5659262 - DNA, 25 bp, Homo sapien
acatagggggttaacatgtaagaat

SEQ ID NO: 5659263 - DNA, 25 bp, Homo sapien
cacattgccatattacatagggggt

SEQ ID NO: 5659264 - DNA, 25 bp, Homo sapien
cctatgttaatagttcaaccaatac

SEQ ID NO: 5659265 - DNA, 25 bp, Homo sapien
cctcttatctgcctcagtcttctga

SEQ ID NO: 5659266 - DNA, 25 bp, Homo sapien
atgtgttttaagagacagaatctca

SEQ ID NO: 5659267 - DNA, 25 bp, Homo sapien
gatcctcttatctgcctcagtcttc

SEQ ID NO: 5659268 - DNA, 25 bp, Homo sapien
agacagaatctcactacattgccca

SEQ ID NO: 5659269 - DNA, 25 bp, Homo sapien
caggttggtcttgagctcgtgagct

SEQ ID NO: 5659270 - DNA, 25 bp, Homo sapien
cttatctgcctcagtcttctgagta

SEQ ID NO: 5659271 - DNA, 25 bp, Homo sapien
tactcagaagactgaggcagataag

SEQ ID NO: 5659272 - DNA, 25 bp, Homo sapien
agctcacgagctcaagaccaacctg

SEQ ID NO: 5659273 - DNA, 25 bp, Homo sapien
tcagaagactgaggcagataagagg

SEQ ID NO: 5659274 - DNA, 25 bp, Homo sapien
gaagactgaggcagataagaggatc

SEQ ID NO: 5659275 - DNA, 25 bp, Homo sapien
tgagattctgtctcttaaaacacat

SEQ ID NO: 5659276 - DNA, 25 bp, Homo sapien
agaagactgaggcagataagaggat

SEQ ID NO: 5659277 - DNA, 25 bp, Homo sapien
cttcagcctaccaagtagctgggat

SEQ ID NO: 5659278 - DNA, 25 bp, Homo sapien
caggcacgtgccaccatgcccagct

SEQ ID NO: 5659279 - DNA, 25 bp, Homo sapien
aattctcctgcttcagcctaccaag

SEQ ID NO: 5659280 - DNA, 25 bp, Homo sapien
ccagctaatttttgtataattaatt

SEQ ID NO: 5659281 - DNA, 25 bp, Homo sapien
aggcacgtgccaccatgcccagcta

SEQ ID NO: 5659282 - DNA, 25 bp, Homo sapien
ttacaggcacgtgccaccatgccca

SEQ ID NO: 5659283 - DNA, 25 bp, Homo sapien
taattaattatacaaaaattagctg

SEQ ID NO: 5659284 - DNA, 25 bp, Homo sapien
agctgggcatggtggcacgtgcctg

SEQ ID NO: 5659285 - DNA, 25 bp, Homo sapien
atcccagctacttggtaggctgaag

SEQ ID NO: 5659286 - DNA, 25 bp, Homo sapien
cttggtaggctgaagcaggagaatt

SEQ ID NO: 5659287 - DNA, 25 bp, Homo sapien
tagctgggcatggtggcacgtgcct

SEQ ID NO: 5659288 - DNA, 25 bp, Homo sapien
tgggcatggtggcacgtgcctgtaa

SEQ ID NO: 5659289 - DNA, 25 bp, Homo sapien
taataagatcttaatgcataaccct

SEQ ID NO: 5659290 - DNA, 25 bp, Homo sapien
tagtcattaaatataacactgcaca

SEQ ID NO: 5659291 - DNA, 25 bp, Homo sapien
aatgcataaccctattgttgggtgg

SEQ ID NO: 5659292 - DNA, 25 bp, Homo sapien
tcattaaatataacactgcacattc

SEQ ID NO: 5659293 - DNA, 25 bp, Homo sapien
cataaccctattgttgggtggtgaa

SEQ ID NO: 5659294 - DNA, 25 bp, Homo sapien
tcttaatgcataaccctattgttgg

SEQ ID NO: 5659295 - DNA, 25 bp, Homo sapien
cacccaacaatagggttatgcatta

SEQ ID NO: 5659296 - DNA, 25 bp, Homo sapien
attcaccacccaacaatagggttat

SEQ ID NO: 5659297 - DNA, 25 bp, Homo sapien
caatagggttatgcattaagatctt

SEQ ID NO: 5659298 - DNA, 25 bp, Homo sapien
tcaccacccaacaatagggttatgc

SEQ ID NO: 5659299 - DNA, 25 bp, Homo sapien
ccaacaatagggttatgcattaaga

SEQ ID NO: 5659300 - DNA, 25 bp, Homo sapien
aatgtgcagtgttatatttaatgac

SEQ ID NO: 5659301 - DNA, 25 bp, Homo sapien
aagcattcatttaggaagccagtag

SEQ ID NO: 5659302 - DNA, 25 bp, Homo sapien
ttaggaagccagtagtaaacgactg

SEQ ID NO: 5659303 - DNA, 25 bp, Homo sapien
taggaagccagtagtaaacgactga

SEQ ID NO: 5659304 - DNA, 25 bp, Homo sapien
ctgtctcaaaccctaaaaaatatca

SEQ ID NO: 5659305 - DNA, 25 bp, Homo sapien
catttaggaagccagtagtaaacga

SEQ ID NO: 5659306 - DNA, 25 bp, Homo sapien
gcattcatttaggaagccagtagta

SEQ ID NO: 5659307 - DNA, 25 bp, Homo sapien
tgatattttttagggtttgagacag

SEQ ID NO: 5659308 - DNA, 25 bp, Homo sapien
tcagtcgtttactactggcttccta

SEQ ID NO: 5659309 - DNA, 25 bp, Homo sapien
ctactggcttcctaaatgaatgctt

SEQ ID NO: 5659310 - DNA, 25 bp, Homo sapien
tactactggcttcctaaatgaatgc

SEQ ID NO: 5659311 - DNA, 25 bp, Homo sapien
gtttactactggcttcctaaatgaa

SEQ ID NO: 5659312 - DNA, 25 bp, Homo sapien
cagtcgtttactactggcttcctaa

SEQ ID NO: 5659313 - DNA, 25 bp, Homo sapien
aaatcttgtcagctaggcatgtatg

SEQ ID NO: 5659314 - DNA, 25 bp, Homo sapien
tcttgtcttgactttactggttatc

SEQ ID NO: 5659315 - DNA, 25 bp, Homo sapien
gaaaaatcttgtcagctaggcatgt

SEQ ID NO: 5659316 - DNA, 25 bp, Homo sapien
gactttactggttatcttcaagtgg

SEQ ID NO: 5659317 - DNA, 25 bp, Homo sapien
tcttgtcagctaggcatgtatgtgt

SEQ ID NO: 5659318 - DNA, 25 bp, Homo sapien
gtatctcacccctctcttgtcttga

SEQ ID NO: 5659319 - DNA, 25 bp, Homo sapien
tcaagacaagagaggggtgagatac

SEQ ID NO: 5659320 - DNA, 25 bp, Homo sapien
gataaccagtaaagtcaagacaaga

SEQ ID NO: 5659321 - DNA, 25 bp, Homo sapien
tgaagataaccagtaaagtcaagac

SEQ ID NO: 5659322 - DNA, 25 bp, Homo sapien
acatgcctagctgacaagatttttc

SEQ ID NO: 5659323 - DNA, 25 bp, Homo sapien
tccacttgaagataaccagtaaagt

SEQ ID NO: 5659324 - DNA, 25 bp, Homo sapien
acacatacatgcctagctgacaaga

SEQ ID NO: 5659325 - DNA, 25 bp, Homo sapien
tactttgtgtccagcagtattggaa

SEQ ID NO: 5659326 - DNA, 25 bp, Homo sapien
tgtaaagttactttgtgtccagcag

SEQ ID NO: 5659327 - DNA, 25 bp, Homo sapien
taaagttactttgtgtccagcagta

SEQ ID NO: 5659328 - DNA, 25 bp, Homo sapien
ggtcatttgataattatttgttctg

SEQ ID NO: 5659329 - DNA, 25 bp, Homo sapien
gcagtattggaatggtcatttgata

SEQ ID NO: 5659330 - DNA, 25 bp, Homo sapien
ctttgtgtccagcagtattggaatg

SEQ ID NO: 5659331 - DNA, 25 bp, Homo sapien
cagaacaaataattatcaaatgacc

SEQ ID NO: 5659332 - DNA, 25 bp, Homo sapien
ccaatactgctggacacaaagtaac

SEQ ID NO: 5659333 - DNA, 25 bp, Homo sapien
cattccaatactgctggacacaaag

SEQ ID NO: 5659334 - DNA, 25 bp, Homo sapien
actgctggacacaaagtaactttac

SEQ ID NO: 5659335 - DNA, 25 bp, Homo sapien
gctggacacaaagtaactttacaaa

SEQ ID NO: 5659336 - DNA, 25 bp, Homo sapien
tatcaaatgaccattccaatactgc

SEQ ID NO: 5659337 - DNA, 25 bp, Homo sapien
gtataccttgagattgggctagaga

SEQ ID NO: 5659338 - DNA, 25 bp, Homo sapien
cttgagattgggctagagattctaa

SEQ ID NO: 5659339 - DNA, 25 bp, Homo sapien
gattgggctagagattctaaaggta

SEQ ID NO: 5659340 - DNA, 25 bp, Homo sapien
gggtataccttgagattgggctaga

SEQ ID NO: 5659341 - DNA, 25 bp, Homo sapien
taccttgagattgggctagagattc

SEQ ID NO: 5659342 - DNA, 25 bp, Homo sapien
tgaagacatggcatatctgataggg

SEQ ID NO: 5659343 - DNA, 25 bp, Homo sapien
caatctcaaggtatacccctatcag

SEQ ID NO: 5659344 - DNA, 25 bp, Homo sapien
gaatctctagcccaatctcaaggta

SEQ ID NO: 5659345 - DNA, 25 bp, Homo sapien
tacctttagaatctctagcccaatc

SEQ ID NO: 5659346 - DNA, 25 bp, Homo sapien
ccctatcagatatgccatgtcttca

SEQ ID NO: 5659347 - DNA, 25 bp, Homo sapien
tacccctatcagatatgccatgtct

SEQ ID NO: 5659348 - DNA, 25 bp, Homo sapien
ttagaatctctagcccaatctcaag

SEQ ID NO: 5659349 - DNA, 25 bp, Homo sapien
gtacttagctacaaaagaagctggg

SEQ ID NO: 5659350 - DNA, 25 bp, Homo sapien
tgtacttagctacaaaagaagctgg

SEQ ID NO: 5659351 - DNA, 25 bp, Homo sapien
tacttagctacaaaagaagctggga

SEQ ID NO: 5659352 - DNA, 25 bp, Homo sapien
cccagcttcttttgtagctaagtac

SEQ ID NO: 5659353 - DNA, 25 bp, Homo sapien
ccagcttcttttgtagctaagtaca

SEQ ID NO: 5659354 - DNA, 25 bp, Homo sapien
tcccagcttcttttgtagctaagta

SEQ ID NO: 5659355 - DNA, 25 bp, Homo sapien
gtagacactgttctttgctttgcca

SEQ ID NO: 5659356 - DNA, 25 bp, Homo sapien
tgtacttagctacaaaagaagctgg

SEQ ID NO: 5659357 - DNA, 25 bp, Homo sapien
ttgctttgccacattaacaaatggt

SEQ ID NO: 5659358 - DNA, 25 bp, Homo sapien
gctgggaaatttaaccaggtggcca

SEQ ID NO: 5659359 - DNA, 25 bp, Homo sapien
taaccaggtggccatgtgaagaagg

SEQ ID NO: 5659360 - DNA, 25 bp, Homo sapien
ccatgtgaagaagggaagagtagac

SEQ ID NO: 5659361 - DNA, 25 bp, Homo sapien
tggcaaagcaaagaacagtgtctac

SEQ ID NO: 5659362 - DNA, 25 bp, Homo sapien
ccagcttcttttgtagctaagtaca

SEQ ID NO: 5659363 - DNA, 25 bp, Homo sapien
accatttgttaatgtggcaaagcaa

SEQ ID NO: 5659364 - DNA, 25 bp, Homo sapien
catggccacctggttaaatttccca

SEQ ID NO: 5659365 - DNA, 25 bp, Homo sapien
ccttcttcacatggccacctggtta

SEQ ID NO: 5659366 - DNA, 25 bp, Homo sapien
gtctactcttcccttcttcacatgg

SEQ ID NO: 5659367 - DNA, 25 bp, Homo sapien
aaaatgtgacgtttgctatagcttg

SEQ ID NO: 5659368 - DNA, 25 bp, Homo sapien
tgtgttagtaaaatgtgacgtttgc

SEQ ID NO: 5659369 - DNA, 25 bp, Homo sapien
gagtttgggctgttctcagataaag

SEQ ID NO: 5659370 - DNA, 25 bp, Homo sapien
agaaaggttgtatcaggtagtatag

SEQ ID NO: 5659371 - DNA, 25 bp, Homo sapien
tatcaggtagtatagagtttgggct

SEQ ID NO: 5659372 - DNA, 25 bp, Homo sapien
tttgggctgttctcagataaagagg

SEQ ID NO: 5659373 - DNA, 25 bp, Homo sapien
ctatactacctgatacaacctttct

SEQ ID NO: 5659374 - DNA, 25 bp, Homo sapien
gcaaacgtcacattttactaacaca

SEQ ID NO: 5659375 - DNA, 25 bp, Homo sapien
agcccaaactctatactacctgata

SEQ ID NO: 5659376 - DNA, 25 bp, Homo sapien
cctctttatctgagaacagcccaaa

SEQ ID NO: 5659377 - DNA, 25 bp, Homo sapien
caagctatagcaaacgtcacatttt

SEQ ID NO: 5659378 - DNA, 25 bp, Homo sapien
ctttatctgagaacagcccaaactc

SEQ ID NO: 5659379 - DNA, 25 bp, Homo sapien
gctgggaatatataggtcgtgcacc

SEQ ID NO: 5659380 - DNA, 25 bp, Homo sapien
gggaatatataggtcgtgcaccacc

SEQ ID NO: 5659381 - DNA, 25 bp, Homo sapien
ctgggaatatataggtcgtgcacca

SEQ ID NO: 5659382 - DNA, 25 bp, Homo sapien
ggaatatataggtcgtgcaccacca

SEQ ID NO: 5659383 - DNA, 25 bp, Homo sapien
gaatatataggtcgtgcaccaccat

SEQ ID NO: 5659384 - DNA, 25 bp, Homo sapien
tgggaatatataggtcgtgcaccac

SEQ ID NO: 5659385 - DNA, 25 bp, Homo sapien
gtggtgcacgacctatatattccca

SEQ ID NO: 5659386 - DNA, 25 bp, Homo sapien
tggtggtgcacgacctatatattcc

SEQ ID NO: 5659387 - DNA, 25 bp, Homo sapien
atggtggtgcacgacctatatattc

SEQ ID NO: 5659388 - DNA, 25 bp, Homo sapien
ggtgcacgacctatatattcccagc

SEQ ID NO: 5659389 - DNA, 25 bp, Homo sapien
ggtggtgcacgacctatatattccc

SEQ ID NO: 5659390 - DNA, 25 bp, Homo sapien
tggtgcacgacctatatattcccag

SEQ ID NO: 5659391 - DNA, 25 bp, Homo sapien
aaatgtgcaacaggctccaagacat

SEQ ID NO: 5659392 - DNA, 25 bp, Homo sapien
attcttaaatgtgcaacaggctcca

SEQ ID NO: 5659393 - DNA, 25 bp, Homo sapien
tattcttaaatgtgcaacaggctcc

SEQ ID NO: 5659394 - DNA, 25 bp, Homo sapien
cttaaatgtgcaacaggctccaaga

SEQ ID NO: 5659395 - DNA, 25 bp, Homo sapien
tcttaaatgtgcaacaggctccaag

SEQ ID NO: 5659396 - DNA, 25 bp, Homo sapien
taaatgtgcaacaggctccaagaca

SEQ ID NO: 5659397 - DNA, 25 bp, Homo sapien
tggagcctgttgcacatttaagaat

SEQ ID NO: 5659398 - DNA, 25 bp, Homo sapien
cttggagcctgttgcacatttaaga

SEQ ID NO: 5659399 - DNA, 25 bp, Homo sapien
gagcctgttgcacatttaagaataa

SEQ ID NO: 5659400 - DNA, 25 bp, Homo sapien
tcttggagcctgttgcacatttaag

SEQ ID NO: 5659401 - DNA, 25 bp, Homo sapien
tgtcttggagcctgttgcacattta

SEQ ID NO: 5659402 - DNA, 25 bp, Homo sapien
atgtcttggagcctgttgcacattt

SEQ ID NO: 5659403 - DNA, 25 bp, Homo sapien
gggtggcagcgcgactctgtgccaa

SEQ ID NO: 5659404 - DNA, 25 bp, Homo sapien
ttgcggtgggtggcagcgcgactct

SEQ ID NO: 5659405 - DNA, 25 bp, Homo sapien
tgcggtgggtggcagcgcgactctg

SEQ ID NO: 5659406 - DNA, 25 bp, Homo sapien
gttgcggtgggtggcagcgcgactc

SEQ ID NO: 5659407 - DNA, 25 bp, Homo sapien
ggttgcggtgggtggcagcgcgact

SEQ ID NO: 5659408 - DNA, 25 bp, Homo sapien
caaagattgcgtgaaccttggaggc

SEQ ID NO: 5659409 - DNA, 25 bp, Homo sapien
ggcacaaagattgcgtgaaccttgg

SEQ ID NO: 5659410 - DNA, 25 bp, Homo sapien
aaagattgcgtgaaccttggaggca

SEQ ID NO: 5659411 - DNA, 25 bp, Homo sapien
aggcacaaagattgcgtgaaccttg

SEQ ID NO: 5659412 - DNA, 25 bp, Homo sapien
acaaagattgcgtgaaccttggagg

SEQ ID NO: 5659413 - DNA, 25 bp, Homo sapien
cacaaagattgcgtgaaccttggag

SEQ ID NO: 5659414 - DNA, 25 bp, Homo sapien
caaggttcacgcaatctttgtgcct

SEQ ID NO: 5659415 - DNA, 25 bp, Homo sapien
ctccaaggttcacgcaatctttgtg

SEQ ID NO: 5659416 - DNA, 25 bp, Homo sapien
cctccaaggttcacgcaatctttgt

SEQ ID NO: 5659417 - DNA, 25 bp, Homo sapien
tgcctccaaggttcacgcaatcttt

SEQ ID NO: 5659418 - DNA, 25 bp, Homo sapien
gcctccaaggttcacgcaatctttg

SEQ ID NO: 5659419 - DNA, 25 bp, Homo sapien
ccaaggttcacgcaatctttgtgcc

SEQ ID NO: 5659420 - DNA, 25 bp, Homo sapien
ttggcacagagtcgcgctgccaccc

SEQ ID NO: 5659421 - DNA, 25 bp, Homo sapien
gagtcgcgctgccacccaccgcaac

SEQ ID NO: 5659422 - DNA, 25 bp, Homo sapien
cagagtcgcgctgccacccaccgca

SEQ ID NO: 5659423 - DNA, 25 bp, Homo sapien
agtcgcgctgccacccaccgcaacc

SEQ ID NO: 5659424 - DNA, 25 bp, Homo sapien
agagtcgcgctgccacccaccgcaa

SEQ ID NO: 5659425 - DNA, 25 bp, Homo sapien
ggcacaaagattgcgtgaaccttgg

SEQ ID NO: 5659426 - DNA, 25 bp, Homo sapien
aaagattgcgtgaaccttggaggca

SEQ ID NO: 5659427 - DNA, 25 bp, Homo sapien
gggtggcagcgcgactctgtgccaa

SEQ ID NO: 5659428 - DNA, 25 bp, Homo sapien
tgcggtgggtggcagcgcgactctg

SEQ ID NO: 5659429 - DNA, 25 bp, Homo sapien
gttgcggtgggtggcagcgcgactc

SEQ ID NO: 5659430 - DNA, 25 bp, Homo sapien
ggttgcggtgggtggcagcgcgact

SEQ ID NO: 5659431 - DNA, 25 bp, Homo sapien
tattgtcactttatacctgtaaagg

SEQ ID NO: 5659432 - DNA, 25 bp, Homo sapien
tgttgcatgccatcaagcatgcctc

SEQ ID NO: 5659433 - DNA, 25 bp, Homo sapien
gttgggattactgttgcatgccatc

SEQ ID NO: 5659434 - DNA, 25 bp, Homo sapien
gaggcatgcttgatggcatgcaaca

SEQ ID NO: 5659435 - DNA, 25 bp, Homo sapien
gatggcatgcaacagtaatcccaac

SEQ ID NO: 5659436 - DNA, 25 bp, Homo sapien
cctttacaggtataaagtgacaata

SEQ ID NO: 5659437 - DNA, 25 bp, Homo sapien
gaattttttggagacaggttctcgc

SEQ ID NO: 5659438 - DNA, 25 bp, Homo sapien
catatgtattcatttaagaaaggaa

SEQ ID NO: 5659439 - DNA, 25 bp, Homo sapien
tatgtattcatttaagaaaggaatt

SEQ ID NO: 5659440 - DNA, 25 bp, Homo sapien
acatatgtattcatttaagaaagga

SEQ ID NO: 5659441 - DNA, 25 bp, Homo sapien
gacatatgtattcatttaagaaagg

SEQ ID NO: 5659442 - DNA, 25 bp, Homo sapien
agacatatgtattcatttaagaaag

SEQ ID NO: 5659443 - DNA, 25 bp, Homo sapien
ctttcttaaatgaatacatatgtct

SEQ ID NO: 5659444 - DNA, 25 bp, Homo sapien
cctttcttaaatgaatacatatgtc

SEQ ID NO: 5659445 - DNA, 25 bp, Homo sapien
aaattcctttcttaaatgaatacat

SEQ ID NO: 5659446 - DNA, 25 bp, Homo sapien
ttcctttcttaaatgaatacatatg

SEQ ID NO: 5659447 - DNA, 25 bp, Homo sapien
gcgagaacctgtctccaaaaaattc

SEQ ID NO: 5659448 - DNA, 25 bp, Homo sapien
tcctttcttaaatgaatacatatgt

SEQ ID NO: 5659449 - DNA, 25 bp, Homo sapien
aagccagatctttttgcccttgtct

SEQ ID NO: 5659450 - DNA, 25 bp, Homo sapien
cttgtcttgcatcatccatgtctat

SEQ ID NO: 5659451 - DNA, 25 bp, Homo sapien
aatcaagccagatctttttgccctt

SEQ ID NO: 5659452 - DNA, 25 bp, Homo sapien
tgcccttgtcttgcatcatccatgt

SEQ ID NO: 5659453 - DNA, 25 bp, Homo sapien
ccatgtctatatccctgtataataa

SEQ ID NO: 5659454 - DNA, 25 bp, Homo sapien
taataatcatgaaagtaagccagaa

SEQ ID NO: 5659455 - DNA, 25 bp, Homo sapien
ttattatacagggatatagacatgg

SEQ ID NO: 5659456 - DNA, 25 bp, Homo sapien
tctggcttactttcatgattattat

SEQ ID NO: 5659457 - DNA, 25 bp, Homo sapien
acatggatgatgcaagacaagggca

SEQ ID NO: 5659458 - DNA, 25 bp, Homo sapien
aagacaagggcaaaaagatctggct

SEQ ID NO: 5659459 - DNA, 25 bp, Homo sapien
tagacatggatgatgcaagacaagg

SEQ ID NO: 5659460 - DNA, 25 bp, Homo sapien
caagggcaaaaagatctggcttgat

SEQ ID NO: 5659461 - DNA, 25 bp, Homo sapien
tcccttgactctggaccagatttcc

SEQ ID NO: 5659462 - DNA, 25 bp, Homo sapien
cccttgactctggaccagatttcct

SEQ ID NO: 5659463 - DNA, 25 bp, Homo sapien
atcccttgactctggaccagatttc

SEQ ID NO: 5659464 - DNA, 25 bp, Homo sapien
ggaaatctggtccagagtcaaggga

SEQ ID NO: 5659465 - DNA, 25 bp, Homo sapien
aggaaatctggtccagagtcaaggg

SEQ ID NO: 5659466 - DNA, 25 bp, Homo sapien
gaaatctggtccagagtcaagggat

SEQ ID NO: 5659467 - DNA, 25 bp, Homo sapien
tcccttgactctggaccagatttcc

SEQ ID NO: 5659468 - DNA, 25 bp, Homo sapien
gactctggaccagatttccttcctg

SEQ ID NO: 5659469 - DNA, 25 bp, Homo sapien
tgctgatcccttgactctggaccag

SEQ ID NO: 5659470 - DNA, 25 bp, Homo sapien
cctgtgtgccctggtagctttgtta

SEQ ID NO: 5659471 - DNA, 25 bp, Homo sapien
taaagattttgctgatcccttgact

SEQ ID NO: 5659472 - DNA, 25 bp, Homo sapien
cctggtagctttgttaggaataaat

SEQ ID NO: 5659473 - DNA, 25 bp, Homo sapien
caggaaggaaatctggtccagagtc

SEQ ID NO: 5659474 - DNA, 25 bp, Homo sapien
aatttattcctaacaaagctaccag

SEQ ID NO: 5659475 - DNA, 25 bp, Homo sapien
gagtcaagggatcagcaaaatcttt

SEQ ID NO: 5659476 - DNA, 25 bp, Homo sapien
aggaaatctggtccagagtcaaggg

SEQ ID NO: 5659477 - DNA, 25 bp, Homo sapien
ctaacaaagctaccagggcacacag

SEQ ID NO: 5659478 - DNA, 25 bp, Homo sapien
gaaatctggtccagagtcaagggat

SEQ ID NO: 5659479 - DNA, 25 bp, Homo sapien
aaacatgtattattgaagggctaaa

SEQ ID NO: 5659480 - DNA, 25 bp, Homo sapien
aacatgtattattgaagggctaaaa

SEQ ID NO: 5659481 - DNA, 25 bp, Homo sapien
tttagcccttcaataatacatgttt

SEQ ID NO: 5659482 - DNA, 25 bp, Homo sapien
ttttagcccttcaataatacatgtt

SEQ ID NO: 5659483 - DNA, 25 bp, Homo sapien
aaacatgtattattgaagggctaaa

SEQ ID NO: 5659484 - DNA, 25 bp, Homo sapien
tatttttgggaattataaacatgta

SEQ ID NO: 5659485 - DNA, 25 bp, Homo sapien
tggaagctgagaaataaattttaaa

SEQ ID NO: 5659486 - DNA, 25 bp, Homo sapien
aacatgtattattgaagggctaaaa

SEQ ID NO: 5659487 - DNA, 25 bp, Homo sapien
catgtattattgaagggctaaaata

SEQ ID NO: 5659488 - DNA, 25 bp, Homo sapien
tgaagggctaaaatattaatagtat

SEQ ID NO: 5659489 - DNA, 25 bp, Homo sapien
ttttagcccttcaataatacatgtt

SEQ ID NO: 5659490 - DNA, 25 bp, Homo sapien
catgtttataattcccaaaaataag

SEQ ID NO: 5659491 - DNA, 25 bp, Homo sapien
tttaaaatttatttctcagcttcca

SEQ ID NO: 5659492 - DNA, 25 bp, Homo sapien
tattttagcccttcaataatacatg

SEQ ID NO: 5659493 - DNA, 25 bp, Homo sapien
tttagcccttcaataatacatgttt

SEQ ID NO: 5659494 - DNA, 25 bp, Homo sapien
tactattaatattttagcccttcaa

SEQ ID NO: 5659495 - DNA, 25 bp, Homo sapien
gacatagtcctcagttcaaagaata

SEQ ID NO: 5659496 - DNA, 25 bp, Homo sapien
gagctctgacatagtcctcagttca

SEQ ID NO: 5659497 - DNA, 25 bp, Homo sapien
tcttgagctctgacatagtcctcag

SEQ ID NO: 5659498 - DNA, 25 bp, Homo sapien
actgttttgaacaggaatggaatta

SEQ ID NO: 5659499 - DNA, 25 bp, Homo sapien
caggaatggaattagaatctttctt

SEQ ID NO: 5659500 - DNA, 25 bp, Homo sapien
gatctattttacctggagaccactg

SEQ ID NO: 5659501 - DNA, 25 bp, Homo sapien
tgaactgaggactatgtcagagctc

SEQ ID NO: 5659502 - DNA, 25 bp, Homo sapien
cagtggtctccaggtaaaatagatc

SEQ ID NO: 5659503 - DNA, 25 bp, Homo sapien
tattctttgaactgaggactatgtc

SEQ ID NO: 5659504 - DNA, 25 bp, Homo sapien
caagaaagattctaattccattcct

SEQ ID NO: 5659505 - DNA, 25 bp, Homo sapien
taattccattcctgttcaaaacagt

SEQ ID NO: 5659506 - DNA, 25 bp, Homo sapien
ctgaggactatgtcagagctcaaga

SEQ ID NO: 5659507 - DNA, 25 bp, Homo sapien
tagagtaattatagtcttgcattaa

SEQ ID NO: 5659508 - DNA, 25 bp, Homo sapien
ttagagtaattatagtcttgcatta

SEQ ID NO: 5659509 - DNA, 25 bp, Homo sapien
agagtaattatagtcttgcattaag

SEQ ID NO: 5659510 - DNA, 25 bp, Homo sapien
gagtaattatagtcttgcattaagg

SEQ ID NO: 5659511 - DNA, 25 bp, Homo sapien
aaggaaattaggccttatttgagca

SEQ ID NO: 5659512 - DNA, 25 bp, Homo sapien
tgctcaaataaggcctaatttcctt

SEQ ID NO: 5659513 - DNA, 25 bp, Homo sapien
ttaatgcaagactataattactcta

SEQ ID NO: 5659514 - DNA, 25 bp, Homo sapien
cttaatgcaagactataattactct

SEQ ID NO: 5659515 - DNA, 25 bp, Homo sapien
ccttaatgcaagactataattactc

SEQ ID NO: 5659516 - DNA, 25 bp, Homo sapien
taatgcaagactataattactctaa

SEQ ID NO: 5659517 - DNA, 25 bp, Homo sapien
taggccttatttgagcagcatatga

SEQ ID NO: 5659518 - DNA, 25 bp, Homo sapien
acttaaaactaaggacaccatatag

SEQ ID NO: 5659519 - DNA, 25 bp, Homo sapien
gaaattaggccttatttgagcagca

SEQ ID NO: 5659520 - DNA, 25 bp, Homo sapien
gagtaattatagtcttgcattaagg

SEQ ID NO: 5659521 - DNA, 25 bp, Homo sapien
caccatatagtaaggaaattaggcc

SEQ ID NO: 5659522 - DNA, 25 bp, Homo sapien
gagcagcatatgattttttagagta

SEQ ID NO: 5659523 - DNA, 25 bp, Homo sapien
tttccttactatatggtgtccttag

SEQ ID NO: 5659524 - DNA, 25 bp, Homo sapien
aaatcatatgctgctcaaataaggc

SEQ ID NO: 5659525 - DNA, 25 bp, Homo sapien
tactctaaaaaatcatatgctgctc

SEQ ID NO: 5659526 - DNA, 25 bp, Homo sapien
ggcctaatttccttactatatggtg

SEQ ID NO: 5659527 - DNA, 25 bp, Homo sapien
tatgctgctcaaataaggcctaatt

SEQ ID NO: 5659528 - DNA, 25 bp, Homo sapien
ccttaatgcaagactataattactc

SEQ ID NO: 5659529 - DNA, 25 bp, Homo sapien
cactctactcaagccggcataacag

SEQ ID NO: 5659530 - DNA, 25 bp, Homo sapien
gaggccactctactcaagccggcat

SEQ ID NO: 5659531 - DNA, 25 bp, Homo sapien
gatgaggccactctactcaagccgg

SEQ ID NO: 5659532 - DNA, 25 bp, Homo sapien
tactcaagccggcataacagaatga

SEQ ID NO: 5659533 - DNA, 25 bp, Homo sapien
tgatgaggccactctactcaagccg

SEQ ID NO: 5659534 - DNA, 25 bp, Homo sapien
tcaagccggcataacagaatgagac

SEQ ID NO: 5659535 - DNA, 25 bp, Homo sapien
tgccggcttgagtagagtggcctca

SEQ ID NO: 5659536 - DNA, 25 bp, Homo sapien
gtctcattctgttatgccggcttga

SEQ ID NO: 5659537 - DNA, 25 bp, Homo sapien
ctgttatgccggcttgagtagagtg

SEQ ID NO: 5659538 - DNA, 25 bp, Homo sapien
ttatgccggcttgagtagagtggcc

SEQ ID NO: 5659539 - DNA, 25 bp, Homo sapien
cggcttgagtagagtggcctcatca

SEQ ID NO: 5659540 - DNA, 25 bp, Homo sapien
tcattctgttatgccggcttgagta

SEQ ID NO: 5659541 - DNA, 25 bp, Homo sapien
aaaatgtggatcataggccgggcgc

SEQ ID NO: 5659542 - DNA, 25 bp, Homo sapien
agccactgttgtcttcttatggatg

SEQ ID NO: 5659543 - DNA, 25 bp, Homo sapien
taaaatgtggatcataggccgggcg

SEQ ID NO: 5659544 - DNA, 25 bp, Homo sapien
tgtgtaaaatgtggatcataggccg

SEQ ID NO: 5659545 - DNA, 25 bp, Homo sapien
tgtcttcttatggatgtgtaaaatg

SEQ ID NO: 5659546 - DNA, 25 bp, Homo sapien
tgtaaaatgtggatcataggccggg

SEQ ID NO: 5659547 - DNA, 25 bp, Homo sapien
catccataagaagacaacagtggct

SEQ ID NO: 5659548 - DNA, 25 bp, Homo sapien
tacacatccataagaagacaacagt

SEQ ID NO: 5659549 - DNA, 25 bp, Homo sapien
acatccataagaagacaacagtggc

SEQ ID NO: 5659550 - DNA, 25 bp, Homo sapien
cattttacacatccataagaagaca

SEQ ID NO: 5659551 - DNA, 25 bp, Homo sapien
cggcctatgatccacattttacaca

SEQ ID NO: 5659552 - DNA, 25 bp, Homo sapien
gcgcccggcctatgatccacatttt

SEQ ID NO: 5659553 - DNA, 25 bp, Homo sapien
ccaagaaacccctcccgctggctct

SEQ ID NO: 5659554 - DNA, 25 bp, Homo sapien
aaacccctcccgctggctctggtca

SEQ ID NO: 5659555 - DNA, 25 bp, Homo sapien
acccctcccgctggctctggtcacc

SEQ ID NO: 5659556 - DNA, 25 bp, Homo sapien
aacccctcccgctggctctggtcac

SEQ ID NO: 5659557 - DNA, 25 bp, Homo sapien
caagaaacccctcccgctggctctg

SEQ ID NO: 5659558 - DNA, 25 bp, Homo sapien
ccctcccgctggctctggtcacccc

SEQ ID NO: 5659559 - DNA, 25 bp, Homo sapien
ccagagccagcgggaggggtttctt

SEQ ID NO: 5659560 - DNA, 25 bp, Homo sapien
tgaccagagccagcgggaggggttt

SEQ ID NO: 5659561 - DNA, 25 bp, Homo sapien
ggggtgaccagagccagcgggaggg

SEQ ID NO: 5659562 - DNA, 25 bp, Homo sapien
ggtgaccagagccagcgggaggggt

SEQ ID NO: 5659563 - DNA, 25 bp, Homo sapien
gtgaccagagccagcgggaggggtt

SEQ ID NO: 5659564 - DNA, 25 bp, Homo sapien
cagagccagcgggaggggtttcttg

SEQ ID NO: 5659565 - DNA, 25 bp, Homo sapien
gccgtctctcccctctcccaagaaa

SEQ ID NO: 5659566 - DNA, 25 bp, Homo sapien
aaacccctcccgctggctctggtca

SEQ ID NO: 5659567 - DNA, 25 bp, Homo sapien
aacccctcccgctggctctggtcac

SEQ ID NO: 5659568 - DNA, 25 bp, Homo sapien
caagaaacccctcccgctggctctg

SEQ ID NO: 5659569 - DNA, 25 bp, Homo sapien
ccctcccgctggctctggtcacccc

SEQ ID NO: 5659570 - DNA, 25 bp, Homo sapien
tggctctggtcacccccactcgacc

SEQ ID NO: 5659571 - DNA, 25 bp, Homo sapien
tgaccagagccagcgggaggggttt

SEQ ID NO: 5659572 - DNA, 25 bp, Homo sapien
tttcttgggagaggggagagacggc

SEQ ID NO: 5659573 - DNA, 25 bp, Homo sapien
ggggtgaccagagccagcgggaggg

SEQ ID NO: 5659574 - DNA, 25 bp, Homo sapien
gtcgagtgggggtgaccagagccag

SEQ ID NO: 5659575 - DNA, 25 bp, Homo sapien
ctgggaggctgtggctgcccgcggg

SEQ ID NO: 5659576 - DNA, 25 bp, Homo sapien
cagagccagcgggaggggtttcttg

SEQ ID NO: 5659577 - DNA, 25 bp, Homo sapien
agatcgatgtgagcaacccgcaaac

SEQ ID NO: 5659578 - DNA, 25 bp, Homo sapien
ctcgagatcgatgtgagcaacccgc

SEQ ID NO: 5659579 - DNA, 25 bp, Homo sapien
tcctcgagatcgatgtgagcaaccc

SEQ ID NO: 5659580 - DNA, 25 bp, Homo sapien
cgatgtgagcaacccgcaaacggtg

SEQ ID NO: 5659581 - DNA, 25 bp, Homo sapien
ccagcaacttcctcgagatcgatgt

SEQ ID NO: 5659582 - DNA, 25 bp, Homo sapien
caacttcctcgagatcgatgtgagc

SEQ ID NO: 5659583 - DNA, 25 bp, Homo sapien
acatcgatctcgaggaagttgctgg

SEQ ID NO: 5659584 - DNA, 25 bp, Homo sapien
gggttgctcacatcgatctcgagga

SEQ ID NO: 5659585 - DNA, 25 bp, Homo sapien
gctcacatcgatctcgaggaagttg

SEQ ID NO: 5659586 - DNA, 25 bp, Homo sapien
cgtttgcgggttgctcacatcgatc

SEQ ID NO: 5659587 - DNA, 25 bp, Homo sapien
caccgtttgcgggttgctcacatcg

SEQ ID NO: 5659588 - DNA, 25 bp, Homo sapien
tgcgggttgctcacatcgatctcga

SEQ ID NO: 5659589 - DNA, 25 bp, Homo sapien
ccatggaaaggaccacggcaccatt

SEQ ID NO: 5659590 - DNA, 25 bp, Homo sapien
gaccacggcaccattcgtaatgtgt

SEQ ID NO: 5659591 - DNA, 25 bp, Homo sapien
ggaccacggcaccattcgtaatgtg

SEQ ID NO: 5659592 - DNA, 25 bp, Homo sapien
gcaccattcgtaatgtgtacacttc

SEQ ID NO: 5659593 - DNA, 25 bp, Homo sapien
aaaggaccacggcaccattcgtaat

SEQ ID NO: 5659594 - DNA, 25 bp, Homo sapien
cacggcaccattcgtaatgtgtaca

SEQ ID NO: 5659595 - DNA, 25 bp, Homo sapien
gaagtgtacacattacgaatggtgc

SEQ ID NO: 5659596 - DNA, 25 bp, Homo sapien
cacattacgaatggtgccgtggtcc

SEQ ID NO: 5659597 - DNA, 25 bp, Homo sapien
tacacattacgaatggtgccgtggt

SEQ ID NO: 5659598 - DNA, 25 bp, Homo sapien
aatggtgccgtggtcctttccatgg

SEQ ID NO: 5659599 - DNA, 25 bp, Homo sapien
cattacgaatggtgccgtggtcctt

SEQ ID NO: 5659600 - DNA, 25 bp, Homo sapien
tgtacacattacgaatggtgccgtg

SEQ ID NO: 5659601 - DNA, 25 bp, Homo sapien
tgagatcatgccattgcactacagc

SEQ ID NO: 5659602 - DNA, 25 bp, Homo sapien
ctgagatcatgccattgcactacag

SEQ ID NO: 5659603 - DNA, 25 bp, Homo sapien
tgggaggccgaggcaagagaatcac

SEQ ID NO: 5659604 - DNA, 25 bp, Homo sapien
gatcatgccattgcactacagcctg

SEQ ID NO: 5659605 - DNA, 25 bp, Homo sapien
gggaggccgaggcaagagaatcact

SEQ ID NO: 5659606 - DNA, 25 bp, Homo sapien
gagatcatgccattgcactacagcc

SEQ ID NO: 5659607 - DNA, 25 bp, Homo sapien
agtgattctcttgcctcggcctccc

SEQ ID NO: 5659608 - DNA, 25 bp, Homo sapien
caggctgtagtgcaatggcatgatc

SEQ ID NO: 5659609 - DNA, 25 bp, Homo sapien
ctgtagtgcaatggcatgatctcag

SEQ ID NO: 5659610 - DNA, 25 bp, Homo sapien
gtgattctcttgcctcggcctccca

SEQ ID NO: 5659611 - DNA, 25 bp, Homo sapien
gctgtagtgcaatggcatgatctca

SEQ ID NO: 5659612 - DNA, 25 bp, Homo sapien
ggctgtagtgcaatggcatgatctc

SEQ ID NO: 5659613 - DNA, 25 bp, Homo sapien
tttttatgcattcattggctcccag

SEQ ID NO: 5659614 - DNA, 25 bp, Homo sapien
cattggctcccagtttaaatgtcac

SEQ ID NO: 5659615 - DNA, 25 bp, Homo sapien
cacttaatctaaatcaggcttttcc

SEQ ID NO: 5659616 - DNA, 25 bp, Homo sapien
gattagcatggccaatttttatgca

SEQ ID NO: 5659617 - DNA, 25 bp, Homo sapien
aaatgtcactgcctcagagttgttc

SEQ ID NO: 5659618 - DNA, 25 bp, Homo sapien
tgcctcagagttgttcttaaacact

SEQ ID NO: 5659619 - DNA, 25 bp, Homo sapien
gattaagtgtttaagaacaactctg

SEQ ID NO: 5659620 - DNA, 25 bp, Homo sapien
aactgggagccaatgaatgcataaa

SEQ ID NO: 5659621 - DNA, 25 bp, Homo sapien
taagaacaactctgaggcagtgaca

SEQ ID NO: 5659622 - DNA, 25 bp, Homo sapien
tgcataaaaattggccatgctaatc

SEQ ID NO: 5659623 - DNA, 25 bp, Homo sapien
ggaaaagcctgatttagattaagtg

SEQ ID NO: 5659624 - DNA, 25 bp, Homo sapien
cagtgacatttaaactgggagccaa

SEQ ID NO: 5659625 - DNA, 25 bp, Homo sapien
gaaggccagttccatgtgaagacct

SEQ ID NO: 5659626 - DNA, 25 bp, Homo sapien
agaaggccagttccatgtgaagacc

SEQ ID NO: 5659627 - DNA, 25 bp, Homo sapien
ggtcttcacatggaactggccttct

SEQ ID NO: 5659628 - DNA, 25 bp, Homo sapien
aggtcttcacatggaactggccttc

SEQ ID NO: 5659629 - DNA, 25 bp, Homo sapien
ggcagagagctcagaaggccagttc

SEQ ID NO: 5659630 - DNA, 25 bp, Homo sapien
catgtgaagacctgcaggagatctg

SEQ ID NO: 5659631 - DNA, 25 bp, Homo sapien
agaaggccagttccatgtgaagacc

SEQ ID NO: 5659632 - DNA, 25 bp, Homo sapien
aaaaagctctgagggcagagagctc

SEQ ID NO: 5659633 - DNA, 25 bp, Homo sapien
gatcattgaaaaagctctgagggca

SEQ ID NO: 5659634 - DNA, 25 bp, Homo sapien
cagttccatgtgaagacctgcagga

SEQ ID NO: 5659635 - DNA, 25 bp, Homo sapien
ggtcttcacatggaactggccttct

SEQ ID NO: 5659636 - DNA, 25 bp, Homo sapien
gaactggccttctgagctctctgcc

SEQ ID NO: 5659637 - DNA, 25 bp, Homo sapien
tcctgcaggtcttcacatggaactg

SEQ ID NO: 5659638 - DNA, 25 bp, Homo sapien
tgccctcagagctttttcaatgatc

SEQ ID NO: 5659639 - DNA, 25 bp, Homo sapien
gagctctctgccctcagagcttttt

SEQ ID NO: 5659640 - DNA, 25 bp, Homo sapien
cagatctcctgcaggtcttcacatg

SEQ ID NO: 5659641 - DNA, 25 bp, Homo sapien
cggaatgactagcagtttaaattag

SEQ ID NO: 5659642 - DNA, 25 bp, Homo sapien
gaaatcatgtatgtgctgggaatgg

SEQ ID NO: 5659643 - DNA, 25 bp, Homo sapien
tggcggaatgactagcagtttaaat

SEQ ID NO: 5659644 - DNA, 25 bp, Homo sapien
aatggaatggcggaatgactagcag

SEQ ID NO: 5659645 - DNA, 25 bp, Homo sapien
tggaatggcggaatgactagcagtt

SEQ ID NO: 5659646 - DNA, 25 bp, Homo sapien
gaatggcggaatgactagcagttta

SEQ ID NO: 5659647 - DNA, 25 bp, Homo sapien
tttaaactgctagtcattccgccat

SEQ ID NO: 5659648 - DNA, 25 bp, Homo sapien
taaactgctagtcattccgccattc

SEQ ID NO: 5659649 - DNA, 25 bp, Homo sapien
cattcccagcacatacatgatttct

SEQ ID NO: 5659650 - DNA, 25 bp, Homo sapien
ctaatttaaactgctagtcattccg

SEQ ID NO: 5659651 - DNA, 25 bp, Homo sapien
ctgctagtcattccgccattccatt

SEQ ID NO: 5659652 - DNA, 25 bp, Homo sapien
aatttaaactgctagtcattccgcc

SEQ ID NO: 5659653 - DNA, 25 bp, Homo sapien
tgcacaactaggactctgacctggg

SEQ ID NO: 5659654 - DNA, 25 bp, Homo sapien
caggaaattgcacaactaggactct

SEQ ID NO: 5659655 - DNA, 25 bp, Homo sapien
cacaactaggactctgacctgggag

SEQ ID NO: 5659656 - DNA, 25 bp, Homo sapien
aaattgcacaactaggactctgacc

SEQ ID NO: 5659657 - DNA, 25 bp, Homo sapien
ggaaattgcacaactaggactctga

SEQ ID NO: 5659658 - DNA, 25 bp, Homo sapien
attgcacaactaggactctgacctg

SEQ ID NO: 5659659 - DNA, 25 bp, Homo sapien
agagtcctagttgtgcaatttcctg

SEQ ID NO: 5659660 - DNA, 25 bp, Homo sapien
ctcccaggtcagagtcctagttgtg

SEQ ID NO: 5659661 - DNA, 25 bp, Homo sapien
caggtcagagtcctagttgtgcaat

SEQ ID NO: 5659662 - DNA, 25 bp, Homo sapien
cccaggtcagagtcctagttgtgca

SEQ ID NO: 5659663 - DNA, 25 bp, Homo sapien
tcagagtcctagttgtgcaatttcc

SEQ ID NO: 5659664 - DNA, 25 bp, Homo sapien
ggtcagagtcctagttgtgcaattt

SEQ ID NO: 5659665 - DNA, 25 bp, Homo sapien
ttcttaaatagttgagtaaagtgag

SEQ ID NO: 5659666 - DNA, 25 bp, Homo sapien
aaatagttgagtaaagtgagaatag

SEQ ID NO: 5659667 - DNA, 25 bp, Homo sapien
aaggataggtatatttcttaaatag

SEQ ID NO: 5659668 - DNA, 25 bp, Homo sapien
cacaaaaggataggtatatttctta

SEQ ID NO: 5659669 - DNA, 25 bp, Homo sapien
catatatatactcttcagctttaca

SEQ ID NO: 5659670 - DNA, 25 bp, Homo sapien
tacacaaaaggataggtatatttct

SEQ ID NO: 5659671 - DNA, 25 bp, Homo sapien
tcactttactcaactatttaagaaa

SEQ ID NO: 5659672 - DNA, 25 bp, Homo sapien
agaaatatacctatccttttgtgta

SEQ ID NO: 5659673 - DNA, 25 bp, Homo sapien
ctatttaagaaatatacctatcctt

SEQ ID NO: 5659674 - DNA, 25 bp, Homo sapien
tgtaaagctgaagagtatatatatg

SEQ ID NO: 5659675 - DNA, 25 bp, Homo sapien
taagaaatatacctatccttttgtg

SEQ ID NO: 5659676 - DNA, 25 bp, Homo sapien
tattctcactttactcaactattta

SEQ ID NO: 5659677 - DNA, 25 bp, Homo sapien
ataattagtctaaatgctaaagaat

SEQ ID NO: 5659678 - DNA, 25 bp, Homo sapien
aataattagtctaaatgctaaagaa

SEQ ID NO: 5659679 - DNA, 25 bp, Homo sapien
gtgagcaagagattcgaaaatattc

SEQ ID NO: 5659680 - DNA, 25 bp, Homo sapien
cagtgagcaagagattcgaaaatat

SEQ ID NO: 5659681 - DNA, 25 bp, Homo sapien
agtgagcaagagattcgaaaatatt

SEQ ID NO: 5659682 - DNA, 25 bp, Homo sapien
atattttcgaatctcttgctcactg

SEQ ID NO: 5659683 - DNA, 25 bp, Homo sapien
gaatattttcgaatctcttgctcac

SEQ ID NO: 5659684 - DNA, 25 bp, Homo sapien
aatattttcgaatctcttgctcact

SEQ ID NO: 5659685 - DNA, 25 bp, Homo sapien
attctttagcatttagactaattat

SEQ ID NO: 5659686 - DNA, 25 bp, Homo sapien
ttctttagcatttagactaattatt

SEQ ID NO: 5659687 - DNA, 25 bp, Homo sapien
taattagtctaaatgctaaagaata

SEQ ID NO: 5659688 - DNA, 25 bp, Homo sapien
cagcagtgagcaagagattcgaaaa

SEQ ID NO: 5659689 - DNA, 25 bp, Homo sapien
tcatgtcatatgtgtatttacagac

SEQ ID NO: 5659690 - DNA, 25 bp, Homo sapien
caagagattcgaaaatattcatgtc

SEQ ID NO: 5659691 - DNA, 25 bp, Homo sapien
gctttcacttcagcagtgagcaaga

SEQ ID NO: 5659692 - DNA, 25 bp, Homo sapien
aataattagtctaaatgctaaagaa

SEQ ID NO: 5659693 - DNA, 25 bp, Homo sapien
tcttgctcactgctgaagtgaaagc

SEQ ID NO: 5659694 - DNA, 25 bp, Homo sapien
tattctttagcatttagactaatta

SEQ ID NO: 5659695 - DNA, 25 bp, Homo sapien
tacacatatgacatgaatattttcg

SEQ ID NO: 5659696 - DNA, 25 bp, Homo sapien
gactaattatttaaaacagtgtctg

SEQ ID NO: 5659697 - DNA, 25 bp, Homo sapien
cagtgtctgtaaatacacatatgac

SEQ ID NO: 5659698 - DNA, 25 bp, Homo sapien
gaatattttcgaatctcttgctcac

SEQ ID NO: 5659699 - DNA, 25 bp, Homo sapien
agtgagcaagagattcgaaaatatt

SEQ ID NO: 5659700 - DNA, 25 bp, Homo sapien
gtgagcaagagattcgaaaatattc

SEQ ID NO: 5659701 - DNA, 25 bp, Homo sapien
cagtgagcaagagattcgaaaatat

SEQ ID NO: 5659702 - DNA, 25 bp, Homo sapien
aatattttcgaatctcttgctcact

SEQ ID NO: 5659703 - DNA, 25 bp, Homo sapien
atattttcgaatctcttgctcactg

SEQ ID NO: 5659704 - DNA, 25 bp, Homo sapien
gaatattttcgaatctcttgctcac

SEQ ID NO: 5659705 - DNA, 25 bp, Homo sapien
acagctttcacttcagcagtgagca

SEQ ID NO: 5659706 - DNA, 25 bp, Homo sapien
taaaacagctttcacttcagcagtg

SEQ ID NO: 5659707 - DNA, 25 bp, Homo sapien
aaacagctttcacttcagcagtgag

SEQ ID NO: 5659708 - DNA, 25 bp, Homo sapien
cagtgagcaagagattcgaaaatat

SEQ ID NO: 5659709 - DNA, 25 bp, Homo sapien
agctttcacttcagcagtgagcaag

SEQ ID NO: 5659710 - DNA, 25 bp, Homo sapien
tattaaaacagctttcacttcagca

SEQ ID NO: 5659711 - DNA, 25 bp, Homo sapien
cttgctcactgctgaagtgaaagct

SEQ ID NO: 5659712 - DNA, 25 bp, Homo sapien
gctcactgctgaagtgaaagctgtt

SEQ ID NO: 5659713 - DNA, 25 bp, Homo sapien
tgctcactgctgaagtgaaagctgt

SEQ ID NO: 5659714 - DNA, 25 bp, Homo sapien
cactgctgaagtgaaagctgtttta

SEQ ID NO: 5659715 - DNA, 25 bp, Homo sapien
gctgaagtgaaagctgttttaataa

SEQ ID NO: 5659716 - DNA, 25 bp, Homo sapien
gaatattttcgaatctcttgctcac

SEQ ID NO: 5659717 - DNA, 25 bp, Homo sapien
tcagcattttgtagggagtacccag

SEQ ID NO: 5659718 - DNA, 25 bp, Homo sapien
gagtacccagtagaattactcctga

SEQ ID NO: 5659719 - DNA, 25 bp, Homo sapien
gaagtccaactgtagaacggcagga

SEQ ID NO: 5659720 - DNA, 25 bp, Homo sapien
attactcctgagacaaataagtgtg

SEQ ID NO: 5659721 - DNA, 25 bp, Homo sapien
actgtagaacggcaggaagcattct

SEQ ID NO: 5659722 - DNA, 25 bp, Homo sapien
accaccgaagtccaactgtagaacg

SEQ ID NO: 5659723 - DNA, 25 bp, Homo sapien
gcttcctgccgttctacagttggac

SEQ ID NO: 5659724 - DNA, 25 bp, Homo sapien
ctgggtactccctacaaaatgctga

SEQ ID NO: 5659725 - DNA, 25 bp, Homo sapien
cacacttatttgtctcaggagtaat

SEQ ID NO: 5659726 - DNA, 25 bp, Homo sapien
cgttctacagttggacttcggtggt

SEQ ID NO: 5659727 - DNA, 25 bp, Homo sapien
tagaatgcttcctgccgttctacag

SEQ ID NO: 5659728 - DNA, 25 bp, Homo sapien
tcaggagtaattctactgggtactc

SEQ ID NO: 5659729 - DNA, 25 bp, Homo sapien
ttaaagttcgcagttgcctttgaga

SEQ ID NO: 5659730 - DNA, 25 bp, Homo sapien
ctttgagaaatggttcttgaaaaat

SEQ ID NO: 5659731 - DNA, 25 bp, Homo sapien
tttaaagttcgcagttgcctttgag

SEQ ID NO: 5659732 - DNA, 25 bp, Homo sapien
ttttaaagttcgcagttgcctttga

SEQ ID NO: 5659733 - DNA, 25 bp, Homo sapien
atttttcaagaaccatttctcaaag

SEQ ID NO: 5659734 - DNA, 25 bp, Homo sapien
ctcaaaggcaactgcgaactttaaa

SEQ ID NO: 5659735 - DNA, 25 bp, Homo sapien
tcaaaggcaactgcgaactttaaaa

SEQ ID NO: 5659736 - DNA, 25 bp, Homo sapien
tctcaaaggcaactgcgaactttaa

SEQ ID NO: 5659737 - DNA, 25 bp, Homo sapien
ctttgagaaatggttcttgaaaaat

SEQ ID NO: 5659738 - DNA, 25 bp, Homo sapien
tggttcttgaaaaatttacatttga

SEQ ID NO: 5659739 - DNA, 25 bp, Homo sapien
tttaaagttcgcagttgcctttgag

SEQ ID NO: 5659740 - DNA, 25 bp, Homo sapien
ttttaaagttcgcagttgcctttga

SEQ ID NO: 5659741 - DNA, 25 bp, Homo sapien
aagttcgcagttgcctttgagaaat

SEQ ID NO: 5659742 - DNA, 25 bp, Homo sapien
ttaaagttcgcagttgcctttgaga

SEQ ID NO: 5659743 - DNA, 25 bp, Homo sapien
atttctcaaaggcaactgcgaactt

SEQ ID NO: 5659744 - DNA, 25 bp, Homo sapien
atttttcaagaaccatttctcaaag

SEQ ID NO: 5659745 - DNA, 25 bp, Homo sapien
aaagaatttcccctgagtagagaca

SEQ ID NO: 5659746 - DNA, 25 bp, Homo sapien
tcaaatgtaaatttttcaagaacca

SEQ ID NO: 5659747 - DNA, 25 bp, Homo sapien
tcaaaggcaactgcgaactttaaaa

SEQ ID NO: 5659748 - DNA, 25 bp, Homo sapien
tctcaaaggcaactgcgaactttaa

SEQ ID NO: 5659749 - DNA, 25 bp, Homo sapien
tactaatgtcggttagattcaaaac

SEQ ID NO: 5659750 - DNA, 25 bp, Homo sapien
tattctactaatgtcggttagattc

SEQ ID NO: 5659751 - DNA, 25 bp, Homo sapien
tcggttagattcaaaacgttatcaa

SEQ ID NO: 5659752 - DNA, 25 bp, Homo sapien
tgtcggttagattcaaaacgttatc

SEQ ID NO: 5659753 - DNA, 25 bp, Homo sapien
catttattctactaatgtcggttag

SEQ ID NO: 5659754 - DNA, 25 bp, Homo sapien
ctaatgtcggttagattcaaaacgt

SEQ ID NO: 5659755 - DNA, 25 bp, Homo sapien
ttgataacgttttgaatctaaccga

SEQ ID NO: 5659756 - DNA, 25 bp, Homo sapien
acgttttgaatctaaccgacattag

SEQ ID NO: 5659757 - DNA, 25 bp, Homo sapien
tgaatctaaccgacattagtagaat

SEQ ID NO: 5659758 - DNA, 25 bp, Homo sapien
ctaaccgacattagtagaataaatg

SEQ ID NO: 5659759 - DNA, 25 bp, Homo sapien
gataacgttttgaatctaaccgaca

SEQ ID NO: 5659760 - DNA, 25 bp, Homo sapien
ttttgaatctaaccgacattagtag

SEQ ID NO: 5659761 - DNA, 25 bp, Homo sapien
taccctgggctagcgaggcgatctc

SEQ ID NO: 5659762 - DNA, 25 bp, Homo sapien
gacctctcccgctgaacattttgga

SEQ ID NO: 5659763 - DNA, 25 bp, Homo sapien
tctcctgagataagaagtgggcccg

SEQ ID NO: 5659764 - DNA, 25 bp, Homo sapien
gctagcgaggcgatctcctgagata

SEQ ID NO: 5659765 - DNA, 25 bp, Homo sapien
gatttgctttccgttgacctctccc

SEQ ID NO: 5659766 - DNA, 25 bp, Homo sapien
tgagataagaagtgggcccgcgtct

SEQ ID NO: 5659767 - DNA, 25 bp, Homo sapien
tatctcaggagatcgcctcgctagc

SEQ ID NO: 5659768 - DNA, 25 bp, Homo sapien
gcgggcccacttcttatctcaggag

SEQ ID NO: 5659769 - DNA, 25 bp, Homo sapien
agacgcgggcccacttcttatctca

SEQ ID NO: 5659770 - DNA, 25 bp, Homo sapien
gggagaggtcaacggaaagcaaatc

SEQ ID NO: 5659771 - DNA, 25 bp, Homo sapien
tccaaaatgttcagcgggagaggtc

SEQ ID NO: 5659772 - DNA, 25 bp, Homo sapien
gagatcgcctcgctagcccagggta

SEQ ID NO: 5659773 - DNA, 25 bp, Homo sapien
gttactcgttatctgccccgggcgc

SEQ ID NO: 5659774 - DNA, 25 bp, Homo sapien
cggcgctccggttactcgttatctg

SEQ ID NO: 5659775 - DNA, 25 bp, Homo sapien
gcgtgccggcgctccggttactcgt

SEQ ID NO: 5659776 - DNA, 25 bp, Homo sapien
gccggcgctccggttactcgttatc

SEQ ID NO: 5659777 - DNA, 25 bp, Homo sapien
gcgctccggttactcgttatctgcc

SEQ ID NO: 5659778 - DNA, 25 bp, Homo sapien
tactcgttatctgccccgggcgcgg

SEQ ID NO: 5659779 - DNA, 25 bp, Homo sapien
agataacgagtaaccggagcgccgg

SEQ ID NO: 5659780 - DNA, 25 bp, Homo sapien
gcagataacgagtaaccggagcgcc

SEQ ID NO: 5659781 - DNA, 25 bp, Homo sapien
gcgcccggggcagataacgagtaac

SEQ ID NO: 5659782 - DNA, 25 bp, Homo sapien
gataacgagtaaccggagcgccggc

SEQ ID NO: 5659783 - DNA, 25 bp, Homo sapien
ggcagataacgagtaaccggagcgc

SEQ ID NO: 5659784 - DNA, 25 bp, Homo sapien
aacgagtaaccggagcgccggcacg

SEQ ID NO: 5659785 - DNA, 25 bp, Homo sapien
gatcctcgggtttctcgcggaggga

SEQ ID NO: 5659786 - DNA, 25 bp, Homo sapien
ggagaggaggggtcgcgagtgtagc

SEQ ID NO: 5659787 - DNA, 25 bp, Homo sapien
ggtcgcgagtgtagcggcgacggga

SEQ ID NO: 5659788 - DNA, 25 bp, Homo sapien
tcctcgggtttctcgcggagggaga

SEQ ID NO: 5659789 - DNA, 25 bp, Homo sapien
gcggatcctcgggtttctcgcggag

SEQ ID NO: 5659790 - DNA, 25 bp, Homo sapien
cctcgggtttctcgcggagggagag

SEQ ID NO: 5659791 - DNA, 25 bp, Homo sapien
ctccgcgagaaacccgaggatccgc

SEQ ID NO: 5659792 - DNA, 25 bp, Homo sapien
ctctccctccgcgagaaacccgagg

SEQ ID NO: 5659793 - DNA, 25 bp, Homo sapien
ctccctccgcgagaaacccgaggat

SEQ ID NO: 5659794 - DNA, 25 bp, Homo sapien
ctcccgtcgccgctacactcgcgac

SEQ ID NO: 5659795 - DNA, 25 bp, Homo sapien
gtcgccgctacactcgcgacccctc

SEQ ID NO: 5659796 - DNA, 25 bp, Homo sapien
tccctccgcgagaaacccgaggatc

SEQ ID NO: 5659797 - DNA, 25 bp, Homo sapien
ggttggagtgcggaggggcagtctt

SEQ ID NO: 5659798 - DNA, 25 bp, Homo sapien
caggttggagtgcggaggggcagtc

SEQ ID NO: 5659799 - DNA, 25 bp, Homo sapien
aggttggagtgcggaggggcagtct

SEQ ID NO: 5659800 - DNA, 25 bp, Homo sapien
gttggagtgcggaggggcagtcttg

SEQ ID NO: 5659801 - DNA, 25 bp, Homo sapien
aagactgcccctccgcactccaacc

SEQ ID NO: 5659802 - DNA, 25 bp, Homo sapien
gactgcccctccgcactccaacctg

SEQ ID NO: 5659803 - DNA, 25 bp, Homo sapien
caagactgcccctccgcactccaac

SEQ ID NO: 5659804 - DNA, 25 bp, Homo sapien
agactgcccctccgcactccaacct

SEQ ID NO: 5659805 - DNA, 25 bp, Homo sapien
caaaccttactagagtctcattctg

SEQ ID NO: 5659806 - DNA, 25 bp, Homo sapien
aaaacaaaccttactagagtctcat

SEQ ID NO: 5659807 - DNA, 25 bp, Homo sapien
tgcaaccaccaattcctgggttcag

SEQ ID NO: 5659808 - DNA, 25 bp, Homo sapien
ggctcaatgcaaccaccaattcctg

SEQ ID NO: 5659809 - DNA, 25 bp, Homo sapien
ccaccaattcctgggttcaggtggt

SEQ ID NO: 5659810 - DNA, 25 bp, Homo sapien
tcaatgcaaccaccaattcctgggt

SEQ ID NO: 5659811 - DNA, 25 bp, Homo sapien
gaacccaggaattggtggttgcatt

SEQ ID NO: 5659812 - DNA, 25 bp, Homo sapien
cacctgaacccaggaattggtggtt

SEQ ID NO: 5659813 - DNA, 25 bp, Homo sapien
cagaatgagactctagtaaggtttg

SEQ ID NO: 5659814 - DNA, 25 bp, Homo sapien
aagactgcccctccgcactccaacc

SEQ ID NO: 5659815 - DNA, 25 bp, Homo sapien
caggaattggtggttgcattgagcc

SEQ ID NO: 5659816 - DNA, 25 bp, Homo sapien
acccaggaattggtggttgcattga

SEQ ID NO: 5659817 - DNA, 25 bp, Homo sapien
gattactattttgaaacaactttga

SEQ ID NO: 5659818 - DNA, 25 bp, Homo sapien
tgatgtattaaattttaaaaccaga

SEQ ID NO: 5659819 - DNA, 25 bp, Homo sapien
agattactattttgaaacaactttg

SEQ ID NO: 5659820 - DNA, 25 bp, Homo sapien
ctattttgaaacaactttgaaaatg

SEQ ID NO: 5659821 - DNA, 25 bp, Homo sapien
ggtaaatattttgttgatgtattaa

SEQ ID NO: 5659822 - DNA, 25 bp, Homo sapien
gtaaatattttgttgatgtattaaa

SEQ ID NO: 5659823 - DNA, 25 bp, Homo sapien
cattttcaaagttgtttcaaaatag

SEQ ID NO: 5659824 - DNA, 25 bp, Homo sapien
ttaatacatcaacaaaatatttacc

SEQ ID NO: 5659825 - DNA, 25 bp, Homo sapien
tttaatacatcaacaaaatatttac

SEQ ID NO: 5659826 - DNA, 25 bp, Homo sapien
caaagttgtttcaaaatagtaatct

SEQ ID NO: 5659827 - DNA, 25 bp, Homo sapien
tcaaagttgtttcaaaatagtaatc

SEQ ID NO: 5659828 - DNA, 25 bp, Homo sapien
tctggttttaaaatttaatacatca

SEQ ID NO: 5659829 - DNA, 25 bp, Homo sapien
aatggatgcatagaattacagggac

SEQ ID NO: 5659830 - DNA, 25 bp, Homo sapien
tggcagtttagtgaagcccaaggat

SEQ ID NO: 5659831 - DNA, 25 bp, Homo sapien
tgtttcgagtaaatggatgcataga

SEQ ID NO: 5659832 - DNA, 25 bp, Homo sapien
gatcttttatgtttcgagtaaatgg

SEQ ID NO: 5659833 - DNA, 25 bp, Homo sapien
tgccgtggaccctgtggcagtttag

SEQ ID NO: 5659834 - DNA, 25 bp, Homo sapien
accctgtggcagtttagtgaagccc

SEQ ID NO: 5659835 - DNA, 25 bp, Homo sapien
ccatttactcgaaacataaaagatc

SEQ ID NO: 5659836 - DNA, 25 bp, Homo sapien
ctaaactgccacagggtccacggca

SEQ ID NO: 5659837 - DNA, 25 bp, Homo sapien
gtccctgtaattctatgcatccatt

SEQ ID NO: 5659838 - DNA, 25 bp, Homo sapien
tctatgcatccatttactcgaaaca

SEQ ID NO: 5659839 - DNA, 25 bp, Homo sapien
atccttgggcttcactaaactgcca

SEQ ID NO: 5659840 - DNA, 25 bp, Homo sapien
gggcttcactaaactgccacagggt

SEQ ID NO: 5659841 - DNA, 25 bp, Homo sapien
gaccattggctgttagtaatgtaat

SEQ ID NO: 5659842 - DNA, 25 bp, Homo sapien
aaagcgtggcttgaccattggctgt

SEQ ID NO: 5659843 - DNA, 25 bp, Homo sapien
aaaaaagcgtggcttgaccattggc

SEQ ID NO: 5659844 - DNA, 25 bp, Homo sapien
taatgtaattctgacgtcttactcc

SEQ ID NO: 5659845 - DNA, 25 bp, Homo sapien
ctgttagtaatgtaattctgacgtc

SEQ ID NO: 5659846 - DNA, 25 bp, Homo sapien
tggcttgaccattggctgttagtaa

SEQ ID NO: 5659847 - DNA, 25 bp, Homo sapien
gaattacattactaacagccaatgg

SEQ ID NO: 5659848 - DNA, 25 bp, Homo sapien
gacgtcagaattacattactaacag

SEQ ID NO: 5659849 - DNA, 25 bp, Homo sapien
ttactaacagccaatggtcaagcca

SEQ ID NO: 5659850 - DNA, 25 bp, Homo sapien
ggagtaagacgtcagaattacatta

SEQ ID NO: 5659851 - DNA, 25 bp, Homo sapien
taacagccaatggtcaagccacgct

SEQ ID NO: 5659852 - DNA, 25 bp, Homo sapien
gccaatggtcaagccacgctttttt

SEQ ID NO: 5659853 - DNA, 25 bp, Homo sapien
ttggtgggtcgtttgctgtggcctg

SEQ ID NO: 5659854 - DNA, 25 bp, Homo sapien
caggccacagcaaacgacccaccaa

SEQ ID NO: 5659855 - DNA, 25 bp, Homo sapien
taacctgttggtgggtcgtttgctg

SEQ ID NO: 5659856 - DNA, 25 bp, Homo sapien
tgctgtggcctggtctgctggtctc

SEQ ID NO: 5659857 - DNA, 25 bp, Homo sapien
gtctccgggaggaagcccagtgcct

SEQ ID NO: 5659858 - DNA, 25 bp, Homo sapien
ggaggaagcccagtgcctgccctgc

SEQ ID NO: 5659859 - DNA, 25 bp, Homo sapien
ttggtgggtcgtttgctgtggcctg

SEQ ID NO: 5659860 - DNA, 25 bp, Homo sapien
tctgctggtctccgggaggaagccc

SEQ ID NO: 5659861 - DNA, 25 bp, Homo sapien
gcaggcactgggcttcctcccggag

SEQ ID NO: 5659862 - DNA, 25 bp, Homo sapien
ggcttcctcccggagaccagcagac

SEQ ID NO: 5659863 - DNA, 25 bp, Homo sapien
tgcagggcaggcactgggcttcctc

SEQ ID NO: 5659864 - DNA, 25 bp, Homo sapien
agaccagcagaccaggccacagcaa

SEQ ID NO: 5659865 - DNA, 25 bp, Homo sapien
cagcaaacgacccaccaacaggtta

SEQ ID NO: 5659866 - DNA, 25 bp, Homo sapien
agcagaccaggccacagcaaacgac

SEQ ID NO: 5659867 - DNA, 25 bp, Homo sapien
cctgtgaccagcagcatacgggctt

SEQ ID NO: 5659868 - DNA, 25 bp, Homo sapien
ccctgtgaccagcagcatacgggct

SEQ ID NO: 5659869 - DNA, 25 bp, Homo sapien
ctgtgaccagcagcatacgggcttt

SEQ ID NO: 5659870 - DNA, 25 bp, Homo sapien
tgaccagcagcatacgggctttggg

SEQ ID NO: 5659871 - DNA, 25 bp, Homo sapien
tgtgaccagcagcatacgggctttg

SEQ ID NO: 5659872 - DNA, 25 bp, Homo sapien
gtgaccagcagcatacgggctttgg

SEQ ID NO: 5659873 - DNA, 25 bp, Homo sapien
cccaaagcccgtatgctgctggtca

SEQ ID NO: 5659874 - DNA, 25 bp, Homo sapien
aaagcccgtatgctgctggtcacag

SEQ ID NO: 5659875 - DNA, 25 bp, Homo sapien
ccaaagcccgtatgctgctggtcac

SEQ ID NO: 5659876 - DNA, 25 bp, Homo sapien
caaagcccgtatgctgctggtcaca

SEQ ID NO: 5659877 - DNA, 25 bp, Homo sapien
aagcccgtatgctgctggtcacagg

SEQ ID NO: 5659878 - DNA, 25 bp, Homo sapien
accccaaagcccgtatgctgctggt

SEQ ID NO: 5659879 - DNA, 25 bp, Homo sapien
ttggagtcagattaacctgtttgta

SEQ ID NO: 5659880 - DNA, 25 bp, Homo sapien
tcagattaacctgtttgtagttaat

SEQ ID NO: 5659881 - DNA, 25 bp, Homo sapien
agtcagattaacctgtttgtagtta

SEQ ID NO: 5659882 - DNA, 25 bp, Homo sapien
agctctacttatatttggagtcaga

SEQ ID NO: 5659883 - DNA, 25 bp, Homo sapien
cttagctctacttatatttggagtc

SEQ ID NO: 5659884 - DNA, 25 bp, Homo sapien
tagctctacttatatttggagtcag

SEQ ID NO: 5659885 - DNA, 25 bp, Homo sapien
taactacaaacaggttaatctgact

SEQ ID NO: 5659886 - DNA, 25 bp, Homo sapien
tctgactccaaatataagtagagct

SEQ ID NO: 5659887 - DNA, 25 bp, Homo sapien
tacaaacaggttaatctgactccaa

SEQ ID NO: 5659888 - DNA, 25 bp, Homo sapien
caattaactacaaacaggttaatct

SEQ ID NO: 5659889 - DNA, 25 bp, Homo sapien
gactccaaatataagtagagctaag

SEQ ID NO: 5659890 - DNA, 25 bp, Homo sapien
ttaactacaaacaggttaatctgac

SEQ ID NO: 5659891 - DNA, 25 bp, Homo sapien
caaacttcgtttctgtatcggttca

SEQ ID NO: 5659892 - DNA, 25 bp, Homo sapien
tcgtttctgtatcggttcaaagatg

SEQ ID NO: 5659893 - DNA, 25 bp, Homo sapien
acttcgtttctgtatcggttcaaag

SEQ ID NO: 5659894 - DNA, 25 bp, Homo sapien
tgatttaacctctagaatgggttcc

SEQ ID NO: 5659895 - DNA, 25 bp, Homo sapien
gatgatttaacctctagaatgggtt

SEQ ID NO: 5659896 - DNA, 25 bp, Homo sapien
ctgtatcggttcaaagatgatttaa

SEQ ID NO: 5659897 - DNA, 25 bp, Homo sapien
ggaacccattctagaggttaaatca

SEQ ID NO: 5659898 - DNA, 25 bp, Homo sapien
ttaaatcatctttgaaccgatacag

SEQ ID NO: 5659899 - DNA, 25 bp, Homo sapien
ctttgaaccgatacagaaacgaagt

SEQ ID NO: 5659900 - DNA, 25 bp, Homo sapien
gaaccgatacagaaacgaagtttgc

SEQ ID NO: 5659901 - DNA, 25 bp, Homo sapien
catctttgaaccgatacagaaacga

SEQ ID NO: 5659902 - DNA, 25 bp, Homo sapien
taaatcatctttgaaccgatacaga

SEQ ID NO: 5659903 - DNA, 25 bp, Homo sapien
tcaccaaccgggctggcaaaccaaa

SEQ ID NO: 5659904 - DNA, 25 bp, Homo sapien
aaggctcatggcaccgtgaaggacc

SEQ ID NO: 5659905 - DNA, 25 bp, Homo sapien
caccaaccgggctggcaaaccaaag

SEQ ID NO: 5659906 - DNA, 25 bp, Homo sapien
aggctcatggcaccgtgaaggacct

SEQ ID NO: 5659907 - DNA, 25 bp, Homo sapien
caggctggtcaccaaccgggctggc

SEQ ID NO: 5659908 - DNA, 25 bp, Homo sapien
tcaggctggtcaccaaccgggctgg

SEQ ID NO: 5659909 - DNA, 25 bp, Homo sapien
tttggtttgccagcccggttggtga

SEQ ID NO: 5659910 - DNA, 25 bp, Homo sapien
ggtccttcacggtgccatgagcctt

SEQ ID NO: 5659911 - DNA, 25 bp, Homo sapien
gccagcccggttggtgaccagcctg

SEQ ID NO: 5659912 - DNA, 25 bp, Homo sapien
aggtccttcacggtgccatgagcct

SEQ ID NO: 5659913 - DNA, 25 bp, Homo sapien
ccagcccggttggtgaccagcctga

SEQ ID NO: 5659914 - DNA, 25 bp, Homo sapien
ctttggtttgccagcccggttggtg

SEQ ID NO: 5659915 - DNA, 25 bp, Homo sapien
ccaaaggtcagagtcagagcagatt

SEQ ID NO: 5659916 - DNA, 25 bp, Homo sapien
taaggctcatggcaccgtgaaggac

SEQ ID NO: 5659917 - DNA, 25 bp, Homo sapien
cagagcagattgtgccttgtcttca

SEQ ID NO: 5659918 - DNA, 25 bp, Homo sapien
cagattgtgccttgtcttcaaggct

SEQ ID NO: 5659919 - DNA, 25 bp, Homo sapien
tggcaaaccaaaggtcagagtcaga

SEQ ID NO: 5659920 - DNA, 25 bp, Homo sapien
gtcagagtcagagcagattgtgcct

SEQ ID NO: 5659921 - DNA, 25 bp, Homo sapien
ggcacaatctgctctgactctgacc

SEQ ID NO: 5659922 - DNA, 25 bp, Homo sapien
aagccttgaagacaaggcacaatct

SEQ ID NO: 5659923 - DNA, 25 bp, Homo sapien
ccttgaagacaaggcacaatctgct

SEQ ID NO: 5659924 - DNA, 25 bp, Homo sapien
aatctgctctgactctgacctttgg

SEQ ID NO: 5659925 - DNA, 25 bp, Homo sapien
tctgactctgacctttggtttgcca

SEQ ID NO: 5659926 - DNA, 25 bp, Homo sapien
tgaagacaaggcacaatctgctctg

SEQ ID NO: 5659927 - DNA, 25 bp, Homo sapien
acaagctgttcatctcaggcctgcc

SEQ ID NO: 5659928 - DNA, 25 bp, Homo sapien
cacaagctgttcatctcaggcctgc

SEQ ID NO: 5659929 - DNA, 25 bp, Homo sapien
gagaaacacaagctgttcatctcag

SEQ ID NO: 5659930 - DNA, 25 bp, Homo sapien
aacacaagctgttcatctcaggcct

SEQ ID NO: 5659931 - DNA, 25 bp, Homo sapien
acacaagctgttcatctcaggcctg

SEQ ID NO: 5659932 - DNA, 25 bp, Homo sapien
aggcctgagatgaacagcttgtgtt

SEQ ID NO: 5659933 - DNA, 25 bp, Homo sapien
caggcctgagatgaacagcttgtgt

SEQ ID NO: 5659934 - DNA, 25 bp, Homo sapien
gcaggcctgagatgaacagcttgtg

SEQ ID NO: 5659935 - DNA, 25 bp, Homo sapien
ctgagatgaacagcttgtgtttctc

SEQ ID NO: 5659936 - DNA, 25 bp, Homo sapien
ggcaggcctgagatgaacagcttgt

SEQ ID NO: 5659937 - DNA, 25 bp, Homo sapien
taaacttccttgtgagccaaggtcc

SEQ ID NO: 5659938 - DNA, 25 bp, Homo sapien
gcagcagtgatatttaggatagaca

SEQ ID NO: 5659939 - DNA, 25 bp, Homo sapien
ggtccatcctgagccggttgactga

SEQ ID NO: 5659940 - DNA, 25 bp, Homo sapien
ttgtgagccaaggtccatcctgagc

SEQ ID NO: 5659941 - DNA, 25 bp, Homo sapien
gacatggaagttttacgctctgttt

SEQ ID NO: 5659942 - DNA, 25 bp, Homo sapien
ttacgctctgtttggatctaaactt

SEQ ID NO: 5659943 - DNA, 25 bp, Homo sapien
aaacagagcgtaaaacttccatgtc

SEQ ID NO: 5659944 - DNA, 25 bp, Homo sapien
tcagtcaaccggctcaggatggacc

SEQ ID NO: 5659945 - DNA, 25 bp, Homo sapien
aagtttagatccaaacagagcgtaa

SEQ ID NO: 5659946 - DNA, 25 bp, Homo sapien
tctatcctaaatatcactgctgcag

SEQ ID NO: 5659947 - DNA, 25 bp, Homo sapien
gaccttggctcacaaggaagtttag

SEQ ID NO: 5659948 - DNA, 25 bp, Homo sapien
gctcaggatggaccttggctcacaa

SEQ ID NO: 5659949 - DNA, 25 bp, Homo sapien
ttcatctgtggttgctttagacagg

SEQ ID NO: 5659950 - DNA, 25 bp, Homo sapien
tttcatctgtggttgctttagacag

SEQ ID NO: 5659951 - DNA, 25 bp, Homo sapien
cctgtctaaagcaaccacagatgaa

SEQ ID NO: 5659952 - DNA, 25 bp, Homo sapien
ctgtctaaagcaaccacagatgaaa

SEQ ID NO: 5659953 - DNA, 25 bp, Homo sapien
aagaatgcctttcatctgtggttgc

SEQ ID NO: 5659954 - DNA, 25 bp, Homo sapien
ggttgctttagacaggcactttctt

SEQ ID NO: 5659955 - DNA, 25 bp, Homo sapien
tctgtggttgctttagacaggcact

SEQ ID NO: 5659956 - DNA, 25 bp, Homo sapien
ttcatctgtggttgctttagacagg

SEQ ID NO: 5659957 - DNA, 25 bp, Homo sapien
tgtggataagagcaaaaaccccgat

SEQ ID NO: 5659958 - DNA, 25 bp, Homo sapien
cccctgtgtggataagagcaaaaac

SEQ ID NO: 5659959 - DNA, 25 bp, Homo sapien
tgcctgtctaaagcaaccacagatg

SEQ ID NO: 5659960 - DNA, 25 bp, Homo sapien
cctgtctaaagcaaccacagatgaa

SEQ ID NO: 5659961 - DNA, 25 bp, Homo sapien
gcaaccacagatgaaaggcattctt

SEQ ID NO: 5659962 - DNA, 25 bp, Homo sapien
aagaaagtgcctgtctaaagcaacc

SEQ ID NO: 5659963 - DNA, 25 bp, Homo sapien
gaaagtgcctgtctaaagcaaccac

SEQ ID NO: 5659964 - DNA, 25 bp, Homo sapien
ggtttttgctcttatccacacaggg

SEQ ID NO: 5659965 - DNA, 25 bp, Homo sapien
gttattacttccacttgattgagcc

SEQ ID NO: 5659966 - DNA, 25 bp, Homo sapien
tgagatccactgaccttttgtataa

SEQ ID NO: 5659967 - DNA, 25 bp, Homo sapien
tgaccttttgtataattaagagtgg

SEQ ID NO: 5659968 - DNA, 25 bp, Homo sapien
ttccacttgattgagcccacttacc

SEQ ID NO: 5659969 - DNA, 25 bp, Homo sapien
tgagcccacttacccgagtgtaatt

SEQ ID NO: 5659970 - DNA, 25 bp, Homo sapien
tgattgagcccacttacccgagtgt

SEQ ID NO: 5659971 - DNA, 25 bp, Homo sapien
cactcttaattatacaaaaggtcag

SEQ ID NO: 5659972 - DNA, 25 bp, Homo sapien
tacactcgggtaagtgggctcaatc

SEQ ID NO: 5659973 - DNA, 25 bp, Homo sapien
ttatacaaaaggtcagtggatctca

SEQ ID NO: 5659974 - DNA, 25 bp, Homo sapien
taaatccccattgtccactcttaat

SEQ ID NO: 5659975 - DNA, 25 bp, Homo sapien
ggctcaatcaagtggaagtaataac

SEQ ID NO: 5659976 - DNA, 25 bp, Homo sapien
tgccccaattacactcgggtaagtg

SEQ ID NO: 5659977 - DNA, 25 bp, Homo sapien
tggtgaggacagactgcagtagaag

SEQ ID NO: 5659978 - DNA, 25 bp, Homo sapien
tgttgagcttcagtactggccctct

SEQ ID NO: 5659979 - DNA, 25 bp, Homo sapien
agtagaagattgtggttaagctctc

SEQ ID NO: 5659980 - DNA, 25 bp, Homo sapien
gatgtctgttgagcttcagtactgg

SEQ ID NO: 5659981 - DNA, 25 bp, Homo sapien
gtctgttgagcttcagtactggccc

SEQ ID NO: 5659982 - DNA, 25 bp, Homo sapien
ttgagcttcagtactggccctctgg

SEQ ID NO: 5659983 - DNA, 25 bp, Homo sapien
ccagagggccagtactgaagctcaa

SEQ ID NO: 5659984 - DNA, 25 bp, Homo sapien
cttctactgcagtctgtcctcacca

SEQ ID NO: 5659985 - DNA, 25 bp, Homo sapien
ccagtactgaagctcaacagacatc

SEQ ID NO: 5659986 - DNA, 25 bp, Homo sapien
gggccagtactgaagctcaacagac

SEQ ID NO: 5659987 - DNA, 25 bp, Homo sapien
gagggccagtactgaagctcaacag

SEQ ID NO: 5659988 - DNA, 25 bp, Homo sapien
gagagcttaaccacaatcttctact

SEQ ID NO: 5659989 - DNA, 25 bp, Homo sapien
ggaagaccgagtgactgtggcagcg

SEQ ID NO: 5659990 - DNA, 25 bp, Homo sapien
gaccgagtgactgtggcagcgagaa

SEQ ID NO: 5659991 - DNA, 25 bp, Homo sapien
aagaccgagtgactgtggcagcgag

SEQ ID NO: 5659992 - DNA, 25 bp, Homo sapien
accgagtgactgtggcagcgagaag

SEQ ID NO: 5659993 - DNA, 25 bp, Homo sapien
agggaggagccaatgttagtacagc

SEQ ID NO: 5659994 - DNA, 25 bp, Homo sapien
gggaggagccaatgttagtacagcc

SEQ ID NO: 5659995 - DNA, 25 bp, Homo sapien
ttctcgctgccacagtcactcggtc

SEQ ID NO: 5659996 - DNA, 25 bp, Homo sapien
ggctgtactaacattggctcctccc

SEQ ID NO: 5659997 - DNA, 25 bp, Homo sapien
gctgtactaacattggctcctccct

SEQ ID NO: 5659998 - DNA, 25 bp, Homo sapien
tctcgctgccacagtcactcggtct

SEQ ID NO: 5659999 - DNA, 25 bp, Homo sapien
tcgctgccacagtcactcggtcttc

SEQ ID NO: 5660000 - DNA, 25 bp, Homo sapien
cttctcgctgccacagtcactcggt

SEQ ID NO: 5660001 - DNA, 25 bp, Homo sapien
tccatcgttgagttgaccttgcttg

SEQ ID NO: 5660002 - DNA, 25 bp, Homo sapien
ggctttcctaaatgactgaggatgg

SEQ ID NO: 5660003 - DNA, 25 bp, Homo sapien
gggaatggagtcatccatcgttgag

SEQ ID NO: 5660004 - DNA, 25 bp, Homo sapien
gtttgggctttcctaaatgactgag

SEQ ID NO: 5660005 - DNA, 25 bp, Homo sapien
ggagtcatccatcgttgagttgacc

SEQ ID NO: 5660006 - DNA, 25 bp, Homo sapien
gcacaccttgtttgggctttcctaa

SEQ ID NO: 5660007 - DNA, 25 bp, Homo sapien
tcaactcaacgatggatgactccat

SEQ ID NO: 5660008 - DNA, 25 bp, Homo sapien
caagcaaggtcaactcaacgatgga

SEQ ID NO: 5660009 - DNA, 25 bp, Homo sapien
agtcatttaggaaagcccaaacaag

SEQ ID NO: 5660010 - DNA, 25 bp, Homo sapien
cctcagtcatttaggaaagcccaaa

SEQ ID NO: 5660011 - DNA, 25 bp, Homo sapien
taggaaagcccaaacaaggtgtgca

SEQ ID NO: 5660012 - DNA, 25 bp, Homo sapien
ccatcctcagtcatttaggaaagcc

SEQ ID NO: 5660013 - DNA, 25 bp, Homo sapien
gggtcaagatcaacctggccaacat

SEQ ID NO: 5660014 - DNA, 25 bp, Homo sapien
caggggtcaagatcaacctggccaa

SEQ ID NO: 5660015 - DNA, 25 bp, Homo sapien
ggggtcaagatcaacctggccaaca

SEQ ID NO: 5660016 - DNA, 25 bp, Homo sapien
aggggtcaagatcaacctggccaac

SEQ ID NO: 5660017 - DNA, 25 bp, Homo sapien
atgttggccaggttgatcttgaccc

SEQ ID NO: 5660018 - DNA, 25 bp, Homo sapien
tgttggccaggttgatcttgacccc

SEQ ID NO: 5660019 - DNA, 25 bp, Homo sapien
ttggccaggttgatcttgacccctg

SEQ ID NO: 5660020 - DNA, 25 bp, Homo sapien
gttggccaggttgatcttgacccct

SEQ ID NO: 5660021 - DNA, 25 bp, Homo sapien
gcacctggccttggccctgctttta

SEQ ID NO: 5660022 - DNA, 25 bp, Homo sapien
gcatgagacactgcacctggccttg

SEQ ID NO: 5660023 - DNA, 25 bp, Homo sapien
atgagacactgcacctggccttggc

SEQ ID NO: 5660024 - DNA, 25 bp, Homo sapien
ctggccttggccctgcttttaatgg

SEQ ID NO: 5660025 - DNA, 25 bp, Homo sapien
tgcacctggccttggccctgctttt

SEQ ID NO: 5660026 - DNA, 25 bp, Homo sapien
tgctgttattacaggcatgagacac

SEQ ID NO: 5660027 - DNA, 25 bp, Homo sapien
gccaaggccaggtgcagtgtctcat

SEQ ID NO: 5660028 - DNA, 25 bp, Homo sapien
tgtctcatgcctgtaataacagcac

SEQ ID NO: 5660029 - DNA, 25 bp, Homo sapien
caaggccaggtgcagtgtctcatgc

SEQ ID NO: 5660030 - DNA, 25 bp, Homo sapien
taaaagcagggccaaggccaggtgc

SEQ ID NO: 5660031 - DNA, 25 bp, Homo sapien
aaaagcagggccaaggccaggtgca

SEQ ID NO: 5660032 - DNA, 25 bp, Homo sapien
ccattaaaagcagggccaaggccag

SEQ ID NO: 5660033 - DNA, 25 bp, Homo sapien
gcatgcaccatcatacctggctaat

SEQ ID NO: 5660034 - DNA, 25 bp, Homo sapien
acaggcatgcaccatcatacctggc

SEQ ID NO: 5660035 - DNA, 25 bp, Homo sapien
catgcaccatcatacctggctaatt

SEQ ID NO: 5660036 - DNA, 25 bp, Homo sapien
caggcatgcaccatcatacctggct

SEQ ID NO: 5660037 - DNA, 25 bp, Homo sapien
ggcatgcaccatcatacctggctaa

SEQ ID NO: 5660038 - DNA, 25 bp, Homo sapien
tacaggcatgcaccatcatacctgg

SEQ ID NO: 5660039 - DNA, 25 bp, Homo sapien
gccaggtatgatggtgcatgcctgt

SEQ ID NO: 5660040 - DNA, 25 bp, Homo sapien
attagccaggtatgatggtgcatgc

SEQ ID NO: 5660041 - DNA, 25 bp, Homo sapien
agccaggtatgatggtgcatgcctg

SEQ ID NO: 5660042 - DNA, 25 bp, Homo sapien
aattagccaggtatgatggtgcatg

SEQ ID NO: 5660043 - DNA, 25 bp, Homo sapien
ccaggtatgatggtgcatgcctgta

SEQ ID NO: 5660044 - DNA, 25 bp, Homo sapien
ttagccaggtatgatggtgcatgcc

SEQ ID NO: 5660045 - DNA, 25 bp, Homo sapien
aagtcatgatttcacaccaatacct

SEQ ID NO: 5660046 - DNA, 25 bp, Homo sapien
acagggttccccttcacacttgcaa

SEQ ID NO: 5660047 - DNA, 25 bp, Homo sapien
gggttccccttcacacttgcaatgc

SEQ ID NO: 5660048 - DNA, 25 bp, Homo sapien
tccagttccggtctaacaccacagg

SEQ ID NO: 5660049 - DNA, 25 bp, Homo sapien
gaaagtcatgatttcacaccaatac

SEQ ID NO: 5660050 - DNA, 25 bp, Homo sapien
cagttccggtctaacaccacagggt

SEQ ID NO: 5660051 - DNA, 25 bp, Homo sapien
accctgtggtgttagaccggaactg

SEQ ID NO: 5660052 - DNA, 25 bp, Homo sapien
cattgcaagtgtgaaggggaaccct

SEQ ID NO: 5660053 - DNA, 25 bp, Homo sapien
cctgtggtgttagaccggaactgga

SEQ ID NO: 5660054 - DNA, 25 bp, Homo sapien
aggtattggtgtgaaatcatgactt

SEQ ID NO: 5660055 - DNA, 25 bp, Homo sapien
tattggtgtgaaatcatgactttca

SEQ ID NO: 5660056 - DNA, 25 bp, Homo sapien
ccctgtggtgttagaccggaactgg

SEQ ID NO: 5660057 - DNA, 25 bp, Homo sapien
ccaaggttcctttgagtgatgagtg

SEQ ID NO: 5660058 - DNA, 25 bp, Homo sapien
ggtatttagaaggtgctagttgtgc

SEQ ID NO: 5660059 - DNA, 25 bp, Homo sapien
cctttgagtgatgagtggtatttag

SEQ ID NO: 5660060 - DNA, 25 bp, Homo sapien
ggttcctttgagtgatgagtggtat

SEQ ID NO: 5660061 - DNA, 25 bp, Homo sapien
caaggttcctttgagtgatgagtgg

SEQ ID NO: 5660062 - DNA, 25 bp, Homo sapien
ctttgagtgatgagtggtatttaga

SEQ ID NO: 5660063 - DNA, 25 bp, Homo sapien
aaataccactcatcactcaaaggaa

SEQ ID NO: 5660064 - DNA, 25 bp, Homo sapien
gcacaactagcaccttctaaatacc

SEQ ID NO: 5660065 - DNA, 25 bp, Homo sapien
tctaaataccactcatcactcaaag

SEQ ID NO: 5660066 - DNA, 25 bp, Homo sapien
cactcatcactcaaaggaaccttgg

SEQ ID NO: 5660067 - DNA, 25 bp, Homo sapien
taccactcatcactcaaaggaacct

SEQ ID NO: 5660068 - DNA, 25 bp, Homo sapien
ctaaataccactcatcactcaaagg

SEQ ID NO: 5660069 - DNA, 25 bp, Homo sapien
aggtttggctagcaagagttccttc

SEQ ID NO: 5660070 - DNA, 25 bp, Homo sapien
tcccaggtttggctagcaagagttc

SEQ ID NO: 5660071 - DNA, 25 bp, Homo sapien
tgattctctacttatcccaggtttg

SEQ ID NO: 5660072 - DNA, 25 bp, Homo sapien
gactgtgattcgctttgttccatca

SEQ ID NO: 5660073 - DNA, 25 bp, Homo sapien
gattcgctttgttccatcactggtg

SEQ ID NO: 5660074 - DNA, 25 bp, Homo sapien
tcactggtgatgacccttttgagaa

SEQ ID NO: 5660075 - DNA, 25 bp, Homo sapien
tgatggaacaaagcgaatcacagtc

SEQ ID NO: 5660076 - DNA, 25 bp, Homo sapien
ttctcaaaagggtcatcaccagtga

SEQ ID NO: 5660077 - DNA, 25 bp, Homo sapien
caaacctgggataagtagagaatca

SEQ ID NO: 5660078 - DNA, 25 bp, Homo sapien
catcaccagtgatggaacaaagcga

SEQ ID NO: 5660079 - DNA, 25 bp, Homo sapien
gaaggaactcttgctagccaaacct

SEQ ID NO: 5660080 - DNA, 25 bp, Homo sapien
gaactcttgctagccaaacctggga

SEQ ID NO: 5660081 - DNA, 25 bp, Homo sapien
gcagtcttgtaagggggcaggccag

SEQ ID NO: 5660082 - DNA, 25 bp, Homo sapien
tgacctgcagtcttgtaagggggca

SEQ ID NO: 5660083 - DNA, 25 bp, Homo sapien
gacctgcagtcttgtaagggggcag

SEQ ID NO: 5660084 - DNA, 25 bp, Homo sapien
tgcagtcttgtaagggggcaggcca

SEQ ID NO: 5660085 - DNA, 25 bp, Homo sapien
cttgtaagggggcaggccagttgct

SEQ ID NO: 5660086 - DNA, 25 bp, Homo sapien
atgacctgcagtcttgtaagggggc

SEQ ID NO: 5660087 - DNA, 25 bp, Homo sapien
gcccccttacaagactgcaggtcat

SEQ ID NO: 5660088 - DNA, 25 bp, Homo sapien
tgcccccttacaagactgcaggtca

SEQ ID NO: 5660089 - DNA, 25 bp, Homo sapien
agcaactggcctgcccccttacaag

SEQ ID NO: 5660090 - DNA, 25 bp, Homo sapien
cagcaactggcctgcccccttacaa

SEQ ID NO: 5660091 - DNA, 25 bp, Homo sapien
ggcctgcccccttacaagactgcag

SEQ ID NO: 5660092 - DNA, 25 bp, Homo sapien
ctggcctgcccccttacaagactgc

SEQ ID NO: 5660093 - DNA, 25 bp, Homo sapien
ctgatgacctgcagtcttgtaaggg

SEQ ID NO: 5660094 - DNA, 25 bp, Homo sapien
gtctggagcactcctcagctttttt

SEQ ID NO: 5660095 - DNA, 25 bp, Homo sapien
ttgctgtgttgtgcccctcagcctg

SEQ ID NO: 5660096 - DNA, 25 bp, Homo sapien
caggccagttgctgtgttgtgcccc

SEQ ID NO: 5660097 - DNA, 25 bp, Homo sapien
ttgagtctggagcactcctcagctt

SEQ ID NO: 5660098 - DNA, 25 bp, Homo sapien
ttttttactctgatgacctgcagtc

SEQ ID NO: 5660099 - DNA, 25 bp, Homo sapien
gggcacaacacagcaactggcctgc

SEQ ID NO: 5660100 - DNA, 25 bp, Homo sapien
gactgcaggtcatcagagtaaaaaa

SEQ ID NO: 5660101 - DNA, 25 bp, Homo sapien
tgcccccttacaagactgcaggtca

SEQ ID NO: 5660102 - DNA, 25 bp, Homo sapien
aagctgaggagtgctccagactcaa

SEQ ID NO: 5660103 - DNA, 25 bp, Homo sapien
ccttacaagactgcaggtcatcaga

SEQ ID NO: 5660104 - DNA, 25 bp, Homo sapien
aaaaaagctgaggagtgctccagac

SEQ ID NO: 5660105 - DNA, 25 bp, Homo sapien
tagggtgtatgtcttgcaaacaagg

SEQ ID NO: 5660106 - DNA, 25 bp, Homo sapien
tgtatgtcttgcaaacaaggggccc

SEQ ID NO: 5660107 - DNA, 25 bp, Homo sapien
gggccctcttctacatgactagaat

SEQ ID NO: 5660108 - DNA, 25 bp, Homo sapien
cactgttagggtgtatgtcttgcaa

SEQ ID NO: 5660109 - DNA, 25 bp, Homo sapien
gactagaatgcagccatcagagccg

SEQ ID NO: 5660110 - DNA, 25 bp, Homo sapien
cctcttctacatgactagaatgcag

SEQ ID NO: 5660111 - DNA, 25 bp, Homo sapien
attgctaaccccggctctgatggct

SEQ ID NO: 5660112 - DNA, 25 bp, Homo sapien
gggccccttgtttgcaagacataca

SEQ ID NO: 5660113 - DNA, 25 bp, Homo sapien
tctagtcatgtagaagagggcccct

SEQ ID NO: 5660114 - DNA, 25 bp, Homo sapien
cattctagtcatgtagaagagggcc

SEQ ID NO: 5660115 - DNA, 25 bp, Homo sapien
ggctctgatggctgcattctagtca

SEQ ID NO: 5660116 - DNA, 25 bp, Homo sapien
ttgcaagacatacaccctaacagtg

SEQ ID NO: 5660117 - DNA, 25 bp, Homo sapien
cgtgatccacccatctcggcctccc

SEQ ID NO: 5660118 - DNA, 25 bp, Homo sapien
agtgctgggattacaggcgtgagcc

SEQ ID NO: 5660119 - DNA, 25 bp, Homo sapien
tcgtgatccacccatctcggcctcc

SEQ ID NO: 5660120 - DNA, 25 bp, Homo sapien
ccgcgcccggccagttttatggatt

SEQ ID NO: 5660121 - DNA, 25 bp, Homo sapien
accgcgcccggccagttttatggat

SEQ ID NO: 5660122 - DNA, 25 bp, Homo sapien
cgcgcccggccagttttatggattt

SEQ ID NO: 5660123 - DNA, 25 bp, Homo sapien
gggaggccgagatgggtggatcacg

SEQ ID NO: 5660124 - DNA, 25 bp, Homo sapien
aatccataaaactggccgggcgcgg

SEQ ID NO: 5660125 - DNA, 25 bp, Homo sapien
atccataaaactggccgggcgcggt

SEQ ID NO: 5660126 - DNA, 25 bp, Homo sapien
ggctcacgcctgtaatcccagcact

SEQ ID NO: 5660127 - DNA, 25 bp, Homo sapien
ggaggccgagatgggtggatcacga

SEQ ID NO: 5660128 - DNA, 25 bp, Homo sapien
aaatccataaaactggccgggcgcg

SEQ ID NO: 5660129 - DNA, 25 bp, Homo sapien
agcttctcgagtagctgggactaca

SEQ ID NO: 5660130 - DNA, 25 bp, Homo sapien
ggtgcccgctaccacacctagctaa

SEQ ID NO: 5660131 - DNA, 25 bp, Homo sapien
aggtgcccgctaccacacctagcta

SEQ ID NO: 5660132 - DNA, 25 bp, Homo sapien
gcttctcgagtagctgggactacag

SEQ ID NO: 5660133 - DNA, 25 bp, Homo sapien
tcagcttctcgagtagctgggacta

SEQ ID NO: 5660134 - DNA, 25 bp, Homo sapien
cagcttctcgagtagctgggactac

SEQ ID NO: 5660135 - DNA, 25 bp, Homo sapien
tgtagtcccagctactcgagaagct

SEQ ID NO: 5660136 - DNA, 25 bp, Homo sapien
tagctaggtgtggtagcgggcacct

SEQ ID NO: 5660137 - DNA, 25 bp, Homo sapien
ttagctaggtgtggtagcgggcacc

SEQ ID NO: 5660138 - DNA, 25 bp, Homo sapien
gtagtcccagctactcgagaagctg

SEQ ID NO: 5660139 - DNA, 25 bp, Homo sapien
tagtcccagctactcgagaagctga

SEQ ID NO: 5660140 - DNA, 25 bp, Homo sapien
ctgtagtcccagctactcgagaagc

SEQ ID NO: 5660141 - DNA, 25 bp, Homo sapien
gcctagtgagtggaacatgaacacc

SEQ ID NO: 5660142 - DNA, 25 bp, Homo sapien
gaagagcctcacttagcctagtgag

SEQ ID NO: 5660143 - DNA, 25 bp, Homo sapien
gagtggaacatgaacaccccaactt

SEQ ID NO: 5660144 - DNA, 25 bp, Homo sapien
caccccaacttatttagggcttcag

SEQ ID NO: 5660145 - DNA, 25 bp, Homo sapien
catgaacaccccaacttatttaggg

SEQ ID NO: 5660146 - DNA, 25 bp, Homo sapien
tagtgagtggaacatgaacacccca

SEQ ID NO: 5660147 - DNA, 25 bp, Homo sapien
taagttggggtgttcatgttccact

SEQ ID NO: 5660148 - DNA, 25 bp, Homo sapien
ctcactaggctaagtgaggctcttc

SEQ ID NO: 5660149 - DNA, 25 bp, Homo sapien
gggtgttcatgttccactcactagg

SEQ ID NO: 5660150 - DNA, 25 bp, Homo sapien
ggtgttcatgttccactcactaggc

SEQ ID NO: 5660151 - DNA, 25 bp, Homo sapien
ctgaagccctaaataagttggggtg

SEQ ID NO: 5660152 - DNA, 25 bp, Homo sapien
ccactcactaggctaagtgaggctc

SEQ ID NO: 5660153 - DNA, 25 bp, Homo sapien
tagtgagggaattttggctctaaaa

SEQ ID NO: 5660154 - DNA, 25 bp, Homo sapien
catttagtgagggaattttggctct

SEQ ID NO: 5660155 - DNA, 25 bp, Homo sapien
tgttctaaaacatcagccccaatat

SEQ ID NO: 5660156 - DNA, 25 bp, Homo sapien
tttcatttagtgagggaattttggc

SEQ ID NO: 5660157 - DNA, 25 bp, Homo sapien
tctaaaacatcagccccaatattaa

SEQ ID NO: 5660158 - DNA, 25 bp, Homo sapien
tacattgttctaaaacatcagcccc

SEQ ID NO: 5660159 - DNA, 25 bp, Homo sapien
ttttagagccaaaattccctcacta

SEQ ID NO: 5660160 - DNA, 25 bp, Homo sapien
gggctgatgttttagaacaatgtaa

SEQ ID NO: 5660161 - DNA, 25 bp, Homo sapien
agagccaaaattccctcactaaatg

SEQ ID NO: 5660162 - DNA, 25 bp, Homo sapien
gccaaaattccctcactaaatgaaa

SEQ ID NO: 5660163 - DNA, 25 bp, Homo sapien
aatattggggctgatgttttagaac

SEQ ID NO: 5660164 - DNA, 25 bp, Homo sapien
caaaattccctcactaaatgaaaca

SEQ ID NO: 5660165 - DNA, 25 bp, Homo sapien
gcagctcttctcaaattctgcagct

SEQ ID NO: 5660166 - DNA, 25 bp, Homo sapien
tgcagctcttctcaaattctgcagc

SEQ ID NO: 5660167 - DNA, 25 bp, Homo sapien
agctgcagaatttgagaagagctgc

SEQ ID NO: 5660168 - DNA, 25 bp, Homo sapien
gctgcagaatttgagaagagctgca

SEQ ID NO: 5660169 - DNA, 25 bp, Homo sapien
tctgcagctacaaggaggactctgt

SEQ ID NO: 5660170 - DNA, 25 bp, Homo sapien
gactctgtgatgtcactgtagcaca

SEQ ID NO: 5660171 - DNA, 25 bp, Homo sapien
tgattagactgtcacaagtgtcctg

SEQ ID NO: 5660172 - DNA, 25 bp, Homo sapien
gcagctcttctcaaattctgcagct

SEQ ID NO: 5660173 - DNA, 25 bp, Homo sapien
tgaaaatgagtcctcctgcagctct

SEQ ID NO: 5660174 - DNA, 25 bp, Homo sapien
caagtgtcctgaaaatgagtcctcc

SEQ ID NO: 5660175 - DNA, 25 bp, Homo sapien
ggaggactcattttcaggacacttg

SEQ ID NO: 5660176 - DNA, 25 bp, Homo sapien
tgtgctacagtgacatcacagagtc

SEQ ID NO: 5660177 - DNA, 25 bp, Homo sapien
gagctgcaggaggactcattttcag

SEQ ID NO: 5660178 - DNA, 25 bp, Homo sapien
caggacacttgtgacagtctaatca

SEQ ID NO: 5660179 - DNA, 25 bp, Homo sapien
gctgcagaatttgagaagagctgca

SEQ ID NO: 5660180 - DNA, 25 bp, Homo sapien
cagagtcctccttgtagctgcagaa

SEQ ID NO: 5660181 - DNA, 25 bp, Homo sapien
tacttcagtatgcagaagggcttta

SEQ ID NO: 5660182 - DNA, 25 bp, Homo sapien
gcagaagggctttaagtgtacttag

SEQ ID NO: 5660183 - DNA, 25 bp, Homo sapien
ttcagtatgcagaagggctttaagt

SEQ ID NO: 5660184 - DNA, 25 bp, Homo sapien
cagtatgcagaagggctttaagtgt

SEQ ID NO: 5660185 - DNA, 25 bp, Homo sapien
aaaagatttctactgccttgatttg

SEQ ID NO: 5660186 - DNA, 25 bp, Homo sapien
cagaagggctttaagtgtacttagt

SEQ ID NO: 5660187 - DNA, 25 bp, Homo sapien
acttaaagcccttctgcatactgaa

SEQ ID NO: 5660188 - DNA, 25 bp, Homo sapien
taaagcccttctgcatactgaagta

SEQ ID NO: 5660189 - DNA, 25 bp, Homo sapien
actaagtacacttaaagcccttctg

SEQ ID NO: 5660190 - DNA, 25 bp, Homo sapien
caaatcaaggcagtagaaatctttt

SEQ ID NO: 5660191 - DNA, 25 bp, Homo sapien
acacttaaagcccttctgcatactg

SEQ ID NO: 5660192 - DNA, 25 bp, Homo sapien
ctaagtacacttaaagcccttctgc

SEQ ID NO: 5660193 - DNA, 25 bp, Homo sapien
tgcaactcaaacagtaatatgcttt

SEQ ID NO: 5660194 - DNA, 25 bp, Homo sapien
caactcaaacagtaatatgcttttt

SEQ ID NO: 5660195 - DNA, 25 bp, Homo sapien
agcttgcaactcaaacagtaatatg

SEQ ID NO: 5660196 - DNA, 25 bp, Homo sapien
ttagcttgcaactcaaacagtaata

SEQ ID NO: 5660197 - DNA, 25 bp, Homo sapien
gcttgcaactcaaacagtaatatgc

SEQ ID NO: 5660198 - DNA, 25 bp, Homo sapien
cttgcaactcaaacagtaatatgct

SEQ ID NO: 5660199 - DNA, 25 bp, Homo sapien
aaatgacttgattagcttgcaactc

SEQ ID NO: 5660200 - DNA, 25 bp, Homo sapien
aaaatgacttgattagcttgcaact

SEQ ID NO: 5660201 - DNA, 25 bp, Homo sapien
agttgcaagctaatcaagtcatttt

SEQ ID NO: 5660202 - DNA, 25 bp, Homo sapien
gagttgcaagctaatcaagtcattt

SEQ ID NO: 5660203 - DNA, 25 bp, Homo sapien
aaaagcatattactgtttgagttgc

SEQ ID NO: 5660204 - DNA, 25 bp, Homo sapien
aaagcatattactgtttgagttgca

SEQ ID NO: 5660205 - DNA, 25 bp, Homo sapien
tattactgtttgagttgcaagctaa

SEQ ID NO: 5660206 - DNA, 25 bp, Homo sapien
aaaaaagcatattactgtttgagtt

SEQ ID NO: 5660207 - DNA, 25 bp, Homo sapien
gcatattactgtttgagttgcaagc

SEQ ID NO: 5660208 - DNA, 25 bp, Homo sapien
catattactgtttgagttgcaagct

SEQ ID NO: 5660209 - DNA, 25 bp, Homo sapien
caaaaatatgtgatagaaagcgaca

SEQ ID NO: 5660210 - DNA, 25 bp, Homo sapien
tatgtgatagaaagcgacagtttct

SEQ ID NO: 5660211 - DNA, 25 bp, Homo sapien
aaaaatatgtgatagaaagcgacag

SEQ ID NO: 5660212 - DNA, 25 bp, Homo sapien
aaatatgtgatagaaagcgacagtt

SEQ ID NO: 5660213 - DNA, 25 bp, Homo sapien
acaaaaatatgtgatagaaagcgac

SEQ ID NO: 5660214 - DNA, 25 bp, Homo sapien
aaaatatgtgatagaaagcgacagt

SEQ ID NO: 5660215 - DNA, 25 bp, Homo sapien
agaaactgtcgctttctatcacata

SEQ ID NO: 5660216 - DNA, 25 bp, Homo sapien
gaaactgtcgctttctatcacatat

SEQ ID NO: 5660217 - DNA, 25 bp, Homo sapien
gtcgctttctatcacatatttttgt

SEQ ID NO: 5660218 - DNA, 25 bp, Homo sapien
aactgtcgctttctatcacatattt

SEQ ID NO: 5660219 - DNA, 25 bp, Homo sapien
tgtcgctttctatcacatatttttg

SEQ ID NO: 5660220 - DNA, 25 bp, Homo sapien
actgtcgctttctatcacatatttt

SEQ ID NO: 5660221 - DNA, 25 bp, Homo sapien
gaaaagaaactgtcgctttctatca

SEQ ID NO: 5660222 - DNA, 25 bp, Homo sapien
agaaactgtcgctttctatcacata

SEQ ID NO: 5660223 - DNA, 25 bp, Homo sapien
gaaactgtcgctttctatcacatat

SEQ ID NO: 5660224 - DNA, 25 bp, Homo sapien
gtcgctttctatcacatatttttgt

SEQ ID NO: 5660225 - DNA, 25 bp, Homo sapien
agaaaagaaactgtcgctttctatc

SEQ ID NO: 5660226 - DNA, 25 bp, Homo sapien
tgtcgctttctatcacatatttttg

SEQ ID NO: 5660227 - DNA, 25 bp, Homo sapien
gaccaacttttcagtctgtcttgaa

SEQ ID NO: 5660228 - DNA, 25 bp, Homo sapien
tctgtcttgaacgttgttcattgca

SEQ ID NO: 5660229 - DNA, 25 bp, Homo sapien
ccaacttttcagtctgtcttgaacg

SEQ ID NO: 5660230 - DNA, 25 bp, Homo sapien
gttgttcattgcataacattgctac

SEQ ID NO: 5660231 - DNA, 25 bp, Homo sapien
gaacgttgttcattgcataacattg

SEQ ID NO: 5660232 - DNA, 25 bp, Homo sapien
ttcagtctgtcttgaacgttgttca

SEQ ID NO: 5660233 - DNA, 25 bp, Homo sapien
caatgaacaacgttcaagacagact

SEQ ID NO: 5660234 - DNA, 25 bp, Homo sapien
tagcaatgttatgcaatgaacaacg

SEQ ID NO: 5660235 - DNA, 25 bp, Homo sapien
tgttatgcaatgaacaacgttcaag

SEQ ID NO: 5660236 - DNA, 25 bp, Homo sapien
cgttcaagacagactgaaaagttgg

SEQ ID NO: 5660237 - DNA, 25 bp, Homo sapien
tgaacaacgttcaagacagactgaa

SEQ ID NO: 5660238 - DNA, 25 bp, Homo sapien
tcaagacagactgaaaagttggtca

SEQ ID NO: 5660239 - DNA, 25 bp, Homo sapien
tgaacgaaataagataggcctaaca

SEQ ID NO: 5660240 - DNA, 25 bp, Homo sapien
aagataggcctaacaatatttataa

SEQ ID NO: 5660241 - DNA, 25 bp, Homo sapien
aaaatgcaattatagcatgcatgtg

SEQ ID NO: 5660242 - DNA, 25 bp, Homo sapien
atttgaacgaaataagataggccta

SEQ ID NO: 5660243 - DNA, 25 bp, Homo sapien
cgaaataagataggcctaacaatat

SEQ ID NO: 5660244 - DNA, 25 bp, Homo sapien
tatagcatgcatgtgttacaagcct

SEQ ID NO: 5660245 - DNA, 25 bp, Homo sapien
cacatgcatgctataattgcatttt

SEQ ID NO: 5660246 - DNA, 25 bp, Homo sapien
tgttaggcctatcttatttcgttca

SEQ ID NO: 5660247 - DNA, 25 bp, Homo sapien
taggcctatcttatttcgttcaaat

SEQ ID NO: 5660248 - DNA, 25 bp, Homo sapien
tattgttaggcctatcttatttcgt

SEQ ID NO: 5660249 - DNA, 25 bp, Homo sapien
aggcttgtaacacatgcatgctata

SEQ ID NO: 5660250 - DNA, 25 bp, Homo sapien
tataaatattgttaggcctatctta

SEQ ID NO: 5660251 - DNA, 25 bp, Homo sapien
tactgacccagtcataaccatgacc

SEQ ID NO: 5660252 - DNA, 25 bp, Homo sapien
aattactgacccagtcataaccatg

SEQ ID NO: 5660253 - DNA, 25 bp, Homo sapien
ttactgacccagtcataaccatgac

SEQ ID NO: 5660254 - DNA, 25 bp, Homo sapien
aactcaaattactgacccagtcata

SEQ ID NO: 5660255 - DNA, 25 bp, Homo sapien
tcaaattactgacccagtcataacc

SEQ ID NO: 5660256 - DNA, 25 bp, Homo sapien
aaactcaaattactgacccagtcat

SEQ ID NO: 5660257 - DNA, 25 bp, Homo sapien
ggttatgactgggtcagtaatttga

SEQ ID NO: 5660258 - DNA, 25 bp, Homo sapien
ggtcatggttatgactgggtcagta

SEQ ID NO: 5660259 - DNA, 25 bp, Homo sapien
gtcatggttatgactgggtcagtaa

SEQ ID NO: 5660260 - DNA, 25 bp, Homo sapien
tgggtcatggttatgactgggtcag

SEQ ID NO: 5660261 - DNA, 25 bp, Homo sapien
catggttatgactgggtcagtaatt

SEQ ID NO: 5660262 - DNA, 25 bp, Homo sapien
tatgactgggtcagtaatttgagtt

SEQ ID NO: 5660263 - DNA, 25 bp, Homo sapien
ggtcatggttatgactgggtcagta

SEQ ID NO: 5660264 - DNA, 25 bp, Homo sapien
gtcatggttatgactgggtcagtaa

SEQ ID NO: 5660265 - DNA, 25 bp, Homo sapien
tctcttagctttttagtattttcta

SEQ ID NO: 5660266 - DNA, 25 bp, Homo sapien
catggttatgactgggtcagtaatt

SEQ ID NO: 5660267 - DNA, 25 bp, Homo sapien
ggttatgactgggtcagtaatttga

SEQ ID NO: 5660268 - DNA, 25 bp, Homo sapien
tatgactgggtcagtaatttgagtt

SEQ ID NO: 5660269 - DNA, 25 bp, Homo sapien
tgcctggaactcttatagccatgca

SEQ ID NO: 5660270 - DNA, 25 bp, Homo sapien
ttatagccatgcatttcttttaatt

SEQ ID NO: 5660271 - DNA, 25 bp, Homo sapien
gtgcctggaactcttatagccatgc

SEQ ID NO: 5660272 - DNA, 25 bp, Homo sapien
gcatggctataagagttccaggcac

SEQ ID NO: 5660273 - DNA, 25 bp, Homo sapien
aattaaaagaaatgcatggctataa

SEQ ID NO: 5660274 - DNA, 25 bp, Homo sapien
tgcatggctataagagttccaggca

SEQ ID NO: 5660275 - DNA, 25 bp, Homo sapien
tgggcagggctagagaaccagacat

SEQ ID NO: 5660276 - DNA, 25 bp, Homo sapien
catgatattttgtgcctggaactct

SEQ ID NO: 5660277 - DNA, 25 bp, Homo sapien
gaaccagacatgatattttgtgcct

SEQ ID NO: 5660278 - DNA, 25 bp, Homo sapien
ttttgtcttgatttttgggcatgat

SEQ ID NO: 5660279 - DNA, 25 bp, Homo sapien
tagccatgcatttcttttaatttgt

SEQ ID NO: 5660280 - DNA, 25 bp, Homo sapien
tgcctggaactcttatagccatgca

SEQ ID NO: 5660281 - DNA, 25 bp, Homo sapien
gcatggctataagagttccaggcac

SEQ ID NO: 5660282 - DNA, 25 bp, Homo sapien
aattaaaagaaatgcatggctataa

SEQ ID NO: 5660283 - DNA, 25 bp, Homo sapien
aatatcatgtctggttctctagccc

SEQ ID NO: 5660284 - DNA, 25 bp, Homo sapien
tgtctggttctctagccctgcccat

SEQ ID NO: 5660285 - DNA, 25 bp, Homo sapien
tcatgcccaaaaatcaagacaaaaa

SEQ ID NO: 5660286 - DNA, 25 bp, Homo sapien
gttccaggcacaaaatatcatgtct

SEQ ID NO: 5660287 - DNA, 25 bp, Homo sapien
taccagcttggactagctccttaga

SEQ ID NO: 5660288 - DNA, 25 bp, Homo sapien
tgactcctaccagcttggactagct

SEQ ID NO: 5660289 - DNA, 25 bp, Homo sapien
tggctgactcctaccagcttggact

SEQ ID NO: 5660290 - DNA, 25 bp, Homo sapien
gcttggactagctccttagaactgg

SEQ ID NO: 5660291 - DNA, 25 bp, Homo sapien
tcctaccagcttggactagctcctt

SEQ ID NO: 5660292 - DNA, 25 bp, Homo sapien
tcctggctgactcctaccagcttgg

SEQ ID NO: 5660293 - DNA, 25 bp, Homo sapien
agctagtccaagctggtaggagtca

SEQ ID NO: 5660294 - DNA, 25 bp, Homo sapien
taaggagctagtccaagctggtagg

SEQ ID NO: 5660295 - DNA, 25 bp, Homo sapien
tagtccaagctggtaggagtcagcc

SEQ ID NO: 5660296 - DNA, 25 bp, Homo sapien
ccagttctaaggagctagtccaagc

SEQ ID NO: 5660297 - DNA, 25 bp, Homo sapien
ttctaaggagctagtccaagctggt

SEQ ID NO: 5660298 - DNA, 25 bp, Homo sapien
ccaagctggtaggagtcagccagga

SEQ ID NO: 5660299 - DNA, 25 bp, Homo sapien
tcggttctcaggaaacataggtaga

SEQ ID NO: 5660300 - DNA, 25 bp, Homo sapien
tagattagcttgtggctgcagaaag

SEQ ID NO: 5660301 - DNA, 25 bp, Homo sapien
tccctctctcggttctcaggaaaca

SEQ ID NO: 5660302 - DNA, 25 bp, Homo sapien
cagaaaggctcaagtgtttgggctg

SEQ ID NO: 5660303 - DNA, 25 bp, Homo sapien
cataggtagattagcttgtggctgc

SEQ ID NO: 5660304 - DNA, 25 bp, Homo sapien
ttgggctgggtcgtttaccactgga

SEQ ID NO: 5660305 - DNA, 25 bp, Homo sapien
tctacctatgtttcctgagaaccga

SEQ ID NO: 5660306 - DNA, 25 bp, Homo sapien
ctttctgcagccacaagctaatcta

SEQ ID NO: 5660307 - DNA, 25 bp, Homo sapien
cagcccaaacacttgagcctttctg

SEQ ID NO: 5660308 - DNA, 25 bp, Homo sapien
gcagccacaagctaatctacctatg

SEQ ID NO: 5660309 - DNA, 25 bp, Homo sapien
tgtttcctgagaaccgagagaggga

SEQ ID NO: 5660310 - DNA, 25 bp, Homo sapien
tccagtggtaaacgacccagcccaa

SEQ ID NO: 5660311 - DNA, 25 bp, Homo sapien
taagtattagtagcagagtgtgcat

SEQ ID NO: 5660312 - DNA, 25 bp, Homo sapien
tattagtagcagagtgtgcatttaa

SEQ ID NO: 5660313 - DNA, 25 bp, Homo sapien
aacattgtctctcaaacacttgtag

SEQ ID NO: 5660314 - DNA, 25 bp, Homo sapien
tgtaagtattagtagcagagtgtgc

SEQ ID NO: 5660315 - DNA, 25 bp, Homo sapien
gtctctcaaacacttgtagttaagc

SEQ ID NO: 5660316 - DNA, 25 bp, Homo sapien
cagtttgtaagtattagtagcagag

SEQ ID NO: 5660317 - DNA, 25 bp, Homo sapien
gcacactctgctactaatacttaca

SEQ ID NO: 5660318 - DNA, 25 bp, Homo sapien
gcttaactacaagtgtttgagagac

SEQ ID NO: 5660319 - DNA, 25 bp, Homo sapien
ctacaagtgtttgagagacaatgtt

SEQ ID NO: 5660320 - DNA, 25 bp, Homo sapien
taaatgcacactctgctactaatac

SEQ ID NO: 5660321 - DNA, 25 bp, Homo sapien
taactacaagtgtttgagagacaat

SEQ ID NO: 5660322 - DNA, 25 bp, Homo sapien
ctctgctactaatacttacaaactg

SEQ ID NO: 5660323 - DNA, 25 bp, Homo sapien
tttctcctcggagggagcgtcagat

SEQ ID NO: 5660324 - DNA, 25 bp, Homo sapien
gttttctcctcggagggagcgtcag

SEQ ID NO: 5660325 - DNA, 25 bp, Homo sapien
gatagaagaaactaacatttgtcag

SEQ ID NO: 5660326 - DNA, 25 bp, Homo sapien
agggagcgtcagatagaagaaacta

SEQ ID NO: 5660327 - DNA, 25 bp, Homo sapien
gcgtcagatagaagaaactaacatt

SEQ ID NO: 5660328 - DNA, 25 bp, Homo sapien
ttgtaacaattctaatcatgttttc

SEQ ID NO: 5660329 - DNA, 25 bp, Homo sapien
aatgttagtttcttctatctgacgc

SEQ ID NO: 5660330 - DNA, 25 bp, Homo sapien
tctgacgctccctccgaggagaaaa

SEQ ID NO: 5660331 - DNA, 25 bp, Homo sapien
tagtttcttctatctgacgctccct

SEQ ID NO: 5660332 - DNA, 25 bp, Homo sapien
atctgacgctccctccgaggagaaa

SEQ ID NO: 5660333 - DNA, 25 bp, Homo sapien
cctgacaaatgttagtttcttctat

SEQ ID NO: 5660334 - DNA, 25 bp, Homo sapien
gaaaacatgattagaattgttacaa

SEQ ID NO: 5660335 - DNA, 25 bp, Homo sapien
tagaggatatgatgacttgaatgtc

SEQ ID NO: 5660336 - DNA, 25 bp, Homo sapien
aaggcttctatctaatgtagaagac

SEQ ID NO: 5660337 - DNA, 25 bp, Homo sapien
aattcctttgctagtaaggcttcta

SEQ ID NO: 5660338 - DNA, 25 bp, Homo sapien
cagatgatttgacaagtaattagag

SEQ ID NO: 5660339 - DNA, 25 bp, Homo sapien
caagtaattagaggatatgatgact

SEQ ID NO: 5660340 - DNA, 25 bp, Homo sapien
ctagtaaggcttctatctaatgtag

SEQ ID NO: 5660341 - DNA, 25 bp, Homo sapien
gtcttctacattagatagaagcctt

SEQ ID NO: 5660342 - DNA, 25 bp, Homo sapien
ctctaattacttgtcaaatcatctg

SEQ ID NO: 5660343 - DNA, 25 bp, Homo sapien
gacattcaagtcatcatatcctcta

SEQ ID NO: 5660344 - DNA, 25 bp, Homo sapien
gatagaagccttactagcaaaggaa

SEQ ID NO: 5660345 - DNA, 25 bp, Homo sapien
catcatatcctctaattacttgtca

SEQ ID NO: 5660346 - DNA, 25 bp, Homo sapien
tacattagatagaagccttactagc

SEQ ID NO: 5660347 - DNA, 25 bp, Homo sapien
cctctttgcttcatttgtgagagca

SEQ ID NO: 5660348 - DNA, 25 bp, Homo sapien
cagctagaagttgtgcagtaaatgt

SEQ ID NO: 5660349 - DNA, 25 bp, Homo sapien
gatgctaggtattcactcgtttact

SEQ ID NO: 5660350 - DNA, 25 bp, Homo sapien
ggtattcactcgtttacttctgtct

SEQ ID NO: 5660351 - DNA, 25 bp, Homo sapien
gctcccagctagaagttgtgcagta

SEQ ID NO: 5660352 - DNA, 25 bp, Homo sapien
gtaaatgtttagatgctaggtattc

SEQ ID NO: 5660353 - DNA, 25 bp, Homo sapien
tactgcacaacttctagctgggagc

SEQ ID NO: 5660354 - DNA, 25 bp, Homo sapien
catttactgcacaacttctagctgg

SEQ ID NO: 5660355 - DNA, 25 bp, Homo sapien
gagacagaagtaaacgagtgaatac

SEQ ID NO: 5660356 - DNA, 25 bp, Homo sapien
gaagtaaacgagtgaatacctagca

SEQ ID NO: 5660357 - DNA, 25 bp, Homo sapien
tgctctcacaaatgaagcaaagagg

SEQ ID NO: 5660358 - DNA, 25 bp, Homo sapien
gaatacctagcatctaaacatttac

SEQ ID NO: 5660359 - DNA, 25 bp, Homo sapien
aggtaatggtctaggctccacaagg

SEQ ID NO: 5660360 - DNA, 25 bp, Homo sapien
aatcccagataatggcctaagctct

SEQ ID NO: 5660361 - DNA, 25 bp, Homo sapien
cctaggtaatggtctaggctccaca

SEQ ID NO: 5660362 - DNA, 25 bp, Homo sapien
ttacctaggtaatggtctaggctcc

SEQ ID NO: 5660363 - DNA, 25 bp, Homo sapien
atggcctaagctctataaggattta

SEQ ID NO: 5660364 - DNA, 25 bp, Homo sapien
gataatggcctaagctctataagga

SEQ ID NO: 5660365 - DNA, 25 bp, Homo sapien
taaatccttatagagcttaggccat

SEQ ID NO: 5660366 - DNA, 25 bp, Homo sapien
tgtggagcctagaccattacctagg

SEQ ID NO: 5660367 - DNA, 25 bp, Homo sapien
ccttgtggagcctagaccattacct

SEQ ID NO: 5660368 - DNA, 25 bp, Homo sapien
gagcctagaccattacctaggtaat

SEQ ID NO: 5660369 - DNA, 25 bp, Homo sapien
tagagcttaggccattatctgggat

SEQ ID NO: 5660370 - DNA, 25 bp, Homo sapien
ttatagagcttaggccattatctgg

SEQ ID NO: 5660371 - DNA, 25 bp, Homo sapien
cagctgggggagactcccccccaca

SEQ ID NO: 5660372 - DNA, 25 bp, Homo sapien
tgtgggggggagtctcccccagctg

SEQ ID NO: 5660373 - DNA, 25 bp, Homo sapien
ccacagcaccctgtgtttgcctttt

SEQ ID NO: 5660374 - DNA, 25 bp, Homo sapien
gctgtccatgctctattctgttcaa

SEQ ID NO: 5660375 - DNA, 25 bp, Homo sapien
tgtgtttgcctttttcaccacgctg

SEQ ID NO: 5660376 - DNA, 25 bp, Homo sapien
tgcctttttcaccacgctgtccatg

SEQ ID NO: 5660377 - DNA, 25 bp, Homo sapien
ttttcaccacgctgtccatgctcta

SEQ ID NO: 5660378 - DNA, 25 bp, Homo sapien
aaatttctttctccccaactatgtg

SEQ ID NO: 5660379 - DNA, 25 bp, Homo sapien
tgaacagaatagagcatggacagcg

SEQ ID NO: 5660380 - DNA, 25 bp, Homo sapien
cagaatagagcatggacagcgtggt

SEQ ID NO: 5660381 - DNA, 25 bp, Homo sapien
gaaatttgaacagaatagagcatgg

SEQ ID NO: 5660382 - DNA, 25 bp, Homo sapien
catggacagcgtggtgaaaaaggca

SEQ ID NO: 5660383 - DNA, 25 bp, Homo sapien
tagagcatggacagcgtggtgaaaa

SEQ ID NO: 5660384 - DNA, 25 bp, Homo sapien
tgaaaaaggcaaacacagggtgctg

SEQ ID NO: 5660385 - DNA, 25 bp, Homo sapien
catacaggtagcctttagccattct

SEQ ID NO: 5660386 - DNA, 25 bp, Homo sapien
cctcatacaggtagcctttagccat

SEQ ID NO: 5660387 - DNA, 25 bp, Homo sapien
tacaggtagcctttagccattctct

SEQ ID NO: 5660388 - DNA, 25 bp, Homo sapien
acaggtagcctttagccattctctt

SEQ ID NO: 5660389 - DNA, 25 bp, Homo sapien
acctcatacaggtagcctttagcca

SEQ ID NO: 5660390 - DNA, 25 bp, Homo sapien
ctcatacaggtagcctttagccatt

SEQ ID NO: 5660391 - DNA, 25 bp, Homo sapien
tggctaaaggctacctgtatgaggt

SEQ ID NO: 5660392 - DNA, 25 bp, Homo sapien
gagaatggctaaaggctacctgtat

SEQ ID NO: 5660393 - DNA, 25 bp, Homo sapien
agagaatggctaaaggctacctgta

SEQ ID NO: 5660394 - DNA, 25 bp, Homo sapien
aatggctaaaggctacctgtatgag

SEQ ID NO: 5660395 - DNA, 25 bp, Homo sapien
aagagaatggctaaaggctacctgt

SEQ ID NO: 5660396 - DNA, 25 bp, Homo sapien
agaatggctaaaggctacctgtatg

SEQ ID NO: 5660397 - DNA, 25 bp, Homo sapien
cctctgtgggatcctttgccccttc

SEQ ID NO: 5660398 - DNA, 25 bp, Homo sapien
tcttgaaataagtctgctgtgtttt

SEQ ID NO: 5660399 - DNA, 25 bp, Homo sapien
acttcttgaaataagtctgctgtgt

SEQ ID NO: 5660400 - DNA, 25 bp, Homo sapien
acctctgtgggatcctttgcccctt

SEQ ID NO: 5660401 - DNA, 25 bp, Homo sapien
cttgaaataagtctgctgtgtttta

SEQ ID NO: 5660402 - DNA, 25 bp, Homo sapien
ataagtctgctgtgttttagaaaaa

SEQ ID NO: 5660403 - DNA, 25 bp, Homo sapien
gaaggggcaaaggatcccacagagg

SEQ ID NO: 5660404 - DNA, 25 bp, Homo sapien
aaggggcaaaggatcccacagaggt

SEQ ID NO: 5660405 - DNA, 25 bp, Homo sapien
taaaacacagcagacttatttcaag

SEQ ID NO: 5660406 - DNA, 25 bp, Homo sapien
acacagcagacttatttcaagaagt

SEQ ID NO: 5660407 - DNA, 25 bp, Homo sapien
tttttctaaaacacagcagacttat

SEQ ID NO: 5660408 - DNA, 25 bp, Homo sapien
aaaacacagcagacttatttcaaga

SEQ ID NO: 5660409 - DNA, 25 bp, Homo sapien
taacctgtaagttgctcctctcctt

SEQ ID NO: 5660410 - DNA, 25 bp, Homo sapien
ggttggctgacgtcttttaaggctg

SEQ ID NO: 5660411 - DNA, 25 bp, Homo sapien
gctgacgtcttttaaggctgtttta

SEQ ID NO: 5660412 - DNA, 25 bp, Homo sapien
gctgttttaacctgtaagttgctcc

SEQ ID NO: 5660413 - DNA, 25 bp, Homo sapien
tttaacctgtaagttgctcctctcc

SEQ ID NO: 5660414 - DNA, 25 bp, Homo sapien
tggctgacgtcttttaaggctgttt

SEQ ID NO: 5660415 - DNA, 25 bp, Homo sapien
ggagaggagcaacttacaggttaaa

SEQ ID NO: 5660416 - DNA, 25 bp, Homo sapien
gagcaacttacaggttaaaacagcc

SEQ ID NO: 5660417 - DNA, 25 bp, Homo sapien
cagccttaaaagacgtcagccaacc

SEQ ID NO: 5660418 - DNA, 25 bp, Homo sapien
taaaacagccttaaaagacgtcagc

SEQ ID NO: 5660419 - DNA, 25 bp, Homo sapien
aaggagaggagcaacttacaggtta

SEQ ID NO: 5660420 - DNA, 25 bp, Homo sapien
gaggagcaacttacaggttaaaaca

SEQ ID NO: 5660421 - DNA, 25 bp, Homo sapien
tgtgtctgtataaaaggatccaaat

SEQ ID NO: 5660422 - DNA, 25 bp, Homo sapien
agtgtgtctgtataaaaggatccaa

SEQ ID NO: 5660423 - DNA, 25 bp, Homo sapien
tgtctgtataaaaggatccaaatga

SEQ ID NO: 5660424 - DNA, 25 bp, Homo sapien
gtgtctgtataaaaggatccaaatg

SEQ ID NO: 5660425 - DNA, 25 bp, Homo sapien
atccagaaatgatatttcgttggta

SEQ ID NO: 5660426 - DNA, 25 bp, Homo sapien
gtgtgtctgtataaaaggatccaaa

SEQ ID NO: 5660427 - DNA, 25 bp, Homo sapien
taccaacgaaatatcatttctggat

SEQ ID NO: 5660428 - DNA, 25 bp, Homo sapien
tttggatccttttatacagacacac

SEQ ID NO: 5660429 - DNA, 25 bp, Homo sapien
ttggatccttttatacagacacact

SEQ ID NO: 5660430 - DNA, 25 bp, Homo sapien
tcatttggatccttttatacagaca

SEQ ID NO: 5660431 - DNA, 25 bp, Homo sapien
catttggatccttttatacagacac

SEQ ID NO: 5660432 - DNA, 25 bp, Homo sapien
atttggatccttttatacagacaca

SEQ ID NO: 5660433 - DNA, 25 bp, Homo sapien
tcatcttctgcatttatctacattc

SEQ ID NO: 5660434 - DNA, 25 bp, Homo sapien
tagcatcaggcaccaaaattttcca

SEQ ID NO: 5660435 - DNA, 25 bp, Homo sapien
gaaacctgaaatagcatcaggcacc

SEQ ID NO: 5660436 - DNA, 25 bp, Homo sapien
tctacattcttccaggaactgatat

SEQ ID NO: 5660437 - DNA, 25 bp, Homo sapien
ttatctacattcttccaggaactga

SEQ ID NO: 5660438 - DNA, 25 bp, Homo sapien
gcatttatctacattcttccaggaa

SEQ ID NO: 5660439 - DNA, 25 bp, Homo sapien
ggtgcctgatgctatttcaggtttc

SEQ ID NO: 5660440 - DNA, 25 bp, Homo sapien
gaatgtagataaatgcagaagatga

SEQ ID NO: 5660441 - DNA, 25 bp, Homo sapien
tcagttcctggaagaatgtagataa

SEQ ID NO: 5660442 - DNA, 25 bp, Homo sapien
tcctggaagaatgtagataaatgca

SEQ ID NO: 5660443 - DNA, 25 bp, Homo sapien
tggaaaattttggtgcctgatgcta

SEQ ID NO: 5660444 - DNA, 25 bp, Homo sapien
aatatcagttcctggaagaatgtag

SEQ ID NO: 5660445 - DNA, 25 bp, Homo sapien
aagagaaaacatgtcgaataagatt

SEQ ID NO: 5660446 - DNA, 25 bp, Homo sapien
gagaaaacatgtcgaataagatttt

SEQ ID NO: 5660447 - DNA, 25 bp, Homo sapien
agagaaaacatgtcgaataagattt

SEQ ID NO: 5660448 - DNA, 25 bp, Homo sapien
agaaaacatgtcgaataagattttt

SEQ ID NO: 5660449 - DNA, 25 bp, Homo sapien
aaaatcttattcgacatgttttctc

SEQ ID NO: 5660450 - DNA, 25 bp, Homo sapien
aatcttattcgacatgttttctctt

SEQ ID NO: 5660451 - DNA, 25 bp, Homo sapien
aaaaatcttattcgacatgttttct

SEQ ID NO: 5660452 - DNA, 25 bp, Homo sapien
aaatcttattcgacatgttttctct

SEQ ID NO: 5660453 - DNA, 25 bp, Homo sapien
aagagaaaacatgtcgaataagatt

SEQ ID NO: 5660454 - DNA, 25 bp, Homo sapien
gcaaaatgtgcctgaagagaaaaca

SEQ ID NO: 5660455 - DNA, 25 bp, Homo sapien
tctaaaaagaatttgattgtatgtc

SEQ ID NO: 5660456 - DNA, 25 bp, Homo sapien
cattaaacattcagcacagctgcct

SEQ ID NO: 5660457 - DNA, 25 bp, Homo sapien
tggatcattaaacattcagcacagc

SEQ ID NO: 5660458 - DNA, 25 bp, Homo sapien
tgtctttggatcattaaacattcag

SEQ ID NO: 5660459 - DNA, 25 bp, Homo sapien
gatccaaagacatacaatcaaattc

SEQ ID NO: 5660460 - DNA, 25 bp, Homo sapien
cagctgtgctgaatgtttaatgatc

SEQ ID NO: 5660461 - DNA, 25 bp, Homo sapien
tgttttctcttcaggcacattttgc

SEQ ID NO: 5660462 - DNA, 25 bp, Homo sapien
gacatacaatcaaattctttttaga

SEQ ID NO: 5660463 - DNA, 25 bp, Homo sapien
aaatcttattcgacatgttttctct

SEQ ID NO: 5660464 - DNA, 25 bp, Homo sapien
gctgaatgtttaatgatccaaagac

SEQ ID NO: 5660465 - DNA, 25 bp, Homo sapien
gtgcttcccaaaacttcgatcattc

SEQ ID NO: 5660466 - DNA, 25 bp, Homo sapien
caaaacttcgatcattcaattatgt

SEQ ID NO: 5660467 - DNA, 25 bp, Homo sapien
ccaaaacttcgatcattcaattatg

SEQ ID NO: 5660468 - DNA, 25 bp, Homo sapien
tgcttcccaaaacttcgatcattca

SEQ ID NO: 5660469 - DNA, 25 bp, Homo sapien
gcttcccaaaacttcgatcattcaa

SEQ ID NO: 5660470 - DNA, 25 bp, Homo sapien
ttcccaaaacttcgatcattcaatt

SEQ ID NO: 5660471 - DNA, 25 bp, Homo sapien
aattgaatgatcgaagttttgggaa

SEQ ID NO: 5660472 - DNA, 25 bp, Homo sapien
gaatgatcgaagttttgggaagcac

SEQ ID NO: 5660473 - DNA, 25 bp, Homo sapien
cataattgaatgatcgaagttttgg

SEQ ID NO: 5660474 - DNA, 25 bp, Homo sapien
tgaatgatcgaagttttgggaagca

SEQ ID NO: 5660475 - DNA, 25 bp, Homo sapien
ttgaatgatcgaagttttgggaagc

SEQ ID NO: 5660476 - DNA, 25 bp, Homo sapien
acataattgaatgatcgaagttttg

SEQ ID NO: 5660477 - DNA, 25 bp, Homo sapien
gtgcttcccaaaacttcgatcattc

SEQ ID NO: 5660478 - DNA, 25 bp, Homo sapien
ccaaaacttcgatcattcaattatg

SEQ ID NO: 5660479 - DNA, 25 bp, Homo sapien
tcattcaattatgtcatggccatca

SEQ ID NO: 5660480 - DNA, 25 bp, Homo sapien
tcctgcactgcttcatcctttcttt

SEQ ID NO: 5660481 - DNA, 25 bp, Homo sapien
gatttgcatgtacctgtgcttccca

SEQ ID NO: 5660482 - DNA, 25 bp, Homo sapien
catgtgtaaatgatttgcatgtacc

SEQ ID NO: 5660483 - DNA, 25 bp, Homo sapien
gaattctagacggacaatgtgtcct

SEQ ID NO: 5660484 - DNA, 25 bp, Homo sapien
gtgtcctctcagcaattgattgtat

SEQ ID NO: 5660485 - DNA, 25 bp, Homo sapien
aatgtgtcctctcagcaattgattg

SEQ ID NO: 5660486 - DNA, 25 bp, Homo sapien
gacaatgtgtcctctcagcaattga

SEQ ID NO: 5660487 - DNA, 25 bp, Homo sapien
aaaagaattctagacggacaatgtg

SEQ ID NO: 5660488 - DNA, 25 bp, Homo sapien
gacggacaatgtgtcctctcagcaa

SEQ ID NO: 5660489 - DNA, 25 bp, Homo sapien
caattgctgagaggacacattgtcc

SEQ ID NO: 5660490 - DNA, 25 bp, Homo sapien
atacaatcaattgctgagaggacac

SEQ ID NO: 5660491 - DNA, 25 bp, Homo sapien
gacacattgtccgtctagaattctt

SEQ ID NO: 5660492 - DNA, 25 bp, Homo sapien
tgctgagaggacacattgtccgtct

SEQ ID NO: 5660493 - DNA, 25 bp, Homo sapien
tacaatcaattgctgagaggacaca

SEQ ID NO: 5660494 - DNA, 25 bp, Homo sapien
gagaggacacattgtccgtctagaa

SEQ ID NO: 5660495 - DNA, 25 bp, Homo sapien
cattgaacctggagatcaatttggg

SEQ ID NO: 5660496 - DNA, 25 bp, Homo sapien
cctggagatcaatttggggaataat

SEQ ID NO: 5660497 - DNA, 25 bp, Homo sapien
gaattgcattgaacctggagatcaa

SEQ ID NO: 5660498 - DNA, 25 bp, Homo sapien
tggaattgcattgaacctggagatc

SEQ ID NO: 5660499 - DNA, 25 bp, Homo sapien
ccatcggatttagaatcagcttttc

SEQ ID NO: 5660500 - DNA, 25 bp, Homo sapien
tagaatcagcttttctagttatatt

SEQ ID NO: 5660501 - DNA, 25 bp, Homo sapien
aattattccccaaattgatctccag

SEQ ID NO: 5660502 - DNA, 25 bp, Homo sapien
tccccaaattgatctccaggttcaa

SEQ ID NO: 5660503 - DNA, 25 bp, Homo sapien
aatataactagaaaagctgattcta

SEQ ID NO: 5660504 - DNA, 25 bp, Homo sapien
tattccccaaattgatctccaggtt

SEQ ID NO: 5660505 - DNA, 25 bp, Homo sapien
gatctccaggttcaatgcaattcca

SEQ ID NO: 5660506 - DNA, 25 bp, Homo sapien
gaaaagctgattctaaatccgatgg

SEQ ID NO: 5660507 - DNA, 25 bp, Homo sapien
gtggtatgagactgcgtctggtttc

SEQ ID NO: 5660508 - DNA, 25 bp, Homo sapien
gtactgagtttgatcattccttctt

SEQ ID NO: 5660509 - DNA, 25 bp, Homo sapien
tttccatatggagaaccagttgttc

SEQ ID NO: 5660510 - DNA, 25 bp, Homo sapien
gagactgcgtctggtttcatttttc

SEQ ID NO: 5660511 - DNA, 25 bp, Homo sapien
tctagtactgagtttgatcattcct

SEQ ID NO: 5660512 - DNA, 25 bp, Homo sapien
ggagaaccagttgttctagtactga

SEQ ID NO: 5660513 - DNA, 25 bp, Homo sapien
gaaaaatgaaaccagacgcagtctc

SEQ ID NO: 5660514 - DNA, 25 bp, Homo sapien
tcagtactagaacaactggttctcc

SEQ ID NO: 5660515 - DNA, 25 bp, Homo sapien
gaaaccagacgcagtctcataccac

SEQ ID NO: 5660516 - DNA, 25 bp, Homo sapien
ggaatgatcaaactcagtactagaa

SEQ ID NO: 5660517 - DNA, 25 bp, Homo sapien
aagaaggaatgatcaaactcagtac

SEQ ID NO: 5660518 - DNA, 25 bp, Homo sapien
gaacaactggttctccatatggaaa

SEQ ID NO: 5660519 - DNA, 25 bp, Homo sapien
ctcaggtgattcacctgcctcagcc

SEQ ID NO: 5660520 - DNA, 25 bp, Homo sapien
aggtgattcacctgcctcagcctcc

SEQ ID NO: 5660521 - DNA, 25 bp, Homo sapien
ctgcctcagcctcccaaagggctgg

SEQ ID NO: 5660522 - DNA, 25 bp, Homo sapien
tcaggtgattcacctgcctcagcct

SEQ ID NO: 5660523 - DNA, 25 bp, Homo sapien
cctcaggtgattcacctgcctcagc

SEQ ID NO: 5660524 - DNA, 25 bp, Homo sapien
gattacaggcgtgagtcactgcaac

SEQ ID NO: 5660525 - DNA, 25 bp, Homo sapien
gctgaggcaggtgaatcacctgagg

SEQ ID NO: 5660526 - DNA, 25 bp, Homo sapien
aggctgaggcaggtgaatcacctga

SEQ ID NO: 5660527 - DNA, 25 bp, Homo sapien
ggctgaggcaggtgaatcacctgag

SEQ ID NO: 5660528 - DNA, 25 bp, Homo sapien
ggaggctgaggcaggtgaatcacct

SEQ ID NO: 5660529 - DNA, 25 bp, Homo sapien
gttgcagtgactcacgcctgtaatc

SEQ ID NO: 5660530 - DNA, 25 bp, Homo sapien
ccagccctttgggaggctgaggcag

SEQ ID NO: 5660531 - DNA, 25 bp, Homo sapien
tattttaggctgtatgtgttgcaga

SEQ ID NO: 5660532 - DNA, 25 bp, Homo sapien
ttttaggctgtatgtgttgcagatt

SEQ ID NO: 5660533 - DNA, 25 bp, Homo sapien
atttgtgggagtgctttgtcttaag

SEQ ID NO: 5660534 - DNA, 25 bp, Homo sapien
ctaattgatttgtgggagtgctttg

SEQ ID NO: 5660535 - DNA, 25 bp, Homo sapien
ttctaattgatttgtgggagtgctt

SEQ ID NO: 5660536 - DNA, 25 bp, Homo sapien
gtgggagtgctttgtcttaagtctt

SEQ ID NO: 5660537 - DNA, 25 bp, Homo sapien
tctgcaacacatacagcctaaaata

SEQ ID NO: 5660538 - DNA, 25 bp, Homo sapien
aatctgcaacacatacagcctaaaa

SEQ ID NO: 5660539 - DNA, 25 bp, Homo sapien
aagcactcccacaaatcaattagaa

SEQ ID NO: 5660540 - DNA, 25 bp, Homo sapien
cttaagacaaagcactcccacaaat

SEQ ID NO: 5660541 - DNA, 25 bp, Homo sapien
caaagcactcccacaaatcaattag

SEQ ID NO: 5660542 - DNA, 25 bp, Homo sapien
aagacttaagacaaagcactcccac

SEQ ID NO: 5660543 - DNA, 25 bp, Homo sapien
actttcggagcccaaggcaggtgaa

SEQ ID NO: 5660544 - DNA, 25 bp, Homo sapien
ctttcggagcccaaggcaggtgaat

SEQ ID NO: 5660545 - DNA, 25 bp, Homo sapien
ttcggagcccaaggcaggtgaatca

SEQ ID NO: 5660546 - DNA, 25 bp, Homo sapien
tcggagcccaaggcaggtgaatcat

SEQ ID NO: 5660547 - DNA, 25 bp, Homo sapien
cggagcccaaggcaggtgaatcatg

SEQ ID NO: 5660548 - DNA, 25 bp, Homo sapien
tttcggagcccaaggcaggtgaatc

SEQ ID NO: 5660549 - DNA, 25 bp, Homo sapien
gattcacctgccttgggctccgaaa

SEQ ID NO: 5660550 - DNA, 25 bp, Homo sapien
atgattcacctgccttgggctccga

SEQ ID NO: 5660551 - DNA, 25 bp, Homo sapien
attcacctgccttgggctccgaaag

SEQ ID NO: 5660552 - DNA, 25 bp, Homo sapien
catgattcacctgccttgggctccg

SEQ ID NO: 5660553 - DNA, 25 bp, Homo sapien
tgattcacctgccttgggctccgaa

SEQ ID NO: 5660554 - DNA, 25 bp, Homo sapien
ttcacctgccttgggctccgaaagt

SEQ ID NO: 5660555 - DNA, 25 bp, Homo sapien
gaaagtatccttaattaatatattg

SEQ ID NO: 5660556 - DNA, 25 bp, Homo sapien
caagctatgaaagtatccttaatta

SEQ ID NO: 5660557 - DNA, 25 bp, Homo sapien
tttacaagctatgaaagtatcctta

SEQ ID NO: 5660558 - DNA, 25 bp, Homo sapien
gaacttttatatattggaatcatgc

SEQ ID NO: 5660559 - DNA, 25 bp, Homo sapien
acttttatatattggaatcatgctg

SEQ ID NO: 5660560 - DNA, 25 bp, Homo sapien
tgcttttctttatagttttacaagc

SEQ ID NO: 5660561 - DNA, 25 bp, Homo sapien
caaaagcaagcaaaattaaacaata

SEQ ID NO: 5660562 - DNA, 25 bp, Homo sapien
caatatattaattaaggatactttc

SEQ ID NO: 5660563 - DNA, 25 bp, Homo sapien
gcttgtaaaactataaagaaaagca

SEQ ID NO: 5660564 - DNA, 25 bp, Homo sapien
taattaaggatactttcatagcttg

SEQ ID NO: 5660565 - DNA, 25 bp, Homo sapien
taaggatactttcatagcttgtaaa

SEQ ID NO: 5660566 - DNA, 25 bp, Homo sapien
gcatgattccaatatataaaagttc

SEQ ID NO: 5660567 - DNA, 25 bp, Homo sapien
tgatggatagttgcgagttaaacag

SEQ ID NO: 5660568 - DNA, 25 bp, Homo sapien
cctgatggatagttgcgagttaaac

SEQ ID NO: 5660569 - DNA, 25 bp, Homo sapien
gatagttgcgagttaaacagtatct

SEQ ID NO: 5660570 - DNA, 25 bp, Homo sapien
tccctgatggatagttgcgagttaa

SEQ ID NO: 5660571 - DNA, 25 bp, Homo sapien
tatatagagtgtataaatgtatacg

SEQ ID NO: 5660572 - DNA, 25 bp, Homo sapien
cctttccctgatggatagttgcgag

SEQ ID NO: 5660573 - DNA, 25 bp, Homo sapien
aagatactgtttaactcgcaactat

SEQ ID NO: 5660574 - DNA, 25 bp, Homo sapien
tactgtttaactcgcaactatccat

SEQ ID NO: 5660575 - DNA, 25 bp, Homo sapien
ctcgcaactatccatcagggaaagg

SEQ ID NO: 5660576 - DNA, 25 bp, Homo sapien
ttaactcgcaactatccatcaggga

SEQ ID NO: 5660577 - DNA, 25 bp, Homo sapien
cgtatacatttatacactctatata

SEQ ID NO: 5660578 - DNA, 25 bp, Homo sapien
gtttaactcgcaactatccatcagg

SEQ ID NO: 5660579 - DNA, 25 bp, Homo sapien
gggctagtggcacctgagtctcatg

SEQ ID NO: 5660580 - DNA, 25 bp, Homo sapien
gctgccatgccacagatgtgggagg

SEQ ID NO: 5660581 - DNA, 25 bp, Homo sapien
ctagtggcacctgagtctcatggct

SEQ ID NO: 5660582 - DNA, 25 bp, Homo sapien
gctagtggcacctgagtctcatggc

SEQ ID NO: 5660583 - DNA, 25 bp, Homo sapien
cacctgagtctcatggcttaatctg

SEQ ID NO: 5660584 - DNA, 25 bp, Homo sapien
ggctagtggcacctgagtctcatgg

SEQ ID NO: 5660585 - DNA, 25 bp, Homo sapien
gccatgagactcaggtgccactagc

SEQ ID NO: 5660586 - DNA, 25 bp, Homo sapien
agccatgagactcaggtgccactag

SEQ ID NO: 5660587 - DNA, 25 bp, Homo sapien
cagattaagccatgagactcaggtg

SEQ ID NO: 5660588 - DNA, 25 bp, Homo sapien
atgagactcaggtgccactagcccc

SEQ ID NO: 5660589 - DNA, 25 bp, Homo sapien
catgagactcaggtgccactagccc

SEQ ID NO: 5660590 - DNA, 25 bp, Homo sapien
cctcccacatctgtggcatggcagc

SEQ ID NO: 5660591 - DNA, 25 bp, Homo sapien
tgttgttaaatcgttgccactagtg

SEQ ID NO: 5660592 - DNA, 25 bp, Homo sapien
gaagtggtagaacataggtaacact

SEQ ID NO: 5660593 - DNA, 25 bp, Homo sapien
tgttaaatcgttgccactagtgtca

SEQ ID NO: 5660594 - DNA, 25 bp, Homo sapien
ggtaagtgttgttaaatcgttgcca

SEQ ID NO: 5660595 - DNA, 25 bp, Homo sapien
cataggtaacactgggtaagtgttg

SEQ ID NO: 5660596 - DNA, 25 bp, Homo sapien
taaatcgttgccactagtgtcattg

SEQ ID NO: 5660597 - DNA, 25 bp, Homo sapien
agtgttacctatgttctaccacttc

SEQ ID NO: 5660598 - DNA, 25 bp, Homo sapien
tgacactagtggcaacgatttaaca

SEQ ID NO: 5660599 - DNA, 25 bp, Homo sapien
caatgacactagtggcaacgattta

SEQ ID NO: 5660600 - DNA, 25 bp, Homo sapien
caacacttacccagtgttacctatg

SEQ ID NO: 5660601 - DNA, 25 bp, Homo sapien
tggcaacgatttaacaacacttacc

SEQ ID NO: 5660602 - DNA, 25 bp, Homo sapien
cactagtggcaacgatttaacaaca

SEQ ID NO: 5660603 - DNA, 25 bp, Homo sapien
tgctctaccattaactgtagacgag

SEQ ID NO: 5660604 - DNA, 25 bp, Homo sapien
gcgtgaaacaacctagcataatgat

SEQ ID NO: 5660605 - DNA, 25 bp, Homo sapien
cctagcataatgattagagtgcgaa

SEQ ID NO: 5660606 - DNA, 25 bp, Homo sapien
cacagccttgctctaccattaactg

SEQ ID NO: 5660607 - DNA, 25 bp, Homo sapien
tagagtgcgaacttgagccagactg

SEQ ID NO: 5660608 - DNA, 25 bp, Homo sapien
cacctaccagcgtgaaacaacctag

SEQ ID NO: 5660609 - DNA, 25 bp, Homo sapien
aagcagtctggctcaagttcgcact

SEQ ID NO: 5660610 - DNA, 25 bp, Homo sapien
ctcgtctacagttaatggtagagca

SEQ ID NO: 5660611 - DNA, 25 bp, Homo sapien
ttcgcactctaatcattatgctagg

SEQ ID NO: 5660612 - DNA, 25 bp, Homo sapien
tcattatgctaggttgtttcacgct

SEQ ID NO: 5660613 - DNA, 25 bp, Homo sapien
cagttaatggtagagcaaggctgtg

SEQ ID NO: 5660614 - DNA, 25 bp, Homo sapien
ctaggttgtttcacgctggtaggtg

SEQ ID NO: 5660615 - DNA, 25 bp, Homo sapien
tgtgttgtacatactcagaacctct

SEQ ID NO: 5660616 - DNA, 25 bp, Homo sapien
gtgttgtacatactcagaacctctg

SEQ ID NO: 5660617 - DNA, 25 bp, Homo sapien
ttcatggtttattggatttaacaag

SEQ ID NO: 5660618 - DNA, 25 bp, Homo sapien
cttcatggtttattggatttaacaa

SEQ ID NO: 5660619 - DNA, 25 bp, Homo sapien
catggtttattggatttaacaagtt

SEQ ID NO: 5660620 - DNA, 25 bp, Homo sapien
cttgttaaatccaataaaccatgaa

SEQ ID NO: 5660621 - DNA, 25 bp, Homo sapien
ttgttaaatccaataaaccatgaag

SEQ ID NO: 5660622 - DNA, 25 bp, Homo sapien
agaggttctgagtatgtacaacaca

SEQ ID NO: 5660623 - DNA, 25 bp, Homo sapien
cagaggttctgagtatgtacaacac

SEQ ID NO: 5660624 - DNA, 25 bp, Homo sapien
aacttgttaaatccaataaaccatg

SEQ ID NO: 5660625 - DNA, 25 bp, Homo sapien
ttggcaatctaagcctttgagtctt

SEQ ID NO: 5660626 - DNA, 25 bp, Homo sapien
tacattttggcaatctaagcctttg

SEQ ID NO: 5660627 - DNA, 25 bp, Homo sapien
ttttggcaatctaagcctttgagtc

SEQ ID NO: 5660628 - DNA, 25 bp, Homo sapien
aatacattttggcaatctaagcctt

SEQ ID NO: 5660629 - DNA, 25 bp, Homo sapien
cattttggcaatctaagcctttgag

SEQ ID NO: 5660630 - DNA, 25 bp, Homo sapien
tttggcaatctaagcctttgagtct

SEQ ID NO: 5660631 - DNA, 25 bp, Homo sapien
caaaggcttagattgccaaaatgta

SEQ ID NO: 5660632 - DNA, 25 bp, Homo sapien
ctcaaaggcttagattgccaaaatg

SEQ ID NO: 5660633 - DNA, 25 bp, Homo sapien
gactcaaaggcttagattgccaaaa

SEQ ID NO: 5660634 - DNA, 25 bp, Homo sapien
tcaaaggcttagattgccaaaatgt

SEQ ID NO: 5660635 - DNA, 25 bp, Homo sapien
agactcaaaggcttagattgccaaa

SEQ ID NO: 5660636 - DNA, 25 bp, Homo sapien
aagactcaaaggcttagattgccaa

SEQ ID NO: 5660637 - DNA, 25 bp, Homo sapien
gaacaagagttccattataatcatt

SEQ ID NO: 5660638 - DNA, 25 bp, Homo sapien
ttttacatgagtttagatcattcct

SEQ ID NO: 5660639 - DNA, 25 bp, Homo sapien
attttacatgagtttagatcattcc

SEQ ID NO: 5660640 - DNA, 25 bp, Homo sapien
tcttcacaagtaacctcttccataa

SEQ ID NO: 5660641 - DNA, 25 bp, Homo sapien
tgaacaagagttccattataatcat

SEQ ID NO: 5660642 - DNA, 25 bp, Homo sapien
ctcttcacaagtaacctcttccata

SEQ ID NO: 5660643 - DNA, 25 bp, Homo sapien
ggaatgatctaaactcatgtaaaat

SEQ ID NO: 5660644 - DNA, 25 bp, Homo sapien
aatgattataatggaactcttgttc

SEQ ID NO: 5660645 - DNA, 25 bp, Homo sapien
tatggaagaggttacttgtgaagag

SEQ ID NO: 5660646 - DNA, 25 bp, Homo sapien
aggaatgatctaaactcatgtaaaa

SEQ ID NO: 5660647 - DNA, 25 bp, Homo sapien
atgattataatggaactcttgttca

SEQ ID NO: 5660648 - DNA, 25 bp, Homo sapien
ttatggaagaggttacttgtgaaga

SEQ ID NO: 5660649 - DNA, 25 bp, Homo sapien
tacaagaactaaaacattagctggg

SEQ ID NO: 5660650 - DNA, 25 bp, Homo sapien
catctctacaagaactaaaacatta

SEQ ID NO: 5660651 - DNA, 25 bp, Homo sapien
ctacaagaactaaaacattagctgg

SEQ ID NO: 5660652 - DNA, 25 bp, Homo sapien
tctacaagaactaaaacattagctg

SEQ ID NO: 5660653 - DNA, 25 bp, Homo sapien
atgatggcgtatgcctgtggtccta

SEQ ID NO: 5660654 - DNA, 25 bp, Homo sapien
catgatggcgtatgcctgtggtcct

SEQ ID NO: 5660655 - DNA, 25 bp, Homo sapien
taatgttttagttcttgtagagatg

SEQ ID NO: 5660656 - DNA, 25 bp, Homo sapien
cccagctaatgttttagttcttgta

SEQ ID NO: 5660657 - DNA, 25 bp, Homo sapien
taggaccacaggcatacgccatcat

SEQ ID NO: 5660658 - DNA, 25 bp, Homo sapien
ccagctaatgttttagttcttgtag

SEQ ID NO: 5660659 - DNA, 25 bp, Homo sapien
cagctaatgttttagttcttgtaga

SEQ ID NO: 5660660 - DNA, 25 bp, Homo sapien
aggaccacaggcatacgccatcatg

SEQ ID NO: 5660661 - DNA, 25 bp, Homo sapien
gaaagaaccagagttggccaagtgc

SEQ ID NO: 5660662 - DNA, 25 bp, Homo sapien
gtagaaagaaccagagttggccaag

SEQ ID NO: 5660663 - DNA, 25 bp, Homo sapien
aagaaccagagttggccaagtgcgg

SEQ ID NO: 5660664 - DNA, 25 bp, Homo sapien
aaagaaccagagttggccaagtgcg

SEQ ID NO: 5660665 - DNA, 25 bp, Homo sapien
tagaaagaaccagagttggccaagt

SEQ ID NO: 5660666 - DNA, 25 bp, Homo sapien
agaaccagagttggccaagtgcggt

SEQ ID NO: 5660667 - DNA, 25 bp, Homo sapien
acttggccaactctggttctttcta

SEQ ID NO: 5660668 - DNA, 25 bp, Homo sapien
cgcacttggccaactctggttcttt

SEQ ID NO: 5660669 - DNA, 25 bp, Homo sapien
gcacttggccaactctggttctttc

SEQ ID NO: 5660670 - DNA, 25 bp, Homo sapien
ccgcacttggccaactctggttctt

SEQ ID NO: 5660671 - DNA, 25 bp, Homo sapien
cttggccaactctggttctttctac

SEQ ID NO: 5660672 - DNA, 25 bp, Homo sapien
accgcacttggccaactctggttct

SEQ ID NO: 5660673 - DNA, 25 bp, Homo sapien
tataccccttctagcatttggtaca

SEQ ID NO: 5660674 - DNA, 25 bp, Homo sapien
tgtatggaagaggtcgtataaattt

SEQ ID NO: 5660675 - DNA, 25 bp, Homo sapien
tagcttgaactgaaaatttgttgag

SEQ ID NO: 5660676 - DNA, 25 bp, Homo sapien
cttctagcatttggtacaatatgta

SEQ ID NO: 5660677 - DNA, 25 bp, Homo sapien
ccccttctagcatttggtacaatat

SEQ ID NO: 5660678 - DNA, 25 bp, Homo sapien
tttataccccttctagcatttggta

SEQ ID NO: 5660679 - DNA, 25 bp, Homo sapien
acatattgtaccaaatgctagaagg

SEQ ID NO: 5660680 - DNA, 25 bp, Homo sapien
caacaaattttcagttcaagctaaa

SEQ ID NO: 5660681 - DNA, 25 bp, Homo sapien
catattgtaccaaatgctagaaggg

SEQ ID NO: 5660682 - DNA, 25 bp, Homo sapien
tacatattgtaccaaatgctagaag

SEQ ID NO: 5660683 - DNA, 25 bp, Homo sapien
ctcaacaaattttcagttcaagcta

SEQ ID NO: 5660684 - DNA, 25 bp, Homo sapien
aaatttatacgacctcttccataca

SEQ ID NO: 5660685 - DNA, 25 bp, Homo sapien
gttggggctgtctttgtaagtctcc

SEQ ID NO: 5660686 - DNA, 25 bp, Homo sapien
tggttgtctctgaacgggttggggc

SEQ ID NO: 5660687 - DNA, 25 bp, Homo sapien
gtccatgatgaatcttgcagttcat

SEQ ID NO: 5660688 - DNA, 25 bp, Homo sapien
tccatgatgaatcttgcagttcata

SEQ ID NO: 5660689 - DNA, 25 bp, Homo sapien
tgtccatgatgaatcttgcagttca

SEQ ID NO: 5660690 - DNA, 25 bp, Homo sapien
catgtccatgatgaatcttgcagtt

SEQ ID NO: 5660691 - DNA, 25 bp, Homo sapien
tgaactgcaagattcatcatggaca

SEQ ID NO: 5660692 - DNA, 25 bp, Homo sapien
tatgaactgcaagattcatcatgga

SEQ ID NO: 5660693 - DNA, 25 bp, Homo sapien
ggagacttacaaagacagccccaac

SEQ ID NO: 5660694 - DNA, 25 bp, Homo sapien
gccccaacccgttcagagacaacca

SEQ ID NO: 5660695 - DNA, 25 bp, Homo sapien
gaactgcaagattcatcatggacat

SEQ ID NO: 5660696 - DNA, 25 bp, Homo sapien
aactgcaagattcatcatggacatg

SEQ ID NO: 5660697 - DNA, 25 bp, Homo sapien
gcttaccgagagtttgaaagtgcga

SEQ ID NO: 5660698 - DNA, 25 bp, Homo sapien
cgtctgttggtttacatatgaccaa

SEQ ID NO: 5660699 - DNA, 25 bp, Homo sapien
gaaagtgcgattgtggaagctgctc

SEQ ID NO: 5660700 - DNA, 25 bp, Homo sapien
aaggactcgccctctgggaggctta

SEQ ID NO: 5660701 - DNA, 25 bp, Homo sapien
tatgaccaaaggactcgccctctgg

SEQ ID NO: 5660702 - DNA, 25 bp, Homo sapien
agggctctctcgtctgttggtttac

SEQ ID NO: 5660703 - DNA, 25 bp, Homo sapien
gagcagcttccacaatcgcactttc

SEQ ID NO: 5660704 - DNA, 25 bp, Homo sapien
tgtaaaccaacagacgagagagccc

SEQ ID NO: 5660705 - DNA, 25 bp, Homo sapien
ggtcatatgtaaaccaacagacgag

SEQ ID NO: 5660706 - DNA, 25 bp, Homo sapien
ccagagggcgagtcctttggtcata

SEQ ID NO: 5660707 - DNA, 25 bp, Homo sapien
taagcctcccagagggcgagtcctt

SEQ ID NO: 5660708 - DNA, 25 bp, Homo sapien
gcactttcaaactctcggtaagcct

SEQ ID NO: 5660709 - DNA, 25 bp, Homo sapien
atctttttctgaggatctatggtct

SEQ ID NO: 5660710 - DNA, 25 bp, Homo sapien
ctcacaggcattgttaatagcacca

SEQ ID NO: 5660711 - DNA, 25 bp, Homo sapien
tctcacaggcattgttaatagcacc

SEQ ID NO: 5660712 - DNA, 25 bp, Homo sapien
tttctgatgatcctgttaccccctt

SEQ ID NO: 5660713 - DNA, 25 bp, Homo sapien
tctttttctgaggatctatggtctt

SEQ ID NO: 5660714 - DNA, 25 bp, Homo sapien
aagaccatagatcctcagaaaaaga

SEQ ID NO: 5660715 - DNA, 25 bp, Homo sapien
ggtgctattaacaatgcctgtgaga

SEQ ID NO: 5660716 - DNA, 25 bp, Homo sapien
agaccatagatcctcagaaaaagat

SEQ ID NO: 5660717 - DNA, 25 bp, Homo sapien
tggtgctattaacaatgcctgtgag

SEQ ID NO: 5660718 - DNA, 25 bp, Homo sapien
aagggggtaacaggatcatcagaaa

SEQ ID NO: 5660719 - DNA, 25 bp, Homo sapien
gcctgccacaacgcctggctaattt

SEQ ID NO: 5660720 - DNA, 25 bp, Homo sapien
gtgcctgccacaacgcctggctaat

SEQ ID NO: 5660721 - DNA, 25 bp, Homo sapien
tgccacaacgcctggctaatttttc

SEQ ID NO: 5660722 - DNA, 25 bp, Homo sapien
ggtgcctgccacaacgcctggctaa

SEQ ID NO: 5660723 - DNA, 25 bp, Homo sapien
tgcctgccacaacgcctggctaatt

SEQ ID NO: 5660724 - DNA, 25 bp, Homo sapien
cacaacgcctggctaatttttctat

SEQ ID NO: 5660725 - DNA, 25 bp, Homo sapien
aaattagccaggcgttgtggcaggc

SEQ ID NO: 5660726 - DNA, 25 bp, Homo sapien
ttagccaggcgttgtggcaggcacc

SEQ ID NO: 5660727 - DNA, 25 bp, Homo sapien
atagaaaaattagccaggcgttgtg

SEQ ID NO: 5660728 - DNA, 25 bp, Homo sapien
aattagccaggcgttgtggcaggca

SEQ ID NO: 5660729 - DNA, 25 bp, Homo sapien
gaaaaattagccaggcgttgtggca

SEQ ID NO: 5660730 - DNA, 25 bp, Homo sapien
attagccaggcgttgtggcaggcac

SEQ ID NO: 5660731 - DNA, 25 bp, Homo sapien
tgctactaaccagatagactgttct

SEQ ID NO: 5660732 - DNA, 25 bp, Homo sapien
caagccaagaagaattcacagtttt

SEQ ID NO: 5660733 - DNA, 25 bp, Homo sapien
tagactgttctgagatgatagagaa

SEQ ID NO: 5660734 - DNA, 25 bp, Homo sapien
ccagatagactgttctgagatgata

SEQ ID NO: 5660735 - DNA, 25 bp, Homo sapien
gaagcattgctactaaccagataga

SEQ ID NO: 5660736 - DNA, 25 bp, Homo sapien
caagaagaattcacagttttttggt

SEQ ID NO: 5660737 - DNA, 25 bp, Homo sapien
tctatctggttagtagcaatgcttc

SEQ ID NO: 5660738 - DNA, 25 bp, Homo sapien
ttctctatcatctcagaacagtcta

SEQ ID NO: 5660739 - DNA, 25 bp, Homo sapien
aaaactgtgaattcttcttggcttg

SEQ ID NO: 5660740 - DNA, 25 bp, Homo sapien
caaaaaactgtgaattcttcttggc

SEQ ID NO: 5660741 - DNA, 25 bp, Homo sapien
tatcatctcagaacagtctatctgg

SEQ ID NO: 5660742 - DNA, 25 bp, Homo sapien
gaacagtctatctggttagtagcaa

SEQ ID NO: 5660743 - DNA, 25 bp, Homo sapien
tagctaggcgtggtggcatgctcct

SEQ ID NO: 5660744 - DNA, 25 bp, Homo sapien
ctagctaggcgtggtggcatgctcc

SEQ ID NO: 5660745 - DNA, 25 bp, Homo sapien
gctaggcgtggtggcatgctcctgt

SEQ ID NO: 5660746 - DNA, 25 bp, Homo sapien
actagctaggcgtggtggcatgctc

SEQ ID NO: 5660747 - DNA, 25 bp, Homo sapien
gagcatgccaccacgcctagctagt

SEQ ID NO: 5660748 - DNA, 25 bp, Homo sapien
acaggagcatgccaccacgcctagc

SEQ ID NO: 5660749 - DNA, 25 bp, Homo sapien
ggagcatgccaccacgcctagctag

SEQ ID NO: 5660750 - DNA, 25 bp, Homo sapien
aggagcatgccaccacgcctagcta

SEQ ID NO: 5660751 - DNA, 25 bp, Homo sapien
gcggggtggcatgcaggcctgtaat

SEQ ID NO: 5660752 - DNA, 25 bp, Homo sapien
cgggcggggtggcatgcaggcctgt

SEQ ID NO: 5660753 - DNA, 25 bp, Homo sapien
gccgggcggggtggcatgcaggcct

SEQ ID NO: 5660754 - DNA, 25 bp, Homo sapien
ggcggggtggcatgcaggcctgtaa

SEQ ID NO: 5660755 - DNA, 25 bp, Homo sapien
gggcggggtggcatgcaggcctgta

SEQ ID NO: 5660756 - DNA, 25 bp, Homo sapien
tagccgggcggggtggcatgcaggc

SEQ ID NO: 5660757 - DNA, 25 bp, Homo sapien
acaggcctgcatgccaccccgcccg

SEQ ID NO: 5660758 - DNA, 25 bp, Homo sapien
ttacaggcctgcatgccaccccgcc

SEQ ID NO: 5660759 - DNA, 25 bp, Homo sapien
tacaggcctgcatgccaccccgccc

SEQ ID NO: 5660760 - DNA, 25 bp, Homo sapien
gattacaggcctgcatgccaccccg

SEQ ID NO: 5660761 - DNA, 25 bp, Homo sapien
attacaggcctgcatgccaccccgc

SEQ ID NO: 5660762 - DNA, 25 bp, Homo sapien
aggcctgcatgccaccccgcccggc

SEQ ID NO: 5660763 - DNA, 25 bp, Homo sapien
gcagcgagttgaggttgtgctacta

SEQ ID NO: 5660764 - DNA, 25 bp, Homo sapien
cagcgagttgaggttgtgctactac

SEQ ID NO: 5660765 - DNA, 25 bp, Homo sapien
tagtagcacaacctcaactcgctgc

SEQ ID NO: 5660766 - DNA, 25 bp, Homo sapien
gtagtagcacaacctcaactcgctg

SEQ ID NO: 5660767 - DNA, 25 bp, Homo sapien
agcgagttgaggttgtgctactaca

SEQ ID NO: 5660768 - DNA, 25 bp, Homo sapien
gcagcgagttgaggttgtgctacta

SEQ ID NO: 5660769 - DNA, 25 bp, Homo sapien
cagcgagttgaggttgtgctactac

SEQ ID NO: 5660770 - DNA, 25 bp, Homo sapien
gagttgaggttgtgctactacactc

SEQ ID NO: 5660771 - DNA, 25 bp, Homo sapien
cgagttgaggttgtgctactacact

SEQ ID NO: 5660772 - DNA, 25 bp, Homo sapien
gcgagttgaggttgtgctactacac

SEQ ID NO: 5660773 - DNA, 25 bp, Homo sapien
gtgtagtagcacaacctcaactcgc

SEQ ID NO: 5660774 - DNA, 25 bp, Homo sapien
tgtagtagcacaacctcaactcgct

SEQ ID NO: 5660775 - DNA, 25 bp, Homo sapien
gagtgtagtagcacaacctcaactc

SEQ ID NO: 5660776 - DNA, 25 bp, Homo sapien
tagtagcacaacctcaactcgctgc

SEQ ID NO: 5660777 - DNA, 25 bp, Homo sapien
gtagtagcacaacctcaactcgctg

SEQ ID NO: 5660778 - DNA, 25 bp, Homo sapien
agtgtagtagcacaacctcaactcg

SEQ ID NO: 5660779 - DNA, 25 bp, Homo sapien
aattagcaagatttaagttgagttg

SEQ ID NO: 5660780 - DNA, 25 bp, Homo sapien
ttagcaagatttaagttgagttgtc

SEQ ID NO: 5660781 - DNA, 25 bp, Homo sapien
tagcaagatttaagttgagttgtct

SEQ ID NO: 5660782 - DNA, 25 bp, Homo sapien
tgtctttggtctttaattgaggaag

SEQ ID NO: 5660783 - DNA, 25 bp, Homo sapien
ttgtctttggtctttaattgaggaa

SEQ ID NO: 5660784 - DNA, 25 bp, Homo sapien
caattagcaagatttaagttgagtt

SEQ ID NO: 5660785 - DNA, 25 bp, Homo sapien
gacaactcaacttaaatcttgctaa

SEQ ID NO: 5660786 - DNA, 25 bp, Homo sapien
caactcaacttaaatcttgctaatt

SEQ ID NO: 5660787 - DNA, 25 bp, Homo sapien
ttcctcaattaaagaccaaagacaa

SEQ ID NO: 5660788 - DNA, 25 bp, Homo sapien
agacaactcaacttaaatcttgcta

SEQ ID NO: 5660789 - DNA, 25 bp, Homo sapien
cttcctcaattaaagaccaaagaca

SEQ ID NO: 5660790 - DNA, 25 bp, Homo sapien
aactcaacttaaatcttgctaattg

SEQ ID NO: 5660791 - DNA, 25 bp, Homo sapien
gagttgtcttatcattgtctttggt

SEQ ID NO: 5660792 - DNA, 25 bp, Homo sapien
gtttcacaattagcaagatttaagt

SEQ ID NO: 5660793 - DNA, 25 bp, Homo sapien
tagcaagatttaagttgagttgtct

SEQ ID NO: 5660794 - DNA, 25 bp, Homo sapien
aaaataaaagtggaagaagcacttg

SEQ ID NO: 5660795 - DNA, 25 bp, Homo sapien
tgtctttggtctttaattgaggaag

SEQ ID NO: 5660796 - DNA, 25 bp, Homo sapien
caattagcaagatttaagttgagtt

SEQ ID NO: 5660797 - DNA, 25 bp, Homo sapien
actgtattatgagatgttgctaccc

SEQ ID NO: 5660798 - DNA, 25 bp, Homo sapien
tctgctgttgaggactgtattatga

SEQ ID NO: 5660799 - DNA, 25 bp, Homo sapien
ttttttggatatctggcaatgtcat

SEQ ID NO: 5660800 - DNA, 25 bp, Homo sapien
tatatatcagtctgctgttgaggac

SEQ ID NO: 5660801 - DNA, 25 bp, Homo sapien
caatgtcatatatatcagtctgctg

SEQ ID NO: 5660802 - DNA, 25 bp, Homo sapien
tctggcaatgtcatatatatcagtc

SEQ ID NO: 5660803 - DNA, 25 bp, Homo sapien
tgggtagcaacatctcataatacag

SEQ ID NO: 5660804 - DNA, 25 bp, Homo sapien
tcataatacagtcctcaacagcaga

SEQ ID NO: 5660805 - DNA, 25 bp, Homo sapien
tatgacattgccagatatccaaaaa

SEQ ID NO: 5660806 - DNA, 25 bp, Homo sapien
caacagcagactgatatatatgaca

SEQ ID NO: 5660807 - DNA, 25 bp, Homo sapien
taatacagtcctcaacagcagactg

SEQ ID NO: 5660808 - DNA, 25 bp, Homo sapien
gactgatatatatgacattgccaga

SEQ ID NO: 5660809 - DNA, 25 bp, Homo sapien
gcctggacagagagcacgtgtatga

SEQ ID NO: 5660810 - DNA, 25 bp, Homo sapien
ctggacagagagcacgtgtatgacc

SEQ ID NO: 5660811 - DNA, 25 bp, Homo sapien
tggcctggacagagagcacgtgtat

SEQ ID NO: 5660812 - DNA, 25 bp, Homo sapien
cctggacagagagcacgtgtatgac

SEQ ID NO: 5660813 - DNA, 25 bp, Homo sapien
tggacagagagcacgtgtatgacct

SEQ ID NO: 5660814 - DNA, 25 bp, Homo sapien
ggcctggacagagagcacgtgtatg

SEQ ID NO: 5660815 - DNA, 25 bp, Homo sapien
gtcatacacgtgctctctgtccagg

SEQ ID NO: 5660816 - DNA, 25 bp, Homo sapien
aggtcatacacgtgctctctgtcca

SEQ ID NO: 5660817 - DNA, 25 bp, Homo sapien
atacacgtgctctctgtccaggcca

SEQ ID NO: 5660818 - DNA, 25 bp, Homo sapien
tcatacacgtgctctctgtccaggc

SEQ ID NO: 5660819 - DNA, 25 bp, Homo sapien
ggtcatacacgtgctctctgtccag

SEQ ID NO: 5660820 - DNA, 25 bp, Homo sapien
acgtttgcatgctgatgtctcttgg

SEQ ID NO: 5660821 - DNA, 25 bp, Homo sapien
aatttctggaaacaacgccaggttg

SEQ ID NO: 5660822 - DNA, 25 bp, Homo sapien
taagatggatgaaacgtttgcatgc

SEQ ID NO: 5660823 - DNA, 25 bp, Homo sapien
gatgaaacgtttgcatgctgatgtc

SEQ ID NO: 5660824 - DNA, 25 bp, Homo sapien
caacgccaggttgtgtaagatggat

SEQ ID NO: 5660825 - DNA, 25 bp, Homo sapien
ttctggaaacaacgccaggttgtgt

SEQ ID NO: 5660826 - DNA, 25 bp, Homo sapien
tccatcttacacaacctggcgttgt

SEQ ID NO: 5660827 - DNA, 25 bp, Homo sapien
cacaacctggcgttgtttccagaaa

SEQ ID NO: 5660828 - DNA, 25 bp, Homo sapien
ttcatccatcttacacaacctggcg

SEQ ID NO: 5660829 - DNA, 25 bp, Homo sapien
gagacatcagcatgcaaacgtttca

SEQ ID NO: 5660830 - DNA, 25 bp, Homo sapien
gcatgcaaacgtttcatccatctta

SEQ ID NO: 5660831 - DNA, 25 bp, Homo sapien
ccaagagacatcagcatgcaaacgt

SEQ ID NO: 5660832 - DNA, 25 bp, Homo sapien
caggattgtgataaagactgaatga

SEQ ID NO: 5660833 - DNA, 25 bp, Homo sapien
ttacaggattgtgataaagactgaa

SEQ ID NO: 5660834 - DNA, 25 bp, Homo sapien
tacaggattgtgataaagactgaat

SEQ ID NO: 5660835 - DNA, 25 bp, Homo sapien
acaggattgtgataaagactgaatg

SEQ ID NO: 5660836 - DNA, 25 bp, Homo sapien
tcattcagtctttatcacaatcctg

SEQ ID NO: 5660837 - DNA, 25 bp, Homo sapien
ttcagtctttatcacaatcctgtaa

SEQ ID NO: 5660838 - DNA, 25 bp, Homo sapien
attcagtctttatcacaatcctgta

SEQ ID NO: 5660839 - DNA, 25 bp, Homo sapien
cattcagtctttatcacaatcctgt

SEQ ID NO: 5660840 - DNA, 25 bp, Homo sapien
caggattgtgataaagactgaatga

SEQ ID NO: 5660841 - DNA, 25 bp, Homo sapien
tgctttgcaaaatataaaatgccta

SEQ ID NO: 5660842 - DNA, 25 bp, Homo sapien
gactgaatgagaaaagtgctttgca

SEQ ID NO: 5660843 - DNA, 25 bp, Homo sapien
cattattattagtgttactatcacc

SEQ ID NO: 5660844 - DNA, 25 bp, Homo sapien
gtgttactatcaccaaccttacagg

SEQ ID NO: 5660845 - DNA, 25 bp, Homo sapien
ctatcaccaaccttacaggattgtg

SEQ ID NO: 5660846 - DNA, 25 bp, Homo sapien
tcattcagtctttatcacaatcctg

SEQ ID NO: 5660847 - DNA, 25 bp, Homo sapien
cacaatcctgtaaggttggtgatag

SEQ ID NO: 5660848 - DNA, 25 bp, Homo sapien
tagtaacactaataataatgacatc

SEQ ID NO: 5660849 - DNA, 25 bp, Homo sapien
cctgtaaggttggtgatagtaacac

SEQ ID NO: 5660850 - DNA, 25 bp, Homo sapien
taggcattttatattttgcaaagca

SEQ ID NO: 5660851 - DNA, 25 bp, Homo sapien
tgcaaagcacttttctcattcagtc

SEQ ID NO: 5660852 - DNA, 25 bp, Homo sapien
attatgtaaacattctaagactcag

SEQ ID NO: 5660853 - DNA, 25 bp, Homo sapien
ttatgtaaacattctaagactcagt

SEQ ID NO: 5660854 - DNA, 25 bp, Homo sapien
gtttctgcattgtaatgtatgacgg

SEQ ID NO: 5660855 - DNA, 25 bp, Homo sapien
tatgtaaacattctaagactcagtt

SEQ ID NO: 5660856 - DNA, 25 bp, Homo sapien
actgagtcttagaatgtttacataa

SEQ ID NO: 5660857 - DNA, 25 bp, Homo sapien
aactgagtcttagaatgtttacata

SEQ ID NO: 5660858 - DNA, 25 bp, Homo sapien
ccgtcatacattacaatgcagaaac

SEQ ID NO: 5660859 - DNA, 25 bp, Homo sapien
ctgagtcttagaatgtttacataat

SEQ ID NO: 5660860 - DNA, 25 bp, Homo sapien
ctaagactcagtttttctagcagtt

SEQ ID NO: 5660861 - DNA, 25 bp, Homo sapien
gtttctgcattgtaatgtatgacgg

SEQ ID NO: 5660862 - DNA, 25 bp, Homo sapien
tatgtaaacattctaagactcagtt

SEQ ID NO: 5660863 - DNA, 25 bp, Homo sapien
aatgatggcaacagtagtttctgca

SEQ ID NO: 5660864 - DNA, 25 bp, Homo sapien
gaccttaagcaaattatgtaaacat

SEQ ID NO: 5660865 - DNA, 25 bp, Homo sapien
tctagcagttaaatgatggcaacag

SEQ ID NO: 5660866 - DNA, 25 bp, Homo sapien
tacaatgcagaaactactgttgcca

SEQ ID NO: 5660867 - DNA, 25 bp, Homo sapien
gaatgtttacataatttgcttaagg

SEQ ID NO: 5660868 - DNA, 25 bp, Homo sapien
aactgagtcttagaatgtttacata

SEQ ID NO: 5660869 - DNA, 25 bp, Homo sapien
ccgtcatacattacaatgcagaaac

SEQ ID NO: 5660870 - DNA, 25 bp, Homo sapien
actgttgccatcatttaactgctag

SEQ ID NO: 5660871 - DNA, 25 bp, Homo sapien
catttaactgctagaaaaactgagt

SEQ ID NO: 5660872 - DNA, 25 bp, Homo sapien
agtacttagaacactttggtcctag

SEQ ID NO: 5660873 - DNA, 25 bp, Homo sapien
gaacactttggtcctagatcccact

SEQ ID NO: 5660874 - DNA, 25 bp, Homo sapien
tagaacactttggtcctagatccca

SEQ ID NO: 5660875 - DNA, 25 bp, Homo sapien
gggcagtacttagaacactttggtc

SEQ ID NO: 5660876 - DNA, 25 bp, Homo sapien
actttggtcctagatcccactctgc

SEQ ID NO: 5660877 - DNA, 25 bp, Homo sapien
tcctagatcccactctgcccctttt

SEQ ID NO: 5660878 - DNA, 25 bp, Homo sapien
ggatctaggaccaaagtgttctaag

SEQ ID NO: 5660879 - DNA, 25 bp, Homo sapien
agtgggatctaggaccaaagtgttc

SEQ ID NO: 5660880 - DNA, 25 bp, Homo sapien
gaccaaagtgttctaagtactgccc

SEQ ID NO: 5660881 - DNA, 25 bp, Homo sapien
taggaccaaagtgttctaagtactg

SEQ ID NO: 5660882 - DNA, 25 bp, Homo sapien
gcagagtgggatctaggaccaaagt

SEQ ID NO: 5660883 - DNA, 25 bp, Homo sapien
tgggatctaggaccaaagtgttcta

SEQ ID NO: 5660884 - DNA, 25 bp, Homo sapien
cattaattgttccagaatagttggg

SEQ ID NO: 5660885 - DNA, 25 bp, Homo sapien
taattgttccagaatagttgggcat

SEQ ID NO: 5660886 - DNA, 25 bp, Homo sapien
atatatttaaacttttacagacagt

SEQ ID NO: 5660887 - DNA, 25 bp, Homo sapien
catacattaattgttccagaatagt

SEQ ID NO: 5660888 - DNA, 25 bp, Homo sapien
ttaattgttccagaatagttgggca

SEQ ID NO: 5660889 - DNA, 25 bp, Homo sapien
tcatacattaattgttccagaatag

SEQ ID NO: 5660890 - DNA, 25 bp, Homo sapien
caactattctggaacaattaatgta

SEQ ID NO: 5660891 - DNA, 25 bp, Homo sapien
atgcccaactattctggaacaatta

SEQ ID NO: 5660892 - DNA, 25 bp, Homo sapien
gcccaactattctggaacaattaat

SEQ ID NO: 5660893 - DNA, 25 bp, Homo sapien
actgtctgtaaaagtttaaatatat

SEQ ID NO: 5660894 - DNA, 25 bp, Homo sapien
ctattctggaacaattaatgtatga

SEQ ID NO: 5660895 - DNA, 25 bp, Homo sapien
tgcccaactattctggaacaattaa

SEQ ID NO: 5660896 - DNA, 25 bp, Homo sapien
atgcccaactattctggaacaatta

SEQ ID NO: 5660897 - DNA, 25 bp, Homo sapien
catttacataaaaaactgtctgtaa

SEQ ID NO: 5660898 - DNA, 25 bp, Homo sapien
gcccaactattctggaacaattaat

SEQ ID NO: 5660899 - DNA, 25 bp, Homo sapien
acctaaatgcccaactattctggaa

SEQ ID NO: 5660900 - DNA, 25 bp, Homo sapien
ctattctggaacaattaatgtatga

SEQ ID NO: 5660901 - DNA, 25 bp, Homo sapien
tatatttacaattttctggtttcaa

SEQ ID NO: 5660902 - DNA, 25 bp, Homo sapien
gttatgatcatataacacggatttt

SEQ ID NO: 5660903 - DNA, 25 bp, Homo sapien
cgttgtggtaaacatttgtaatgta

SEQ ID NO: 5660904 - DNA, 25 bp, Homo sapien
tctaacgttgtggtaaacatttgta

SEQ ID NO: 5660905 - DNA, 25 bp, Homo sapien
attctaacgttgtggtaaacatttg

SEQ ID NO: 5660906 - DNA, 25 bp, Homo sapien
tgatttctttattctaacgttgtgg

SEQ ID NO: 5660907 - DNA, 25 bp, Homo sapien
aacgttgtggtaaacatttgtaatg

SEQ ID NO: 5660908 - DNA, 25 bp, Homo sapien
aaaatccgtgttatatgatcataac

SEQ ID NO: 5660909 - DNA, 25 bp, Homo sapien
ccacaacgttagaataaagaaatca

SEQ ID NO: 5660910 - DNA, 25 bp, Homo sapien
taattacattacaaatgtttaccac

SEQ ID NO: 5660911 - DNA, 25 bp, Homo sapien
tacattacaaatgtttaccacaacg

SEQ ID NO: 5660912 - DNA, 25 bp, Homo sapien
caaatgtttaccacaacgttagaat

SEQ ID NO: 5660913 - DNA, 25 bp, Homo sapien
tacaaatgtttaccacaacgttaga

SEQ ID NO: 5660914 - DNA, 25 bp, Homo sapien
acagatttgagggagctttatgttt

SEQ ID NO: 5660915 - DNA, 25 bp, Homo sapien
aacagatttgagggagctttatgtt

SEQ ID NO: 5660916 - DNA, 25 bp, Homo sapien
cagatttgagggagctttatgtttg

SEQ ID NO: 5660917 - DNA, 25 bp, Homo sapien
agatttgagggagctttatgtttgt

SEQ ID NO: 5660918 - DNA, 25 bp, Homo sapien
acaaacataaagctccctcaaatct

SEQ ID NO: 5660919 - DNA, 25 bp, Homo sapien
aacataaagctccctcaaatctgtt

SEQ ID NO: 5660920 - DNA, 25 bp, Homo sapien
caaacataaagctccctcaaatctg

SEQ ID NO: 5660921 - DNA, 25 bp, Homo sapien
aaacataaagctccctcaaatctgt

SEQ ID NO: 5660922 - DNA, 25 bp, Homo sapien
tgtcttctaacaggaactgtaacag

SEQ ID NO: 5660923 - DNA, 25 bp, Homo sapien
cagatttgagggagctttatgtttg

SEQ ID NO: 5660924 - DNA, 25 bp, Homo sapien
gctttatgtttgttacaaaagcctc

SEQ ID NO: 5660925 - DNA, 25 bp, Homo sapien
tccaagagaacccaaatgtcttcta

SEQ ID NO: 5660926 - DNA, 25 bp, Homo sapien
gaactgtaacagatttgagggagct

SEQ ID NO: 5660927 - DNA, 25 bp, Homo sapien
gaacccaaatgtcttctaacaggaa

SEQ ID NO: 5660928 - DNA, 25 bp, Homo sapien
tagaagacaaaacaataaaagaggc

SEQ ID NO: 5660929 - DNA, 25 bp, Homo sapien
cagttcctgttagaagacatttggg

SEQ ID NO: 5660930 - DNA, 25 bp, Homo sapien
tagaagacatttgggttctcttgga

SEQ ID NO: 5660931 - DNA, 25 bp, Homo sapien
caaacataaagctccctcaaatctg

SEQ ID NO: 5660932 - DNA, 25 bp, Homo sapien
gaggcttttgtaacaaacataaagc

SEQ ID NO: 5660933 - DNA, 25 bp, Homo sapien
caaatctgttacagttcctgttaga

SEQ ID NO: 5660934 - DNA, 25 bp, Homo sapien
atagagcttaggaaagtaaataact

SEQ ID NO: 5660935 - DNA, 25 bp, Homo sapien
taaataacttacctaaggtcacata

SEQ ID NO: 5660936 - DNA, 25 bp, Homo sapien
ttatttgtttcattagaatgcctcc

SEQ ID NO: 5660937 - DNA, 25 bp, Homo sapien
tgtttcattagaatgcctcctttat

SEQ ID NO: 5660938 - DNA, 25 bp, Homo sapien
gatgaggaaatagagcttaggaaag

SEQ ID NO: 5660939 - DNA, 25 bp, Homo sapien
cctaaggtcacatactttttatttg

SEQ ID NO: 5660940 - DNA, 25 bp, Homo sapien
caaataaaaagtatgtgaccttagg

SEQ ID NO: 5660941 - DNA, 25 bp, Homo sapien
taaaggaggcattctaatgaaacaa

SEQ ID NO: 5660942 - DNA, 25 bp, Homo sapien
tgaaacaaataaaaagtatgtgacc

SEQ ID NO: 5660943 - DNA, 25 bp, Homo sapien
tatgtgaccttaggtaagttattta

SEQ ID NO: 5660944 - DNA, 25 bp, Homo sapien
agttatttactttcctaagctctat

SEQ ID NO: 5660945 - DNA, 25 bp, Homo sapien
tactttcctaagctctatttcctca

SEQ ID NO: 5660946 - DNA, 25 bp, Homo sapien
tggaagacctggtatgagctagaaa

SEQ ID NO: 5660947 - DNA, 25 bp, Homo sapien
ggaagacctggtatgagctagaaac

SEQ ID NO: 5660948 - DNA, 25 bp, Homo sapien
gaagacctggtatgagctagaaact

SEQ ID NO: 5660949 - DNA, 25 bp, Homo sapien
aagacctggtatgagctagaaacta

SEQ ID NO: 5660950 - DNA, 25 bp, Homo sapien
tttctagctcataccaggtcttcca

SEQ ID NO: 5660951 - DNA, 25 bp, Homo sapien
tagtttctagctcataccaggtctt

SEQ ID NO: 5660952 - DNA, 25 bp, Homo sapien
agtttctagctcataccaggtcttc

SEQ ID NO: 5660953 - DNA, 25 bp, Homo sapien
gtttctagctcataccaggtcttcc

SEQ ID NO: 5660954 - DNA, 25 bp, Homo sapien
ggaagacctggtatgagctagaaac

SEQ ID NO: 5660955 - DNA, 25 bp, Homo sapien
aagacctggtatgagctagaaacta

SEQ ID NO: 5660956 - DNA, 25 bp, Homo sapien
ttcttaaagaccagtgtaacagtag

SEQ ID NO: 5660957 - DNA, 25 bp, Homo sapien
agaccagtgtaacagtagaaatttt

SEQ ID NO: 5660958 - DNA, 25 bp, Homo sapien
ttaaatccttggaagacctggtatg

SEQ ID NO: 5660959 - DNA, 25 bp, Homo sapien
acctggtatgagctagaaactagta

SEQ ID NO: 5660960 - DNA, 25 bp, Homo sapien
tactagtttctagctcataccaggt

SEQ ID NO: 5660961 - DNA, 25 bp, Homo sapien
tactgttacactggtctttaagaaa

SEQ ID NO: 5660962 - DNA, 25 bp, Homo sapien
tagtttctagctcataccaggtctt

SEQ ID NO: 5660963 - DNA, 25 bp, Homo sapien
aaaatttctactgttacactggtct

SEQ ID NO: 5660964 - DNA, 25 bp, Homo sapien
gtttctagctcataccaggtcttcc

SEQ ID NO: 5660965 - DNA, 25 bp, Homo sapien
cataccaggtcttccaaggatttaa

SEQ ID NO: 5660966 - DNA, 25 bp, Homo sapien
gtttctcctttcttgcctttctgtg

SEQ ID NO: 5660967 - DNA, 25 bp, Homo sapien
cttgcctttctgtggattatttgaa

SEQ ID NO: 5660968 - DNA, 25 bp, Homo sapien
cctttcttgcctttctgtggattat

SEQ ID NO: 5660969 - DNA, 25 bp, Homo sapien
gcctttctgtggattatttgaatat

SEQ ID NO: 5660970 - DNA, 25 bp, Homo sapien
tctgtttctcattcttctgtttctc

SEQ ID NO: 5660971 - DNA, 25 bp, Homo sapien
gaatattttttagattttcatcttg

SEQ ID NO: 5660972 - DNA, 25 bp, Homo sapien
taatccacagaaaggcaagaaagga

SEQ ID NO: 5660973 - DNA, 25 bp, Homo sapien
cacagaaaggcaagaaaggagaaac

SEQ ID NO: 5660974 - DNA, 25 bp, Homo sapien
ggagaaacagaagaatgagaaacag

SEQ ID NO: 5660975 - DNA, 25 bp, Homo sapien
ttcaaataatccacagaaaggcaag

SEQ ID NO: 5660976 - DNA, 25 bp, Homo sapien
aatattcaaataatccacagaaagg

SEQ ID NO: 5660977 - DNA, 25 bp, Homo sapien
caagatgaaaatctaaaaaatattc

SEQ ID NO: 5660978 - DNA, 25 bp, Homo sapien
tcatttctcttaaattgttgaggtt

SEQ ID NO: 5660979 - DNA, 25 bp, Homo sapien
ccaaggatatggcttcagtgaatgt

SEQ ID NO: 5660980 - DNA, 25 bp, Homo sapien
gaatgttccgtaagtacttgagaaa

SEQ ID NO: 5660981 - DNA, 25 bp, Homo sapien
ccgtaagtacttgagaaaaatacat

SEQ ID NO: 5660982 - DNA, 25 bp, Homo sapien
tcagtgaatgttccgtaagtacttg

SEQ ID NO: 5660983 - DNA, 25 bp, Homo sapien
gaggtttgttttatggccaaggata

SEQ ID NO: 5660984 - DNA, 25 bp, Homo sapien
tgtatttttctcaagtacttacgga

SEQ ID NO: 5660985 - DNA, 25 bp, Homo sapien
cctcaacaatttaagagaaatgaaa

SEQ ID NO: 5660986 - DNA, 25 bp, Homo sapien
caagtacttacggaacattcactga

SEQ ID NO: 5660987 - DNA, 25 bp, Homo sapien
catatccttggccataaaacaaacc

SEQ ID NO: 5660988 - DNA, 25 bp, Homo sapien
acattcactgaagccatatccttgg

SEQ ID NO: 5660989 - DNA, 25 bp, Homo sapien
tggccataaaacaaacctcaacaat

SEQ ID NO: 5660990 - DNA, 25 bp, Homo sapien
taagattgtctacttagccatatca

SEQ ID NO: 5660991 - DNA, 25 bp, Homo sapien
ccttgctcagttcactatttttgga

SEQ ID NO: 5660992 - DNA, 25 bp, Homo sapien
cttaagattgtctacttagccatat

SEQ ID NO: 5660993 - DNA, 25 bp, Homo sapien
gtctacttagccatatcatctacaa

SEQ ID NO: 5660994 - DNA, 25 bp, Homo sapien
taattggttccttaagattgtctac

SEQ ID NO: 5660995 - DNA, 25 bp, Homo sapien
gattgtctacttagccatatcatct

SEQ ID NO: 5660996 - DNA, 25 bp, Homo sapien
ttgtagatgatatggctaagtagac

SEQ ID NO: 5660997 - DNA, 25 bp, Homo sapien
atatggctaagtagacaatcttaag

SEQ ID NO: 5660998 - DNA, 25 bp, Homo sapien
gtagacaatcttaaggaaccaatta

SEQ ID NO: 5660999 - DNA, 25 bp, Homo sapien
ccaaaaatagtgaactgagcaaggt

SEQ ID NO: 5661000 - DNA, 25 bp, Homo sapien
gatgatatggctaagtagacaatct

SEQ ID NO: 5661001 - DNA, 25 bp, Homo sapien
tccaaaaatagtgaactgagcaagg

SEQ ID NO: 5661002 - DNA, 25 bp, Homo sapien
cagatcagttctgtcaccttaagga

SEQ ID NO: 5661003 - DNA, 25 bp, Homo sapien
aagatacagatcagttctgtcacct

SEQ ID NO: 5661004 - DNA, 25 bp, Homo sapien
ctgtcaccttaaggatccttgatgt

SEQ ID NO: 5661005 - DNA, 25 bp, Homo sapien
tctcttgtcctaacattttgtgatg

SEQ ID NO: 5661006 - DNA, 25 bp, Homo sapien
tctgtcaccttaaggatccttgatg

SEQ ID NO: 5661007 - DNA, 25 bp, Homo sapien
agttctgtcaccttaaggatccttg

SEQ ID NO: 5661008 - DNA, 25 bp, Homo sapien
acatcaaggatccttaaggtgacag

SEQ ID NO: 5661009 - DNA, 25 bp, Homo sapien
caaggatccttaaggtgacagaact

SEQ ID NO: 5661010 - DNA, 25 bp, Homo sapien
tccttaaggtgacagaactgatctg

SEQ ID NO: 5661011 - DNA, 25 bp, Homo sapien
tcacaaaatgttaggacaagagaaa

SEQ ID NO: 5661012 - DNA, 25 bp, Homo sapien
acatcacaaaatgttaggacaagag

SEQ ID NO: 5661013 - DNA, 25 bp, Homo sapien
taaggtgacagaactgatctgtatc

SEQ ID NO: 5661014 - DNA, 25 bp, Homo sapien
agagaaggtgagagatccttctggg

SEQ ID NO: 5661015 - DNA, 25 bp, Homo sapien
ccctgaggttggagagacgttggaa

SEQ ID NO: 5661016 - DNA, 25 bp, Homo sapien
cccagaaggatctctcaccttctct

SEQ ID NO: 5661017 - DNA, 25 bp, Homo sapien
ttccaacgtctctccaacctcaggg

SEQ ID NO: 5661018 - DNA, 25 bp, Homo sapien
cagagagaaggtgagagatccttct

SEQ ID NO: 5661019 - DNA, 25 bp, Homo sapien
gcagcaggtgcctagccctgaggtt

SEQ ID NO: 5661020 - DNA, 25 bp, Homo sapien
aaggtgagagatccttctgggctga

SEQ ID NO: 5661021 - DNA, 25 bp, Homo sapien
gatccttctgggctgaaggagcagc

SEQ ID NO: 5661022 - DNA, 25 bp, Homo sapien
ccctgaggttggagagacgttggaa

SEQ ID NO: 5661023 - DNA, 25 bp, Homo sapien
ctagccctgaggttggagagacgtt

SEQ ID NO: 5661024 - DNA, 25 bp, Homo sapien
acgtctctccaacctcagggctagg

SEQ ID NO: 5661025 - DNA, 25 bp, Homo sapien
acctcagggctaggcacctgctgct

SEQ ID NO: 5661026 - DNA, 25 bp, Homo sapien
gaaggatctctcaccttctctctgc

SEQ ID NO: 5661027 - DNA, 25 bp, Homo sapien
ttccaacgtctctccaacctcaggg

SEQ ID NO: 5661028 - DNA, 25 bp, Homo sapien
tgctgctccttcagcccagaaggat

SEQ ID NO: 5661029 - DNA, 25 bp, Homo sapien
ttcagcccagaaggatctctcacct

SEQ ID NO: 5661030 - DNA, 25 bp, Homo sapien
gatatcatctgaccataattaacag

SEQ ID NO: 5661031 - DNA, 25 bp, Homo sapien
tacattgatatcatctgaccataat

SEQ ID NO: 5661032 - DNA, 25 bp, Homo sapien
tatacattgatatcatctgaccata

SEQ ID NO: 5661033 - DNA, 25 bp, Homo sapien
tcatctgaccataattaacagttct

SEQ ID NO: 5661034 - DNA, 25 bp, Homo sapien
atctgaccataattaacagttctca

SEQ ID NO: 5661035 - DNA, 25 bp, Homo sapien
tactatacattgatatcatctgacc

SEQ ID NO: 5661036 - DNA, 25 bp, Homo sapien
gagaactgttaattatggtcagatg

SEQ ID NO: 5661037 - DNA, 25 bp, Homo sapien
ctgttaattatggtcagatgatatc

SEQ ID NO: 5661038 - DNA, 25 bp, Homo sapien
taattatggtcagatgatatcaatg

SEQ ID NO: 5661039 - DNA, 25 bp, Homo sapien
tatggtcagatgatatcaatgtata

SEQ ID NO: 5661040 - DNA, 25 bp, Homo sapien
ggtcagatgatatcaatgtatagta

SEQ ID NO: 5661041 - DNA, 25 bp, Homo sapien
tgagaactgttaattatggtcagat

SEQ ID NO: 5661042 - DNA, 25 bp, Homo sapien
gcagggtgttttggctctttcatat

SEQ ID NO: 5661043 - DNA, 25 bp, Homo sapien
tatctggtaagacaaatcctcctac

SEQ ID NO: 5661044 - DNA, 25 bp, Homo sapien
tttccttgcagggtgttttggctct

SEQ ID NO: 5661045 - DNA, 25 bp, Homo sapien
ttgctaaggcttgctatctggtaag

SEQ ID NO: 5661046 - DNA, 25 bp, Homo sapien
tgctatctggtaagacaaatcctcc

SEQ ID NO: 5661047 - DNA, 25 bp, Homo sapien
taaggcttgctatctggtaagacaa

SEQ ID NO: 5661048 - DNA, 25 bp, Homo sapien
gatttgtcttaccagatagcaagcc

SEQ ID NO: 5661049 - DNA, 25 bp, Homo sapien
taggaggatttgtcttaccagatag

SEQ ID NO: 5661050 - DNA, 25 bp, Homo sapien
tttatatgaaagagccaaaacaccc

SEQ ID NO: 5661051 - DNA, 25 bp, Homo sapien
aagagccaaaacaccctgcaaggaa

SEQ ID NO: 5661052 - DNA, 25 bp, Homo sapien
tcttaccagatagcaagccttagca

SEQ ID NO: 5661053 - DNA, 25 bp, Homo sapien
tatgaaagagccaaaacaccctgca

SEQ ID NO: 5661054 - DNA, 25 bp, Homo sapien
cacctgagccatagtgtttttcaac

SEQ ID NO: 5661055 - DNA, 25 bp, Homo sapien
ctctcttcagtttgtctatcctgtg

SEQ ID NO: 5661056 - DNA, 25 bp, Homo sapien
ttcaactgcatgggtctgttttggg

SEQ ID NO: 5661057 - DNA, 25 bp, Homo sapien
tttcaactgcatgggtctgttttgg

SEQ ID NO: 5661058 - DNA, 25 bp, Homo sapien
tctctcttcagtttgtctatcctgt

SEQ ID NO: 5661059 - DNA, 25 bp, Homo sapien
ccacctgagccatagtgtttttcaa

SEQ ID NO: 5661060 - DNA, 25 bp, Homo sapien
cacaggatagacaaactgaagagag

SEQ ID NO: 5661061 - DNA, 25 bp, Homo sapien
acaggatagacaaactgaagagaga

SEQ ID NO: 5661062 - DNA, 25 bp, Homo sapien
ccaaaacagacccatgcagttgaaa

SEQ ID NO: 5661063 - DNA, 25 bp, Homo sapien
cccaaaacagacccatgcagttgaa

SEQ ID NO: 5661064 - DNA, 25 bp, Homo sapien
gttgaaaaacactatggctcaggtg

SEQ ID NO: 5661065 - DNA, 25 bp, Homo sapien
ttgaaaaacactatggctcaggtgg

SEQ ID NO: 5661066 - DNA, 25 bp, Homo sapien
gggtcatagtcataggttgtgaatt

SEQ ID NO: 5661067 - DNA, 25 bp, Homo sapien
cactgtttttcaacctgggggtcat

SEQ ID NO: 5661068 - DNA, 25 bp, Homo sapien
gtcatagtcataggttgtgaattta

SEQ ID NO: 5661069 - DNA, 25 bp, Homo sapien
tcatagtcataggttgtgaatttat

SEQ ID NO: 5661070 - DNA, 25 bp, Homo sapien
tcaacctgggggtcatagtcatagg

SEQ ID NO: 5661071 - DNA, 25 bp, Homo sapien
ggtcatagtcataggttgtgaattt

SEQ ID NO: 5661072 - DNA, 25 bp, Homo sapien
aattcacaacctatgactatgaccc

SEQ ID NO: 5661073 - DNA, 25 bp, Homo sapien
ctatgacccccaggttgaaaaacag

SEQ ID NO: 5661074 - DNA, 25 bp, Homo sapien
atgacccccaggttgaaaaacagtg

SEQ ID NO: 5661075 - DNA, 25 bp, Homo sapien
cctatgactatgacccccaggttga

SEQ ID NO: 5661076 - DNA, 25 bp, Homo sapien
taaattcacaacctatgactatgac

SEQ ID NO: 5661077 - DNA, 25 bp, Homo sapien
ataaattcacaacctatgactatga

SEQ ID NO: 5661078 - DNA, 25 bp, Homo sapien
gggtcatagtcataggttgtgaatt

SEQ ID NO: 5661079 - DNA, 25 bp, Homo sapien
tcatagtcataggttgtgaatttat

SEQ ID NO: 5661080 - DNA, 25 bp, Homo sapien
aaaaagagagtttctcaaagtcact

SEQ ID NO: 5661081 - DNA, 25 bp, Homo sapien
tcaacctgggggtcatagtcatagg

SEQ ID NO: 5661082 - DNA, 25 bp, Homo sapien
cataggttgtgaatttattttagct

SEQ ID NO: 5661083 - DNA, 25 bp, Homo sapien
caaagtcactgtttttcaacctggg

SEQ ID NO: 5661084 - DNA, 25 bp, Homo sapien
agtgatttgtgactgccacggcact

SEQ ID NO: 5661085 - DNA, 25 bp, Homo sapien
gtgatttgtgactgccacggcactc

SEQ ID NO: 5661086 - DNA, 25 bp, Homo sapien
cagtgatttgtgactgccacggcac

SEQ ID NO: 5661087 - DNA, 25 bp, Homo sapien
gagtgccgtggcagtcacaaatcac

SEQ ID NO: 5661088 - DNA, 25 bp, Homo sapien
gtgccgtggcagtcacaaatcactg

SEQ ID NO: 5661089 - DNA, 25 bp, Homo sapien
agtgccgtggcagtcacaaatcact

SEQ ID NO: 5661090 - DNA, 25 bp, Homo sapien
taaaacatttagctatgtgtggtgg

SEQ ID NO: 5661091 - DNA, 25 bp, Homo sapien
tagctatgtgtggtggcatgagctt

SEQ ID NO: 5661092 - DNA, 25 bp, Homo sapien
gctatgtgtggtggcatgagcttgt

SEQ ID NO: 5661093 - DNA, 25 bp, Homo sapien
tttagctatgtgtggtggcatgagc

SEQ ID NO: 5661094 - DNA, 25 bp, Homo sapien
aaacatttagctatgtgtggtggca

SEQ ID NO: 5661095 - DNA, 25 bp, Homo sapien
catttagctatgtgtggtggcatga

SEQ ID NO: 5661096 - DNA, 25 bp, Homo sapien
gctcatgccaccacacatagctaaa

SEQ ID NO: 5661097 - DNA, 25 bp, Homo sapien
ccaccacacatagctaaatgtttta

SEQ ID NO: 5661098 - DNA, 25 bp, Homo sapien
caccacacatagctaaatgttttaa

SEQ ID NO: 5661099 - DNA, 25 bp, Homo sapien
tgccaccacacatagctaaatgttt

SEQ ID NO: 5661100 - DNA, 25 bp, Homo sapien
aagctcatgccaccacacatagcta

SEQ ID NO: 5661101 - DNA, 25 bp, Homo sapien
tcatgccaccacacatagctaaatg

SEQ ID NO: 5661102 - DNA, 25 bp, Homo sapien
ttcagagtacttgtccacatatagt

SEQ ID NO: 5661103 - DNA, 25 bp, Homo sapien
aaaagccacaccttaaaagtcagct

SEQ ID NO: 5661104 - DNA, 25 bp, Homo sapien
gtccacatatagtatcttcatcatt

SEQ ID NO: 5661105 - DNA, 25 bp, Homo sapien
tatgtactttcagagtacttgtcca

SEQ ID NO: 5661106 - DNA, 25 bp, Homo sapien
aaagccacaccttaaaagtcagctt

SEQ ID NO: 5661107 - DNA, 25 bp, Homo sapien
tactttcagagtacttgtccacata

SEQ ID NO: 5661108 - DNA, 25 bp, Homo sapien
gacaagtactctgaaagtacatata

SEQ ID NO: 5661109 - DNA, 25 bp, Homo sapien
agctgacttttaaggtgtggctttt

SEQ ID NO: 5661110 - DNA, 25 bp, Homo sapien
tatatgtggacaagtactctgaaag

SEQ ID NO: 5661111 - DNA, 25 bp, Homo sapien
actatatgtggacaagtactctgaa

SEQ ID NO: 5661112 - DNA, 25 bp, Homo sapien
tgtggacaagtactctgaaagtaca

SEQ ID NO: 5661113 - DNA, 25 bp, Homo sapien
aatgatgaagatactatatgtggac

SEQ ID NO: 5661114 - DNA, 25 bp, Homo sapien
tgacagagcaagattccacctcaaa

SEQ ID NO: 5661115 - DNA, 25 bp, Homo sapien
cagagcaagattccacctcaaaaaa

SEQ ID NO: 5661116 - DNA, 25 bp, Homo sapien
ggtgacagagcaagattccacctca

SEQ ID NO: 5661117 - DNA, 25 bp, Homo sapien
gacagagcaagattccacctcaaaa

SEQ ID NO: 5661118 - DNA, 25 bp, Homo sapien
gtgacagagcaagattccacctcaa

SEQ ID NO: 5661119 - DNA, 25 bp, Homo sapien
agagcaagattccacctcaaaaaaa

SEQ ID NO: 5661120 - DNA, 25 bp, Homo sapien
tttttttgaggtggaatcttgctct

SEQ ID NO: 5661121 - DNA, 25 bp, Homo sapien
tttgaggtggaatcttgctctgtca

SEQ ID NO: 5661122 - DNA, 25 bp, Homo sapien
ttttgaggtggaatcttgctctgtc

SEQ ID NO: 5661123 - DNA, 25 bp, Homo sapien
tgaggtggaatcttgctctgtcacc

SEQ ID NO: 5661124 - DNA, 25 bp, Homo sapien
ttgaggtggaatcttgctctgtcac

SEQ ID NO: 5661125 - DNA, 25 bp, Homo sapien
ttttttgaggtggaatcttgctctg

SEQ ID NO: 5661126 - DNA, 25 bp, Homo sapien
tacagctaggtataacacatttttc

SEQ ID NO: 5661127 - DNA, 25 bp, Homo sapien
ctagtacagctaggtataacacatt

SEQ ID NO: 5661128 - DNA, 25 bp, Homo sapien
atcagtcctctctattatttctccc

SEQ ID NO: 5661129 - DNA, 25 bp, Homo sapien
acattgctagggagttaaatcagtt

SEQ ID NO: 5661130 - DNA, 25 bp, Homo sapien
agctaggtataacacatttttcaca

SEQ ID NO: 5661131 - DNA, 25 bp, Homo sapien
ttctcccccattctagtacagctag

SEQ ID NO: 5661132 - DNA, 25 bp, Homo sapien
aatgtgttatacctagctgtactag

SEQ ID NO: 5661133 - DNA, 25 bp, Homo sapien
tagctgtactagaatgggggagaaa

SEQ ID NO: 5661134 - DNA, 25 bp, Homo sapien
tgtgaaaaatgtgttatacctagct

SEQ ID NO: 5661135 - DNA, 25 bp, Homo sapien
gggagaaataatagagaggactgat

SEQ ID NO: 5661136 - DNA, 25 bp, Homo sapien
gaaaaatgtgttatacctagctgta

SEQ ID NO: 5661137 - DNA, 25 bp, Homo sapien
aactgatttaactccctagcaatgt

SEQ ID NO: 5661138 - DNA, 25 bp, Homo sapien
tgggtgtcccagttagtaaaatgaa

SEQ ID NO: 5661139 - DNA, 25 bp, Homo sapien
tgagtagtggaaaggccttgtacaa

SEQ ID NO: 5661140 - DNA, 25 bp, Homo sapien
tagtggaaaggccttgtacaagtta

SEQ ID NO: 5661141 - DNA, 25 bp, Homo sapien
gtacaagttatttcagctcgcagag

SEQ ID NO: 5661142 - DNA, 25 bp, Homo sapien
gctcgcagagtcttgggtgtcccag

SEQ ID NO: 5661143 - DNA, 25 bp, Homo sapien
tatttcagctcgcagagtcttgggt

SEQ ID NO: 5661144 - DNA, 25 bp, Homo sapien
ccaagactctgcgagctgaaataac

SEQ ID NO: 5661145 - DNA, 25 bp, Homo sapien
tcattttactaactgggacacccaa

SEQ ID NO: 5661146 - DNA, 25 bp, Homo sapien
taacttgtacaaggcctttccacta

SEQ ID NO: 5661147 - DNA, 25 bp, Homo sapien
ctctgcgagctgaaataacttgtac

SEQ ID NO: 5661148 - DNA, 25 bp, Homo sapien
actgggacacccaagactctgcgag

SEQ ID NO: 5661149 - DNA, 25 bp, Homo sapien
ttgtacaaggcctttccactactca

SEQ ID NO: 5661150 - DNA, 25 bp, Homo sapien
caggcgcaagctactgcacgtggcc

SEQ ID NO: 5661151 - DNA, 25 bp, Homo sapien
agtttgctgtggtatctgtctaaca

SEQ ID NO: 5661152 - DNA, 25 bp, Homo sapien
gctgtggtatctgtctaacaaaagc

SEQ ID NO: 5661153 - DNA, 25 bp, Homo sapien
atcacaggcgcaagctactgcacgt

SEQ ID NO: 5661154 - DNA, 25 bp, Homo sapien
tattttatggtagctggcagtttgc

SEQ ID NO: 5661155 - DNA, 25 bp, Homo sapien
gcagtttgctgtggtatctgtctaa

SEQ ID NO: 5661156 - DNA, 25 bp, Homo sapien
cgtgcagtagcttgcgcctgtgatc

SEQ ID NO: 5661157 - DNA, 25 bp, Homo sapien
ggccacgtgcagtagcttgcgcctg

SEQ ID NO: 5661158 - DNA, 25 bp, Homo sapien
gcaaactgccagctaccataaaata

SEQ ID NO: 5661159 - DNA, 25 bp, Homo sapien
gcttttgttagacagataccacagc

SEQ ID NO: 5661160 - DNA, 25 bp, Homo sapien
tgttagacagataccacagcaaact

SEQ ID NO: 5661161 - DNA, 25 bp, Homo sapien
ttagacagataccacagcaaactgc

SEQ ID NO: 5661162 - DNA, 25 bp, Homo sapien
agctcatcctccaaagtatctcgga

SEQ ID NO: 5661163 - DNA, 25 bp, Homo sapien
tcatcctccaaagtatctcggacta

SEQ ID NO: 5661164 - DNA, 25 bp, Homo sapien
gctcatcctccaaagtatctcggac

SEQ ID NO: 5661165 - DNA, 25 bp, Homo sapien
cagctcatcctccaaagtatctcgg

SEQ ID NO: 5661166 - DNA, 25 bp, Homo sapien
tcctccaaagtatctcggactacag

SEQ ID NO: 5661167 - DNA, 25 bp, Homo sapien
catcctccaaagtatctcggactac

SEQ ID NO: 5661168 - DNA, 25 bp, Homo sapien
tagtccgagatactttggaggatga

SEQ ID NO: 5661169 - DNA, 25 bp, Homo sapien
gtccgagatactttggaggatgagc

SEQ ID NO: 5661170 - DNA, 25 bp, Homo sapien
ccgagatactttggaggatgagctg

SEQ ID NO: 5661171 - DNA, 25 bp, Homo sapien
tccgagatactttggaggatgagct

SEQ ID NO: 5661172 - DNA, 25 bp, Homo sapien
gtagtccgagatactttggaggatg

SEQ ID NO: 5661173 - DNA, 25 bp, Homo sapien
ctgtagtccgagatactttggagga

SEQ ID NO: 5661174 - DNA, 25 bp, Homo sapien
gataggacctggcaagtgatgaact

SEQ ID NO: 5661175 - DNA, 25 bp, Homo sapien
gtttagaatggaccacacaggatag

SEQ ID NO: 5661176 - DNA, 25 bp, Homo sapien
tagaatggaccacacaggataggac

SEQ ID NO: 5661177 - DNA, 25 bp, Homo sapien
ggagtttagaatggaccacacagga

SEQ ID NO: 5661178 - DNA, 25 bp, Homo sapien
gaatggaccacacaggataggacct

SEQ ID NO: 5661179 - DNA, 25 bp, Homo sapien
caggataggacctggcaagtgatga

SEQ ID NO: 5661180 - DNA, 25 bp, Homo sapien
cctatcctgtgtggtccattctaaa

SEQ ID NO: 5661181 - DNA, 25 bp, Homo sapien
tcctgtgtggtccattctaaactcc

SEQ ID NO: 5661182 - DNA, 25 bp, Homo sapien
aggtcctatcctgtgtggtccattc

SEQ ID NO: 5661183 - DNA, 25 bp, Homo sapien
ggtcctatcctgtgtggtccattct

SEQ ID NO: 5661184 - DNA, 25 bp, Homo sapien
agttcatcacttgccaggtcctatc

SEQ ID NO: 5661185 - DNA, 25 bp, Homo sapien
catcacttgccaggtcctatcctgt

SEQ ID NO: 5661186 - DNA, 25 bp, Homo sapien
aagtccttggtgagggtacacagct

SEQ ID NO: 5661187 - DNA, 25 bp, Homo sapien
gttaagtccttggtgagggtacaca

SEQ ID NO: 5661188 - DNA, 25 bp, Homo sapien
taagtccttggtgagggtacacagc

SEQ ID NO: 5661189 - DNA, 25 bp, Homo sapien
ttaagtccttggtgagggtacacag

SEQ ID NO: 5661190 - DNA, 25 bp, Homo sapien
gagggtacacagcttgctaaagagc

SEQ ID NO: 5661191 - DNA, 25 bp, Homo sapien
agagaggttaagtccttggtgaggg

SEQ ID NO: 5661192 - DNA, 25 bp, Homo sapien
agctgtgtaccctcaccaaggactt

SEQ ID NO: 5661193 - DNA, 25 bp, Homo sapien
ccctcaccaaggacttaacctctct

SEQ ID NO: 5661194 - DNA, 25 bp, Homo sapien
tgtgtaccctcaccaaggacttaac

SEQ ID NO: 5661195 - DNA, 25 bp, Homo sapien
ctgtgtaccctcaccaaggacttaa

SEQ ID NO: 5661196 - DNA, 25 bp, Homo sapien
gctctttagcaagctgtgtaccctc

SEQ ID NO: 5661197 - DNA, 25 bp, Homo sapien
gctgtgtaccctcaccaaggactta

SEQ ID NO: 5661198 - DNA, 25 bp, Homo sapien
cacagcgtgacactgggtaccagat

SEQ ID NO: 5661199 - DNA, 25 bp, Homo sapien
gctaatttagtcttactcattcagc

SEQ ID NO: 5661200 - DNA, 25 bp, Homo sapien
cactgggtaccagattgactgtgtc

SEQ ID NO: 5661201 - DNA, 25 bp, Homo sapien
ggtaccagattgactgtgtccctgc

SEQ ID NO: 5661202 - DNA, 25 bp, Homo sapien
gcaaacacagcgtgacactgggtac

SEQ ID NO: 5661203 - DNA, 25 bp, Homo sapien
tgtgctgaagctaatttagtcttac

SEQ ID NO: 5661204 - DNA, 25 bp, Homo sapien
gctgaatgagtaagactaaattagc

SEQ ID NO: 5661205 - DNA, 25 bp, Homo sapien
gacacagtcaatctggtacccagtg

SEQ ID NO: 5661206 - DNA, 25 bp, Homo sapien
taagactaaattagcttcagcacac

SEQ ID NO: 5661207 - DNA, 25 bp, Homo sapien
tctggtacccagtgtcacgctgtgt

SEQ ID NO: 5661208 - DNA, 25 bp, Homo sapien
tacccagtgtcacgctgtgtttgct

SEQ ID NO: 5661209 - DNA, 25 bp, Homo sapien
gcagggacacagtcaatctggtacc

SEQ ID NO: 5661210 - DNA, 25 bp, Homo sapien
tttttgttatgagatagtgatgtca

SEQ ID NO: 5661211 - DNA, 25 bp, Homo sapien
taatactctctctggcactgatatt

SEQ ID NO: 5661212 - DNA, 25 bp, Homo sapien
tgtcccacccattacatctgattgt

SEQ ID NO: 5661213 - DNA, 25 bp, Homo sapien
ggtatagcttgtcccacccattaca

SEQ ID NO: 5661214 - DNA, 25 bp, Homo sapien
gtcatccattggtatagcttgtccc

SEQ ID NO: 5661215 - DNA, 25 bp, Homo sapien
tccattggtatagcttgtcccaccc

SEQ ID NO: 5661216 - DNA, 25 bp, Homo sapien
aatatcagtgccagagagagtatta

SEQ ID NO: 5661217 - DNA, 25 bp, Homo sapien
gacaatcagatgtaatgggtgggac

SEQ ID NO: 5661218 - DNA, 25 bp, Homo sapien
gacatcactatctcataacaaaaat

SEQ ID NO: 5661219 - DNA, 25 bp, Homo sapien
taatgggtgggacaagctataccaa

SEQ ID NO: 5661220 - DNA, 25 bp, Homo sapien
cagatgtaatgggtgggacaagcta

SEQ ID NO: 5661221 - DNA, 25 bp, Homo sapien
gggacaagctataccaatggatgac

SEQ ID NO: 5661222 - DNA, 25 bp, Homo sapien
atctactgtataatccaggatctca

SEQ ID NO: 5661223 - DNA, 25 bp, Homo sapien
ctactgtataatccaggatctcagc

SEQ ID NO: 5661224 - DNA, 25 bp, Homo sapien
tctactgtataatccaggatctcag

SEQ ID NO: 5661225 - DNA, 25 bp, Homo sapien
gcaggaaataggtggcacatttaaa

SEQ ID NO: 5661226 - DNA, 25 bp, Homo sapien
agcaggaaataggtggcacatttaa

SEQ ID NO: 5661227 - DNA, 25 bp, Homo sapien
taaattaggatgatctgagagaaac

SEQ ID NO: 5661228 - DNA, 25 bp, Homo sapien
tttaaatgtgccacctatttcctgc

SEQ ID NO: 5661229 - DNA, 25 bp, Homo sapien
gctgagatcctggattatacagtag

SEQ ID NO: 5661230 - DNA, 25 bp, Homo sapien
ctgagatcctggattatacagtaga

SEQ ID NO: 5661231 - DNA, 25 bp, Homo sapien
gtttctctcagatcatcctaattta

SEQ ID NO: 5661232 - DNA, 25 bp, Homo sapien
tgagatcctggattatacagtagat

SEQ ID NO: 5661233 - DNA, 25 bp, Homo sapien
ttaaatgtgccacctatttcctgct

SEQ ID NO: 5661234 - DNA, 25 bp, Homo sapien
tgttgtaacagtaactatagctcag

SEQ ID NO: 5661235 - DNA, 25 bp, Homo sapien
cataacatggtctctcacttgtaac

SEQ ID NO: 5661236 - DNA, 25 bp, Homo sapien
catctagtcataacatggtctctca

SEQ ID NO: 5661237 - DNA, 25 bp, Homo sapien
cacttgtaaccttatgaggtggtga

SEQ ID NO: 5661238 - DNA, 25 bp, Homo sapien
cagtgcctagcatctagtcataaca

SEQ ID NO: 5661239 - DNA, 25 bp, Homo sapien
cagtaactatagctcagtgcctagc

SEQ ID NO: 5661240 - DNA, 25 bp, Homo sapien
cactgagctatagttactgttacaa

SEQ ID NO: 5661241 - DNA, 25 bp, Homo sapien
tcataaggttacaagtgagagacca

SEQ ID NO: 5661242 - DNA, 25 bp, Homo sapien
catgttatgactagatgctaggcac

SEQ ID NO: 5661243 - DNA, 25 bp, Homo sapien
gctaggcactgagctatagttactg

SEQ ID NO: 5661244 - DNA, 25 bp, Homo sapien
tacaagtgagagaccatgttatgac

SEQ ID NO: 5661245 - DNA, 25 bp, Homo sapien
tcaccacctcataaggttacaagtg

SEQ ID NO: 5661246 - DNA, 25 bp, Homo sapien
gcctcagttctagctgttcaactct

SEQ ID NO: 5661247 - DNA, 25 bp, Homo sapien
tgttcaactcttgtatgtgcttgta

SEQ ID NO: 5661248 - DNA, 25 bp, Homo sapien
ctagctgttcaactcttgtatgtgc

SEQ ID NO: 5661249 - DNA, 25 bp, Homo sapien
tctcgacttccttatctgcagattg

SEQ ID NO: 5661250 - DNA, 25 bp, Homo sapien
cgacttccttatctgcagattggga

SEQ ID NO: 5661251 - DNA, 25 bp, Homo sapien
tccttatctgcagattgggagcaac

SEQ ID NO: 5661252 - DNA, 25 bp, Homo sapien
tcccaatctgcagataaggaagtcg

SEQ ID NO: 5661253 - DNA, 25 bp, Homo sapien
gcacatacaagagttgaacagctag

SEQ ID NO: 5661254 - DNA, 25 bp, Homo sapien
agagttgaacagctagaactgaggc

SEQ ID NO: 5661255 - DNA, 25 bp, Homo sapien
tacaagcacatacaagagttgaaca

SEQ ID NO: 5661256 - DNA, 25 bp, Homo sapien
caatctgcagataaggaagtcgaga

SEQ ID NO: 5661257 - DNA, 25 bp, Homo sapien
gttgctcccaatctgcagataagga

SEQ ID NO: 5661258 - DNA, 25 bp, Homo sapien
gagactacaggccgcaccaccacgc

SEQ ID NO: 5661259 - DNA, 25 bp, Homo sapien
actacaggccgcaccaccacgcccg

SEQ ID NO: 5661260 - DNA, 25 bp, Homo sapien
tgagactacaggccgcaccaccacg

SEQ ID NO: 5661261 - DNA, 25 bp, Homo sapien
gactacaggccgcaccaccacgccc

SEQ ID NO: 5661262 - DNA, 25 bp, Homo sapien
agactacaggccgcaccaccacgcc

SEQ ID NO: 5661263 - DNA, 25 bp, Homo sapien
ctgagactacaggccgcaccaccac

SEQ ID NO: 5661264 - DNA, 25 bp, Homo sapien
gcgtggtggtgcggcctgtagtctc

SEQ ID NO: 5661265 - DNA, 25 bp, Homo sapien
cgggcgtggtggtgcggcctgtagt

SEQ ID NO: 5661266 - DNA, 25 bp, Homo sapien
gtggtggtgcggcctgtagtctcag

SEQ ID NO: 5661267 - DNA, 25 bp, Homo sapien
ggcgtggtggtgcggcctgtagtct

SEQ ID NO: 5661268 - DNA, 25 bp, Homo sapien
cgtggtggtgcggcctgtagtctca

SEQ ID NO: 5661269 - DNA, 25 bp, Homo sapien
gggcgtggtggtgcggcctgtagtc

SEQ ID NO: 5661270 - DNA, 25 bp, Homo sapien
ccgattctcactttgtcacccaggc

SEQ ID NO: 5661271 - DNA, 25 bp, Homo sapien
gcctgggtgacaaagtgagaatcgg

SEQ ID NO: 5661272 - DNA, 25 bp, Homo sapien
tcctggattcaagcgattctcctgc

SEQ ID NO: 5661273 - DNA, 25 bp, Homo sapien
aggcgcccgccagcaggcccagcta

SEQ ID NO: 5661274 - DNA, 25 bp, Homo sapien
acaggcgcccgccagcaggcccagc

SEQ ID NO: 5661275 - DNA, 25 bp, Homo sapien
caggcgcccgccagcaggcccagct

SEQ ID NO: 5661276 - DNA, 25 bp, Homo sapien
ctcagcctcccgaataggtgggatt

SEQ ID NO: 5661277 - DNA, 25 bp, Homo sapien
attagctgggcctgctggcgggcgc

SEQ ID NO: 5661278 - DNA, 25 bp, Homo sapien
aatcccacctattcgggaggctgag

SEQ ID NO: 5661279 - DNA, 25 bp, Homo sapien
tccaggaggtggaggttgcagtgag

SEQ ID NO: 5661280 - DNA, 25 bp, Homo sapien
ttagctgggcctgctggcgggcgcc

SEQ ID NO: 5661281 - DNA, 25 bp, Homo sapien
gctgggcctgctggcgggcgcctgt

SEQ ID NO: 5661282 - DNA, 25 bp, Homo sapien
gcaggagaatcgcttgaatccagga

SEQ ID NO: 5661283 - DNA, 25 bp, Homo sapien
tatgatgaagccactgcactcctgg

SEQ ID NO: 5661284 - DNA, 25 bp, Homo sapien
gtgacagagagaccccacctctttt

SEQ ID NO: 5661285 - DNA, 25 bp, Homo sapien
tgacagagagaccccacctcttttt

SEQ ID NO: 5661286 - DNA, 25 bp, Homo sapien
gacagtcttgctcttgtcgcccagt

SEQ ID NO: 5661287 - DNA, 25 bp, Homo sapien
tgatgaagccactgcactcctgggt

SEQ ID NO: 5661288 - DNA, 25 bp, Homo sapien
atgatgaagccactgcactcctggg

SEQ ID NO: 5661289 - DNA, 25 bp, Homo sapien
cccaggagtgcagtggcttcatcat

SEQ ID NO: 5661290 - DNA, 25 bp, Homo sapien
aaaagaggtggggtctctctgtcac

SEQ ID NO: 5661291 - DNA, 25 bp, Homo sapien
actgggcgacaagagcaagactgtc

SEQ ID NO: 5661292 - DNA, 25 bp, Homo sapien
agactgggcgacaagagcaagactg

SEQ ID NO: 5661293 - DNA, 25 bp, Homo sapien
ccaggagtgcagtggcttcatcata

SEQ ID NO: 5661294 - DNA, 25 bp, Homo sapien
aaaaagaggtggggtctctctgtca

SEQ ID NO: 5661295 - DNA, 25 bp, Homo sapien
agaacatactactctccgactcccc

SEQ ID NO: 5661296 - DNA, 25 bp, Homo sapien
aacatactactctccgactcccccg

SEQ ID NO: 5661297 - DNA, 25 bp, Homo sapien
gagaacatactactctccgactccc

SEQ ID NO: 5661298 - DNA, 25 bp, Homo sapien
aaaagccagccgcaatgtgcctgta

SEQ ID NO: 5661299 - DNA, 25 bp, Homo sapien
acatactactctccgactcccccgc

SEQ ID NO: 5661300 - DNA, 25 bp, Homo sapien
aagccagccgcaatgtgcctgtagt

SEQ ID NO: 5661301 - DNA, 25 bp, Homo sapien
tacaggcacattgcggctggctttt

SEQ ID NO: 5661302 - DNA, 25 bp, Homo sapien
actacaggcacattgcggctggctt

SEQ ID NO: 5661303 - DNA, 25 bp, Homo sapien
ggggagtcggagagtagtatgttct

SEQ ID NO: 5661304 - DNA, 25 bp, Homo sapien
gggagtcggagagtagtatgttctc

SEQ ID NO: 5661305 - DNA, 25 bp, Homo sapien
gcgggggagtcggagagtagtatgt

SEQ ID NO: 5661306 - DNA, 25 bp, Homo sapien
cgggggagtcggagagtagtatgtt

SEQ ID NO: 5661307 - DNA, 25 bp, Homo sapien
cagttaggtgtggtttgaatctcag

SEQ ID NO: 5661308 - DNA, 25 bp, Homo sapien
gtgacttcgtgcaagtggcttcatt

SEQ ID NO: 5661309 - DNA, 25 bp, Homo sapien
tcagctgcgtgtgacttcgtgcaag

SEQ ID NO: 5661310 - DNA, 25 bp, Homo sapien
tcctcacagttaggtgtggtttgaa

SEQ ID NO: 5661311 - DNA, 25 bp, Homo sapien
tgcgtgtgacttcgtgcaagtggct

SEQ ID NO: 5661312 - DNA, 25 bp, Homo sapien
gtttgaatctcagctgcgtgtgact

SEQ ID NO: 5661313 - DNA, 25 bp, Homo sapien
tgagattcaaaccacacctaactgt

SEQ ID NO: 5661314 - DNA, 25 bp, Homo sapien
agtcacacgcagctgagattcaaac

SEQ ID NO: 5661315 - DNA, 25 bp, Homo sapien
aatgaagccacttgcacgaagtcac

SEQ ID NO: 5661316 - DNA, 25 bp, Homo sapien
ttcaaaccacacctaactgtgagga

SEQ ID NO: 5661317 - DNA, 25 bp, Homo sapien
gcacgaagtcacacgcagctgagat

SEQ ID NO: 5661318 - DNA, 25 bp, Homo sapien
acttgcacgaagtcacacgcagctg

SEQ ID NO: 5661319 - DNA, 25 bp, Homo sapien
aagcagaggcacactgccgctggat

SEQ ID NO: 5661320 - DNA, 25 bp, Homo sapien
aatcacacagctgtcaagtggagga

SEQ ID NO: 5661321 - DNA, 25 bp, Homo sapien
cagaggcacactgccgctggatact

SEQ ID NO: 5661322 - DNA, 25 bp, Homo sapien
cacactgccgctggatactaaccag

SEQ ID NO: 5661323 - DNA, 25 bp, Homo sapien
ggcacactgccgctggatactaacc

SEQ ID NO: 5661324 - DNA, 25 bp, Homo sapien
cgctggatactaaccagccccaaat

SEQ ID NO: 5661325 - DNA, 25 bp, Homo sapien
tcctccacttgacagctgtgtgatt

SEQ ID NO: 5661326 - DNA, 25 bp, Homo sapien
tccagcggcagtgtgcctctgcttc

SEQ ID NO: 5661327 - DNA, 25 bp, Homo sapien
ggttagtatccagcggcagtgtgcc

SEQ ID NO: 5661328 - DNA, 25 bp, Homo sapien
gctggttagtatccagcggcagtgt

SEQ ID NO: 5661329 - DNA, 25 bp, Homo sapien
agtatccagcggcagtgtgcctctg

SEQ ID NO: 5661330 - DNA, 25 bp, Homo sapien
tatccagcggcagtgtgcctctgct

SEQ ID NO: 5661331 - DNA, 25 bp, Homo sapien
gaggcatcattgtaagcacttcaca

SEQ ID NO: 5661332 - DNA, 25 bp, Homo sapien
catgtactgatttcgtttaattctg

SEQ ID NO: 5661333 - DNA, 25 bp, Homo sapien
ccaccgtgctagaggcatcattgta

SEQ ID NO: 5661334 - DNA, 25 bp, Homo sapien
tgtaagcacttcacatgtactgatt

SEQ ID NO: 5661335 - DNA, 25 bp, Homo sapien
aaaactctggtctcgccaccgtgct

SEQ ID NO: 5661336 - DNA, 25 bp, Homo sapien
aaatagccaaaactctggtctcgcc

SEQ ID NO: 5661337 - DNA, 25 bp, Homo sapien
ggcgagaccagagttttggctattt

SEQ ID NO: 5661338 - DNA, 25 bp, Homo sapien
aatcagtacatgtgaagtgcttaca

SEQ ID NO: 5661339 - DNA, 25 bp, Homo sapien
catgtgaagtgcttacaatgatgcc

SEQ ID NO: 5661340 - DNA, 25 bp, Homo sapien
tcagaattaaacgaaatcagtacat

SEQ ID NO: 5661341 - DNA, 25 bp, Homo sapien
tacaatgatgcctctagcacggtgg

SEQ ID NO: 5661342 - DNA, 25 bp, Homo sapien
tagcacggtggcgagaccagagttt

SEQ ID NO: 5661343 - DNA, 25 bp, Homo sapien
gcagagttggtcgggtgcggtggct

SEQ ID NO: 5661344 - DNA, 25 bp, Homo sapien
cagagttggtcgggtgcggtggctc

SEQ ID NO: 5661345 - DNA, 25 bp, Homo sapien
agccaccgcacccgaccaactctgc

SEQ ID NO: 5661346 - DNA, 25 bp, Homo sapien
gagccaccgcacccgaccaactctg

SEQ ID NO: 5661347 - DNA, 25 bp, Homo sapien
gatcttgcatgtttctagtgatttt

SEQ ID NO: 5661348 - DNA, 25 bp, Homo sapien
agatcttgcatgtttctagtgattt

SEQ ID NO: 5661349 - DNA, 25 bp, Homo sapien
agaaacacagggtggcttaaagaat

SEQ ID NO: 5661350 - DNA, 25 bp, Homo sapien
aaaatcactagaaacatgcaagatc

SEQ ID NO: 5661351 - DNA, 25 bp, Homo sapien
aaatcactagaaacatgcaagatct

SEQ ID NO: 5661352 - DNA, 25 bp, Homo sapien
attctttaagccaccctgtgtttct

SEQ ID NO: 5661353 - DNA, 25 bp, Homo sapien
gatcttgcatgtttctagtgatttt

SEQ ID NO: 5661354 - DNA, 25 bp, Homo sapien
gggataggcttttgaagaaaacaga

SEQ ID NO: 5661355 - DNA, 25 bp, Homo sapien
tgatttttagacaagtgatttgctg

SEQ ID NO: 5661356 - DNA, 25 bp, Homo sapien
gatttgctgatatgagaaacacagg

SEQ ID NO: 5661357 - DNA, 25 bp, Homo sapien
agaaacacagggtggcttaaagaat

SEQ ID NO: 5661358 - DNA, 25 bp, Homo sapien
gaaaacagatcttgcatgtttctag

SEQ ID NO: 5661359 - DNA, 25 bp, Homo sapien
aaatcactagaaacatgcaagatct

SEQ ID NO: 5661360 - DNA, 25 bp, Homo sapien
gcaaatcacttgtctaaaaatcact

SEQ ID NO: 5661361 - DNA, 25 bp, Homo sapien
tctgttttcttcaaaagcctatccc

SEQ ID NO: 5661362 - DNA, 25 bp, Homo sapien
tctcatatcagcaaatcacttgtct

SEQ ID NO: 5661363 - DNA, 25 bp, Homo sapien
caccctgtgtttctcatatcagcaa

SEQ ID NO: 5661364 - DNA, 25 bp, Homo sapien
attctttaagccaccctgtgtttct

SEQ ID NO: 5661365 - DNA, 25 bp, Homo sapien
ttccattgctggaaaatttagggga

SEQ ID NO: 5661366 - DNA, 25 bp, Homo sapien
tccattgctggaaaatttaggggat

SEQ ID NO: 5661367 - DNA, 25 bp, Homo sapien
aatttaggggatattcaaaacatgg

SEQ ID NO: 5661368 - DNA, 25 bp, Homo sapien
ccattgctggaaaatttaggggata

SEQ ID NO: 5661369 - DNA, 25 bp, Homo sapien
tcccctaaattttccagcaatggaa

SEQ ID NO: 5661370 - DNA, 25 bp, Homo sapien
atcccctaaattttccagcaatgga

SEQ ID NO: 5661371 - DNA, 25 bp, Homo sapien
tatcccctaaattttccagcaatgg

SEQ ID NO: 5661372 - DNA, 25 bp, Homo sapien
ccatgttttgaatatcccctaaatt

SEQ ID NO: 5661373 - DNA, 25 bp, Homo sapien
tattcaaaacatggtattgttgctg

SEQ ID NO: 5661374 - DNA, 25 bp, Homo sapien
tagcttgttgctattccacatgcag

SEQ ID NO: 5661375 - DNA, 25 bp, Homo sapien
tccacatgcagcttcctgggaattg

SEQ ID NO: 5661376 - DNA, 25 bp, Homo sapien
ctgtttagtttacttagcttgttgc

SEQ ID NO: 5661377 - DNA, 25 bp, Homo sapien
catggtattgttgctgtttagttta

SEQ ID NO: 5661378 - DNA, 25 bp, Homo sapien
ccattgctggaaaatttaggggata

SEQ ID NO: 5661379 - DNA, 25 bp, Homo sapien
gctgcatgtggaatagcaacaagct

SEQ ID NO: 5661380 - DNA, 25 bp, Homo sapien
tatcccctaaattttccagcaatgg

SEQ ID NO: 5661381 - DNA, 25 bp, Homo sapien
gcaacaagctaagtaaactaaacag

SEQ ID NO: 5661382 - DNA, 25 bp, Homo sapien
taaactaaacagcaacaataccatg

SEQ ID NO: 5661383 - DNA, 25 bp, Homo sapien
ccatgttttgaatatcccctaaatt

SEQ ID NO: 5661384 - DNA, 25 bp, Homo sapien
caattcccaggaagctgcatgtgga

SEQ ID NO: 5661385 - DNA, 25 bp, Homo sapien
cagaactccattgttagttcttttt

SEQ ID NO: 5661386 - DNA, 25 bp, Homo sapien
ccagaactccattgttagttctttt

SEQ ID NO: 5661387 - DNA, 25 bp, Homo sapien
tccagaactccattgttagttcttt

SEQ ID NO: 5661388 - DNA, 25 bp, Homo sapien
ttcgaaaactggatccagaactcca

SEQ ID NO: 5661389 - DNA, 25 bp, Homo sapien
tggagttctggatccagttttcgaa

SEQ ID NO: 5661390 - DNA, 25 bp, Homo sapien
aaaaagaactaacaatggagttctg

SEQ ID NO: 5661391 - DNA, 25 bp, Homo sapien
aaaagaactaacaatggagttctgg

SEQ ID NO: 5661392 - DNA, 25 bp, Homo sapien
aaagaactaacaatggagttctgga

SEQ ID NO: 5661393 - DNA, 25 bp, Homo sapien
cagaactccattgttagttcttttt

SEQ ID NO: 5661394 - DNA, 25 bp, Homo sapien
aacagtgccacccaatcttcgaaaa

SEQ ID NO: 5661395 - DNA, 25 bp, Homo sapien
caatcttcgaaaactggatccagaa

SEQ ID NO: 5661396 - DNA, 25 bp, Homo sapien
ccagaactccattgttagttctttt

SEQ ID NO: 5661397 - DNA, 25 bp, Homo sapien
gattctcattacaacagtgccaccc

SEQ ID NO: 5661398 - DNA, 25 bp, Homo sapien
tccagaactccattgttagttcttt

SEQ ID NO: 5661399 - DNA, 25 bp, Homo sapien
aaaaagaactaacaatggagttctg

SEQ ID NO: 5661400 - DNA, 25 bp, Homo sapien
aaaagaactaacaatggagttctgg

SEQ ID NO: 5661401 - DNA, 25 bp, Homo sapien
cagttttcgaagattgggtggcact

SEQ ID NO: 5661402 - DNA, 25 bp, Homo sapien
tctggatccagttttcgaagattgg

SEQ ID NO: 5661403 - DNA, 25 bp, Homo sapien
aaagaactaacaatggagttctgga

SEQ ID NO: 5661404 - DNA, 25 bp, Homo sapien
ggtggcactgttgtaatgagaatct

SEQ ID NO: 5661405 - DNA, 25 bp, Homo sapien
caagggagatctgtttgatctccct

SEQ ID NO: 5661406 - DNA, 25 bp, Homo sapien
ttcaagggagatctgtttgatctcc

SEQ ID NO: 5661407 - DNA, 25 bp, Homo sapien
aagggagatctgtttgatctccctt

SEQ ID NO: 5661408 - DNA, 25 bp, Homo sapien
tcaagggagatctgtttgatctccc

SEQ ID NO: 5661409 - DNA, 25 bp, Homo sapien
agggagatctgtttgatctcccttc

SEQ ID NO: 5661410 - DNA, 25 bp, Homo sapien
agggagatcaaacagatctcccttg

SEQ ID NO: 5661411 - DNA, 25 bp, Homo sapien
gaagggagatcaaacagatctccct

SEQ ID NO: 5661412 - DNA, 25 bp, Homo sapien
ggagatcaaacagatctcccttgaa

SEQ ID NO: 5661413 - DNA, 25 bp, Homo sapien
aagggagatcaaacagatctccctt

SEQ ID NO: 5661414 - DNA, 25 bp, Homo sapien
gggagatcaaacagatctcccttga

SEQ ID NO: 5661415 - DNA, 25 bp, Homo sapien
gatctcccttctaaagctctgtatt

SEQ ID NO: 5661416 - DNA, 25 bp, Homo sapien
tctgtattctaaattctcattctgg

SEQ ID NO: 5661417 - DNA, 25 bp, Homo sapien
aattctcattctggactttgtgctg

SEQ ID NO: 5661418 - DNA, 25 bp, Homo sapien
gatctgtttgatctcccttctaaag

SEQ ID NO: 5661419 - DNA, 25 bp, Homo sapien
ttcaagggagatctgtttgatctcc

SEQ ID NO: 5661420 - DNA, 25 bp, Homo sapien
tctggactttgtgctgttttaaaaa

SEQ ID NO: 5661421 - DNA, 25 bp, Homo sapien
ctttagaagggagatcaaacagatc

SEQ ID NO: 5661422 - DNA, 25 bp, Homo sapien
ggagatcaaacagatctcccttgaa

SEQ ID NO: 5661423 - DNA, 25 bp, Homo sapien
cagcacaaagtccagaatgagaatt

SEQ ID NO: 5661424 - DNA, 25 bp, Homo sapien
aatacagagctttagaagggagatc

SEQ ID NO: 5661425 - DNA, 25 bp, Homo sapien
tttttaaaacagcacaaagtccaga

SEQ ID NO: 5661426 - DNA, 25 bp, Homo sapien
gaatgagaatttagaatacagagct

SEQ ID NO: 5661427 - DNA, 25 bp, Homo sapien
agaagcctgaggtggggccgggtgc

SEQ ID NO: 5661428 - DNA, 25 bp, Homo sapien
cagaagcctgaggtggggccgggtg

SEQ ID NO: 5661429 - DNA, 25 bp, Homo sapien
tcagaagcctgaggtggggccgggt

SEQ ID NO: 5661430 - DNA, 25 bp, Homo sapien
aagcctgaggtggggccgggtgcag

SEQ ID NO: 5661431 - DNA, 25 bp, Homo sapien
gaagcctgaggtggggccgggtgca

SEQ ID NO: 5661432 - DNA, 25 bp, Homo sapien
ctcagaagcctgaggtggggccggg

SEQ ID NO: 5661433 - DNA, 25 bp, Homo sapien
cacccggccccacctcaggcttctg

SEQ ID NO: 5661434 - DNA, 25 bp, Homo sapien
cccggccccacctcaggcttctgag

SEQ ID NO: 5661435 - DNA, 25 bp, Homo sapien
tgcacccggccccacctcaggcttc

SEQ ID NO: 5661436 - DNA, 25 bp, Homo sapien
ctgcacccggccccacctcaggctt

SEQ ID NO: 5661437 - DNA, 25 bp, Homo sapien
acccggccccacctcaggcttctga

SEQ ID NO: 5661438 - DNA, 25 bp, Homo sapien
gcacccggccccacctcaggcttct

SEQ ID NO: 5661439 - DNA, 25 bp, Homo sapien
tgattgttaaaacaagggggtgcta

SEQ ID NO: 5661440 - DNA, 25 bp, Homo sapien
tagcacccccttgttttaacaatca

SEQ ID NO: 5661441 - DNA, 25 bp, Homo sapien
catcaaaaaagggtagaagccaggt

SEQ ID NO: 5661442 - DNA, 25 bp, Homo sapien
ggtgctactggcatcaaaaaagggt

SEQ ID NO: 5661443 - DNA, 25 bp, Homo sapien
gctactggcatcaaaaaagggtaga

SEQ ID NO: 5661444 - DNA, 25 bp, Homo sapien
caaaaaagggtagaagccaggtgtg

SEQ ID NO: 5661445 - DNA, 25 bp, Homo sapien
ctggcatcaaaaaagggtagaagcc

SEQ ID NO: 5661446 - DNA, 25 bp, Homo sapien
tgattgttaaaacaagggggtgcta

SEQ ID NO: 5661447 - DNA, 25 bp, Homo sapien
acctggcttctacccttttttgatg

SEQ ID NO: 5661448 - DNA, 25 bp, Homo sapien
tagcacccccttgttttaacaatca

SEQ ID NO: 5661449 - DNA, 25 bp, Homo sapien
cacacctggcttctacccttttttg

SEQ ID NO: 5661450 - DNA, 25 bp, Homo sapien
acccttttttgatgccagtagcacc

SEQ ID NO: 5661451 - DNA, 25 bp, Homo sapien
tctacccttttttgatgccagtagc

SEQ ID NO: 5661452 - DNA, 25 bp, Homo sapien
ggcttctacccttttttgatgccag

SEQ ID NO: 5661453 - DNA, 25 bp, Homo sapien
ttactgtacggccatgtttctcaac

SEQ ID NO: 5661454 - DNA, 25 bp, Homo sapien
tctgaaagaatgtatagcaggttac

SEQ ID NO: 5661455 - DNA, 25 bp, Homo sapien
taatgagtgataagggacaaacgct

SEQ ID NO: 5661456 - DNA, 25 bp, Homo sapien
tgagtgataagggacaaacgctgga

SEQ ID NO: 5661457 - DNA, 25 bp, Homo sapien
ataagggacaaacgctggagtgtgt

SEQ ID NO: 5661458 - DNA, 25 bp, Homo sapien
gcaggttactgtacggccatgtttc

SEQ ID NO: 5661459 - DNA, 25 bp, Homo sapien
tccagcgtttgtcccttatcactca

SEQ ID NO: 5661460 - DNA, 25 bp, Homo sapien
acacactccagcgtttgtcccttat

SEQ ID NO: 5661461 - DNA, 25 bp, Homo sapien
gaaacatggccgtacagtaacctgc

SEQ ID NO: 5661462 - DNA, 25 bp, Homo sapien
gcgtttgtcccttatcactcattaa

SEQ ID NO: 5661463 - DNA, 25 bp, Homo sapien
gttgagaaacatggccgtacagtaa

SEQ ID NO: 5661464 - DNA, 25 bp, Homo sapien
gtaacctgctatacattctttcaga

SEQ ID NO: 5661465 - DNA, 25 bp, Homo sapien
caccatgccaggctaatttttctat

SEQ ID NO: 5661466 - DNA, 25 bp, Homo sapien
accatgttagctagtctggtctcaa

SEQ ID NO: 5661467 - DNA, 25 bp, Homo sapien
catgttagctagtctggtctcaaac

SEQ ID NO: 5661468 - DNA, 25 bp, Homo sapien
ttagtagagacggggtttcaccatg

SEQ ID NO: 5661469 - DNA, 25 bp, Homo sapien
ccatgccaggctaatttttctattt

SEQ ID NO: 5661470 - DNA, 25 bp, Homo sapien
ccaccatgccaggctaatttttcta

SEQ ID NO: 5661471 - DNA, 25 bp, Homo sapien
aaatagaaaaattagcctggcatgg

SEQ ID NO: 5661472 - DNA, 25 bp, Homo sapien
atagaaaaattagcctggcatggtg

SEQ ID NO: 5661473 - DNA, 25 bp, Homo sapien
catggtgaaaccccgtctctactaa

SEQ ID NO: 5661474 - DNA, 25 bp, Homo sapien
ttgagaccagactagctaacatggt

SEQ ID NO: 5661475 - DNA, 25 bp, Homo sapien
gtttgagaccagactagctaacatg

SEQ ID NO: 5661476 - DNA, 25 bp, Homo sapien
tagaaaaattagcctggcatggtgg

SEQ ID NO: 5661477 - DNA, 25 bp, Homo sapien
ttttgtttttgagacggatctcact

SEQ ID NO: 5661478 - DNA, 25 bp, Homo sapien
tttgtttttgagacggatctcactc

SEQ ID NO: 5661479 - DNA, 25 bp, Homo sapien
agtgagatccgtctcaaaaacaaaa

SEQ ID NO: 5661480 - DNA, 25 bp, Homo sapien
gagtgagatccgtctcaaaaacaaa

SEQ ID NO: 5661481 - DNA, 25 bp, Homo sapien
actgtgcccagcccttacggatctt

SEQ ID NO: 5661482 - DNA, 25 bp, Homo sapien
gctcaagcaatctgcccacctcagc

SEQ ID NO: 5661483 - DNA, 25 bp, Homo sapien
gagctcaagcaatctgcccacctca

SEQ ID NO: 5661484 - DNA, 25 bp, Homo sapien
agctcaagcaatctgcccacctcag

SEQ ID NO: 5661485 - DNA, 25 bp, Homo sapien
aagcaatctgcccacctcagcctcc

SEQ ID NO: 5661486 - DNA, 25 bp, Homo sapien
ccactgtgcccagcccttacggatc

SEQ ID NO: 5661487 - DNA, 25 bp, Homo sapien
ctgaggtgggcagattgcttgagct

SEQ ID NO: 5661488 - DNA, 25 bp, Homo sapien
aagatccgtaagggctgggcacagt

SEQ ID NO: 5661489 - DNA, 25 bp, Homo sapien
gatccgtaagggctgggcacagtgg

SEQ ID NO: 5661490 - DNA, 25 bp, Homo sapien
gctgaggtgggcagattgcttgagc

SEQ ID NO: 5661491 - DNA, 25 bp, Homo sapien
tgaggtgggcagattgcttgagctc

SEQ ID NO: 5661492 - DNA, 25 bp, Homo sapien
agatccgtaagggctgggcacagtg

SEQ ID NO: 5661493 - DNA, 25 bp, Homo sapien
tcagttgtctattatccaaagccaa

SEQ ID NO: 5661494 - DNA, 25 bp, Homo sapien
ttcagttgtctattatccaaagcca

SEQ ID NO: 5661495 - DNA, 25 bp, Homo sapien
gttgtctattatccaaagccaagcc

SEQ ID NO: 5661496 - DNA, 25 bp, Homo sapien
agttgtctattatccaaagccaagc

SEQ ID NO: 5661497 - DNA, 25 bp, Homo sapien
cagttgtctattatccaaagccaag

SEQ ID NO: 5661498 - DNA, 25 bp, Homo sapien
ttgtctattatccaaagccaagcct

SEQ ID NO: 5661499 - DNA, 25 bp, Homo sapien
cttggctttggataatagacaactg

SEQ ID NO: 5661500 - DNA, 25 bp, Homo sapien
ttggctttggataatagacaactga

SEQ ID NO: 5661501 - DNA, 25 bp, Homo sapien
ggcttggctttggataatagacaac

SEQ ID NO: 5661502 - DNA, 25 bp, Homo sapien
tggctttggataatagacaactgaa

SEQ ID NO: 5661503 - DNA, 25 bp, Homo sapien
aggcttggctttggataatagacaa

SEQ ID NO: 5661504 - DNA, 25 bp, Homo sapien
gcttggctttggataatagacaact

SEQ ID NO: 5661505 - DNA, 25 bp, Homo sapien
ggttaagaatggtgttaacagagcc

SEQ ID NO: 5661506 - DNA, 25 bp, Homo sapien
tgttaacagagcctgaaatccacaa

SEQ ID NO: 5661507 - DNA, 25 bp, Homo sapien
ctgttggtaaggttaagaatggtgt

SEQ ID NO: 5661508 - DNA, 25 bp, Homo sapien
ttaagaatggtgttaacagagcctg

SEQ ID NO: 5661509 - DNA, 25 bp, Homo sapien
gttaagaatggtgttaacagagcct

SEQ ID NO: 5661510 - DNA, 25 bp, Homo sapien
actgttggtaaggttaagaatggtg

SEQ ID NO: 5661511 - DNA, 25 bp, Homo sapien
aggctctgttaacaccattcttaac

SEQ ID NO: 5661512 - DNA, 25 bp, Homo sapien
acaccattcttaaccttaccaacag

SEQ ID NO: 5661513 - DNA, 25 bp, Homo sapien
ggctctgttaacaccattcttaacc

SEQ ID NO: 5661514 - DNA, 25 bp, Homo sapien
ttgtggatttcaggctctgttaaca

SEQ ID NO: 5661515 - DNA, 25 bp, Homo sapien
caggctctgttaacaccattcttaa

SEQ ID NO: 5661516 - DNA, 25 bp, Homo sapien
caccattcttaaccttaccaacagt

SEQ ID NO: 5661517 - DNA, 25 bp, Homo sapien
gaagaggaatcaggacctggctccc

SEQ ID NO: 5661518 - DNA, 25 bp, Homo sapien
tgaagaggaatcaggacctggctcc

SEQ ID NO: 5661519 - DNA, 25 bp, Homo sapien
ctgaagaggaatcaggacctggctc

SEQ ID NO: 5661520 - DNA, 25 bp, Homo sapien
gagccaggtcctgattcctcttcag

SEQ ID NO: 5661521 - DNA, 25 bp, Homo sapien
ggagccaggtcctgattcctcttca

SEQ ID NO: 5661522 - DNA, 25 bp, Homo sapien
gggagccaggtcctgattcctcttc

SEQ ID NO: 5661523 - DNA, 25 bp, Homo sapien
gaagaggaatcaggacctggctccc

SEQ ID NO: 5661524 - DNA, 25 bp, Homo sapien
tcttccagaaatgtctctaaagcag

SEQ ID NO: 5661525 - DNA, 25 bp, Homo sapien
gctgaacaggtatgttcttttggct

SEQ ID NO: 5661526 - DNA, 25 bp, Homo sapien
ggtatgttcttttggctgtcttcca

SEQ ID NO: 5661527 - DNA, 25 bp, Homo sapien
tggctgtcttccagaaatgtctcta

SEQ ID NO: 5661528 - DNA, 25 bp, Homo sapien
tccagaaatgtctctaaagcagtta

SEQ ID NO: 5661529 - DNA, 25 bp, Homo sapien
taactgctttagagacatttctgga

SEQ ID NO: 5661530 - DNA, 25 bp, Homo sapien
gagccaggtcctgattcctcttcag

SEQ ID NO: 5661531 - DNA, 25 bp, Homo sapien
ggaagacagccaaaagaacatacct

SEQ ID NO: 5661532 - DNA, 25 bp, Homo sapien
tgctttagagacatttctggaagac

SEQ ID NO: 5661533 - DNA, 25 bp, Homo sapien
ccaaaagaacatacctgttcagcag

SEQ ID NO: 5661534 - DNA, 25 bp, Homo sapien
tagagacatttctggaagacagcca

SEQ ID NO: 5661535 - DNA, 25 bp, Homo sapien
gctaattgaacaaattaagcagtaa

SEQ ID NO: 5661536 - DNA, 25 bp, Homo sapien
gcccagctaattgaacaaattaagc

SEQ ID NO: 5661537 - DNA, 25 bp, Homo sapien
ccagctaattgaacaaattaagcag

SEQ ID NO: 5661538 - DNA, 25 bp, Homo sapien
acgcccagctatcacctcagcctcc

SEQ ID NO: 5661539 - DNA, 25 bp, Homo sapien
cacgcccagctaattgaacaaatta

SEQ ID NO: 5661540 - DNA, 25 bp, Homo sapien
cgcccagctaattgaacaaattaag

SEQ ID NO: 5661541 - DNA, 25 bp, Homo sapien
tgcttaatttgttcaattagctggg

SEQ ID NO: 5661542 - DNA, 25 bp, Homo sapien
taatttgttcaattagctgggcgtg

SEQ ID NO: 5661543 - DNA, 25 bp, Homo sapien
ttactgcttaatttgttcaattagc

SEQ ID NO: 5661544 - DNA, 25 bp, Homo sapien
ggaggctgaggtgatagctgggcgt

SEQ ID NO: 5661545 - DNA, 25 bp, Homo sapien
cttaatttgttcaattagctgggcg

SEQ ID NO: 5661546 - DNA, 25 bp, Homo sapien
ggctgaggtgatagctgggcgtggt

SEQ ID NO: 5661547 - DNA, 25 bp, Homo sapien
actgtgcctggcctttgaataaatt

SEQ ID NO: 5661548 - DNA, 25 bp, Homo sapien
aggtgtgcgtgacccactgtgcctg

SEQ ID NO: 5661549 - DNA, 25 bp, Homo sapien
tgtgcctggcctttgaataaatttt

SEQ ID NO: 5661550 - DNA, 25 bp, Homo sapien
gattacaggtgtgcgtgacccactg

SEQ ID NO: 5661551 - DNA, 25 bp, Homo sapien
tacaggtgtgcgtgacccactgtgc

SEQ ID NO: 5661552 - DNA, 25 bp, Homo sapien
tgtgcgtgacccactgtgcctggcc

SEQ ID NO: 5661553 - DNA, 25 bp, Homo sapien
aggcacagtgggtcacgcacacctg

SEQ ID NO: 5661554 - DNA, 25 bp, Homo sapien
cagtgggtcacgcacacctgtaatc

SEQ ID NO: 5661555 - DNA, 25 bp, Homo sapien
aatttattcaaaggccaggcacagt

SEQ ID NO: 5661556 - DNA, 25 bp, Homo sapien
ggccaggcacagtgggtcacgcaca

SEQ ID NO: 5661557 - DNA, 25 bp, Homo sapien
cacagtgggtcacgcacacctgtaa

SEQ ID NO: 5661558 - DNA, 25 bp, Homo sapien
aaaatttattcaaaggccaggcaca

SEQ ID NO: 5661559 - DNA, 25 bp, Homo sapien
tctgaacaagtaattgtatttatgg

SEQ ID NO: 5661560 - DNA, 25 bp, Homo sapien
tggtatatctgttactataaagata

SEQ ID NO: 5661561 - DNA, 25 bp, Homo sapien
tgtatttatggtatatctgttacta

SEQ ID NO: 5661562 - DNA, 25 bp, Homo sapien
agatagtgatagcttaaattatggc

SEQ ID NO: 5661563 - DNA, 25 bp, Homo sapien
gatagcttaaattatggctattcca

SEQ ID NO: 5661564 - DNA, 25 bp, Homo sapien
caagtaattgtatttatggtatatc

SEQ ID NO: 5661565 - DNA, 25 bp, Homo sapien
gccataatttaagctatcactatct

SEQ ID NO: 5661566 - DNA, 25 bp, Homo sapien
ccataaatacaattacttgttcaga

SEQ ID NO: 5661567 - DNA, 25 bp, Homo sapien
tagtaacagatataccataaataca

SEQ ID NO: 5661568 - DNA, 25 bp, Homo sapien
gatataccataaatacaattacttg

SEQ ID NO: 5661569 - DNA, 25 bp, Homo sapien
tggaatagccataatttaagctatc

SEQ ID NO: 5661570 - DNA, 25 bp, Homo sapien
tatctttatagtaacagatatacca

SEQ ID NO: 5661571 - DNA, 25 bp, Homo sapien
aagtgatttgtgaaaagatttgggg

SEQ ID NO: 5661572 - DNA, 25 bp, Homo sapien
ccccaaatcttttcacaaatcactt

SEQ ID NO: 5661573 - DNA, 25 bp, Homo sapien
atggttgaaatagggagggaaagtg

SEQ ID NO: 5661574 - DNA, 25 bp, Homo sapien
agatggttgaaatagggagggaaag

SEQ ID NO: 5661575 - DNA, 25 bp, Homo sapien
gaaagtgatttgtgaaaagatttgg

SEQ ID NO: 5661576 - DNA, 25 bp, Homo sapien
aagtgatttgtgaaaagatttgggg

SEQ ID NO: 5661577 - DNA, 25 bp, Homo sapien
gagggaaagtgatttgtgaaaagat

SEQ ID NO: 5661578 - DNA, 25 bp, Homo sapien
aaagtgatttgtgaaaagatttggg

SEQ ID NO: 5661579 - DNA, 25 bp, Homo sapien
cactttccctccctatttcaaccat

SEQ ID NO: 5661580 - DNA, 25 bp, Homo sapien
aatcttttcacaaatcactttccct

SEQ ID NO: 5661581 - DNA, 25 bp, Homo sapien
ccaaatcttttcacaaatcactttc

SEQ ID NO: 5661582 - DNA, 25 bp, Homo sapien
atcttttcacaaatcactttccctc

SEQ ID NO: 5661583 - DNA, 25 bp, Homo sapien
ccccaaatcttttcacaaatcactt

SEQ ID NO: 5661584 - DNA, 25 bp, Homo sapien
caaatcttttcacaaatcactttcc

SEQ ID NO: 5661585 - DNA, 25 bp, Homo sapien
agacacagtgcctcacgcctgtaat

SEQ ID NO: 5661586 - DNA, 25 bp, Homo sapien
ggcagatggattacctgaaggtcag

SEQ ID NO: 5661587 - DNA, 25 bp, Homo sapien
gcagacacagtgcctcacgcctgta

SEQ ID NO: 5661588 - DNA, 25 bp, Homo sapien
ggcagacacagtgcctcacgcctgt

SEQ ID NO: 5661589 - DNA, 25 bp, Homo sapien
cagacacagtgcctcacgcctgtaa

SEQ ID NO: 5661590 - DNA, 25 bp, Homo sapien
gacacagtgcctcacgcctgtaatc

SEQ ID NO: 5661591 - DNA, 25 bp, Homo sapien
tacaggcgtgaggcactgtgtctgc

SEQ ID NO: 5661592 - DNA, 25 bp, Homo sapien
acaggcgtgaggcactgtgtctgcc

SEQ ID NO: 5661593 - DNA, 25 bp, Homo sapien
ttacaggcgtgaggcactgtgtctg

SEQ ID NO: 5661594 - DNA, 25 bp, Homo sapien
ctgaccttcaggtaatccatctgcc

SEQ ID NO: 5661595 - DNA, 25 bp, Homo sapien
attacaggcgtgaggcactgtgtct

SEQ ID NO: 5661596 - DNA, 25 bp, Homo sapien
gattacaggcgtgaggcactgtgtc

SEQ ID NO: 5661597 - DNA, 25 bp, Homo sapien
ttcctgcactcctgttaaatgaatt

SEQ ID NO: 5661598 - DNA, 25 bp, Homo sapien
ttttcctgcactcctgttaaatgaa

SEQ ID NO: 5661599 - DNA, 25 bp, Homo sapien
tgaatttggccccactatgctaaga

SEQ ID NO: 5661600 - DNA, 25 bp, Homo sapien
gaatttggccccactatgctaagaa

SEQ ID NO: 5661601 - DNA, 25 bp, Homo sapien
tttggccccactatgctaagaatga

SEQ ID NO: 5661602 - DNA, 25 bp, Homo sapien
tcttttcctgcactcctgttaaatg

SEQ ID NO: 5661603 - DNA, 25 bp, Homo sapien
tcatttaacaggagtgcaggaaaag

SEQ ID NO: 5661604 - DNA, 25 bp, Homo sapien
catttaacaggagtgcaggaaaaga

SEQ ID NO: 5661605 - DNA, 25 bp, Homo sapien
tcattcttagcatagtggggccaaa

SEQ ID NO: 5661606 - DNA, 25 bp, Homo sapien
aattcatttaacaggagtgcaggaa

SEQ ID NO: 5661607 - DNA, 25 bp, Homo sapien
ttcatttaacaggagtgcaggaaaa

SEQ ID NO: 5661608 - DNA, 25 bp, Homo sapien
tcttagcatagtggggccaaattca

SEQ ID NO: 5661609 - DNA, 25 bp, Homo sapien
gcttgtcatctaaataggagtttta

SEQ ID NO: 5661610 - DNA, 25 bp, Homo sapien
ttctgcttgtcatctaaataggagt

SEQ ID NO: 5661611 - DNA, 25 bp, Homo sapien
cttggttgttagtttctgcttgtca

SEQ ID NO: 5661612 - DNA, 25 bp, Homo sapien
tctgcacttggttgttagtttctgc

SEQ ID NO: 5661613 - DNA, 25 bp, Homo sapien
gtaccagcttttagcatctctgcac

SEQ ID NO: 5661614 - DNA, 25 bp, Homo sapien
tagcatctctgcacttggttgttag

SEQ ID NO: 5661615 - DNA, 25 bp, Homo sapien
taaaactcctatttagatgacaagc

SEQ ID NO: 5661616 - DNA, 25 bp, Homo sapien
actcctatttagatgacaagcagaa

SEQ ID NO: 5661617 - DNA, 25 bp, Homo sapien
gcagaaactaacaaccaagtgcaga

SEQ ID NO: 5661618 - DNA, 25 bp, Homo sapien
ctaacaaccaagtgcagagatgcta

SEQ ID NO: 5661619 - DNA, 25 bp, Homo sapien
gtgcagagatgctaaaagctggtac

SEQ ID NO: 5661620 - DNA, 25 bp, Homo sapien
gatgacaagcagaaactaacaacca

SEQ ID NO: 5661621 - DNA, 25 bp, Homo sapien
aggttccgagggatgaaagtagcca

SEQ ID NO: 5661622 - DNA, 25 bp, Homo sapien
gatgaaagtagccaacctaagatga

SEQ ID NO: 5661623 - DNA, 25 bp, Homo sapien
tctcttgcctaccgttgggaggttc

SEQ ID NO: 5661624 - DNA, 25 bp, Homo sapien
gagggatgaaagtagccaacctaag

SEQ ID NO: 5661625 - DNA, 25 bp, Homo sapien
ttccgagggatgaaagtagccaacc

SEQ ID NO: 5661626 - DNA, 25 bp, Homo sapien
ccgagggatgaaagtagccaaccta

SEQ ID NO: 5661627 - DNA, 25 bp, Homo sapien
gaacctcccaacggtaggcaagaga

SEQ ID NO: 5661628 - DNA, 25 bp, Homo sapien
ggttggctactttcatccctcggaa

SEQ ID NO: 5661629 - DNA, 25 bp, Homo sapien
tggctactttcatccctcggaacct

SEQ ID NO: 5661630 - DNA, 25 bp, Homo sapien
taggttggctactttcatccctcgg

SEQ ID NO: 5661631 - DNA, 25 bp, Homo sapien
tcatcttaggttggctactttcatc

SEQ ID NO: 5661632 - DNA, 25 bp, Homo sapien
cacttacacttgtccccattccaaa

SEQ ID NO: 5661633 - DNA, 25 bp, Homo sapien
gaaatgagcaatctttagcctccga

SEQ ID NO: 5661634 - DNA, 25 bp, Homo sapien
ttagcctccgaagtattaggattcg

SEQ ID NO: 5661635 - DNA, 25 bp, Homo sapien
tcgtgtggcccaggattatgggtta

SEQ ID NO: 5661636 - DNA, 25 bp, Homo sapien
tatgggttattaagtgtagggctca

SEQ ID NO: 5661637 - DNA, 25 bp, Homo sapien
taaatgtgtaccttagtgaagaaat

SEQ ID NO: 5661638 - DNA, 25 bp, Homo sapien
tattaggattcgtgtggcccaggat

SEQ ID NO: 5661639 - DNA, 25 bp, Homo sapien
tgagccctacacttaataacccata

SEQ ID NO: 5661640 - DNA, 25 bp, Homo sapien
catttcttcactaaggtacacattt

SEQ ID NO: 5661641 - DNA, 25 bp, Homo sapien
cgaatcctaatacttcggaggctaa

SEQ ID NO: 5661642 - DNA, 25 bp, Homo sapien
aatcctgggccacacgaatcctaat

SEQ ID NO: 5661643 - DNA, 25 bp, Homo sapien
taacccataatcctgggccacacga

SEQ ID NO: 5661644 - DNA, 25 bp, Homo sapien
tacttcggaggctaaagattgctca

SEQ ID NO: 5661645 - DNA, 25 bp, Homo sapien
gagagatggaggccggtagaggcgg

SEQ ID NO: 5661646 - DNA, 25 bp, Homo sapien
gggagagatggaggccggtagaggc

SEQ ID NO: 5661647 - DNA, 25 bp, Homo sapien
ggagagatggaggccggtagaggcg

SEQ ID NO: 5661648 - DNA, 25 bp, Homo sapien
ccgcctctaccggcctccatctctc

SEQ ID NO: 5661649 - DNA, 25 bp, Homo sapien
gcctctaccggcctccatctctccc

SEQ ID NO: 5661650 - DNA, 25 bp, Homo sapien
cgcctctaccggcctccatctctcc

SEQ ID NO: 5661651 - DNA, 25 bp, Homo sapien
gagagatggaggccggtagaggcgg

SEQ ID NO: 5661652 - DNA, 25 bp, Homo sapien
gggagagatggaggccggtagaggc

SEQ ID NO: 5661653 - DNA, 25 bp, Homo sapien
gatggaggccggtagaggcggggaa

SEQ ID NO: 5661654 - DNA, 25 bp, Homo sapien
agatggaggccggtagaggcgggga

SEQ ID NO: 5661655 - DNA, 25 bp, Homo sapien
ggagagatggaggccggtagaggcg

SEQ ID NO: 5661656 - DNA, 25 bp, Homo sapien
agagatggaggccggtagaggcggg

SEQ ID NO: 5661657 - DNA, 25 bp, Homo sapien
ttccccgcctctaccggcctccatc

SEQ ID NO: 5661658 - DNA, 25 bp, Homo sapien
ccgcctctaccggcctccatctctc

SEQ ID NO: 5661659 - DNA, 25 bp, Homo sapien
gcctctaccggcctccatctctccc

SEQ ID NO: 5661660 - DNA, 25 bp, Homo sapien
cgcctctaccggcctccatctctcc

SEQ ID NO: 5661661 - DNA, 25 bp, Homo sapien
tccccgcctctaccggcctccatct

SEQ ID NO: 5661662 - DNA, 25 bp, Homo sapien
cccgcctctaccggcctccatctct

SEQ ID NO: 5661663 - DNA, 25 bp, Homo sapien
tcgggggaggcgtgtgtcttttgcg

SEQ ID NO: 5661664 - DNA, 25 bp, Homo sapien
catgggtcggaggtcggatttgggc

SEQ ID NO: 5661665 - DNA, 25 bp, Homo sapien
gaggtcggatttgggcgcaggacgg

SEQ ID NO: 5661666 - DNA, 25 bp, Homo sapien
cgtgtgtcttttgcggggttcgcgg

SEQ ID NO: 5661667 - DNA, 25 bp, Homo sapien
cggaggtcggatttgggcgcaggac

SEQ ID NO: 5661668 - DNA, 25 bp, Homo sapien
ggtcggaggtcggatttgggcgcag

SEQ ID NO: 5661669 - DNA, 25 bp, Homo sapien
ccgcgaaccccgcaaaagacacacg

SEQ ID NO: 5661670 - DNA, 25 bp, Homo sapien
gtcctgcgcccaaatccgacctccg

SEQ ID NO: 5661671 - DNA, 25 bp, Homo sapien
gcccaaatccgacctccgacccatg

SEQ ID NO: 5661672 - DNA, 25 bp, Homo sapien
gaaccccgcaaaagacacacgcctc

SEQ ID NO: 5661673 - DNA, 25 bp, Homo sapien
ccgtcctgcgcccaaatccgacctc

SEQ ID NO: 5661674 - DNA, 25 bp, Homo sapien
aatccgacctccgacccatgcccct

SEQ ID NO: 5661675 - DNA, 25 bp, Homo sapien
tcgggggaggcgtgtgtcttttgcg

SEQ ID NO: 5661676 - DNA, 25 bp, Homo sapien
catgggtcggaggtcggatttgggc

SEQ ID NO: 5661677 - DNA, 25 bp, Homo sapien
tcggaggtcggatttgggcgcagga

SEQ ID NO: 5661678 - DNA, 25 bp, Homo sapien
cgtgtgtcttttgcggggttcgcgg

SEQ ID NO: 5661679 - DNA, 25 bp, Homo sapien
gaggtcggatttgggcgcaggacgg

SEQ ID NO: 5661680 - DNA, 25 bp, Homo sapien
ctgatttgcgggaggggcatgggtc

SEQ ID NO: 5661681 - DNA, 25 bp, Homo sapien
ccgactccccgtcctgcgcccaaat

SEQ ID NO: 5661682 - DNA, 25 bp, Homo sapien
ccgcgaaccccgcaaaagacacacg

SEQ ID NO: 5661683 - DNA, 25 bp, Homo sapien
gtcctgcgcccaaatccgacctccg

SEQ ID NO: 5661684 - DNA, 25 bp, Homo sapien
acccatgcccctcccgcaaatcagg

SEQ ID NO: 5661685 - DNA, 25 bp, Homo sapien
gcccaaatccgacctccgacccatg

SEQ ID NO: 5661686 - DNA, 25 bp, Homo sapien
gaaccccgcaaaagacacacgcctc

SEQ ID NO: 5661687 - DNA, 25 bp, Homo sapien
attcggtttggaggaagggtgtgcg

SEQ ID NO: 5661688 - DNA, 25 bp, Homo sapien
tctggtcgagggttggatttgcggg

SEQ ID NO: 5661689 - DNA, 25 bp, Homo sapien
gagaggcttctggtcgagggttgga

SEQ ID NO: 5661690 - DNA, 25 bp, Homo sapien
gcgcagactgggaattcggtttgga

SEQ ID NO: 5661691 - DNA, 25 bp, Homo sapien
gcttctggtcgagggttggatttgc

SEQ ID NO: 5661692 - DNA, 25 bp, Homo sapien
tggaggaagggtgtgcggtcgggtc

SEQ ID NO: 5661693 - DNA, 25 bp, Homo sapien
cgcacacccttcctccaaaccgaat

SEQ ID NO: 5661694 - DNA, 25 bp, Homo sapien
gtctgcgccccgcaaatccaaccct

SEQ ID NO: 5661695 - DNA, 25 bp, Homo sapien
aattcccagtctgcgccccgcaaat

SEQ ID NO: 5661696 - DNA, 25 bp, Homo sapien
gcaaatccaaccctcgaccagaagc

SEQ ID NO: 5661697 - DNA, 25 bp, Homo sapien
atccaaccctcgaccagaagcctct

SEQ ID NO: 5661698 - DNA, 25 bp, Homo sapien
ctccaaaccgaattcccagtctgcg

SEQ ID NO: 5661699 - DNA, 25 bp, Homo sapien
cgcacgatggggcaatctggttggg

SEQ ID NO: 5661700 - DNA, 25 bp, Homo sapien
tggggggctggtccgcggacaggca

SEQ ID NO: 5661701 - DNA, 25 bp, Homo sapien
ttggggggctggtccgcggacaggc

SEQ ID NO: 5661702 - DNA, 25 bp, Homo sapien
ggggctggtccgcggacaggcaggg

SEQ ID NO: 5661703 - DNA, 25 bp, Homo sapien
ccttggggggctggtccgcggacag

SEQ ID NO: 5661704 - DNA, 25 bp, Homo sapien
ggaggcgcacgatggggcaatctgg

SEQ ID NO: 5661705 - DNA, 25 bp, Homo sapien
aaccagattgccccatcgtgcgcct

SEQ ID NO: 5661706 - DNA, 25 bp, Homo sapien
cccaaccagattgccccatcgtgcg

SEQ ID NO: 5661707 - DNA, 25 bp, Homo sapien
ccctgcctgtccgcggaccagcccc

SEQ ID NO: 5661708 - DNA, 25 bp, Homo sapien
accagattgccccatcgtgcgcctc

SEQ ID NO: 5661709 - DNA, 25 bp, Homo sapien
ctgtccgcggaccagccccccaagg

SEQ ID NO: 5661710 - DNA, 25 bp, Homo sapien
ccccaaccagattgccccatcgtgc

SEQ ID NO: 5661711 - DNA, 25 bp, Homo sapien
cgcacgatggggcaatctggttggg

SEQ ID NO: 5661712 - DNA, 25 bp, Homo sapien
tccgcggacaggcagggcccgcggg

SEQ ID NO: 5661713 - DNA, 25 bp, Homo sapien
ccttggggggctggtccgcggacag

SEQ ID NO: 5661714 - DNA, 25 bp, Homo sapien
ggaggcgcacgatggggcaatctgg

SEQ ID NO: 5661715 - DNA, 25 bp, Homo sapien
ggctggtccgcggacaggcagggcc

SEQ ID NO: 5661716 - DNA, 25 bp, Homo sapien
cccgcggggctggtgaatctgcact

SEQ ID NO: 5661717 - DNA, 25 bp, Homo sapien
cccgcgggccctgcctgtccgcgga

SEQ ID NO: 5661718 - DNA, 25 bp, Homo sapien
gggccctgcctgtccgcggaccagc

SEQ ID NO: 5661719 - DNA, 25 bp, Homo sapien
cccaaccagattgccccatcgtgcg

SEQ ID NO: 5661720 - DNA, 25 bp, Homo sapien
agtgcagattcaccagccccgcggg

SEQ ID NO: 5661721 - DNA, 25 bp, Homo sapien
accagattgccccatcgtgcgcctc

SEQ ID NO: 5661722 - DNA, 25 bp, Homo sapien
ccccaaccagattgccccatcgtgc

SEQ ID NO: 5661723 - DNA, 25 bp, Homo sapien
ctgttgcctcgatgtggcccctgca

SEQ ID NO: 5661724 - DNA, 25 bp, Homo sapien
gttgcctcgatgtggcccctgcacg

SEQ ID NO: 5661725 - DNA, 25 bp, Homo sapien
ttgcggtggacgagctcccgcgggt

SEQ ID NO: 5661726 - DNA, 25 bp, Homo sapien
cgcgggtccctgttgcctcgatgtg

SEQ ID NO: 5661727 - DNA, 25 bp, Homo sapien
agcgctttgcggtggacgagctccc

SEQ ID NO: 5661728 - DNA, 25 bp, Homo sapien
ggtccctgttgcctcgatgtggccc

SEQ ID NO: 5661729 - DNA, 25 bp, Homo sapien
gggagctcgtccaccgcaaagcgct

SEQ ID NO: 5661730 - DNA, 25 bp, Homo sapien
gccacatcgaggcaacagggacccg

SEQ ID NO: 5661731 - DNA, 25 bp, Homo sapien
ggacccgcgggagctcgtccaccgc

SEQ ID NO: 5661732 - DNA, 25 bp, Homo sapien
gggccacatcgaggcaacagggacc

SEQ ID NO: 5661733 - DNA, 25 bp, Homo sapien
gtgcaggggccacatcgaggcaaca

SEQ ID NO: 5661734 - DNA, 25 bp, Homo sapien
acatcgaggcaacagggacccgcgg

SEQ ID NO: 5661735 - DNA, 25 bp, Homo sapien
ggcgaggccgcgcacgtagacggca

SEQ ID NO: 5661736 - DNA, 25 bp, Homo sapien
tttttcgcccctgagcgagtcggtc

SEQ ID NO: 5661737 - DNA, 25 bp, Homo sapien
ttttcgcccctgagcgagtcggtct

SEQ ID NO: 5661738 - DNA, 25 bp, Homo sapien
cgtttttcgcccctgagcgagtcgg

SEQ ID NO: 5661739 - DNA, 25 bp, Homo sapien
cgcgcacgtagacggcacccagggc

SEQ ID NO: 5661740 - DNA, 25 bp, Homo sapien
tttcgcccctgagcgagtcggtctg

SEQ ID NO: 5661741 - DNA, 25 bp, Homo sapien
cagaccgactcgctcaggggcgaaa

SEQ ID NO: 5661742 - DNA, 25 bp, Homo sapien
gccctgggtgccgtctacgtgcgcg

SEQ ID NO: 5661743 - DNA, 25 bp, Homo sapien
ccgactcgctcaggggcgaaaaacg

SEQ ID NO: 5661744 - DNA, 25 bp, Homo sapien
gtgccgtctacgtgcgcggcctcgc

SEQ ID NO: 5661745 - DNA, 25 bp, Homo sapien
tgggtgccgtctacgtgcgcggcct

SEQ ID NO: 5661746 - DNA, 25 bp, Homo sapien
cctgggtgccgtctacgtgcgcggc

SEQ ID NO: 5661747 - DNA, 25 bp, Homo sapien
caaatactctcctatctaactggct

SEQ ID NO: 5661748 - DNA, 25 bp, Homo sapien
agccagttagataggagagtatttg

SEQ ID NO: 5661749 - DNA, 25 bp, Homo sapien
aatactctcctatctaactggctac

SEQ ID NO: 5661750 - DNA, 25 bp, Homo sapien
tactctcctatctaactggctactt

SEQ ID NO: 5661751 - DNA, 25 bp, Homo sapien
ctcctatctaactggctactttttt

SEQ ID NO: 5661752 - DNA, 25 bp, Homo sapien
caaatactctcctatctaactggct

SEQ ID NO: 5661753 - DNA, 25 bp, Homo sapien
tctcctatctaactggctacttttt

SEQ ID NO: 5661754 - DNA, 25 bp, Homo sapien
actctcctatctaactggctacttt

SEQ ID NO: 5661755 - DNA, 25 bp, Homo sapien
aaaaaagtagccagttagataggag

SEQ ID NO: 5661756 - DNA, 25 bp, Homo sapien
agccagttagataggagagtatttg

SEQ ID NO: 5661757 - DNA, 25 bp, Homo sapien
aaagtagccagttagataggagagt

SEQ ID NO: 5661758 - DNA, 25 bp, Homo sapien
aaaagtagccagttagataggagag

SEQ ID NO: 5661759 - DNA, 25 bp, Homo sapien
aaaaagtagccagttagataggaga

SEQ ID NO: 5661760 - DNA, 25 bp, Homo sapien
gtagccagttagataggagagtatt

SEQ ID NO: 5661761 - DNA, 25 bp, Homo sapien
tgacctgggctcaaacatcatgccc

SEQ ID NO: 5661762 - DNA, 25 bp, Homo sapien
gacctgggctcaaacatcatgccca

SEQ ID NO: 5661763 - DNA, 25 bp, Homo sapien
acctgggctcaaacatcatgcccag

SEQ ID NO: 5661764 - DNA, 25 bp, Homo sapien
tgggcatgatgtttgagcccaggtc

SEQ ID NO: 5661765 - DNA, 25 bp, Homo sapien
ctgggcatgatgtttgagcccaggt

SEQ ID NO: 5661766 - DNA, 25 bp, Homo sapien
gggcatgatgtttgagcccaggtca

SEQ ID NO: 5661767 - DNA, 25 bp, Homo sapien
gctcaaacatcatgcccagctactt

SEQ ID NO: 5661768 - DNA, 25 bp, Homo sapien
tgggctcaaacatcatgcccagcta

SEQ ID NO: 5661769 - DNA, 25 bp, Homo sapien
tgacctgggctcaaacatcatgccc

SEQ ID NO: 5661770 - DNA, 25 bp, Homo sapien
gacctgggctcaaacatcatgccca

SEQ ID NO: 5661771 - DNA, 25 bp, Homo sapien
taaaagaccgggtctcactatatta

SEQ ID NO: 5661772 - DNA, 25 bp, Homo sapien
tattacccaggctggcctgacctgg

SEQ ID NO: 5661773 - DNA, 25 bp, Homo sapien
tgggcatgatgtttgagcccaggtc

SEQ ID NO: 5661774 - DNA, 25 bp, Homo sapien
taatatagtgagacccggtctttta

SEQ ID NO: 5661775 - DNA, 25 bp, Homo sapien
gggcatgatgtttgagcccaggtca

SEQ ID NO: 5661776 - DNA, 25 bp, Homo sapien
tagctgggcatgatgtttgagccca

SEQ ID NO: 5661777 - DNA, 25 bp, Homo sapien
catgatgtttgagcccaggtcaggc

SEQ ID NO: 5661778 - DNA, 25 bp, Homo sapien
aagtagctgggcatgatgtttgagc

SEQ ID NO: 5661779 - DNA, 25 bp, Homo sapien
atcacaaaacactcatttgcatttt

SEQ ID NO: 5661780 - DNA, 25 bp, Homo sapien
tcatcacaaaacactcatttgcatt

SEQ ID NO: 5661781 - DNA, 25 bp, Homo sapien
tcacaaaacactcatttgcattttt

SEQ ID NO: 5661782 - DNA, 25 bp, Homo sapien
catcacaaaacactcatttgcattt

SEQ ID NO: 5661783 - DNA, 25 bp, Homo sapien
aaaatgcaaatgagtgttttgtgat

SEQ ID NO: 5661784 - DNA, 25 bp, Homo sapien
aaaaatgcaaatgagtgttttgtga

SEQ ID NO: 5661785 - DNA, 25 bp, Homo sapien
aaatgcaaatgagtgttttgtgatg

SEQ ID NO: 5661786 - DNA, 25 bp, Homo sapien
aatgcaaatgagtgttttgtgatga

SEQ ID NO: 5661787 - DNA, 25 bp, Homo sapien
aaagttccacattcatcacaaaaca

SEQ ID NO: 5661788 - DNA, 25 bp, Homo sapien
aaaaaagttccacattcatcacaaa

SEQ ID NO: 5661789 - DNA, 25 bp, Homo sapien
tttgcatttttcttttgtcctttga

SEQ ID NO: 5661790 - DNA, 25 bp, Homo sapien
tcatcacaaaacactcatttgcatt

SEQ ID NO: 5661791 - DNA, 25 bp, Homo sapien
tcacaaaacactcatttgcattttt

SEQ ID NO: 5661792 - DNA, 25 bp, Homo sapien
catcacaaaacactcatttgcattt

SEQ ID NO: 5661793 - DNA, 25 bp, Homo sapien
tcaaaggacaaaagaaaaatgcaaa

SEQ ID NO: 5661794 - DNA, 25 bp, Homo sapien
aaaaatgcaaatgagtgttttgtga

SEQ ID NO: 5661795 - DNA, 25 bp, Homo sapien
tgttttgtgatgaatgtggaacttt

SEQ ID NO: 5661796 - DNA, 25 bp, Homo sapien
aaatgcaaatgagtgttttgtgatg

SEQ ID NO: 5661797 - DNA, 25 bp, Homo sapien
gaaaaatgcaaatgagtgttttgtg

SEQ ID NO: 5661798 - DNA, 25 bp, Homo sapien
aatgcaaatgagtgttttgtgatga

SEQ ID NO: 5661799 - DNA, 25 bp, Homo sapien
cgcccaagagttagaagctgctgtg

SEQ ID NO: 5661800 - DNA, 25 bp, Homo sapien
ttgcgcccaagagttagaagctgct

SEQ ID NO: 5661801 - DNA, 25 bp, Homo sapien
tgcgcccaagagttagaagctgctg

SEQ ID NO: 5661802 - DNA, 25 bp, Homo sapien
gcgcccaagagttagaagctgctgt

SEQ ID NO: 5661803 - DNA, 25 bp, Homo sapien
agcagcttctaactcttgggcgcaa

SEQ ID NO: 5661804 - DNA, 25 bp, Homo sapien
acagcagcttctaactcttgggcgc

SEQ ID NO: 5661805 - DNA, 25 bp, Homo sapien
cagcagcttctaactcttgggcgca

SEQ ID NO: 5661806 - DNA, 25 bp, Homo sapien
cacagcagcttctaactcttgggcg

SEQ ID NO: 5661807 - DNA, 25 bp, Homo sapien
actgaggggaaggatcgcctgagcc

SEQ ID NO: 5661808 - DNA, 25 bp, Homo sapien
caggctggccagcagagggagacct

SEQ ID NO: 5661809 - DNA, 25 bp, Homo sapien
aggctggccagcagagggagacctg

SEQ ID NO: 5661810 - DNA, 25 bp, Homo sapien
gctggccagcagagggagacctgtc

SEQ ID NO: 5661811 - DNA, 25 bp, Homo sapien
ggctggccagcagagggagacctgt

SEQ ID NO: 5661812 - DNA, 25 bp, Homo sapien
ctggccagcagagggagacctgtct

SEQ ID NO: 5661813 - DNA, 25 bp, Homo sapien
acaggtctccctctgctggccagcc

SEQ ID NO: 5661814 - DNA, 25 bp, Homo sapien
caggtctccctctgctggccagcct

SEQ ID NO: 5661815 - DNA, 25 bp, Homo sapien
ggctcaggcgatccttcccctcagt

SEQ ID NO: 5661816 - DNA, 25 bp, Homo sapien
agacaggtctccctctgctggccag

SEQ ID NO: 5661817 - DNA, 25 bp, Homo sapien
aggtctccctctgctggccagcctg

SEQ ID NO: 5661818 - DNA, 25 bp, Homo sapien
gacaggtctccctctgctggccagc

SEQ ID NO: 5661819 - DNA, 25 bp, Homo sapien
gaacaatgccttcattagcacattc

SEQ ID NO: 5661820 - DNA, 25 bp, Homo sapien
tgtgacactgaacaatgccttcatt

SEQ ID NO: 5661821 - DNA, 25 bp, Homo sapien
gctccaaggtcacactttctaccat

SEQ ID NO: 5661822 - DNA, 25 bp, Homo sapien
gcctgtgacactgaacaatgccttc

SEQ ID NO: 5661823 - DNA, 25 bp, Homo sapien
tgtgcctgtgacactgaacaatgcc

SEQ ID NO: 5661824 - DNA, 25 bp, Homo sapien
ccaagctccaaggtcacactttcta

SEQ ID NO: 5661825 - DNA, 25 bp, Homo sapien
atggtagaaagtgtgaccttggagc

SEQ ID NO: 5661826 - DNA, 25 bp, Homo sapien
taatgaaggcattgttcagtgtcac

SEQ ID NO: 5661827 - DNA, 25 bp, Homo sapien
tagaaagtgtgaccttggagcttgg

SEQ ID NO: 5661828 - DNA, 25 bp, Homo sapien
ggcattgttcagtgtcacaggcaca

SEQ ID NO: 5661829 - DNA, 25 bp, Homo sapien
gaatgtgctaatgaaggcattgttc

SEQ ID NO: 5661830 - DNA, 25 bp, Homo sapien
gaaggcattgttcagtgtcacaggc

SEQ ID NO: 5661831 - DNA, 25 bp, Homo sapien
ccagtctgcattttacgtagtcaag

SEQ ID NO: 5661832 - DNA, 25 bp, Homo sapien
cattttacgtagtcaaggttgcact

SEQ ID NO: 5661833 - DNA, 25 bp, Homo sapien
ttattcagagttgttctgacctcct

SEQ ID NO: 5661834 - DNA, 25 bp, Homo sapien
tgcactggatatggtcattgttgct

SEQ ID NO: 5661835 - DNA, 25 bp, Homo sapien
tcaaggttgcactggatatggtcat

SEQ ID NO: 5661836 - DNA, 25 bp, Homo sapien
tcagagttgttctgacctcctagca

SEQ ID NO: 5661837 - DNA, 25 bp, Homo sapien
caaccttgactacgtaaaatgcaga

SEQ ID NO: 5661838 - DNA, 25 bp, Homo sapien
cttgactacgtaaaatgcagactgg

SEQ ID NO: 5661839 - DNA, 25 bp, Homo sapien
tgaccatatccagtgcaaccttgac

SEQ ID NO: 5661840 - DNA, 25 bp, Homo sapien
gctaggaggtcagaacaactctgaa

SEQ ID NO: 5661841 - DNA, 25 bp, Homo sapien
tccagtgcaaccttgactacgtaaa

SEQ ID NO: 5661842 - DNA, 25 bp, Homo sapien
gcaacaatgaccatatccagtgcaa

SEQ ID NO: 5661843 - DNA, 25 bp, Homo sapien
tctcaagctgctaacctcaagtgat

SEQ ID NO: 5661844 - DNA, 25 bp, Homo sapien
cagactggtctcaagctgctaacct
